United States Patent Application Publication US 2025/0311734 A1 - sequence listing, part 12

SEQ ID NO: 48069 - protein, 309 aa, Thermochaetoides thermophila
MRSTPVLRTALAAALPGTVLAADGKSTRYWDCCKPSCLSPGNVQVSQNVFACDTNFNRIYDFGAKSGCEGGPAYSCADQTPWAVNDQFSYGFAATNIAGGNQASWCCACYKLTFTDGPVAGKVMVVQSTSTGGDLGNNHFDLNIPGGGVGIFDGCTPQFGPLPGERYGGISSRSQCDSFPDALKPGCYWRFDWFLNADNPNFTFERVQCPSELVARTGCKRNDDGNYPVFTPPSGDSPSSSSAAPTSTSTSQQPQQPSSSSSQASVPTSNPGGCTSQKWAQCGMIGFTGCATCVSGTTCTKLNDWYSQC

SEQ ID NO: 48070 - protein, 309 aa, Thermochaetoides thermophila
MRSTPVLRTALAAALPFTVLAADGKSTRYWDCCKPSCLSPGNVQVSQNVFACDRNFNRIYDFGAKSYCEGGPAYSCQDQTPWAVNDQFSYGFAATNIAGGNEASWCCACYKLTFTDGPVAGKVMVVQSTSTGGDLGNNHFDLNIPGGGVGIFDGCTPQFGPLPGERYGGISSRSQCDSFPDALKPGCYWRFDWFLNADNPNFTFERVQCPSELVARTGCKRNDDGNYPVFTPPSGDSPSSSSAAPTSTSTSQQPQQPTSSSSQASVPTSNPGGCTSQKWAQCGGIGFTGCTTCVSGTTCTKLNDWYSQC

SEQ ID NO: 48071 - protein, 269 aa, Staphylotrichum coccosporum
ADGKSTRYWDCCKPSCSWPGKASVNQPVFACSANFQRISDPNVKSGCDGGSAYACADQTPWAVNDNFSYGFAATSIMGGNEASWCCACYELTFTSGPVAGKTMVVQSTSTGGDLGTNHFDLAMPGGGVGIFDGCSEQFGGLAGDRYGGVSSRSQCDDFPAALKPGCYWRFWFKNADNPTFTFRQVQCPSELVARTGCRRNDDGNFPVFTPPSGGQSSSSLSSSSAKPTSTSTSTTSTKATSTTSTASDKATSTTSTASSQTSSSTGGGC

SEQ ID NO: 48072 - protein, 225 aa, Thermothielavioides terrestris
SGSGQSTRYWDCCKPSCAWPGKAAVSQPVYACDANFQRLSDFNVQSGCNGGSAYACADQTPWAVNDNLAYGFAATSIAGGSESSWCCACYALTFTSGPVAGKTMVVQSTSTGGDLGSNHFDIAMPGGGVGIFDGCSSQFGGLPGARYGGISSRDQCDSFPAPLKPGCQWRFDWFQNADNPTFTFQQVQCPAEIVARSGCKRNDDSSFPVFTTPTPTPTPTPGCTS

SEQ ID NO: 48073 - protein, 225 aa, Thermothielavioides terrestris
SGSGQSTRYWDCCKPSCAWPGKAAVSQPVYACDANFQRLSDFNVQSGCNGGSAYSCADQTPWAVNDNLAYGFAATSIAGGSESSWCCACYALTFTSGPVAGKTMVVQSTSTGGDLGSNHFDIAMPGGGVGIFDGCSSQFGGLPGARYGGISSRDQCDSFPAPLKPGCQWRFDWFQNADNPTFTFQQVQCPAEIVARSGCKRNDDSSFPVFTTPTPTPTPTPGCTA

SEQ ID NO: 48074 - protein, 225 aa, Thielavia terrestris
SGSGQSTRYWDCCKPSCAWPGKAAVSQPVYSCDANFQRLSDFNVQSGCNGGSAYACADQTPWAVNDNLAYGFAATSIAGGSESSWCCACYALTFTSGPVAGKTMVVQSTSTGGDLGSNHFDIAMPGGGVGIFDGCSSQFGGLPGDRYGGISSRDQCDSFPAPLKPGCYWRFDWFQNADNPTVTFQQVQCPAEIVARSGCKRNDDSSFPVFTTPTPTPTPTPGCTT

SEQ ID NO: 48075 - protein, 225 aa, Thermothielavioides terrestris
SGSGQSTRYWDCCKPSCAWPGKAAVSQPVYACDANFQRLSDFNVQSGCNGGSAYACADQTPWAVNDNLAYGFAATSIAGGSESSWCCACYALTFTSGPVAGKTMVVQSTSTGGDLGSNHFDIAMPGGGVGIFDGCSSQFGGLPGARYGGISSRDQCDSFPAPLKPGCQWRFDWFQNADNPTFTFQQVQCPAEIVARSGCKRNDDSSFPVFTPSPNSPNSPNGCTS

SEQ ID NO: 48076 - protein, 225 aa, Thermothielavioides terrestris
SGSGQSTRYWDCCKPSCAWPGKAAVSQPVYACDANFQRLSDFNVQSGCNGGSAYACADQTPWAVNDNLAYGFAATSIAGGSESSWCCACYALTFTSGPVAGKTMVVQSTSTGGDLGSNHFDIAMPGGGVGIFDGCSSQFGGLPGAQYGGISSRDECDSFPEPLKPGCQWRFDWFQNADNPTFTFQQVQCPAEIVARSGCKRNDDSSFPVFTTPTPTPTPTPGCTS

SEQ ID NO: 48077 - protein, 225 aa, Thermothielavioides terrestris
SGSGQSTRYWDCCKPSCAWPGKAAVSQPVYACDANFQRLSDFNVQSGCNGGSAYACADQTPWAVNDNLAYGFAATSIAGGSESSWCCACYALTFTSGPVAGKTMVVQSTSTGGDLGSNHFDIAMPGGGVGIFDGCSSQFGGLPGAQYGGISSRDECDSFPAPLKPGCYWRFDWFQNADNPTFTFQQVQCPAEIVARSGCKRNDDSSFPVFTTPTPTPTPTPGCTA

SEQ ID NO: 48078 - protein, 269 aa, Thermothielavioides terrestris
SGSGQSTRYWDCCKPSCAWPGKAAVSQPVYACDANFQRLSDFNVQSGCNGGSAYACADQTPWAVNDNLAYGFAATSIAGGSESSWCCACYALTFTSGPVAGKTMVVQSTSTGGDLGSNHFDIAMPGGGVGIFDGCSSQFGGLPGARYGGISSRDQCDSFPAPLKPGCQWRFDWFQNADNPTFTFQQVQCPAEIVARSGCKRNDDSSFPVFTPSPTPSPTPSPTPSPTPSPTGCTSQKWAQCGGIGFSGCTTCVSGTTCQKLNDYYSQCL

SEQ ID NO: 48079 - protein, 256 aa, Staphylotrichum coccosporum
GKSTRYWDCCKPSCSWPGKALVNQPVFACSANFQRISDPNVKSGCDGGSAYACADQTPWAVNDNFSYGFAATSISGGNEASWCCGCYELTFTSGPVAGKTMVVQSTSTGGDLGTNHFDLAMPGGGVGIFDGCSPQFGGLPGDRYGGVSSRSQCDSFPAALKPGCYWRFDWFKNADNPTFTFRQVQCPSELVARTGCRRNEDGNFPVFTPPSGGQSSSSSSSSSAKPTSTTSTTSTKATSTTSTASSQTSSSTGGGC

SEQ ID NO: 48080 - protein, 256 aa, Staphylotrichum coccosporum
GKSTRYWDCCKPSCSWPGKASVNQPVFACSANFQRISDPNVKSGCDGGSAYACADQTPWAVNDNFSYGFAATSIMGGNEASWCCACYELTFTSGPVHGKTMVVQSTSTGTDLGTNHFDLAMPGGGVGIFDGCSPQFGGLPGDRYGGVSSRSQCDSFPAALKPGCYWRFDWFKNADNPTFTFRQVQCPSELVARTGCRRNDDGNFPVFTPPSGGQSSSSSSSSSAKPTSTTSTASTKATSTTSTASSQTSSSTGGGC

SEQ ID NO: 48081 - protein, 256 aa, Staphylotrichum coccosporum
GVSTRYWDCCKPSCSWPGKASVNQPVFACSANFQRISDPNVKSGCDGGSAYACADQTPWAVNDNFSYGFAATSIKGGNEASWCCGCYALTFTSGPVAGKTMVVQSTSTGGDLGTNHFDLAMPGGGVGIFDGCSPQFGGLPGDRYGGVSSRSQCDDFPAALKPGCYWRFDWFKNADNPTFTFRQVQCPSELVARTGCRRNDDGNFPVFTPPSGQGSSSSSSSSAKPTSTSASTTSDKATSTTSTASSQTSSSTGGGC

SEQ ID NO: 48082 - protein, 257 aa, Staphylotrichum coccosporum
GKSTRYWDCCKPSCSWPGKASVNQPVFACSANFQRISDPNVKSGCDGGSAYACADQTPWAVNDNFSYGFAATSISGGNEASWCCGCYELTFTSGPVAGKTMVVQSTSTGGDLGTNHFDLAMPGGGVGIFDGCSPQFGGIAGDRYGGVSSRSQCDSFPAALKPGCYWRFDWFKNADNPTFTFRQVQCPSQLVARTGCRRNDDGNFPVFTPPSGGQSSSSSSSSSAKPTSTSTSTTSTKATSTTSTASSQTSSSTGGGC

SEQ ID NO: 48083 - protein, 257 aa, Staphylotrichum coccosporum
GKSTRYWDCCKPSCSWPGKASVNQPVFACSANFQRISDPNVKSGCDGGSAYACADQTPWAVNDNFSYGFAATSISGGNEASWCCGCYELTFTSGPVAGKTMVVQSTSTGGDLGTNHFDLAMPGGGVGIFDGCSPQSGGLAGDRYGGVSSRSQCESFPAALKPGCYWRFDWFKNADNPTFTFRQVQCPSELVARTGCRRNDDGNFPVFTPPSGGQSSSSSSSSSAKPTSTSTSTTSTKATSTTSTASSQTSSSTGGGC

SEQ ID NO: 48084 - protein, 257 aa, Staphylotrichum coccosporum
GKSTRYWDCCKPSCSWPGKASVNQPVFACSANFQRISDPNVKSGCDGGTAYACADQTPWAVNDNFSYGFAATSISGGNEASWCCACYELTFTSGPVYGKTMVVQSTSTGGDLGTNHFDLAMPGGGVGIFDGCTPQFGGLAGDRYGGVSSRSQCDSFPAALKPGCYWRFDWFKNADNPTFTFRQVQCPSELVARTGCRRNDDGDFPVFTPPSGGQSSSSSSSSSAKPTSTSTSTTSDKATSTTSTASSQTSSSTGGGC

SEQ ID NO: 48085 - protein, 257 aa, Staphylotrichum coccosporum
GKSTRYWDCCKPSCSWPGKASVNQPVFACSANFQRISDPNVKSGCDGGSAYACADQTPWAVNDNFSYGFAATSISGGNEASWCCGCYELTFTSGPVAGKTMVVQSTSTGGDLGTNHFDLAMPGGGVGIFDGCSPQFGGLAGDRYGGVSSRSQCDSFPAAIKPGCYWRFDWFKNADNPTFTFRQVQCPSEYLARTGCRRNDDGNFPVFTPPSGGQSSSSSSSSSAKPTSTSTSTTSTKATSTTSTASSQTSSSTGGGC

SEQ ID NO: 48086 - protein, 257 aa, Staphylotrichum coccosporum
GKSTRYWDCCKPSCSWPGKASVNQPVFACSANFQRISDPNVKSGCDGGTAYACADQTPWAVNDNFSYGFAATSIMGGNEASWCCGCYELTFTSGPVAGKTMVVQSTSTGGDLGTNHFDLAMPGGGVGIFDGCSEQFGGLAGDRYGGVSSRSQCDSFPAALVPGCYWRFDWFKNADNPTFTFRQVQCPSELVARTGCRRNDDSNFPVFVPPSGGQSSSSSSSSSARPTSTSTSTTSTKATSTTSTASSQTSSSTGGGC

SEQ ID NO: 48087 - protein, 257 aa, Staphylotrichum coccosporum
GVSTRYWDCCKPSCSWPGKASVNQPVWACSANFQRISDPNVKSGCDGGTAYACADQTPWAVNDNFSYGFAATSISGGNEASWCCGCYELTFTSGPVAGKTMVVQSTSTGGDLGVNHFDLAMPGGGVGIFDGCTPQFGGLAGDRYGGVSSRSQCDSFPAALKPGCYWRFDWFKNADNPTFTFRQVQCPSELVARTGCRRNDDGNFPVFTPPSGGQSSSSLSSSKAKPTSTSTSTTSTKATSTTSTASSQTSSSTGGGC

SEQ ID NO: 48088 - protein, 257 aa, Staphylotrichum coccosporum
GKSTRYWDCCKPSCSWPGKASVNQPVFACSANFQRISDPNVKSGCDGGSAYACADQTPWAVNDNFSYGFAATSISGGNEASWCCGCYELTFTSGPVAGKTMVVQSTSTGGDVGTNHFDLAMPGGGVGIFDGCSPQFGGLAGDRYGGVSSRSQCDSFPGALKPGCYWRFDWFKNADNPTFTFRQVQCPSELVARTGCRRNDDGNFPVFTPPSGGQSSSSSSSSSAKPTSTSTSTTSTKATSTTSTASSQTSSSTGGGC

SEQ ID NO: 48089 - protein, 257 aa, Staphylotrichum coccosporum
GKSTRYWDCCKPSCSWPGKASVNQPVFACSANFQRISDPNVKSGCDGGSAYACADQTPWAVNDNFSYGFAATSISGGNEASWCCGCYELTFTSGSVAGKTMVVQSTSTGVDLGTNHFDLAMPGGGVGIFDGCSSQFGGLPGDRYGGVSSRSQCDSFPAELVPGCYWRFDWFKNADNPTFTFRQVQCPSELVARTGCRRNDDGNFPVFTPSSGGQSSSSSASSSAKPTSTSTSTTSTKATSTTSTASSQTSSSTGGGC

SEQ ID NO: 48090 - protein, 257 aa, Staphylotrichum coccosporum
GKSTRYWDCCKPSCSWPGKASVNQPVFACSANFQRISDPNVKSGCDGGSAYACADQTPWAVNDNFSYGFAATSISGGNEASWCCGCYELTFTSGPVAGKTMVVQSTSTGGDLGTNHFDLAMPGGGVGIFDGCSPQFGGLAGDRYGGVSSRSQCDSFPAAVKPGCYWRFDWFKNADNPTFTFRQVQCPSELLARTGCRRNDDGNFPVFTPPSGGQSSSSSSSSSAKPTSTSTSTTSTKATSTTSTASSQTSSSTGGGC

SEQ ID NO: 48091 - protein, 257 aa, Staphylotrichum coccosporum
GKSTRYWDCCKPSCSWPGKASVNQPVFACSANFQRISDPNVKSGCDGGSAYACADQTPWAVNDNFSYGFAATSISGGNEASWCCGCYELTFTSGPVAGKTMVVQSTSTGGDLGTNHFDLAMPGGGVGIFDGCSPQFGGIAGDRYGGVSSRSQCDSFPAALKPGCYWRFDWFKNADNPTFTFRQVQCPSDLVARTGCRRNDDGNFPVFTPPSGGQSSSSSSSSSAKPTSTSTSTTSTKATSTTSTASSQTSSSTGGGC

SEQ ID NO: 48092 - protein, 257 aa, Staphylotrichum coccosporum
GKSTRYWDCCKPSCSWPGKASVNQPVFACSANFQRISDPNVKSGCDGGSAYACADQTPWAVNDNFSYGFAATSISGGNEASWCCGCYELTFTSGPVAGKTMVVQSTSTGGDLGTNHFDLAMPGGGVGIFDGCSPQFGGLAGDRYGGVSSRSQCDSFPAAVKPGCYWRFDWFKNADNPTFTFRQVQCPSEYLARTGCRRNDDGNFPVFTPPSGGQSSSSSSSSSAKPTSTSTSTTSTKATSTTSTASSQTSSSTGGGC

SEQ ID NO: 48093 - protein, 257 aa, Staphylotrichum coccosporum
GVSTRYWDCCKPSCSWPGKALVNQPVFACSANFTRISDPNVKSGCDGGSAYACADQTPWAVNDNFSYGFAATSIMGGNEASWCCGCYELTFTSGPVAGKTMVVQSTSTGTDLGTNHFDLAMPGGGVGIFDGCSPQFGGLAGDRYGGVSSRSQCDDFPAPLKPGCYWRFDWFKNADNPTFTFRQVQCPSEVVARTGCRRNDDGNFPVFTPPSGGQSSSSLSSSSAKPTSTSTSTTSTKATSTTSTASSQTSSSTGGGC

SEQ ID NO: 48094 - protein, 257 aa, Staphylotrichum coccosporum
GKSTRYWDCCKPSCSWPGKASVNQPVFACSANFQRISDPNVKSGCDGGSAYACADQTPWAVNDNFSYGFAATSISGGNEASWCCGCYEITFTSGPVAGKTMVVQSTSTGGDLGTNHFDLAMPGGGVGIFDGCSPQFGGIAGDRYGGVSSRSQCDSFPAALKPGCYWRFDWFKNADNPTFTFRQVQCPSELVARTGCRRNDDGNFPVFTPPSGGQSSSSSSSSSAKPTSTSTSTTSTKATSTTSTASSQTSSSTGGGC

SEQ ID NO: 48095 - protein, 257 aa, Staphylotrichum coccosporum
GKSTRYWDCCKPSCSWPGKASVNQPVFACSANFQRISDPNVKSGCDGGSAYACADQTPWAVNDNFSYGFAATSISGGNEASWCCGCYELTFTSGPVAGKTMVVQSTSTGGDIGTNHFDLAMPGGGVGIFDGCSPQFGGLAGDRYGGVSSRSQCDSFPGALKPGCYWRFDWFKNADNPTFTFRQVQCPSELVARTGCRRNDDGNFPVFTPPSGGQSSSSSSSSSAKPTSTSTSTTSTKATSTTSTASSQTSSSTGGGC

SEQ ID NO: 48096 - protein, 257 aa, Staphylotrichum coccosporum
GKSTRYWDCCKPSCSWPGKASVNQPVFACSANFQRISDPNVKSGCDGGSAYACADQTPWAVNDNFSYGFAATSISGGNEASWCCGCYELTFTSGPVYGKTMVVQSTSTGTDLGTNHFDLAMPGGGVGIFDGCTPQFGGLAGDRYGGVSSRDQCDSFPAALKPGCYWRFDWFKNADNPTFTFRQVQCPSELVARTGCRRNDDGNFPVFTPPSGGQSSSSSSSSSARPTSTSTSTTSTKATSTTSTASSQTSSSTGGGC

SEQ ID NO: 48097 - protein, 230 aa, Thermothielavioides terrestris
SGSGQSTRYWDCCKPSCAWPGKAAVSQPVYACDANFQRLSDFNVQSGCNGGSAYACADQTPWAVNDNLAYGFAATSIAGGSESSWCCACYALTFTSGPVAGKTMVVQSTSTGGDLGSNHFDIAMPGGGVGIFDGCSSQFGGLPGARYGGISSRDQCDSFPAPLKPGCQWRFDWFQNADNPTFTFQQVQCPAEIVARSGCKRNDDSSFPVFTSPPSPPSPPSPPSPPGCTS

SEQ ID NO: 48098 - protein, 282 aa, Staphylotrichum coccosporum
ADGKSTRYWDCCKPSCSWPGKASVNQPVFACSANFQRISDPNVKSGCDGGSAYACADQTPWAVNDNFSYGFAATSISGGNEASWCCGCYELTFTSGPVAGKTMVVQSTSTGTDLGTNHFDLAMPGGGVGIFDGCTPQFGGLAGDRYGGVSSRSECDSFPAALKPGCYWRFDWFKNADNPTFTFRQVQCPSELVARTGCRRNDDGNFPVFTPPSGGQSSSSSSSSSAKPTSTTSTTSTSTSTTDTKATSTTSTASSQTSSSTGGGCAAQRWAQCGGIGFSGCT

SEQ ID NO: 48099 - protein, 260 aa, Staphylotrichum coccosporum
AADGKSTRYWDCCKPSCSWPGKASVNQPVFACSANFQRISDPNVKSGCDGGSAYACADQTPWAVNDNFSYGFAATSISGGNEASWCCGCYELTFTSGPVAGKTMVVQSTSTGGDLGTNHFDLAMPGGGVGIFDGCSPQFGGLAGDRYGGVSSRSQCDSFPAALKPGCYWRFDWFKNADNPTFTFRQVQCPSELVARTGCRRNDDGNFPVFTPPSGGQSSSSSSSSSAKPTSTSTSTTSTKATSTTSTASSQTSSSTGGGC

SEQ ID NO: 48100 - protein, 265 aa, Humicola insolens
GRSTRYWDCCKPSCGWAKKAPVNQPVFSCNANFQRITDFDAKSGCEPGGVAYSCADQTPWAVNDDFALGFAATSIAGSNEAGWCCACYELTFTSGPVAGKKMVVQSTSTGGDLGSNHFDLNIPGGGVGIFDGCTPQFGGLPGQRYGGISSRNECDRFPDALKPGCYWRFDWFKNADNPSFSFRQVQCPAELVARTGCRRNDDGNFPAVQIPSSSTSSSPPVQPTTPSGCTAERWAQCGGNGWSGCTTCVAGSTCTKINDWYHQCL

SEQ ID NO: 48101 - protein, 231 aa, Thermothielavioides terrestris
SGSGQSTRYWDCCKPSCAWPGKAAVSQPVYACDANFQRLSDFNVQSGCNGGSAYSCADQTPWAVNDNLAYGFAATSIAGGSESSWCCACYALTFTSGPVAGKTMVVQSTSTGGDLGSNHFDIAMPGGGVGIFDGCSSQFGGLPGARYGGISSRDQCDSFPAPLKPGCQWRFDWFQNADNPTFTFQQVQCPAEIVARSGCKRNDDSSFPVFTPEPTPEPTPEPTPEPTGCTS

SEQ ID NO: 48102 - protein, 231 aa, Thermothielavioides terrestris
SGSGQSTRYWDCCKPSCAWPGKAAVSQPVYACDANFQRLSDFNVQSGCNGGSAYACADQTPWAVNDNLAYGFAATSIAGGSESSWCCACYALTFTSGPVAGKTMVVQSTSTGGDLGSNHFDIAMPGGGVGIFDGCSSQFGGLPGARYGGISSRDQCDSFPAPLKPGCQWRFDWFQNADNPTFTFQQVQCPAEIVARSGCKRNDDSSFPVFTPSPTPSPTPSPTPSPTGCTA

SEQ ID NO: 48103 - protein, 231 aa, Thermothielavioides terrestris
SGSGQSTRYWDCCKPSCAWPGKAAVSQPVYACDANFQRLSDFNVQSGCNGGSAYACADQTPWAVNDNLAYGFAATSIAGGSESSWCCACYALTFTSGPVAGKTMVVQSTSTGGDLGSNHFDIAMPGGGVGIFDGCSSQFGGLPGAQYGGISSRDECDSFPAPLKPGCYWRFDWFQNADNPTFTFQQVQCPAEIVARSGCKRNDDSSFPVFTPEPTPEPTPEPTPEPTGCTS

SEQ ID NO: 48104 - protein, 231 aa, Thielavia terrestris
SGSGQSTRYWDCCKPSCAWPGKAAVSQPVYSCDANFQRLSDFNVQSGCNGGSAYACADQTPWAVNDNLAYGFAATSIAGGSESSWCCACYALTFTSGPVAGKTMVVQSTSTGGDLGSNHFDIAMPGGGVGIFDGCSSQFGGLPGDRYGGISSRDQCDSFPAPLKPGCYWRFDWFQNADNPTVTFQQVQCPAEIVARSGCKRNDDSSFPVFTPQPTPQPTPQPTPQPTGCTT

SEQ ID NO: 48105 - protein, 231 aa, Thermothielavioides terrestris
SGSGQSTRYWDCCKPSCAWPGKAAVSQPVYACDANFQRLSDFNVQSGCNGGSAYACADQTPWAVNDNLAYGFAATSIAGGSESSWCCACYALTFTSGPVAGKTMVVQSTSTGGDLGSNHFDIAMPGGGVGIFDGCSSQFGGLPGARYGGISSRDQCDSFPAPLKPGCQWRFDWFQNADNPTFTFQQVQCPAEIVARSGCKRNDDSSFPVFTPQPTPQPTPQPTPQPTGCTS

SEQ ID NO: 48106 - protein, 231 aa, Thermothielavioides terrestris
SGSGQSTRYWDCCKPSCAWPGKAAVSQPVYACDANFQRLSDFNVQSGCNGGSAYACADQTPWAVNDNLAYGFAATSIAGGSESSWCCACYALTFTSGPVAGKTMVVQSTSTGGDLGSNHFDIAMPGGGVGIFDGCSSQFGGLPGARYGGISSRDQCDSFPAPLKPGCQWRFDWFQNADNPTFTFQQVQCPAEIVARSGCKRNDDSSFPVFTPQPTPEPTPQPTPEPTGCTS

SEQ ID NO: 48107 - protein, 231 aa, Thermothielavioides terrestris
SGSGQSTRYWDCCKPSCAWPGKAAVSQPVYACDANFQRLSDFNVQSGCNGGSAYSCADQTPWAVNDNLAYGFAATSIAGGSESSWCCACYALTFTSGPVAGKTMVVQSTSTGGDLGSNHFDIAMPGGGVGIFNGCSSQFGGLPGAQYGGISSRDQCDSFPAPLKPGCQWRFDWFQNADNPTFTFQQVQCPAEIVARSGCKRNDDSSFPVFTPSPTPSPTPSPTPSPTGCTS

SEQ ID NO: 48108 - protein, 231 aa, Thielavia terrestris
SGSGQSTRYWDCCKPSCAWPGKAAVSQPVYSCDANFQRLSDFNVQSGCNGGSAYACADQTPWAVNDNLAYGFAATSIAGGSESSWCCACYALTFTSGPVAGKTMVVQSTSTGGDLGSNHFDIAMPGGGVGIFDGCSSQFGGLPGDRYGGISSRDQCDSFPAPLKPGCYWRFDWFQNADNPTVTFQQVQCPAEIVARSGCKRNDDSSFPVFTPQPTPEPTPQPTPEPTGCTT

SEQ ID NO: 48109 - protein, 220 aa, Thermothielavioides terrestris
SGSGQSTRYWDCCKPSCAWPGKAAVSQPVYACDANFQRLSDFNVQSGCNGGSAYACADQTPWAVNDNLAYGFAATSIAGGSESSWCCACYALTFTSGPVAGKTMVVQSTSTGGDLGSNHFDIAMPGGGVGIFDGCSSQFGGLPGARYGGISSRDQCDSFPAPLKPGCQWRFDWFQNADNPTFTFQQVQCPAEIVARSGCKRNDDSSFPVFTPPPPPPPPP

SEQ ID NO: 48110 - protein, 227 aa, Thermothielavioides terrestris
SGSGQSTRYWDCCKPSCAWPGKAAVSQPVYACDANFQRLSDFNVQSGCNGGSAYSCADQTPWAVNDNLAYGFAATSIAGGSESSWCCACYALTFTSGPVAGKTMVVQSTSTGGDLGSNHFDIAMPGGGVGIFDGCSSQFGGLPGARYGGISSRDQCDSFPAPLKPGCQWRFDWFQNADNPTFTFQQVQCPAEIVARSGCKRNDDSSFPVFTPEPTPEPTPEPTGCTS

SEQ ID NO: 48111 - protein, 227 aa, Thermothielavioides terrestris
SGSGQSTRYWDCCKPSCAWPGKAAVSQPVYACDANFQRLSDFNVQSGCNGGSAYACADQTPWAVNDNLAYGFAATSIAGGSESSWCCACYALTFTSGPVAGKTMVVQSTSTGGDLGSNHFDIAMPGGGVGIFDGCSSQFGGLPGARYGGISSRDQCDSFPAPLKPGCQWRFDWFQNADNPTFTFQQVQCPAEIVARSGCKRNDDSSFPVFTPEPTPEPTPEPTPCTS

SEQ ID NO: 48112 - protein, 296 aa, Acremonium thermophilum
LAVISAFLATARALDGKSTRYWDCCKPSCGWAGKASVNQPVFSCSADWQRISDFNAKSGCDGGSAYSCADQTPWAVNDNFSYGFAATAIAGGSESSWCCACYALTFNSGPVAGKTMVVQSTSTGGDLGSNQFDLAIPGGGVGIFNGCASQFGGLPGAQYGGISDRSQCSSFPAPLQPGCQWRFDWFQNADNPTFTFQRVQCPSELTSRTGCKRDDDASYPVFNPPSGGNPPPVTTTTTTTTTSKPSQPTTTTTTTSPQGPQQTHWGQCGGIGWTGPQSCQSPWTCQKQNDWYSQCL

SEQ ID NO: 48113 - protein, 223 aa, Thielavia terrestris
SGSGQSTRYWDCCKPSCAWPGKAAVSQPVYSCDANFQRLSDFNVQSGCNGGSAYACADQTPWAVNDNLAYGFAATSIAGGSESSWCCACYALTFTSGPVAGKTMVVQSTSTGGDLGSNHFDIAMPGGGVGIFDGCSSQFGGLPGDRYGGISSRDQCDSFPAPLKPGCYWRFDWFQNADNPTVTFQQVQCPAEIVARSGCKRNDDSSFPVFTPPPPCTTQKWGQ

SEQ ID NO: 48114 - protein, 223 aa, Thermothielavioides terrestris
SGSGQSTRYWDCCKPSCAWPGKAAVSQPVYACDANFQRLSDFNVQSGCNGGSAYACADQTPWAVNDNLAYGFAATSIAGGSESSWCCACYALTFTSGPVAGKTMVVQSTSTGGDLGSNHFDIAMPGGGVGIFDGCSSQFGGLPGARYGGISSRDQCDSFPAPLKPGCQWRFDWFQNADNPTFTFQQVQCPAEIVARSGCKRNDDSSFPVFTPDPTPDPTGCTS

SEQ ID NO: 48115 - protein, 223 aa, Thermothielavioides terrestris
SGSGQSTRYWDCCKPSCAWPGKAAVSQPVYACDANFQRLSDFNVQSGCNGGSAYACADQTPWAVNDNLAYGFAATSIAGGSESSWCCACYALTFTSGPVAGKTMVVQSTSTGGDLGSNHFDIAMPGGGVGIFDGCSSQFGGLPGARYGGISSRDQCDSFPAPLKPGCQWRFDWFQNADNPTFTFQQVQCPAEIVARSGCKRNDDSSFPVFTPEPTPEPTECTS

SEQ ID NO: 48116 - protein, 223 aa, Thermothielavioides terrestris
SGSGQSTRYWDCCKPSCAWPGKAAVSQPVYACDANFQRLSDFNVQSGCNGGSAYACADQTPWAVNDNLAYGFAATSIAGGSESSWCCACYALTFTSGPVAGKTMVVQSTSTGGDLGSNHFDIAMPGGGVGIFDGCSSQFGGLPGARYGGISSRDQCDSFPAPLKPGCQWRFDWFQNADNPTFTFQQVQCPAEIVARSGCKRNDDSSFPVFTPEPTPEPTGCTS

SEQ ID NO: 48117 - protein, 223 aa, Thermothielavioides terrestris
SGSGQSTRYWDCCKPSCAWPGKAAVSQPVYACDANFQRLSDFNVQSGCNGGSAYACADQTPWAVNDNLAYGFAATSIAGGSESSWCCACYALTFTSGPVAGKTMVVQSTSTGGDLGSNHFDIAMPGGGVGIFDGCSSQFGGLPGARYGGISSRDQCDSFPAPLKPGCQWRFDWFQNADNPTFTFQQVQCPAEIVARSGCKRNDDSSFPVFTPQPTPEPTGCTS

SEQ ID NO: 48118 - protein, 223 aa, Thermothielavioides terrestris
SGSGQSTRYWDCCKPSCAWPGKAAVSQPVYACDANFQRLSDFNVQSGCNGGSAYACADQTPWAVNDNLAYGFAATSIAGGSESSWCCACYALTFTSGPVAGKTMVVQSTSTGGDLGSNHFDIAMPGGGVGIFDGCSSQFGGLPGARYGGISSRDQCDSFPAPLKPGCQWRFDWFQNADNPTFTFQQVQCPAEIVARSGCKRNDDSSFPVFTPRPTPEPTGCTS

SEQ ID NO: 48119 - protein, 223 aa, Thermothielavioides terrestris
SGSGQSTRYWDCCKPSCAWPGKAAVSQPVYACDANFQRLSDFNVQSGCNGGSAYACADQTPWAVNDNLAYGFAATSIAGGSESSWCCACYALTFTSGPVAGKTMVVQSTSTGGDLGSNHFDIAMPGGGVGIFDGCSSQFGGLPGARYGGISSRDQCDSFPAPLKPGCQWRFDWFQNADNPTFTFQQVQCPAEIVARSGCKRNDDSSFPVFTPEPTPRPTGCTS

SEQ ID NO: 48120 - protein, 279 aa, Acremonium thermophilum
GKSTRYWDCCKPSCGWAGKAPVNQPVFSCSADWQRISDFNANSGCSGGNAYSCADQTPWAVNEQFSYGFAATAISGGSEQSWCCACYALTFNSGPVAGKTMVVQSTSTGGALGENHFDLAIPGGGVGIFNGCQSQFGGLPGAQYGGIQDRSQCSSFPAPLQPGCYWRFDWFQNADNPTFTFQRVQCPSELISRTGCKRDDDANYPVFNPPSGNPSGGNPPGGNPPGTTTTRRPATTTGSSPGPTQSRYGQCGGIGYSGPTVCASGTTCQVLNPYYSQCL

SEQ ID NO: 48121 - protein, 279 aa, Acremonium thermophilum
GKSTRYWDCCKPSCGWAGKASVNQPVFSCSQDWQRISDFNAKSGCDGGNAYSCADQTPWAVNDNFSYGFAATAIAGGSEQSWCCACYALTFNSGPVSGKTMVVQSTSTGGDLGENHFDLAIPGGGVGIFNGCQSQFGGLPGAQYGGIQDRSQCSSFPASLQTGCQWRFDWFQNADNPTFTFERVQCPSELTSRTGCKRDDDANYPVFNPPSGNPSGGNPPGGNPPGTTTTRRPATTTGSSPGPTQSHYGQCGGIGYSGPTVCASGTTCQVLNPYYSQCL

SEQ ID NO: 48122 - protein, 279 aa, Acremonium thermophilum
GKSTRYWDCCKPSCGWAGKAPVNQPVFSCSADWQRISDFNANSGCSGGNAYSCADQTPWAVNEQFSYGFAATAISGGSEQSWCCACYALTFNSGPVAGKTMVVQSTSTGGDLGENHFDLAIPGGGVGIFNGCQSQFGGLPGAQYGGIQDRSQCSSFPAPLQPGCYWRFDWFQNADNPTFTFQRVQCPSELISRTGCKRDDDANYPVFNPPSGNPSGGNPPGGNPPGTTTTRRPATTTGSSPGPTQSRYGQCGGIGYSGPTVCHSGTTCVVLNPYYSQCL

SEQ ID NO: 48123 - protein, 282 aa, Synthetic construct
GKSTRYWDCCKPSCGWAKKAPVNQPVFSCNANFQRLTDFDAKSGCNPGGVAYSCADQTPWAVNDDFAYGFAATSIAGSNEAGWCCACYELTFTSGPVAGKKMVVQSTSTGGDLGSNHFDLFIPGGGVGIFDGCTPQFGGLPGQRYGGISSRNECDRFPDALKPGCYWRFDWFKNADNPSFSFRQVQCPAELVARTGCRRNDDGNFPAVQIPSSSTSSPVGQPTSTSTTSTSTTSSPPVQPTTPSGCTAERWAQCGGNGWSGCTTCVAGSTCTKINDWYHQCL

SEQ ID NO: 48124 - protein, 282 aa, Synthetic construct
GKSTRYWDCCKPSCGWAKKAPVNQPVFSCNANFQRLTDFDAKSGCNPGGVAYSCADQTPWAVNDDFAYGFAATSIAGSNEAGWCCACYELTFTSGPVAGKKMVVQSTSTGGDLGSNHFDLNIPGGGVGIFDGCTPQFGGLPGQRYGGISSRNECDRFPDALKPGCYWRFDWFKNADNPSFSFRQVQCPAELVARTGCRRNDDGNFPAVQIPSSSTSSPVGQPTSTSTTSTSTTSSPPVQPTTPSGCTAERWAQCGGNGWSGCTTCVAGSTCTKINDWYHQCL

SEQ ID NO: 48125 - protein, 282 aa, Synthetic construct
GKSTRYWDCCKPSCGWAKKAPVNQPVFSCNANFQRLTDFDAKSGCNPGGVAYSCADQTPWAVNDDFAYGFAATSIAGSNEAGWCCACYELTFTSGPVAGKKMVVQSTSTGGDLGSNHFDLLIPGGGVGIFDGCTPQFGGLPGQRYGGISSRNECDRFPDALKPGCYWRFDWFKNADNPSFSFRQVQCPAELVARTGCRRNDDGNFPAVQIPSSSTSSPVGQPTSTSTTSTSTTSSPPVQPTTPSGCTAERWAQCGGNGWSGCTTCVAGSTCTKINDWYHQCL

SEQ ID NO: 48126 - protein, 309 aa, Thermochaetoides thermophila
MRSTPVLRTALAAALPFTVLAADGKSTRYWDCCKPSCLSPGNVQVSQNVFACDRNFNRIYDFGAKSGCEGGPAYSCADQTPWAVNDQFSYGFAATNIAGGNEASWCCACYKLTFTSGPVAGKVMVVQSTSTGGDLGNNHFDLNIPGGGVGIFDGCTPQFGGLPGERYGGISSRSQCDSFPDALKPGCYWRFDWFLNADNPNFTFERVQCPSELVARTGCKRNDDGNYPVFTPPSGDSPSSSSAAPTSTSTSQQPQQPTSSSSQASVPTSNPGGCTSQLHQAEXGIGFTGCTTCVSGTTCTKLNDWYSQC

SEQ ID NO: 48127 - protein, 309 aa, Thermochaetoides thermophila
MRSTPVLRTALAAALPFTVLAADGKSTRYWDCCKPSCLSPGNVQVSQNVFACDTNFNRIYDFGAKSGCEGGPAYSCADQTPWAVNDQFSYGFAATNIAGGNQASWCCACYKLTFTDGPVAGKVMVVQSTSTGGDLGNNHFDLNIPGGGVGIFDGCTPQFGPLPGERYGGISSRSQCDSFPDALKPGCYWRFDWFLNADNPNFTFERVQCPSELVARTGCKRNDDGNYPVFTPPSGDSPSSSSAAPTSTSTSQQPQQPTSSSSQASVPTSNPGGCTSDKWAQCGMIGFTGCQTCVSGTTCTKLNDWYSQC

SEQ ID NO: 48128 - protein, 309 aa, Thermochaetoides thermophila
MRSTPVLRTALAAALPFTVLAADGKSTRYWDCCKPSCLSPGNVQVSQNVFACDTNFNRIYDFGAKSGCEGGPAYSCADQTPWAVNDQFSYGFAATNIAGGNEASWCCACYKLTFTEGPVAGKVMVVQSTSTGGDLGNNHFSLNIPGGGVGIFDGCTPQFGGLPGERYGGISSRSQCDSFTDALKPGCYWRFDWFLNADNPNFTFERVQCPSELVARTGCKRNDDGNYPVFTPPSGDSPSSSSAAPTSTSTSQQPQQPTSSSSQASVPTSNPGGCTSQKWAGSGGIGFTGCTTCVSGTTCTKLNDWYSQC

SEQ ID NO: 48129 - protein, 309 aa, Thermochaetoides thermophila
MRSTPVLRTALAAALPFTVLAADGNSTRYWDCCKPSCLSPGNVQVSQNVFACDTNFNRIYDFGAKSGCEGGPAYSCADQTPWAVNDQFSYGFAATNIAGGNEASWCCACYKLTFTSGPVAGKVMVVQSTSTGGDLGNNHFSLNIPGGGVGIFDGCTPQFGGLPGERYGGISSRSQCDSFTDALKPGCYWRFDWFLNADNPNFTFERVQCPSELVARTGCKRNDDGNYPVFTPPSGDSPSSSSAAPTSTSTSQQPQQPTSSSSQASVPTSNPGGCTSQKWAQCGMIGFTGCSTTVSGTTCTKLNDWYSQC

SEQ ID NO: 48130 - protein, 309 aa, Thermochaetoides thermophila
MRSTPVLRTALAAALPFTVLAANGKSTRYWDCCKPSCLSPGNEQVSQNVFACDTNFNRIYDFGAKSGCEGGPAYSCEDQTPWAVNDQFSYGFAATNIAGGNEASWCCACYKLTFTSGPVAGKVMVVQSTSTGGDLGNNHFDLNIPGGGVGIFDGCTPQFGPLPGERYGGISSRSQCDSFPDALKPGCYWRFDWFLNADNPNFTFERVQCPSELVARTGCKRNDDGNYPVFTPPSGDSPSSSSAAPTSTSTSQQPQQPTSSSSQASVPTSNPGGCTSQKWAQSGGIGFTGCQTCVSGTTCTKLNDWYSQC

SEQ ID NO: 48131 - protein, 309 aa, Thermochaetoides thermophila
MRSTPVLRTALAAALPFTVLAADGKSTRYWDCCKPSCLSPGNVEVSQNVFACDTNFNRIYDFGAKTGCEGGPAYSCADQTPWAVNDQFSYGFAATNIAGGNQASWCCACYKLTFTSGPVAGKVMVVQSTSTGGDLGNNHFSLNIPGGGVGIFDGCTPQFGGLPGERYGGISSRSQCDSFTDALKPGCYWRFDWFLNADNPNFTFERVQCPSELVARTGCKRNDDGNYPVFTPPSGDSPSSSSAAPTSTSTSQQPQQPRSSSSQASVPTSNPGGCTSQKWAQCGGIGFTGCTTCVSGTTCTKLNDWYSQC

SEQ ID NO: 48132 - protein, 309 aa, Thermochaetoides thermophila
MRSTPVLRTALAAALPFTVLAADGKSTRYWDCCKPSCLSPGNSQVSQNVFACDRNFNRIYDFGAKSGCEGGPAYSCQDQTPWAVNDQFSYGFAATNIAGGNEASWCCACYKLTFTEGPVAGKVMVVQSTSTGGDLGNNHFSLNIPGGGVGIFDGCTPQFGGLPGERYGGISSRSQCDSFPDALKPGCYWRFDWFLNADNPNFTFERVQCPSELVARTGCKRNDDGNYPVFTPPSGDSPSSSSAAPTSTSTSQQPQQPTSSSSQASVPTSNPGGCESDKWAQCGRIGFTGCTTCVSGTTCTKLNDWYSQC

SEQ ID NO: 48133 - protein, 309 aa, Thermochaetoides thermophila
MRSTPVLRTALAAALPFTVLAANGKSTRYWDCCKPSCLSPGNEEVSQNVFACDTNFNRIYDFGAKSGCEGGPAYSCEDQTPWAVNDQFSYGFAATNIAGGNQASWCCACYKLTFTDGPVAGKVMVVQSTSTGGDLGNNHFDLNIPGGGVGIFDGCTPQFGGLPGERYGGISSRSQCDSFPDALKPGCYWRFDWFLNADNPNFTFERVQCPSELVARTGCKRNDDGNYPVFTPPSGDSPSSSSAAPTSTSTSQQPQQPSSSSSQASVPTSNPGGCTSQKWAQCGMIGFTGCQTCVSGTTCTKLNDWYSQC

SEQ ID NO: 48134 - protein, 309 aa, Thermochaetoides thermophila
MRSTPVLRTALAAALPFTVLAANGKSTRYWDCCKPSCLSPGNSQVSQNVFACDTNFNRIYDFGAKTYCEGGPAYSCADQTPWAVNDQFSYGFAATNIAGGNEASWCCACYKLTFTDGPVAGKVMVVQSTSTGGDLGNNHFSLNIPGGGVGIFDGCTPQFGGLPGERYGGISSRSQCDSFPDALKPGCYWRFDWFLNADNPNFTFERVQCPSELVARTGCKRNDDGNYPVFTPPSGDSPSSSSAAPTSTSTSQQPQQPTSSSSQASVPTSNPGGCTSQKWAQCGGIGFTGCTTCVSGTTCTKLNDWYSQC

SEQ ID NO: 48135 - protein, 309 aa, Thermochaetoides thermophila
MRSTPVLRTALAAALPFTVLAANGKSTRYWDCCKPSCLSPGNEQVSQNVFACDTNFNRIYDFGAKSGCEGGPAYSCADQTPWAVNDQFSYGFAATNIAGGNQASWCCACYKLTFTDGPVAGKVMVVQSTSTGGDLGNNHFDLNIPGGGVGIFDGCTPQFGGLPGERYGGISSRSQCDSFPDALKPGCYWRFDWFLNADNPNFTFERVQCPSELVARTGCKRNDDGNYPVFTPPSGDSPSSSSAAPTSTSTSQQPQQPSSSSSQASVPTSNPGGCTSQKWAESGGIGFTGCATCVSGTTCTKLNDWYSQC

SEQ ID NO: 48136 - protein, 309 aa, Thermochaetoides thermophila
MRSTPVLRTALAAALPGTVLAADGKSTRYWDCCKPSCLSPGNTQVSQNVFACDTNFNRIYDFGAKSGCEGGPAYSCADQTPWAVNDQFSYGFAATNIAGGNQASWCCACYKLTFTDGPVAGKVMVVQSTSTGGDLGNNHFDLNIPGGGVGIFDGCTPQFGPLPGERYGGISSRSQCDSFPDALKPGCYWRFDWFLNADNPNFTFERVQCPSELVARTGCKRNDDGNYPVFTPPSGDSPSSSSAAPTSTSTSQQPQQPTSSSSQASVPTSNPGGCTSQKWAESGGIGFTGCTTCVSGTTCTKLNDWYSQC

SEQ ID NO: 48137 - protein, 309 aa, Thermochaetoides thermophila
MRSTPVLRTALAAALPFTVLAADGNSTRYWDCCKPSCLSPGNSEVSQNVFACDTNFNRIYDFGAKSGCEGGPAYSCQDQTPWAVNDQFSYGFAATNIAGGNQASWCCACYKLTFTDGPVAGKVMVVQSTSTGGDLGNNHFSLNIPGGGVGIFDGCTPQFGGLPGERYGGISSRSQCDSFPDALKPGCYWRFDWTLNADNPNFTFERVQCPSELVARTGCKRNDDGNYPVFTPPSGDSPSSSSAAPTSTSTSQQPQQPSSSSSQASVPTSNPGGCTSQKWAQCGMIGFTGCTTCVSGTTCTKLNDWYSQC

SEQ ID NO: 48138 - protein, 309 aa, Thermochaetoides thermophila
MRSTPVLRTALAAALPFTVLAADGKSTRYWDCCKPSCLSPGNVQVSQNVFACDRNFNRIYDFGAKSYCEGGPAYSCQDQTPWAVNDQFSYGFAATNIAGGNEASWCCACYKLTFTSGPVAGKVMVVQSTSTGGDLGNNHFDLNIPGGGVGIFDGCTPQFGGLPGERYGGISSRSQCDSFTDALKPGCYWRFDWFLNADNPNFTFERVQCPSELVARTGCKRNDDGNYPVFTPPSGDSPSSSSAAPTSTSTSQQPQQPSDSSSQASVPTSNPGGCTSEKWAKSGGIGFTGCSTNVSGTTCTKLNDWYSQC

SEQ ID NO: 48139 - protein, 309 aa, Thermochaetoides thermophila
MRSTPVLRTALAAALPFTVLAADGNSTRYWDCCKPSCLSPGNVQVSQNVFACDTNFNRIYDFGAKSGCEGGPAYSCQDQTPWAVNDQFSYGFAATNIAGGNEASWCCACYKLTFTDGPVAGKVMVVQSTSTGGDLGNNHFSLNIPGGGVGIFDGCTPQFGGLPGERYGGISSRSQCDSFPDALKPGCYWRFDWFLNADNPNFTFERVQCPSELVARTGCKRNDDGNYPVFTPPSGDSPSSSSAAPTSTSTSQQPQQPSDSSSQASVPTSNPGGCTSQKWAECGGIGFTGCTSTVSGTTCTKLNDWYSQC

SEQ ID NO: 48140 - protein, 309 aa, Thermochaetoides thermophila
MRSTPVLRTALAAALPFTVLAANGKSTRYWDCCKPSCLSPGNVQVSQNVFACDRNFNRIYDFGAKSGCEGGPAYSCADQTPWAVNDQFSYGFAATNIAGGNEASWCCACYKLTFTSGPVAGKVMVVQSTSTGGDLGNNHFDLNIPGGGVGIFDGCTPQFGPLPGERYGGISSRSQCDSFPDALKPGCYWRFDWFLNADNPNFTFERVQCPSELVARTGCKRNDDGNYPVFTPPSGDSPSSSSAAPTSTSTSQQPQQPTSSSSQASVPTSNPGGCTSQKWAESGGIGFTGCATCVSGTTCTKLNDWYSQC

SEQ ID NO: 48141 - protein, 309 aa, Thermochaetoides thermophila
MRSTPVLRTALAAALPGTVLAADGKSTRYWDCCKPSCLSPGNVQVSQNVFACDTNFNRIYDFGAKSGCEGGPAYSCEDQTPWAVNDQFSYGFAATNIAGGNQASWCCACYKLTFTDGPVAGKVMVVQSTSTGGDLGNNHFDLNIPGGGVGIFDGCTPQFGPLPGERYGGISSRSQCDSFPDALKPGCYWRFDWFLNADNPNFTFERVQCPSELVARTGCKRNDDGNYPVFTPPSGDSPSSSSAAPTSTSTSQQPQQPTSSSSQASVPTSNPGGCTSQKWAGCGGIGFTGCTTCVSGTTCTKLNDWYSQC

SEQ ID NO: 48142 - protein, 309 aa, Thermochaetoides thermophila
MRSTPVLRTALAAALPGTVLAADGKSTRYWDCCKPSCLSPGNTEVSQNVFACDRNFNRIYDFGAKSGCEGGPAYSCEDQTPWAVNDQFSYGFAATNIAGGNQASWCCACYKLTFTSGPVAGKVMVVQSTSTGGDLGNNHFDLNIPGGGVGIFDGCTPQFGPLPGERYGGISSRSQCDSFPDALKPGCYWRFDWFLNADNPNFTFERVQCPSELVARTGCKRNDDGNYPVFTPPSGDSPSSSSAAPTSTSTSQQPQQPTSSSSQASVPTSNPGGCTSQKWAQSGGIGFTGCATCVSGTTCTKLNDWYSQC

SEQ ID NO: 48143 - protein, 309 aa, Thermochaetoides thermophila
MRSTPVLRTALAAALPFTVLAADGKSTRYWDCCKPSCLSPGNEEVSQNVFACDTNFNRIYDFGAKSGCEGGPAYSCQDQTPWAVNDQFSYGFAATNIAGGNEASWCCACYKLTFTDGPVAGSVMVVQSTSTGGDLGNNHFSLNIPGGGVGIFDGCTPQFGGLPGERYGGISSRSQCDSFPDALKPGCYWRFDWFLNADNPNFTFERVQCPSELVARTGCKRNDDGNYPVFTPPSGDSPSSSSAAPTSTSTSQQPQQPTSSSSQASVPTSNPGGCTSQKWAGCGGIGFTGCTTCVSGTTCTKLNDWYSQC

SEQ ID NO: 48144 - protein, 309 aa, Thermochaetoides thermophila
MRSTPVLRTALAAALPGTVLAADGKSTRYWDCCKPSCLSPGNVQVSQNVFACDTNFNRIYDFGAKSGCEGGPAYSCQDQTPWAVNDQFSYGFAATNIAGGNEASWCCACYKLTFTSGPVAGKVMVVQSTSTGGDLGNNHFSLNIPGGGVGIFDGCTPQFGGLPGERYGGISSRSQCDSFPDALKPGCYWRFDWTLNADNPNFTFERVQCPSELVARTGCKRNDDGNYPVFTPPSGDSPSSSSAAPTSTSTSQQPQQPRSSSSQASVPTSNPGGCTSQKWAGCGGIGFTGCTTCVSGTTCTKLNDWYSQC

SEQ ID NO: 48145 - protein, 309 aa, Thermochaetoides thermophila
MRSTPVLRTALAAALPFTVLAANGKSTRYWDCCKPSCLSPGNVQVSQNVFACDTNFNRIYDFGAKTGCEGGPAYSCADQTPWAVNDQFSYGFAATNIAGGNEASWCCACYKLTFTSGPVAGKVMVVQSTSTGGDLGNNHFDLNIPGGGVGIFDGCTPQFGGLPGERYGGISSRSQCDSFPDALKPGCYWRFDWFLNADNPNFTFERVQCPSELVARTGCKRNDDGNYPVFTPPSGDSPSSSSAAPTSTSTSQQPQQPTDSSSQASVPTSNPGGCTSQKWAQCGGIGFTGCSTTVSGTTCTKLNDWYSQC

SEQ ID NO: 48146 - protein, 309 aa, Thermochaetoides thermophila
MRSTPVLRTALAAALPFTVLAADGNSTRYWDCCKPSCLSPGNVQVSQNVFACDRNFNRIYDFGAKSGCEGGPAYSCQDQTPWAVNDQFSYGFAATNIAGGNEASWCCACYKLTFTDGPVAGKVMVVQSTSTGGDLGNNHFSLNIPGGGVGIFDGCTPQFGGLPGERYGGISSRSQCDSFTDALKPGCYWRFDWFLNADNPNFTFERVQCPSELVARTGCKRNDDGNYPVFTPPSGDSPSSSSAAPTSTSTSQQPQQPRSSSSQASVPTSNPGGCESEKWAQCGGIGFTGCTTCVSGTTCTKLNDWYSQC

SEQ ID NO: 48147 - protein, 309 aa, Thermochaetoides thermophila
MRSTPVLRTALAAALPFTVLAADGNSTRYWDCCKPSCLSPGNVQVSQNVFACDTNFNRIYDFGAKSGCEGGPAYSCADQTPWAVNDQFSYGFAATNIAGGNEASWCCACYKLTFTSGPVAGKVMVVQSTSTGGDLGNNHFDLNIPGGGVGIFDGCTPQFGGLPGERYGGISSRSQCDSFTDALKPGCYWRFDWFLNADNPNFTFERVQCPSELVARTGCKRNDDGNYPVFTPPSGDSPSSSSAAPTSTSTSQQPQQPTSSSSQASVPTSNPGGCTSQKWAESGGIGFAQXTTCVSGTTCTKLNDWYSQC

SEQ ID NO: 48148 - protein, 309 aa, Thermochaetoides thermophila
MRSTPVLRTALAAALPFTVLAADGNSTRYWDCCKPSCLSPGNVQVSQNVFACDRNFNRIYDFGAKSYCEGGPAYSCEDQTPWAVNDQFSYGFAATNIAGGNEASWCCACYKLTFTSGPVAGKVMVVQSTSTGGDLGNNHFDLNIPGGGVGIFDGCTPQFGPLPTERYGGISSRSQCDSFTDALKPGCYWRFDWFLNADNPNFTFERVQCPSELVARTGCKRNDDGNYPVFTPPSGDSPSSSSAAPTSTSTSQQPQQPTSSSSQASVPTSNPGGCTSQKWAQCGGIGFTGCTTCVSGTTCTKLNDWYSQC

SEQ ID NO: 48149 - protein, 309 aa, Thermochaetoides thermophila
MRSTPVLRTALAAALPFTVLAADGNSTRYWDCCKPSCLSPGNVQVSQNVFACDRNFNRIYDFGAKSGCEGGPAYSCEDQTPWAVNDQFSYGFAATNIAGGNEASWCCACYKLTFTSGPVAGKVMVVQSTSTGGDLGNNHFDLNIPGGGVGIFDGCTPQFGGLPGERYGGISSRSQCDSFTDALKPGCYWRFDWFLNADNPNFTFERVQCPSELVARTGCKRNDDGNYPVFTPPSGDSPSSSSAAPTSTSTSQQPQQPTDSSSQASVPTSNPGGCTSQKWAKCGGIGFTGCTTTVSGTTCTKLNDWYSQC

SEQ ID NO: 48150 - protein, 309 aa, Thermochaetoides thermophila
MRSTPVLRTALAAALPFTVLAANGKSTRYWDCCKPSCLSPGNAEVSQNVFACDTNFNRIYDFGAKSGCEGGPAYSCADQTPWAVNDQFSYGFAATNIAGGNEASWCCACYKLTFTSGPVAGKVMVVQSTSTGGDLGNNHFDLNIPGGGVGIFDGCTPQFGGLPGERYGGISSRSQCDSFTDALKPGCYWRFDWTLNADNPNFTFERVQCPSELVARTGCKRNDDGNYPVFTPPSGDSPSSSSAAPTSTSTSQQPQQPTSSSSQASVPTSNPGGCTSQKWAQCGGIGFTGCSSNVSGTTCTKLNDWYSQC

SEQ ID NO: 48151 - protein, 309 aa, Thermochaetoides thermophila
MRSTPVLRTALAAALPFTVLAADGKSTRYWDCCKPSCLSPGNVQVSQNVFACDRNFNRIYDFGAKTGCEGGPAYSCQDQTPWAVNDQFSYGFAATNIAGGNEASWCCACYKLTFTSGPVAGAVMVVQSTSTGGDLGNNHFSLNIPGGGVGIFDGCTPQFGGLPGERYGGISSRSQCDSFPDALKPGCYWRFDWFLNADNPNFTFERVQCPSELVARTGCKRNDDGNYPVFTPPSGDSPSSSSAAPTSTSTSQQPQQPTSSSSQASVPTSNPGGCTSQKWAQCGGIAFTGCTTCVSGTTCTKLNDWYSQC

SEQ ID NO: 48152 - protein, 309 aa, Thermochaetoides thermophila
MRSTPVLRTALAAALPGTVLAADGKSTRYWDCCKPSCLSPGNSQVSQNVFACDTNFNRIYDFGAKSGCEGGPAYSCADQTPWAVNDQFSYGFAATNIAGGNQASWCCACYKLTFTDGPVAGKVMVVQSTSTGGDLGNNHFDLNIPGGGVGIFDGCTPQFGPLPGERYGGISSRSQCDSFPDALKPGCYWRFDWFLNADNPNFTFERVQCPSELVARTGCKRNDDGNYPVFTPPSGDSPSSSSAAPTSTSTSQQPQQPSSSSSQASVPTSNPGGCTSQKWAQSGMIGFTGCATCVSGTTCTKLNDWYSQC

SEQ ID NO: 48153 - protein, 309 aa, Thermochaetoides thermophila
MRSTPVLRTALAAALPGTVLAADGKSTRYWDCCKPSCLSPGNVQVSQNVFACDRNFNRIYDFGAKSGCEGGPAYSCADQTPWAVNDQFSYGFAATNIAGGNEASWCCACYKLTFTSGPVAGAVMVVQSTSTGGDLGNNHFDLNIPGGGVGIFDGCTPQFGGLPGERYGGISSRSQCDSFPDALKPGCYWRFDWTLNADNPNFTFERVQCPSELVARTGCKRNDDGNYPVFTPPSGDSPSSSSAAPTSTSTSQQPQQPTDSSSQASVPTSNPGGCTSDKWAKCGGIGFTGCTTNVSGTTCTKLNDWYSQC

SEQ ID NO: 48154 - protein, 309 aa, Thermochaetoides thermophila
MRSTPVLRTALAAALPFTVLAADGKSTRYWDCCKPSCLSPGNSEVSQNVFACDRNFNRIYDFGAKSGCEGGPAYSCEDQTPWAVNDQFSYGFAATNIAGGNEASWCCACYKLTFTSGPVAGAVMVVQSTSTGGDLGNNHFDLNIPGGGVGIFDGCTPQFGGLPGERYGGISSRSQCDSFTDALKPGCYWRFDWFLNADNPNFTFERVQCPSELVARTGCKRNDDGNYPVFTPPSGDSPSSSSAAPTSTSTSQQPQQPSDSSSQASVPTSNPGGCESDKWAQCGGIGFTGCDTTVSGTTCTKLNDWYSQC

SEQ ID NO: 48155 - protein, 309 aa, Thermochaetoides thermophila
MRSTPVLRTALAAALPFTVLAADGNSTRYWDCCKPSCLSPGNVQVSQNVFACDTNFNRIYDFGAKSGCEGGPAYSCQDQTPWAVNDQFSYGFAATNIAGGNEASWCCACYKLTFTSGPVAGKVMVVQSTSTGGDLGNNHFDLNIPGGGVGIFDGCTPQFGGLPGERYGGISSRSQCDSFTDALKPGCYWRFDWTLNADNPNFTFERVQCPSELVARTGCKRNDDGNYPVFTPPSGDSPSSSSAAPTSTSTSQQPQQPTDSSSQASVPTSNPGGCTSDKWAQCGGIGFTGCQTCVSGTTCTKLNDWYSQC

SEQ ID NO: 48156 - protein, 309 aa, Thermochaetoides thermophila
MRSTPVLRTALAAALPFTVLAADGKSTRYWDCCKPSCLSPGNVQVSQNVFACDRNFNRIYDFGAKSGCEGGPAYSCADQTPWAVNDQFSYGFAATNIAGGNEASWCCACYKLTFTDGPVAGKVMVVQSTSTGGDLGNNHFSLNIPGGGVGIFDGCTPQFGGLPGERYGGISSRSQCDSFTDALKPGCYWRFDWFLNADNPNFTFERVQCPSELVARTGCKRNDDGNYPVFTPPSGDSPSSSSAAPTSTSTSQQPQQPTDSSSQASVPTSNPGGCTSQKWAQSGGIGFTGCTTCVSGTTCTKLNDWYSQC

SEQ ID NO: 48157 - protein, 416 aa, Melanocarpus albomyces
MTRNIALLGAASALLGLAHGQKPGETPEVHPQLTTFRCTKADGCQPRTNYIVLDSLSHPVHQVDNDYNCGDWGQKPNATACPDVESCARNCIMEGVPDYSQHGVTTSDTSLRLQQLVDGRLVTPRVYLLDETEHRYEMMHLTGQEFTFEVDATKLPCGMNSALYLSEMDPTGARSELNPGGAYYGTGYCDAQCFVTPFINGIGNIEGKGSCCNEMDIWEANSRATHVAPHTCNQTGLYMCEGAECEYDGVCDKDGCGWNPYRVNITDYYGNSDAFRVDTRRPFTVVTQFPADAEGRLESIHRLYVQDGKVIESYVVDAPGLPRTDSLNDEFCAATGAARYLDLGGTAGMGDAMTRGMVLAMSIWWDESGFMNWLDSGEAGPCLPDEGDPKNIVKVEPSPEVTYSNLRWGEIGSTFE

SEQ ID NO: 48158 - protein, 262 aa, unidentified
SACADGKSTRYWDCCKPSCSWPGKASVNQPVFACSANFQRISDPNVKSGCDGGSAYACADQTPWAVNDNFSYGFAATSISGGNEASWCCGCYELTFTSGPVAGKTMVVQSTSTGGDLGTNHFDLAMPGGGVGIFDGCSPQFGGLAGDRYGGVSSRSQCDSFPAALKPGCYWRFDWFKNADNPTFTFRQVQCPSELVARTGCRRNDDGNFPVFTPPSGGQSSSSSSSSSAKPTSTSTSTTSTKATSTTSTASSQTSSSTGGGC

SEQ ID NO: 48159 - protein, 206 aa, Fusarium oxysporum
TLLALAGPLAVSAASGSGHSTRYWDCCKPSCSWSGKAAVNAPALTCDKNDNPISNTNAVNGCEGGGSAYACTNYSPWAVNDELAYGFAATKISGGSEASWCCACYALTFTTGPVKGKKMIVQSTNTGGDLGDNHFDLMMPGGGVGIFDGCTSEFGKALGGAQYGGISSRSECDSYPELLKDGCHWRFDWFENADNPDFTFEQVQCP

SEQ ID NO: 48160 - protein, 225 aa, Thermothielavioides terrestris
SGSGQSTRYWDCCKPSCAWPGKAAVSQPVYACDANFQRLSDFNVQSGCNGGSAYACADQTPWAVNDNLAYGFAATSIAGGSESSWCCACYALTFTSGPVAGKTMVVQSTSTGGDLGSNHFDIAMPGGGVGIFDGCSSQFGGLPGARYGGISSRDQCDSFPAPLKPGCQWRFDWFQNADNPTFTFQQVQCPAEIVARSGCKRNDDSSFPVFTTPTPTPTPTPGCTA

SEQ ID NO: 48161 - protein, 225 aa, Thermothielavioides terrestris
SGSGQSTRYWDCCKPSCAWPGKAAVSQPVYACDANFQRLSDFNVQSGCNGGSAYSCADQTPWAVNDNLAYGFAATSIAGGSESSWCCACYALTFTSGPVAGKTMVVQSTSTGGDLGSNHFDIAMPGGGVGIFNGCSSQFGGLPGAQYGGISSRDQCDSFPAPLKPGCQWRFDWFQNADNPTFTFQQVQCPAEIVARSGCKRNDDSSFPVFTTPTPTPTPTPGCTS

SEQ ID NO: 48162 - protein, 225 aa, Thermothielavioides terrestris
SGSGQSTRYWDCCKPSCAWPGKAAVSQPVYACDANFQRLSDFNVQSGCNGGSAYACADQTPWAVNDNLAYGFAATSIAGGSESSWCCACYALTFTSGPVAGKTMVVQSTSTGGDLGSNHFDIAMPGGGVGIFDGCSSQFGGLPGAQYGGISSRDECDSFPEPLKPGCQWRFDWFQNADNPTFTFQQVQCPAEIVARSGCKRNDDSSFPVFTTPTPTPTPTPGCTA

SEQ ID NO: 48163 - protein, 257 aa, Staphylotrichum coccosporum
GKSTRYWDCCKPSCSWPGKASVNQPVFACSADFQRISDPNVKSGCDGGTAYACADQTPWAVNDNFSYGFAATSISGGNEASWCCACYELTFTSGPVAGKKMVVQSTSTGGDLGVNHFDLAMPGGGVGIFDGCSEQFGGLAGDRYGGVSSRSECDSFPAPLKPGCYWRFDWFKNADNPTFTFRQVQCPSEVVARTGCRRNDDGNFPVFTPPSGGQSSSSSSSSSAKPTSTSASTTSDKATSTTSTASSQTSSSTGGGC

SEQ ID NO: 48164 - protein, 414 aa, Thermochaetoides thermophila
MARKFALLSLLLGLASAQKPGNTPEVHPKLTTYRCTHLQGCRPETNYIVLDSLAHPVHQVNSNANCGDWGNPPPRNVCPDVETCAQNCIMEGIPDYSAYGVTTSGSSLRLKQIHQGRVTSPRVYLLDKTEQQYEMMRLTGFEFTFDVDATKLPCGMNAALYLSEMDATGARSRLNPGGAYYGTGYCDAQCFVTPFINGIGNIEGKGSCCNEMDIWEANSRSQSIAPHTCNKQGLYMCSGQECEFDGVCDKWGCTWNPYKVNVTNYYGRGPQFKVDTTRPFTVITQFPADQNGKLTSIHRMYVQDGKLIEAHTVNLPGYPQVNALNDDFCRATGAATKYLELGATAGMGEALRRGMVLAMSIWWDESGFMNWLDSGESGPCDPNEGNPQNIRRIEPEPEVTYSNLRWGEIGSTYK

SEQ ID NO: 48165 - protein, 269 aa, Thermothielavioides terrestris
SGSGQSTRYWDCCKPSCAWPGKAAVSQPVYACDANFQRLSDFNVQSGCNGGSAYACADQTPWAVNDNLAYGFAATSIAGGSESSWCCACYALTFTSGPVAGKTMVVQSTSTGGDLGSNHFDIAMPGGGVGIFDGCSSQFGGLPGAQYGGISSRDECDSFPAPLKPGCYWRFDWFQNADNPTFTFQQVQCPAEIVARSGCKRNDDSSFPVFTPEPTPEPTPEPTPEPTPEPTGCTSQKWAQCGGIGFSGCTTCVSGTTCQKLNDYYSQCL

SEQ ID NO: 48166 - protein, 269 aa, Thermothielavioides terrestris
SGSGQSTRYWDCCKPSCAWPGKAAVSQPVYACDANFQRLSDFNVQSGCNGGSAYSCADQTPWAVNDNLAYGFAATSIAGGSESSWCCACYALTFTSGPVAGKTMVVQSTSTGGDLGSNHFDIAMPGGGVGIFDGCSSQFGGLPGARYGGISSRDQCDSFPAPLKPGCQWRFDWFQNADNPTFTFQQVQCPAEIVARSGCKRNDDSSFPVFTPEPTPEPTPEPTPEPTPEPTGCTSQKWAQCGGIGFSGCTTCVSGTTCQKLNDYYSQCL

SEQ ID NO: 48167 - protein, 269 aa, Thermothielavioides terrestris
SGSGQSTRYWDCCKPSCAWPGKAAVSQPVYSCDANFQRLSDFNVQSGCNGGSAYACADQTPWAVNDNLAYGFAATSIAGGSESSWCCACYALTFTSGPVAGKTMVVQSTSTGGDLGSNHFDIAMPGGGVGIFDGCSSQFGGLPGDRYGGISSRDQCDSFPAPLKPGCYWRFDWFQNADNPTVTFQQVQCPAEIVARSGCKRNDDSSFPVFTPEPTPEPTPEPTPEPTPEPTGCTSQKWAQCGGIGFSGCTTCVSGTTCQKLNDYYSQCL

SEQ ID NO: 48168 - protein, 269 aa, Thermothielavioides terrestris
SGSGQSTRYWDCCKPSCAWPGKAAVSQPVYACDANFQRLSDFNVQSGCNGGSAYACADQTPWAVNDNLAYGFAATSIAGGSESSWCCACYALTFTSGPVAGKTMVVQSTSTGGDLGSNHFDIAMPGGGVGIFDGCSSQFGGLPGARYGGISSRDQCDSFPAPLKPGCQWRFDWFQNADNPTFTFQQVQCPAEIVARSGCKRNDDSSFPVFTPEPTPEPTPEPTPEPTPTPTGCTSQKWAQCGGIGFSGCTTCVSGTTCQKLNDYYSQCL

SEQ ID NO: 48169 - protein, 230 aa, Thermothielavioides terrestris
SGSGQSTRYWDCCKPSCAWPGKAAVSQPVYACDANFQRLSDFNVQSGCNGGSAYACADQTPWAVNDNLAYGFAATSIAGGSESSWCCACYALTFTSGPVAGKTMVVQSTSTGGDLGSNHFDIAMPGGGVGIFDGCSSQFGGLPGARYGGISSRDQCDSFPAPLKPGCQWRFDWFQNADNPTFTFQQVQCPAEIVARSGCKRNDDSSFPVFTSPPSPPSPPSPPSPPGCTA

SEQ ID NO: 48170 - protein, 278 aa, Trichoderma reesei
GKSTRYWDCCKPSCGWAKKASVNQPVFSCNANFQRITDFDAKSGCEPGGVAYSCADQTPWAVNDDFAFGFAATSIAGSNEAGWCCACYELTFTSGPVAGKKMVVQSTSTGGDLGSNHFDLNIPGGGVGIFDGCTPQFGGLPGQRYGGISSRNECDRFPDALKPGCYWRFDWFKNADNPSFSFRQVQCPAELVARTGCRRNDDGNFPAVQIGNPSGGNPPGGNPPGTTTTRRPATTTGSSPGPTQSHYGQCGGIGYSGPTVCASGTTCQVLNPYYSQCL

SEQ ID NO: 48171 - protein, 302 aa, Melanocarpus albomyces
MRSTPVLRALLAAALPLGALAANGQSTRYWDCCKPSCGWAGKAPVNQPVYSCDANFQRIHDFDAVSGCEGGPAFSCADHSPWAINDNLSYGFAATALSGQTEESWCCACYALTFTSGPVAGKTMVVQSTSTGGDLGSNHFDLAIPGGGVGLFDGCTPQFGGLPGARYGGISSRQECDSFPEPLKPGCQWRFDWFQNADNPSFTFERVQCPEELVARTGCRRHDDGGFPVFSPPSGRPSGSSPPGGSPPGTTTTRRPATTTGSSPTPTQSHYGQCGGIGYSGPTVCASGTTCQVLNPYYSQCL

SEQ ID NO: 48172 - protein, 302 aa, Melanocarpus albomyces
MRSTPVLRALLAAALPLGALAANGQSTRYWDCCKPSCGWAGKAPVNQPVYSCDANFQRIHDFDAVSGCEGGPAFSCADHSPWAINDNLSYGFAATALSGQTEESWCCACYALTFTSGPVAGKTMVVQSTSTGGDLGSNHFDLAIPGGGVGLFDGCTPQFGGLPGARYGGISSRQECDSFPEPLKPGCQWRFDWFQNADNPSFTFERVQCPEELVARTGCRRHDDGGFPVFSPPSGRPSGGSPPGGSPPGTTTTRRPATTTGSSPTPTQSHYGQCGGIGYSGPTVCASGTTCQVLNPYYSQCL

SEQ ID NO: 48173 - protein, 231 aa, Thermothielavioides terrestris
SGSGQSTRYWDCCKPSCAWPGKAAVSQPVYACDANFQRLSDFNVQSGCNGGSAYACADQTPWAVNDNLAYGFAATSIAGGSESSWCCACYALTFTSGPVAGKTMVVQSTSTGGDLGSNHFDIAMPGGGVGIFDGCSSQFGGLPGARYGGISSRDQCDSFPAPLKPGCQWRFDWFQNADNPTFTFQQVQCPAEIVARSGCKRNDDSSFPVFTPEPTPKPTPEPTPKPTGCTS

SEQ ID NO: 48174 - protein, 231 aa, Thielavia terrestris
SGSGQSTRYWDCCKPSCAWPGKAAVSQPVYSCDANFQRLSDFNVQSGCNGGSAYACADQTPWAVNDNLAYGFAATSIAGGSESSWCCACYALTFTSGPVAGKTMVVQSTSTGGDLGSNHFDIAMPGGGVGIFDGCSSQFGGLPGDRYGGISSRDQCDSFPAPLKPGCYWRFDWFQNADNPTVTFQQVQCPAEIVARSGCKRNDDSSFPVFTPEPTPKPTPEPTPKPTGCTT

SEQ ID NO: 48175 - protein, 231 aa, Thermothielavioides terrestris
SGSGQSTRYWDCCKPSCAWPGKAAVSQPVYACDANFQRLSDFNVQSGCNGGSAYSCADQTPWAVNDNLAYGFAATSIAGGSESSWCCACYALTFTSGPVAGKTMVVQSTSTGGDLGSNHFDIAMPGGGVGIFNGCSSQFGGLPGAQYGGISSRDQCDSFPAPLKPGCQWRFDWFQNADNPTFTFQQVQCPAEIVARSGCKRNDDSSFPVFTPSPTPSPTPSPTPSPTGCTA

SEQ ID NO: 48176 - protein, 231 aa, Thermothielavioides terrestris
SGSGQSTRYWDCCKPSCAWPGKAAVSQPVYACDANFQRLSDFNVQSGCNGGSAYACADQTPWAVNDNLAYGFAATSIAGGSESSWCCACYALTFTSGPVAGKTMVVQSTSTGGDLGSNHFDIAMPGGGVGIFDGCSSQFGGLPGARYGGISSRDQCDSFPAPLKPGCQWRFDWFQNADNPTFTFQQVQCPAEIVARSGCKRNDDSSFPVFTPEPTPRPTPEPTPRPTGCTS

SEQ ID NO: 48177 - protein, 231 aa, Thermothielavioides terrestris
SGSGQSTRYWDCCKPSCAWPGKAAVSQPVYACDANFQRLSDFNVQSGCNGGSAYACADQTPWAVNDNLAYGFAATSIAGGSESSWCCACYALTFTSGPVAGKTMVVQSTSTGGDLGSNHFDIAMPGGGVGIFDGCSSQFGGLPGARYGGISSRDQCDSFPAPLKPGCQWRFDWFQNADNPTFTFQQVQCPAEIVARSGCKRNDDSSFPVFTPEPTPQPTPEPTPQPTGCTS

SEQ ID NO: 48178 - protein, 231 aa, Thermothielavioides terrestris
SGSGQSTRYWDCCKPSCAWPGKAAVSQPVYACDANFQRLSDFNVQSGCNGGSAYACADQTPWAVNDNLAYGFAATSIAGGSESSWCCACYALTFTSGPVAGKTMVVQSTSTGGDLGSNHFDIAMPGGGVGIFDGCSSQFGGLPGARYGGISSRDQCDSFPAPLKPGCQWRFDWFQNADNPTFTFQQVQCPAEIVARSGCKRNDDSSFPVFTPQPTPEPTPQPTPEPTGCTA

SEQ ID NO: 48179 - protein, 231 aa, Thermothielavioides terrestris
SGSGQSTRYWDCCKPSCAWPGKAAVSQPVYACDANFQRLSDFNVQSGCNGGSAYSCADQTPWAVNDNLAYGFAATSIAGGSESSWCCACYALTFTSGPVAGKTMVVQSTSTGGDLGSNHFDIAMPGGGVGIFDGCSSQFGGLPGARYGGISSRDQCDSFPAPLKPGCQWRFDWFQNADNPTFTFQQVQCPAEIVARSGCKRNDDSSFPVFTPEPTPEPTPEPTPEPTGCTA

SEQ ID NO: 48180 - protein, 231 aa, Thermothielavioides terrestris
SGSGQSTRYWDCCKPSCAWPGKAAVSQPVYACDANFQRLSDFNVQSGCNGGSAYACADQTPWAVNDNLAYGFAATSIAGGSESSWCCACYALTFTSGPVAGKTMVVQSTSTGGDLGSNHFDIAMPGGGVGIFDGCSSQFGGLPGAQYGGISSRDECDSFPEPLKPGCQWRFDWFQNADNPTFTFQQVQCPAEIVARSGCKRNDDSSFPVFTPEPTPEPTPEPTPEPTGCTS

SEQ ID NO: 48181 - protein, 231 aa, Thermothielavioides terrestris
SGSGQSTRYWDCCKPSCAWPGKAAVSQPVYACDANFQRLSDFNVQSGCNGGSAYACADQTPWAVNDNLAYGFAATSIAGGSESSWCCACYALTFTSGPVAGKTMVVQSTSTGGDLGSNHFDIAMPGGGVGIFDGCSSQFGGLPGARYGGISSRDQCDSFPAPLKPGCQWRFDWFQNADNPTFTFQQVQCPAEIVARSGCKRNDDSSFPVFTPKPTPEPTPKPTPEPTGCTS

SEQ ID NO: 48182 - protein, 231 aa, Thermothielavioides terrestris
SGSGQSTRYWDCCKPSCAWPGKAAVSQPVYACDANFQRLSDFNVQSGCNGGSAYACADQTPWAVNDNLAYGFAATSIAGGSESSWCCACYALTFTSGPVAGKTMVVQSTSTGGDLGSNHFDIAMPGGGVGIFDGCSSQFGGLPGARYGGISSRDQCDSFPAPLKPGCQWRFDWFQNADNPTFTFQQVQCPAEIVARSGCKRNDDSSFPVFTPEPTPEPTPEPTPEPTGCTS

SEQ ID NO: 48183 - protein, 231 aa, Thermothielavioides terrestris
SGSGQSTRYWDCCKPSCAWPGKAAVSQPVYACDANFQRLSDFNVQSGCNGGSAYACADQTPWAVNDNLAYGFAATSIAGGSESSWCCACYALTFTSGPVAGKTMVVQSTSTGGDLGSNHFDIAMPGGGVGIFDGCSSQFGGLPGAQYGGISSRDECDSFPAPLKPGCYWRFDWFQNADNPTFTFQQVQCPAEIVARSGCKRNDDSSFPVFTPEPTPEPTPEPTPEPTGCTA

SEQ ID NO: 48184 - protein, 231 aa, Thielavia terrestris
SGSGQSTRYWDCCKPSCAWPGKAAVSQPVYSCDANFQRLSDFNVQSGCNGGSAYACADQTPWAVNDNLAYGFAATSIAGGSESSWCCACYALTFTSGPVAGKTMVVQSTSTGGDLGSNHFDIAMPGGGVGIFDGCSSQFGGLPGDRYGGISSRDQCDSFPAPLKPGCYWRFDWFQNADNPTVTFQQVQCPAEIVARSGCKRNDDSSFPVFTPKPTPEPTPKPTPEPTGCTT

SEQ ID NO: 48185 - protein, 231 aa, Thielavia terrestris
SGSGQSTRYWDCCKPSCAWPGKAAVSQPVYSCDANFQRLSDFNVQSGCNGGSAYACADQTPWAVNDNLAYGFAATSIAGGSESSWCCACYALTFTSGPVAGKTMVVQSTSTGGDLGSNHFDIAMPGGGVGIFDGCSSQFGGLPGDRYGGISSRDQCDSFPAPLKPGCYWRFDWFQNADNPTVTFQQVQCPAEIVARSGCKRNDDSSFPVFTPEPTPRPTPEPTPRPTGCTT

SEQ ID NO: 48186 - protein, 231 aa, Thermothielavioides terrestris
SGSGQSTRYWDCCKPSCAWPGKAAVSQPVYACDANFQRLSDFNVQSGCNGGSAYACADQTPWAVNDNLAYGFAATSIAGGSESSWCCACYALTFTSGPVAGKTMVVQSTSTGGDLGSNHFDIAMPGGGVGIFDGCSSQFGGLPGARYGGISSRDQCDSFPAPLKPGCQWRFDWFQNADNPTFTFQQVQCPAEIVARSGCKRNDDSSFPVFTPQPTPQPTPQPTPQPTGCTA

SEQ ID NO: 48187 - protein, 231 aa, Thielavia terrestris
SGSGQSTRYWDCCKPSCAWPGKAAVSQPVYSCDANFQRLSDFNVQSGCNGGSAYACADQTPWAVNDNLAYGFAATSIAGGSESSWCCACYALTFTSGPVAGKTMVVQSTSTGGDLGSNHFDIAMPGGGVGIFDGCSSQFGGLPGDRYGGISSRDQCDSFPAPLKPGCYWRFDWFQNADNPTVTFQQVQCPAEIVARSGCKRNDDSSFPVFTPEPTPEPTPEPTPEPTGCTT

SEQ ID NO: 48188 - protein, 268 aa, Thielavia terrestris
SGSGQSTRYWDCCKPSCAWPGKAAVSQPVYSCDANFQRLSDFNVQSGCNGGSAYACADQTPWAVNDNLAYGFAATSIAGGSESSWCCACYALTFTSGPVAGKTMVVQSTSTGGDLGSNHFDIAMPGGGVGIFDGCSSQFGGLPGDRYGGISSRDQCDSFPAPLKPGCYWRFDWFQNADNPTVTFQQVQCPAEIVARSGCKRNDDSSFPVFTPEPTPEPTPEPTPEPTPTPTGCTTQKWGQCGGIGYTGCTNCVAGTTCTQLNPWYHQC

SEQ ID NO: 48189 - protein, 309 aa, Thermochaetoides thermophila
MRSTPVLRTALAAALPFTVLAANGKSTRYWDCCKPSCLSPGNVQVSQNVFACDTNFNRIYDFGAKSGCEGGPAYSCADQTPWAVNDQFSYGFAATNIAGGNEASWCCACYKLTFTDGPVAGKVMVVQSTSTGGDLGNNHFDLNIPGGGVGIFDGCTPQFGPLPTERYGGISSRSQCDSFPDALKPGCYWRFDWFLNADNPNFTFERVQCPSELVARTGCKRNDDGNYPVFTPPSGDSPSSSSAAPTSTSTSQQPQQPTSSSSQASVPTSNPGGCESQKWAECGGIGFTGCTTCVSGTTCTKLNDWYSQC

SEQ ID NO: 48190 - protein, 309 aa, Thermochaetoides thermophila
MRSTPVLRTALAAALPFTVLAADGKSTRYWDCCKPSCLSPGNVQVSQNVFACDTNFNRIYDFGAKSGCEGGPAYSCADQTPWAVNDQFSYGFAATNIAGGNEASWCCACYKLTFTDGPVAGKVMVVQSTSTGGDLGNNHFSLNIPGGGVGIFDGCTPQFGGLPGERYGGISSRSQCDSFTDALKPGCYWRFDWFLNADNPNFTFERVQCPSELVARTGCKRNDDGNYPVFTPPSGDSPSSSSAAPTSTSTSQQPQQPTSSSSQASVPTSNPGGCTSQKWAQCGRIGFTGCQTNVSGTTCTKLNDWYSQC

SEQ ID NO: 48191 - protein, 309 aa, Thermochaetoides thermophila
MRSTPVLRTALAAALPFTVLAANGNSTRYWDCCKPSCLSPGNVQVSQNVFACDRNFNRIYDFGAKSYCEGGPAYSCEDQTPWAVNDQFSYGFAATNIAGGNEASWCCACYKLTFTSGPVAGKVMVVQSTSTGGDLGNNHFDLNIPGGGVGIFDGCTPQFGGLPGERYGGISSRSQCDSFTDALKPGCYWRFDWTLNADNPNFTFERVQCPSELVARTGCKRNDDGNYPVFTPPSGDSPSSSSAAPTSTSTSQQPQQPTSSSSQASVPTSNPGGCTSQKWAGCGGIGFTGCTTCVSGTTCTKLNDWYSQC

SEQ ID NO: 48192 - protein, 309 aa, Thermochaetoides thermophila
MRSTPVLRTALAAALPFTVLAADGKSTRYWDCCKPSCLSPGNVQVSQNVFACDRNFNRIYDFGAKSGCEGGPAYSCADQTPWAVNDQFSYGFAATNIAGGNEASWCCACYKLTFTSGPVAGKVMVVQSTSTGGDLGNNHFSLNIPGGGVGIFDGCTPQFGGLPGERYGGISSRSQCDSFIDALKPGCYWRFDWFLNADNPNFTFERVQCPSELVARTGCKRNDDGNYPVFTPPSGDSPSSSSAAPTSTSTSQQPQQPTDSSSQASVPTSNPGGCTSQKWAGSGGIGFTGCTTNVSGTTCTKLNDWYSQC

SEQ ID NO: 48193 - protein, 309 aa, Thermochaetoides thermophila
MRSTPVLRTALAAALPGTVLAADGKSTRYWDCCKPSCLSPGNVQVSQNVFACDTNFNRIYDFGAKSGCEGGPAYSCQDQTPWAVNDQFSYGFAATNIAGGNEASWCCACYKLTFTEGPVAGKVMVVQSTSTGGDLGNNHFSLNIPGGGVGIFDGCTPQFGGLPGERYGGISSRSQCDSFTDALKPGCYWRFDWTLNADNPNFTFERVQCPSELVARTGCKRNDDGNYPVFTPPSGDSPSSSSAAPTSTSTSQQPQQPSDSSSQASVPTSNPGGCTSQKWAQCGGIGFTGCQTGVSGTTCTKLNDWYSQC

SEQ ID NO: 48194 - protein, 309 aa, Thermochaetoides thermophila
MRSTPVLRTALAAALPFTVLAANGKSTRYWDCCKPSCLSPGNVQVSQNVFACDRNFNRIYDFGAKSGCEGGPAYSCEDQTPWAVNDQFSYGFAATNIAGGNQASWCCACYKLTFTSGPVAGKVMVVQSTSTGGDLGNNHFDLNIPGGGVGIFDGCTPQFGGLPGERYGGISSRSQCDSFPDALKPGCYWRFDWFLNADNPNFTFERVQCPSELVARTGCKRNDDGNYPVFTPPSGDSPSSSSAAPTSTSTSQQPQQPTSSSSQASVPTSNPGGCTSQKWAQCGMIAFTGCATCVSGTTCTKLNDWYSQC

SEQ ID NO: 48195 - protein, 309 aa, Thermochaetoides thermophila
MRSTPVLRTALAAALPFTVLAADGKSTRYWDCCKPSCLSPGNVQVSQNVFACDRNFNRIYDFGAKSGCEGGPAYSCADQTPWAVNDQFSYGFAATNIAGGNEASWCCACYKLTFTSGPVAGKVMVVQSTSTGGDLGNNHFDLNIPGGGVGIFDGCTPQFGGLPGERYGGISSRSQCDSFPDALKPGCYWRFDWFLNADNPNFTFERVQCPSELVARTGCKRNDDGNYPVFTPPSGDSPSSSSAAPTSTSTSQQPQQPTSSSSQASVPTSNPGDRAPLAPSXCGGIGFTGCTTCVSGTTCTKLNDWYSQC

SEQ ID NO: 48196 - protein, 309 aa, Thermochaetoides thermophila
MRSTPVLRTALAAALPFTVLAADGKSTRYWDCCKPSCLSPGNAEVSQNVFACDRNFNRIYDFGAKTYCEGGPAYSCQDQTPWAVNDQFSYGFAATNIAGGNEASWCCACYKLTFTSGPVAGAVMVVQSTSTGGDLGNNHFDLNIPGGGVGIFDGCTPQFGKLPGERYGGISSRSQCDSFPDALKPGCYWRFDWFLNADNPNFTFERVQCPSELVARTGCKRNDDGNYPVFTPPSGDSPSSSSAAPTSTSTSQQPQQPTSSSSQASVPTSNPGGCTSQKWAQCGGIGFTKXTTCVSGTTCTKLNDWYSQC

SEQ ID NO: 48197 - protein, 309 aa, Thermochaetoides thermophila
MRSTPVLRTALAAALPGTVLAADGKSTRYWDCCKPSCLSPGNSEVSQNVFACDRNFNRIYDFGAKTGCEGGPAYSCQDQTPWAVNDQFSYGFAATNIAGGNQASWCCACYKLTFTSGPVAGSVMVVQSTSTGGDLGNNHFSLNIPGGGVGIFDGCTPQFGGLPGERYGGISSRSQCDSFPDALKPGCYWRFDWFLNADNPNFTFERVQCPSELVARTGCKRNDDGNYPVFTPPSGDSPSSSSAAPTSTSTSQQPQQPRDSSSQASVPTSNPGGCTSQKWAQCGRIGFTGCTTCVSGTTCTKLNDWYSQC

SEQ ID NO: 48198 - protein, 309 aa, Thermochaetoides thermophila
MRSTPVLRTALAAALPFTVLAANGKSTRYWDCCKPSCLSPGNEQVSQNVFACDTNFNRIYDFGAKSGCEGGPAYSCEDQTPWAVNDQFSYGFAATNIAGGNEASWCCACYKLTFTDGPVAGKVMVVQSTSTGGDLGNNHFDLNIPGGGVGIFDGCTPQFGGLPGERYGGISSRSQCDSFPDALKPGCYWRFDWFLNADNPNFTFERVQCPSELVARTGCKRNDDGNYPVFTPPSGDSPSSSSAAPTSTSTSQQPQQPTSSSSQASVPTSNPGGCTSQKWAQCGMIAFTGCQTCVSGTTCTKLNDWYSQC

SEQ ID NO: 48199 - protein, 309 aa, Thermochaetoides thermophila
MRSTPVLRTALAAALPFTVLAADGKSTRYWDCCKPSCLSPGNVQVSQNVFACDRNFNRIYDFGAKSGCEGGPAYSCADQTPWAVNDQFSYGFAATNIAGGNEASWCCACYKLTFTDGPVAGKVMVVQSTSTGGDLGNNHFDLNIPGGGVGIFDGCTPQFGGLPGERYGGISSRSQCDSFPDALKPGCYWRFDWFLNADNPNFTFERVQCPSELVARTGCKRNDDGNYPVFTPPSGDSPSSSSAAPTSTSTSQQPQQPTSSSSQASVPTSNPGGCTSQKWAKSGGIGFTGCSSNVSGTTCTKLNDWYSQC

SEQ ID NO: 48200 - protein, 309 aa, Thermochaetoides thermophila
MRSTPVLRTALAAALPFTVLAANGKSTRYWDCCKPSCLSPGNVQVSQNVFACDTNFNRIYDFGAKTYCEGGPAYSCADQTPWAVNDQFSYGFAATNIAGGNEASWCCACYKLTFTSGPVAGKVMVVQSTSTGGDLGNNHFDLNIPGGGVGIFDGCTPQFGPLPGERYGGISSRSQCDSFPDALKPGCYWRFDWFLNADNPNFTFERVQCPSELVARTGCKRNDDGNYPVFTPPSGDSPSSSSAAPTSTSTSQQPQQPTSSSSQASVPTSNPGGCTSQKWAQCGMIGFTGCQTCVSGTTCTKLNDWYSQC

SEQ ID NO: 48201 - protein, 309 aa, Thermochaetoides thermophila
MRSTPVLRTALAAALPFTVLAADGKSTRYWDCCKPSCLSPGNSQVSQNVFACDINFNRIYDFGAKSGCEGGPAYSCEDQTPWAVNDQFSYGFAATNIAGGNEASWCCACYKLTFTEGPVAGKVMVVQSTSTGGDLGNNHFDLNIPGGGVGIFDGCTPQFGGLPGERYGGISSRSQCDSFIDALKPGCYWRFDWFLNADNPNFTFERVQCPSELVARTGCKRNDDGNYPVFTPPSGDSPSSSSAAPTSTSTSQQPQQPTDSSSQASVPTSNPGGCTSQKWAQCGGIGFTGCQTGVSGTTCTKLNDWYSQC

SEQ ID NO: 48202 - protein, 309 aa, Thermochaetoides thermophila
MRSTPVLRTALAAALPFTVLAADGNSTRYWDCCKPSCLSPGNVQVSQNVFACDTNFNRIYDFGAKSGCEGGPAYSCADQTPWAVNDQFSYGFAATNIAGGNEASWCCACYKLTFTDGPVAGKVMVVQSTSTGGDLGNNHFDLNIPGGGVGIFDGCTPQFGPLPGERYGGISSRSQCDSFTDALKPGCYWRFDWFLNADNPNFTFERVQCPSELVARTGCKRNDDGNYPVFTPPSGDSPSSSSAAPTSTSTSQQPQQPRSSSSQASVPTSNPGGCESEKWAQCGGIGFTGCSTGVSGTTCTKLNDWYSQC

SEQ ID NO: 48203 - protein, 309 aa, Thermochaetoides thermophila
MRSTPVLRTALAAALPFTVLAADGNSTRYWDCCKPSCLSPGNVQVSQNVFACDRNFNRIYDFGAKSGCEGGPAYSCADQTPWAVNDQFSYGFAATNIAGGNEASWCCACYKLTFTEGPVAGSVMVVQSTSTGGDLGNNHFDLNIPGGGVGIFDGCTPQFGGLPGERYGGISSRSQCDSFPDALKPGCYWRFDWTLNADNPNFTFERVQCPSELVARTGCKRNDDGNYPVFTPPSGDSPSSSSAAPTSTSTSQQPQQPTSSSSQASVPTSNPGGCTSLAPSXCGGIGFTGCTTCVSGTTCTKLNDWYSQC

SEQ ID NO: 48204 - protein, 309 aa, Thermochaetoides thermophila
MRSTPVLRTALAAALPGTVLAANGKSTRYWDCCKPSCLSPGNVQVSQNVFACDRNFNRIYDFGAKSGCEGGPAYSCEDQTPWAVNDQFSYGFAATNIAGGNQASWCCACYKLTFTSGPVAGKVMVVQSTSTGGDLGNNHFDLNIPGGGVGIFDGCTPQFGPLPGERYGGISSRSQCDSFPDALKPGCYWRFDWFLNADNPNFTFERVQCPSELVARTGCKRNDDGNYPVFTPPSGDSPSSSSAAPTSTSTSQQPQQPTSSSSQASVPTSNPGGCTSQKWAQCGMIGFTGCQTCVSGTTCTKLNDWYSQC

SEQ ID NO: 48205 - protein, 309 aa, Thermochaetoides thermophila
MRSTPVLRTALAAALPFTVLAADGNSTRYWDCCKPSCLSPGNAQVSQNVFACDTNFNRIYDFGAKSGCEGGPAYSCEDQTPWAVNDQFSYGFAATNIAGGNRASWCCACYKLTFTSGPVAGSVMVVQSTSTGGDLGNNHFSLNIPGGGVGIFDGCTPQFGGLPGERYGGISSRSQCDSFPDALKPGCYWRFDWFLNADNPNFTFERVQCPSELVARTGCKRNDDGNYPVFTPPSGDSPSSSSAAPTSTSTSQQPQQPTDSSSQASVPTSNPGGCTSQKWAQCGGIGFTGCSTTVSGTTCTKLNDWYSQC

SEQ ID NO: 48206 - protein, 220 aa, Thermothielavioides terrestris
SGSGQSTRYWDCCKPSCAWPGKAAVSQPVYACDANFQRLSDFNVQSGCNGGSAYSCADQTPWAVNDNLAYGFAATSIAGGSESSWCCACYALTFTSGPVAGKTMVVQSTSTGGDLGSNHFDIAMPGGGVGIFNGCSSQFGGLPGAQYGGISSRDQCDSFPAPLKPGCQWRFDWFQNADNPTFTFQQVQCPAEIVARSGCKRNDDSSFPVFTPPPPPPPPP

SEQ ID NO: 48207 - protein, 279 aa, Acremonium thermophilum
GKSTRYWDCCKPSCGWAGKAPVNQPVFSCSADWQRISDFNANSGCSGGNAYSCADQTPWAVNEQFSYGFAATAISGGSEQSWCCACYALTFNSGPVAGKTMVVQSTSTGGDLGENHFDLAIPGGGVGIFNGCQSQFGGLPGAQYGGIQDRSQCSSFPAPLQPGCYWRFDWFENADDPTFTFQRVQCPSELISRTGCKRDDDANYPVFNPPSGNPSGGNPPGGNPPGTTTTRRPATTTGSSPGPTQSRYGQCGGIGYSGPTVCASGTTCQVLNPYYSQCL

SEQ ID NO: 48208 - protein, 279 aa, Acremonium thermophilum
GKSTRYWDCCKPSCGWAGKAPVNQPVFSCSADWQRISDFNANSGCSGGNAYSCADQTPWAVNEQFSYGFAATAISGGSEQSWCCACYALTFNSGPVAGKTMVVQSTSTGGDLGENHFDLAIPGGGVGIFNGCQSQFGGLPAAEYGGIQDRSQCSSFPAPLQPGCYWRFDWFQNADNPTFTFQRVQCPSELISRTGCKRDDDANYPVFNPPSGNPSGGNPPGGNPPGTTTTRRPATTTGSSPGPTQSRYGQCGGIGYSGPTVCASGTTCQVLNPYYSQCL

SEQ ID NO: 48209 - protein, 282 aa, Synthetic construct
GKSTRYWDCCKPSCGWAKKAPVNQPVFSCNANFQRLTDFDAKSGCEPGGVAYSCADQTPWAVNDDFAYGFAATSIAGSNEAGWCCACYELTFTSGPVAGKKMVVQSTSTGGDLGSNHFDLNIPGGGVGIFDGCTPQFGGLPGQRYGGISSRNECDRFPDALKPGCYWRFDWFKNADNPSFSFRQVQCPAELVARTGCRRNDDGNFPAVQIPSSSTSSPVGQPTSTSTTSTSTTSSPPVQPTTPSGCTAERWAQCGGNGWSGCTTCVAGSTCTKINDWYHQCL

SEQ ID NO: 48210 - protein, 282 aa, Synthetic construct
GKSTRYWDCCKPSCGWAKKAPVNQPVFSCNANFQRLTDFDAKSGCNPGGVAYKCADQTPWAVNDDFAYGFAATSIAGSNEAGWCCACYELTFTSGPVAGKKMVVQSTSTGGDLGSNHFDLLIPGGGVGIFDGCTPQFGGLPGQRYGGISSRNECDRFPDALKPGCYWRFDWFKNADNPSFSFRQVQCPAELVARTGCRRNDDGNFPAVQIPSSSTSSPVGQPTSTSTTSTSTTSSPPVQPTTPSGCTAERWAQCGGNGWSGCTTCVAGSTCTKINDWYHQCL

SEQ ID NO: 48211 - protein, 282 aa, Synthetic construct
GKSTRYWDCCKPSCGWAKKAPVNQPVFSCNANFQRLTDFDAKSGCNPGGVAYKCADQTPWAVNDDFAYGFAATSIAGSNEAGWCCACYELTFTSGPVAGKKMVVQSTSTGGDLGSNHFDLNIPGGGVGIFDGCTPQFGGLPGQRYGGISSRNECDRFPDALKPGCYWRFDWFKNADNPSFSFRQVQCPAELVARTGCRRNDDGNFPAVQIPSSSTSSPVGQPTSTSTTSTSTTSSPPVQPTTPSGCTAERWAQCGGNGWSGCTTCVAGSTCTKINDWYHQCL

SEQ ID NO: 48212 - protein, 282 aa, Synthetic construct
GKSTRYWDCCKPSCGWAKKAPVNQPVFSCNANFQRLTDFDAKSGCNPGGVAYMCADQTPWAVNDDFAYGFAATSIAGSNEAGWCCACYELTFTSGPVAGKKMVVQSTSTGGDLGSNHFDLNIPGGGVGIFDGCTPQFGGLPGQRYGGISSRNECDRFPDALKPGCYWRFDWFKNADNPSFSFRQVQCPAELVARTGCRRNDDGNFPAVQIPSSSTSSPVGQPTSTSTTSTSTTSSPPVQPTTPSGCTAERWAQCGGNGWSGCTTCVAGSTCTKINDWYHQCL

SEQ ID NO: 48213 - protein, 282 aa, Synthetic construct
GKSTRYWDCCKPSCGWAKKAPVNQPVFSCNANFQRLTDFDAKSGCNPGGVAYLCADQTPWAVNDDFAYGFAATSIAGSNEAGWCCACYELTFTSGPVAGKKMVVQSTSTGGDLGSNHFDLNIPGGGVGIFDGCTPQFGGLPGQRYGGISSRNECDRFPDALKPGCYWRFDWFKNADNPSFSFRQVQCPAELVARTGCRRNDDGNFPAVQIPSSSTSSPVGQPTSTSTTSTSTTSSPPVQPTTPSGCTAERWAQCGGNGWSGCTTCVAGSTCTKINDWYHQCL

SEQ ID NO: 48214 - protein, 282 aa, Synthetic construct
GKSTRYWDCCKPSCGWAKKAPVNQPVFSCNANFQRLTDFDAKSGCNPGGVAYMCADQTPWAVNDDFAYGFAATSIAGSNEAGWCCACYELTFTSGPVAGKKMVVQSTSTGGDLGSNHFDLFIPGGGVGIFDGCTPQFGGLPGQRYGGISSRNECDRFPDALKPGCYWRFDWFKNADNPSFSFRQVQCPAELVARTGCRRNDDGNFPAVQIPSSSTSSPVGQPTSTSTTSTSTTSSPPVQPTTPSGCTAERWAQCGGNGWSGCTTCVAGSTCTKINDWYHQCL

SEQ ID NO: 48215 - protein, 282 aa, Synthetic construct
GKSTRYWDCCKPSCGWAKKAPVNQPVFSCNANFQRLTDFDAKSGCNPGGVAYLCADQTPWAVNDDFAYGFAATSIAGSNEAGWCCACYELTFTSGPVAGKKMVVQSTSTGGDLGSNHFDLLIPGGGVGIFDGCTPQFGGLPGQRYGGISSRNECDRFPDALKPGCYWRFDWFKNADNPSFSFRQVQCPAELVARTGCRRNDDGNFPAVQIPSSSTSSPVGQPTSTSTTSTSTTSSPPVQPTTPSGCTAERWAQCGGNGWSGCTTCVAGSTCTKINDWYHQCL

SEQ ID NO: 48216 - protein, 282 aa, Synthetic construct
GKSTRYWDCCKPSCGWAKKAPVNQPVFSCNANFQRLTDFDAKSGCNPGGVAYSCADQTPWAVNDDFAFGFAATSIAGSNEAGWCCACYELTFTSGPVAGKKMVVQSTSTGGDLGSNHFDLNIPGGGVGIFDGCTPQFGGLPGQRYGGISSRNECDRFPDALKPGCYWRFDWFKNADNPSFSFRQVQCPAELVARTGCRRNDDGNFPAVQIPSSSTSSPVGQPTSTSTTSTSTTSSPPVQPTTPSGCTAERWAQCGGNGWSGCTTCVAGSTCTKINDWYHQCL

SEQ ID NO: 48217 - protein, 282 aa, Synthetic construct
GKSTRYWDCCKPSCGWAKKAPVNQPVFSCNANFQRLTDFDAKSGCNPGGVAYLCADQTPWAVNDDFAYGFAATSIAGSNEAGWCCACYELTFTSGPVAGKKMVVQSTSTGGDLGSNHFDLFIPGGGVGIFDGCTPQFGGLPGQRYGGISSRNECDRFPDALKPGCYWRFDWFKNADNPSFSFRQVQCPAELVARTGCRRNDDGNFPAVQIPSSSTSSPVGQPTSTSTTSTSTTSSPPVQPTTPSGCTAERWAQCGGNGWSGCTTCVAGSTCTKINDWYHQCL

SEQ ID NO: 48218 - protein, 282 aa, Synthetic construct
GKSTRYWDCCKPSCGWAKKAPVNQPVFSCNANFQRLTDFDAKSGCEPGGVAYSCADQTPWAVNDDFAYGFAATSIAGSNEAGWCCACYELTFTSGPVAGKKMVVQSTSTGGDLGSNHFDLFIPGGGVGIFDGCTPQFGGLPGQRYGGISSRNECDRFPDALKPGCYWRFDWFKNADNPSFSFRQVQCPAELVARTGCRRNDDGNFPAVQIPSSSTSSPVGQPTSTSTTSTSTTSSPPVQPTTPSGCTAERWAQCGGNGWSGCTTCVAGSTCTKINDWYHQCL

SEQ ID NO: 48219 - protein, 282 aa, Synthetic construct
GKSTRYWDCCKPSCGWAKKAPVNQPVFSCNANFQRLTDFDAKSGCNPGGVAYSCADQTPWAVNDDFAFGFAATSIAGSNEAGWCCACYELTFTSGPVAGKKMVVQSTSTGGDLGSNHFDLFIPGGGVGIFDGCTPQFGGLPGQRYGGISSRNECDRFPDALKPGCYWRFDWFKNADNPSFSFRQVQCPAELVARTGCRRNDDGNFPAVQIPSSSTSSPVGQPTSTSTTSTSTTSSPPVQPTTPSGCTAERWAQCGGNGWSGCTTCVAGSTCTKINDWYHQCL

SEQ ID NO: 48220 - protein, 282 aa, Synthetic construct
GKSTRYWDCCKPSCGWAKKAPVNQPVFSCNANFQRLTDFDAKSGCNPGGVAYSCADQTPWAVNDDFAYGFAATSIAGSNEAGWCCACYELTFTSGPVAGKKMVVQSTSTGGDLGSNHFDLFIPGGGVGPFDGCTPQFGGLPGQRYGGISSRNECDRFPDALKPGCYWRFDWFKNADNPSFSFRQVQCPAELVARTGCRRNDDGNFPAVQIPSSSTSSPVGQPTSTSTTSTSTTSSPPVQPTTPSGCTAERWAQCGGNGWSGCTTCVAGSTCTKINDWYHQCL

SEQ ID NO: 48221 - protein, 282 aa, Synthetic construct
GKSTRYWDCCKPSCGWAKKAPVNQPVFSCNANFQRLTDFDAKSGCEPGGVAYSCADQTPWAVNDDFAYGFAATSIAGSNEAGWCCACYELTFTSGPVAGKKMVVQSTSTGGDLGSNHFDLLIPGGGVGIFDGCTPQFGGLPGQRYGGISSRNECDRFPDALKPGCYWRFDWFKNADNPSFSFRQVQCPAELVARTGCRRNDDGNFPAVQIPSSSTSSPVGQPTSTSTTSTSTTSSPPVQPTTPSGCTAERWAQCGGNGWSGCTTCVAGSTCTKINDWYHQCL

SEQ ID NO: 48222 - protein, 282 aa, Synthetic construct
GKSTRYWDCCKPSCGWAKKAPVNQPVFSCNANFQRLTDFDAKSGCNPGGVAYKCADQTPWAVNDDFAYGFAATSIAGSNEAGWCCACYELTFTSGPVAGKKMVVQSTSTGGDLGSNHFDLFIPGGGVGIFDGCTPQFGGLPGQRYGGISSRNECDRFPDALKPGCYWRFDWFKNADNPSFSFRQVQCPAELVARTGCRRNDDGNFPAVQIPSSSTSSPVGQPTSTSTTSTSTTSSPPVQPTTPSGCTAERWAQCGGNGWSGCTTCVAGSTCTKINDWYHQCL

SEQ ID NO: 48223 - protein, 282 aa, Synthetic construct
GKSTRYWDCCKPSCGWAKKAPVNQPVFSCNANFQRLTDFDAKSGCNPGGVAYSCADQTPWAVNDDFAFGFAATSIAGSNEAGWCCACYELTFTSGPVAGKKMVVQSTSTGGDLGSNHFDLLIPGGGVGIFDGCTPQFGGLPGQRYGGISSRNECDRFPDALKPGCYWRFDWFKNADNPSFSFRQVQCPAELVARTGCRRNDDGNFPAVQIPSSSTSSPVGQPTSTSTTSTSTTSSPPVQPTTPSGCTAERWAQCGGNGWSGCTTCVAGSTCTKINDWYHQCL

SEQ ID NO: 48224 - protein, 282 aa, Synthetic construct
GKSTRYWDCCKPSCGWAKKAPVNQPVFSCNANFQRLTDFDAKSGCNPGGVAYSCADQTPWAVNDDFAYGFAATSIAGSNEAGWCCACYELTFTSGPVAGKKMVVQSTSTGGDLGSNHFDLNIPGGGVGPFDGCTPQFGGLPGQRYGGISSRNECDRFPDALKPGCYWRFDWFKNADNPSFSFRQVQCPAELVARTGCRRNDDGNFPAVQIPSSSTSSPVGQPTSTSTTSTSTTSSPPVQPTTPSGCTAERWAQCGGNGWSGCTTCVAGSTCTKINDWYHQCL

SEQ ID NO: 48225 - protein, 282 aa, Synthetic construct
GKSTRYWDCCKPSCGWAKKAPVNQPVFSCNANFQRLTDFDAKSGCNPGGVAYSCADQTPWAVNDDFAYGFAATSIAGSNEAGWCCACYELTFTSGPVAGKKMVVQSTSTGGDLGSNHFDLLIPGGGVGPFDGCTPQFGGLPGQRYGGISSRNECDRFPDALKPGCYWRFDWFKNADNPSFSFRQVQCPAELVARTGCRRNDDGNFPAVQIPSSSTSSPVGQPTSTSTTSTSTTSSPPVQPTTPSGCTAERWAQCGGNGWSGCTTCVAGSTCTKINDWYHQCL

SEQ ID NO: 48226 - protein, 282 aa, Synthetic construct
GKSTRYWDCCKPSCGWAKKAPVNQPVFSCNANFQRLTDFDAKSGCNPGGVAYMCADQTPWAVNDDFAYGFAATSIAGSNEAGWCCACYELTFTSGPVAGKKMVVQSTSTGGDLGSNHFDLLIPGGGVGIFDGCTPQFGGLPGQRYGGISSRNECDRFPDALKPGCYWRFDWFKNADNPSFSFRQVQCPAELVARTGCRRNDDGNFPAVQIPSSSTSSPVGQPTSTSTTSTSTTSSPPVQPTTPSGCTAERWAQCGGNGWSGCTTCVAGSTCTKINDWYHQCL

SEQ ID NO: 48227 - protein, 227 aa, Thermothielavioides terrestris
SGSGQSTRYWDCCKPSCAWPGKAAVSQPVYACDANFQRLSDFNVQSGCNGGSAYACADQTPWAVNDNLAYGFAATSIAGGSESSWCCACYALTFTSGPVAGKTMVVQSTSTGGDLGSNHFDIAMPGGGVGIFDGCSSQFGGLPGARYGGISSRDQCDSFPAPLKPGCQWRFDWFQNADNPTFTFQQVQCPAEIVARSGCKRNDDSSFPVFTPKPTPEPTPKPTGCTS

SEQ ID NO: 48228 - protein, 227 aa, Thermothielavioides terrestris
SGSGQSTRYWDCCKPSCAWPGKAAVSQPVYACDANFQRLSDFNVQSGCNGGSAYACADQTPWAVNDNLAYGFAATSIAGGSESSWCCACYALTFTSGPVAGKTMVVQSTSTGGDLGSNHFDIAMPGGGVGIFDGCSSQFGGLPGARYGGISSRDQCDSFPAPLKPGCQWRFDWFQNADNPTFTFQQVQCPAEIVARSGCKRNDDSSFPVFTPDPTPDPTPDPTGCTS

SEQ ID NO: 48229 - protein, 227 aa, Thermothielavioides terrestris
SGSGQSTRYWDCCKPSCAWPGKAAVSQPVYACDANFQRLSDFNVQSGCNGGSAYACADQTPWAVNDNLAYGFAATSIAGGSESSWCCACYALTFTSGPVAGKTMVVQSTSTGGDLGSNHFDIAMPGGGVGIFDGCSSQFGGLPGARYGGISSRDQCDSFPAPLKPGCQWRFDWFQNADNPTFTFQQVQCPAEIVARSGCKRNDDSSFPVFTPEPTPEPTPEPTGCTS

SEQ ID NO: 48230 - protein, 227 aa, Thermothielavioides terrestris
SGSGQSTRYWDCCKPSCAWPGKAAVSQPVYACDANFQRLSDFNVQSGCNGGSAYACADQTPWAVNDNLAYGFAATSIAGGSESSWCCACYALTFTSGPVAGKTMVVQSTSTGGDLGSNHFDIAMPGGGVGIFDGCSSQFGGLPGARYGGISSRDQCDSFPAPLKPGCQWRFDWFQNADNPTFTFQQVQCPAEIVARSGCKRNDDSSFPVFTPRPTPEPTPRPTGCTS

SEQ ID NO: 48231 - protein, 269 aa, Staphylotrichum coccosporum
ADGKSTRYWDCCKPSCSWPGKASVNQPVFACSANFTRISDPNVKSGCDGGTAYACADQTPWAVNDNFSYGFAATSISGGNEASWCCGCYELTFTSGPGAGKTMVVQSTSTGGDLGVNHFDLAMPGGGVGIFDGCSPQFGGLPGDRYGGVSSRSQCDSFPAPLKPGCYWRFDWFKNADNPTFTFRQVQCPSELVARTGCRRNDDGNFPVFTPPSGGQSSSSSSSSSAKPTSTTSTASTKATSTTSTTSTKATSTTSTASSQTSSSTGGGC

SEQ ID NO: 48232 - protein, 198 aa, Sordaria fimicola
GKSTRYWDCCKPSCAWSGKASVNRPVLACDANNNPLNDANVKSGCDGGSAYTCANNSPWAVNDNLAYGFAATKLSGGTESSWCCACYALTFTSGPVSGKTLVVQSTSTGGDLGSNHFDLNMPGGGVGLFDGCKREFGGLPGAQYGGISSRSECDSFPAALKPGCQWRFDWFKNADNPEFTFKQVQCPSELTSRTGCKR

SEQ ID NO: 48233 - protein, 223 aa, Thermothielavioides terrestris
SGSGQSTRYWDCCKPSCAWPGKAAVSQPVYACDANFQRLSDFNVQSGCNGGSAYSCADQTPWAVNDNLAYGFAATSIAGGSESSWCCACYALTFTSGPVAGKTMVVQSTSTGGDLGSNHFDIAMPGGGVGIFNGCSSQFGGLPGAQYGGISSRDQCDSFPAPLKPGCQWRFDWFQNADNPTFTFQQVQCPAEIVARSGCKRNDDSSFPVFTPEPTPEPTGCTS

SEQ ID NO: 48234 - protein, 233 aa, Thielavia terrestris
SGSGQSTRYWDCCKPSCAWPGKAAVSQPVYSCDANFQRLSDFNVQSGCNGGSAYACADQTPWAVNDNLAYGFAATSIAGGSESSWCCACYALTFTSGPVAGKTMVVQSTSTGGDLGSNHFDIAMPGGGVGIFDGCSSQFGGLPGDRYGGISSRDQCDSFPAPLKPGCYWRFDWFQNADNPTVTFQQVQCPAEIVARSGCKRNDDSSFPVFTPEPTPEPTPEPTPEPTPEPCTT

SEQ ID NO: 48235 - protein, 224 aa, Ascomycota
TLLAAAAGLPYTALAASGSGVSTRYWDCCKPSCAWSGKAAVSKPVTTCDKNDSPLADADAQSGCNGGPAFACTNNSPFAVNDNLAYGFAATALGGGTESSWCCACYALKFTSGPVAGKTLVVQSTNTGGDLGSNHFDLMIPGGGVGLFDGCTPEFGGIPGAQYGGVSSRAECDQMPEKLKAGCYWRFDWFLNADNPNLTFEQVKCPAALTAISGCVRQDDGSFP

SEQ ID NO: 48236 - protein, 257 aa, Staphylotrichum coccosporum
GVSTRYWDCCKPSCSWPGKASVNQPVFACSANFTRISDPNVKSGCDGGTAYACADQTPWAVNDNFSYGFAATSISGGSEASWCCGCYELTFTSGPVAGKTMVVQSTSTGGDLGTNHFDLAMPGGGVGIFDGCTPQFGGLAGDRYGGVSSRSQCDDFPAALKPGCYWRFDWFKNADNPTFTFRQVQCPSELVARTGCRRNDDGNFPVFTPPSGGQSSSSSSSSSAKPTSTSASTTSTKATSTTSTASSQTSSSTGGGC

SEQ ID NO: 48237 - protein, 257 aa, Staphylotrichum coccosporum
GKSTRYWDCCKPSCSWPGKASVNQPVFACSANFQRISDPNVKSGCDGGTAYACADQTPWAVNDNFSYGFAATSISGGNEASWCCGCYELTFTSGPVYGKTMVVQSTSTGGDLGTNHLDLAMPGGGVGIFDGCSEQFGGLAGDRYGGVSSRSECGSFPAALKPGCYWRFDWFKNADNPTFTFRQVQCPSELVARTGCRRNDDGNFPVFTPPSGGQGSSSSSSSSAKPTSTSTSTTSTKATSTTSTASSQTSSSTGGGC

SEQ ID NO: 48238 - protein, 318 aa, Thielavia terrestris. Staphylotrichum coccosporum. Chimeric. Synthetic construct
MRSTPVLRTTLAAALPLVASAASGSGQSTRYWDCCKPSCAWPGKAAVSQPVYACDANFQRLSDFNVQSGCNGGSAYSCADQTPWAVNDNLAYGFAATSIAGGSESSWCCACYALTFTSGPVAGKTMVVQSTSTGGDLGSNHFDIAMPGGGVGIFNGCSSQFGGLPGAQYGGISSRDQCDSFPAPLKPGCQWRFDWFQNADNPTFTFQQVQCPAEIVARSGCKRNDDGNFPVFTPPSGGQSSSSSSSSSAKPTSTSTSTTSTKATSTTSTASSQTSPSTGGGCAAQRWAQCGGIGFSGCTTCVSGTTCNKQNDYYSQCL

SEQ ID NO: 48239 - protein, 318 aa, Thielavia terrestris. Staphylotrichum coccosporum. Chimeric. Synthetic construct
MRSTPVLRTTLAAALPLVASAASGSGQSTRYWDCCKPSCAWPGKAAVSQPVYACDANFQRLSDFNVQSGCNGGSAYSCADQTPWAVNDNLAYGFAATSIAGGSESSWCCACYALTFTSGPVAGKTMVVQSTSTGGDLGSNHFDIAMPGGGVGIFNGCSSQFGGLPGAQYGGISSRDQCDSFPAPLKPGCQWRFDWFQNADNPTFTFQQVQCPAEIVARSGCKRNDDGNFPVFTPPSGGQSSSSSSSSSAKPTSTSTSTTSTKATSTTSTASSQTSSSTGGGCAAQRWAQCGGIGFSGCTTCVSGTTCNKQNDWYSQCL

SEQ ID NO: 48240 - protein, 318 aa, Thielavia terrestris. Staphylotrichum coccosporum. Chimeric. Synthetic construct
MRSTPVLRTTLAAALPLVASAASGSGQSTRYWDCCKPSCAWPGKAAVSQPVYACDANFQRLSDFNVQSGCNGGSAYSCADQTPWAVNDNLAYGFAATSIAGGSESSWCCACYALTFTSGPVAGKTMVVQSTSTGGDLGSNHFDIAMPGGGVGIFNGCSSQFGGLPGAQYGGISSRDQCDSFPAPLKPGCQWRFDWFQNADNPTFTFQQVQCPAEIVARSGCKRNDDGNFPVFTPPSGGQSSPSSPSSSAKPTSTSTSTTSTKATSTTSTASSQTSSSTGGGCAAQRWAQCGGIGFSGCTTCVSGTTCNKQNDYYSQCL

SEQ ID NO: 48241 - protein, 269 aa, Thermothielavioides terrestris
SGSGQSTRYWDCCKPSCAWPGKAAVSQPVYACDANFQRLSDFNVQSGCNGGSAYACADQTPWAVNDNLAYGFAATSIAGGSESSWCCACYALTFTSGPVAGKTMVVQSTSTGGDLGSNHFDIAMPGGGVGIFDGCSSQFGGLPGARYGGISSRDQCDSFPAPLKPGCQWRFDWFQNADNPTFTFQQVQCPAEIVARSGCKRNDDSSFPVFTPEPTPEPTPEPTPEPTPSPTGCTSQKWAQCGGIGFSGCTTCVSGTTCQKLNDYYSQCL

SEQ ID NO: 48242 - protein, 269 aa, Thermothielavioides terrestris
SGSGQSTRYWDCCKPSCAWPGKAAVSQPVYACDANFQRLSDFNVQSGCNGGSAYACADQTPWAVNDNLAYGFAATSIAGGSESSWCCACYALTFTSGPVAGKTMVVQSTSTGGDLGSNHFDIAMPGGGVGIFDGCSSQFGGLPGARYGGISSRDQCDSFPAPLKPGCQWRFDWFQNADNPTFTFQQVQCPAEIVARSGCKRNDDSSFPVFTPEPTPEPTPEPTPEPTPGPTGCTSQKWAQCGGIGFSGCTTCVSGTTCQKLNDYYSQCL

SEQ ID NO: 48243 - protein, 269 aa, Thermothielavioides terrestris
SGSGQSTRYWDCCKPSCAWPGKAAVSQPVYACDANFQRLSDFNVQSGCNGGSAYACADQTPWAVNDNLAYGFAATSIAGGSESSWCCACYALTFTSGPVAGKTMVVQSTSTGGDLGSNHFDIAMPGGGVGIFDGCSSQFGGLPGARYGGISSRDQCDSFPAPLKPGCQWRFDWFQNADNPTFTFQQVQCPAEIVARSGCKRNDDSSFPVFTPEPTPEPTPEPTPEPTPEPTGCTSQKWAQCGGIGFSGCTTCVSGTTCQKLNDYYSQCL

SEQ ID NO: 48244 - protein, 269 aa, Thermothielavioides terrestris
SGSGQSTRYWDCCKPSCAWPGKAAVSQPVYACDANFQRLSDFNVQSGCNGGSAYACADQTPWAVNDNLAYGFAATSIAGGSESSWCCACYALTFTSGPVAGKTMVVQSTSTGGDLGSNHFDIAMPGGGVGIFDGCSSQFGGLPGARYGGISSRDQCDSFPAPLKPGCQWRFDWFQNADNPTFTFQQVQCPAEIVARSGCKRNDDSSFPVFTPEPTPEPTPEPTPEPTPDPTGCTSQKWAQCGGIGFSGCTTCVSGTTCQKLNDYYSQCL

SEQ ID NO: 48245 - protein, 225 aa, Thermothielavioides terrestris
SGSGQSTRYWDCCKPSCAWPGKAAVSQPVYACDANFQRLSDFNVQSGCNGGSAYSCADQTPWAVNDNLAYGFAATSIAGGSESSWCCACYALTFTSGPVAGKTMVVQSTSTGGDLGSNHFDIAMPGGGVGIFNGCSSQFGGLPGAQYGGISSRDQCDSFPAPLKPGCQWRFDWFQNADNPTFTFQQVQCPAEIVARSGCKRNDDSSFPVFTTPTPTPTPTPGCTA

SEQ ID NO: 48246 - protein, 288 aa, Thermochaetoides thermophila
ADGKSTRYWDCCKPSCSWPGKASVNQPVYACDANFQRLSDFNVQSGCNGGSAYSCADQTPWAVNDNLAYGFAATSIAGGSESSWCCACYALTFTSGPVAGKTMVVQSTSTGGDLGSNHFDIAMPGGGVGIFNGCSSQFGGLPGAQYGGISSRDQCDSFPAPLKPGCQWRFDWFQNADNPTFTFQQVQCPAEIVARSGCKRNDDSSFPVFTPPSGDSPSSSSAAPTSTSTSQQPQQPTSSSSQASVPTSNPGGCTSQKWAQCGGIGFTGCTTCVSGTTCTKLNDWYSQC

SEQ ID NO: 48247 - protein, 294 aa, Acremonium thermophilum
LAVISAFLATARALDGKSTRYWDCCKPSCGWAGKASVNQPVFSCSADWQRISDFNAKSGCDGGNAYSCADQTPWAVNDNFSYGFAATAIAGGSEQSWCCACYALTFNSGPVAGKTMVVQSTSTGGDLGENHFDLAIPGGGVGIFNGCQSQFGGLPGAQYGGIQDRSQCSSFPAPLQPGCQWRFDWFQNADNPTFTFQRVQCPSELTSRTGCKRDDDANYPVFNPPSGNPSGGNPPGGNPPGTTTTRRPATTTGSSPGPTQSHYGQCGGIGYSGPTVCASGTTCQVLNPYYSQCL

SEQ ID NO: 48248 - protein, 309 aa, Thermochaetoides thermophila
MRSTPVLRTALAAALPFTVLAADGKSTRYWDCCKPSCLSPGNVQVSQNVFACDTNFNRIYDFGAKSGCEGGPAYSCADQTPWAVNDQFSYGFAATNIAGGNEASWCCACYKLTFTSGPVAGKVMVVQSTSTGGDLGNNHFDLNIPGGGVGIFDGCTPQFGGLPTERYGGISSRSQCDSFIDALKPGCYWRFDWFLNADNPNFTFERVQCPSELVARTGCKRNDDGNYPVFTPPSGDSPSSSSAAPTSTSTSQQPQQPRDSSSQASVPTSNPGGCTSQKWAGSGGIGFTGCSSNVSGTTCTKLNDWYSQC

SEQ ID NO: 48249 - protein, 309 aa, Thermochaetoides thermophila
MRSTPVLRTALAAALPFTVLAADGNSTRYWDCCKPSCLSPGNVQVSQNVFACDTNFNRIYDFGAKSGCEGGPAYSCQDQTPWAVNDQFSYGFAATNIAGGNEASWCCACYKLTFTSGPVAGKVMVVQSTSTGGDLGNNHFSLNIPGGGVGIFDGCTPQFGGLPGERYGGISSRSQCDSFTDALKPGCYWRFDWFLNADNPNFTFERVQCPSELVARTGCKRNDDGNYPVFTPPSGDSPSSSSAAPTSTSTSQQPQQPTSSSSQASVPTSNPGGCESQKWAQCGGIGFTGCQSGVSGTTCTKLNDWYSQC

SEQ ID NO: 48250 - protein, 309 aa, Thermochaetoides thermophila
MRSTPVLRTALAAALPFTVLAANGNSTRYWDCCKPSCLSPGNVQVSQNVFACDTNFNRIYDFGAKSYCEGGPAYSCADQTPWAVNDQFSYGFAATNIAGGNEASWCCACYKLTFTSGPVAGSVMVVQSTSTGGDLGNNHFSLNIPGGGVGIFDGCTPQFGPLPTERYGGISSRSQCDSFPDALKPGCYWRFDWTLNADNPNFTFERVQCPSELVARTGCKRNDDGNYPVFTPPSGDSPSSSSAAPTSTSTSQQPQQPTSSSSQASVPTSNPGGCTSQKWAQCGGIGFTGCTTCVSGTTCTKLNDWYSQC

SEQ ID NO: 48251 - protein, 309 aa, Thermochaetoides thermophila
MRSTPVLRTALAAALPFTVLAADGKSTRYWDCCKPSCLSPGNSEVSQNVFACDTNFNRIYDFGAKSGCEGGPAYSCEDQTPWAVNDQFSYGFAATNIAGGNEASWCCACYKLTFTSGPVAGSVMVVQSTSTGGDLGNNHFDLNIPGGGVGIFDGCTPQFGGLPTERYGGISSRSQCDSFTDALKPGCYWRFDWFLNADNPNFTFERVQCPSELVARTGCKRNDDGNYPVFTPPSGDSPSSSSAAPTSTSTSQQPQQPTDSSSQASVPTSNPGGCTSQKWAQCGGIAFTGCTTTVSGTTCTKLNDWYSQC

SEQ ID NO: 48252 - protein, 309 aa, Thermochaetoides thermophila
MRSTPVLRTALAAALPFTVLAADGNSTRYWDCCKPSCLSPGNVQVSQNVFACDRNFNRIYDFGAKTGCEGGPAYSCQDQTPWAVNDQFSYGFAATNIAGGNEASWCCACYKLTFTDGPVAGKVMVVQSTSTGGDLGNNHFDLNIPGGGVGIFDGCTPQFGKLPTERYGGISSRSQCDSFPDALKPGCYWRFDWFLNADNPNFTFERVQCPSELVARTGCKRNDDGNYPVFTPPSGDSPSSSSAAPTSTSTSQQPQQPTSSSSQASVPTSNPGGCTSQKWAQCGGIGFTGCTSGVSGTTCTKLNDWYSQC

SEQ ID NO: 48253 - protein, 309 aa, Thermochaetoides thermophila
MRSTPVLRTALAAALPGTVLAADGKSTRYWDCCKPSCLSPGNSEVSQNVFACDTNFNRIYDFGAKSGCEGGPAYSCQDQTPWAVNDQFSYGFAATNIAGGNEASWCCACYKLTFTEGPVAGAVMVVQSTSTGGDLGNNHFSLNIPGGGVGIFDGCTPQFGKLPTERYGGISSRSQCDSFTDALKPGCYWRFDWTLNADNPNFTFERVQCPSELVARTGCKRNDDGNYPVFTPPSGDSPSSSSAAPTSTSTSQQPQQPTSSSSQASVPTSNPGGCTSEKWAQCGGIGFTGCTTCVSGTTCTKLNDWYSQC

SEQ ID NO: 48254 - protein, 309 aa, Thermochaetoides thermophila
MRSTPVLRTALAAALPFTVLAANGNSTRYWDCCKPSCLSPGNSQVSQNVFACDTNFNRIYDFGAKSYCEGGPAYSCEDQTPWAVNDQFSYGFAATNIAGGNEASWCCACYKLTFTSGPVAGSVMVVQSTSTGGDLGNNHFDLNIPGGGVGIFDGCTPQFGGLPGERYGGISSRSQCDSFTDALKPGCYWRFDWFLNADNPNFTFERVQCPSELVARTGCKRNDDGNYPVFTPPSGDSPSSSSAAPTSTSTSQQPQQPTDSSSQASVPTSNPGGCTSQKWAQCGRIGFTGCTTCVSGTTCTKLNDWYSQC

SEQ ID NO: 48255 - protein, 309 aa, Thermochaetoides thermophila
MRSTPVLRTALAAALPFTVLAADGNSTRYWDCCKPSCLSPGNEEVSQNVFACDRNFNRIYDFGAKSGCEGGPAYSCADQTPWAVNDQFSYGFAATNIAGGNRASWCCACYKLTFTSGPVAGAVMVVQSTSTGGDLGNNHFSLNIPGGGVGIFDGCTPQFGKLPTERYGGISSRSQCDSFPDALKPGCYWRFDWTLNADNPNFTFERVQCPSELVARTGCKRNDDGNYPVFTPPSGDSPSSSSAAPTSTSTSQQPQQPRDSSSQASVPTSNPGGCTSQKWAECGGIGFTGCTTCVSGTTCTKLNDWYSQC

SEQ ID NO: 48256 - protein, 309 aa, Thermochaetoides thermophila
MRSTPVLRTALAAALPFTVLAANGNSTRYWDCCKPSCLSPGNEQVSQNVFACDTNFNRIYDFGAKTGCEGGPAYSCADQTPWAVNDQFSYGFAATNIAGGNEASWCCACYKLTFTEGPVAGSVMVVQSTSTGGDLGNNHFDLNIPGGGVGIFDGCTPQFGPLPGERYGGISSRSQCDSFPDALKPGCYWRFDWFLNADNPNFTFERVQCPSELVARTGCKRNDDGNYPVFTPPSGDSPSSSSAAPTSTSTSQQPQQPTDSSSQASVPTSNPGGCTSQKWAGCGGIGFTGCTTCVSGTTCTKLNDWYSQC

SEQ ID NO: 48257 - protein, 309 aa, Thermochaetoides thermophila
MRSTPVLRTALAAALPFTVLAANGKSTRYWDCCKPSCLSPGNVEVSQNVFACDRNFNRIYDFGAKSGCEGGPAYSCQDQTPWAVNDQFSYGFAATNIAGGNEASWCCACYKLTFTSGPVAGSVMVVQSTSTGGDLGNNHFSLNIPGGGVGIFDGCTPQFGGLPGERYGGISSRSQCDSFTDALKPGCYWRFDWFLNADNPNFTFERVQCPSELVARTGCKRNDDGNYPVFTPPSGDSPSSSSAAPTSTSTSQQPQQPTSSSSQASVPTSNPGGCTSQKWAQCGMIAFTGCTTCVSGTTCTKLNDWYSQC

SEQ ID NO: 48258 - protein, 309 aa, Thermochaetoides thermophila
MRSTPVLRTALAAALPFTVLAADGNSTRYWDCCKPSCLSPGNVQVSQNVFACDTNFNRIYDFGAKTYCEGGPAYSCQDQTPWAVNDQFSYGFAATNIAGGNEASWCCACYKLTFTSGPVAGSVMVVQSTSTGGDLGNNHFSLNIPGGGVGIFDGCTPQFGGLPGERYGGISSRSQCDSFPDALKPGCYWRFDWFLNADNPNFTFERVQCPSELVARTGCKRNDDGNYPVFTPPSGDSPSSSSAAPTSTSTSQQPQQPRSSSSQASVPTSNPGGCTSQKWAQSGGIGFTGCTTCVSGTTCTKLNDWYSQC

SEQ ID NO: 48259 - protein, 309 aa, Thermochaetoides thermophila
MRSTPVLRTALAAALPFTVLAADGKSTRYWDCCKPSCLSPGNVQVSQNVFACDRNFNRIYDFGAKTYCEGGPAYSCQDQTPWAVNDQFSYGFAATNIAGGNEASWCCACYKLTFTEGPVAGAVMVVQSTSTGGDLGNNHFDLNIPGGGVGIFDGCTPQFGKLPGERYGGISSRSQCDSFTDALKPGCYWRFDWFLNADNPNFTFERVQCPSELVARTGCKRNDDGNYPVFTPPSGDSPSSSSAAPTSTSTSQQPQQPSSSSSQASVPTSNPGGCTSQKWAQCGGIGFTGCTTGVSGTTCTKLNDWYSQC

SEQ ID NO: 48260 - protein, 309 aa, Thermochaetoides thermophila
MRSSPVLRTALAAALPLAALAADGKSTRYWDCCKPSCSWPGKASVNQPVYACDANFQRLSDFNVQSGCNGGSAYSCADQTPWAVNDNLAYGFAATSIAGGSESSWCCACYALTFTSGPVAGKTMVVQSTSTGGDLGSNHFDIAMPGGGVGIFNGCSSQFGGLPGAQYGGISSRDQCDSFPAPLKPGCQWRFDWFQNADNPTFTFQQVQCPAEIVARSGCKRNDDSSFPVFTPPSGDSPSSSSAAPTSTSTSQQPQQPTSSSSQASVPTSNPGGCTSQKWAQCGGIGFTGCTTCVSGTTCTKLNDWYSQC

SEQ ID NO: 48261 - protein, 309 aa, Thermochaetoides thermophila
MRSTPVLRTALAAALPFTVLAADGKSTRYWDCCKPSCLSPGNTEVSQNVFACDRNFNRIYDFGAKTGCEGGPAYSCADQTPWAVNDQFSYGFAATNIAGGNEASWCCACYKLTFTEGPVAGKVMVVQSTSTGGDLGNNHFDLNIPGGGVGIFDGCTPQFGPLPTERYGGISSRSQCDSFPDALKPGCYWRFDWTLNADNPNFTFERVQCPSELVARTGCKRNDDGNYPVFTPPSGDSPSSSSAAPTSTSTSQQPQQPTSSSSQASVPTSNPGGCTSQKWAKSGGIGFTGCTTCVSGTTCTKLNDWYSQC

SEQ ID NO: 48262 - protein, 268 aa, Thielavia terrestris
SGSGQSTRYWDCCKPSCAWPGKAAVSQPVYSCDANFQRLSDFNVQSGCNGGSAYACADQTPWAVNDNLAYGFAATSIAGGSESSWCCACYALTFTSGPVAGKTMVVQSTSTGGDLGSNHFDIAMPGGGVGIFDGCSSQFGGLPGDRYGGISSRDQCDSFPAPLKPGCYWRFDWFQNADNPTVTFQQVQCPAEIVARSGCKRNDDSSFPVFTPEPTPEPTPEPTPEPTPEPTGCTTQKWGQCGGIGYTGCTNCVAGTTCTQLNPWYHQC

SEQ ID NO: 48263 - protein, 268 aa, Thielavia terrestris
SGSGQSTRYWDCCKPSCAWPGKAAVSQPVYSCDANFQRLSDFNVQSGCNGGSAYACADQTPWAVNDNLAYGFAATSIAGGSESSWCCACYALTFTSGPVAGKTMVVQSTSTGGDLGSNHFDIAMPGGGVGIFDGCSSQFGGLPGDRYGGISSRDQCDSFPAPLKPGCYWRFDWFQNADNPTVTFQQVQCPAEIVARSGCKRNDDSSFPVFTPEPTPEPTPEPTPEPTPGPTGCTTQKWGQCGGIGYTGCTNCVAGTTCTQLNPWYHQC

SEQ ID NO: 48264 - protein, 268 aa, Thielavia terrestris
SGSGQSTRYWDCCKPSCAWPGKAAVSQPVYSCDANFQRLSDFNVQSGCNGGSAYACADQTPWAVNDNLAYGFAATSIAGGSESSWCCACYALTFTSGPVAGKTMVVQSTSTGGDLGSNHFDIAMPGGGVGIFDGCSSQFGGLPGDRYGGISSRDQCDSFPAPLKPGCYWRFDWFQNADNPTVTFQQVQCPAEIVARSGCKRNDDSSFPVFTPEPTPEPTPEPTPEPTPSPTGCTTQKWGQCGGIGYTGCTNCVAGTTCTQLNPWYHQC

SEQ ID NO: 48265 - protein, 268 aa, Thielavia terrestris
SGSGQSTRYWDCCKPSCAWPGKAAVSQPVYSCDANFQRLSDFNVQSGCNGGSAYACADQTPWAVNDNLAYGFAATSIAGGSESSWCCACYALTFTSGPVAGKTMVVQSTSTGGDLGSNHFDIAMPGGGVGIFDGCSSQFGGLPGDRYGGISSRDQCDSFPAPLKPGCYWRFDWFQNADNPTVTFQQVQCPAEIVARSGCKRNDDSSFPVFTPEPTPEPTPEPTPEPTPDPTGCTTQKWGQCGGIGYTGCTNCVAGTTCTQLNPWYHQC

SEQ ID NO: 48266 - protein, 279 aa, Acremonium thermophilum
GKSTRYWDCCKPTCGWAGKTPVNQPVFSCSADWQRISDFNANSGCSGGNAYSCADQTPWAVNEQFSYGFAATAISGGSEQSWCCACYALAFNSGPVAGKTMVVQSTSTGGDLGENHFDLAIPGGGVGIFNGCQSQFGGLPGAQYGGIQDRSQCSSFPAPLQPGCYWRFDWFQNADNPTFTFQRVQCPSELISRTGCKRDDDANYPVFNPPSGNPSGGNPPGGNPPGTTTTRRPATTTGSSPGPTQSRYGQCGGIGYSGPTVCASGTTCQVLNPYYSQCL

SEQ ID NO: 48267 - protein, 282 aa, Synthetic construct
GKSTRYWDCCKPSCGWAKKAPVNQPVFSCNANFQRLTDFDAKSGCEPGGVAYSCADQTPWAVNDDFAYGFAATSIAGSNEAGWCCACYELTFTSGPVAGKKMVVQSTSTGGDLGSNHFDLFIPGGGVGPFDGCTPQFGGLPGQRYGGISSRNECDRFPDALKPGCYWRFDWFKNADNPSFSFRQVQCPAELVARTGCRRNDDGNFPAVQIPSSSTSSPVGQPTSTSTTSTSTTSSPPVQPTTPSGCTAERWAQCGGNGWSGCTTCVAGSTCTKINDWYHQCL

SEQ ID NO: 48268 - protein, 282 aa, Synthetic construct
GKSTRYWDCCKPSCGWAKKAPVNQPVFSCNANFQRLTDFDAKSGCNPGGVAYKCADQTPWAVNDDFAYGFAATSIAGSNEAGWCCACYELTFTSGPVAGKKMVVQSTSTGGDLGSNHFDLFIPGGGVGPFDGCTPQFGGLPGQRYGGISSRNECDRFPDALKPGCYWRFDWFKNADNPSFSFRQVQCPAELVARTGCRRNDDGNFPAVQIPSSSTSSPVGQPTSTSTTSTSTTSSPPVQPTTPSGCTAERWAQCGGNGWSGCTTCVAGSTCTKINDWYHQCL

SEQ ID NO: 48269 - protein, 282 aa, Synthetic construct
GKSTRYWDCCKPSCGWAKKAPVNQPVFSCNANFQRLTDFDAKSGCEPGGVAYSCADQTPWAVNDDFAYGFAATSIAGSNEAGWCCACYELTFTSGPVAGKKMVVQSTSTGGDLGSNHFDLNIPGGGVGPFDGCTPQFGGLPGQRYGGISSRNECDRFPDALKPGCYWRFDWFKNADNPSFSFRQVQCPAELVARTGCRRNDDGNFPAVQIPSSSTSSPVGQPTSTSTTSTSTTSSPPVQPTTPSGCTAERWAQCGGNGWSGCTTCVAGSTCTKINDWYHQCL

SEQ ID NO: 48270 - protein, 282 aa, Synthetic construct
GKSTRYWDCCKPSCGWAKKAPVNQPVFSCNANFQRLTDFDAKSGCNPGGVAYLCADQTPWAVNDDFAFGFAATSIAGSNEAGWCCACYELTFTSGPVAGKKMVVQSTSTGGDLGSNHFDLFIPGGGVGIFDGCTPQFGGLPGQRYGGISSRNECDRFPDALKPGCYWRFDWFKNADNPSFSFRQVQCPAELVARTGCRRNDDGNFPAVQIPSSSTSSPVGQPTSTSTTSTSTTSSPPVQPTTPSGCTAERWAQCGGNGWSGCTTCVAGSTCTKINDWYHQCL

SEQ ID NO: 48271 - protein, 282 aa, Synthetic construct
GKSTRYWDCCKPSCGWAKKAPVNQPVFSCNANFQRLTDFDAKSGCEPGGVAYSCADQTPWAVNDDFAFGFAATSIAGSNEAGWCCACYELTFTSGPVAGKKMVVQSTSTGGDLGSNHFDLLIPGGGVGIFDGCTPQFGGLPGQRYGGISSRNECDRFPDALKPGCYWRFDWFKNADNPSFSFRQVQCPAELVARTGCRRNDDGNFPAVQIPSSSTSSPVGQPTSTSTTSTSTTSSPPVQPTTPSGCTAERWAQCGGNGWSGCTTCVAGSTCTKINDWYHQCL

SEQ ID NO: 48272 - protein, 282 aa, Synthetic construct
GKSTRYWDCCKPSCGWAKKAPVNQPVFSCNANFQRLTDFDAKSGCEPGGVAYKCADQTPWAVNDDFAYGFAATSIAGSNEAGWCCACYELTFTSGPVAGKKMVVQSTSTGGDLGSNHFDLNIPGGGVGIFDGCTPQFGGLPGQRYGGISSRNECDRFPDALKPGCYWRFDWFKNADNPSFSFRQVQCPAELVARTGCRRNDDGNFPAVQIPSSSTSSPVGQPTSTSTTSTSTTSSPPVQPTTPSGCTAERWAQCGGNGWSGCTTCVAGSTCTKINDWYHQCL

SEQ ID NO: 48273 - protein, 282 aa, Synthetic construct
GKSTRYWDCCKPSCGWAKKAPVNQPVFSCNANFQRLTDFDAKSGCNPGGVAYKCADQTPWAVNDDFAFGFAATSIAGSNEAGWCCACYELTFTSGPVAGKKMVVQSTSTGGDLGSNHFDLLIPGGGVGIFDGCTPQFGGLPGQRYGGISSRNECDRFPDALKPGCYWRFDWFKNADNPSFSFRQVQCPAELVARTGCRRNDDGNFPAVQIPSSSTSSPVGQPTSTSTTSTSTTSSPPVQPTTPSGCTAERWAQCGGNGWSGCTTCVAGSTCTKINDWYHQCL

SEQ ID NO: 48274 - protein, 282 aa, Synthetic construct
GKSTRYWDCCKPSCGWAKKAPVNQPVFSCNANFQRLTDFDAKSGCNPGGVAYLCADQTPWAVNDDFAFGFAATSIAGSNEAGWCCACYELTFTSGPVAGKKMVVQSTSTGGDLGSNHFDLNIPGGGVGIFDGCTPQFGGLPGQRYGGISSRNECDRFPDALKPGCYWRFDWFKNADNPSFSFRQVQCPAELVARTGCRRNDDGNFPAVQIPSSSTSSPVGQPTSTSTTSTSTTSSPPVQPTTPSGCTAERWAQCGGNGWSGCTTCVAGSTCTKINDWYHQCL

SEQ ID NO: 48275 - protein, 282 aa, Synthetic construct
GKSTRYWDCCKPSCGWAKKAPVNQPVFSCNANFQRLTDFDAKSGCNPGGVAYSCADQTPWAVNDDFAFGFAATSIAGSNEAGWCCACYELTFTSGPVAGKKMVVQSTSTGGDLGSNHFDLLIPGGGVGPFDGCTPQFGGLPGQRYGGISSRNECDRFPDALKPGCYWRFDWFKNADNPSFSFRQVQCPAELVARTGCRRNDDGNFPAVQIPSSSTSSPVGQPTSTSTTSTSTTSSPPVQPTTPSGCTAERWAQCGGNGWSGCTTCVAGSTCTKINDWYHQCL

SEQ ID NO: 48276 - protein, 282 aa, Synthetic construct
GKSTRYWDCCKPSCGWAKKAPVNQPVFSCNANFQRLTDFDAKSGCNPGGVAYMCADQTPWAVNDDFAFGFAATSIAGSNEAGWCCACYELTFTSGPVAGKKMVVQSTSTGGDLGSNHFDLLIPGGGVGIFDGCTPQFGGLPGQRYGGISSRNECDRFPDALKPGCYWRFDWFKNADNPSFSFRQVQCPAELVARTGCRRNDDGNFPAVQIPSSSTSSPVGQPTSTSTTSTSTTSSPPVQPTTPSGCTAERWAQCGGNGWSGCTTCVAGSTCTKINDWYHQCL

SEQ ID NO: 48277 - protein, 282 aa, Synthetic construct
GKSTRYWDCCKPSCGWAKKAPVNQPVFSCNANFQRLTDFDAKSGCEPGGVAYLCADQTPWAVNDDFAYGFAATSIAGSNEAGWCCACYELTFTSGPVAGKKMVVQSTSTGGDLGSNHFDLLIPGGGVGIFDGCTPQFGGLPGQRYGGISSRNECDRFPDALKPGCYWRFDWFKNADNPSFSFRQVQCPAELVARTGCRRNDDGNFPAVQIPSSSTSSPVGQPTSTSTTSTSTTSSPPVQPTTPSGCTAERWAQCGGNGWSGCTTCVAGSTCTKINDWYHQCL

SEQ ID NO: 48278 - protein, 282 aa, unidentified
GKSTRYWDCCKPSCGWAKKAPVNQPVFSCNANFQRLTDFDAKSGCEPGGVAYSCADQTPWAVNDDFAFGFAATSIAGSNEAGWCCACYELTFTSGPVAGKKMVVQSTSTGGDLGSNHFDLNIPGGGVGIFDGCTPQFGGLPGQRYGGISSRNECDRFPDALKPGCYWRFDWFKNADNPSFSFRQVQCPAELVARTGCRRNDDGNFPAVQIPSSSTSSPVGQPTSTSTTSTSTTSSPPVQPTTPSGCTAERWAQCGGNGWSGCTTCVAGSTCTKINDWYHQCL

SEQ ID NO: 48279 - protein, 282 aa, Synthetic construct
GKSTRYWDCCKPSCGWAKKAPVNQPVFSCNANFQRLTDFDAKSGCNPGGVAYMCADQTPWAVNDDFAYGFAATSIAGSNEAGWCCACYELTFTSGPVAGKKMVVQSTSTGGDLGSNHFDLLIPGGGVGPFDGCTPQFGGLPGQRYGGISSRNECDRFPDALKPGCYWRFDWFKNADNPSFSFRQVQCPAELVARTGCRRNDDGNFPAVQIPSSSTSSPVGQPTSTSTTSTSTTSSPPVQPTTPSGCTAERWAQCGGNGWSGCTTCVAGSTCTKINDWYHQCL

SEQ ID NO: 48280 - protein, 282 aa, Synthetic construct
GKSTRYWDCCKPSCGWAKKAPVNQPVFSCNANFQRLTDFDAKSGCNPGGVAYMCADQTPWAVNDDFAFGFAATSIAGSNEAGWCCACYELTFTSGPVAGKKMVVQSTSTGGDLGSNHFDLFIPGGGVGIFDGCTPQFGGLPGQRYGGISSRNECDRFPDALKPGCYWRFDWFKNADNPSFSFRQVQCPAELVARTGCRRNDDGNFPAVQIPSSSTSSPVGQPTSTSTTSTSTTSSPPVQPTTPSGCTAERWAQCGGNGWSGCTTCVAGSTCTKINDWYHQCL

SEQ ID NO: 48281 - protein, 282 aa, Synthetic construct
GKSTRYWDCCKPSCGWAKKAPVNQPVFSCNANFQRLTDFDAKSGCEPGGVAYLCADQTPWAVNDDFAYGFAATSIAGSNEAGWCCACYELTFTSGPVAGKKMVVQSTSTGGDLGSNHFDLNIPGGGVGIFDGCTPQFGGLPGQRYGGISSRNECDRFPDALKPGCYWRFDWFKNADNPSFSFRQVQCPAELVARTGCRRNDDGNFPAVQIPSSSTSSPVGQPTSTSTTSTSTTSSPPVQPTTPSGCTAERWAQCGGNGWSGCTTCVAGSTCTKINDWYHQCL

SEQ ID NO: 48282 - protein, 282 aa, Synthetic construct
GKSTRYWDCCKPSCGWAKKAPVNQPVFSCNANFQRLTDFDAKSGCEPGGVAYMCADQTPWAVNDDFAYGFAATSIAGSNEAGWCCACYELTFTSGPVAGKKMVVQSTSTGGDLGSNHFDLLIPGGGVGIFDGCTPQFGGLPGQRYGGISSRNECDRFPDALKPGCYWRFDWFKNADNPSFSFRQVQCPAELVARTGCRRNDDGNFPAVQIPSSSTSSPVGQPTSTSTTSTSTTSSPPVQPTTPSGCTAERWAQCGGNGWSGCTTCVAGSTCTKINDWYHQCL

SEQ ID NO: 48283 - protein, 282 aa, Synthetic construct
GKSTRYWDCCKPSCGWAKKAPVNQPVFSCNANFQRLTDFDAKSGCNPGGVAYSCADQTPWAVNDDFAFGFAATSIAGSNEAGWCCACYELTFTSGPVAGKKMVVQSTSTGGDLGSNHFDLNIPGGGVGPFDGCTPQFGGLPGQRYGGISSRNECDRFPDALKPGCYWRFDWFKNADNPSFSFRQVQCPAELVARTGCRRNDDGNFPAVQIPSSSTSSPVGQPTSTSTTSTSTTSSPPVQPTTPSGCTAERWAQCGGNGWSGCTTCVAGSTCTKINDWYHQCL

SEQ ID NO: 48284 - protein, 282 aa, Synthetic construct
GKSTRYWDCCKPSCGWAKKAPVNQPVFSCNANFQRLTDFDAKSGCNPGGVAYKCADQTPWAVNDDFAYGFAATSIAGSNEAGWCCACYELTFTSGPVAGKKMVVQSTSTGGDLGSNHFDLLIPGGGVGPFDGCTPQFGGLPGQRYGGISSRNECDRFPDALKPGCYWRFDWFKNADNPSFSFRQVQCPAELVARTGCRRNDDGNFPAVQIPSSSTSSPVGQPTSTSTTSTSTTSSPPVQPTTPSGCTAERWAQCGGNGWSGCTTCVAGSTCTKINDWYHQCL

SEQ ID NO: 48285 - protein, 282 aa, Synthetic construct
GKSTRYWDCCKPSCGWAKKAPVNQPVFSCNANFQRLTDFDAKSGCNPGGVAYMCADQTPWAVNDDFAYGFAATSIAGSNEAGWCCACYELTFTSGPVAGKKMVVQSTSTGGDLGSNHFDLFIPGGGVGPFDGCTPQFGGLPGQRYGGISSRNECDRFPDALKPGCYWRFDWFKNADNPSFSFRQVQCPAELVARTGCRRNDDGNFPAVQIPSSSTSSPVGQPTSTSTTSTSTTSSPPVQPTTPSGCTAERWAQCGGNGWSGCTTCVAGSTCTKINDWYHQCL

SEQ ID NO: 48286 - protein, 282 aa, Synthetic construct
GKSTRYWDCCKPSCGWAKKAPVNQPVFSCNANFQRLTDFDAKSGCNPGGVAYLCADQTPWAVNDDFAYGFAATSIAGSNEAGWCCACYELTFTSGPVAGKKMVVQSTSTGGDLGSNHFDLLIPGGGVGPFDGCTPQFGGLPGQRYGGISSRNECDRFPDALKPGCYWRFDWFKNADNPSFSFRQVQCPAELVARTGCRRNDDGNFPAVQIPSSSTSSPVGQPTSTSTTSTSTTSSPPVQPTTPSGCTAERWAQCGGNGWSGCTTCVAGSTCTKINDWYHQCL

SEQ ID NO: 48287 - protein, 282 aa, Synthetic construct
GKSTRYWDCCKPSCGWAKKAPVNQPVFSCNANFQRLTDFDAKSGCEPGGVAYMCADQTPWAVNDDFAYGFAATSIAGSNEAGWCCACYELTFTSGPVAGKKMVVQSTSTGGDLGSNHFDLNIPGGGVGIFDGCTPQFGGLPGQRYGGISSRNECDRFPDALKPGCYWRFDWFKNADNPSFSFRQVQCPAELVARTGCRRNDDGNFPAVQIPSSSTSSPVGQPTSTSTTSTSTTSSPPVQPTTPSGCTAERWAQCGGNGWSGCTTCVAGSTCTKINDWYHQCL

SEQ ID NO: 48288 - protein, 282 aa, Synthetic construct
GKSTRYWDCCKPSCGWAKKAPVNQPVFSCNANFQRLTDFDAKSGCNPGGVAYMCADQTPWAVNDDFAFGFAATSIAGSNEAGWCCACYELTFTSGPVAGKKMVVQSTSTGGDLGSNHFDLNIPGGGVGIFDGCTPQFGGLPGQRYGGISSRNECDRFPDALKPGCYWRFDWFKNADNPSFSFRQVQCPAELVARTGCRRNDDGNFPAVQIPSSSTSSPVGQPTSTSTTSTSTTSSPPVQPTTPSGCTAERWAQCGGNGWSGCTTCVAGSTCTKINDWYHQCL

SEQ ID NO: 48289 - protein, 282 aa, Synthetic construct
GKSTRYWDCCKPSCGWAKKAPVNQPVFSCNANFQRLTDFDAKSGCNPGGVAYLCADQTPWAVNDDFAYGFAATSIAGSNEAGWCCACYELTFTSGPVAGKKMVVQSTSTGGDLGSNHFDLNIPGGGVGPFDGCTPQFGGLPGQRYGGISSRNECDRFPDALKPGCYWRFDWFKNADNPSFSFRQVQCPAELVARTGCRRNDDGNFPAVQIPSSSTSSPVGQPTSTSTTSTSTTSSPPVQPTTPSGCTAERWAQCGGNGWSGCTTCVAGSTCTKINDWYHQCL

SEQ ID NO: 48290 - protein, 282 aa, Synthetic construct
GKSTRYWDCCKPSCGWAKKAPVNQPVFSCNANFQRLTDFDAKSGCNPGGVAYKCADQTPWAVNDDFAFGFAATSIAGSNEAGWCCACYELTFTSGPVAGKKMVVQSTSTGGDLGSNHFDLFIPGGGVGIFDGCTPQFGGLPGQRYGGISSRNECDRFPDALKPGCYWRFDWFKNADNPSFSFRQVQCPAELVARTGCRRNDDGNFPAVQIPSSSTSSPVGQPTSTSTTSTSTTSSPPVQPTTPSGCTAERWAQCGGNGWSGCTTCVAGSTCTKINDWYHQCL

SEQ ID NO: 48291 - protein, 282 aa, Synthetic construct
GKSTRYWDCCKPSCGWAKKAPVNQPVFSCNANFQRLTDFDAKSGCEPGGVAYLCADQTPWAVNDDFAYGFAATSIAGSNEAGWCCACYELTFTSGPVAGKKMVVQSTSTGGDLGSNHFDLFIPGGGVGIFDGCTPQFGGLPGQRYGGISSRNECDRFPDALKPGCYWRFDWFKNADNPSFSFRQVQCPAELVARTGCRRNDDGNFPAVQIPSSSTSSPVGQPTSTSTTSTSTTSSPPVQPTTPSGCTAERWAQCGGNGWSGCTTCVAGSTCTKINDWYHQCL

SEQ ID NO: 48292 - protein, 282 aa, Synthetic construct
GKSTRYWDCCKPSCGWAKKAPVNQPVFSCNANFQRLTDFDAKSGCNPGGVAYSCADQTPWAVNDDFAFGFAATSIAGSNEAGWCCACYELTFTSGPVAGKKMVVQSTSTGGDLGSNHFDLFIPGGGVGPFDGCTPQFGGLPGQRYGGISSRNECDRFPDALKPGCYWRFDWFKNADNPSFSFRQVQCPAELVARTGCRRNDDGNFPAVQIPSSSTSSPVGQPTSTSTTSTSTTSSPPVQPTTPSGCTAERWAQCGGNGWSGCTTCVAGSTCTKINDWYHQCL

SEQ ID NO: 48293 - protein, 282 aa, Synthetic construct
GKSTRYWDCCKPSCGWAKKAPVNQPVFSCNANFQRLTDFDAKSGCNPGGVAYMCADQTPWAVNDDFAYGFAATSIAGSNEAGWCCACYELTFTSGPVAGKKMVVQSTSTGGDLGSNHFDLNIPGGGVGPFDGCTPQFGGLPGQRYGGISSRNECDRFPDALKPGCYWRFDWFKNADNPSFSFRQVQCPAELVARTGCRRNDDGNFPAVQIPSSSTSSPVGQPTSTSTTSTSTTSSPPVQPTTPSGCTAERWAQCGGNGWSGCTTCVAGSTCTKINDWYHQCL

SEQ ID NO: 48294 - protein, 282 aa, Synthetic construct
GKSTRYWDCCKPSCGWAKKAPVNQPVFSCNANFQRLTDFDAKSGCNPGGVAYLCADQTPWAVNDDFAYGFAATSIAGSNEAGWCCACYELTFTSGPVAGKKMVVQSTSTGGDLGSNHFDLFIPGGGVGPFDGCTPQFGGLPGQRYGGISSRNECDRFPDALKPGCYWRFDWFKNADNPSFSFRQVQCPAELVARTGCRRNDDGNFPAVQIPSSSTSSPVGQPTSTSTTSTSTTSSPPVQPTTPSGCTAERWAQCGGNGWSGCTTCVAGSTCTKINDWYHQCL

SEQ ID NO: 48295 - protein, 282 aa, Synthetic construct
GKSTRYWDCCKPSCGWAKKAPVNQPVFSCNANFQRLTDFDAKSGCNPGGVAYLCADQTPWAVNDDFAFGFAATSIAGSNEAGWCCACYELTFTSGPVAGKKMVVQSTSTGGDLGSNHFDLLIPGGGVGIFDGCTPQFGGLPGQRYGGISSRNECDRFPDALKPGCYWRFDWFKNADNPSFSFRQVQCPAELVARTGCRRNDDGNFPAVQIPSSSTSSPVGQPTSTSTTSTSTTSSPPVQPTTPSGCTAERWAQCGGNGWSGCTTCVAGSTCTKINDWYHQCL

SEQ ID NO: 48296 - protein, 282 aa, Synthetic construct
GKSTRYWDCCKPSCGWAKKAPVNQPVFSCNANFQRLTDFDAKSGCEPGGVAYKCADQTPWAVNDDFAYGFAATSIAGSNEAGWCCACYELTFTSGPVAGKKMVVQSTSTGGDLGSNHFDLLIPGGGVGIFDGCTPQFGGLPGQRYGGISSRNECDRFPDALKPGCYWRFDWFKNADNPSFSFRQVQCPAELVARTGCRRNDDGNFPAVQIPSSSTSSPVGQPTSTSTTSTSTTSSPPVQPTTPSGCTAERWAQCGGNGWSGCTTCVAGSTCTKINDWYHQCL

SEQ ID NO: 48297 - protein, 282 aa, Synthetic construct
GKSTRYWDCCKPSCGWAKKAPVNQPVFSCNANFQRLTDFDAKSGCEPGGVAYKCADQTPWAVNDDFAYGFAATSIAGSNEAGWCCACYELTFTSGPVAGKKMVVQSTSTGGDLGSNHFDLFIPGGGVGIFDGCTPQFGGLPGQRYGGISSRNECDRFPDALKPGCYWRFDWFKNADNPSFSFRQVQCPAELVARTGCRRNDDGNFPAVQIPSSSTSSPVGQPTSTSTTSTSTTSSPPVQPTTPSGCTAERWAQCGGNGWSGCTTCVAGSTCTKINDWYHQCL

SEQ ID NO: 48298 - protein, 282 aa, Synthetic construct
GKSTRYWDCCKPSCGWAKKAPVNQPVFSCNANFQRLTDFDAKSGCEPGGVAYMCADQTPWAVNDDFAYGFAATSIAGSNEAGWCCACYELTFTSGPVAGKKMVVQSTSTGGDLGSNHFDLFIPGGGVGIFDGCTPQFGGLPGQRYGGISSRNECDRFPDALKPGCYWRFDWFKNADNPSFSFRQVQCPAELVARTGCRRNDDGNFPAVQIPSSSTSSPVGQPTSTSTTSTSTTSSPPVQPTTPSGCTAERWAQCGGNGWSGCTTCVAGSTCTKINDWYHQCL

SEQ ID NO: 48299 - protein, 282 aa, Synthetic construct
GKSTRYWDCCKPSCGWAKKAPVNQPVFSCNANFQRLTDFDAKSGCNPGGVAYKCADQTPWAVNDDFAFGFAATSIAGSNEAGWCCACYELTFTSGPVAGKKMVVQSTSTGGDLGSNHFDLNIPGGGVGIFDGCTPQFGGLPGQRYGGISSRNECDRFPDALKPGCYWRFDWFKNADNPSFSFRQVQCPAELVARTGCRRNDDGNFPAVQIPSSSTSSPVGQPTSTSTTSTSTTSSPPVQPTTPSGCTAERWAQCGGNGWSGCTTCVAGSTCTKINDWYHQCL

SEQ ID NO: 48300 - protein, 282 aa, Synthetic construct
GKSTRYWDCCKPSCGWAKKAPVNQPVFSCNANFQRLTDFDAKSGCNPGGVAYKCADQTPWAVNDDFAYGFAATSIAGSNEAGWCCACYELTFTSGPVAGKKMVVQSTSTGGDLGSNHFDLNIPGGGVGPFDGCTPQFGGLPGQRYGGISSRNECDRFPDALKPGCYWRFDWFKNADNPSFSFRQVQCPAELVARTGCRRNDDGNFPAVQIPSSSTSSPVGQPTSTSTTSTSTTSSPPVQPTTPSGCTAERWAQCGGNGWSGCTTCVAGSTCTKINDWYHQCL

SEQ ID NO: 48301 - protein, 282 aa, Synthetic construct
GKSTRYWDCCKPSCGWAKKAPVNQPVFSCNANFQRLTDFDAKSGCEPGGVAYSCADQTPWAVNDDFAFGFAATSIAGSNEAGWCCACYELTFTSGPVAGKKMVVQSTSTGGDLGSNHFDLFIPGGGVGIFDGCTPQFGGLPGQRYGGISSRNECDRFPDALKPGCYWRFDWFKNADNPSFSFRQVQCPAELVARTGCRRNDDGNFPAVQIPSSSTSSPVGQPTSTSTTSTSTTSSPPVQPTTPSGCTAERWAQCGGNGWSGCTTCVAGSTCTKINDWYHQCL

SEQ ID NO: 48302 - protein, 282 aa, Synthetic construct
GKSTRYWDCCKPSCGWAKKAPVNQPVFSCNANFQRLTDFDAKSGCEPGGVAYSCADQTPWAVNDDFAYGFAATSIAGSNEAGWCCACYELTFTSGPVAGKKMVVQSTSTGGDLGSNHFDLLIPGGGVGPFDGCTPQFGGLPGQRYGGISSRNECDRFPDALKPGCYWRFDWFKNADNPSFSFRQVQCPAELVARTGCRRNDDGNFPAVQIPSSSTSSPVGQPTSTSTTSTSTTSSPPVQPTTPSGCTAERWAQCGGNGWSGCTTCVAGSTCTKINDWYHQCL

SEQ ID NO: 48303 - protein, 429 aa, Humicola hyalothermophila
MTRSVAIFGLASLLLGHTANGQKPGESPEVHPKLTTFRCSKQEGCRPATNYVVLDSLTHWVHQVGSNLGCGDWGSKPNETVCPDVESCAENCVMEGISDYSQYGVTTQDSSLRLQQILDGRVVSPRVYLLDETEDRYEMMHLTGQEFTFDVDATKLPCGMNSALYLSEMDPTGARSELNPGGAYYGTGYCDAQCFVTPFINGLGNVEGKGSCCNEMDIWEANSRATHVAPHTCNKTGLYLCEGAECEHDGVCDKDGCAWNPYRVNVTDYYGLGDGFRVDTTRPFSVVTQFPDDGTGKLQRIHRLYVQDGRVIEAHVVDVPGLPQTDSLTDEFCAATGAAKYLELGGTEGMGDAMTRGMVLAMSIWWDESGFMNWLDSGEAGPCNATEGDPAVIVDVEPNPEVTYSNLRWGEIGSTFEEEEEEDGCKGKG

SEQ ID NO: 48304 - protein, 226 aa, Fusarium oxysporum
TLLALAGPLAVSAASGSGHSTRYWDCCKPSCSWSGKAAVNAPALTCDKNDNPISNTNAVNGCEGGGSAYACTNYSPWAVNDELAYGFAATKISGGSEASWCCACYALTFTSGPVKGKKMIVQSTNTGGDLGDNHFDLMMPGGGVGIFDGCTSEFGKALGGAQYGGISSRSECDSFPELLKDGCHWRFDWFENADNPDFTFEQVQCPKALLDISGCKRDDDSSFPAY

SEQ ID NO: 48305 - protein, 231 aa, Thermothielavioides terrestris
SGSGQSTRYWDCCKPSCAWPGKAAVSQPVYACDANFQRLSDFNVQSGCNGGSAYSCADQTPWAVNDNLAYGFAATSIAGGSESSWCCACYALTFTSGPVAGKTMVVQSTSTGGDLGSNHFDIAMPGGGVGIFNGCSSQFGGLPGAQYGGISSRDQCDSFPAPLKPGCQWRFDWFQNADNPTFTFQQVQCPAEIVARSGCKRNDDSSFPVFTPEPTPEPTPEPTPEPTGCTS

SEQ ID NO: 48306 - protein, 231 aa, Thermothielavioides terrestris
SGSGQSTRYWDCCKPSCAWPGKAAVSQPVYACDANFQRLSDFNVQSGCNGGSAYACADQTPWAVNDNLAYGFAATSIAGGSESSWCCACYALTFTSGPVAGKTMVVQSTSTGGDLGSNHFDIAMPGGGVGIFDGCSSQFGGLPGARYGGISSRDQCDSFPAPLKPGCQWRFDWFQNADNPTFTFQQVQCPAEIVARSGCKRNDDSSFPVFTPEPTPRPTPEPTPRPTGCTA

SEQ ID NO: 48307 - protein, 231 aa, Thermothielavioides terrestris
SGSGQSTRYWDCCKPSCAWPGKAAVSQPVYACDANFQRLSDFNVQSGCNGGSAYACADQTPWAVNDNLAYGFAATSIAGGSESSWCCACYALTFTSGPVAGKTMVVQSTSTGGDLGSNHFDIAMPGGGVGIFDGCSSQFGGLPGARYGGISSRDQCDSFPAPLKPGCQWRFDWFQNADNPTFTFQQVQCPAEIVARSGCKRNDDSSFPVFTPKPTPEPTPKPTPEPTGCTA

SEQ ID NO: 48308 - protein, 231 aa, Thermothielavioides terrestris
SGSGQSTRYWDCCKPSCAWPGKAAVSQPVYACDANFQRLSDFNVQSGCNGGSAYACADQTPWAVNDNLAYGFAATSIAGGSESSWCCACYALTFTSGPVAGKTMVVQSTSTGGDLGSNHFDIAMPGGGVGIFDGCSSQFGGLPGAQYGGISSRDECDSFPEPLKPGCQWRFDWFQNADNPTFTFQQVQCPAEIVARSGCKRNDDSSFPVFTPEPTPEPTPEPTPEPTGCTA

SEQ ID NO: 48309 - protein, 231 aa, Thermothielavioides terrestris
SGSGQSTRYWDCCKPSCAWPGKAAVSQPVYACDANFQRLSDFNVQSGCNGGSAYACADQTPWAVNDNLAYGFAATSIAGGSESSWCCACYALTFTSGPVAGKTMVVQSTSTGGDLGSNHFDIAMPGGGVGIFNGCSSQFGGLPGARYGGISSRDQCDSFPAPLKPGCQWRFDWFQNADNPTFTFQQVQCPAEIVARSGCKRNDDSSFPVFTPEPTPEPTPEPTPEPTGCTS

SEQ ID NO: 48310 - protein, 231 aa, Thermothielavioides terrestris
SGSGQSTRYWDCCKPSCAWPGKAAVSQPVYACDANFQRLSDFNVQSGCNGGSAYACADQTPWAVNDNLAYGFAATSIAGGSESSWCCACYALTFTSGPVAGKTMVVQSTSTGGDLGSNHFDIAMPGGGVGIFDGCSSQFGGLPGARYGGISSRDQCDSFPAPLKPGCQWRFDWFQNADNPTFTFQQVQCPAEIVARSGCKRNDDSSFPVFTPEPTPKPTPEPTPKPTGCTA

SEQ ID NO: 48311 - protein, 231 aa, Thermothielavioides terrestris
SGSGQSTRYWDCCKPSCAWPGKAAVSQPVYACDANFQRLSDFNVQSGCNGGSAYACADQTPWAVNDNLAYGFAATSIAGGSESSWCCACYALTFTSGPVAGKTMVVQSTSTGGDLGSNHFDIAMPGGGVGIFDGCSSQFGGLPGARYGGISSRDQCDSFPAPLKPGCQWRFDWFQNADNPTFTFQQVQCPAEIVARSGCKRNDDSSFPVFTPEPTPEPTPEPTPEPTGCTA

SEQ ID NO: 48312 - protein, 231 aa, Thermothielavioides terrestris
SGSGQSTRYWDCCKPSCAWPGKAAVSQPVYACDANFQRLSDFNVQSGCNGGSAYACADQTPWAVNDNLAYGFAATSIAGGSESSWCCACYALTFTSGPVAGKTMVVQSTSTGGDLGSNHFDIAMPGGGVGIFDGCSSQFGGLPGARYGGISSRDQCDSFPAPLKPGCQWRFDWFQNADNPTFTFQQVQCPAEIVARSGCKRNDDSSFPVFTPEPTPQPTPEPTPQPTGCTA

SEQ ID NO: 48313 - protein, 273 aa, Acremonium thermophilum
LAVISAFLATARALDGKSTRYWDCCKPSCGWAGKASVNQPVFSCSADWQRISDFNAKSGCDGGSAYSCADQTPWAVNDNFSYGFAATAIAGGSESSWCCACYALTFNSGPVAGKTMVVQSTSTGGDLGSNQFDLAIPGGGVGIFNGCASQFGGLPGAQYGGISDRSQCSSFPAPLQPGCQWRFDWFQNADNPTFTFQRVQCPSELTSRTGCKRDDDASYPVFNPPSVPGLDGSNPGNPTTTVVPPASTSTSRPTSSTSSPVSTPTGQPGGCTT

SEQ ID NO: 48314 - protein, 277 aa, Thermothielavioides terrestris
SGSGQSTRYWDCCKPSCAWPGKAAVSQPVYSCDANFQRLSDFNVQSGCNGGSAYACADQTPWAVNDNLAYGFAATSIAGGSESSWCCACYALTFTSGPVAGKTMVVQSTSTGGDLGSNHFDIAMPGGGVGIFDGCSSQFGGLPGARYGGISSRDQCDSFPAPLKPGCYWRFDWFQNADNPTFTFQQVQCPAEIVARSGCRRNDDSSFPVFTPPSGGNGGTGTPTSTAPGSGQTSPGGGSGCTSQKWAQCGGIGFSGCTTCVSGTTCQKLNDYYSQCL

SEQ ID NO: 48315 - protein, 227 aa, Thermothielavioides terrestris
SGSGQSTRYWDCCKPSCAWPGKAAVSQPVYACDANFQRLSDFNVQSGCNGGSAYACADQTPWAVNDNLAYGFAATSIAGGSESSWCCACYALTFTSGPVAGKTMVVQSTSTGGDLGSNHFDIAMPGGGVGIFNGCSSQFGGLPGARYGGISSRDQCDSFPAPLKPGCQWRFDWFQNADNPTFTFQQVQCPAEIVARSGCKRNDDSSFPVFTPEPTPEPTPEPTGCTS

SEQ ID NO: 48316 - protein, 227 aa, Thermothielavioides terrestris
SGSGQSTRYWDCCKPSCAWPGKAAVSQPVYACDANFQRLSDFNVQSGCNGGSAYSCADQTPWAVNDNLAYGFAATSIAGGSESSWCCACYALTFTSGPVAGKTMVVQSTSTGGDLGSNHFDIAMPGGGVGIFNGCSSQFGGLPGAQYGGISSRDQCDSFPAPLKPGCQWRFDWFQNADNPTFTFQQVQCPAEIVARSGCKRNDDSSFPVFTPEPTPEPTPEPTGCTS

SEQ ID NO: 48317 - protein, 269 aa, Thermothielavioides terrestris
SGSGQSTRYWDCCKPSCAWPGKAAVSQPVYACDANFQRLSDFNVQSGCNGGSAYACADQTPWAVNDNLAYGFAATSIAGGSESSWCCACYALTFTSGPVAGKTMVVQSTSTGGDLGSNHFDIAMPGGGVGIFDGCSSQFGGLPGARYGGISSRDQCDSFPAPLKPGCQWRFDWFQNADNPTFTFQQVQCPAEIVARSGCKRNDDSSFPVFTPEPTPEPTPEPTPEPTPRPTTCTSQKWAQCGGIGFSGCTTCVSGTTCQKLNDYYSQCL

SEQ ID NO: 48318 - protein, 269 aa, Thermothielavioides terrestris
SGSGQSTRYWDCCKPSCAWPGKAAVSQPVYACDANFQRLSDFNVQSGCNGGSAYACADQTPWAVNDNLAYGFAATSIAGGSESSWCCACYALTFTSGPVAGKTMVVQSTSTGGDLGSNHFDIAMPGGGVGIFDGCSSQFGGLPGARYGGISSRDQCDSFPAPLKPGCQWRFDWFQNADNPTFTFQQVQCPAEIVARSGCKRNDDSSFPVFTPEPTPEPTPEPTPEPTPEPTTCTSQKWAQCGGIGFSGCTTCVSGTTCQKLNDYYSQCL

SEQ ID NO: 48319 - protein, 292 aa, Thermochaetoides thermophila
MRSTPVLRTALAAALPFTVLAADGKSTRYWDCCKPSCLSPGNVQVSQNVFACDRNFNRIYDFGAKSGCEGGPAYSCADQTPWAVNDQFSYGFAATNIAGGNEASWCCACYKLTFTSGPVAGKVMVVQSTSTGGDLGNNHFDLNIPGGGVGIFDGCTPQFGGLPGERYGGISSRSQCDSFPDALKPGCYWRFDWFLNADNPNFTFERVQCPSELVGNGGIGIDGNYAPGSGQISDGGGSQQPQQPTSSSSQASVSTSNPGGCTSQKQAQCGYIGFTCVSGTTCTKLNDWYSQC

SEQ ID NO: 48320 - protein, 318 aa, Thielavia terrestris. Staphylotrichum coccosporum. Chimeric. Synthetic construct
MRSTPVLRTTLAAALPLVASAASGSGQSTRYWDCCKPSCAWPGKAAVSQPVYACDANFQRLSDFNVQSGCNGGSAYSCADQTPWAVNDNLAYGFAATSIAGGSESSWCCACYALTFTSGPVAGKTMVVQSTSTGGDLGSNHFDIAMPGGGVGIFNGCSSQFGGLPGAQYGGISSRDQCDSFPAPLKPGCQWRFDWFQNADNPTFTFQQVQCPAEIVARSGCKRNDDGNFPVFTPPSGGQSSSSSSSSSAKPTSTSTSNTSTKATSTNSTASSQTSSSTGGGCAAQRWAQCGGIGFSGCTTCVSGTTCNKQNDYYSQCL

SEQ ID NO: 48321 - protein, 318 aa, Thielavia terrestris. Staphylotrichum coccosporum. Chimeric. Synthetic construct
MRSTPVLRTTLAAALPLVASAASGSGQSTRYWDCCKPSCAWPGKAAVSQPVYACDANFQRLSDFNVQSGCNGGSAYSCADQTPWAVNDNLAYGFAATSIAGGSESSWCCACYALTFTSGPVAGKTMVVQSTSTGGDLGSNHFDIAMPGGGVGIFNGCSSQFGGLPGAQYGGISSRDQCDSFPAPLKPGCQWRFDWFQNADNPTFTFQQVQCPAEIVARSGCKRNDDGNFPVFTPPSGGQSSSSSSSSSAKPTSTSTSTTSTKATSTTSTASSQTSSSTGGGCAAQRWAQCGGIGYSGCTTCVSGTTCNKQNDYYSQCL

SEQ ID NO: 48322 - protein, 318 aa, Thielavia terrestris. Staphylotrichum coccosporum. Chimeric. Synthetic construct
MRSTPVLRTTLAAALPLVASAASGSGQSTRYWDCCKPSCAWPGKAAVSQPVYACDANFQRLSDFNVQSGCNGGSAYSCADQTPWAVNDNLAYGFAATSIAGGSESSWCCACYALTFTSGPVAGKTMVVQSTSTGGDLGSNHFDIAMPGGGVGIFNGCSSQFGGLPGAQYGGISSRDQCDSFPAPLKPGCQWRFDWFQNADNPTFTFQQVQCPAEIVARSGCKRNDDGNFPVFTPPSGGQSSSSSSSSSAKPTSTSTSTTSTKATSTTSTASSQTSSSTGGGCAAQRWAQCGGIGFSGCTTCVSGTTCNKQNDYYSQCL

SEQ ID NO: 48323 - protein, 226 aa, Thermothielavioides terrestris
SGSGQSTRYWDCCKPSCAWPGKAAVSQPVYACDANFQRLSDFNVQSGCNGGSAYSCADQTPWAVNDNLAYGFAATSIAGGSESSWCCACYALTFTSGPVAGKTMVVQSTSTGGDLGSNHFDIAMPGGGVGIFNGCSSQFGGLPGAQYGGISSRDQCDSFPAPLKPGCQWRFDWFQNADNPTFTFQQVQCPAEIVARSGCKRNDDSSFPVFTPPPPPPPPPPPGCTS

SEQ ID NO: 48324 - protein, 242 aa, Thermothielavioides terrestris
SGSGQSTRYWDCCKPSCAWPGKAAVSQPVYACDANFQRLSDFNVQSGCNGGSAYACADQTPWAVNDNLAYGFAATSIAGGSESSWCCACYALTFTSGPVAGKTMVVQSTSTGGDLGSNHFDIAMPGGGVGIFDGCSSQFGGLPGARYGGISSRDQCDSFPAPLKPGCQWRFDWFQNADNPTFTFQQVQCPAEIVARSGCKRNDDSSFPVFTTPTTPTTPTTPTGCTSQKWAQCGGIGFSGCT

SEQ ID NO: 48325 - protein, 268 aa, Thermothielavioides terrestris
SGSGQSTRYWDCCKPSCAWPGKAAVSQPVYACDANFQRLSDFNVQSGCNGGSAYACADQTPWAVNDNLAYGFAATSIAGGSESSWCCACYALTFTSGPVAGKTMVVQSTSTGGDLGSNHFDIAMPGGGVGIFDGCSSQFGGLPGARYGGISSRDQCDSFPAPLKPGCQWRFDWFQNADNPTFTFQQVQCPAEIVARSGCKRNDDSSFPVFTPEPTPEPTPEPTPEPTPETGCTSQKWAQCGGIGFSGCTTCVSGTTCQKLNDYYSQCL

SEQ ID NO: 48326 - protein, 268 aa, Thermothielavioides terrestris
SGSGQSTRYWDCCKPSCAWPGKAAVSQPVYACDANFQRLSDFNVQSGCNGGSAYACADQTPWAVNDNLAYGFAATSIAGGSESSWCCACYALTFTSGPVAGKTMVVQSTSTGGDLGSNHFDIAMPGGGVGIFDGCSSQFGGLPGARYGGISSRDQCDSFPAPLKPGCQWRFDWFQNADNPTFTFQQVQCPAEIVARSGCKRNDDSSFPVFTPEPTPEPTPEPTPEPTPEPTCTSQKWAQCGGIGFSGCTTCVSGTTCQKLNDYYSQCL

SEQ ID NO: 48327 - protein, 269 aa, Thermothielavioides terrestris
SGSGQSTRYWDCCKPSCAWPGKAAVSQPVYACDANFQRLSDFNVQSGCNGGSAYACADQTPWAVNDNLAYGFAATSIAGGSESSWCCACYALTFTSGPVAGKTMVVQSTSTGGDLGSNHFDIAMPGGGVGIFDGCSSQFGGLPGARYGGISSRDQCDSFPAPLKPGCQWRFDWFQNADNPTFTFQQVQCPAEIVARSGCKRNDDSSFPVFTPEPTPEPTPEPTPEPTPEPTDCTSQKWAQCGGIGFSGCTTCVSGTTCQKLNDYYSQCL

SEQ ID NO: 48328 - protein, 269 aa, Thermothielavioides terrestris
SGSGQSTRYWDCCKPSCAWPGKAAVSQPVYACDANFQRLSDFNVQSGCNGGSAYSCADQTPWAVNDNLAYGFAATSIAGGSESSWCCACYALTFTSGPVAGKTMVVQSTSTGGDLGSNHFDIAMPGGGVGIFNGCSSQFGGLPGAQYGGISSRDQCDSFPAPLKPGCQWRFDWFQNADNPTFTFQQVQCPAEIVARSGCKRNDDSSFPVFTPEPTPEPTPEPTPEPTPEPTGCTSQKWAQCGGIGFSGCTTCVSGTTCQKLNDYYSQCL

SEQ ID NO: 48329 - protein, 268 aa, Thielavia terrestris
SGSGQSTRYWDCCKPSCAWPGKAAVSQPVYSCDANFQRLSDFNVQSGCNGGSAYACADQTPWAVNDNLAYGFAATSIAGGSESSWCCACYALTFTSGPVAGKTMVVQSTSTGGDLGSNHFDIAMPGGGVGIFDGCSSQFGGLPGDRYGGISSRDQCDSFPAPLKPGCYWRFDWFQNADNPTVTFQQVQCPAEIVARSGCKRNDDSSFPVFTPEPTPEPTPEPTPEPTPRPTTCTTQKWGQCGGIGYTGCTNCVAGTTCTQLNPWYHQC

SEQ ID NO: 48330 - protein, 269 aa, Thermothielavioides terrestris
SGSGQSTRYWDCCKPSCAWPGKAAVSQPVYACDANFQRLSDFNVQSGCNGGSAYACADQTPWAVNDNLAYGFAATSIAGGSESSWCCACYALTFTSGPVAGKTMVVQSTSTGGDLGSNHFDIAMPGGGVGIFNGCSSQFGGLPGARYGGISSRDQCDSFPAPLKPGCQWRFDWFQNADNPTFTFQQVQCPAEIVARSGCKRNDDSSFPVFTPEPTPEPTPEPTPEPTPEPTGCTSQKWAQCGGIGFSGCTTCVSGTTCQKLNDYYSQCL

SEQ ID NO: 48331 - protein, 309 aa, Thermochaetoides thermophila
MRSTPVLRTALAAALPFTVLAANGNSTRYWDCCKPSCLSPGNVQVSQNVFACDTNFNRIYDFGAKSGCEGGPAYSCADQTPWAVNDQFSYGFAATNIAGGNEASWCCACYKLTFTDGPVAGKVMVVQSTSTGGDLGNNHFSLNIPGGGVGIFDGCTPQFGKLPGERYGGISSRSQCDSFTDALKPGCYWRFDWTLNADNPNFTFERVQCPSELVARTGCKRNDDGNYPVFTPPSGDSPSSSSAAPTSTSTSQQPQQPSDSSSQASVPTSNPGGCTSQKWAQCGMIGFTGCQSCVSGTTCTKLNDWYSQC

SEQ ID NO: 48332 - protein, 309 aa, Thermochaetoides thermophila
MRSTPVLRTALAAALPGTVLAADGNSTRYWDCCKPSCLSPGNSEVSQNVFACDRNFNRIYDFGAKSGCEGGPAYSCADQTPWAVNDQFSYGFAATNIAGGNQASWCCACYKLTFTDGPVAGKVMVVQSTSTGGDLGNNHFSLNIPGGGVGIFDGCTPQFGGLPGERYGGISSRSQCDSFTDALKPGCYWRFDWFLNADNPNFTFERVQCPSELVARTGCKRNDDGNYPVFTPPSGDSPSSSSAAPTSTSTSQQPQQPTSSSSQASVPTSNPGGCTSQKWAGCGGIGFTGCQSNVSGTTCTKLNDWYSQC

SEQ ID NO: 48333 - protein, 309 aa, Thermochaetoides thermophila
MRSTPVLRTALAAALPFTVLAADGNSTRYWDCCKPSCLSPGNSEVSQNVFACDTNFNRIYDFGAKSGCEGGPAYSCADQTPWAVNDQFSYGFAATNIAGGNEASWCCACYKLTFTDGPVAGSVMVVQSTSTGGDLGNNHFSLNIPGGGVGIFDGCTPQFGGLPGERYGGISSRSQCDSFTDALKPGCYWRFDWFLNADNPNFTFERVQCPSELVARTGCKRNDDGNYPVFTPPSGDSPSSSSAAPTSTSTSQQPQQPRSSSSQASVPTSNPGGCTSEKWAQCGMIGFTGCQSTVSGTTCTKLNDWYSQC

SEQ ID NO: 48334 - protein, 309 aa, Thermochaetoides thermophila
MRSTPVLRTALAAALPFTVLAADGKSTRYWDCCKPSCLSPGNVQVSQNVFACDTNFNRIYDFGAKTYCEGGPAYSCADQTPWAVNDQFSYGFAATNIAGGNEASWCCACYKLTFTSGPVAGSVMVVQSTSTGGDLGNNHFDLNIPGGGVGIFDGCTPQFGGLPGERYGGISSRSQCDSFTDALKPGCYWRFDWFLNADNPNFTFERVQCPSELVARTGCKRNDDGNYPVFTPPSGDSPSSSSAAPTSTSTSQQPQQPTSSSSQASVPTSNPGGCTSQKWAGCGGIGFTGCSSGVSGTTCTKLNDWYSQC

SEQ ID NO: 48335 - protein, 309 aa, Thermochaetoides thermophila
MRSTPVLRTALAAALPFTVLAADGKSTRYWDCCKPSCLSPGNVQVSQNVFACDRNFNRIYDFGAKSYCEGGPAYSCQDQTPWAVNDQFSYGFAATNIAGGNEASWCCACYKLTFTSGPVAGSVMVVQSTSTGGDLGNNHFSLNIPGGGVGIFDGCTPQFGGLPGERYGGISSRSQCDSFTDALKPGCYWRFDWTLNADNPNFTFERVQCPSELVARTGCKRNDDGNYPVFTPPSGDSPSSSSAAPTSTSTSQQPQQPRSSSSQASVPTSNPGGCTSQKWAKCGGIGFTGCTTCVSGTTCTKLNDWYSQC

SEQ ID NO: 48336 - protein, 309 aa, Thermochaetoides thermophila
MRSTPVLRTALAAALPGTVLAANGNSTRYWDCCKPSCLSPGNSQVSQNVFACDRNFNRIYDFGAKTGCEGGPAYSCADQTPWAVNDQFSYGFAATNIAGGNQASWCCACYKLTFTSGPVAGSVMVVQSTSTGGDLGNNHFDLNIPGGGVGIFDGCTPQFGPLPTERYGGISSRSQCDSFPDALKPGCYWRFDWFLNADNPNFTFERVQCPSELVARTGCKRNDDGNYPVFTPPSGDSPSSSSAAPTSTSTSQQPQQPTSSSSQASVPTSNPGGCTSQKWAKSGGIGFTGCTTCVSGTTCTKLNDWYSQC

SEQ ID NO: 48337 - protein, 302 aa, Podospora anserina
MRSSTVLQTSLLAVLPLAVQAQGASGSGKSTRYWDCCKPSCAWPGKAAVNRPVFACDANFQRISDSGVASGCNGGSAYSCADHSAWAINDNLSYGFAATALSGGSEASWCCACYELTFTDGPVAGKKMVVQSTSTGGDLGSNHFDLNIPGGGVGLFDGCKPQFGGLPGATYGGISDRSQCASFPDALKPGCNWRFDWFKNADNPSFTFRQVQCPSELTARSGCKRDDDSRFPVFSPPGGGSQPQPQPTSSAAQNPNPTPSAAPGGCRAAKYAQCGGQGFTGCTTCEAGSTCTASNQWYSQCL

SEQ ID NO: 48338 - protein, 256 aa, Staphylotrichum coccosporum
GVSTRYWDCCKPSCSWPGKASVNQPVFACSANFQRISDPNVKSGCDGGTAYACADQTPWAVNDNFSYGFAATSISGGNEASWCCGCYELTFTSGPGAGKTMVVQSTSTGGDLGTNHFDLAMPGGGVGIFDGCTPQFGGLAGDRYGGVSSRSECDSFPAALKPGCYWRFWFKNADNPTFTFRQVQCPSELVARTGCRRNDDGNFPVFTPPSGGQSSSSSSSSSAKPTSTSASTTSTKATSTTSTASSQTSSSTGGGC

SEQ ID NO: 48339 - protein, 268 aa, Thielavia terrestris
SGSGQSTRYWDCCKPSCAWPGKAAVSQPVYSCDANFQRLSDFNVQSGCNGGSAYACADQTPWAVNDNLAYGFAATSIAGGSESSWCCACYALTFTSGPVAGKTMVVQSTSTGGDLGSNHFDIAMPGGGVGIFDGCSSQFGGLPGDRYGGISSRDQCDSFPAPLKPGCYWRFDWFQNADNPTVTFQQVQCPAEIVARSGCKRNDDSSFPVFTPEPTPEPTPEPTPEPTPEPTDCTTQKWGQCGGIGYTGCTNCVAGTTCTQLNPWYHQC

SEQ ID NO: 48340 - protein, 282 aa, Humicola insolens
GRSTRYWDCCKPSCGWAKKAPVNQPVFSCNANFQRITDFDAKSGCEPGGVAYSCADQTPWAVNDDFALGFAATSIAGSNEAGWCCACYELTFTSGPVAGKKMVVQSTSTGGDLGSNHFDLNIPGGGVGIFDGCTPQFGGLPGQRYGGISSRNECDRFPDPLKPGCYWRFDWFKNADNPSFSFRQVQCPAELVARTGCRRNDDGNFPAVQIPSSSTSSPVNQPTSTSTTSTSTTSSPPVQPTTPSGCTAERWAQCGGNGWSGCTTCVAGSTCTKINDWYHQCL

SEQ ID NO: 48341 - protein, 282 aa, Synthetic construct
GKSTRYWDCCKPSCGWAKKAPVNQPVFSCNANFQRLTDFDAKSGCEPGGVAYMCADQTPWAVNDDFAFGFAATSIAGSNEAGWCCACYELTFTSGPVAGKKMVVQSTSTGGDLGSNHFDLNIPGGGVGIFDGCTPQFGGLPGQRYGGISSRNECDRFPDALKPGCYWRFDWFKNADNPSFSFRQVQCPAELVARTGCRRNDDGNFPAVQIPSSSTSSPVGQPTSTSTTSTSTTSSPPVQPTTPSGCTAERWAQCGGNGWSGCTTCVAGSTCTKINDWYHQCL

SEQ ID NO: 48342 - protein, 282 aa, Synthetic construct
GKSTRYWDCCKPSCGWAKKAPVNQPVFSCNANFQRLTDFDAKSGCEPGGVAYMCADQTPWAVNDDFAFGFAATSIAGSNEAGWCCACYELTFTSGPVAGKKMVVQSTSTGGDLGSNHFDLFIPGGGVGIFDGCTPQFGGLPGQRYGGISSRNECDRFPDALKPGCYWRFDWFKNADNPSFSFRQVQCPAELVARTGCRRNDDGNFPAVQIPSSSTSSPVGQPTSTSTTSTSTTSSPPVQPTTPSGCTAERWAQCGGNGWSGCTTCVAGSTCTKINDWYHQCL

SEQ ID NO: 48343 - protein, 282 aa, Synthetic construct
GKSTRYWDCCKPSCGWAKKAPVNQPVFSCNANFQRLTDFDAKSGCEPGGVAYKCADQTPWAVNDDFAYGFAATSIAGSNEAGWCCACYELTFTSGPVAGKKMVVQSTSTGGDLGSNHFDLNIPGGGVGPFDGCTPQFGGLPGQRYGGISSRNECDRFPDALKPGCYWRFDWFKNADNPSFSFRQVQCPAELVARTGCRRNDDGNFPAVQIPSSSTSSPVGQPTSTSTTSTSTTSSPPVQPTTPSGCTAERWAQCGGNGWSGCTTCVAGSTCTKINDWYHQCL

SEQ ID NO: 48344 - protein, 282 aa, Synthetic construct
GKSTRYWDCCKPSCGWAKKAPVNQPVFSCNANFQRLTDFDAKSGCEPGGVAYLCADQTPWAVNDDFAFGFAATSIAGSNEAGWCCACYELTFTSGPVAGKKMVVQSTSTGGDLGSNHFDLNIPGGGVGIFDGCTPQFGGLPGQRYGGISSRNECDRFPDALKPGCYWRFDWFKNADNPSFSFRQVQCPAELVARTGCRRNDDGNFPAVQIPSSSTSSPVGQPTSTSTTSTSTTSSPPVQPTTPSGCTAERWAQCGGNGWSGCTTCVAGSTCTKINDWYHQCL

SEQ ID NO: 48345 - protein, 282 aa, Synthetic construct
GKSTRYWDCCKPSCGWAKKAPVNQPVFSCNANFQRLTDFDAKSGCEPGGVAYKCADQTPWAVNDDFAFGFAATSIAGSNEAGWCCACYELTFTSGPVAGKKMVVQSTSTGGDLGSNHFDLLIPGGGVGIFDGCTPQFGGLPGQRYGGISSRNECDRFPDALKPGCYWRFDWFKNADNPSFSFRQVQCPAELVARTGCRRNDDGNFPAVQIPSSSTSSPVGQPTSTSTTSTSTTSSPPVQPTTPSGCTAERWAQCGGNGWSGCTTCVAGSTCTKINDWYHQCL

SEQ ID NO: 48346 - protein, 282 aa, Synthetic construct
GKSTRYWDCCKPSCGWAKKAPVNQPVFSCNANFQRLTDFDAKSGCEPGGVAYLCADQTPWAVNDDFAYGFAATSIAGSNEAGWCCACYELTFTSGPVAGKKMVVQSTSTGGDLGSNHFDLFIPGGGVGPFDGCTPQFGGLPGQRYGGISSRNECDRFPDALKPGCYWRFDWFKNADNPSFSFRQVQCPAELVARTGCRRNDDGNFPAVQIPSSSTSSPVGQPTSTSTTSTSTTSSPPVQPTTPSGCTAERWAQCGGNGWSGCTTCVAGSTCTKINDWYHQCL

SEQ ID NO: 48347 - protein, 282 aa, Synthetic construct
GKSTRYWDCCKPSCGWAKKAPVNQPVFSCNANFQRLTDFDAKSGCEPGGVAYMCADQTPWAVNDDFAFGFAATSIAGSNEAGWCCACYELTFTSGPVAGKKMVVQSTSTGGDLGSNHFDLLIPGGGVGIFDGCTPQFGGLPGQRYGGISSRNECDRFPDALKPGCYWRFDWFKNADNPSFSFRQVQCPAELVARTGCRRNDDGNFPAVQIPSSSTSSPVGQPTSTSTTSTSTTSSPPVQPTTPSGCTAERWAQCGGNGWSGCTTCVAGSTCTKINDWYHQCL

SEQ ID NO: 48348 - protein, 282 aa, Synthetic construct
GKSTRYWDCCKPSCGWAKKAPVNQPVFSCNANFQRLTDFDAKSGCEPGGVAYMCADQTPWAVNDDFAYGFAATSIAGSNEAGWCCACYELTFTSGPVAGKKMVVQSTSTGGDLGSNHFDLNIPGGGVGPFDGCTPQFGGLPGQRYGGISSRNECDRFPDALKPGCYWRFDWFKNADNPSFSFRQVQCPAELVARTGCRRNDDGNFPAVQIPSSSTSSPVGQPTSTSTTSTSTTSSPPVQPTTPSGCTAERWAQCGGNGWSGCTTCVAGSTCTKINDWYHQCL

SEQ ID NO: 48349 - protein, 282 aa, Synthetic construct
GKSTRYWDCCKPSCGWAKKAPVNQPVFSCNANFQRLTDFDAKSGCEPGGVAYKCADQTPWAVNDDFAFGFAATSIAGSNEAGWCCACYELTFTSGPVAGKKMVVQSTSTGGDLGSNHFDLNIPGGGVGIFDGCTPQFGGLPGQRYGGISSRNECDRFPDALKPGCYWRFDWFKNADNPSFSFRQVQCPAELVARTGCRRNDDGNFPAVQIPSSSTSSPVGQPTSTSTTSTSTTSSPPVQPTTPSGCTAERWAQCGGNGWSGCTTCVAGSTCTKINDWYHQCL

SEQ ID NO: 48350 - protein, 282 aa, Humicola insolens
GRSTRYWDCCKPSCGWAKKAPVNQPVFSCNANFQRITDFDAKSGCEPGGVAYSCADQTPWAVNDDFALGFAATSIAGSNEAGWCCACYELTFTSGPVAGKKMVVQSTSTGGDLGSNHFDLNIPGGGVGIFDGCTPQFGGLPGQRYGGISSRDECDRFPDALKPGCYWRFDWFKNADNPSFSFRQVQCPAELVARTGCRRNDDGNFPAVQIPSSSTSSPVNQPTSTSTTSTSTTSSPPVQPTTPSGCTAERWAQCGGNGWSGCTTCVAGSTCTKINDWYHQCL

SEQ ID NO: 48351 - protein, 282 aa, Synthetic construct
GKSTRYWDCCKPSCGWAKKAPVNQPVFSCNANFQRLTDFDAKSGCNPGGVAYLCADQTPWAVNDDFAFGFAATSIAGSNEAGWCCACYELTFTSGPVAGKKMVVQSTSTGGDLGSNHFDLNIPGGGVGPFDGCTPQFGGLPGQRYGGISSRNECDRFPDALKPGCYWRFDWFKNADNPSFSFRQVQCPAELVARTGCRRNDDGNFPAVQIPSSSTSSPVGQPTSTSTTSTSTTSSPPVQPTTPSGCTAERWAQCGGNGWSGCTTCVAGSTCTKINDWYHQCL

SEQ ID NO: 48352 - protein, 282 aa, Synthetic construct
GKSTRYWDCCKPSCGWAKKAPVNQPVFSCNANFQRLTDFDAKSGCEPGGVAYKCADQTPWAVNDDFAFGFAATSIAGSNEAGWCCACYELTFTSGPVAGKKMVVQSTSTGGDLGSNHFDLFIPGGGVGIFDGCTPQFGGLPGQRYGGISSRNECDRFPDALKPGCYWRFDWFKNADNPSFSFRQVQCPAELVARTGCRRNDDGNFPAVQIPSSSTSSPVGQPTSTSTTSTSTTSSPPVQPTTPSGCTAERWAQCGGNGWSGCTTCVAGSTCTKINDWYHQCL

SEQ ID NO: 48353 - protein, 282 aa, Humicola insolens
GRSTRYWDCCKPSCGWAKKAPVNQPVFSCNANFQRITDFDAKSGCEPGGVAYSCADQTPWAVNDDFALGFAATSIAGSNEAGWCCACYELTFTSGPVAGKKMVVQSTSTGGDLGSNHFDLNIPGGGVGIFDGCTPQFGGLPGQRYGGISSRNECDRFPDALKPGCYWRFDWFKNADNPSFSFRQVQCPAELVARTGCRRNDDGNFPAVQIPSSSTSSPSSTPTSTSTTSTSTTSSPPVQPTTPSGCTAERWAQCGGNGWSGCTTCVAGSTCTKINDWYHQCL

SEQ ID NO: 48354 - protein, 282 aa, Synthetic construct
GKSTRYWDCCKPSCGWAKKAPVNQPVFSCNANFQRLTDFDAKSGCEPGGVAYMCADQTPWAVNDDFAYGFAATSIAGSNEAGWCCACYELTFTSGPVAGKKMVVQSTSTGGDLGSNHFDLLIPGGGVGPFDGCTPQFGGLPGQRYGGISSRNECDRFPDALKPGCYWRFDWFKNADNPSFSFRQVQCPAELVARTGCRRNDDGNFPAVQIPSSSTSSPVGQPTSTSTTSTSTTSSPPVQPTTPSGCTAERWAQCGGNGWSGCTTCVAGSTCTKINDWYHQCL

SEQ ID NO: 48355 - protein, 282 aa, Synthetic construct
GKSTRYWDCCKPSCGWAKKAPVNQPVFSCNANFQRLTDFDAKSGCEPGGVAYMCADQTPWAVNDDFAYGFAATSIAGSNEAGWCCACYELTFTSGPVAGKKMVVQSTSTGGDLGSNHFDLFIPGGGVGPFDGCTPQFGGLPGQRYGGISSRNECDRFPDALKPGCYWRFDWFKNADNPSFSFRQVQCPAELVARTGCRRNDDGNFPAVQIPSSSTSSPVGQPTSTSTTSTSTTSSPPVQPTTPSGCTAERWAQCGGNGWSGCTTCVAGSTCTKINDWYHQCL

SEQ ID NO: 48356 - protein, 282 aa, Synthetic construct
GKSTRYWDCCKPSCGWAKKAPVNQPVFSCNANFQRLTDFDAKSGCNPGGVAYMCADQTPWAVNDDFAFGFAATSIAGSNEAGWCCACYELTFTSGPVAGKKMVVQSTSTGGDLGSNHFDLNIPGGGVGPFDGCTPQFGGLPGQRYGGISSRNECDRFPDALKPGCYWRFDWFKNADNPSFSFRQVQCPAELVARTGCRRNDDGNFPAVQIPSSSTSSPVGQPTSTSTTSTSTTSSPPVQPTTPSGCTAERWAQCGGNGWSGCTTCVAGSTCTKINDWYHQCL

SEQ ID NO: 48357 - protein, 282 aa, Synthetic construct
GKSTRYWDCCKPSCGWAKKAPVNQPVFSCNANFQRLTDFDAKSGCEPGGVAYLCADQTPWAVNDDFAFGFAATSIAGSNEAGWCCACYELTFTSGPVAGKKMVVQSTSTGGDLGSNHFDLLIPGGGVGIFDGCTPQFGGLPGQRYGGISSRNECDRFPDALKPGCYWRFDWFKNADNPSFSFRQVQCPAELVARTGCRRNDDGNFPAVQIPSSSTSSPVGQPTSTSTTSTSTTSSPPVQPTTPSGCTAERWAQCGGNGWSGCTTCVAGSTCTKINDWYHQCL

SEQ ID NO: 48358 - protein, 282 aa, Synthetic construct
GKSTRYWDCCKPSCGWAKKAPVNQPVFSCNANFQRLTDFDAKSGCEPGGVAYSCADQTPWAVNDDFAFGFAATSIAGSNEAGWCCACYELTFTSGPVAGKKMVVQSTSTGGDLGSNHFDLNIPGGGVGPFDGCTPQFGGLPGQRYGGISSRNECDRFPDALKPGCYWRFDWFKNADNPSFSFRQVQCPAELVARTGCRRNDDGNFPAVQIPSSSTSSPVGQPTSTSTTSTSTTSSPPVQPTTPSGCTAERWAQCGGNGWSGCTTCVAGSTCTKINDWYHQCL

SEQ ID NO: 48359 - protein, 282 aa, Synthetic construct
GKSTRYWDCCKPSCGWAKKAPVNQPVFSCNANFQRLTDFDAKSGCEPGGVAYSCADQTPWAVNDDFAFGFAATSIAGSNEAGWCCACYELTFTSGPVAGKKMVVQSTSTGGDLGSNHFDLLIPGGGVGPFDGCTPQFGGLPGQRYGGISSRNECDRFPDALKPGCYWRFDWFKNADNPSFSFRQVQCPAELVARTGCRRNDDGNFPAVQIPSSSTSSPVGQPTSTSTTSTSTTSSPPVQPTTPSGCTAERWAQCGGNGWSGCTTCVAGSTCTKINDWYHQCL

SEQ ID NO: 48360 - protein, 282 aa, Synthetic construct
GKSTRYWDCCKPSCGWAKKAPVNQPVFSCNANFQRLTDFDAKSGCEPGGVAYLCADQTPWAVNDDFAFGFAATSIAGSNEAGWCCACYELTFTSGPVAGKKMVVQSTSTGGDLGSNHFDLFIPGGGVGIFDGCTPQFGGLPGQRYGGISSRNECDRFPDALKPGCYWRFDWFKNADNPSFSFRQVQCPAELVARTGCRRNDDGNFPAVQIPSSSTSSPVGQPTSTSTTSTSTTSSPPVQPTTPSGCTAERWAQCGGNGWSGCTTCVAGSTCTKINDWYHQCL

SEQ ID NO: 48361 - protein, 282 aa, Synthetic construct
GKSTRYWDCCKPSCGWAKKAPVNQPVFSCNANFQRLTDFDAKSGCNPGGVAYKCADQTPWAVNDDFAFGFAATSIAGSNEAGWCCACYELTFTSGPVAGKKMVVQSTSTGGDLGSNHFDLNIPGGGVGPFDGCTPQFGGLPGQRYGGISSRNECDRFPDALKPGCYWRFDWFKNADNPSFSFRQVQCPAELVARTGCRRNDDGNFPAVQIPSSSTSSPVGQPTSTSTTSTSTTSSPPVQPTTPSGCTAERWAQCGGNGWSGCTTCVAGSTCTKINDWYHQCL

SEQ ID NO: 48362 - protein, 282 aa, Trichocladium griseum
GKSTRYWDCCKPSCGWAKKAPVNQPVFSCNANFQRLTDFDAKSGCEPGGVAYSCADQTPWAVNDDFAFGFAATSIAGSNEAGWCCACYELTFTSGPVAGKKMVVQSTSTGGDLGSNHFDLNIPGGGVGIFDGCTPQFGGLPGQRYGGISSRNECDRFPDALKPGCYWRFDWFKNADNPSFSFRQVQCPAELVARTGCRRNDDGNFPAVQIPSSSTSSPVDQPTSTSTTSTSTTSSPPVQPTTPSGCTAERWAQCGGNGWSGCTTCVAGSTCTKINDWYHQCL

SEQ ID NO: 48363 - protein, 282 aa, Synthetic construct
GKSTRYWDCCKPSCGWAKKAPVNQPVFSCNANFQRLTDFDAKSGCEPGGVAYKCADQTPWAVNDDFAYGFAATSIAGSNEAGWCCACYELTFTSGPVAGKKMVVQSTSTGGDLGSNHFDLFIPGGGVGPFDGCTPQFGGLPGQRYGGISSRNECDRFPDALKPGCYWRFDWFKNADNPSFSFRQVQCPAELVARTGCRRNDDGNFPAVQIPSSSTSSPVGQPTSTSTTSTSTTSSPPVQPTTPSGCTAERWAQCGGNGWSGCTTCVAGSTCTKINDWYHQCL

SEQ ID NO: 48364 - protein, 282 aa, Synthetic construct
GKSTRYWDCCKPSCGWAKKAPVNQPVFSCNANFQRLTDFDAKSGCEPGGVAYLCADQTPWAVNDDFAYGFAATSIAGSNEAGWCCACYELTFTSGPVAGKKMVVQSTSTGGDLGSNHFDLNIPGGGVGPFDGCTPQFGGLPGQRYGGISSRNECDRFPDALKPGCYWRFDWFKNADNPSFSFRQVQCPAELVARTGCRRNDDGNFPAVQIPSSSTSSPVGQPTSTSTTSTSTTSSPPVQPTTPSGCTAERWAQCGGNGWSGCTTCVAGSTCTKINDWYHQCL

SEQ ID NO: 48365 - protein, 282 aa, Synthetic construct
GKSTRYWDCCKPSCGWAKKAPVNQPVFSCNANFQRLTDFDAKSGCEPGGVAYSCADQTPWAVNDDFAFGFAATSIAGSNEAGWCCACYELTFTSGPVAGKKMVVQSTSTGGDLGSNHFDLFIPGGGVGPFDGCTPQFGGLPGQRYGGISSRNECDRFPDALKPGCYWRFDWFKNADNPSFSFRQVQCPAELVARTGCRRNDDGNFPAVQIPSSSTSSPVGQPTSTSTTSTSTTSSPPVQPTTPSGCTAERWAQCGGNGWSGCTTCVAGSTCTKINDWYHQCL

SEQ ID NO: 48366 - protein, 282 aa, Synthetic construct
GKSTRYWDCCKPSCGWAKKAPVNQPVFSCNANFQRLTDFDAKSGCEPGGVAYKCADQTPWAVNDDFAYGFAATSIAGSNEAGWCCACYELTFTSGPVAGKKMVVQSTSTGGDLGSNHFDLLIPGGGVGPFDGCTPQFGGLPGQRYGGISSRNECDRFPDALKPGCYWRFDWFKNADNPSFSFRQVQCPAELVARTGCRRNDDGNFPAVQIPSSSTSSPVGQPTSTSTTSTSTTSSPPVQPTTPSGCTAERWAQCGGNGWSGCTTCVAGSTCTKINDWYHQCL

SEQ ID NO: 48367 - protein, 282 aa, Humicola insolens
GRSTRYWDCCKPSCGWAKKAGVNQPVFSCNANFQRITDFDAKSGCEPGGVAYSCADQTPWAVNDNFSLGFAATSIAGSNEAGWCCACYELTFTSGPVAGKKMVVQSTSTGGDLGSNHFDLNIPGGGVGIFDGCTPQFGGLPGQRYGGISSRNECDSFPDALKPGCYWRFDWFKNADNPSFSFRQVQCPAELVARTGCRRNDDGNFPAVQIPSSSTSSPVNQPTSTSTTSTSTTSSPPVQPTTPSGCTAERWAQCGGNGWSGCTTCVAGSTCTKINDWYHQCL

SEQ ID NO: 48368 - protein, 282 aa, Synthetic construct
GKSTRYWDCCKPSCGWAKKAPVNQPVFSCNANFQRLTDFDAKSGCEPGGVAYLCADQTPWAVNDDFAYGFAATSIAGSNEAGWCCACYELTFTSGPVAGKKMVVQSTSTGGDLGSNHFDLLIPGGGVGPFDGCTPQFGGLPGQRYGGISSRNECDRFPDALKPGCYWRFDWFKNADNPSFSFRQVQCPAELVARTGCRRNDDGNFPAVQIPSSSTSSPVGQPTSTSTTSTSTTSSPPVQPTTPSGCTAERWAQCGGNGWSGCTTCVAGSTCTKINDWYHQCL

SEQ ID NO: 48369 - protein, 202 aa, Fusarium oxysporum
GSGHSTRYWDCCKPSCSWSGKAAVNAPALTCDKNDNPISNTNAVNGCEGGGSAYACTNYSPWAVNDELAYGFAATKISGGSEASWCCACYALTFTTGPVKGKKMIVQSTNTGGDLGDNHFDLMMPGGGVGIFDGCTSEFGKALGGAQYGGISSRSECDSYPELLKDGCHWRFDWFENADNPDFTFEQVQCPKALLDISGCKR

SEQ ID NO: 48370 - protein, 228 aa, Thielavia terrestris
SGSGQSTRYWDCCKPSCAWPGKAAVSQPVYSCDANFQRLSDFNVQSGCNGGSAYACADQTPWAVNDNLAYGFAATSIAGGSESSWCCACYALTFTSGPVAGKTMVVQSTSTGGDLGSNHFDIAMPGGGVGIFDGCSSQFGGLPGDRYGGISSRDQCDSFPAPLKPGCYWRFDWFQNADNPTVTFQQVQCPAEIVARSGCKRNDDSSFPVFTPPPPPPPPPPPPPGCTT

SEQ ID NO: 48371 - protein, 229 aa, Thermothielavioides terrestris
SGSGQSTRYWDCCKPSCAWPGKAAVSQPVYACDANFQRLSDFNVQSGCNGGSAYSCADQTPWAVNDNLAYGFAATSIAGGSESSWCCACYALTFTSGPVAGKTMVVQSTSTGGDLGSNHFDIAMPGGGVGIFNGCSSQFGGLPGAQYGGISSRDQCDSFPAPLKPGCQWRFDWFQNADNPTFTFQQVQCPAEIVARSGCKRNDDSSFPVFTTTPTPPTPTPTPTPGCTS

SEQ ID NO: 48372 - protein, 270 aa, Staphylotrichum coccosporum
ADGVSTRYWDCCKPSCSWPGKASVNQPVWACSANFQRISDPNVKSGCDGGTAYACADQTPWAVNGNFSYGFAATSIMGGNEASWCCGCYELTFTSGPVAGKTMVVQSTSTGGDLGVNHFDLAMPGGGVGIFDGCSPQFGGLAGDRYGGVSSRDQCDSFPAALVPGCYWRFDWFKNADNPTFTFRQVQCPSELVARTGCRRNDDSNSPVFVPPSGGQSSSSLSSSSAKPTSTSTSTTSTKATSTTSTTSTKATSTTSTASSQTSSSTGGGC

SEQ ID NO: 48373 - protein, 277 aa, Thermothielavioides terrestris
SGSGQSTRYWDCCKPSCAWPGKAAVSQPVYSCDANFQRLSDFNVQSGCNGGSAYACADQTPWAVNDNLAYGFAATSIAGGSESSWCCACYALTFTSGPVAGKTMVVQSTSTGGDLGSNHFDIAMPGGGVGIFDGCSSQFGGLPGDRYGGISSRDQCDSFPAPLKPGCYWRFDWFQNADNPTFTFQQVQCPAEIVARSGCKRNDDSSFPVFTPPSGGNGGTGTPTSTAPGSGQTSPGGGSGCTSQKWAQCGGIGFSGCTTCVSGTTCQKLNDYYSQCL

SEQ ID NO: 48374 - protein, 277 aa, Thermothielavioides terrestris
SGSGQSTRYWDCCKPSCAWPGKAAVSQPVYSCDANFQRLSDFNVQSGCNGGSAYACADQTPWAVNDNLAYGFAATSIAGGSESSWCCACYALTFTSGPVAGKTMVVQSTSTGGDLGSNHFDIAMPGGGVGIFDGCSSQFGGLPGDRYGGISSRDQCDSFPEPLKPGCYWRFDWFQNADNPTFTFQQVQCPAEIVARSGCKRNDDSSFPVFTPPSGGNGGTGTPTSTAPGSGQTSPGGGSGCTSQKWAQCGGIGFSGCTTCVSGTTCQKLNDYYSQCL

SEQ ID NO: 48375 - protein, 277 aa, Thermothielavioides terrestris
SGSGQSTRYWDCCKPSCAWPGKAAVSQPVYACDANFQRLSDFNVQSGCNGGSAYACADQTPWAVNDNLAYGFAATSIAGGSESSWCCACYALTFTSGPVAGKTMVVQSTSTGGDLGSNHFDIAMPGGGVGIFDGCSSQFGGLPGARYGGISSRDQCDSFPAPLKPGCQWRFDWFQNADNPTFTFQQVQCPAEIVARSGCKRNDDSSFPVFTPQPTPEPTPQPTPEPTPQPTPEPTPQPTGCTSQKWAQCGGIGFSGCTTCVSGTTCQKLNDYYSQCL

SEQ ID NO: 48376 - protein, 277 aa, Thermothielavioides terrestris
SGSGQSTRYWDCCKPSCAWPGKAAVSQPVYSCDANFQRLSDFNVQSGCNGGSAYACADQTPWAVNDNLAYGFAATSIAGGSESSWCCACYALTFTSGPVAGKTMVVQSTSTGGDLGSNHFDIAMPGGGVGIFDGCSSQFGGLPGARYGGISSRDQCDSFPAPLKPGCYWRFDWFQNADNPTFTFQQVQCPAEIVARSGCKRNDDSSFPVFTPPSGGNGGTGTPTSTAPGSGQTSPGGGSGCTSQKWAQCGGIGFSGCTTCVSGTTCQKLNDYYSQCL

SEQ ID NO: 48377 - protein, 277 aa, Thermothielavioides terrestris
SGSGQSTRYWDCCKPSCAWPGKAAVSQPVYSCDANFQRLSDFNVQSGCNGGSAYACADQTPWAVNDNLAYGFAATSIAGGSESSWCCACYALTFTSGPVAGKTMVVQSTSTGGDLGSNHFDIAMPGGGVGIFDGCSSQFGGLPGSRYGGISSRDQCDSFPAPLKPGCYWRFDWFQNADNPTFTFQQVQCPAEIVARSGCKRNDDSSFPVFTPPSGGNGGTGTPTSTAPGSGQTSPGGGSGCTSQKWAQCGGIGFSGCTTCVSGTTCQKLNDYYSQCL

SEQ ID NO: 48378 - protein, 277 aa, Thermothielavioides terrestris
SGSGQSTRYWDCCKPSCAWPGKAAVSQPVYACDANFQRLSDFNVQSGCNGGSAYACADQTPWAVNDNLAYGFAATSIAGGSESSWCCACYALTFTSGPVAGKTMVVQSTSTGGDLGSNHFDIAMPGGGVGIFDGCSSQFGGLPGDRYGGISSRDQCDSFPAPLKPGCYWRFDWFQNADNPTFTFQQVQCPAEIVARSGCRRNDDSSFPVFTPPSGGNGGTGTPTSTAPGSGQTSPGGGSGCTSQKWAQCGGIGFSGCTTCVSGTTCQKLNDYYSQCL

SEQ ID NO: 48379 - protein, 288 aa, unidentified
MRSSPLLPSAVVAALPVLALAADGRSTRYWDCCKPSCGWAKKASVNQPVFSCNANFQRITDFDAKSGCEPGGVAYSCADQTPWAVNDNFSLGFAATSIAGSNEAGWCCACYELTFTSGPVAGKKMVVQSTSTGGDLGSNHFDLNIPGGGVGIFDGCTPQFGGLPGQRYGGISSRNECDSFPDALKPGCYWRFDWFKNADNPSFSFRQVQCPAELVARTGCRRNDDGNFPAVQIPSSSTSSSPPVQPTTPSGCTAERWAQCGGNGWSGCTTCVAGSTCTKINDWYHQCL

SEQ ID NO: 48380 - protein, 231 aa, Thermothielavioides terrestris
SGSGQSTRYWDCCKPSCAWPGKAAVSQPVYACDANFQRLSDFNVQSGCNGGSAYSCADQTPWAVNDNLAYGFAATSIAGGSESSWCCACYALTFTSGPVAGKTMVVQSTSTGGDLGSNHFDIAMPGGGVGIFNGCSSQFGGLPGAQYGGISSRDQCDSFPAPLKPGCQWRFDWFQNADNPTFTFQQVQCPAEIVARSGCKRNDDSSFPVFTPEPTPEPTPEPTPEPTGCTA

SEQ ID NO: 48381 - protein, 231 aa, Thermothielavioides terrestris
SGSGQSTRYWDCCKPSCAWPGKAAVSQPVYACDANFQRLSDFNVQSGCNGGSAYACADQTPWAVNDNLAYGFAATSIAGGSESSWCCACYALTFTSGPVAGKTMVVQSTSTGGDLGSNHFDIAMPGGGVGIFNGCSSQFGGLPGARYGGISSRDQCDSFPAPLKPGCQWRFDWFQNADNPTFTFQQVQCPAEIVARSGCKRNDDSSFPVFTPEPTPEPTPEPTPEPTGCTA

SEQ ID NO: 48382 - protein, 226 aa, Humicola insolens
TLLALAGPLAVSAASGSGHSTRYWDCCKPSCSWSGKAAVNAPALTCDKNDNPISNTNAVNGCEGGGSAYACTNYSPWAVNDELAYGFAATKISGGSEASWCCACYALTFTTGPVKGKKMIVQSTNTGGDLGDNHFDLMMPGGGVGIFDGCTSEFGKALGGAQYGGISSRSECDSYPELLKDGCHWRFDWFENADNPDFTFEQVQCPKALLDISGCKRDDDSSFPAF

SEQ ID NO: 48383 - protein, 318 aa, Thielavia terrestris. Staphylotrichum coccosporum. Chimeric. Synthetic construct
MRSTPVLRTTLAAALPLVASAASGSGQSTRYWDCCKPSCAWPGKAAVSQPVYACDANFQRLSDFNVQSGCNGGSAYSCADQTPWAVNDNLAYGFAATSIAGGSESSWCCACYALTFTSGPVAGKTMVVQSTSTGGDLGSNHFDIAMPGGGVGIFNGCSSQFGGLPGAQYGGISSRDQCDSFPAPLKPGCQWRFDWFQNADNPTFTFQQVQCPAEIVARSGCKRNDDGNFPVFTPPSGGQSSSSSSSSSAKPTSTSTSTTSTKATSTTSTASSQTSSSTGGGCAAQRYAQCGGIGYSGCTTCVSGTTCNKQNDYYSQCL

SEQ ID NO: 48384 - protein, 318 aa, Thielavia terrestris. Staphylotrichum coccosporum. Chimeric. Synthetic construct
MRSTPVLRTTLAAALPLVASAASGSGQSTRYWDCCKPSCAWPGKAAVSQPVYACDANFQRLSDFNVQSGCNGGSAYSCADQTPWAVNDNLAYGFAATSIAGGSESSWCCACYALTFTSGPVAGKTMVVQSTSTGGDLGSNHFDIAMPGGGVGIFNGCSSQFGGLPGAQYGGISSRDQCDSFPAPLKPGCQWRFDWFQNADNPTFTFQQVQCPAEIVARSGCKRNDDGNFPVFTPPSGGQSSSSSSSSSAKPTSTSTSTTSTKATSTTSTASSQTSSSTGGGCAAQKWAQCGGIGFSGCTTCVSGTTCNKQNDYYSQCL

SEQ ID NO: 48385 - protein, 318 aa, Unidentified
MRSTPVLRTTLAAALPLVASAASGSGQSTRYWDCCKPSCAWPGKAAVSQPVYACDANFQRLSDFNVQSGCNGGSAYSCADQTPWAVNDNLAYGFAATSIAGGSESSWCCACYALTFTSGPVAGKTMVVQSTSTGGDLGSNHFDIAMPGGGVGIFNGCSSQFGGLPGAQYGGISSRDQCDSFPAPLKPGCQWRFDWFQNADNPTFTFQQVQCPAEIVARSGCKRNDDGNFPVFTPPSGGQSSSSSSSSSAKPTSTSTSTTSTKATSTTSTASSQTSSSTGGGCAAQRYAQCGGIGFSGCTTCVSGTTCNKQNDYYSQCL

SEQ ID NO: 48386 - protein, 318 aa, Thielavia terrestris. Staphylotrichum coccosporum. Chimeric. Synthetic construct
MRSTPVLRTTLAAALPLVASAASGSGQSTRYWDCCKPSCAWPGKAAVSQPVYACDANFQRLSDFNVQSGCNGGSAYSCADQTPWAVNDNLAYGFAATSIAGGSESSWCCACYALTFTSGPVAGKTMVVQSTSTGGDLGSNHFDIAMPGGGVGIFNGCSSQFGGLPGAQYGGISSRDQCDSFPAPLKPGCQWRFDWFQNADNPTFTFQQVQCPAEIVARSGCKRNDDGNFPVFTPPSGGQSSSSSSSSSAKPTSTSTSTTSTKATSTTSTASSQTSSSTGGGCTSQKWAQCGGIGFSGCTTCVSGTTCQKLNDYYSQCL

SEQ ID NO: 48387 - protein, 269 aa, Thermothielavioides terrestris
SGSGQSTRYWDCCKPSCAWPGKAAVSQPVYACDANFQRLSDFNVQSGCNGGSAYACADQTPWAVNDNLAYGFAATSIAGGSESSWCCACYALTFTSGPVAGKTMVVQSTSTGGDLGSNHFDIAMPGGGVGIFDGCSSQFGGLPGARYGGISSRDQCDSFPAPLKPGCQWRFDWFQNADNPTFTFQQVQCPAEIVARSGCKRNDDSSFPVFTPEPTPEPTPEPTPEPTPEPTRCTSQKWAQCGGIGFSGCTTCVSGTTCQKLNDYYSQCL

SEQ ID NO: 48388 - protein, 269 aa, Thermothielavioides terrestris
SGSGQSTRYWDCCKPSCAWPGKAAVSQPVYACDANFQRLSDFNVQSGCNGGSAYACADQTPWAVNDNLAYGFAATSIAGGSESSWCCACYALTFTSGPVAGKTMVVQSTSTGGDLGSNHFDIAMPGGGVGIFDGCSSQFGGLPGARYGGISSRDQCDSFPAPLKPGCQWRFDWFQNADNPTFTFQQVQCPAEIVARSGCKRNDDSSFPVFTPEPTPEPTPEPTPEPTPEPTSCTSQKWAQCGGIGFSGCTTCVSGTTCQKLNDYYSQCL

SEQ ID NO: 48389 - protein, 257 aa, Remersonia thermophila
QPVYACNAQFQRISDPMAKSGCDGGPAYSCADHTPWAVNDEFSYGFAATSIAGGSESSWCCACYELTFTSGPVAGKKMVVQSTSTGGDLGSNHFDLNIPGGGVGLFDGCTPQFGGLPGQRYGGISSRAECERFPEALKPGCYWRFDWFKNADNPSFSFRQVQCPAELVARTGCRRNDDGNFPVVSPPSSQPSTTSTSSSSSSSTTSSSIQQPTQPTSPGGCVSQKWGQCGGNGWSGCTSCEAGSTCTKVNEWYSQCM

SEQ ID NO: 48390 - protein, 307 aa, Thielavia terrestris. Thielavia hyrcaniae. Chimeric. Synthetic construct
MRSTPVLRTTLAAALPLVASAASGSGQSTRYWDCCKPSCAWPGKAAVSQPVYACDANFQRLSDFNVQSGCNGGSAYSCADQTPWAVNDNLAYGFAATSIAGGSESSWCCACYALTFTSGPVAGKTMVVQSTSTGGDLGSNHFDIAMPGGGVGIFNGCSSQFGGLPGAQYGGISSRDQCDSFPAPLKPGCQWRFDWFQNADNPTFTFQQVQCPAEIVARSGCKANDDSSFPVFTPGTSGSSSTAKPASSSTRATSTKTSAPATQTSSTGGGCVAQKWAQCGGSGFSGCTTCAAGSTCTKQNDWYSQCL

SEQ ID NO: 48391 - protein, 309 aa, Thermochaetoides thermophila
MRSTPVLRTALAAALPFTVLAANGKSTRYWDCCKPSCLSPGNVQVSQNVFACDRNFNRIYDFGAKSYCEGGPAYSCQDQTPWAVNDQFSYGFAATNIAGGNEASWCCACYKLTFTDGPVAGKVMVVQSTSTGGDLGNNHFDLNIPGGGVGIFDGCTPQFGGLPGERYGGISSRSQCDSFTDALKPGCYWRFDWFLNADNPNFTFERVQCPSELVARTGCKRNDDGNYPVFTPPSGDSPSSSSAAPTSTSTSQQPQQPTSSSSQASVPTSNPGGCESDKWAQCGRIGFTGCSTNVSGTTCTKLNDWYSQC

SEQ ID NO: 48392 - protein, 309 aa, Thermochaetoides thermophila
MRSTPVLRTALAAALPFTVLAADGNSTRYWDCCKPSCLSPGNSEVSQNVFACDTNFNRIYDFGAKTGCEGGPAYSCEDQTPWAVNDQFSYGFAATNIAGGNEASWCCACYKLTFTEGPVAGKVMVVQSTSTGGDLGNNHFDLNIPGGGVGIFDGCTPQFGGLPGERYGGISSRSQCDSFTDALKPGCYWRFDWFLNADNPNFTFERVQCPSELVARTGCKRNDDGNYPVFTPPSGDSPSSSSAAPTSTSTSQQPQQPTDSSSQASVPTSNPGGCTSDKWAQCGGIAFTGCQSTVSGTTCTKLNDWYSQC

SEQ ID NO: 48393 - protein, 309 aa, Thermochaetoides thermophila
MRSTPVLRTALAAALPGTVLAADGKSTRYWDCCKPSCLSPGNVQVSQNVFACDRNFNRIYDFGAKSYCEGGPAYSCADQTPWAVNDQFSYGFAATNIAGGNQASWCCACYKLTFTSGPVAGAVMVVQSTSTGGDLGNNHFSLNIPGGGVGIFDGCTPQFGGLPGERYGGISSRSQCDSFTDALKPGCYWRFDWTLNADNPNFTFERVQCPSELVARTGCKRNDDGNYPVFTPPSGDSPSSSSAAPTSTSTSQQPQQPTSSSSQASVPTSNPGGCTSQKWAQCGRIGFTGCTSTVSGTTCTKLNDWYSQC

SEQ ID NO: 48394 - protein, 309 aa, Thermochaetoides thermophila
MRSTPVLRTALAAALPFTVLAADGKSTRYWDCCKPSCLSPGNVQVSQNVFACDTNFNRIYDFGAKSGCEGGPAYSCADQTPWAVNDQFSYGFAATNIAGGNEASWCCACYKLTFTDGPVAGKVMVVQSTSTGGDLGNNHFSLNIPGGGVGIFDGCTPQFGKLPGERYGGISSRSQCDSFTDALKPGCYWRFDWFLNADNPNFTFERVQCPSELVARTGCKRNDDGNYPVFTPPSGDSPSSSSAAPTSTSTSQQPQQPRDSSSQASVPTSNPGGCESDKWAQCGRIGFTGCQSGVSGTTCTKLNDWYSQC

SEQ ID NO: 48395 - protein, 268 aa, Thermothielavioides terrestris
SGSGQSTRYWDCCKPSCAWPGKAAVSQPVYACDANFQRLSDFNVQSGCNGGSAYACADQTPWAVNDNLAYGFAATSIAGGSESSWCCACYALTFTSGPVAGKTMVVQSTSTGGDLGSNHFDIAMPGGGVGIFDGCSSQFGGLPGARYGGISSRDQCDSFPAPLKPGCQWRFDWFQNADNPTFTFQQVQCPAEIVARSGCKRNDDSSFPVFTPEPTPEPTPEPTPEPTPSPTCTSQKWAQCGGIGFSGCTTCVSGTTCQKLNDYYSQCL

SEQ ID NO: 48396 - protein, 268 aa, Thielavia terrestris
SGSGQSTRYWDCCKPSCAWPGKAAVSQPVYSCDANFQRLSDFNVQSGCNGGSAYACADQTPWAVNDNLAYGFAATSIAGGSESSWCCACYALTFTSGPVAGKTMVVQSTSTGGDLGSNHFDIAMPGGGVGIFDGCSSQFGGLPGDRYGGISSRDQCDSFPAPLKPGCYWRFDWFQNADNPTVTFQQVQCPAEIVARSGCKRNDDSSFPVFTPEPTPEPTPEPTPEPTPEPTSCTTQKWGQCGGIGYTGCTNCVAGTTCTQLNPWYHQC

SEQ ID NO: 48397 - protein, 268 aa, Thielavia terrestris
SGSGQSTRYWDCCKPSCAWPGKAAVSQPVYSCDANFQRLSDFNVQSGCNGGSAYACADQTPWAVNDNLAYGFAATSIAGGSESSWCCACYALTFTSGPVAGKTMVVQSTSTGGDLGSNHFDIAMPGGGVGIFDGCSSQFGGLPGDRYGGISSRDQCDSFPAPLKPGCYWRFDWFQNADNPTVTFQQVQCPAEIVARSGCKRNDDSSFPVFTPEPTPEPTPEPTPEPTPEPTRCTTQKWGQCGGIGYTGCTNCVAGTTCTQLNPWYHQC

SEQ ID NO: 48398 - protein, 257 aa, Fungi
MRSTPVIRTALAAALPLVASAADGKSTRYWDCCKPSCSWSGKASVNQPVFACHANFKRITDVNAKSGCDGGSAYSCADQTPWAVNDNLAYASRRHTSLAGPRRHGAAACYALTFTSGLYAGKTMVVQSTSTGGDLGNNHFDLAMPGGGVGILNGCSSQFGGLPGAQYGGISSRSECDSFPDALKPGCQWRFDWFKNADNPNFNFEQVQCPDELVARTGCRRDDDSRFPAFTPSGGSSSSKPSSAAPSPSSSSPSAIS

SEQ ID NO: 48399 - protein, 242 aa, Thermothielavioides terrestris
SGSGQSTRYWDCCKPSCAWPGKAAVSQPVYACDANFQRLSDFNVQSGCNGGSAYACADQTPWAVNDNLAYGFAATSIAGGSESSWCCACYALTFTSGPVAGKTMVVQSTSTGGDLGSNHFDIAMPGGGVGIFDGCSSQFGGLPGARYGGISSRDQCDSFPAPLKPGCQWRFDWFQNADNPTFTFQQVQCPAEIVARSGCKRNDDSSFPVFTTPTTPTTPTTPTGCTAERWAQCGGNGWSGCT

SEQ ID NO: 48400 - protein, 286 aa, Humicola insolens
ACADGKSTRYWDCCKPSCGWAKKAPVNQPVFSCNANFQRLTDFDAKSGCEPGGVAYSCADQTPWAVNDDFAFGFAATSIAGSNEAGWCCACYELTFTSGPVAGKKMVVQSTSTGGDLGSNHFDLNIPGGGVGIFDGCTPQFGGLPGQRYGGISSRNECDRFPDALKPGCYWRFDWFKNADNPSFSFRQVQCPAELVARTGCRRNDDGNFPAVQIPSSSTSSPVGQPTSTSTTSTSTTSSPPVQPTTPSGCTAERWAQCGGNGWSGCTTCVAGSTCTKINDWYHQCL

SEQ ID NO: 48401 - protein, 274 aa, Thermothielavioides terrestris
GQSTRYWDCCKPSCAWPGKAAVSQPVYACDANFQRLSDFNVQSGCNGGSAYSCADQTPWAVNDNLAYGFAATSIAGGSESSWCCACYALTFTSGPVAGKTMVVQSTSTGGDLGSNHFDIAMPGGGVGIFNGCSSQFGGLPGAQYGGISSRDQCDSFPAPLKPGCQWRFDWFQNADNPTFTFQQVQCPAEIVARSGCKRNDDSSFPVFTPPSGGNGGTGTPTSTAPGSGQTSPGGGSGCTSQKWAQCGGIGFSGCTTCVSGTTCQKLNDYYSQCL

SEQ ID NO: 48402 - protein, 282 aa, Synthetic construct
GKSTRYWDCCKPSCGWAKKAPVNQPVFSCNANFQRLTDFDAKSGCEPGGVAYKCADQTPWAVNDDFAFGFAATSIAGSNEAGWCCACYELTFTSGPVAGKKMVVQSTSTGGDLGSNHFDLLIPGGGVGPFDGCTPQFGGLPGQRYGGISSRNECDRFPDALKPGCYWRFDWFKNADNPSFSFRQVQCPAELVARTGCRRNDDGNFPAVQIPSSSTSSPVGQPTSTSTTSTSTTSSPPVQPTTPSGCTAERWAQCGGNGWSGCTTCVAGSTCTKINDWYHQCL

SEQ ID NO: 48403 - protein, 282 aa, Synthetic construct
GKSTRYWDCCKPSCGWAKKAPVNQPVFSCNANFQRLTDFDAKSGCEPGGVAYMCADQTPWAVNDDFAFGFAATSIAGSNEAGWCCACYELTFTSGPVAGKKMVVQSTSTGGDLGSNHFDLNIPGGGVGPFDGCTPQFGGLPGQRYGGISSRNECDRFPDALKPGCYWRFDWFKNADNPSFSFRQVQCPAELVARTGCRRNDDGNFPAVQIPSSSTSSPVGQPTSTSTTSTSTTSSPPVQPTTPSGCTAERWAQCGGNGWSGCTTCVAGSTCTKINDWYHQCL

SEQ ID NO: 48404 - protein, 282 aa, Synthetic construct
GKSTRYWDCCKPSCGWAKKAPVNQPVFSCNANFQRLTDFDAKSGCEPGGVAYMCADQTPWAVNDDFAFGFAATSIAGSNEAGWCCACYELTFTSGPVAGKKMVVQSTSTGGDLGSNHFDLFIPGGGVGPFDGCTPQFGGLPGQRYGGISSRNECDRFPDALKPGCYWRFDWFKNADNPSFSFRQVQCPAELVARTGCRRNDDGNFPAVQIPSSSTSSPVGQPTSTSTTSTSTTSSPPVQPTTPSGCTAERWAQCGGNGWSGCTTCVAGSTCTKINDWYHQCL

SEQ ID NO: 48405 - protein, 282 aa, Humicola insolens
GRSTRYWDCCKPSCGWAKKAPVNQPVFSCNANFQRITDFDAKSGCEPGGVAYSCADQTPWAVNDDFALGFAATSIAGSNEAGWCCACYELTFTSGPVAGKKMVVQSTSTGGDLGSNHFDLNIPGGGVGIFDGCTPQFGGLPGQRYGGISSRNECDEFPDALKPGCYWRFDWFKNADNPSFSFRQVQCPAELVARTGCRRNDDGNFPAVQIPSSSTSSPVNQPTSTSTTSTSTTSSPPVQPTTPSGCTAERWAQCGGNGWSGCTTCVAGSTCTKINDWYHQCL

SEQ ID NO: 48406 - protein, 282 aa, Humicola insolens
GRSTRYWDCCKPSCGWAKKAPVNQPVFSCNANFQRITDFDAKSGCEPGGVAYSCADQTPWAVNDDFALGFAATSIAGSNEAGWCCACYELTFTSGPVAGKKMVVQSTSTGGDLGSNHFDLNIPGGGVGIFDGCTPQFGGLPGQRYGGISSRNECDRFPDALKPGCYWRFDWFKNADNPSFSFRQVQCPAELVARTGCRRNDDGNFPAVQIPSSSTSSPVNQPTSTSTTSTSTTSSPPVQPTTPSGCTAERWAQCGGNGWSGCTTCVAGSTCTKINDWYHQCL

SEQ ID NO: 48407 - protein, 282 aa, Humicola insolens
GRSTRYWDCCKPSCGWAKKAPVNQPVFSCNANFQRITDFDAKSGCEPGGVAYSCADQTPWAVNDDFALGFAATSIAGSNEAGWCCACYELTFTSGPVAGKKMVVQSTSTGGDLGSNHFDLNIPGGGVGIFDGCTPQFGGLPGQRYGGISSRNECDRFPDALKPGCYWRFDWFKNADNPSFSFRQVQCPAELVARTGCRRNDDGNFPAVQIPSSSTSSPXXXPTSTSTTSTSTTSSPPXXPTTPSGCTAERWAQCGGNGWSGCTTCVAGSTCTKINDWYHQCL

SEQ ID NO: 48408 - protein, 282 aa, Synthetic construct
GKSTRYWDCCKPSCGWAKKAPVNQPVFSCNANFQRLTDFDAKSGCEPGGVAYLCADQTPWAVNDDFAFGFAATSIAGSNEAGWCCACYELTFTSGPVAGKKMVVQSTSTGGDLGSNHFDLFIPGGGVGPFDGCTPQFGGLPGQRYGGISSRNECDRFPDALKPGCYWRFDWFKNADNPSFSFRQVQCPAELVARTGCRRNDDGNFPAVQIPSSSTSSPVGQPTSTSTTSTSTTSSPPVQPTTPSGCTAERWAQCGGNGWSGCTTCVAGSTCTKINDWYHQCL

SEQ ID NO: 48409 - protein, 282 aa, Synthetic construct
GKSTRYWDCCKPSCGWAKKAPVNQPVFSCNANFQRLTDFDAKSGCEPGGVAYLCADQTPWAVNDDFAFGFAATSIAGSNEAGWCCACYELTFTSGPVAGKKMVVQSTSTGGDLGSNHFDLLIPGGGVGPFDGCTPQFGGLPGQRYGGISSRNECDRFPDALKPGCYWRFDWFKNADNPSFSFRQVQCPAELVARTGCRRNDDGNFPAVQIPSSSTSSPVGQPTSTSTTSTSTTSSPPVQPTTPSGCTAERWAQCGGNGWSGCTTCVAGSTCTKINDWYHQCL

SEQ ID NO: 48410 - protein, 282 aa, Synthetic construct
GKSTRYWDCCKPSCGWAKKAPVNQPVFSCNANFQRLTDFDAKSGCEPGGVAYMCADQTPWAVNDDFAFGFAATSIAGSNEAGWCCACYELTFTSGPVAGKKMVVQSTSTGGDLGSNHFDLLIPGGGVGPFDGCTPQFGGLPGQRYGGISSRNECDRFPDALKPGCYWRFDWFKNADNPSFSFRQVQCPAELVARTGCRRNDDGNFPAVQIPSSSTSSPVGQPTSTSTTSTSTTSSPPVQPTTPSGCTAERWAQCGGNGWSGCTTCVAGSTCTKINDWYHQCL

SEQ ID NO: 48411 - protein, 282 aa, Synthetic construct
GKSTRYWDCCKPSCGWAKKAPVNQPVFSCNANFQRLTDFDAKSGCEPGGVAYKCADQTPWAVNDDFAFGFAATSIAGSNEAGWCCACYELTFTSGPVAGKKMVVQSTSTGGDLGSNHFDLFIPGGGVGPFDGCTPQFGGLPGQRYGGISSRNECDRFPDALKPGCYWRFDWFKNADNPSFSFRQVQCPAELVARTGCRRNDDGNFPAVQIPSSSTSSPVGQPTSTSTTSTSTTSSPPVQPTTPSGCTAERWAQCGGNGWSGCTTCVAGSTCTKINDWYHQCL

SEQ ID NO: 48412 - protein, 282 aa, Humicola insolens
GRSTRYWDCCKPSCGWAKKAPVNQPVFSCNANFQRITDFDAKSGCEPGGVAYSCADQTPWAVNDDFALGFAATSIAGSNEAGWCCACYELTFTSGPVAGKKMVVQSTSTGGDLGSNHFDLNIPGGGVGIFDGCTPQFGGLPGQRYGGISSRNECDRFPDALKPGCYWRFDWFKNADNPSFSFRQVQCPAELVARTGCRRNDDGNFPAVQIPSSSTSSPVNQPTSTSTTSTSTTSSPPVQPTTPSGCTAEFWAQCGGNGWSGCTTCVAGSTCTKINDWYHQCL

SEQ ID NO: 48413 - protein, 282 aa, Synthetic construct
GKSTRYWDCCKPSCGWAKKAPVNQPVFSCNANFQRLTDFDAKSGCEPGGVAYKCADQTPWAVNDDFAFGFAATSIAGSNEAGWCCACYELTFTSGPVAGKKMVVQSTSTGGDLGSNHFDLNIPGGGVGPFDGCTPQFGGLPGQRYGGISSRNECDRFPDALKPGCYWRFDWFKNADNPSFSFRQVQCPAELVARTGCRRNDDGNFPAVQIPSSSTSSPVGQPTSTSTTSTSTTSSPPVQPTTPSGCTAERWAQCGGNGWSGCTTCVAGSTCTKINDWYHQCL

SEQ ID NO: 48414 - protein, 282 aa, Synthetic construct
GKSTRYWDCCKPSCGWAKKAPVNQPVFSCNANFQRLTDFDAKSGCEPGGVAYLCADQTPWAVNDDFAFGFAATSIAGSNEAGWCCACYELTFTSGPVAGKKMVVQSTSTGGDLGSNHFDLNIPGGGVGPFDGCTPQFGGLPGQRYGGISSRNECDRFPDALKPGCYWRFDWFKNADNPSFSFRQVQCPAELVARTGCRRNDDGNFPAVQIPSSSTSSPVGQPTSTSTTSTSTTSSPPVQPTTPSGCTAERWAQCGGNGWSGCTTCVAGSTCTKINDWYHQCL

SEQ ID NO: 48415 - protein, 282 aa, Humicola insolens
GRSTRYWDCCKPSCGWAKKAPVNQPVFSCNANFQRITDFDAKSGCEPGGVAYSCADQTPWAVNDDFALGFAATSIAGSNEAGWCCACYELTFTSGPVAGKKMVVQSTSTGGDLGSNHFDLNIPGGGVGIFDGCTPQFGGLPGQRYGGISSRNECDRFPDALKPGCYWRFDWFKNADNPSFSFRQVQCPAELVARTGCRRNDDGNFPAVQIPSSSTSSPVNQPTSTSTTSTSTTSSPPPPPTTPSGCTAERWAQCGGNGWSGCTTCVAGSTCTKINDWYHQCL

SEQ ID NO: 48416 - protein, 282 aa, Humicola insolens
GRSTRYWDCCKPSCGWANKAPVNQPVFSCNANFQRITDFDAKSGCEPGGVAYSCADQTPWAVNDDFALGFAATSIAGSNEAGWCCACYELTFTSGPVAGKKMVVQSTSTGGDLGSNHFDLNIPGGGVGIFDGCTPQFGGLPGQRYGGISSRNECDRFPDALKPGCYWRFDWFKNADNPSFSFRQVQCPAELVARTGCRRNDDGNFPAVQIPSSSTSSPVNQPTSTSTTSTSTTSSPPVQPTTPSGCTAERWAQCGGNGWSGCTTCVAGSTCTKINDWYHQCL

SEQ ID NO: 48417 - protein, 277 aa, Thermothielavioides terrestris
AGSGQSTRYWDCCKPSCAWPGKAAVSQPVYACDANFQRLSDFNVQSGCNGGSAYACADQTPWAVNDNLAYGFAATSIAGGSESSWCCACYALTFTSGPVAGKTMVVQSTSTGGDLGSNHFDIAMPGGGVGIFNGCSSQFGGLPGARYGGISSRDQCDSFPAPLKPGCYWRFDWFQNADNPTFTFQQVQCPAEIVARSGCKRNDDSSFPVFTPPSGGNGGTGTPTSTAPGSGQTSPGGGSGCTSQKWAQCGGIGFSGCTTCVSGTTCQKLNDYYSQCL

SEQ ID NO: 48418 - protein, 277 aa, Thermothielavioides terrestris
SGSGQSTRYWDCCKPSCAWPGKAAVSQPVYACDANFQRLSDFNVQSGCNGGSAYACADQTPWAVNDNLAYGFAATSIAGGSESSWCCACYALTFTSGPVAGKTMVVQSTSTGGDLGSNHFDIAMPGGGVGIFDGCSSQFGGLPGARYGGISSRDQCDSFPEPLKPGCYWRFDWFQNADNPTFTFQQVQCPAEIVARSGCKRNDDSSFPVFTPPSGGNGGTGTPTSTAPGSGQTSPGGGSGCTSQKWAQCGGIGFSGCTTCVSGTTCQKLNDYYSQCL

SEQ ID NO: 48419 - protein, 277 aa, Thermothielavioides terrestris
SGSGQSTRYWDCCKPSCAWPGKAAVSQPVYACDANFQRLTDFNVQSGCNGGSAYACADQTPWAVNDNLAYGFAATSIAGGSESSWCCACYALTFTSGPVAGKTMVVQSTSTGGDLGSNHFDIAMPGGGVGIFNGCSSQFGGLPGARYGGISSRDQCDSFPAPLKPGCYWRFDWFQNADNPTFTFQQVQCPAEIVARSGCKRNDDSSFPVFTPPSGGNGGTGTPTSTAPGSGQTSPGGGSGCTSQKWAQCGGIGFSGCTTCVSGTTCQKLNDYYSQCL

SEQ ID NO: 48420 - protein, 277 aa, Thermothielavioides terrestris
SGSGQSTRYWDCCKPSCAWPGKAAVSQPVYACDANFQRLSDFNVQSGCNGGSAYACADQTPWAVNDNLAYGFAATSIAGGSESSWCCACYALTFTSGPVAGKTMVVQSTSTGGDLGSNHFDIAMPGGGVGIFDGCSSQFGGLPGAQYGGISSRDECDSFPAPLKPGCYWRFDWFQNADNPTFTFQQVQCPAEIVARSGCKRNDDSSFPVFTPPSGGNGGTGTPTSTAPGSGQTSPGGGSGCTSQKWAQCGGIGFSGCTTCVSGTTCQKLNDYYSQCL

SEQ ID NO: 48421 - protein, 277 aa, Thermothielavioides terrestris
SGSGQSTRYWDCCKPSCAWPGKAAVSQPVYACDANFQRLSDFNVQSGCNGGSAYSCADQTPWAVNDNLAYGFAATSIAGGSESSWCCACYALTFTSGPVAGKTMVVQSTSTGGDLGSNHFDIAMPGGGVGIFNGCSSQFGGLPGAQYGGISSRDECDSFPAPLKPGCYWRFDWFQNADNPTFTFQQVQCPAEIVARSGCKRNDDSSFPVFTPPSGGNGGTGTPTSTAPGSGQTSPGGGSGCTSQKWAQCGGIGFSGCTTCVSGTTCQKLNDYYSQCL

SEQ ID NO: 48422 - protein, 277 aa, Thermothielavioides terrestris
SGSGQSTRYWDCCKPSCAWPGKAAVSQPVYSCDANFQRLSDFNVQSGCNGGSAYACADQTPWAVNDNLAYGFAATSIAGGSESSWCCACYALTFTSGPVAGKTMVVQSTSTGGDLGSNHFDIAMPGGGVGIFNGCSSQFGGLPGARYGGISSRDQCDSFPAPLKPGCYWRFDWFQNADNPTFTFQQVQCPAEIVARSGCKRNDDSSFPVFTPPSGGNGGTGTPTSTAPGSGQTSPGGGSGCTSQKWAQCGGIGFSGCTTCVSGTTCQKLNDYYSQCL

SEQ ID NO: 48423 - protein, 277 aa, Thermothielavioides terrestris
SGSGQSTRYWDCCKPSCAWPGKAAVSQPVYSCDANFQRLSDFNVQSGCNGGSAYACADQTPWAVNDNLAYGFAATSIAGGSESSWCCACYALTFTSGPVAGKTMVVQSTSTGGDLGSNHFDIAMPGGGVGIFDGCSSQFGGLPGDRYGGISSRDQCDSFPAPLKPGCYWRFDWFQNADNPTVTFQQVQCPAEIVARSGCKRNDDSSFPVFTPPSGGNGGTGTPTSTAPGSGQTSPGGGSGCTSQKWAQCGGIGFSGCTTCVSGTTCQKLNDYYSQCL

SEQ ID NO: 48424 - protein, 277 aa, Thermothielavioides terrestris
SGSGQSTRYWDCCKPSCAWPGKAAVSQPVYACDANFQRLSDFNVQSGCNGGSAYSCADQTPWAVNDNLAYGFAATSIAGGSESSWCCACYALTFTSGPVAGKTMVVQSTSTGGDLGSNHFDIAMPGGGVGIFDGCSSQFGGLPGARYGGISSRDQCDSFPAPLKPGCQWRFDWFQNADNPTFTFQQVQCPAEIVARSGCKRNDDSSFPVFTPPSGGNGGTGTPTSTAPGSGQTSPGGGSGCTSQKWAQCGGIGFSGCTTCVSGTTCQKLNDYYSQCL

SEQ ID NO: 48425 - protein, 277 aa, Thermothielavioides terrestris
SGSGQSTRYWDCCKPSCAWPGKAAVSQPVYACDANFQRLSDFNVQSGCNGGSAYACADQTPWAVNDNLAYGFAATSIAGGSESSWCCACYALTFTSGPVAGKTMVVQSTSTGGDLGSNHFDIAMPGGGVGIFDGCSSQFGGLPGARYGGISSRDQCDSFPAPLKPGCYWRFDWFQNADNPTVTFQQVQCPAEIVARSGCRRNDDSSFPVFTPPSGGNGGTGTPTSTAPGSGQTSPGGGSGCTSQKWAQCGGIGFSGCTTCVSGTTCQKLNDYYSQCL

SEQ ID NO: 48426 - protein, 277 aa, Thermothielavioides terrestris
SGSGQSTRYWDCCKPSCAWPGKAAVSQPVYACDANFQRLSDFNVQSGCNGGSAYACADQTPWAVNDNLAYGFAATSIAGGSESSWCCACYALTFTSGPVAGKTMVVQSTSTGGDLGSNHFDIAMPGGGVGIFDGCSSQFGGLPGARYGGISSRDQCDSFPAPLKPGCYWRFDWFQNADNPTFTFQQVQCPAEIVARSGCKRNDDSSFPVFTPPSGGNGGTGTPTSTAPGSGQTSPGGGSGCTSQKWAQCGGIGFSGCTTCVSGTTCQKLNDYYSQCL

SEQ ID NO: 48427 - protein, 277 aa, Thermothielavioides terrestris
SGSGQSTRYWDCCKPSCAWPGKAAVSQPVYACDANFQRLSDFNVQSGCNGGSAYSCADQTPWAVNDNLAYGFAATSIAGGSESSWCCACYALTFTSGPVAGKTMVVQSTSTGGDLGSNHFDIAMPGGGVGIFNGCSSQFGGLPGARYGGISSRDECDSFPAPLKPGCQWRFDWFQNADNPTFTFQQVQCPAEIVARSGCKRNDDSSFPVFTPPSGGNGGTGTPTSTAPGSGQTSPGGGSGCTSQKWAQCGGIGFSGCTTCVSGTTCQKLNDYYSQCL

SEQ ID NO: 48428 - protein, 277 aa, Thermothielavioides terrestris
SGSGQSTRYWDCCKPSCAWPGKAAVSQPVYACDANFQRLSDFNVQSGCNGGSAYACADQTPWAVNDNLAYGFAATSIAGGSESSWCCACYALTFTSGPVAGKTMVVQSTSTGGDLGSNHFDIAMPGGGVGIFDGCSSQFGGLPGDRYGGISSRDQCDSFPEPLKPGCYWRFDWFQNADNPTFTFQQVQCPAEIVARSGCKRNDDSSFPVFTPPSGGNGGTGTPTSTAPGSGQTSPGGGSGCTSQKWAQCGGIGFSGCTTCVSGTTCQKLNDYYSQCL

SEQ ID NO: 48429 - protein, 277 aa, Thermothielavioides terrestris
SGSGQSTRYWDCCKPSCAWPGKAAVSQPVYSCDANFQRLSDFNVQSGCNGGSAYACADQTPWAVNDNLAYGFAATSIAGGSESSWCCACYALTFTSGPVAGKTMVVQSTSTGGDLGSNHFDIAMPGGGVGIFDGCSSQFGGLPGARYGGISSRDQCDSFPAPLKPGCYWRFDWFQNADNPTVTFQQVQCPAEIVARSGCKRNDDSSFPVFTPPSGGNGGTGTPTSTAPGSGQTSPGGGSGCTSQKWAQCGGIGFSGCTTCVSGTTCQKLNDYYSQCL

SEQ ID NO: 48430 - protein, 277 aa, Thermothielavioides terrestris
SGSGQSTRYWDCCKPSCAWPGKAAVSQPVYACDANFQRLSDFNVQSGCNGGSAYACADQTPWAVNDNLAYGFAATSIAGGSESSWCCACYALTFTSGPVAGKTMVVQSTSTGGDLGSNHFDIAMPGGGVGIFNGCSSQFGGLPGARYGGISSRDQCDSFPAPLKPGCYWRFDWFQNADNPTFTFQQVQCPAEIVARSGCRRNDDSSFPVFTPPSGGNGGTGTPTSTAPGSGQTSPGGGSGCTSQKWAQCGGIGFSGCTTCVSGTTCQKLNDYYSQCL

SEQ ID NO: 48431 - protein, 277 aa, Thermothielavioides terrestris
SGSGQSTRYWDCCKPSCAWPGKAAVSQPVYACDANFQRLSDFNVQSGCNGGSAYSCADQTPWAVNDNLAYGFAATSIAGGSESSWCCACYALTFTSGPVAGKTMVVQSTSTGGDLGSNHFDIAMPGGGVGIFNGCSSQFGGLPGARYGGISSRDECDSFPEPLKPGCQWRFDWFQNADNPTFTFQQVQCPAEIVARSGCKRNDDSSFPVFTPPSGGNGGTGTPTSTAPGSGQTSPGGGSGCTSQKWAQCGGIGFSGCTTCVSGTTCQKLNDYYSQCL

SEQ ID NO: 48432 - protein, 277 aa, Thermothielavioides terrestris
SGSGQSTRYWDCCKPSCAWPGKAAVSQPVYACDANFQRLSDFNVQSGCNGGSAYACADQTPWAVNDNLAYGFAATSIAGGSESSWCCACYALTFTSGPVAGKKMVVQSTSTGGDLGSNHFDIAMPGGGVGIFNGCSSQFGGLPGARYGGISSRDQCDSFPAPLKPGCYWRFDWFQNADNPTFTFQQVQCPAEIVARSGCKRNDDSSFPVFTPPSGGNGGTGTPTSTAPGSGQTSPGGGSGCTSQKWAQCGGIGFSGCTTCVSGTTCQKLNDYYSQCL

SEQ ID NO: 48433 - protein, 277 aa, Thermothielavioides terrestris
SGSGQSTRYWDCCKPSCAWPGKAAVSQPVYACDANFQRLSDFNVQSGCNGGSAYSCADQTPWAVNDNLAYGFAATSIAGGSESSWCCACYALTFTSGPVAGKTMVVQSTSTGGDLGSNHFDIAMPGGGVGIFDGCSSQFGGLPGAEYGGISSRDECDSFPAPLKPGCQWRFDWFQNADNPTFTFQQVQCPAEIVARSGCKRNDDSSFPVFTPPSGGNGGTGTPTSTAPGSGQTSPGGGSGCTSQKWAQCGGIGFSGCTTCVSGTTCQKLNDYYSQCL

SEQ ID NO: 48434 - protein, 277 aa, Thermothielavioides terrestris
SGSGQSTRYWDCCKPSCAWPGKAAVSQPVYSCDANFQRLSDFNVQSGCNGGSAYACADQTPWAVNDNLAYGFAATSIAGGSESSWCCACYALTFTSGPVAGKTMVVQSTSTGGDLGSNHFDIAMPGGGVGIFDGCSSQFGGLPGSRYGGISSRDQCDSFPAPLKPGCYWRFDWFQNADNPTVTFQQVQCPAEIVARSGCKRNDDSSFPVFTPPSGGNGGTGTPTSTAPGSGQTSPGGGSGCTSQKWAQCGGIGFSGCTTCVSGTTCQKLNDYYSQCL

SEQ ID NO: 48435 - protein, 277 aa, Thermothielavioides terrestris
SGSGQSTRYWDCCKPSCAWPGKAAVSQPVYACDANFQRLSDFDVQSGCNGGSAYACADQTPWAVNDNLAYGFAATSIAGGSESSWCCACYALTFTSGPVAGKTMVVQSTSTGGDLGSNHFDIAMPGGGVGIFNGCSSQFGGLPGARYGGISSRDQCDSFPAPLKPGCYWRFDWFQNADNPTFTFQQVQCPAEIVARSGCKRNDDSSFPVFTPPSGGNGGTGTPTSTAPGSGQTSPGGGSGCTSQKWAQCGGIGFSGCTTCVSGTTCQKLNDYYSQCL

SEQ ID NO: 48436 - protein, 277 aa, Thermothielavioides terrestris
SGSGQSTRYWDCCKPSCAWPGKAAVSQPVYSCDANFQRLSDFNVQSGCNGGSAYACADQTPWAVNDNLAYGFAATNIAGGSESSWCCACYALTFTSGPVAGKTMVVQSTSTGGDLGSNHFDIAMPGGGVGIFDGCSSQFGGLPGARYGGISSRDQCDSFPEPLKPGCYWRFDWFQNADNPTFTFQQVQCPAEIVARSGCKRNDDSSFPVFTPPSGGNGGTGTPTSTAPGSGQTSPGGGSGCTSQKWAQCGGIGFSGCTTCVSGTTCQKLNDYYSQCL

SEQ ID NO: 48437 - protein, 277 aa, Thermothielavioides terrestris
SGSGQSTRYWDCCKPSCAWPGKAGVSQPVYACDANFQRLSDFNVQSGCNGGSAYSCADQTPWAVNDNLAYGFAATSIAGGSESSWCCACYALTFTSGPVAGKTMVVQSTSTGGDLGSNHFDIAMPGGGVGIFDGCSSQFGGLPGAQYGGISSRDECDSFPEPLKPGCQWRFDWFQNADNPTFTFQQVQCPAEIVARSGCKRNDDSSFPVFTPPSGGNGGTGTPTSTAPGSGQTSPGGGSGCTSQKWAQCGGIGFSGCTTCVSGTTCQKLNDYYSQCL

SEQ ID NO: 48438 - protein, 277 aa, Thermothielavioides terrestris
SGSGQSTRYWDCCKPSCAWPGKAAVSQPVYACDANFQRLSDFNVQSGCNGGSAYACADQTPWAVNDNLAYGFAATSIAGGSESSWCCACYALTFTSGPVAGKTMVVQSTSTGGDLGSNHFDIAMPGGGVGIFNGCSSQFGGLPGARYGGISSRDQCDSFPAPLKPGCYWRFDWFQNADNPTFTFRQVQCPAEIVARSGCKRNDDSSFPVFTPPSGGNGGTGTPTSTAPGSGQTSPGGGSGCTSQKWAQCGGIGFSGCTTCVSGTTCQKLNDYYSQCL

SEQ ID NO: 48439 - protein, 277 aa, Thermothielavioides terrestris
SGSGQSTRYWDCCKPSCAWPGKAAVSQPVYACDANFQRLSDFNVQSGCEGGSAYACADQTPWAVNDNLAYGFAATSIAGGSESSWCCACYALTFTSGPVAGKTMVVQSTSTGGDLGSNHFDIAMPGGGVGIFNGCSSQFGGLPGARYGGISSRDQCDSFPAPLKPGCYWRFDWFQNADNPTFTFQQVQCPAEIVARSGCKRNDDSSFPVFTPPSGGNGGTGTPTSTAPGSGQTSPGGGSGCTSQKWAQCGGIGFSGCTTCVSGTTCQKLNDYYSQCL

SEQ ID NO: 48440 - protein, 277 aa, Thermothielavioides terrestris
SGSGQSTRYWDCCKPSCAWPGKAAVSQPVYACDANFQRLSDFNVQSGCNGGSAYSCADQTPWAVNDNLAYGFAATSIAGGSESSWCCACYALTFTSGPVAGKTMVVQSTSTGGDLGSNHFDIAMPGGGVGIFNGCSSQFGGLPGARYGGISSRDQCDSFPAPLKPGCYWRFDWFQNADNPTFTFQQVQCPAEIVARSGCKRNDDSSFPVFTPPSGGNGGTGTPTSTAPGSGQTSPGGGSGCTSQKWAQCGGIGFSGCTTCVSGTTCQKLNDYYSQCL

SEQ ID NO: 48441 - protein, 277 aa, Thermothielavioides terrestris
SGSGQSTRYWDCCKPSCAWPGKAAVSQPVYACDANFQRLSDFNVQSGCNGGSAYACADQTPWAVNDNLAYGFAATSIAGGSESSWCCACYALTFTSGPVAGKTMVVQSTSTGGDLGSNHFDIAMPGGGVGIFNGCSSQFGGLPGARYGGISSRDQCDSFPAPLKPGCYWRFDWFQNADNPTFTFQQVQCPAELVARSGCKRNDDSSFPVFTPPSGGNGGTGTPTSTAPGSGQTSPGGGSGCTSQKWAQCGGIGFSGCTTCVSGTTCQKLNDYYSQCL

SEQ ID NO: 48442 - protein, 286 aa, Fungi
AADGKSTRYWDCCKPSCGWAKKAPVNQPVFSCNANFQRLTDFDAKSGCEPGGVAYSCADQTPWAVNDDFAFGFAATSIAGSNEAGWCCACYELTFTSGPVAGKKMVVQSTSTGGDLGSNHFDLNIPGGGVGIFDGCTPQFGGLPGQRYGGISSRNECDRFPDALKPGCYWRFDWFKNADNPSFSFRQVQCPAELVARTGCRRNDDGNFPAVQIPSSSTSSPVGQPTSTSTTSTSTTSSPPVQPTTPSGCTAERWACQCGGNGWSGCTTCVAGSTCTKINDWYHQCL

SEQ ID NO: 48443 - protein, 318 aa, Thielavia terrestris. Staphylotrichum coccosporum. Chimeric. Synthetic construct
MRSTPVLRTTLAAALPLVASAASGSGQSTRYWDCCKPSCAWPGKAAVSQPVYACDANFQRLSDFNVQSGCNGGSAYSCADQTPWAVNDNLAYGFAATSIAGGSESSWCCACYALTFTSGPVAGKTMVVQSTSTGGDLGSNHFDIAMPGGGVGIFNGCSSQFGGLPGAQYGGISSRDQCDSFPAPLKPGCQWRFDWFQNADNPTFTFQQVQCPAEIVARSGCKRNDDGNFPVFTPPSGGQSSSSSSSSSAKPTSTSTSTTSTKATSTTSTASSQTSSSTGGGCAAQKYAQCGGIGFSGCTTCVSGTTCNKQNDYYSQCL

SEQ ID NO: 48444 - protein, 228 aa, Thermothielavioides terrestris
SGSGQSTRYWDCCKPSCAWPGKAAVSQPVYACDANFQRLSDFNVQSGCNGGSAYSCADQTPWAVNDNLAYGFAATSIAGGSESSWCCACYALTFTSGPVAGKTMVVQSTSTGGDLGSNHFDIAMPGGGVGIFNGCSSQFGGLPGAQYGGISSRDQCDSFPAPLKPGCQWRFDWFQNADNPTFTFQQVQCPAEIVARSGCKRNDDSSFPVFTPPPPPPPPPPPPPGCTS

SEQ ID NO: 48445 - protein, 229 aa, Thermothielavioides terrestris
SGSGQSTRYWDCCKPSCAWPGKAAVSQPVYACDANFQRLSDFNVQSGCNGGSAYSCADQTPWAVNDNLAYGFAATSIAGGSESSWCCACYALTFTSGPVAGKTMVVQSTSTGGDLGSNHFDIAMPGGGVGIFNGCSSQFGGLPGAQYGGISSRDQCDSFPAPLKPGCQWRFDWFQNADNPTFTFQQVQCPAEIVARSGCKRNDDSSFPVFTTTPTPPTPTPTPTPGCTA

SEQ ID NO: 48446 - protein, 292 aa, Thermochaetoides thermophila
MRSTPVLRTALAAALPFTVLAADGKSTRYWDCCKPSCLSPGNVQVSQNVFACDTNFNRIYDFGAKSGCEGGPAYSCADQTPWAVNDQFSYGFAATNIAGGNEASWCCACYKLTFTDGPVAGKVMVVQSTSTGGDLGNNHFDLNIPGGGVGIFDGCTPQFGGLPGERYGGISSRSQCDSFPDALKPGCYWRFDWFLNADNPNFTFERVQCPSELVGNGGTGTDGNYAPGSGQTSDGGGSQQPQQPTSSSSQASVSTSNPGGCTSQKQAQCGYIGFTCVSGTTCTKLNDWYSQC

SEQ ID NO: 48447 - protein, 231 aa, Ascomycota
MLSQSVLTLALAALLPTLTAAQSGRTTRYWDCCKPSCAWSGKAQVNRPILTCSANDSPLTDPDVRSGCDGGSAYTCSNNSPWAVNDQTAYGFAATAISGQSESSWCCACYALTFTSGPVAGKTMVVQSTNTGGDLGSNHFDILMPGGGVGLFDGCTPQFGGIPGAQYGGVSSRSECDSMPANLKAGCQWRFDWFQNADNPDVSFKQVRCPSELTSISGCTRNDDGSFPAFS

SEQ ID NO: 48448 - protein, 226 aa, Fusarium oxysporum
TLLALAGPLAVSAASGSGHSTRYWDCCKPSCSWSGKAAVNAPALTCDKNDNPISNTNAVNGCEGGGSAYACTNYSPWAVNDELAYGFAATKISGGSEASWCCACYALTFTTGPVKGKKMIVQSTNTGGDLGDNHFDLMMPGGGVGIFDACTSEFGKALGGAQYGGISSRSECDSYPELLKDGCHWRFDWFENADNPDFTFEQVQCPKALLDISGCKRDDDSSFPAF

SEQ ID NO: 48449 - protein, 309 aa, Thermochaetoides thermophila
MRSTPVLRTALAAALPFTVLAADGKSTRYWDCCKPSCLSPGNSEVSQNVFACDTNFNRIYDFGAKSYCEGGPAYSCQDQTPWAVNDQFSYGFAATNIAGGNRASWCCACYKLTFTDGPVAGSVMVVQSTSTGGDLGNNHFDLNIPGGGVGIFDGCTPQFGGLPGERYGGISSRSQCDSFPDALKPGCYWRFDWFLNADNPNFTFERVQCPSELVARTGCKRNDDGNYPVFTPPSGDSPSSSSAAPTSTSTSQQPQQPRSSSSQASVPTSNPGGCTSQKWAKCGGIGFTGCSSGVSGTTCTKLNDWYSQC

SEQ ID NO: 48450 - protein, 309 aa, Thermochaetoides thermophila
MRSTPVLRTALAAALPFTVLAANGKSTRYWDCCKPSCLSPGNLQVSQNVFACDRNFNRIYDFGAKTYCEGGPAYSCEDQTPWAVNDQFSYGFAATNIAGGNQASWCCACYKLTFTDGPVAGKVMVVQSTSTGGDLGNNHFSLNIPGGGVGIFDGCTPQFGGLPGERYGGISSRSQCDSFTDALKPGCYWRFDWFLNADNPNFTFERVQCPSELVARTGCKRNDDGNYPVFTPPSGDSPSSSSAAPTSTSTSQQPQQPRSSSSQASVPTSNPGGCTSQKWAQCGGIGFTGCSTCVSGTTCTKLNDWYSQC

SEQ ID NO: 48451 - protein, 309 aa, Thermochaetoides thermophila
MRSTPVLRTALAAALPGTVLAANGNSTRYWDCCKPSCLSPGNVQVSQNVFACDRNFNRIYDFGAKTYCEGGPAYSCADQTPWAVNDQFSYGFAATNIAGGNEASWCCACYKLTFTEGPVAGKVMVVQSTSTGGDLGNNHFSLNIPGGGVGIFDGCTPQFGGLPGERYGGISSRSQCDSFTDALKPGCYWRFDWTLNADNPNFTFERVQCPSELVARTGCKRNDDGNYPVFTPPSGDSPSSSSAAPTSTSTSQQPQQPTSSSSQASVPTSNPGGCESQKWAQCGGIGFTGCSSCVSGTTCTKLNDWYSQC

SEQ ID NO: 48452 - protein, 307 aa, Unidentified
MRSTPVLRTTLAAALPLVASAASGSGQSTRYWDCCKPSCAWPGKAAVSQPVYACDANFQRLSDFNVQSGCNGGSAYSCADQTPWAVNDNLAYGFAATSIAGGSESSWCCACYALTFTSGPVAGKTMVVQSTSTGGDLGSNHFDIAMPGGGVGIFNGCSSQFGGLPGAQYGGISSRDQCDSFPAPLKPGCQWRFDWFQNADNPTFTFQQVQCPAEIVARSGCKANDDSSFPVFTPGTSGSSSTAKPASSSTRATSTKTSAPATQTSSTGGGCVAQKWAQCGGSGFSGCTTCAAGSTCTKQNDYYSQCL

SEQ ID NO: 48453 - protein, 212 aa, Fusarium oxysporum
SGSGHSTRYWDCCKPSCSWSGKAAVNAPALTCDKNDNPISNTNAVNGCEGGGSAYACTNYSPWAVNDELAYGFAATKISGGSEASWCCACYALTFTTGVPKGKKMIVQSTNTGGDLGDNHFDLMMPGGGVGIFDGCTSEFGKALGGAQYGGISSRSECDSYPELLKDGCHWRFDWFENADNPDFTFEQVQCPKALLDISGCKRDDDSSFPAF

SEQ ID NO: 48454 - protein, 293 aa, Acremonium thermophilum
DGKSTRYWDCCKPSCGWAGKASVNQPVFSCSADWQRISDFNAKSGCDGGSAYSCADQTPWAVNDNFSYGFAATAIAGGSESSWCCACYALTFNSGPVAGKTMVVQSTSTGGDLGSNQFDLAIPGGGVGIFNGCASQFGGLPGAQYGGISDRSQCSSFPAPLQPGCQWRFDWFQNADNPTFTFQRVQCPSELTSRTGCKRDDDASYPVFNPPSVPGLDGSNPGNPTTTVVPPASTSTSRPTSSTSSPVSTPTGQPGGCTTQKWGQCGGIGYTGCTNCVAGTTCTQLNPWYSQCL

SEQ ID NO: 48455 - protein, 413 aa, Thermochaetoides thermophila
TRKFALVPLLLGLASAQKPGNTPEVHPKITTYRCSHRQGCRPETNYIVLDSLTHPVHQLNSNANCGDWGNPPPRSVCPDVETCAQNCIMEGIQDYSTYGVTTSGSSLRLKQIHQGRVTSPRVYLLDKTEQQYEMMRLTGFEFTFDVDTTKLPCGMNAALYLSEMDATGARSRLNPGGAYYGTGYCDAQCFVTPFINGIGNIEGKGSCCNEMDIWEANSRSQSIAPHPCNKQGLYMCSGQECEFDGVCDEWGCTWNPYKVNVTDYYGRGPQFKVDTTRPFTVITQFPADQNGKLTSIHRMYVQDGKLIEAHTVNLPGYPQVNALNDDFCRATGAATKYLELGATAGMGEALRRGMVLAMSIWWDESGFMNWLDSGESGPCNPNEGNPQNIRQIEPEPEVTYSNLRWGEIGSTYK

SEQ ID NO: 48456 - protein, 242 aa, Thermothielavioides terrestris
SGSGQSTRYWDCCKPSCAWPGKAAVSQPVYACDANFQRLSDFNVQSGCNGGSAYSCADQTPWAVNDNLAYGFAATSIAGGSESSWCCACYALTFTSGPVAGKTMVVQSTSTGGDLGSNHFDIAMPGGGVGIFNGCSSQFGGLPGAQYGGISSRDQCDSFPAPLKPGCQWRFDWFQNADNPTFTFQQVQCPAEIVARSGCKRNDDSSFPVFTTTPPTPTPTPTPGCTSQKWAQCGGIGFSGCT

SEQ ID NO: 48457 - protein, 282 aa, Humicola insolens
GRSTRYWDCCKPSCGWAKKAPVNQPVFSCNANFQRITDFDAKSGCEPGGVAYSCADQTPWAVNDDFALGFAATSIXGSNEAGWCCACYELTFTSGPVAGKKMVVQSTSTGGDLGSNHFDLNIPGGGVGIFDGCTPQFGGLPGQRYGGISSRNECDRFPDXLKPGCYWRFDWFXNADNPSFSFRQVQCPAELVARTGCRRNDDGNFPAVQIPSSSTSSPVNQPTSTSTTSTSTTSSPPVQPTTPSGCTAERWAQCGGNGWSGCTTCVAGSTCTKINDWYHQCL

SEQ ID NO: 48458 - protein, 282 aa, Humicola insolens
GRSTRYWDCCKPSCGWAKKAPVNQPVFSCNANFQRITDFDAKSGCEPGGVAYSCADQTPWAVNDDFALGFAATSIAGSNEAGWCCACYELTFTSGPVAGKKMVVQSTSTGGDLGSNHFDLNIPGGGVGIFDGCTPQFGGLPGQRSGGISSRNECDRFPDALKPGCYWRFDWFKNADNPSFSFRQVQCPAELVARTGCRRNDDGNFPAVQIPSSSTSSPVNQPTSTSTTSTSTTSSPPVQPTTPSGCTAERWAQCGGNGWSGCTTCVAGSTCTKINDWYHQCL

SEQ ID NO: 48459 - protein, 282 aa, Humicola insolens
GRSTRYWDCCKPSCGWAKKAPVNQPVFSCNANFQRITDFDAKSGCEPGGVAYSCADQTPWAVNDDFALGFAATSIAGSNEAGWCCACYELTFTSGPVAGKKMVVQSTSTGGDLGSNHFDLNIPGGGVGIFDGCTPQFGGLPGQRYGGISSRNECDRFPDALKPGCYWRFDWFKNADNPSFSFRQVQCPAELVARTGCRRNDDGNFPAVQIPSSSTSSPVNQPTSTSTTSTSTTSSPPVQPTTPSGCTAERWAQCGGNGWSGCTTCVAGSTCTKINDWFHQCL

SEQ ID NO: 48460 - protein, 282 aa, Humicola insolens
GRSTRYWDCCKPSCGWAKKAPVNQPVFSCNANFQRITDFDAKSGCEPGGVAYSCADQTPEAVNDDFALGFAATSIAGSNEAGWCCACYELTFTSGPVAGKKMVVQSTSTGGDLGSNHFDLNIPGGGVGIFDGCTPQFGGLPGQRYGGISSRNECDRFPDALKPGCYWRFDWFKNADNPSFSFRQVQCPAELVARTGCRRNDDGNFPAVQIPSSSTSSPVNQPTSTSTTSTSTTSSPPVQPTTPSGCTAERWAQCGGNGWSGCTTCVAGSTCTKINDWYHQCL

SEQ ID NO: 48461 - protein, 282 aa, Humicola insolens
GRSTRYWDCCKPSCGWAKKAPVNQPVFSCNANFQRITDFDAKSGCEPGGVAYSCADQTPWAVNDDFALGFAATSIAGSNEAGWCCACYELTFTSGPVAGKKMVVQSTSTGTDLGSNHFDLNIPGGGVGIFDGCTPQFGGLPGQRYGGISSRNECDRFPDALKPGCYWRFDWFKNADNPSFSFRQVQCPAELVARTGCRRNDDGNFPAVQIPSSSTSSPVNQPTSTSTTSTSTTSSPPVQPTTPSGCTAERWAQCGGNGWSGCTTCVAGSTCTKINDWYHQCL

SEQ ID NO: 48462 - protein, 282 aa, Humicola insolens
GRSTRYWDCCKPSCGWAKKAPVNQPVFSCNANFTRITDFDAKSGCEPGGVAYSCADQTPWAVNDDFALGFAATSIAGSNEAGWCCACYELTFTSGPVAGKKMVVQSTSTGGDLGSNHFDLNIPGGGVGIFDGCTPQFGGLPGQRYGGISSRNECDRFPDALKPGCYWRFDWFKNADNPSFSFRQVQCPAELVARTGCRRNDDGNFPAVQIPSSSTSSPVNQPTSTSTTSTSTTSSPPVQPTTPSGCTAERWAQCGGNGWSGCTTCVAGSTCTKINDWYHQCL

SEQ ID NO: 48463 - protein, 282 aa, Humicola insolens
GRSTRFWDCCKPSCGWAKKAPVNQPVFSCNANFQRITDFDAKSGCEPGGVAYSCADQTPWAVNDDFALGFAATSIAGSNEAGWCCACYELTFTSGPVAGKKMVVQSTSTGGDLGSNHFDLNIPGGGVGIFDGCTPQFGGLPGQRYGGISSRNECDRFPDALKPGCYWRFDWFKNADNPSFSFRQVQCPAELVARTGCRRNDDGNFPAVQIPSSSTSSPVNQPTSTSTTSTSTTSSPPVQPTTPSGCTAERWAQCGGNGWSGCTTCVAGSTCTKINDWYHQCL

SEQ ID NO: 48464 - protein, 282 aa, Humicola insolens
GRSTRYWDCCKPSCGWAKKAPVNQPVFSCNANFQRITDFDAKSGCEPGGVAYSCADQTPWAVNDDFALGFAATSIAGSNEAGWCCACYELTFTSGPVAGKKMVVQSTSTGGDLGSNHFDLNIPGGGVGIFDGCTPQFGGLPGQRYGGISSRNECDRFPDALKPGCYWRFDWFKNADNPSFSFRQVQCPAELVARTGCRRNDDGNFPAVQIPSSSTSSPVNQPTSTSTTSTSTTSSPPVQPTTPSGCTAEFWAQCGGNGWSGCTTCVAGSTCTKINDWFHQCL

SEQ ID NO: 48465 - protein, 277 aa, Thermothielavioides terrestris
SGSGQSTRYWDCCKPSCAWPGKAAVSQPVYACDANFQRLSDFNVQSGCNGGSAYACADQTPWAVNDNLAYGFAATSIAGGSESSWCCACYALTFTSGPVAGKTMVVQSTSTGGDLGSNHFDIAMPGGGVGIFDGCSSQFGGLPGAQYGGISSRDECDSFPEPLKPGCQWRFDWFQNADNPTFTFQQVQCPAEIVARSGCKRNDDSSFPVFTPPSGGNGGTGTPTSTAPGSGQTSPGGGSGCTSQKWAQCGGIGFSGCTTCVSGTTCQKLNDYYSQCL

SEQ ID NO: 48466 - protein, 277 aa, Thermothielavioides terrestris
SGSGQSTRYWDCCKPSCAWPGKAAVSQPVYACDANFQRLSDFNVQSGCNGGSAYSCADQTPWAVNDNLAYGFAATSIAGGSESIWCCACYALTFTSGPVAGKTMVVQSTSTGGDLGSNHFDIAMPGGGVGIFNGCSSQFGGLPGARYGGISSRDQCDSFPAPLKPGCQWRFDWFQNADNPTFTFQQVQCPAEIVARSGCKRNDDSSFPVFTPPSGGNGGTGTPTSTAPGSGQTSPGGGSGCTSQKWAQCGGIGFSGCTTCVSGTTCQKLNDYYSQCL

SEQ ID NO: 48467 - protein, 277 aa, Thermothielavioides terrestris
SGSGQSTRYWDCCKPSCAWPGKAAVSQPVYACDANFQRLSDFNVQSGCNGGSAYACADQTPWAVNDNLAYGFAATSIAGGSESSWCCACYALTFTSGPVAGKTMVVQSTSTGGDLGSNHFDIAMPGGGVGIFDGCSSQFGGLPGARYGGISSRDQCDSFPEPLKPGCYWRFDWFQNADNPTVTFQQVQCPAEIVARSGCKRNDDSSFPVFTPPSGGNGGTGTPTSTAPGSGQTSPGGGSGCTSQKWAQCGGIGFSGCTTCVSGTTCQKLNDYYSQCL

SEQ ID NO: 48468 - protein, 277 aa, Thermothielavioides terrestris
SGSGQSTRYWDCCKPSCAWPGKAAVSQPVYACDANFQRLSDFNVQSGCNGGSAYSCADQTPWAVNDNLAYGFAATSIAGGSESSWCCACYALTFTSGPVAGKTMVVQSTSTGGDLGSNHFDIAMPGGGVGIFNGCSSQFGGLPGAQYGGISSRDQCDSFPAPLKPGCQWRFDWFQNADNPTFTFQQVQCPAELVARSGCKRNDDSSFPVFTPPSGGNGGTGTPTSTAPGSGQTSPGGGSGCTSQKWAQCGGIGFSGCTTCVSGTTCQKLNDYYSQCL

SEQ ID NO: 48469 - protein, 277 aa, Thermothielavioides terrestris
SGSGQSTRYWDCCKPSCAWPGKAAVSQPVYACDANFQRLSDFNVQSGCNGGSAYSCADQTPWAVNDNLAYGFAATSIAGGSESSWCCACYALTFTSGPVAGKTMVVQSTSTGGDLGSNHFDIAMPGGGVGIFNGCSSQFGGLPGAQYGGISSRDQCDSFPAPLKPGCQWRFDWFQNADNPTFTFQQVQCPAEIVARSGCRRNDDSSFPVFTPPSGGNGGTGTPTSTAPGSGQTSPGGGSGCTSQKWAQCGGIGFSGCTTCVSGTTCQKLNDYYSQCL

SEQ ID NO: 48470 - protein, 277 aa, Thermothielavioides terrestris
SGSGQSTRYWDCCKPSCAWPGKAAVSQPVYACDANFQRLSDFNVQSGCNGGSAYSCADQTPWAVNDNLAYGFAATSIAGGSESSWCCACYALTFTSGPVAGKTMVVQSTSTGGDLGSNHFDIAMPGGGVGIFNGCSSQFGGLPGDRYGGISSRDQCDSFPAPLKPGCQWRFDWFQNADNPTFTFQQVQCPAEIVARSGCKRNDDSSFPVFTPPSGGNGGTGTPTSTAPGSGQTSPGGGSGCTSQKWAQCGGIGFSGCTTCVSGTTCQKLNDYYSQCL

SEQ ID NO: 48471 - protein, 277 aa, Thermothielavioides terrestris
SGSGQSTRYWDCCKPSCAWPGKAAVSQPVYSCDANFQRLSDFNVQSGCNGGSAYACADQTPWAVNDNLAYGFAATNIAGGSESSWCCACYALTFTSGPVAGKTMVVQSTSTGGDLGSNHFDIAMPGGGVGIFDGCSSQFGGLPGARYGGISSRDQCDSFPAPLKPGCYWRFDWFQNADNPTVTFQQVQCPAEIVARSGCKRNDDSSFPVFTPPSGGNGGTGTPTSTAPGSGQTSPGGGSGCTSQKWAQCGGIGFSGCTTCVSGTTCQKLNDYYSQCL

SEQ ID NO: 48472 - protein, 277 aa, Thermothielavioides terrestris
SGSGQSTRYWDCCKPSCAWPGKAAVSQPVYACDANFQRLSDFNVQSGCNGGSAYSCADQTPWAVNDNLAYGFAATSIAGGSESSWCCACYALTFTSGPVAGKTMVVQSTSTGGDLGSNHFDIAMPGGGVGIFDGCDSQFGGLPGAQYGGISSRDQCDSFPAPLKPGCQWRFDWFQNADNPTFTFQQVQCPAEIVARSGCKRNDDSSFPVFTPPSGGNGGTGTPTSTAPGSGQTSPGGGSGCTSQKWAQCGGIGFSGCTTCVSGTTCQKLNDYYSQCL

SEQ ID NO: 48473 - protein, 277 aa, Thermothielavioides terrestris
SGSGQSTRYWDCCKPSCAWPGKAAVSQPVYACDANFQRLSDFNVQSGCNGGSAYACADQTPWAVNDNLAYGFAATSIAGGSESSWCCACYALTFTSGPVAGKTMVVQSTSTGGDLGSNHFDIAMPGGGVGIFNGCSSQFGGLPGARYGGISSRDQCDSFPEPLKPGCYWRFDWFQNADNPTFTFQQVQCPAEIVARSGCKRNDDSSFPVFTPPSGGNGGTGTPTSTAPGSGQTSPGGGSGCTSQKWAQCGGIGFSGCTTCVSGTTCQKLNDYYSQCL

SEQ ID NO: 48474 - protein, 277 aa, Thermothielavioides terrestris
SGSGQSTRYWDCCKPSCAWPGKAAVSQPVYACDANFQRLSDFNVQSGCNGGSAYACADQTPWAVNDNLAYGFAATSIAGGSESSWCCACYALTFTSGPVAGKTMVVQSTSTGGDLGSNHFDIAMPGGGVGIFNGCSSQFGGLPGARYGGISSRDQCDSFPAPLKPGCYWRFDWFQNADNPTFTFQQVQCPAEIVARSGCKRNDDSSFPVFTPPSGGNWGTGTPTSTAPGSGQTSPGGGSGCTSQKWAQCGGIGFSGCTTCVSGTTCQKLNDYYSQCL

SEQ ID NO: 48475 - protein, 277 aa, Thermothielavioides terrestris
SGSGQSTRYWDCCKPSCAWPGKAAVSQPVYACDANFQRLSDFNVQSGCNGGSAYSCADQTPWAVNDNLAYGFAATSIAGGSESSWCCACYALTFTSGPVAGKTMVVQSTSTGGDLGSNHFDIAMPGGGVGIFNGCSSQFGGLPGARYGGISSRDQCDSFPAPLKPGCQWRFDWFQNADNPTFTFQQVQCPAEIVARSGCKRNDDSSFPVFTPPSGGNGGTGTPTSTAPGSGQTSPGGGSGCTSQKWAQCGGIGFSGCTTCVSGTTCQKLNDYYSQCL

SEQ ID NO: 48476 - protein, 277 aa, Thermothielavioides terrestris
SGSGQSTRYWDCCKPSCAWPGKAGVSQPVYACDANFQRLSDFNVQSGCNGGSAYACADQTPWAVNDNLAYGFAATSIAGGSESSWCCACYALTFTSGPVAGKTMVVQSTSTGGDLGSNHFDIAMPGGGVGIFDGCSSQFGGLPGAQYGGISSRDQCDSFPAPLKPGCYWRFDWFQNADNPTFTFQQVQCPAEIVARSGCKRNDDSSFPVFTPPSGGNGGTGTPTSTAPGSGQTSPGGGSGCTSQKWAQCGGIGFSGCTTCVSGTTCQKLNDYYSQCL

SEQ ID NO: 48477 - protein, 277 aa, Thermothielavioides terrestris
SGSGQSTRYWDCCKPSCAWPGKAAVSQPVYACDANFQRLSDFNVQSGCNGGSAYACADQTPWAVNDNLAYGFAATSIAGGSESSWCCACYALTFTSGPVAGKTMVVQSTSTGGDLGSNHFDIAMPGGGVGIFDGCSSQFGGLPGARYGGISSRDQCDSFPAPLKPGCQWRFDWFQNADNPTFTFQQVQCPAEIVARSGCKRNDDSSFPVFTPPSGGNGGTGTPTSTAPGSGQTSPGGGSGCTSQKWAQCGGIGFSGCTTCVSGTTCQKLNDYYSQCL

SEQ ID NO: 48478 - protein, 277 aa, Thermothielavioides terrestris
SGSGQSTRYWDCCKPSCAWPGKAAVSQPVYACDANFQRLSDFNVQSGCNGGSAYACADQTPWAVNDNLAYGFAATSIAGGSESSWCCACYALTFTSGPVAGKTMVVQSTSTGGDLGSNHFDIAMPGGGVGIFDGCSSQFGGLPGARYGGISSRDQCDSFPAPLKPGCQWRFDWFQNADNPTFTFQQVQCPAEIVARSGCKRNDDSSFPVFTPPSGGPGGPGTPTSTAPGSGPTSPGGGSGCTSQKWAQCGGIGFSGCTTCVSGTTCQKLNDYYSQCL

SEQ ID NO: 48479 - protein, 277 aa, Thermothielavioides terrestris
SGSGQSTRYWDCCKPSCAWPGKAAVSQPVYACDANFQRLSDFNVQSGCNGGSAYSCADQTPWAVNDNLAYGFAATSIAGGSESSWCCACYALTFTSGPVAGKTMVVQSTSTGGDLGSNHFDIAMPGGGVGIFNGCSSQFGGLPGAQYGGISSRDQCDSFPAPLKPGCYWRFDWFQNADNPTFTFQQVQCPAEIVARSGCKRNDDSSFPVFTPPSGGNGGTGTPTSTAPGSGQTSPGGGSGCTSQKWAQCGGIGFSGCTTCVSGTTCQKLNDYYSQCL

SEQ ID NO: 48480 - protein, 277 aa, Thermothielavioides terrestris
SGSGQSTRYWDCCKPSCAWPGKAAVSQPVYACDANFQRLSDFNVQSGCNGGSAYSCADQTPWAVNDNLAYGFAATSIAGGSESIWCCACYALTFTSGPVAGKTMVVQSTSTGGDLGSNHFDIAMPGGGVGIFDGCSSQFGGLPGAQYGGISSRDQCDSFPAPLKPGCQWRFDWFQNADNPTFTFQQVQCPAEIVARSGCKRNDDSSFPVFTPPSGGNGGTGTPTSTAPGSGQTSPGGGSGCTSQKWAQCGGIGFSGCTTCVSGTTCQKLNDYYSQCL

SEQ ID NO: 48481 - protein, 277 aa, Thermothielavioides terrestris
SGSGQSTRYWDCCKPSCAWPGKAAVSQPVYACDANFQRLSDFNVQSGCNGGSAYSCADQTPWAVNDNLAYGFAATSIAGGSESSWCCACYALTFTSGPVAGKTMVVQSTSTGGDLGSNHFDIAMPGGGVGIFNGCDSQFGGLPGARYGGISSRDQCDSFPAPLKPGCQWRFDWFQNADNPTFTFQQVQCPAEIVARSGCKRNDDSSFPVFTPPSGGNGGTGTPTSTAPGSGQTSPGGGSGCTSQKWAQCGGIGFSGCTTCVSGTTCQKLNDYYSQCL

SEQ ID NO: 48482 - protein, 277 aa, Thermothielavioides terrestris
SGSGQSTRYWDCCKPSCAWPGKAAVSQPVYACDANFQRLSDFNVQSGCNGGSAYSCADQTPWAVNDNLAYGFAATSIAGGSESSWCCACYALTFTSGPVAGKTMVVQSTSTGGDLGSNHFDIAMPGGGVGIFNGCRSQFGGLPGARYGGISSRDQCDSFPAPLKPGCQWRFDWFQNADNPTFTFQQVQCPAEIVARSGCKRNDDSSFPVFTPPSGGNGGTGTPTSTAPGSGQTSPGGGSGCTSQKWAQCGGIGFSGCTTCVSGTTCQKLNDYYSQCL

SEQ ID NO: 48483 - protein, 277 aa, Thermothielavioides terrestris
SGSGQSTRYWDCCKPSCAWPGKAAVSQPVYACDANFQRLSDFNVQSGCNGGSAYSCADQTPWAVNDNLAYGFAATSIAGGSESSWCCACYALTFTSGPVAGKTMVVQSTSTGGDLGSNHFDIAMPGGGVGIFNGCSSQFGGLPGARYGGISSRDQCDEFPAPLKPGCQWRFDWFQNADNPTFTFQQVQCPAEIVARSGCKRNDDSSFPVFTPPSGGNGGTGTPTSTAPGSGQTSPGGGSGCTSQKWAQCGGIGFSGCTTCVSGTTCQKLNDYYSQCL

SEQ ID NO: 48484 - protein, 277 aa, Thermothielavioides terrestris
SGSGQSTRYWDCCKPSCAWPGKAAVSQPVYACDANFQRLSDFNVQSGCNGGSAYSCADQTPWAVNDNLAYGFAATSIAGGSESSWCCACYALTFTSGPVAGKTMVVQSTSTGGDLGSNHFDIAMPGGGVGIFDGCSSQFGGLPGAQYGGISSRDQCDSFPAPLKPGCQWRFDWFQNADNPTFTFQQVQCPAEIVARSGCKRNDDSSFPVFTPPSGGNGGTGTPTSTAPGSGQTSPGGGSGCTSQKWAQCGGIGFSGCTTCVSGTTCQKLNDYYSQCL

SEQ ID NO: 48485 - protein, 277 aa, Thermothielavioides terrestris
SGSGQSTRYWDCCKPSCAWPGKAAVSQPVYACDANFQRLSDFNVQSGCNGGSAYSCADQTPWAVNDNLAYGFAATSIAGGSESSWCCACYALTFTSGPVAGKTMVVQSTSTGGDLGSNHFDIAMPGGGVGIFDGCSSQFGGLPGAQYGGISSRDQCDEFPAPLKPGCQWRFDWFQNADNPTFTFQQVQCPAEIVARSGCKRNDDSSFPVFTPPSGGNGGTGTPTSTAPGSGQTSPGGGSGCTSQKWAQCGGIGFSGCTTCVSGTTCQKLNDYYSQCL

SEQ ID NO: 48486 - protein, 277 aa, Thermothielavioides terrestris
SGSGQSTRYWDCCKPSCAWPGKAAVSQPVYACDANFQRLTDFNVQSGCNGGSAYSCADQTPWAVNDNLAYGFAATSIAGGSESSWCCACYALTFTSGPVAGKTMVVQSTSTGGDLGSNHFDIAMPGGGVGIFNGCSSQFGGLPGAQYGGISSRDQCDSFPAPLKPGCQWRFDWFQNADNPTFTFQQVQCPAEIVARSGCKRNDDSSFPVFTPPSGGNGGTGTPTSTAPGSGQTSPGGGSGCTSQKWAQCGGIGFSGCTTCVSGTTCQKLNDYYSQCL

SEQ ID NO: 48487 - protein, 277 aa, Thermothielavioides terrestris
SGSGQSTRYWDCCKPSCAWPGKAAVSQPVYACDANFQRLSDFNVQSGCNGGSAYSCADQTPWAVNDNLAYGFAATSIAGGSESSWCCACYALTFTSGPVAGKTMVVQSTSTGGDLGSNHFDIAMPGGGVGIFNGCSSQFGGLPGARYGGISSRDQCDDFPAPLKPGCQWRFDWFQNADNPTFTFQQVQCPAEIVARSGCKRNDDSSFPVFTPPSGGNGGTGTPTSTAPGSGQTSPGGGSGCTSQKWAQCGGIGFSGCTTCVSGTTCQKLNDYYSQCL

SEQ ID NO: 48488 - protein, 277 aa, Thermothielavioides terrestris
SGSGQSTRYWDCCKPSCAWPGKAAVSQPVYACDANFQRLSDFNVQSGCNGGSAYSCADQTPWAVNDNLAYGFAATSIAGGSESSWCCACYALTFTSGPVAGKKMVVQSTSTGGDLGSNHFDIAMPGGGVGIFNGCSSQFGGLPGAQYGGISSRDQCDSFPAPLKPGCQWRFDWFQNADNPTFTFQQVQCPAEIVARSGCKRNDDSSFPVFTPPSGGNGGTGTPTSTAPGSGQTSPGGGSGCTSQKWAQCGGIGFSGCTTCVSGTTCQKLNDYYSQCL

SEQ ID NO: 48489 - protein, 277 aa, Thermothielavioides terrestris
SGSGQSTRYWDCCKPSCAWPGKAAVSQPVYACDANFQRLSDFNVQSGCNGGSAYACADQTPWAVNDNLAYGFAATSIAGGSESSWCCACYALTFTSGPVAGKTMVVQSTSTGGDLGSNHFDIAMPGGGVGIFDGCSSQFGGLPGDRYGGISSRDQCDSFPAPLKPGCYWRFDWFQNADNPTVTFQQVQCPAEIVARSGCKRNDDSSFPVFTPPSGGNGGTGTPTSTAPGSGQTSPGGGSGCTSQKWAQCGGIGFSGCTTCVSGTTCQKLNDYYSQCL

SEQ ID NO: 48490 - protein, 277 aa, Thermothielavioides terrestris
SGSGQSTRYWDCCKPSCAWPGKAAVSQPVYACDANFQRLSDFNVQSGCNGGSAYSCADQTPWAVNDNLAYGFAATSIAGGSESSWCCACYALTFTSGPVAGKTMVVQSTSTGGDLGSNHFDIAMPGGGVGIFDGCKSQFGGLPGAQYGGISSRDQCDSFPAPLKPGCQWRFDWFQNADNPTFTFQQVQCPAEIVARSGCKRNDDSSFPVFTPPSGGNGGTGTPTSTAPGSGQTSPGGGSGCTSQKWAQCGGIGFSGCTTCVSGTTCQKLNDYYSQCL

SEQ ID NO: 48491 - protein, 277 aa, Thielavia hyrcaniae
SGSGQSTRYWDCCKPSCAWPGKAAVSQPVYACDANFQRLSDFNVQSGCNGGSAYSCADQTPWAVNDNLAYGFAATSIAGGSESSWCCACYALTFTSGPVAGKTMVVQSTSTGGDLGSNHFDIAMPGGGVGIFNGCSSQFGGLPGAQYGGISSRDECDSFPAPLKPGCQWRFDWFQNADNPTFTFQQVQCPAEIVARSGCKRNDDSSFPVFTPPSGGNGGTGTPTSTAPGSGQTSPGGGSGCTSQKWAQCGGIGFSGCTTCVSGTTCQKLNDYYSQCL

SEQ ID NO: 48492 - protein, 277 aa, Thermothielavioides terrestris
SGSGQSTRYWDCCKPSCAWPGKAAVSQPVYACDANFQRLSDFNVQSGCNGGSAYACADQTPWAVNDNLAYGFAATSIAGGSESSWCCACYALTFTSGPVAGKTMVVQSTSTGGDLGSNHFDIAMPGGGVGIFNGCSSQFGGLPGDRYGGISSRDQCDSFPAPLKPGCYWRFDWFQNADNPTFTFQQVQCPAEIVARSGCKRNDDSSFPVFTPPSGGNGGTGTPTSTAPGSGQTSPGGGSGCTSQKWAQCGGIGFSGCTTCVSGTTCQKLNDYYSQCL

SEQ ID NO: 48493 - protein, 277 aa, Thermothielavioides terrestris
SGSGQSTRYWDCCKPSCAWPGKAAVSQPVYACDANFQRLSDFNVQSGCNGGSAYSCADQTPWAVNDNLAYGFAATSIAGGSESSWCCACYALTFTSGPVAGKTMVVQSTSTGGDLGSNHFDIAMPGGGVGIFDGCSSQFGGLPGDQYGGISSRDQCDSFPAPLKPGCQWRFDWFQNADNPTFTFQQVQCPAEIVARSGCKRNDDSSFPVFTPPSGGNGGTGTPTSTAPGSGQTSPGGGSGCTSQKWAQCGGIGFSGCTTCVSGTTCQKLNDYYSQCL

SEQ ID NO: 48494 - protein, 277 aa, Thermothielavioides terrestris
SGSGQSTRYWDCCKPSCAWPGKAAVSQPVYACDANFQRLSDFNVQSGCNGGSAYSCADQTPWAVNDNLAYGFAATSIAGGSESSWCCACYALTFTSGPVAGKTMVVQSTSTGGDLGSNHFDIAMPGGGVGIFNGCSSQFGGLPGARYGGISSRDQCDSFPEPLKPGCQWRFDWFQNADNPTFTFQQVQCPAEIVARSGCKRNDDSSFPVFTPPSGGNGGTGTPTSTAPGSGQTSPGGGSGCTSQKWAQCGGIGFSGCTTCVSGTTCQKLNDYYSQCL

SEQ ID NO: 48495 - protein, 277 aa, Thermothielavioides terrestris
SGSGQSTRYWDCCKPSCAWPGKAAVSQPVYACDANFQRLSDFNVQSGCNGGSAYSCADQTPWAVNDNLAYGFAATSIAGGSESSWCCACYALTFTSGPVAGKTMVVQSTSTGGDLGSNHFDIAMPGGGVGIFDGCSSQFGGLPGAQYGGISSRDQCDSFPAPLKPGCQWRFDWFQNADNPTFTFQQVQCPAESVARSGCKRNDDSSFPVFTPPSGGNGGTGTPTSTAPGSGQTSPGGGSGCTSQKWAQCGGIGFSGCTTCVSGTTCQKLNDYYSQCL

SEQ ID NO: 48496 - protein, 277 aa, Thermothielavioides terrestris
SGSGQSTRYWDCCKPSCAWPGKAAVSQPVYSCDANFQRLSDFNVQSGCNGGSAYSCADQTPWAVNDNLAYGFAATSIAGGSESSWCCACYALTFTSGPVAGKTMVVQSTSTGGDLGSNHFDIAMPGGGVGIFNGCSSQFGGLPGAQYGGISSRDQCDSFPAPLKPGCQWRFDWFQNADNPTFTFQQVQCPAEIVARSGCKRNDDSSFPVFTPPSGGNGGTGTPTSTAPGSGQTSPGGGSGCTSQKWAQCGGIGFSGCTTCVSGTTCQKLNDYYSQCL

SEQ ID NO: 48497 - protein, 277 aa, Thermothielavioides terrestris
SGSGQSTRYWDCCKPSCAWPGKAAVSQPVYACDANFQRLSDFNVQSGCNGGSAYACADQTPWAVNDNLAYGFAATSIAGGSESSWCCACYALTFTSGPVAGKTMVVQSTSTGGDLGSNHFDIAMPGGGVGIFDGCSSQFGGLPGARYGGISSRDQCDSFPEPLKPGCQWRFDWFQNADNPTFTFQQVQCPAEIVARSGCKRNDDSSFPVFTPPSGGNGGTGTPTSTAPGSGQTSPGGGSGCTSQKWAQCGGIGFSGCTTCVSGTTCQKLNDYYSQCL

SEQ ID NO: 48498 - protein, 277 aa, Thermothielavioides terrestris
SGSGQSTRYWDCCKPSCAWPGKAAVSQPVYACDANFQRLSDFNVQSGCNGGSAYACADQTPWAVNDNLAYGFAATSIAGGSESSWCCACYALTFTSGPVAGKTMVVQSTSTGGDLGSNHFDIAMPGGGVGIFNGCSSQFGGLPGARYGGISSRDQCDSFPAPLKPGCYWRFDWFQNADNPTFTFQQVQCPAEIVARSGCKRNDDSSFPVFTPPSGGNGGTGTPTSTAPGSGQTSPGGGSGCTSQKWAQCGGIGFSGCTTCVSGTTCQKLNDYYSQCL

SEQ ID NO: 48499 - protein, 277 aa, Thermothielavioides terrestris
SGSGQSTRYWDCCKPSCAWPGKAAVSQPVYACDANFQRLSDFNVQSGCNGGSAYSCADQTPWAVNDNLAYGFAATSIAGGSESSWCCACYALTFTSGPVAGKTMVVQSTSTGGDLGSNHFDIAMPGGGVGIFNGCSSQFGGLPGAQYGGISSRDQCDSFPAPLKPGCQWRFDWFQNADNPTFTFRQVQCPAEIVARSGCKRNDDSSFPVFTPPSGGNGGTGTPTSTAPGSGQTSPGGGSGCTSQKWAQCGGIGFSGCTTCVSGTTCQKLNDYYSQCL

SEQ ID NO: 48500 - protein, 277 aa, Thermothielavioides terrestris
SGSGQSTRYWDCCKPSCAWPGKAAVSQPVYACDANFQRLSDFNVQSGCNGGSAYSCADQTPWAVNDNLAYGFAATSIAGGSESSWCCACYALTFTSGPVAGKTMVVQSTSTGGDLGSNHFDIAMPGGGVGIFDGCRSQFGGLPGAQYGGISSRDQCDSFPAPLKPGCQWRFDWFQNADNPTFTFQQVQCPAEIVARSGCKRNDDSSFPVFTPPSGGNGGTGTPTSTAPGSGQTSPGGGSGCTSQKWAQCGGIGFSGCTTCVSGTTCQKLNDYYSQCL

SEQ ID NO: 48501 - protein, 277 aa, Thermothielavioides terrestris
SGSGQSTRYWDCCKPSCAWPGKAAVSQPVYACDANFQRLSDFNVQSGCNGGSAYACADQTPWAVNDNLAYGFAATSIAGGSESSWCCACYALTFTSGPVAGKTMVVQSTSTGGDLGSNHFDIAMPGGGVGIFNGCSSQFGGLPGSRYGGISSRDQCDSFPEPLKPGCYWRFDWFQNADNPTFTFQQVQCPAEIVARSGCKRNDDSSFPVFTPPSGGNGGTGTPTSTAPGSGQTSPGGGSGCTSQKWAQCGGIGFSGCTTCVSGTTCQKLNDYYSQCL

SEQ ID NO: 48502 - protein, 277 aa, Thermothielavioides terrestris
SGSGQSTRYWDCCKPSCAWPGKAAVSQPVYACDANFQRLSDFDVQSGCNGGSAYSCADQTPWAVNDNLAYGFAATSIAGGSESSWCCACYALTFTSGPVAGKTMVVQSTSTGGDLGSNHFDIAMPGGGVGIFNGCSSQFGGLPGAQYGGISSRDQCDSFPAPLKPGCQWRFDWFQNADNPTFTFQQVQCPAEIVARSGCKRNDDSSFPVFTPPSGGNGGTGTPTSTAPGSGQTSPGGGSGCTSQKWAQCGGIGFSGCTTCVSGTTCQKLNDYYSQCL

SEQ ID NO: 48503 - protein, 277 aa, Thermothielavioides terrestris
SGSGQSTRYWDCCKPSCAWPGKAAVSQPVYACDANFQRLSDFNVQSGCNGGSAYSCADQTPWAVNDNLAYGFAATSIAGGSESSWCCACYALTFTSGPVAGKTMVVQSTSTGGDLGSNHFDIAMPGGGVGIFDGCSSQFGGLPGAQYGGISSRDQCDDFPAPLKPGCQWRFDWFQNADNPTFTFQQVQCPAEIVARSGCKRNDDSSFPVFTPPSGGNGGTGTPTSTAPGSGQTSPGGGSGCTSQKWAQCGGIGFSGCTTCVSGTTCQKLNDYYSQCL

SEQ ID NO: 48504 - protein, 277 aa, Thermothielavioides terrestris
SGSGQSTRYWDCCKPSCAWPGKAAVSQPVYACDANFQRLSDFNVQSGCNGGSAYSCADQTPWAVNDNLAYGFAATSIAGGSESSWCCACYALTFTSGPVAGKTMVVQSTSTGGDLGSNHFDIAMPGGGVGIFNGCESQFGGLPGARYGGISSRDQCDSFPAPLKPGCQWRFDWFQNADNPTFTFQQVQCPAEIVARSGCKRNDDSSFPVFTPPSGGNGGTGTPTSTAPGSGQTSPGGGSGCTSQKWAQCGGIGFSGCTTCVSGTTCQKLNDYYSQCL

SEQ ID NO: 48505 - protein, 277 aa, Thielavia hyrcaniae
SGSGQSTRYWDCCKPSCAWPGKAAVSQPVYACDANFQRLSDFNVQSGCNGGSAYSCADQTPWAVNDNLAYGFAATSIAGGSESSWCCACYALTFTSGPVAGKTMVVQSTSTGGDLGSNHFDIAMPGGGVGIFNGCTSQFGGLPGAQYGGISSRDQCDSFPAPLKPGCQWRFDWFQNADNPTFTFQQVQCPAEIVARSGCKRNDDSSFPVFTPPSGGNGGTGTPTSTAPGSGQTSPGGGSGCTSQKWAQCGGIGFSGCTTCVSGTTCQKLNDYYSQCL

SEQ ID NO: 48506 - protein, 277 aa, Thermothielavioides terrestris
SGSGQSTRYWDCCKPSCAWPGKAAVSQPVYACDANFQRLSDFNVQSGCNGGSAYSCADQTPWAVNDNLAYGFAATSIAGGSESSWCCACYALTFTSGPVAGKTMVVQSTSTGGDLGSNHFDIAMPGGGVGIFNGCKSQFGGLPGARYGGISSRDQCDSFPAPLKPGCQWRFDWFQNADNPTFTFQQVQCPAEIVARSGCKRNDDSSFPVFTPPSGGNGGTGTPTSTAPGSGQTSPGGGSGCTSQKWAQCGGIGFSGCTTCVSGTTCQKLNDYYSQCL

SEQ ID NO: 48507 - protein, 277 aa, Thermothielavioides terrestris
SGSGQSTRYWDCCKPSCAWPGKAAVSQPVYACDANFQRLSDFNVQSGCNGGSAYSCADQTPWAVNDNLAYGFAATSIAGGSESSWCCACYALTFTSGPVAGKTMVVQSTSTGGDLGSNHFDIAMPGGGVGIFDGCESQFGGLPGAQYGGISSRDQCDSFPAPLKPGCQWRFDWFQNADNPTFTFQQVQCPAEIVARSGCKRNDDSSFPVFTPPSGGNGGTGTPTSTAPGSGQTSPGGGSGCTSQKWAQCGGIGFSGCTTCVSGTTCQKLNDYYSQCL

SEQ ID NO: 48508 - protein, 248 aa, Thermothielavioides terrestris
SGSGQSTRYWDCCKPSCAWPGKAAVSQPVYACDANFQRLSDFNVQSGCNGGSAYACADQTPWAVNDNLAYGFAATSIAGGSESSWCCACYALTFTSGPVAGKTMVVQSTSTGGDLGSNHFDIAMPGGGVGIFDGCSSQFGGLPGARYGGISSRDQCDSFPAPLKPGCQWRFDWFQNADNPTFTFQQVQCPAEIVARSGCKRNDDSSFPVFTTPTTPTTPTTPTTPTTPTGCTSQKWAQCGGIGFSGCT

SEQ ID NO: 48509 - protein, 224 aa, Triticum aestivum
LALVGPLAVSAASGSGHSTRYWDCCKPSCSWSGKAKVSAPALTCDKKDNPITNLNAVNGCESGGSAFACTNYSPWAVNDDLAYGFTATKLAGGTEASWCCACYALTFTTGPVKGKKMIVQSTNTGGDLGDNHFDLMMPGGGVGIFDGCTSEFGKPLGGAQYGGISSRSQCDSFPELLKDGCHWRFDWFKNADNPDFTFEQVQCPKELLAISGCKRDDDSSFPAF

SEQ ID NO: 48510 - protein, 288 aa, unidentified
NCGSADGKSTRYWDCCKPSCGWAKKAPVNQPVFSCNANFQRLTDFDAKSGCEPGGVAYSCADQTPWAVNDDFAFGFAATSIAGSNEAGWCCACYELTFTSGPVAGKKMVVQSTSTGGDLGSNHFDLNIPGGGVGIFDGCTPQFGGLPGQRYGGISSRNECDRFPDALKPGCYWRFDWFKNADNPSFSFRQVQCPAELVARTGCRRNDDGNFPAVQIPSSSTSSPVGQPTSTSTTSTSTTSSPPVQPTTPSGCTAERWAQCGGNGWSGCTTCVAGSTCTKINDWYHQCL

SEQ ID NO: 48511 - protein, 228 aa, Thermothielavioides terrestris
SGSGQSTRYWDCCKPSCAWPGKAAVSQPVYACDANFQRLSDFNVQSGCNGGSAYSCADQTPWAVNDNLAYGFAATSIAGGSESSWCCACYALTFTSGPVAGKTMVVQSTSTGGDLGSNHFDIAMPGGGVGIFNGCSSQFGGLPGAQYGGISSRDQCDSFPAPLKPGCQWRFDWFQNADNPTFTFQQVQCPAEIVARSGCKRNDDSSFPVFTPPPPPPPPPPPPPGCTA

SEQ ID NO: 48512 - protein, 294 aa, Acremonium thermophilum
LAVISAFLATARALDGKSTRYWDCCKPSCGWAGKAPVNQPVFSCSADWQRISDFNAKSGCDGGNAYSCADQTPWAVNEQFSYGFAATAISGGSEQSWCCACYALTFNSGPVAGKTMVVQSTSTGGDLGENHFDLAIPGGGVGIFNGCQSQFGGLPGAQYGGIQDRSQCSSFPAPLQPGCYWRFDWFQNADNPTFTFQRVQCPSELTSRTGCKRDDDANYPVFSPPSGRPSGSSPPGGSPPGTTTTRRPATTTGSSPTPTQSHYGQCGGIGYSGPTVCASGTTCQVLNPYYSQCL

SEQ ID NO: 48513 - protein, 294 aa, Acremonium thermophilum
LAVISAFLATARALDGKSTRYWDCCKPSCGWAGKAPVNQPVFSCSADWQRISDFNAKSGCDGGNAYSCADQTPWAVNEQFSYGFAATAISGGSEQSWCCACYALTFNSGPVAGKTMVVQSTSTGGDLGENHFDLAIPGGGVGIFNGCQSQFGGLPGAQYGGIQDRSQCSSFPAPLQPGCYWRFDWFQNADNPTFTFQRVQCPSELTSRTGCKRDDDANYPVFSPPSGRPSGGSPPGGSPPGTTTTRRPATTTGSSPGPTQSHYGQCGGIGYSGPTVCASGTTCQVLNPYYSQCL

SEQ ID NO: 48514 - protein, 294 aa, Acremonium thermophilum
LAVISAFLATARALDGKSTRYWDCCKPSCGWAGKAPVNQPVFSCSADWQRISDFNAKSGCDGGNAYSCADQTPWAVNEQFSYGFAATAISGGSEQSWCCACYALTFNSGPVAGKTMVVQSTSTGGDLGENHFDLAIPGGGVGIFNGCQSQFGGLPGAQYGGIQDRSQCSSFPAPLQPGCYWRFDWFQNADNPTFTFQRVQCPSELTSRTGCKRDDDANYPVFSPPSGRPSGGSPPGGSPPGTTTTRRPATTTGSSPTPTQSHYGQCGGIGYSGPTVCASGTTCQVLNPYYSQCL

SEQ ID NO: 48515 - protein, 292 aa, Humicola nigrescens
LQVAAPAFAADGRSTRYWDCCKPSCSWPGKALVNQPVYARNANFQRITDPNAKSGCDGGSAFSCADQTPWAVSDDFAYGFAATALAGQSESSWCCACYELTFTSGPVAGKKMAVQSTSTGGDLGSNHFDLNMPGGGVGIFDGCSPQVGGLAGQRYGGVSSRSECDSFPAALKPGCYWRYDWFKNADNPSFSFRQVQCPAELVARTGCRRNDDGNFPAVQIPSSSTSSPVNQPTSTSTTSTSTTSSPPVQPTTPSGCTAERWAQCGGNGWSGCTTCVAGSTCTKINDWYHQCL

SEQ ID NO: 48516 - protein, 264 aa, Acremonium thermophilum
MRSSPFLRAALAAALPLSAHALDGKSTRYWDCCKPSCGWAGKASVNQPVFSCSADWQRISDFNAKSGCDGGSAYSCADQTPWAVNDNFSYGFAATAIAGGSESSWCCACYALTFNSGPVAGKTMVVQSTSTGGDLGSNQFDLAIPGGGVGIFNGCASQFGGLPGAQYGGISDRSQCSSFPAPLQPGCQWRFDWFQNADNPTFTFQRVQCPSELTSRTGCKRDDDASYPVFNPPSGGSPSTTSTTTSSPSGPTGNPPGGGGCTAQ

SEQ ID NO: 48517 - protein, 281 aa, Humicola insolens
GRSTRYWDCCKPSCGWAKKAPVNQPVFSCNANFQRITDFDAKSGCEPGGVAYSCADQTPWAVNDDFALGFAATSIAGSNEAGWCCACYELTFTSGPVAGKKMVVQSTSTGGDLGSNHFDLNIPGGGVGIFDGCTPQFGGLPGKRYGGISSRNECDRFPDALKPGCYWRFDWFKNADNPSFSFRQVQCPAELVARTGCRRNDDGNFPAVQISSSTSSPVNQPTSTSTTSTSTTSSPPVQPTTPSGCTAERWAQCGGNGWSGCTTCVAGSTCTKINDWYHQCL

SEQ ID NO: 48518 - protein, 281 aa, Humicola insolens
GRSTRYWDCCKPSCGWAKKAPVNQPVFSCNANFQRITDFDAKSGCEPGGVAYSCADQTPWAVNDDFALGFAATSIAGSNEAKWCCACYELTFTSGPVAGKKMVVQSTSTGGDLGSNHFDLNIPGGGVGIFDGCTPQFGGLPGQRYGGISSRNECDRFPDALKPGCYWRFDWFKNADNPSFSFRQVQCPAELVARTGCRRNDDGNFPAVQISSSTSSPVNQPTSTSTTSTSTTSSPPVQPTTPSGCTAERWAQCGGNGWSGCTTCVAGSTCTKINDWYHQCL

SEQ ID NO: 48519 - protein, 281 aa, Humicola insolens
GRSTRYWDCCKPSCGWAKKAPVNQPVFSCNANFQRITDFDAKSGCEPGGVAYSCADQTPWAVNDDFALGFAATSIAGSNEAGWCCACYELTFTSGPVAGKKMVVQSTSTGGDLGSNHFDLNIPGGGVGIFDGCTPQFGGLPGQRYGGISSRNECDRFPDALKPGCYWRFDWFKNADNPSFSFRQVQCPAELVARTGCRRNDDGNFPAVQQSSSTSSPVNQPTSTSTTSTSTTSSPPVQPTTPSGCTAERWAQCGGNGWSGCTTCVAGSTCTKINDWYHQCL

SEQ ID NO: 48520 - protein, 281 aa, Humicola insolens
GNSTRYWDCCKPSCGWAKKAPVNQPVFSCNANFQRITDFDAKSGCEPGGVAYSCADQTPWAVNDDFALGFAATSIAGSNEAGWCCACYELTFTSGPVAGKKMVVQSTSTGGDLGSNHFDLNIPGGGVGIFDGCTPQFGGLPGQRYGGISSRNECDRFPDALKPGCYWRFDWFKNADNPSFSFRQVQCPAELVARTGCRRNDDGNFPAVQISSSTSSPVNQPTSTSTTSTSTTSSPPVQPTTPSGCTAERWAQCGGNGWSGCTTCVAGSTCTKINDWYHQCL

SEQ ID NO: 48521 - protein, 281 aa, Humicola insolens
GRSTRYWDCCKPSCGWAKKAPVNQPVFSCNANFQRITDFDAKSGCEPGGVAYSCADQTPWAVNDDFALGFAATSIAGSNEAGWCCACYELTFTSGPVAGKKMVVQSTSTGGDLGSNHFDLNIPGGGVGIFDGCTPQFGGLPGQRYGGISSRNECDRFPDALKPGCYWRFDWFKNADNPSFSFRQVQCPAELVARTGCRRNDDGNFPAVQISSSTSSPVNQPTSTSTTSTSTTSSPPVQPTTPSGCTAERWAQCGGNGWSGCTTCVAGSTCTKINDWYHQCL

SEQ ID NO: 48522 - protein, 281 aa, Humicola insolens
GRSTRYWDCCKPSCGWAKKAPVNQPVFSCNANFQRITDFDAKSGCEPGGVAYSCADQTPWAVNDDFALGFAATSIAGSNEAGWCCACYELTFTSGPVAGKKMVVQSTSTGGDLGSNHFDLNIPGGGVGIFDGCTPQFGGLPGQRYGGISSRNECDDFPDALKPGCYWRFDWFKNADNPSFSFRQVQCPAELVARTGCRRNDDGNFPAVQISSSTSSPVNQPTSTSTTSTSTTSSPPVQPTTPSGCTAERWAQCGGNGWSGCTTCVAGSTCTKINDWYHQCL

SEQ ID NO: 48523 - protein, 281 aa, Humicola insolens
GRSTRYWDCCKPSCGWAKKAPVNQPVFSCNANFQRITDFDAKSGCEPGGVAYSCADQTPWAVNDDFALGFAATSIAGSNEAGWCCACYELTFTSGPVAGKVMVVQSTSTGGDLGSNHFDLNIPGGGVGIFDGCTPQFGGLPGQRYGGISSRNECDRFPDALKPGCYWRFDWFKNADNPSFSFRQVQCPAELVARTGCRRNDDGNFPAVQISSSTSSPVNQPTSTSTTSTSTTSSPPVQPTTPSGCTAERWAQCGGNGWSGCTTCVAGSTCTKINDWYHQCL

SEQ ID NO: 48524 - protein, 281 aa, Humicola insolens
GRSTRYWDCCKPSCGWAKKAPVNQPVFSCNANFQRITDFDAKSGCEPGGVAYSCADQTPWAVNDDFALGFAATSIAGSNEAGWCCACYELTFTSGPVAGKKMVVQSTSTGGDLGSNHFDLNIPGGGVGIFDGCTPQFGGLPGDRYGGISSRNECDRFPDALKPGCYWRFDWFKNADNPSFSFRQVQCPAELVARTGCRRNDDGNFPAVQISSSTSSPVNQPTSTSTTSTSTTSSPPVQPTTPSGCTAERWAQCGGNGWSGCTTCVAGSTCTKINDWYHQCL

SEQ ID NO: 48525 - protein, 281 aa, Humicola insolens
GRSTRYWDCCKPSCGWAKKAPVNQPVFSCNANFQRITDFDAKSGCEPGGVAYSCADQTPWAVNDDFALGFAATSIAGSNEAGWCCACYELTFTSGPVAGKKMVVQSTSTGGDLGSNHFDLNIPGGGVGIFDGCTPQFGGLPGQRYGGISSRNECDEFPDALKPGCYWRFDWFKNADNPSFSFRQVQCPAELVARTGCRRNDDGNFPAVQISSSTSSPVNQPTSTSTTSTSTTSSPPVQPTTPSGCTAERWAQCGGNGWSGCTTCVAGSTCTKINDWYHQCL

SEQ ID NO: 48526 - protein, 281 aa, Humicola insolens
GYSTRYWDCCKPSCGWAKKAPVNQPVFSCNANFQRITDFDAKSGCEPGGVAYSCADQTPWAVNDDFALGFAATSIAGSNEAGWCCACYELTFTSGPVAGKKMVVQSTSTGGDLGSNHFDLNIPGGGVGIFDGCTPQFGGLPGQRYGGISSRNECDRFPDALKPGCYWRFDWFKNADNPSFSFRQVQCPAELVARTGCRRNDDGNFPAVQISSSTSSPVNQPTSTSTTSTSTTSSPPVQPTTPSGCTAERWAQCGGNGWSGCTTCVAGSTCTKINDWYHQCL

SEQ ID NO: 48527 - protein, 281 aa, Humicola insolens
GMSTRYWDCCKPSCGWAKKAPVNQPVFSCNANFQRITDFDAKSGCEPGGVAYSCADQTPWAVNDDFALGFAATSIAGSNEAGWCCACYELTFTSGPVAGKKMVVQSTSTGGDLGSNHFDLNIPGGGVGIFDGCTPQFGGLPGQRYGGISSRNECDRFPDALKPGCYWRFDWFKNADNPSFSFRQVQCPAELVARTGCRRNDDGNFPAVQISSSTSSPVNQPTSTSTTSTSTTSSPPVQPTTPSGCTAERWAQCGGNGWSGCTTCVAGSTCTKINDWYHQCL

SEQ ID NO: 48528 - protein, 281 aa, Humicola insolens
GRSTRYWDCCKPSCGWAKKAPVNQPVFSCNANFQRITDFDAKSGCEPGGVAYSCADQTPWAVNDDFALGFAATSIAGSNEAGWCCACYELTFTSGPVAGKKMVVQSTSTGGDLGSNHFDLNIPGGGVGIFDGCTPQFGGLPGQRYGGISSRNECDRFPDALKPGCYWRFDWFKNADNPSFSFRQVQCPAESVARTGCRRNDDGNFPAVQISSSTSSPVNQPTSTSTTSTSTTSSPPVQPTTPSGCTAERWAQCGGNGWSGCTTCVAGSTCTKINDWYHQCL

SEQ ID NO: 48529 - protein, 281 aa, Humicola insolens
GRSTRYWDCCKPSCGWAKKAPVNQPVFSCNANFQRITDFDAKSGCEPGGVAYSCADQTPWAVNDDFALGFAATSIAGSNEAGWCCACYELTFTSGPVAGKKMVVQSTSTGGDLGSNHFDLNIPGGGVGIFDGCTPQFGGLPGERYGGISSRNECDRFPDALKPGCYWRFDWFKNADNPSFSFRQVQCPAELVARTGCRRNDDGNFPAVQISSSTSSPVNQPTSTSTTSTSTTSSPPVQPTTPSGCTAERWAQCGGNGWSGCTTCVAGSTCTKINDWYHQCL

SEQ ID NO: 48530 - protein, 281 aa, Humicola insolens
GRSTRYWDCCKPSCGWAKKAPVNQPVFSCNANFQRITDFDAKSGCEPGGVAYSCADQTPWAVNDDFALGFAATSIAGSNEADWCCACYELTFTSGPVAGKKMVVQSTSTGGDLGSNHFDLNIPGGGVGIFDGCTPQFGGLPGQRYGGISSRNECDRFPDALKPGCYWRFDWFKNADNPSFSFRQVQCPAELVARTGCRRNDDGNFPAVQISSSTSSPVNQPTSTSTTSTSTTSSPPVQPTTPSGCTAERWAQCGGNGWSGCTTCVAGSTCTKINDWYHQCL

SEQ ID NO: 48531 - protein, 281 aa, Humicola insolens
GWSTRYWDCCKPSCGWAKKAPVNQPVFSCNANFQRITDFDAKSGCEPGGVAYSCADQTPWAVNDDFALGFAATSIAGSNEAGWCCACYELTFTSGPVAGKKMVVQSTSTGGDLGSNHFDLNIPGGGVGIFDGCTPQFGGLPGQRYGGISSRNECDRFPDALKPGCYWRFDWFKNADNPSFSFRQVQCPAELVARTGCRRNDDGNFPAVQISSSTSSPVNQPTSTSTTSTSTTSSPPVQPTTPSGCTAERWAQCGGNGWSGCTTCVAGSTCTKINDWYHQCL

SEQ ID NO: 48532 - protein, 281 aa, Humicola insolens
GRSTRYWDCCKPSCGWAKKAPVNQPVFSCNANFQRITDFDAKSGCEPGGVAYSCADQTPWAVNDDFALGFAATSIAGSNEAGWCCACYELTFTSGPVAGKIMVVQSTSTGGDLGSNHFDLNIPGGGVGIFDGCTPQFGGLPGQRYGGISSRNECDRFPDALKPGCYWRFDWFKNADNPSFSFRQVQCPAELVARTGCRRNDDGNFPAVQISSSTSSPVNQPTSTSTTSTSTTSSPPVQPTTPSGCTAERWAQCGGNGWSGCTTCVAGSTCTKINDWYHQCL

SEQ ID NO: 48533 - protein, 242 aa, Thermothielavioides terrestris
SGSGQSTRYWDCCKPSCAWPGKAAVSQPVYACDANFQRLSDFNVQSGCNGGSAYSCADQTPWAVNDNLAYGFAATSIAGGSESSWCCACYALTFTSGPVAGKTMVVQSTSTGGDLGSNHFDIAMPGGGVGIFNGCSSQFGGLPGAQYGGISSRDQCDSFPAPLKPGCQWRFDWFQNADNPTFTFQQVQCPAEIVARSGCKRNDDSSFPVFTTTPPTPTPTPTPGCTAERWAQCGGNGWSGCT

SEQ ID NO: 48534 - protein, 277 aa, Thermothielavioides terrestris
SGSGQSTRYWDCCKPSCAWPGKAAVSQPVYACDANFQRLSDFNVQSGCNGGSAYSCADQTPWAVNDNLAYGFAATSIAGGSESIWCCACYALTFTSGPVAGKTMVVQSTSTGGDLGSNHFDIAMPGGGVGIFNGCSSQFGGLPGAQYGGISSRDQCDSFPAPLKPGCQWRFDWFQNADNPTFTFQQVQCPAEIVARSGCKRNDDSSFPVFTPPSGGNGGTGTPTSTAPGSGQTSPGGGSGCTSQKWAQCGGIGFSGCTTCVSGTTCQKLNDYYSQCL

SEQ ID NO: 48535 - protein, 277 aa, Thermothielavioides terrestris
SGSGQSTRYWDCCKPSCAWPGKAAVSQPVYACDANFQRLSDFNVQSGCNGGSAYSCADQTPWAVNDNLAYGFAATSIAGGSESSWCCACYALTFTSGPVAGKTMVVQSTSTGGDLGSNHFDIAMPGGGVGIFNGCSSQFGGLPGAQYGGISSRDQCDDFPAPLKPGCQWRFDWFQNADNPTFTFQQVQCPAEIVARSGCKRNDDSSFPVFTPPSGGNGGTGTPTSTAPGSGQTSPGGGSGCTSQKWAQCGGIGFSGCTTCVSGTTCQKLNDYYSQCL

SEQ ID NO: 48536 - protein, 277 aa, Thermothielavioides terrestris
SGSGQSTRYWDCCKPSCAWPGKAAVSQPVYACDANFQRLSDFNVQSGCNGGSAYSCADQTPWAVNDNLAYGFAATSIAGGSESSWCCACYALTFTSGPVAGKNMVVQSTSTGGDLGSNHFDIAMPGGGVGIFNGCSSQFGGLPGAQYGGISSRDQCDSFPAPLKPGCQWRFDWFQNADNPTFTFQQVQCPAEIVARSGCKRNDDSSFPVFTPPSGGNGGTGTPTSTAPGSGQTSPGGGSGCTSQKWAQCGGIGFSGCTTCVSGTTCQKLNDYYSQCL

SEQ ID NO: 48537 - protein, 277 aa, Thermothielavioides terrestris
SGSGQSTRYWDCCKPSCAWPGKAAVSQPVYACDANFQRLSDFNVQSGCNGGSAYSCADQTPWAVNDNLAYGFAATSIAGGSESSWCCACYALTFTSGPVAGKTMVVQSTSTGGDLGSNHFDIAMPGGGVGIFNGCKSQFGGLPGAQYGGISSRDQCDSFPAPLKPGCQWRFDWFQNADNPTFTFQQVQCPAESVARSGCKRNDDSSFPVFTPPSGGNGGTGTPTSTAPGSGQTSPGGGSGCTSQKWAQCGGIGFSGCTTCVSGTTCQKLNDYYSQCL

SEQ ID NO: 48538 - protein, 277 aa, Thermothielavioides terrestris
SGSGQSTRYWDCCKPSCAWPGKAAVSQPVYACDANFQRLSDFNVQSGCNGGSAYSCADQTPWAVNDNLAYGFAATSIAGGSESSWCCACYALTFTSGPVAGKIMVVQSTSTGGDLGSNHFDIAMPGGGVGIFNGCSSQFGGLPGAQYGGISSRDQCDSFPAPLKPGCQWRFDWFQNADNPTFTFQQVQCPAEIVARSGCKRNDDSSFPVFTPPSGGNGGTGTPTSTAPGSGQTSPGGGSGCTSQKWAQCGGIGFSGCTTCVSGTTCQKLNDYYSQCL

SEQ ID NO: 48539 - protein, 277 aa, Thermothielavioides terrestris
SGSGQSTRYWDCCKPSCAWPGKAAVSQPVYACDANFQRLSDFNVQSGCNGGSAYSCADQTPWAVNDNLAYGFAATSIAGGSESSWCCACYALTFTSGPVAGKTMVVQSTSTGGDLGSNHFDIAMPGGGVGIFNGCRSQFGGLPGAQYGGISSRDQCDSFPAPLKPGCQWRFDWFQNADNPTFTFQQVQCPAEIVARSGCKRNDDSSFPVFTPPSGGNGGTGTPTSTAPGSGQTSPGGGSGCTSQKWAQCGGIGFSGCTTCVSGTTCQKLNDYYSQCL

SEQ ID NO: 48540 - protein, 277 aa, Thermothielavioides terrestris
SGSGQSTRYWDCCKPSCAWPGKAAVSQPVYACDANFQRLSDFNVQSGCNGGSAYSCADQTPWAVNDNLAYGFAATSIAGGSESDWCCACYALTFTSGPVAGKTMVVQSTSTGGDLGSNHFDIAMPGGGVGIFNGCSSQFGGLPGAQYGGISSRDQCDSFPAPLKPGCQWRFDWFQNADNPTFTFQQVQCPAEIVARSGCKRNDDSSFPVFTPPSGGNGGTGTPTSTAPGSGQTSPGGGSGCTSQKWAQCGGIGFSGCTTCVSGTTCQKLNDYYSQCL

SEQ ID NO: 48541 - protein, 277 aa, Thermothielavioides terrestris
SGSGQSTRYWDCCKPSCAWPGKAAVSQPVYACDANFQRLSDFNVQSGCNGGSAYSCADQTPWAVNDNLAYGFAATSIAGGSESSWCCACYALTFTSGPVAGKTMVVQSTSTGFDLGSNHFDIAMPGGGVGIFNGCSSQFGGLPGARYGGISSRDQCDSFPAPLKPGCQWRFDWFQNADNPTFTFQQVQCPAEIVARSGCKRNDDSSFPVFTPPSGGNGGTGTPTSTAPGSGQTSPGGGSGCTSQKWAQCGGIGFSGCTTCVSGTTCQKLNDYYSQCL

SEQ ID NO: 48542 - protein, 277 aa, Thermothielavioides terrestris
SGSGQSTRYWDCCKPSCAWPGKAAVSQPVYACDANFQRLSDFNVQSGCNGGSAYSCADQTPWAVNDNLAYGFAATSIAGGSESSWCCACYALTFTSGPVAGKTMVVQSTSTGGDLGSNHFDIAMPGGGVGIFNGCSSQFGGLPGRQYGGISSRDQCDSFPAPLKPGCQWRFDWFQNADNPTFTFQQVQCPAEIVARSGCKRNDDSSFPVFTPPSGGNGGTGTPTSTAPGSGQTSPGGGSGCTSQKWAQCGGIGFSGCTTCVSGTTCQKLNDYYSQCL

SEQ ID NO: 48543 - protein, 277 aa, Thermothielavioides terrestris
SGSGQSTRYWDCCKPSCAWPGKAGVSQPVYACDANFQRLSDFNVQSGCNGGSAYACADQTPWAVNDNLAYGFAATSIAGGSESSWCCACYALTFTSGPVAGKTMVVQSTSTGGDLGSNHFDIAMPGGGVGIFNGCSSQFGGLPGAQYGGISSRDECDSFPEPLKPGCQWRFDWFQNADNPTFTFQQVQCPAEIVARSGCKRNDDSSFPVFTPPSGGNGGTGTPTSTAPGSGQTSPGGGSGCTSQKWAQCGGIGFSGCTTCVSGTTCQKLNDYYSQCL

SEQ ID NO: 48544 - protein, 277 aa, Thermothielavioides terrestris
SGSGQSTRYWDCCKPSCAWPGKAAVSQPVYACDANFQRLSDFNVQSGCNGGSAYSCADQTPWAVNDNLAYGFAATSIAGGSESSWCCACYALTFTSGPVAGKTMVVQSTSTGGDLGSNHFDIAMPGGGVGIFNGCSSQFGGLPGAQYGGISSRDQCDSFPAPLKPGCQWRFDWFQNADNPTFTFQQVQCPAEIVARSGCKRNDDSSFPVPTPPSGGNGGTGTPTSTAPGSGQTSPGGGSGCTSQKWAQCGGIGFSGCTTCVSGTTCQKLNDYYSQCL

SEQ ID NO: 48545 - protein, 277 aa, Thermothielavioides terrestris
SGSGQSTRYWDCCKPSCAWPGKAAVSQPVYACDANFQRLSDFNVQSGCNGGSAYSCADQTPWAVNDNLAYGFAATSIAGGSESSWCCACYALTFTSGPVAGKTMVVQSTSTGGDLGSNHFDIAMPGGGVGIFNGCSSQFGGLPGAQYGGISSRDQCDSFPAPLKPGCQWRFDWFQNADNPTFTFQQVQCPAEIVARSGCKRNDDSSFPVFTPPSGGNWGTGTPTSTAPGSGQTSPGGGSGCTSQKWAQCGGIGFSGCTTCVSGTTCQKLNDYYSQCL

SEQ ID NO: 48546 - protein, 277 aa, Thermothielavioides terrestris
SGSGQSTRYWDCCKPSCAWPGKAAVSQPVYACDANFQRLSDFNVQSGCNGGSAYSCADQTPWAVNDNLAYGFAATSIAGGSESSWCCACYALTFTSGPVAGKTMVVQSTSTGGDLGSNHFDIAMPGGGVGIFNGCKSQFGGLPGAQYGGISSRDQCDSFPAPLKPGCQWRFDWFQNADNPTFTFQQVQCPAEIVARSGCKRNDDSSFPVFTPPSGGNGGTGTPTSTAPGSGQTSPGGGSGCTSQKWAQCGGIGFSGCTTCVSGTTCQKLNDYYSQCL

SEQ ID NO: 48547 - protein, 277 aa, Thermothielavioides terrestris
SGSGQSTRYWDCCKPSCAWPGKAAVSQPVYACDANFQRLSDFNVQSGCNGGSAYSCADQTPWAVNDNLAYGFAATSIAGGSESSWCCACYALTFTSGPVAGKTMVVQSTSTGGDLGSNHFDIAMPGGGVGIFDGCSSQFGGLPGAQYGGIKSRDQCDSFPAPLKPGCQWRFDWFQNADNPTFTFQQVQCPAEIVARSGCKRNDDSSFPVFTPPSGGNGGTGTPTSTAPGSGQTSPGGGSGCTSQKWAQCGGIGFSGCTTCVSGTTCQKLNDYYSQCL

SEQ ID NO: 48548 - protein, 277 aa, Thermothielavioides terrestris
SGSGQSTRYWDCCKPSCAWPGKAAVSQPVYACDANFQRLSDFNVQSGCNGGSAYSCADQTPWAVNDNLAYGFAATSIAGGSESSWCCACYALTFTSGPVAGKTMVVQSTSTGGDLGSNHFDIAMPGGGVGIFNGCDSQFGGLPGAQYGGISSRDQCDSFPAPLKPGCQWRFDWFQNADNPTFTFQQVQCPAESVARSGCKRNDDSSFPVFTPPSGGNGGTGTPTSTAPGSGQTSPGGGSGCTSQKWAQCGGIGFSGCTTCVSGTTCQKLNDYYSQCL

SEQ ID NO: 48549 - protein, 277 aa, Thermothielavioides terrestris
SGSGQSTRYWDCCKPSCAWPGKAAVSQPVYACDANFQRLSDFNVQSGCNGGSAYSCADQTPWAVNDNLAYGFAATSIAGGSESSWCCACYALTFTSGPVAGKTMVVQSTSTGGDLGSNHFDIAMPGGGVGIFNGCESQFGGLPGAQYGGISSRDQCDSFPAPLKPGCQWRFDWFQNADNPTFTFQQVQCPAEIVARSGCKRNDDSSFPVFTPPSGGNGGTGTPTSTAPGSGQTSPGGGSGCTSQKWAQCGGIGFSGCTTCVSGTTCQKLNDYYSQCL

SEQ ID NO: 48550 - protein, 277 aa, Thermothielavioides terrestris
SGSGQSTRYWDCCKPSCAWPGKAAVSQPVYACDANFQRLSDFNVQSGCNGGSAYSCADQTPWAVNDNLAYGFAATSIAGGSESSWCCACYALTFTSGPVAGKTMVVQSTSTGGDLGSNHFDIAMPGGGVGIFNGCSSQFGGLPGAQYGGISSRDQCDSFPEPLKPGCQWRFDWFQNADNPTFTFQQVQCPAEIVARSGCKRNDDSSFPVFTPPSGGNGGTGTPTSTAPGSGQTSPGGGSGCTSQKWAQCGGIGFSGCTTCVSGTTCQKLNDYYSQCL

SEQ ID NO: 48551 - protein, 277 aa, Thermothielavioides terrestris
SGSGQSTRYWDCCKPSCAWPGKAAVSQPVYACDANFQRLSDFNVQSGCNGGSAYSCADQTPWAVNDNLAYGFAATSIAGGSESSWCCACYALTFTSGPVAGKTMVVQSTSTGGDLGSNHFDIAMPGGGVGIFNGCNSQFGGLPGAQYGGISSRDQCDSFPAPLKPGCQWRFDWFQNADNPTFTFQQVQCPAEIVARSGCKRNDDSSFPVFTPPSGGNGGTGTPTSTAPGSGQTSPGGGSGCTSQKWAQCGGIGFSGCTTCVSGTTCQKLNDYYSQCL

SEQ ID NO: 48552 - protein, 277 aa, Thermothielavioides terrestris
SGSGQSTRYWDCCKPSCAWPGKAAVSQPVYACDANFQRLSDFNVQSGCNGGSAYSCADQTPWAVNDNLAYGFAATSIAGGSESSWCCACYALTFTSGPVAGKTMVVQSTSTGGDLGSNHFDIAMPGGGVGIFNGCSSQFGGLPGNQYGGISSRDQCDSFPAPLKPGCQWRFDWFQNADNPTFTFQQVQCPAEIVARSGCKRNDDSSFPVFTPPSGGNGGTGTPTSTAPGSGQTSPGGGSGCTSQKWAQCGGIGFSGCTTCVSGTTCQKLNDYYSQCL

SEQ ID NO: 48553 - protein, 277 aa, Thermothielavioides terrestris
SGSGQSTRYWDCCKPSCAWPGKAAVSQPVYACDANFQRLSDFNVQSGCNGGSAYACADQTPWAVNDNLAYGFAATSIAGGSESSWCCACYALTFTSGPVAGKTMVVQSTSTGGDLGSNHFDIAMPGGGVGIFDGCSSQFGGLPGARYGGISSRDQCDSFPAPLKPGCQWRFDWFQNADNPTFTFQQVQCPAEIVARSGCKRNDDSSFPVFTPPPGGPGGPGTPTSTAPGSGPTSPGGGSGCTSQKWAQCGGIGFSGCTTCVSGTTCQKLNDYYSQCL

SEQ ID NO: 48554 - protein, 277 aa, Thermothielavioides terrestris
SGSGNSTRYWDCCKPSCAWPGKAAVSQPVYACDANFQRLSDFNVQSGCNGGSAYSCADQTPWAVNDNLAYGFAATSIAGGSESSWCCACYALTFTSGPVAGKTMVVQSTSTGGDLGSNHFDIAMPGGGVGIFNGCSSQFGGLPGAQYGGISSRDQCDSFPAPLKPGCQWRFDWFQNADNPTFTFQQVQCPAEIVARSGCKRNDDSSFPVFTPPSGGNGGTGTPTSTAPGSGQTSPGGGSGCTSQKWAQCGGIGFSGCTTCVSGTTCQKLNDYYSQCL

SEQ ID NO: 48555 - protein, 277 aa, Thermothielavioides terrestris
SGSGQSTRYWDCCKPSCAWPGKAAVSQPVYACDANFQRLSDFNVQSGCNGGSAYSCADQTPWAVNDNLAYGFAATSIAGGSESSWCCACYALTFTSGPVAGKTMVVQSTSTGGDLGSNHFDIAMPGGGVGIFNGCSSQFGGLPGAQYGGISSRDQCDSFPAPLKPGCQWRFDWFQNADNPTFTFQQVQCPAEIVARSGCKRNDDSSFPVKTPPSGGNGGTGTPTSTAPGSGQTSPGGGSGCTSQKWAQCGGIGFSGCTTCVSGTTCQKLNDYYSQCL

SEQ ID NO: 48556 - protein, 277 aa, Thermothielavioides terrestris
SGSGQSTRYWDCCKPSCAWPGKAAVSQPVYACDANFQRLSDFNVQSGCNGGSAYSCADQTPWAVNDNLAYGFAATSIAGGSESSWCCACYALTFTSGPVAGKTMVVQSTSTGGDLGSNHFDIAMPGGGVGIFNGCSSQFGGLPGTQYGGISSRDQCDSFPAPLKPGCQWRFDWFQNADNPTFTFQQVQCPAEIVARSGCKRNDDSSFPVFTPPSGGNGGTGTPTSTAPGSGQTSPGGGSGCTSQKWAQCGGIGFSGCTTCVSGTTCQKLNDYYSQCL

SEQ ID NO: 48557 - protein, 277 aa, Thermothielavioides terrestris
SGSGQSTRYWDCCKPSCAWPGKAAVSQPVYACDANFQRLSDFNVQSGCNGGSAYSCADQTPWAVNDNLAYGFAATSIAGGSESSWCCACYALTFTSGPVAGKTMVVQSTSTGGDLGSNHFDIAMPGGGVGIFNGCSSQFGGLPGDQYGGISSRDQCDEFPAPLKPGCQWRFDWFQNADNPTFTFQQVQCPAEIVARSGCKRNDDSSFPVFTPPSGGNGGTGTPTSTAPGSGQTSPGGGSGCTSQKWAQCGGIGFSGCTTCVSGTTCQKLNDYYSQCL

SEQ ID NO: 48558 - protein, 277 aa, Thermothielavioides terrestris
SGSGQSTRYWDCCKPSCAWPGKAAVSQPVYACDANFQRLSDFNVQSGCNGGSAYSCADQTPWAVNDNLAYGFAATSIAGGSESSWCCACYALTFTSGPVAGKTMVVQSTSTGGDLGSNHFDIAMPGGGVGIFNGCSSQFGGLPGSQYGGISSRDQCDSFPAPLKPGCQWRFDWFQNADNPTFTFQQVQCPAEIVARSGCKRNDDSSFPVFTPPSGGNGGTGTPTSTAPGSGQTSPGGGSGCTSQKWAQCGGIGFSGCTTCVSGTTCQKLNDYYSQCL

SEQ ID NO: 48559 - protein, 277 aa, Thermothielavioides terrestris
SGSGQSTRYWDCCKPSCAWPGKAAVSQPVYACDANFQRLSDFNVQSGCNGGSAYACADQTPWAVNDNLAYGFAATSIAGGSESSWCCACYALTFTSGPVAGKTMVVQSTSTGGDLGSNHFDIAMPGGGVGIFNGCSSQFGGLPGARYGGISSRDQCDSFPAPLKPGCQWRFDWFQNADNPTFTFQQVQCPAEIVARSGCKRNDDSSFPVFTPPSGGNGGTGTPTSTAPGSGQTSPGGGSGCTSQKWAQCGGIGFSGCTTCVSGTTCQKLNDYYSQCL

SEQ ID NO: 48560 - protein, 277 aa, Thermothielavioides terrestris
SGSGQSTRYWDCCKPSCAWPGKAAVSQPVYACDANFQRLSDFNVQSGCNGGSAYSCADQTPWAVNDNLAYGFAATSIAGGSESSWCCACYALTFTSGPVAGKTMVVQSTSTGGDLGSNHFDIAMPGGGVGIFNGCSSQFGGLPGAQYGGISSRDQCDSFPAPLKPGCFWRFDWFQNADNPTFTFQQVQCPAEIVARSGCKRNDDSSFPVFTPPSGGNGGTGTPTSTAPGSGQTSPGGGSGCTSQKWAQCGGIGFSGCTTCVSGTTCQKLNDYYSQCL

SEQ ID NO: 48561 - protein, 277 aa, Thermothielavioides terrestris
SGSGQSTRYWDCCKPSCAWPGKAAVSQPVYACDANFQRLSDFNVQSGCNGGSAYSCADQTPWAVNDNLAYGFAATSIAGGSESSWCCACYALTFTSGPVAGKTMVVQSTSTGGDLGSNHFDIAMPGGGVGIFNGCKSQFGGLPGAQYGGISSRDQCDEFPAPLKPGCQWRFDWFQNADNPTFTFQQVQCPAEIVARSGCKRNDDSSFPVFTPPSGGNGGTGTPTSTAPGSGQTSPGGGSGCTSQKWAQCGGIGFSGCTTCVSGTTCQKLNDYYSQCL

SEQ ID NO: 48562 - protein, 277 aa, Thermothielavioides terrestris
SGSGQSTRYWDCCKPSCAWPGKAAVSQPVYACDANFQRLSDFNVQSGCNGGSAYSCADQTPWAVNDNLAYGFAATSIAGGSESSWCCACYALTFTSGPVAGKLMVVQSTSTGGDLGSNHFDIAMPGGGVGIFNGCSSQFGGLPGAQYGGISSRDQCDSFPAPLKPGCQWRFDWFQNADNPTFTFQQVQCPAEIVARSGCKRNDDSSFPVFTPPSGGNGGTGTPTSTAPGSGQTSPGGGSGCTSQKWAQCGGIGFSGCTTCVSGTTCQKLNDYYSQCL

SEQ ID NO: 48563 - protein, 277 aa, Thermothielavioides terrestris
SGSGYSTRYWDCCKPSCAWPGKAAVSQPVYACDANFQRLSDFNVQSGCNGGSAYSCADQTPWAVNDNLAYGFAATSIAGGSESSWCCACYALTFTSGPVAGKTMVVQSTSTGGDLGSNHFDIAMPGGGVGIFNGCSSQFGGLPGAQYGGISSRDQCDSFPAPLKPGCQWRFDWFQNADNPTFTFQQVQCPAEIVARSGCKRNDDSSFPVFTPPSGGNGGTGTPTSTAPGSGQTSPGGGSGCTSQKWAQCGGIGFSGCTTCVSGTTCQKLNDYYSQCL

SEQ ID NO: 48564 - protein, 277 aa, Thermothielavioides terrestris
SGSGQSTRYWDCCKPSCAWPGKAAVSQPVYACDANFQRLSDFNVQSGCNGGSAYSCADQTPWAVNDNLAYGFAATSIAGGSESSWCCACYALTFTSGPVAGKTMVVQSTSTGGDLGSNHFDIAMPGGGVGIFNGCSSQFGGLPGAQYGGISSRDQCDSFPAPLKPGCQWRFDWFQNADNPTFAFQQVQCPAEIVARSGCKRNDDSSFPVFTPPSGGNGGTGTPTSTAPGSGQTSPGGGSGCTSQKWAQCGGIGFSGCTTCVSGTTCQKLNDYYSQCL

SEQ ID NO: 48565 - protein, 277 aa, Thermothielavioides terrestris
SGSGQSTRYWDCCKPSCAWPGKAAVSQPVYACDANFQRLSDFNVQSGCNGGSAYSCADQTPWAVNDNLAYGFAATSIAGGSESSWCCACYALTFTSGPVAGKTMVVQSTSTGGDLGSNHFDIAMPGGGVGIFNGCDSQFGGLPGAQYGGISSRDQCDDFPAPLKPGCQWRFDWFQNADNPTFTFQQVQCPAEIVARSGCKRNDDSSFPVFTPPSGGNGGTGTPTSTAPGSGQTSPGGGSGCTSQKWAQCGGIGFSGCTTCVSGTTCQKLNDYYSQCL

SEQ ID NO: 48566 - protein, 277 aa, Thermothielavioides terrestris
SGSGQSTRYWDCCKPSCAWPGKAAVSQPVYACDANFQRLSDFNVQSGCNGGSAYSCADQTPWAVNDNLAYGFAATSIAGGSESSWCCACYALTFTSGPVAGKTMVVQSTSTGGDLGSNHFDIAMPGGGVGIFNGCRSQFGGLPGDQYGGISSRDQCDSFPAPLKPGCQWRFDWFQNADNPTFTFQQVQCPAEIVARSGCKRNDDSSFPVFTPPSGGNGGTGTPTSTAPGSGQTSPGGGSGCTSQKWAQCGGIGFSGCTTCVSGTTCQKLNDYYSQCL

SEQ ID NO: 48567 - protein, 277 aa, Synthetic construct
SGSGQSTRYWDCCKPSCAWPGKAAVSQPVYACDANFQRLSDFNVQSGCNGGSAYSCADQTPWAVNDNLAYGFAATSIAGGSESSWCCACYALTFTSGPVAGKTMVVQSTSTGGDLGSNHFDIAMPGGGVGIFNGCSSQFGGLPGAQYGGISSRDQCDSFPAPLKPGCQWRFDWFQNADNPTFTFQQVQCPAEIVARSGCKRNDDSSFPVFTPPSGGNGGTGTPTSTAPGSGQTSPGGGSGCTSQKWAQCGGIGFSGCTTCVSGTTCQKLNDYYSQCL

SEQ ID NO: 48568 - protein, 277 aa, Thermothielavioides terrestris
SGSGQSTRYWDCCKPSCAWPGKAAVSQPVYACDANFQRLSDFNVQSGCNGGSAYACADQTPWAVNDNLAYGFAATSIAGGSESSWCCACYALTFTSGPVAGKTMVVQSTSTGGDLGSNHFDIAMPGGGVGIFDGCSSQFGGLPGARYGGISSRDQCDSFPAPLKPGCQWRFDWFQNADNPTFTFQQVQCPAEIVARSGCKRNDDSSFPVFTPPPGGPGGTGTPTSTAPGSGPTSPGGGSGCTSQKWAQCGGIGFSGCTTCVSGTTCQKLNDYYSQCL

SEQ ID NO: 48569 - protein, 277 aa, Thermothielavioides terrestris
SGSGQSTRYWDCCKPSCAWPGKAAVSQPVYACDANFQRLSDFNVQSGCNGGSAYSCADQTPWAVNDNLAYGFAATSIAGGSESSWCCACYALTFTSGPVAGKTMVVQSTSTGGDLGSNHFDIAMPGGGVGIFNGCSSQFGGLPGGQYGGISSRDQCDSFPAPLKPGCQWRFDWFQNADNPTFTFQQVQCPAEIVARSGCKRNDDSSFPVFTPPSGGNGGTGTPTSTAPGSGQTSPGGGSGCTSQKWAQCGGIGFSGCTTCVSGTTCQKLNDYYSQCL

SEQ ID NO: 48570 - protein, 277 aa, Thermothielavioides terrestris
SGSGQSTRYWDCCKPSCAWPGKAAVSQPVYACDANFQRLSDFNVQSGCNGGSAYSCADQTPWAVNDNLAYGFAATSIAGGSESSWCCACYALTFTSGPVAGKTMVVQSTSTGGDLGSNHFDIAMPGGGVGIFNGCSSQFGGLPGAQYGGISSRDQCDSFPAPLKPGCQWRFDWFQNADNPTFTFQQVQCPAEIVARSGCKRNDDSSFPVHTPPSGGNGGTGTPTSTAPGSGQTSPGGGSGCTSQKWAQCGGIGFSGCTTCVSGTTCQKLNDYYSQCL

SEQ ID NO: 48571 - protein, 277 aa, Thermothielavioides terrestris
SGSGQSTRYWDCCKPSCAWPGKAAVSQPVYACDANFQRLSDFNVQSGCNGGSAYSCADQTPWAVNDNLAYGFAATSIAGGSESVWCCACYALTFTSGPVAGKTMVVQSTSTGGDLGSNHFDIAMPGGGVGIFNGCSSQFGGLPGAQYGGISSRDQCDSFPAPLKPGCQWRFDWFQNADNPTFTFQQVQCPAEIVARSGCKRNDDSSFPVFTPPSGGNGGTGTPTSTAPGSGQTSPGGGSGCTSQKWAQCGGIGFSGCTTCVSGTTCQKLNDYYSQCL

SEQ ID NO: 48572 - protein, 277 aa, Thermothielavioides terrestris
SGSGQSTRYWDCCKPSCAWPGKAAVSQPVYACDANFQRLSDFNVQSGCNGGSAYSCADQTPWAVNDNLAYGFAATSIAGGSESSWCCACYALTFTSGPVAGKTMVVQSTSTGGDLGSNHFDIAMPGGGVGIFNGCSSQFGGLPGAQYGGISSRDQCDEFPAPLKPGCQWRFDWFQNADNPTFTFQQVQCPAESVARSGCKRNDDSSFPVFTPPSGGNGGTGTPTSTAPGSGQTSPGGGSGCTSQKWAQCGGIGFSGCTTCVSGTTCQKLNDYYSQCL

SEQ ID NO: 48573 - protein, 277 aa, Thermothielavioides terrestris
SGSGQSTRYWDCCKPSCAWPGKAAVSQPVYACDANFQRLSDFNVQSGCNGGSAYSCADQTPWAVNDNLAYGFAATSIAGGSESSWCCACYALTFTSGPVAGKTMVVQSTSTGGDLGSNHFDIAMPGGGVGIFNGCDSQFGGLPGAQYGGISSRDQCDSFPAPLKPGCQWRFDWFQNADNPTFTFQQVQCPAEIVARSGCKRNDDSSFPVFTPPSGGNGGTGTPTSTAPGSGQTSPGGGSGCTSQKWAQCGGIGFSGCTTCVSGTTCQKLNDYYSQCL

SEQ ID NO: 48574 - protein, 277 aa, Thermothielavioides terrestris
SGSGQSTRYWDCCKPSCAWPGKAAVSQPVYACDANFQRLSDFNVQSGCNGGSAYSCADQTPWAVNDNLAYGFAATSIAGGSESSWCCACYALTFTSGPVAGKTMVVQSTSTGGDLGSNHFDIAMPGGGVGIFNGCSSQFGGLPGAQYGGISSRDQCDSFPAPLKPGCQWRFDWFQNADNPTFTFQQVQCPAEIVARSGCKRNDDSSFPVNTPPSGGNGGTGTPTSTAPGSGQTSPGGGSGCTSQKWAQCGGIGFSGCTTCVSGTTCQKLNDYYSQCL

SEQ ID NO: 48575 - protein, 277 aa, Thermothielavioides terrestris
SGSGQSTRYWDCCKPSCAWPGKAAVSQPVYACDANFQRLSDFNVQSGCNGGSAYSCADQTPWAVNDNLAYGFAATSIAGGSESSWCCACYALTFTSGPVAGKTMVVQSTSTGGDLGSNHFDIAMPGGGVGIFNGCESQFGGLPGAQYGGISSRDQCDEFPAPLKPGCQWRFDWFQNADNPTFTFQQVQCPAEIVARSGCKRNDDSSFPVFTPPSGGNGGTGTPTSTAPGSGQTSPGGGSGCTSQKWAQCGGIGFSGCTTCVSGTTCQKLNDYYSQCL

SEQ ID NO: 48576 - protein, 277 aa, Thermothielavioides terrestris
SGSGWSTRYWDCCKPSCAWPGKAAVSQPVYACDANFQRLSDFNVQSGCNGGSAYSCADQTPWAVNDNLAYGFAATSIAGGSESSWCCACYALTFTSGPVAGKTMVVQSTSTGGDLGSNHFDIAMPGGGVGIFNGCSSQFGGLPGAQYGGISSRDQCDSFPAPLKPGCQWRFDWFQNADNPTFTFQQVQCPAEIVARSGCKRNDDSSFPVFTPPSGGNGGTGTPTSTAPGSGQTSPGGGSGCTSQKWAQCGGIGFSGCTTCVSGTTCQKLNDYYSQCL

SEQ ID NO: 48577 - protein, 277 aa, Thermothielavioides terrestris
SGSGMSTRYWDCCKPSCAWPGKAAVSQPVYACDANFQRLSDFNVQSGCNGGSAYSCADQTPWAVNDNLAYGFAATSIAGGSESSWCCACYALTFTSGPVAGKTMVVQSTSTGGDLGSNHFDIAMPGGGVGIFNGCSSQFGGLPGAQYGGISSRDQCDSFPAPLKPGCQWRFDWFQNADNPTFTFQQVQCPAEIVARSGCKRNDDSSFPVFTPPSGGNGGTGTPTSTAPGSGQTSPGGGSGCTSQKWAQCGGIGFSGCTTCVSGTTCQKLNDYYSQCL

SEQ ID NO: 48578 - protein, 277 aa, Thermothielavioides terrestris
SGSGQSTRYWDCCKPSCAWPGKAAVSQPVYACDANFQRLSDFNVQSGCNGGSAYACADQTPWAVNDNLAYGFAATNIAGGSESSWCCACYALTFTSGPVAGKTMVVQSTSTGGDLGSNHFDIAMPGGGVGIFNGCSSQFGGLPGARYGGISSRDQCDSFPAPLKPGCYWRFDWFQNADNPTFTFQQVQCPAEIVARSGCKRNDDSSFPVFTPPSGGNGGTGTPTSTAPGSGQTSPGGGSGCTSQKWAQCGGIGFSGCTTCVSGTTCQKLNDYYSQCL

SEQ ID NO: 48579 - protein, 277 aa, Thermothielavioides terrestris
SGSGQSTRYWDCCKPSCAWPGKAAVSQPVYACDANFQRLSDFNVQSGCNGGSAYSCADQTPWAVNDNLAYGFAATSIAGGSESSWCCACYALTFTSGPVAGKTMVVQSTSTGGDLGSNHFDIAMPGGGVGIFNGCSSQFGGLPGAQYGGISSRDQCDSFPAPLKPGCQWRFDWFQNADNPTFTFQQVQCPAEIVARSGCKRNDDSSFPVVTPPSGGNGGTGTPTSTAPGSGQTSPGGGSGCTSQKWAQCGGIGFSGCTTCVSGTTCQKLNDYYSQCL

SEQ ID NO: 48580 - protein, 277 aa, Thermothielavioides terrestris
SGSGQSTRYWDCCKPSCAWPGKAAVSQPVYACDANFQRLSDFNVQSGCNGGSAYSCADQTPWAVNDNLAYGFAATSIAGGSESSWCCACYALTFTSGPVAGKTMVVQSTSTGGDLGSNHFDIAMPGGGVGIFNGCSSQFGGLPGKQYGGISSRDQCDSFPAPLKPGCQWRFDWFQNADNPTFTFQQVQCPAEIVARSGCKRNDDSSFPVFTPPSGGNGGTGTPTSTAPGSGQTSPGGGSGCTSQKWAQCGGIGFSGCTTCVSGTTCQKLNDYYSQCL

SEQ ID NO: 48581 - protein, 277 aa, Thermothielavioides terrestris
SGSGQSTRYWDCCKPSCAWPGKAAVSQPVYACDANFQRLSDFNVQSGCNGGSAYSCADQTPWAVNDNLAYGFAATSIAGGSESSWCCACYALTFTSGPVAGKTMVVQSTSTGGDLGSNHFDIAMPGGGVGIFNGCSSQFGGLPGDQYGGISSRDQCDSFPAPLKPGCQWRFDWFQNADNPTFTFQQVQCPAEIVARSGCKRNDDSSFPVFTPPSGGNGGTGTPTSTAPGSGQTSPGGGSGCTSQKWAQCGGIGFSGCTTCVSGTTCQKLNDYYSQCL

SEQ ID NO: 48582 - protein, 277 aa, Thermothielavioides terrestris
SGSGQSTRYWDCCKPSCAWPGKAGVSQPVYACDANFQRLSDFNVQSGCNGGSAYSCADQTPWAVNDNLAYGFAATSIAGGSESSWCCACYALTFTSGPVAGKTMVVQSTSTGGDLGSNHFDIAMPGGGVGIFNGCSSQFGGLPGAQYGGISSRDQCDSFPAPLKPGCQWRFDWFQNADNPTFTFQQVQCPAEIVARSGCKRNDDSSFPVFTPPSGGNGGTGTPTSTAPGSGQTSPGGGSGCTSQKWAQCGGIGFSGCTTCVSGTTCQKLNDYYSQCL

SEQ ID NO: 48583 - protein, 277 aa, Thermothielavioides terrestris
SGSGQSTRYWDCCKPSCAWPGKAAVSQPVYACDANFQRLSDFNVQSGCNGGSAYSCADQTPWAVNDNLAYGFAATSIAGGSESSWCCACYALTFTSGPVAGKTMVVQSTSTGGDLGSNHFDIAMPGGGVGIFNGCGSQFGGLPGAQYGGISSRDQCDSFPAPLKPGCQWRFDWFQNADNPTFTFQQVQCPAEIVARSGCKRNDDSSFPVFTPPSGGNGGTGTPTSTAPGSGQTSPGGGSGCTSQKWAQCGGIGFSGCTTCVSGTTCQKLNDYYSQCL

SEQ ID NO: 48584 - protein, 277 aa, Thermothielavioides terrestris
SGSGQSTRYWDCCKPSCAWPGKAAVSQPVYACDANFQRLSDFNVQSGCNGGSAYSCADQTPWAVNDNLAYGFAATSIAGGSESSWCCACYALTFTSGPVAGKTMVVQSTSTGGDLGSNHFDIAMPGGGVGIFNGCSSQFGGLPGADYGGISSRDQCDSFPAPLKPGCQWRFDWFQNADNPTFTFQQVQCPAEIVARSGCKRNDDSSFPVFTPPSGGNGGTGTPTSTAPGSGQTSPGGGSGCTSQKWAQCGGIGFSGCTTCVSGTTCQKLNDYYSQCL

SEQ ID NO: 48585 - protein, 277 aa, Thermothielavioides terrestris
SGSGQSTRYWDCCKPSCAWPGKAAVSQPVYACDANFQRLSDFNVQSGCNGGSAYSCADQTPWAVNDNLAYGFAATSIAGGSESSWCCACYALTFTSGPVAGKVMVVQSTSTGGDLGSNHFDIAMPGGGVGIFNGCSSQFGGLPGAQYGGISSRDQCDSFPAPLKPGCQWRFDWFQNADNPTFTFQQVQCPAEIVARSGCKRNDDSSFPVFTPPSGGNGGTGTPTSTAPGSGQTSPGGGSGCTSQKWAQCGGIGFSGCTTCVSGTTCQKLNDYYSQCL

SEQ ID NO: 48586 - protein, 277 aa, Thermothielavioides terrestris
SGSGQSTRYWDCCKPSCAWPGKAAVSQPVYACDANFQRLSDFNVQSGCNGGSAYSCADQTPWAVNDNLAYGFAATSIAGGSESSWCCACYALTFTSGPVAGKTMVVQSTSTGGDLGSNHFDIAMPGGGVGIFNGCSSQFGGLPGAQYGGISSRDQCDDFPAPLKPGCQWRFDWFQNADNPTFTFQQVQCPAESVARSGCKRNDDSSFPVFTPPSGGNGGTGTPTSTAPGSGQTSPGGGSGCTSQKWAQCGGIGFSGCTTCVSGTTCQKLNDYYSQCL

SEQ ID NO: 48587 - protein, 277 aa, Thermothielavioides terrestris
SGSGQSTRYWDCCKPSCAWPGKAAVSQPVYACDANFQRLSDFNVQSGCNGGSAYSCADQTPWAVNDNLAYGFAATSIAGGSESSWCCACYALTFTSGPVAGKTMVVQSTSTGGDLGSNHFDIAMPGGGVGIFNGCSSQFGGLPGAKYGGISSRDQCDSFPAPLKPGCQWRFDWFQNADNPTFTFQQVQCPAEIVARSGCKRNDDSSFPVFTPPSGGNGGTGTPTSTAPGSGQTSPGGGSGCTSQKWAQCGGIGFSGCTTCVSGTTCQKLNDYYSQCL

SEQ ID NO: 48588 - protein, 277 aa, Thermothielavioides terrestris
SGSGQSTRYWDCCKPSCAWPGKAAVSQPVYACDANFQRLSDFNVQSGCNGGSAYACADQTPWAVNDNLAYGFAATSIAGGSESSWCCACYALTFTSGPVAGKTMVVQSTSTGGDLGSNHFDIAMPGGGVGIFNGCSSQFGGLPGARYGGISSRDQCDSFPAPLQPGCYWRFDWFQNADNPTFTFQQVQCPAEIVARSGCKRNDDSSFPVFTPPSGGNGGTGTPTSTAPGSGQTSPGGGSGCTSQKWAQCGGIGFSGCTTCVSGTTCQKLNDYYSQCL

SEQ ID NO: 48589 - protein, 277 aa, Thermothielavioides terrestris
SGSGQSTRYWDCCKPSCAWPGKAAVSQPVYACDANFQRLSDFNVQSGCNGGSAYSCADQTPWAVNDNLAYGFAATSIAGGSESIWCCACYALTFTSGPVAGKTMVVQSTSTGGDLGSNHFDIAMPGGGVGIFNGCSSQFGGLPGAQYGGISSRDQCDEFPAPLKPGCQWRFDWFQNADNPTFTFQQVQCPAEIVARSGCKRNDDSSFPVFTPPSGGNGGTGTPTSTAPGSGQTSPGGGSGCTSQKWAQCGGIGFSGCTTCVSGTTCQKLNDYYSQCL

SEQ ID NO: 48590 - protein, 277 aa, Thermothielavioides terrestris
SGSGQSTRYWDCCKPSCAWPGKAAVSQPVYACDANFQRLSDFNVQSGCNGGSAYACADQTPWAVNDNLAYGFAATSIAGGSESSWCCACYALTFTSGPVAGKTMVVQSTSTGGDLGSNHFDIAMPGGGVGIFDGCSSQFGGLPGAQYGGISSRDQCDSFPEPLKPGCQWRFDWFQNADNPTFTFQQVQCPAEIVARSGCKRNDDSSFPVFTPPSGGNGGTGTPTSTAPGSGQTSPGGGSGCTSQKWAQCGGIGFSGCTTCVSGTTCQKLNDYYSQCL

SEQ ID NO: 48591 - protein, 277 aa, Thermothielavioides terrestris
SGSGQSTRYWDCCKPSCAWPGKAAVSQPVYACDANFQRLSDFNVQSGCNGGSAYSCADQTPWAVNDNLAYGFAATSIAGGSESSWCCACYALTFTSGPVAGKTMVVQSTSTGGDLGSNHFDIAMPGGGVGIFNGCSSQFGGLPGATYGGISSRDQCDSFPAPLKPGCQWRFDWFQNADNPTFTFQQVQCPAEIVARSGCKRNDDSSFPVFTPPSGGNGGTGTPTSTAPGSGQTSPGGGSGCTSQKWAQCGGIGFSGCTTCVSGTTCQKLNDYYSQCL

SEQ ID NO: 48592 - protein, 277 aa, Thermothielavioides terrestris
SGSGQSTRYWDCCKPSCAWPGKAAVSQPVYACDANFQRLSDFNVQSGCNGGSAYSCADQTPWAVNDNLAYGFAATSIAGGSESSWCCACYALTFTSGPVAGATMVVQSTSTGGDLGSNHFDIAMPGGGVGIFNGCSSQFGGLPGARYGGISSRDQCDSFPAPLKPGCQWRFDWFQNADNPTFTFQQVQCPAEIVARSGCKRNDDSSFPVFTPPSGGNGGTGTPTSTAPGSGQTSPGGGSGCTSQKWAQCGGIGFSGCTTCVSGTTCQKLNDYYSQCL

SEQ ID NO: 48593 - protein, 277 aa, Thermothielavioides terrestris
SGSGQSTRYWDCCKPSCAWPGKAGVSQPVYACDANFQRLSDFNVQSGCNGGSAYACADQTPWAVNDNLAYGFAATSIAGGSESSWCCACYALTFTSGPVAGKTMVVQSTSTGGDLGSNHFDIAMPGGGVGIFNGCSSQFGGLPGARYGGISSRDQCDSFPAPLKPGCQWRFDWFQNADNPTFTFQQVQCPAEIVARSGCKRNDDSSFPVFTPPSGGNGGTGTPTSTAPGSGQTSPGGGSGCTSQKWAQCGGIGFSGCTTCVSGTTCQKLNDYYSQCL

SEQ ID NO: 48594 - protein, 277 aa, Thermothielavioides terrestris
SGSGQSTRYWDCCKPSCAWPGKAAVSQPVYACDANFQRLSDFNVQSGCNGGSAYSCADQTPWAVNDNLAYGFAATSIAGGSESSWCCACYALTFTSGPVAGKTMVVQSTSTGGDLGSNHFDIAMPGGGVGIFNGCESQFGGLPGAQYGGISSRDQCDSFPAPLKPGCQWRFDWFQNADNPTFTFQQVQCPAESVARSGCKRNDDSSFPVFTPPSGGNGGTGTPTSTAPGSGQTSPGGGSGCTSQKWAQCGGIGFSGCTTCVSGTTCQKLNDYYSQCL

SEQ ID NO: 48595 - protein, 277 aa, Thielavia hyrcaniae
SGSGQSTRYWDCCKPSCAWPGKAAVSQPVYACDANFQRLSDFNVQSGCNGGSAYSCADQTPWAVNDNLAYGFAATSIAGGSESSWCCACYALTFTSGPVAGKTMVVQSTSTGGDLGSNHFDIAMPGGGVGIFNGCSEQFGGLPGAQYGGISSRDQCDSFPAPLKPGCQWRFDWFQNADNPTFTFQQVQCPAEIVARSGCKRNDDSSFPVFTPPSGGNGGTGTPTSTAPGSGQTSPGGGSGCTSQKWAQCGGIGFSGCTTCVSGTTCQKLNDYYSQCL

SEQ ID NO: 48596 - protein, 277 aa, Thermothielavioides terrestris
SGSGQSTRYWDCCKPSCAWPGKAAVSQPVYACDANFQRLSDFNVQSGCNGGSAYSCADQTPWAVNDNLAYGFAATSIAGGSESSWCCACYALTFTSGPVAGKTMVVQSTSTGWDLGSNHFDIAMPGGGVGIFNGCSSQFGGLPGARYGGISSRDQCDSFPAPLKPGCQWRFDWFQNADNPTFTFQQVQCPAEIVARSGCKRNDDSSFPVFTPPSGGNGGTGTPTSTAPGSGQTSPGGGSGCTSQKWAQCGGIGFSGCTTCVSGTTCQKLNDYYSQCL

SEQ ID NO: 48597 - protein, 277 aa, Thermothielavioides terrestris
SGSGQSTRYWDCCKPSCAWPGKAAVSQPVYACDANFQRLSDFNVQSGCNGGSAYSCADQTPWAVNDNLAYGFAATSIAGGSESSWCCACYALTFTSGPVAGKTMVVQSTSTGGDLGSNHFDIAMPGGGVGIFNGCSSQFGGLPGAQYGGISSRDQCDSFPAPLKPGCQWRFDWFQNADNPTFLFQQVQCPAEIVARSGCKRNDDSSFPVFTPPSGGNGGTGTPTSTAPGSGQTSPGGGSGCTSQKWAQCGGIGFSGCTTCVSGTTCQKLNDYYSQCL

SEQ ID NO: 48598 - protein, 277 aa, Thermothielavioides terrestris
SGSGQSTRYWDCCKPSCAWPGKAAVSQPVYACDANFQRLSDFNVQSGCNGGSAYSCADQTPWAVNDNLAYGFAATSIAGGSESSWCCACYALTFTSGPVAGKDMVVQSTSTGGDLGSNHFDIAMPGGGVGIFNGCSSQFGGLPGAQYGGISSRDQCDSFPAPLKPGCQWRFDWFQNADNPTFTFQQVQCPAEIVARSGCKRNDDSSFPVFTPPSGGNGGTGTPTSTAPGSGQTSPGGGSGCTSQKWAQCGGIGFSGCTTCVSGTTCQKLNDYYSQCL

SEQ ID NO: 48599 - protein, 277 aa, Thermothielavioides terrestris
SGSGQSTRYWDCCKPSCAWPGKAAVSQPVYACDANFQRLSDFNVQSGCNGGSAYSCADQTPWAVNDNLAYGFAATSIAGGSESSWCCACYALTFTSGPVAGKTMVVQSTSTGGDLGSNHFDIAMPGGGVGIFNGCSSQFGGLPGAQYGGISSRDQCDSFPAPLKPGCQWRFDWFQNADNPTFMFQQVQCPAEIVARSGCKRNDDSSFPVFTPPSGGNGGTGTPTSTAPGSGQTSPGGGSGCTSQKWAQCGGIGFSGCTTCVSGTTCQKLNDYYSQCL

SEQ ID NO: 48600 - protein, 277 aa, Thermothielavioides terrestris
SGSGQSTRYWDCCKPSCAWPGKAAVSQPVYACDANFQRLSDFNVQSGCNGGSAYSCADQTPWAVNDNLAYGFAATSIAGGSESIWCCACYALTFTSGPVAGKTMVVQSTSTGGDLGSNHFDIAMPGGGVGIFNGCSSQFGGLPGAQYGGISSRDQCDSFPAPLKPGCQWRFDWFQNADNPTFTFQQVQCPAESVARSGCKRNDDSSFPVFTPPSGGNGGTGTPTSTAPGSGQTSPGGGSGCTSQKWAQCGGIGFSGCTTCVSGTTCQKLNDYYSQCL

SEQ ID NO: 48601 - protein, 277 aa, Thermothielavioides terrestris
SGSGQSTRYWDCCKPSCAWPGKAAVSQPVYACDANFQRLSDFNVQSGCNGGSAYSCADQTPWAVNDNLAYGFAATSIAGGSESSWCCACYALTFTSGPVAGKTMVVQSTSTGGDLGSNHFDIAMPGGGVGIFNGCSSQFGGLPGAQYGGISSRDQCDSFPAPLKPGCQWRFDWFQNADNPTFTFQQVQCPAESVARSGCKRNDDSSFPVFTPPSGGNGGTGTPTSTAPGSGQTSPGGGSGCTSQKWAQCGGIGFSGCTTCVSGTTCQKLNDYYSQCL

SEQ ID NO: 48602 - protein, 277 aa, Thermothielavioides terrestris
SGSGQSTRYWDCCKPSCAWPGKAAVSQPVYACDANFQRLSDFNVQSGCNGGSAYSCADQTPWAVNDNLAYGFAATSIAGGSESSWCCACYALTFTSGPVAGKYMVVQSTSTGGDLGSNHFDIAMPGGGVGIFNGCSSQFGGLPGAQYGGISSRDQCDSFPAPLKPGCQWRFDWFQNADNPTFTFQQVQCPAEIVARSGCKRNDDSSFPVFTPPSGGNGGTGTPTSTAPGSGQTSPGGGSGCTSQKWAQCGGIGFSGCTTCVSGTTCQKLNDYYSQCL

SEQ ID NO: 48603 - protein, 277 aa, Thermothielavioides terrestris
SGSGQSTRYWDCCKPSCAWPGKAAVSQPVYACDANFQRLSDFNVQSGCNGGSAYSCADQTPWAVNDNLAYGFAATSIAGGSESSWCCACYALTFTSGPVAGKTMVVQSTSTGGDLGSNHFDIAMPGGGVGIFNGCESQFGGLPGAQYGGISSRDQCDDFPAPLKPGCQWRFDWFQNADNPTFTFQQVQCPAEIVARSGCKRNDDSSFPVFTPPSGGNGGTGTPTSTAPGSGQTSPGGGSGCTSQKWAQCGGIGFSGCTTCVSGTTCQKLNDYYSQCL

SEQ ID NO: 48604 - protein, 277 aa, Thermothielavioides terrestris
SGSGQSTRYWDCCKPSCAWPGKAAVSQPVYACDANFQRLSDFNVQSGCNGGSAYSCADQTPWAVNDNLAYGFAATSIAGGSESSWCCACYALTFTSGPVAGKTMVVQSTSTGGDLGSNHFDIAMPGGGVGIFNGCASQFGGLPGAQYGGISSRDQCDSFPAPLKPGCQWRFDWFQNADNPTFTFQQVQCPAEIVARSGCKRNDDSSFPVFTPPSGGNGGTGTPTSTAPGSGQTSPGGGSGCTSQKWAQCGGIGFSGCTTCVSGTTCQKLNDYYSQCL

SEQ ID NO: 48605 - protein, 277 aa, Thermothielavioides terrestris
SGSGQSTRYWDCCKPSCAWPGKAAVSQPVYACDANFQRLSDFNVQSGCNGGSAYSCADQTPWAVNDNLAYGFAATSIAGGSESSWCCACYALTFTSGPVAGKTMVVQSTSTGGDLGSNHFDIAMPGGGVGIFDGCSSQFGGLPGAQYGGISSRDQCDSFPAPLKPGCQWRFDWFQNATNPTFTFQQVQCPAEIVARSGCKRNDDSSFPVFTPPSGGNGGTGTPTSTAPGSGQTSPGGGSGCTSQKWAQCGGIGFSGCTTCVSGTTCQKLNDYYSQCL

SEQ ID NO: 48606 - protein, 277 aa, Thermothielavioides terrestris
SGSGQSTRYWDCCKPSCAWPGKAAVSQPVYACDANFQRLSDFNVQSGCNGGSAYSCADQTPWAVNDNLAYGFAATSIAGGSESKWCCACYALTFTSGPVAGKTMVVQSTSTGGDLGSNHFDIAMPGGGVGIFNGCSSQFGGLPGAQYGGISSRDQCDSFPAPLKPGCQWRFDWFQNADNPTFTFQQVQCPAEIVARSGCKRNDDSSFPVFTPPSGGNGGTGTPTSTAPGSGQTSPGGGSGCTSQKWAQCGGIGFSGCTTCVSGTTCQKLNDYYSQCL

SEQ ID NO: 48607 - protein, 277 aa, Thermothielavioides terrestris
SGSGQSTRYWDCCKPSCAWPGKAAVSQPVYACDANFQRLSDFNVQSGCNGGSAYSCADQTPWAVNDNLAYGFAATSIAGGSESSWCCACYALTFTSGPVAGKTMVVQSTSTGGDLGSNHFDIAMPGGGVGIFNGCSSQFGGLPGAQYGGISSRDQCDSFPAPLKPGCWWRFDWFQNADNPTFTFQQVQCPAEIVARSGCKRNDDSSFPVFTPPSGGNGGTGTPTSTAPGSGQTSPGGGSGCTSQKWAQCGGIGFSGCTTCVSGTTCQKLNDYYSQCL

SEQ ID NO: 48608 - protein, 277 aa, Thermothielavioides terrestris
SGSGQSTRYWDCCKPSCAWPGKAAVSQPVYACDANFQRLSDFNVQSGCNGGSAYSCADQTPWAVNDNLAYGFAATSIAGGSESSWCCACYALTFTSGPVAGKTMVVQSTSTGGDLGSNHFDIAMPGGGVGIFNGCSSQFGGLPGEQYGGISSRDQCDSFPAPLKPGCQWRFDWFQNADNPTFTFQQVQCPAEIVARSGCKRNDDSSFPVFTPPSGGNGGTGTPTSTAPGSGQTSPGGGSGCTSQKWAQCGGIGFSGCTTCVSGTTCQKLNDYYSQCL

SEQ ID NO: 48609 - protein, 277 aa, Thermothielavioides terrestris
SGSGQSTRYWDCCKPSCAWPGKAAVSQPVYACDANFQRLSDFNVQSGCNGGSAYSCADQTPWAVNDNLAYGFAATSIAGGSESSWCCACYALTFTSGPVAGKTMVVQSTSTGGDLGSNHFDIAMPGGGVGIFNGCRSQFGGLPGAQYGGISSRDQCDEFPAPLKPGCQWRFDWFQNADNPTFTFQQVQCPAEIVARSGCKRNDDSSFPVFTPPSGGNGGTGTPTSTAPGSGQTSPGGGSGCTSQKWAQCGGIGFSGCTTCVSGTTCQKLNDYYSQCL

SEQ ID NO: 48610 - protein, 277 aa, Thermothielavioides terrestris
SGSGQSTRYWDCCKPSCAWPGKAAVSQPVYACDANFQRLSDFNVQSGCNGGSAYSCADQTPWAVNDNLAYGFAATSIAGGSESIWCCACYALTFTSGPVAGKTMVVQSTSTGGDLGSNHFDIAMPGGGVGIFNGCSSQFGGLPGAQYGGISSRDQCDDFPAPLKPGCQWRFDWFQNADNPTFTFQQVQCPAEIVARSGCKRNDDSSFPVFTPPSGGNGGTGTPTSTAPGSGQTSPGGGSGCTSQKWAQCGGIGFSGCTTCVSGTTCQKLNDYYSQCL

SEQ ID NO: 48611 - protein, 277 aa, Thermothielavioides terrestris
SGSGQSTRYWDCCKPSCAWPGKAAVSQPVYACDANFQRLSDFNVQSGCNGGSAYSCADQTPWAVNDNLAYGFAATSIAGGSESIWCCACYALTFTSGPVAGKTMVVQSTSTGGDLGSNHFDIAMPGGGVGIFNGCESQFGGLPGAQYGGISSRDQCDSFPAPLKPGCQWRFDWFQNADNPTFTFQQVQCPAEIVARSGCKRNDDSSFPVFTPPSGGNGGTGTPTSTAPGSGQTSPGGGSGCTSQKWAQCGGIGFSGCTTCVSGTTCQKLNDYYSQCL

SEQ ID NO: 48612 - protein, 277 aa, Thermothielavioides terrestris
SGSGQSTRYWDCCKPSCAWPGKAAVSQPVYACDANFQRLSDFNVQSGCNGGSAYSCADQTPWAVNDNLAYGFAATSIAGGSESSWCCACYALTFTSGPVAGKTMVVQSTSTGGDLGSNHFDIAMPGGGVGIFNGCSSQFGGLPGAEYGGISSRDQCDSFPAPLKPGCQWRFDWFQNADNPTFTFQQVQCPAEIVARSGCKRNDDSSFPVFTPPSGGNGGTGTPTSTAPGSGQTSPGGGSGCTSQKWAQCGGIGFSGCTTCVSGTTCQKLNDYYSQCL

SEQ ID NO: 48613 - protein, 277 aa, Thielavia hyrcaniae
SGSGQSTRYWDCCKPSCAWPGKALVSQPVYACDANFQRLSDFNVQSGCNGGSAYSCADQTPWAVNDNLAYGFAATSIAGGSESSWCCACYALTFTSGPVAGKTMVVQSTSTGGDLGSNHFDIAMPGGGVGIFNGCSSQFGGLPGAQYGGISSRDQCDSFPAPLKPGCQWRFDWFQNADNPTFTFQQVQCPAEIVARSGCKRNDDSSFPVFTPPSGGNGGTGTPTSTAPGSGQTSPGGGSGCTSQKWAQCGGIGFSGCTTCVSGTTCQKLNDYYSQCL

SEQ ID NO: 48614 - protein, 277 aa, Thermothielavioides terrestris
SGSGQSTRYWDCCKPSCAWPGKAAVSQPVYACDANFQRLSDFNVQSGCNGGSAYSCADQTPWAVNDNLAYGFAATSIAGGSESSWCCACYALTFTSGPVAGKTMVVQSTSTGGDLGSNHFDIAMPGGGVGIFNGCSSQFGGLPGAQYGGISSRDQCDSFPAPLKPGCQWRFDWFQNADNPTFTFQQVQCPAEIVARSGCKRNDDSSFPVWTPPSGGNGGTGTPTSTAPGSGQTSPGGGSGCTSQKWAQCGGIGFSGCTTCVSGTTCQKLNDYYSQCL

SEQ ID NO: 48615 - protein, 277 aa, Thermothielavioides terrestris
SGSGQSTRYWDCCKPSCAWPGKAAVSQPVYACDANFQRLSDFNVQSGCNGGSAYSCADQTPWAVNDNLAYGFAATSIAGGSESSWCCACYALTFTSGPVAGKAMVVQSTSTGGDLGSNHFDIAMPGGGVGIFNGCSSQFGGLPGAQYGGISSRDQCDSFPAPLKPGCQWRFDWFQNADNPTFTFQQVQCPAEIVARSGCKRNDDSSFPVFTPPSGGNGGTGTPTSTAPGSGQTSPGGGSGCTSQKWAQCGGIGFSGCTTCVSGTTCQKLNDYYSQCL

SEQ ID NO: 48616 - protein, 277 aa, Thermothielavioides terrestris
SGSGQSTRYWDCCKPSCAWPGKAAVSQPVYACDANFQRLSDFNVQSGCNGGSAYSCADQTPWAVNDNLAYGFAATSIAGGSESSWCCACYALTFTSGPVAGKTMVVQSTSTGWDLGSNHFDIAMPGGGVGIFDGCSSQFGGLPGAQYGGISSRDQCDSFPAPLKPGCQWRFDWFQNADNPTFTFQQVQCPAEIVARSGCKRNDDSSFPVFTPPSGGNGGTGTPTSTAPGSGQTSPGGGSGCTSQKWAQCGGIGFSGCTTCVSGTTCQKLNDYYSQCL

SEQ ID NO: 48617 - protein, 277 aa, Thermothielavioides terrestris
SGSGQSTRYWDCCKPSCAWPGKAAVSQPVYACDANFQRLSDFNVQSGCNGGSAYSCADQTPWAVNDNLAYGFAATSIAGGSESSWCCACYALTFTSGPVAGKTMVVQSTSTGGDLGSNHFDIAMPGGGVGIFNGCSSQFGGLPGAQYGGISSRDQCDEFPAPLKPGCQWRFDWFQNADNPTFTFQQVQCPAEIVARSGCKRNDDSSFPVFTPPSGGNGGTGTPTSTAPGSGQTSPGGGSGCTSQKWAQCGGIGFSGCTTCVSGTTCQKLNDYYSQCL

SEQ ID NO: 48618 - protein, 277 aa, Thermothielavioides terrestris
SGSGQSTRYWDCCKPSCAWPGKAAVSQPVYACDANFQRLSDFNVQSGCNGGSAYSCADQTPWAVNDNLAYGFAATSIAGGSESSWCCACYALTFTSGPVAGKTMVVQSTSTGGDLGSNHFDIAMPGGGVGIFNGCRSQFGGLPGAQYGGISSRDQCDDFPAPLKPGCQWRFDWFQNADNPTFTFQQVQCPAEIVARSGCKRNDDSSFPVFTPPSGGNGGTGTPTSTAPGSGQTSPGGGSGCTSQKWAQCGGIGFSGCTTCVSGTTCQKLNDYYSQCL

SEQ ID NO: 48619 - protein, 277 aa, Thermothielavioides terrestris
SGSGQSTRYWDCCKPSCAWPGKAAVSQPVYACDANFQRLSDFNVQSGCNGGSAYSCADQTPWAVNDNLAYGFAATSIAGGSESSWCCACYALTFTSGPVAGKTMVVQSTSTGFDLGSNHFDIAMPGGGVGIFDGCSSQFGGLPGAQYGGISSRDQCDSFPAPLKPGCQWRFDWFQNADNPTFTFQQVQCPAEIVARSGCKRNDDSSFPVFTPPSGGNGGTGTPTSTAPGSGQTSPGGGSGCTSQKWAQCGGIGFSGCTTCVSGTTCQKLNDYYSQCL

SEQ ID NO: 48620 - protein, 277 aa, Thermothielavioides terrestris
SGSGQSTRYWDCCKPSCAWPGKAAVSQPVYACDANFQRLSDFNVQSGCNGGSAYSCADQTPWAVNDNLAYGFAATSIAGGSESSWCCACYALTFTSGPVAGKTMVVQSTSTGGDLGSNHFDIAMPGGGVGIFNGCSSQFGGLPGARYGGIKSRDQCDSFPAPLKPGCQWRFDWFQNADNPTFTFQQVQCPAEIVARSGCKRNDDSSFPVFTPPSGGNGGTGTPTSTAPGSGQTSPGGGSGCTSQKWAQCGGIGFSGCTTCVSGTTCQKLNDYYSQCL

SEQ ID NO: 48621 - protein, 277 aa, Thermothielavioides terrestris
SGSGQSTRYWDCCKPSCAWPGKAAVSQPVYACDANFQRLSDFNVQSGCNGGSAYSCADQTPWAVNDNLAYGFAATSIAGGSESSWCCACYALTFTSGPVAGKRMVVQSTSTGGDLGSNHFDIAMPGGGVGIFNGCSSQFGGLPGAQYGGISSRDQCDSFPAPLKPGCQWRFDWFQNADNPTFTFQQVQCPAEIVARSGCKRNDDSSFPVFTPPSGGNGGTGTPTSTAPGSGQTSPGGGSGCTSQKWAQCGGIGFSGCTTCVSGTTCQKLNDYYSQCL

SEQ ID NO: 48622 - protein, 277 aa, Thermothielavioides terrestris
SGSGQSTRYWDCCKPSCAWPGKAAVSQPVYACDANFQRLSDFNVQSGCNGGSAYSCADQTPWAVNDNLAYGFAATSIAGGSESSWCCACYALTFTSGPVAGKTMVVQSTSTGGDLGSNHFDIAMPGGGVGIFNGCSSQFGGLPGHQYGGISSRDQCDSFPAPLKPGCQWRFDWFQNADNPTFTFQQVQCPAEIVARSGCKRNDDSSFPVFTPPSGGNGGTGTPTSTAPGSGQTSPGGGSGCTSQKWAQCGGIGFSGCTTCVSGTTCQKLNDYYSQCL

SEQ ID NO: 48623 - protein, 277 aa, Thermothielavioides terrestris
SGSGQSTRYWDCCKPSCAWPGKAAVSQPVYACDANFQRLSDFNVQSGCNGGSAYACADQTPWAVNDNLAYGFAATSIAGGSESSWCCACYALTFTSGPVAGKTMVVQSTSTGGDLGSNHFDIAMPGGGVGIFNGCSSQFGGLPGARYGGISSRDQCDSFPAPLKPGCYWRFDWFQNADNPTVTFQQVQCPAEIVARSGCKRNDDSSFPVFTPPSGGNGGTGTPTSTAPGSGQTSPGGGSGCTSQKWAQCGGIGFSGCTTCVSGTTCQKLNDYYSQCL

SEQ ID NO: 48624 - protein, 277 aa, Thermothielavioides terrestris
SGSGQSTRYWDCCKPSCAWPGKAAVSQPVYACDANFQRLSDFNVQSGCNGGSAYSCADQTPWAVNDNLAYGFAATSIAGGSESSWCCACYALTFTSGPVAGKTMVVQSTSTGGDLGSNHFDIAMPGGGVGIFNGCSSQFGGLPGARYGGISSRDQCDSFPAPLKPGCQWRFDWFQNATNPTFTFQQVQCPAEIVARSGCKRNDDSSFPVFTPPSGGNGGTGTPTSTAPGSGQTSPGGGSGCTSQKWAQCGGIGFSGCTTCVSGTTCQKLNDYYSQCL

SEQ ID NO: 48625 - protein, 277 aa, Thermothielavioides terrestris
SGSGQSTRYWDCCKPSCAWPGKAAVSQPVYACDANFQRLSDFNVQSGCNGGSAYSCADQTPWAVNDNLAYGFAATSIAGGIESSWCCACYALTFTSGPVAGKTMVVQSTSTGGDLGSNHFDIAMPGGGVGIFNGCSSQFGGLPGAQYGGISSRDQCDSFPAPLKPGCQWRFDWFQNADNPTFTFQQVQCPAEIVARSGCKRNDDSSFPVFTPPSGGNGGTGTPTSTAPGSGQTSPGGGSGCTSQKWAQCGGIGFSGCTTCVSGTTCQKLNDYYSQCL

SEQ ID NO: 48626 - protein, 277 aa, Thermothielavioides terrestris
SGSGQSTRYWDCCKPSCAWPGKAAVSQPVYACDANFQRLSDFNVQSGCNGGSAYSCADQTPWAVNDNLAYGFAATSIAGGSESMWCCACYALTFTSGPVAGKTMVVQSTSTGGDLGSNHFDIAMPGGGVGIFNGCSSQFGGLPGAQYGGISSRDQCDSFPAPLKPGCQWRFDWFQNADNPTFTFQQVQCPAEIVARSGCKRNDDSSFPVFTPPSGGNGGTGTPTSTAPGSGQTSPGGGSGCTSQKWAQCGGIGFSGCTTCVSGTTCQKLNDYYSQCL

SEQ ID NO: 48627 - protein, 277 aa, Thermothielavioides terrestris
SGSGQSTRYWDCCKPSCAWPGKAAVSQPVYACDANFQRLSDFNVQSGCNGGSAYSCADQTPWAVNDNLAYGFAATSIAGGSESSWCCACYALTFTSGPVAGKMMVVQSTSTGGDLGSNHFDIAMPGGGVGIFNGCSSQFGGLPGAQYGGISSRDQCDSFPAPLKPGCQWRFDWFQNADNPTFTFQQVQCPAEIVARSGCKRNDDSSFPVFTPPSGGNGGTGTPTSTAPGSGQTSPGGGSGCTSQKWAQCGGIGFSGCTTCVSGTTCQKLNDYYSQCL

SEQ ID NO: 48628 - protein, 277 aa, Thermothielavioides terrestris
SGSGQSTRYWDCCKPSCAWPGKAAVSQPVYACDANFQRLSDFNVQSGCNGGSAYSCADQTPWAVNDNLAYGFAATSIAGGSESSWCCACYALTFTSGPVAGKQMVVQSTSTGGDLGSNHFDIAMPGGGVGIFNGCSSQFGGLPGAQYGGISSRDQCDSFPAPLKPGCQWRFDWFQNADNPTFTFQQVQCPAEIVARSGCKRNDDSSFPVFTPPSGGNGGTGTPTSTAPGSGQTSPGGGSGCTSQKWAQCGGIGFSGCTTCVSGTTCQKLNDYYSQCL

SEQ ID NO: 48629 - protein, 277 aa, Thermothielavioides terrestris
SGSGQSTRYWDCCKPSCAWPGKAAVSQPVYACDANFQRLSDFNVQSGCNGGSAYSCADQTPWAVNDNLAYGFAATSIAGGSESSWCCACYALTFTSGPVAGKTMVVQSTSTGGDLGSNHFDIAMPGGGVGIFNGCSSQFGGLPGDQYGGISSRDQCDDFPAPLKPGCQWRFDWFQNADNPTFTFQQVQCPAEIVARSGCKRNDDSSFPVFTPPSGGNGGTGTPTSTAPGSGQTSPGGGSGCTSQKWAQCGGIGFSGCTTCVSGTTCQKLNDYYSQCL

SEQ ID NO: 48630 - protein, 277 aa, Thermothielavioides terrestris
SGSGQSTRYWDCCKPSCAWPGKAAVSQPVYACDANFQRLSDFNVQSGCNGGSAYSCADQTPWAVNDNLAYGFAATSIAGGSESSWCCACYALTFTSGPVAGKTMVVQSTSTGGDLGSNHFDIAMPGGGVGIFNGCMSQFGGLPGAQYGGISSRDQCDSFPAPLKPGCQWRFDWFQNADNPTFTFQQVQCPAEIVARSGCKRNDDSSFPVFTPPSGGNGGTGTPTSTAPGSGQTSPGGGSGCTSQKWAQCGGIGFSGCTTCVSGTTCQKLNDYYSQCL

SEQ ID NO: 48631 - protein, 315 aa, Acremonium thermophilum
MRSSPFLRAALAAALPLSAHALDGKSTRYWDCCKPSCGWAGKASVNQPVFSCSADWQRISDFNAKSGCDGGSAYSCADQTPWAVNDNFSYGFAATAIAGGSESSWCCACYALTFNSGPVAGKTMVVQSTSTGGDLGSNQFDLAIPGGGVGIFNGCASQFGGLPGAQYGGISDRSQCSSFPAPLQPGCQWRFDWFQNADNPTFTFQRVQCPSELTSRTGCKRDDDASYPVFNPPSVPGLDGSNPGNPTTTVVPPASTSTSRPTSSTSSPVSTPTGQPGGCTTQKWGQCGGIGYTGCTNCVAGTTCTQLNPWYSQCL

SEQ ID NO: 48632 - protein, 248 aa, Thermothielavioides terrestris
SGSGQSTRYWDCCKPSCAWPGKAAVSQPVYACDANFQRLSDFNVQSGCNGGSAYACADQTPWAVNDNLAYGFAATSIAGGSESSWCCACYALTFTSGPVAGKTMVVQSTSTGGDLGSNHFDIAMPGGGVGIFDGCSSQFGGLPGARYGGISSRDQCDSFPAPLKPGCQWRFDWFQNADNPTFTFQQVQCPAEIVARSGCKRNDDSSFPVFTTPTTPTTPTTPTTPTTPTGCTAERWAQCGGNGWSGCT

SEQ ID NO: 48633 - protein, 309 aa, Thermochaetoides thermophila
MRSTPVLRTALAAALPGTVLAADGNSTRYWDCCKPSCLSPGNVQVSQNVFACDTNFNRIYDFGAKTYCEGGPAYSCQDQTPWAVNDQFSYGFAATNIAGGNEASWCCACYKLTFTEGPVAGKVMVVQSTSTGGDLGNNHFSLNIPGGGVGIFDGCTPQFGGLPGERYGGISSRSQCDSFTDALKPGCYWRFDWTLNADNPNFTFERVQCPSELVARTGCKRNDDGNYPVFTPPSGDSPSSSSAAPTSTSTSQQPQQPSDSSSQASVPTSNPGGCESQKWAGSGGIGFTGCSSTVSGTTCTKLNDWYSQC

SEQ ID NO: 48634 - protein, 279 aa, Thermothielavioides terrestris
SGSGQSTRYWDCCKPSCAWPGKAAVSQPVYACDANFQRLSDFNVQSGCNGGSAYACADQTPWAVNDNLAYGFAATSIAGGSESSWCCACYALTFTSGPVAGKTMVVQSTSTGGDLGSNHFDIAMPGGGVGIFDGCSSQFGGLPGARYGGISSRDQCDSFPAPLKPGCQWRFDWFQNADNPTFTFQQVQCPAEIVARSGCKRNDDSSFPVFTSPPSPPSPPSPPSPPSPPSPPSPPSPPSPPGCTSQKWAQCGGIGFSGCTTCVSGTTCQKLNDYYSQCL

SEQ ID NO: 48635 - protein, 287 aa, Humicola insolens
ALAADGRSTRYWDCCKPSCGWAKKAPVNQPVFSCNANFQRITDFDAKSGCEPGGVAYSCADQTPWAVNDDFALGFAATSIAGSNEAGWCCACYELTFTSGPVAGKKMVVQSTSTGGDLGSNHFDLNIPGGGVGIFDGCTPQFGGLPGQRYGGISSRNECDRFPDALKPGCYWRFDWFKNADNPSFSFRQVQCPAELVARTGCRRNDDGNFPAVQIPSSSTSSPVNQPTSTSTTSTSTTSSPPVQPTTPSGCTAERWAQCGGNGWSGCTTCVAGSTCTKINDWYHQCL

SEQ ID NO: 48636 - protein, 281 aa, Humicola insolens
GRSTRYWDCCKPSCGWAKKAPVNQPVFSCNANFQRITDFDAKSGCEPGGVAYSCADQTPWAVNDDFALGFAATSIAGSNEAGWCCACYELTFTSGPVVGKKMVVQSTSTGGDLGSNHFDLNIPGGGVGIFDGCTPQFGGLPGQRYGGISSRNECDRFPDALKPGCYWRFDWFKNADNPSFSFRQVQCPAELVARTGCRRNDDGNFPAVQISSSTSSPVNQPTSTSTTSTSTTSSPPVQPTTPSGCTAERWAQCGGNGWSGCTTCVAGSTCTKINDWYHQCL

SEQ ID NO: 48637 - protein, 281 aa, Humicola insolens
GRSTRYWDCCKPSCGWAKKAPVNQPVFSCNANFQRITDFDAKSGCEPGGVAYSCADQTPWAVNDDFALGFAATSIAGSNEAGWCCACYELTFTSGPVAGKKMVVQSTSTGKDLGSNHFDLNIPGGGVGIFDGCTPQFGGLPGQRYGGISSRNECDRFPDALKPGCYWRFDWFKNADNPSFSFRQVQCPAELVARTGCRRNDDGNFPAVQISSSTSSPVNQPTSTSTTSTSTTSSPPVQPTTPSGCTAERWAQCGGNGWSGCTTCVAGSTCTKINDWYHQCL

SEQ ID NO: 48638 - protein, 281 aa, Humicola insolens
GRSTRYWDCCKPSCGWAKKAPVNQPVFSCNANFQRITDFDAKSGCEPGGVAYSCADQTPWAVNDDFALGFAATSIAGSNEAGWCCACYELTFTSGPVAGQKMVVQSTSTGGDLGSNHFDLNIPGGGVGIFDGCTPQFGGLPGQRYGGISSRNECDRFPDALKPGCYWRFDWFKNADNPSFSFRQVQCPAELVARTGCRRNDDGNFPAVQISSSTSSPVNQPTSTSTTSTSTTSSPPVQPTTPSGCTAERWAQCGGNGWSGCTTCVAGSTCTKINDWYHQCL

SEQ ID NO: 48639 - protein, 281 aa, Humicola insolens
GRSTRYWDCCKPSCGWAKKAPVNQPVFSCNANFQRITDFDAKSGCEPGGVAYSCADQTPWAVNDDFALGFAATSIAGSNEAGWCCACYELTFTSGPVAGKKMVVQSTSTGGDLGSNHFDLNIPGGGVGRFDGCTPQFGGLPGQRYGGISSRNECDRFPDALKPGCYWRFDWFKNADNPSFSFRQVQCPAELVARTGCRRNDDGNFPAVQISSSTSSPVNQPTSTSTTSTSTTSSPPVQPTTPSGCTAERWAQCGGNGWSGCTTCVAGSTCTKINDWYHQCL

SEQ ID NO: 48640 - protein, 281 aa, Humicola insolens
GRSTRYWDCCKPSCGWAKKAPVNQPVFSCNANFQRITDFDAKSGCEPGGVAYSCADQTPWAVNDDFALGFAATSIAGSNEAGWCCACYELTFTSGPVAGKKMVVQSTSTGYDLGSNHFDLNIPGGGVGIFDGCTPQFGGLPGQRYGGISSRNECDRFPDALKPGCYWRFDWFKNADNPSFSFRQVQCPAELVARTGCRRNDDGNFPAVQISSSTSSPVNQPTSTSTTSTSTTSSPPVQPTTPSGCTAERWAQCGGNGWSGCTTCVAGSTCTKINDWYHQCL

SEQ ID NO: 48641 - protein, 281 aa, Humicola insolens
GRSTRYWDCCKPSCGWAKKAPVNQPVFSCNANFQRITDFDAKSGCEPGGVAYSCADQTPWAVNDDFALGFAATSIAGSNEAGWCCACYELTFVSGPVAGKKMVVQSTSTGGDLGSNHFDLNIPGGGVGIFDGCTPQFGGLPGQRYGGISSRNECDRFPDALKPGCYWRFDWFKNADNPSFSFRQVQCPAELVARTGCRRNDDGNFPAVQISSSTSSPVNQPTSTSTTSTSTTSSPPVQPTTPSGCTAERWAQCGGNGWSGCTTCVAGSTCTKINDWYHQCL

SEQ ID NO: 48642 - protein, 281 aa, Humicola insolens
GRSTRYWDCCKPSCGWAKKAPVNQPVFSCNANFQRITDFDAKSGCEPGGVAYSCADQTPWAVNDDFALGFAATSIAGSNEAGWCCACYELTFTSGPVAGKKMVVQSTSTGGDLGSNHFDLNIPGGGVGIFDGCTPQFGGLPGQRFGGISSRNECDRFPDALKPGCYWRFDWFKNADNPSFSFRQVQCPAELVARTGCRRNDDGNFPAVQISSSTSSPVNQPTSTSTTSTSTTSSPPVQPTTPSGCTAERWAQCGGNGWSGCTTCVAGSTCTKINDWYHQCL

SEQ ID NO: 48643 - protein, 281 aa, Humicola insolens
GRSTRYWDCCKPSCGWAKKAPVNQPVFSCNANFQRITDFDAKSGCEPGGVAYSCADQTPWAVNDDFALGFAATSIAGSNEAGWCCACYELTFTSGPVAGKKMVVQSTSTGGDLGSNHFDLNIPGGGVGVFDGCTPQFGGLPGQRYGGISSRNECDRFPDALKPGCYWRFDWFKNADNPSFSFRQVQCPAELVARTGCRRNDDGNFPAVQISSSTSSPVNQPTSTSTTSTSTTSSPPVQPTTPSGCTAERWAQCGGNGWSGCTTCVAGSTCTKINDWYHQCL

SEQ ID NO: 48644 - protein, 281 aa, Humicola insolens
GRSTRYWDCCKPSCGWAKKAPVNQPVFSCNANFQRITDFDAKSGCEPGGVAYSCADQTPWAVNDDFALGFAATSIAGSNEAGWCCACYELTFTSGPVEGKKMVVQSTSTGGDLGSNHFDLNIPGGGVGIFDGCTPQFGGLPGQRYGGISSRNECDRFPDALKPGCYWRFDWFKNADNPSFSFRQVQCPAELVARTGCRRNDDGNFPAVQISSSTSSPVNQPTSTSTTSTSTTSSPPVQPTTPSGCTAERWAQCGGNGWSGCTTCVAGSTCTKINDWYHQCL

SEQ ID NO: 48645 - protein, 281 aa, Humicola insolens
GRSTRYWDCCKPSCGWAKKAPVNQPVFSCNANFQRITDFDAKSGCEPGGVAYSCADQTPWAVNDDFALGFAATSIAGSNEAGWCCACYELTFTSGPVAGKKMVVQSTSTGHDLGSNHFDLNIPGGGVGIFDGCTPQFGGLPGQRYGGISSRNECDRFPDALKPGCYWRFDWFKNADNPSFSFRQVQCPAELVARTGCRRNDDGNFPAVQISSSTSSPVNQPTSTSTTSTSTTSSPPVQPTTPSGCTAERWAQCGGNGWSGCTTCVAGSTCTKINDWYHQCL

SEQ ID NO: 48646 - protein, 281 aa, Humicola insolens
GRSTRYWDCCKPSCGWAKKAPVNQPVFSCNANFQRITDFDAKSGCEPGGVAYSCADQTPWAVNDDFALGFAATSIAGSNEAGWCCACYELTFTSGPVLGKKMVVQSTSTGGDLGSNHFDLNIPGGGVGIFDGCTPQFGGLPGQRYGGISSRNECDRFPDALKPGCYWRFDWFKNADNPSFSFRQVQCPAELVARTGCRRNDDGNFPAVQISSSTSSPVNQPTSTSTTSTSTTSSPPVQPTTPSGCTAERWAQCGGNGWSGCTTCVAGSTCTKINDWYHQCL

SEQ ID NO: 48647 - protein, 281 aa, Humicola insolens
GRSTRYWDCCKPSCGWAKKAPVNQPVFSCNANFQRITDFDAKSGCEPGGVAYSCADQTPWAVNDDFALGFAATSIAGSNEAGWCCACYELTFTSGPVAGKKMVVQSTSTGFDLGSNHFDLNIPGGGVGIFDGCTPQFGGLPGQRYGGISSRNECDRFPDALKPGCYWRFDWFKNADNPSFSFRQVQCPAELVARTGCRRNDDGNFPAVQISSSTSSPVNQPTSTSTTSTSTTSSPPVQPTTPSGCTAERWAQCGGNGWSGCTTCVAGSTCTKINDWYHQCL

SEQ ID NO: 48648 - protein, 281 aa, Humicola insolens
GRSTRYWDCCKPSCGWAKKAPVNQPVFSCNANFQRITDFDAKSGCEPGGVAYSCADQTPWAVNDDFALGFAATSIAGSNEAGWCCACYELTFTSGPVAGKKMVVQSTSTGWDLGSNHFDLNIPGGGVGIFDGCTPQFGGLPGQRYGGISSRNECDRFPDALKPGCYWRFDWFKNADNPSFSFRQVQCPAELVARTGCRRNDDGNFPAVQISSSTSSPVNQPTSTSTTSTSTTSSPPVQPTTPSGCTAERWAQCGGNGWSGCTTCVAGSTCTKINDWYHQCL

SEQ ID NO: 48649 - protein, 281 aa, Humicola insolens
GRSTRYWDCCKPSCGWAKKAPVNQPVFSCNANFQRITDFDAKSGCEPGGVAYSCADQTPWAVNDDFALGFAATSIAGSNEAGWCCACYELTFTSGPVAGKKMVVQSTSTGGDLGSNHFDLNIPGGGVGLFDGCTPQFGGLPGQRYGGISSRNECDRFPDALKPGCYWRFDWFKNADNPSFSFRQVQCPAELVARTGCRRNDDGNFPAVQISSSTSSPVNQPTSTSTTSTSTTSSPPVQPTTPSGCTAERWAQCGGNGWSGCTTCVAGSTCTKINDWYHQCL

SEQ ID NO: 48650 - protein, 277 aa, Acremonium thermophilum
ALDGKSTRYWDCCKPSCGWPGKASVNQPVFSCSADWQRISDFNAKSGCDGGSAYSCADQTPWAVNDNFSYGFAATAIAGGSESSWCCACYALTFNSGPVAGKTMVVQSTSTGGDLGSNQFDLAIPGGGVGIFNGCASQFGGLPGAQYGGISDRSQCSSFPAPLQPGCQWRFDWFQNADNPTFTFQRVQCPSELTSRTGCKRDDDASYPVFNPPSGGSPSTTSTTTSSPSGPTGNPPGGGGCTAQKWAQCGGTGFTGCTTCVSGTTCQVQNQWYSQCL

SEQ ID NO: 48651 - protein, 277 aa, Thermothielavioides terrestris
SGSGQSTRYWDCCKPSCAWPGKAAVSQPVYACDANFQRLSDFNVQSGCNGGSAYSCADQTPWAVNDNLAYGFAATSIAGGSESSWCCACYALTFTSGPVAGKTMVVQSTSTGGDLGSNHFDIAMPGGGVGIFNGCSSQFGGLPGDQYGGISSRDQCDSFPAPLKPGCQWRFDWFQNATNPTFTFQQVQCPAEIVARSGCKRNDDSSFPVFTPPSGGNGGTGTPTSTAPGSGQTSPGGGSGCTSQKWAQCGGIGFSGCTTCVSGTTCQKLNDYYSQCL

SEQ ID NO: 48652 - protein, 277 aa, Thielavia hyrcaniae
SGSGQSTRYWDCCKPSCAWPGKAAVSQPVYACDANFQRLSDFNVQSGCNGGSAYSCADQTPWAVNDNLAYGFAATSIAGGSESSWCCACYALTFTSGPVAGKTMVVQSTSTGTDLGSNHFDIAMPGGGVGIFNGCSSQFGGLPGAQYGGISSRDQCDSFPAPLKPGCQWRFDWFQNADNPTFTFQQVQCPAEIVARSGCKRNDDSSFPVFTPPSGGNGGTGTPTSTAPGSGQTSPGGGSGCTSQKWAQCGGIGFSGCTTCVSGTTCQKLNDYYSQCL

SEQ ID NO: 48653 - protein, 277 aa, Thermothielavioides terrestris
SGSGQSTRYWDCCKPSCAWPGKAAVSQPVYACDANFQRLSDFNVQSGCNGGSAYSCADQTPWAVNDNLAYGFAATSIAGGSESSWCCACYALTFTSGPVAGMTMVVQSTSTGGDLGSNHFDIAMPGGGVGIFNGCSSQFGGLPGAQYGGISSRDQCDSFPAPLKPGCQWRFDWFQNADNPTFTFQQVQCPAEIVARSGCKRNDDSSFPVFTPPSGGNGGTGTPTSTAPGSGQTSPGGGSGCTSQKWAQCGGIGFSGCTTCVSGTTCQKLNDYYSQCL

SEQ ID NO: 48654 - protein, 277 aa, Thermothielavioides terrestris
SGSGQSTRYWDCCKPSCAWPGKAAVSQPVYACDANFQRLSDFNVQSGCNGGSAYSCADQTPWAVNDNLAYGFAATSIAGGSESSWCCACYALTFTSGPVAGQTMVVQSTSTGGDLGSNHFDIAMPGGGVGIFNGCSSQFGGLPGAQYGGISSRDQCDSFPAPLKPGCQWRFDWFQNADNPTFTFQQVQCPAEIVARSGCKRNDDSSFPVFTPPSGGNGGTGTPTSTAPGSGQTSPGGGSGCTSQKWAQCGGIGFSGCTTCVSGTTCQKLNDYYSQCL

SEQ ID NO: 48655 - protein, 277 aa, Thermothielavioides terrestris
SGSGQSTRYWDCCKPSCAWPGKAAVSQPVYACDANFQRLSDFNVQSGCNGGSAYSCADQTPWAVNDNLAYGFAATSIAGGSESSWCCACYALTFVSGPVAGKTMVVQSTSTGGDLGSNHFDIAMPGGGVGIFNGCSSQFGGLPGAQYGGISSRDQCDSFPAPLKPGCQWRFDWFQNADNPTFTFQQVQCPAEIVARSGCKRNDDSSFPVFTPPSGGNGGTGTPTSTAPGSGQTSPGGGSGCTSQKWAQCGGIGFSGCTTCVSGTTCQKLNDYYSQCL

SEQ ID NO: 48656 - protein, 277 aa, Thermothielavioides terrestris
SGSGQSTRYWDCCKPSCAWPGKAAVSQPVYACDANFQRLSDFNVQSGCNGGSAYSCADQTPWAVNDNLAYGFAATSIAGGSESSWCCACYALTFTSGPVAGKTMVVQSTSTGWDLGSNHFDIAMPGGGVGIFNGCSSQFGGLPGAQYGGISSRDQCDDFPAPLKPGCQWRFDWFQNADNPTFTFQQVQCPAEIVARSGCKRNDDSSFPVFTPPSGGNGGTGTPTSTAPGSGQTSPGGGSGCTSQKWAQCGGIGFSGCTTCVSGTTCQKLNDYYSQCL

SEQ ID NO: 48657 - protein, 277 aa, Thermothielavioides terrestris
SGSGQSTRYWDCCKPSCAWPGKAAVSQPVYACDANFQRLSDFNVQSGCNGGSAYSCADQTPWAVNDNLAYGFAATSIAGGSESSWCCACYALTFTSGPVAGKTMVVQSTSTGGDLGSNHFDIAMPGGGVGIFNGCSSQFGGLPGAQFGGISSRDQCDSFPAPLKPGCQWRFDWFQNADNPTFTFQQVQCPAEIVARSGCKRNDDSSFPVFTPPSGGNGGTGTPTSTAPGSGQTSPGGGSGCTSQKWAQCGGIGFSGCTTCVSGTTCQKLNDYYSQCL

SEQ ID NO: 48658 - protein, 277 aa, Thermothielavioides terrestris
SGSGQSTRYWDCCKPSCAWPGKAAVSQPVYACDANFQRLSDFNVQSGCNGGSAYSCADQTPWAVNDNLAYGFAATSIAGGSESSWCCACYALTFTSGPAAGKTMVVQSTSTGGDLGSNHFDIAMPGGGVGIFNGCSSQFGGLPGAQYGGISSRDQCDSFPAPLKPGCQWRFDWFQNADNPTFTFQQVQCPAEIVARSGCKRNDDSSFPVFTPPSGGNGGTGTPTSTAPGSGQTSPGGGSGCTSQKWAQCGGIGFSGCTTCVSGTTCQKLNDYYSQCL

SEQ ID NO: 48659 - protein, 277 aa, Thermothielavioides terrestris
SGSGQSTRYWDCCKPSCAWPGKAAVSQPVYACDANFQRLSDFNVQSGCNGGSAYSCADQTPWAVNDNLAYGFAATSIAGGSESSWCCACYALTFTSGPVAGKTMVVQSTSTGGDLGSNHFDIAMPGGGVGIFNGCSSQFGGLPGAQYGGISSRDQCDSFPAPLKPGCQWRFDWFQNADNPTFTFQQVQCPAEIVARSGCKRNDDSSFPVFTQPSGGNGGTGTPTSTAPGSGQTSPGGGSGCTSQKWAQCGGIGFSGCTTCVSGTTCQKLNDYYSQCL

SEQ ID NO: 48660 - protein, 277 aa, Thermothielavioides terrestris
SGSGQSTRYWDCCKPSCAWPGKAAVSQPVYACDANFQRLSDFNVQSGCNGGSAYSCADQTPWAVNDNLAYGFAATSIAGGSESSWCCACYALTFTSGPVAGKTMVVQSTSTGFDLGSNHFDIAMPGGGVGIFNGCSSQFGGLPGDQYGGISSRDQCDSFPAPLKPGCQWRFDWFQNADNPTFTFQQVQCPAEIVARSGCKRNDDSSFPVFTPPSGGNGGTGTPTSTAPGSGQTSPGGGSGCTSQKWAQCGGIGFSGCTTCVSGTTCQKLNDYYSQCL

SEQ ID NO: 48661 - protein, 277 aa, Thermothielavioides terrestris
SGSGQSTRYWDCCKPSCAWPGKAAVSQPVYACDANFQRLSDFNVQSGCNGGSAYSCADQTPWAVNDNLAYGFAATSIAGGSESSWCCACYALTFTSGPVAGKTMVVQSTSTGRDLGSNHFDIAMPGGGVGIFNGCSSQFGGLPGAQYGGISSRDQCDSFPAPLKPGCQWRFDWFQNADNPTFTFQQVQCPAEIVARSGCKRNDDSSFPVFTPPSGGNGGTGTPTSTAPGSGQTSPGGGSGCTSQKWAQCGGIGFSGCTTCVSGTTCQKLNDYYSQCL

SEQ ID NO: 48662 - protein, 277 aa, Thermothielavioides terrestris
SGSGQSTRYWDCCKPSCAWPGKAAVSQPVYACDANFQRLSDFNVQSGCNGGSAYSCADQTPWAVNDNLAYGFAATSIAGGSESSWCCACYALTFTSGPVAGKTMVVQSTSTGGDLGSNHFDIAMPGGGVGIFNGCSSQFGGLPGAQYGGIRSRDQCDSFPAPLKPGCQWRFDWFQNADNPTFTFQQVQCPAEIVARSGCKRNDDSSFPVFTPPSGGNGGTGTPTSTAPGSGQTSPGGGSGCTSQKWAQCGGIGFSGCTTCVSGTTCQKLNDYYSQCL

SEQ ID NO: 48663 - protein, 277 aa, Thermothielavioides terrestris
SGSGQSTRYWDCCKPSCAWPGKAAVSQPVYACDANFQRLSDFNVQSGCNGGSAYSCADQTPWAVNDNLAYGFAATSIAGGSESSWCCACYALTFTSGPVAGKTMVVQSTSTGFDLGSNHFDIAMPGGGVGIFNGCKSQFGGLPGAQYGGISSRDQCDSFPAPLKPGCQWRFDWFQNADNPTFTFQQVQCPAEIVARSGCKRNDDSSFPVFTPPSGGNGGTGTPTSTAPGSGQTSPGGGSGCTSQKWAQCGGIGFSGCTTCVSGTTCQKLNDYYSQCL

SEQ ID NO: 48664 - protein, 277 aa, Thermothielavioides terrestris
SGSGQSTRYWDCCKPSCAWPGKAAVSQPVYACDANFQRLSDFNVQSGCNGGSAYSCADQTPWAVNDNLAYGFAATSIAGGSDSSWCCACYALTFTSGPVAGKTMVVQSTSTGGDLGSNHFDIAMPGGGVGIFNGCSSQFGGLPGAQYGGISSRDQCDSFPAPLKPGCQWRFDWFQNADNPTFTFQQVQCPAEIVARSGCKRNDDSSFPVFTPPSGGNGGTGTPTSTAPGSGQTSPGGGSGCTSQKWAQCGGIGFSGCTTCVSGTTCQKLNDYYSQCL

SEQ ID NO: 48665 - protein, 277 aa, Thermothielavioides terrestris
SGSGQSTRYWDCCKPSCAWPGKAAVSQPVYACDANFQRLSDFNVQSGCNGGSAYSCADQTPWAVNDNLAYGFAATSIALGSESSWCCACYALTFTSGPVAGKTMVVQSTSTGGDLGSNHFDIAMPGGGVGIFNGCSSQFGGLPGAQYGGISSRDQCDSFPAPLKPGCQWRFDWFQNADNPTFTFQQVQCPAEIVARSGCKRNDDSSFPVFTPPSGGNGGTGTPTSTAPGSGQTSPGGGSGCTSQKWAQCGGIGFSGCTTCVSGTTCQKLNDYYSQCL

SEQ ID NO: 48666 - protein, 277 aa, Thermothielavioides terrestris
SGSGQSTRYWDCCKPSCAWPGKAAVSQPVYACDANFQRLSDFNVQSGCNGGSAYSCADQTPWAVNDNLAYGFAATSIAGGSESSWCCACYALTFTSGPVHGKTMVVQSTSTGGDLGSNHFDIAMPGGGVGIFNGCSSQFGGLPGAQYGGISSRDQCDSFPAPLKPGCQWRFDWFQNADNPTFTFQQVQCPAEIVARSGCKRNDDSSFPVFTPPSGGNGGTGTPTSTAPGSGQTSPGGGSGCTSQKWAQCGGIGFSGCTTCVSGTTCQKLNDYYSQCL

SEQ ID NO: 48667 - protein, 277 aa, Thermothielavioides terrestris
SGSGQSTRYWDCCKPSCAWPGKAAVSQPVYACDANFQRLSDFNVQSGCNGGSAYSCADQTPWAVNDNLAYGFAATSIAGGSESIWCCACYALTFTSGPVAGKTMVVQSTSTGGDLGSNHFDIAMPGGGVGIFNGCSSQFGGLPGAQYGGISSRDQCDSFPAPLKPGCQWRFDWFQNATNPTFTFQQVQCPAEIVARSGCKRNDDSSFPVFTPPSGGNGGTGTPTSTAPGSGQTSPGGGSGCTSQKWAQCGGIGFSGCTTCVSGTTCQKLNDYYSQCL

SEQ ID NO: 48668 - protein, 277 aa, Thermothielavioides terrestris
SGSGQSTRYWDCCKPSCAWPGKAAVSQPVYACDANFQRLSDFNVQSGCNGGSAYSCADQTPWAVNDNLAYGFAATSIAGGSESSWCCACYALTFTSGPVAGKTMVVQSTSTGGDLGSNHFDIAMPGGGVGIFNGCESQFGGLPGAQYGGIKSRDQCDSFPAPLKPGCQWRFDWFQNADNPTFTFQQVQCPAEIVARSGCKRNDDSSFPVFTPPSGGNGGTGTPTSTAPGSGQTSPGGGSGCTSQKWAQCGGIGFSGCTTCVSGTTCQKLNDYYSQCL

SEQ ID NO: 48669 - protein, 277 aa, Thermothielavioides terrestris
SGSGQSTRYWDCCKPSCAWPGKAAVSQPVYACDANFQRLSDFNVQSGCNGGSAYSCADQTPWAVNDNLAYGFAATSIAGGSESSWCCACYALTFTSGPVAGKTMVVQSTSTGGDLGSNHFDIAMPGGGVGIFNGCRSQFGGLPGAQYGGISSRDQCDSFPAPLKPGCQWRFDWFQNATNPTFTFQQVQCPAEIVARSGCKRNDDSSFPVFTPPSGGNGGTGTPTSTAPGSGQTSPGGGSGCTSQKWAQCGGIGFSGCTTCVSGTTCQKLNDYYSQCL

SEQ ID NO: 48670 - protein, 277 aa, Thermothielavioides terrestris
SGSGQSTRYWDCCKPSCAWPGKAAVSQPVYACDANFQRLSDFNVQSGCNGGSAYSCADQTPWAVNDNLAYGFAATSIAGGSESSWCCACYALTFTSGPVAGKTMVVQSTSTGGDLGSNHFDIAMPGGGVGIFNGCSSQFGGLPGAQYGGISSRDQCDDFPAPLKPGCQWRFDWFQNATNPTFTFQQVQCPAEIVARSGCKRNDDSSFPVFTPPSGGNGGTGTPTSTAPGSGQTSPGGGSGCTSQKWAQCGGIGFSGCTTCVSGTTCQKLNDYYSQCL

SEQ ID NO: 48671 - protein, 277 aa, Thermothielavioides terrestris
SGSGQSTRYWDCCKPSCAWPGKAAVSQPVYACDANFQRLSDFNVQSGCNGGSAYSCADQTPWAVNDNLAYGFAATSIAGGSESSWCCACYALTFTSGPVAGKTMVVQSTSTGGDLGSNHFDIAMPGGGVGIFNGCRSQFGGLPGAQYGGIKSRDQCDSFPAPLKPGCQWRFDWFQNADNPTFTFQQVQCPAEIVARSGCKRNDDSSFPVFTPPSGGNGGTGTPTSTAPGSGQTSPGGGSGCTSQKWAQCGGIGFSGCTTCVSGTTCQKLNDYYSQCL

SEQ ID NO: 48672 - protein, 277 aa, Thermothielavioides terrestris
SGSGQSTRYWDCCKPSCAWPGKAAVSQPVYACDANFQRLSDFNVQSGCNGGSAYSCADQTPWAVNDNLAYGFAATSIAGGSESSWCCACYALTFTSGPVAGKTMVVQSTSTGFDLGSNHFDIAMPGGGVGIFNGCSSQFGGLPGAQYGGISSRDQCDSFPAPLKPGCQWRFDWFQNADNPTFTFQQVQCPAEIVARSGCKRNDDSSFPVFTPPSGGNGGTGTPTSTAPGSGQTSPGGGSGCTSQKWAQCGGIGFSGCTTCVSGTTCQKLNDYYSQCL

SEQ ID NO: 48673 - protein, 277 aa, Thermothielavioides terrestris
SGSGQSTRYWDCCKPSCAWPGKAAVSQPVYACDANFQRLSDFNVQSGCNGGSAYSCADQTPWAVNDNLAYGFAATSIAGGSESSWCCACYALTFTSGPVAGKTMVVQSTSTGGDLGSNHFDIAMPGGGVGVFNGCSSQFGGLPGAQYGGISSRDQCDSFPAPLKPGCQWRFDWFQNADNPTFTFQQVQCPAEIVARSGCKRNDDSSFPVFTPPSGGNGGTGTPTSTAPGSGQTSPGGGSGCTSQKWAQCGGIGFSGCTTCVSGTTCQKLNDYYSQCL

SEQ ID NO: 48674 - protein, 277 aa, Thermothielavioides terrestris
SGSGQSTRYWDCCKPSCAWPGKAAVSQPVYACDANFQRLSDFNVQSGCNNGSAYSCADQTPWAVNDNLAYGFAATSIAGGSESSWCCACYALTFTSGPVAGKTMVVQSTSTGGDLGSNHFDIAMPGGGVGIFNGCSSQFGGLPGAQYGGISSRDQCDSFPAPLKPGCQWRFDWFQNADNPTFTFQQVQCPAEIVARSGCKRNDDSSFPVFTPPSGGNGGTGTPTSTAPGSGQTSPGGGSGCTSQKWAQCGGIGFSGCTTCVSGTTCQKLNDYYSQCL

SEQ ID NO: 48675 - protein, 277 aa, Thermothielavioides terrestris
SGSGQSTRYWDCCKPSCAWPGKAAVSQPVYACDANFQRLSDFNVQSGCNGGSAYSCADQTPWAVNDNLAYGFAATSIAGGSESSWCCACYALTFTSGPVAGATMVVQSTSTGGDLGSNHFDIAMPGGGVGIFNGCSSQFGGLPGAQYGGISSRDQCDEFPAPLKPGCQWRFDWFQNADNPTFTFQQVQCPAEIVARSGCKRNDDSSFPVFTPPSGGNGGTGTPTSTAPGSGQTSPGGGSGCTSQKWAQCGGIGFSGCTTCVSGTTCQKLNDYYSQCL

SEQ ID NO: 48676 - protein, 277 aa, Thermothielavioides terrestris
SGSGQSTRYWDCCKPSCAWPGKAAVSQPVYACDANFQRLSDFNVQSGCNGGSAYSCADQTPWAVNDNLAYGFAATSIAGGSESSWCCACYALTFTSGPVAGKTMVVQSTSTGGDLGSNHFDIAMPGGGVGIFNGCESQFGGLPGAQYGGISSRDQCDSFPAPLKPGCQWRFDWFQNATNPTFTFQQVQCPAEIVARSGCKRNDDSSFPVFTPPSGGNGGTGTPTSTAPGSGQTSPGGGSGCTSQKWAQCGGIGFSGCTTCVSGTTCQKLNDYYSQCL

SEQ ID NO: 48677 - protein, 277 aa, Thermothielavioides terrestris
SGSGQSTRYWDCCKPSCAWPGKAAVSQPVYACDANFQRLSDFNVQSGCNGGSAYSCADQTPWAVNDNLAYGFAATSIAGGSESSWCCACYALTFTSGPVAGKTMVVQSTSTGKDLGSNHFDIAMPGGGVGIFNGCSSQFGGLPGAQYGGISSRDQCDSFPAPLKPGCQWRFDWFQNADNPTFTFQQVQCPAEIVARSGCKRNDDSSFPVFTPPSGGNGGTGTPTSTAPGSGQTSPGGGSGCTSQKWAQCGGIGFSGCTTCVSGTTCQKLNDYYSQCL

SEQ ID NO: 48678 - protein, 277 aa, Thermothielavioides terrestris
SGSGQSTRYWDCCKPSCAWPGKAAVSQPVYACDANFQRLSDFNVQSGCNGGSAYSCADQTPWAVNDNLAYGFAATSIAGGSESSWCCACYALTFTSTPVAGKTMVVQSTSTGGDLGSNHFDIAMPGGGVGIFNGCSSQFGGLPGAQYGGISSRDQCDSFPAPLKPGCQWRFDWFQNADNPTFTFQQVQCPAEIVARSGCKRNDDSSFPVFTPPSGGNGGTGTPTSTAPGSGQTSPGGGSGCTSQKWAQCGGIGFSGCTTCVSGTTCQKLNDYYSQCL

SEQ ID NO: 48679 - protein, 277 aa, Thermothielavioides terrestris
SGSGQSTRYWDCCKPSCAWPGKAAVSQPVYACDANFQRLSDFNVQSGCNGGSAYSCADQTPWAVNDNLAYGFAATSIAGGSESSWCCACYALTFTSGPVAGKTMVVQSTSTGGDLGSNHFDIAMPGGGVGKFNGCSSQFGGLPGAQYGGISSRDQCDSFPAPLKPGCQWRFDWFQNADNPTFTFQQVQCPAEIVARSGCKRNDDSSFPVFTPPSGGNGGTGTPTSTAPGSGQTSPGGGSGCTSQKWAQCGGIGFSGCTTCVSGTTCQKLNDYYSQCL

SEQ ID NO: 48680 - protein, 277 aa, Thermothielavioides terrestris
SGSGQSTRYWDCCKPSCAWPGKAAVSQPVYACDANFQRLSDFNVQSGCNGGSAYSCADQTPWAVNDNLAYGFAATSIAGGSESSWCCACYALTFTSGPVAGKTMVVQSTSTGGDLGSNHFDIAMPGGGVGIFNGCSSQFGGLPGAQWGGISSRDQCDSFPAPLKPGCQWRFDWFQNADNPTFTFQQVQCPAEIVARSGCKRNDDSSFPVFTPPSGGNGGTGTPTSTAPGSGQTSPGGGSGCTSQKWAQCGGIGFSGCTTCVSGTTCQKLNDYYSQCL

SEQ ID NO: 48681 - protein, 277 aa, Thermothielavioides terrestris
SGSGQSTRYWDCCKPSCAWPGKAAVSQPVYACDANFQRLSDFNVQSGCNGGSAYSCADQTPWAVNDNLAYGFAATSIAGGSESSWCCACFALTFTSGPVAGKTMVVQSTSTGGDLGSNHFDIAMPGGGVGIFNGCSSQFGGLPGAQYGGISSRDQCDSFPAPLKPGCQWRFDWFQNADNPTFTFQQVQCPAEIVARSGCKRNDDSSFPVFTPPSGGNGGTGTPTSTAPGSGQTSPGGGSGCTSQKWAQCGGIGFSGCTTCVSGTTCQKLNDYYSQCL

SEQ ID NO: 48682 - protein, 277 aa, Thermothielavioides terrestris
SGSGQSTRYWDCCKPSCAWPGKAAVSQPVYACDANWQRLSDFNVQSGCNGGSAYSCADQTPWAVNDNLAYGFAATSIAGGSESSWCCACYALTFTSGPVAGKTMVVQSTSTGGDLGSNHFDIAMPGGGVGIFNGCSSQFGGLPGAQYGGISSRDQCDSFPAPLKPGCQWRFDWFQNADNPTFTFQQVQCPAEIVARSGCKRNDDSSFPVFTPPSGGNGGTGTPTSTAPGSGQTSPGGGSGCTSQKWAQCGGIGFSGCTTCVSGTTCQKLNDYYSQCL

SEQ ID NO: 48683 - protein, 277 aa, Thermothielavioides terrestris
SGSGQSTRYWDCCKPSCAWPGKAAVSQPVYACDANFQRLSDFNVQSGCNGGSAYSCADQTPWAVNDNLAYGFAATSIAGGSESSWCCACYALTFTSGPVAGATMVVQSTSTGGDLGSNHFDIAMPGGGVGIFNGCSSQFGGLPGDQYGGISSRDQCDSFPAPLKPGCQWRFDWFQNADNPTFTFQQVQCPAEIVARSGCKRNDDSSFPVFTPPSGGNGGTGTPTSTAPGSGQTSPGGGSGCTSQKWAQCGGIGFSGCTTCVSGTTCQKLNDYYSQCL

SEQ ID NO: 48684 - protein, 277 aa, Thermothielavioides terrestris
SGSGQSTRYWDCCKPSCAWPGKAAVSQPVYACDANFQRLSDFNVQSGCNGGSAYSCADQTPWAVNDNLAYGFAATSIAGGSESSWCCACYALTFTSGPVVGKTMVVQSTSTGGDLGSNHFDIAMPGGGVGIFNGCSSQFGGLPGAQYGGISSRDQCDSFPAPLKPGCQWRFDWFQNADNPTFTFQQVQCPAEIVARSGCKRNDDSSFPVFTPPSGGNGGTGTPTSTAPGSGQTSPGGGSGCTSQKWAQCGGIGFSGCTTCVSGTTCQKLNDYYSQCL

SEQ ID NO: 48685 - protein, 277 aa, Thermothielavioides terrestris
SGSGQSTRYWDCCKPSCAWPGKAAVSQPVYACDANFQRLSDFNVQSGCNGGSAYSCADQTPWAVNDNLAYGFAATSIAGGSESSWCCACYALTFTSGPVAGKTMVVQSTSTGWDLGSNHFDIAMPGGGVGIFNGCSSQFGGLPGDQYGGISSRDQCDSFPAPLKPGCQWRFDWFQNADNPTFTFQQVQCPAEIVARSGCKRNDDSSFPVFTPPSGGNGGTGTPTSTAPGSGQTSPGGGSGCTSQKWAQCGGIGFSGCTTCVSGTTCQKLNDYYSQCL

SEQ ID NO: 48686 - protein, 277 aa, Thermothielavioides terrestris
SGSGQSTRYWDCCKPSCAWPGKAAVSQPVYACDANFQRLSDFNVQSGCNGGSAYSCADQTPWAVNDNLAYGFAATSIAGGSESSWCCACYALTFTSGPVAGLTMVVQSTSTGGDLGSNHFDIAMPGGGVGIFNGCSSQFGGLPGAQYGGISSRDQCDSFPAPLKPGCQWRFDWFQNADNPTFTFQQVQCPAEIVARSGCKRNDDSSFPVFTPPSGGNGGTGTPTSTAPGSGQTSPGGGSGCTSQKWAQCGGIGFSGCTTCVSGTTCQKLNDYYSQCL

SEQ ID NO: 48687 - protein, 277 aa, Thermothielavioides terrestris
SGSGQSTRYWDCCKPSCAWPGKAAVSQPVYACDANFQRLSDFNVQSGCNGGSAYSCADQTPWAVNDNLAYGFAATSIAGGSESSWCCACYALTFTSGPVAGKTMVVQSTSTGWDLGSNHFDIAMPGGGVGIFNGCSSQFGGLPGAQYGGISSRDQCDSFPAPLKPGCQWRFDWFQNADNPTFTFQQVQCPAEIVARSGCKRNDDSSFPVFTPPSGGNGGTGTPTSTAPGSGQTSPGGGSGCTSQKWAQCGGIGFSGCTTCVSGTTCQKLNDYYSQCL

SEQ ID NO: 48688 - protein, 277 aa, Thermothielavioides terrestris
SGSGQSTRYWDCCKPSCAWPGKAAVSQPVYACDANFQRLSDFNVQSGCNGGSAYSCADQTPWAVNDNLAYGFAATSIAGGSESSWCCACYALTFTSGPVAGKTMVVQSTSTGGDLGSNHFDIAMPGGGVGIFNGCSSQFGGLPGAQYGGISSRDQCDSFPAPLKPGCQWRFDWFQNASNPTFTFQQVQCPAEIVARSGCKRNDDSSFPVFTPPSGGNGGTGTPTSTAPGSGQTSPGGGSGCTSQKWAQCGGIGFSGCTTCVSGTTCQKLNDYYSQCL

SEQ ID NO: 48689 - protein, 277 aa, Thermothielavioides terrestris
SGSGQSTRYWDCCKPSCAWPGKAAVSQPVYACDANFQRLSDFNVQSGCNGGSAYSCADQTPWAVNDNLAYGFAATSIAGGSESSWCCACYALTFTSGPVAGKTMVVQSTSTGGDLRSNHFDIAMPGGGVGIFNGCSSQFGGLPGAQYGGISSRDQCDSFPAPLKPGCQWRFDWFQNADNPTFTFQQVQCPAEIVARSGCKRNDDSSFPVFTPPSGGNGGTGTPTSTAPGSGQTSPGGGSGCTSQKWAQCGGIGFSGCTTCVSGTTCQKLNDYYSQCL

SEQ ID NO: 48690 - protein, 277 aa, Thermothielavioides terrestris
SGSGQSTRYWDCCKPSCAWPGKAAVSQPVYACDANFQRLSDFNVQSGCNGGSAYSCADQTPWAVNDNLAYGFAATSIAGGSESSWCCACYALTFTSGPVKGKTMVVQSTSTGGDLGSNHFDIAMPGGGVGIFNGCSSQFGGLPGAQYGGISSRDQCDSFPAPLKPGCQWRFDWFQNADNPTFTFQQVQCPAEIVARSGCKRNDDSSFPVFTPPSGGNGGTGTPTSTAPGSGQTSPGGGSGCTSQKWAQCGGIGFSGCTTCVSGTTCQKLNDYYSQCL

SEQ ID NO: 48691 - protein, 277 aa, Thermothielavioides terrestris
SGSGQSTRYWDCCKPSCAWPGKAAVSQPVYACDANFQRLSDFNVQSGCNGGSAYSCADQTPWAVNDNLAYGFAATSIAGGSESSWCCACYALTFTSGPVAGKTMVVQSTSTGGDLGSNHFDIAMPGGGVGLFNGCSSQFGGLPGAQYGGISSRDQCDSFPAPLKPGCQWRFDWFQNADNPTFTFQQVQCPAEIVARSGCKRNDDSSFPVFTPPSGGNGGTGTPTSTAPGSGQTSPGGGSGCTSQKWAQCGGIGFSGCTTCVSGTTCQKLNDYYSQCL

SEQ ID NO: 48692 - protein, 277 aa, Thermothielavioides terrestris
SGSGQSTRYWDCCKPSCAWPGKAAVSQPVYACDANFQRLSDFNVQSGCNGGSAYSCADQTPWAVNDNLAYGFAATSIAGGSESSWCCACYALTFTSGPVAGKTMVVQSTSTGGDLGSNHFDIAMPGGGVGIFNGCSSQFGGLPGAQYGGIKSRDQCDSFPAPLKPGCQWRFDWFQNADNPTFTFQQVQCPAEIVARSGCKRNDDSSFPVFTPPSGGNGGTGTPTSTAPGSGQTSPGGGSGCTSQKWAQCGGIGFSGCTTCVSGTTCQKLNDYYSQCL

SEQ ID NO: 48693 - protein, 277 aa, Thermothielavioides terrestris
SGSGQSTRYWDCCKPSCAWPGKAAVSQPVYACDANFQRLSDFNVQSGCNGGSAYSCADQTPWAVNDNLAYGFAATSIAGGSESSWCCACYAMTFTSGPVAGKTMVVQSTSTGGDLGSNHFDIAMPGGGVGIFNGCSSQFGGLPGAQYGGISSRDQCDSFPAPLKPGCQWRFDWFQNADNPTFTFQQVQCPAEIVARSGCKRNDDSSFPVFTPPSGGNGGTGTPTSTAPGSGQTSPGGGSGCTSQKWAQCGGIGFSGCTTCVSGTTCQKLNDYYSQCL

SEQ ID NO: 48694 - protein, 277 aa, Thermothielavioides terrestris
SGSGQSTRYWDCCKPSCAWPGKAAVSQPVYACDANFQRLSDFNVQSGCNGGSAYSCADQTPWAVNDNLAYGFAATSIAGGSESSWCCACYALTFTSGPVAGKTMVVQSTSTGGDLGINHFDIAMPGGGVGIFNGCSSQFGGLPGAQYGGISSRDQCDSFPAPLKPGCQWRFDWFQNADNPTFTFQQVQCPAEIVARSGCKRNDDSSFPVFTPPSGGNGGTGTPTSTAPGSGQTSPGGGSGCTSQKWAQCGGIGFSGCTTCVSGTTCQKLNDYYSQCL

SEQ ID NO: 48695 - protein, 277 aa, Thermothielavioides terrestris
SGSGQSTRYWDCCKPSCAWPGKAAVSQPVYACDANFQRLSDFNVQSGCNGGSAYSCADQTPWAVNDNLAYGFAATSIAGGSESSWCCACYALTFTSGPVAGKTMVVQSTSTGFDLGSNHFDIAMPGGGVGIFNGCRSQFGGLPGAQYGGISSRDQCDSFPAPLKPGCQWRFDWFQNADNPTFTFQQVQCPAEIVARSGCKRNDDSSFPVFTPPSGGNGGTGTPTSTAPGSGQTSPGGGSGCTSQKWAQCGGIGFSGCTTCVSGTTCQKLNDYYSQCL

SEQ ID NO: 48696 - protein, 277 aa, Thermothielavioides terrestris
SGSGQSTRYWDCCKPSCAWPGKAAVSQPVYACDANFQRLSDFNVQSGCNGGSAYSCADQTPWAVNDNLAYGFAATSIAGGSESSWCCACYALNFTSGPVAGKTMVVQSTSTGGDLGSNHFDIAMPGGGVGIFNGCSSQFGGLPGAQYGGISSRDQCDSFPAPLKPGCQWRFDWFQNADNPTFTFQQVQCPAEIVARSGCKRNDDSSFPVFTPPSGGNGGTGTPTSTAPGSGQTSPGGGSGCTSQKWAQCGGIGFSGCTTCVSGTTCQKLNDYYSQCL

SEQ ID NO: 48697 - protein, 277 aa, Thermothielavioides terrestris
SGSGQSTRYWDCCKPSCAWPGKAAVSQPVYACDANFQRLSDFNVQSGCNGGSAYSCADQTPWAVNDNLAYGFAATSIAGGSESSWCCACYALTFTSGPVAGKTMVVQSTSTGMDLGSNHFDIAMPGGGVGIFNGCSSQFGGLPGAQYGGISSRDQCDSFPAPLKPGCQWRFDWFQNADNPTFTFQQVQCPAEIVARSGCKRNDDSSFPVFTPPSGGNGGTGTPTSTAPGSGQTSPGGGSGCTSQKWAQCGGIGFSGCTTCVSGTTCQKLNDYYSQCL

SEQ ID NO: 48698 - protein, 277 aa, Thermothielavioides terrestris
SGSGQSTRYWDCCKPSCAWPGKAAVSQPVYACDANFQRLSDFNVQSGCNGGSAYSCADQTPWAVNDNLAYGFAATSIAGGSESSWCCACYALTFTSGPVAGKTMVVQSTSTGGDLGSNHFDIAMPGGGVGIFNGCSSQFGGLPGAQYGGISSRDQCDSFPAPLKPGCQWRFDWFQNADNPTFTFQQQQCPAEIVARSGCKRNDDSSFPVFTPPSGGNGGTGTPTSTAPGSGQTSPGGGSGCTSQKWAQCGGIGFSGCTTCVSGTTCQKLNDYYSQCL

SEQ ID NO: 48699 - protein, 277 aa, Thermothielavioides terrestris
SGSGQSTRYWDCCKPSCAWPGKAAVSQPVYACDANFQRLSDFNVQSGCNGGSAYSCADQTPWAVNDNLAYGFAATSIAGGSESSWCCACYALTFTSGPVAGKTMVVQSTSTGFDLGSNHFDIAMPGGGVGIFNGCESQFGGLPGAQYGGISSRDQCDSFPAPLKPGCQWRFDWFQNADNPTFTFQQVQCPAEIVARSGCKRNDDSSFPVFTPPSGGNGGTGTPTSTAPGSGQTSPGGGSGCTSQKWAQCGGIGFSGCTTCVSGTTCQKLNDYYSQCL

SEQ ID NO: 48700 - protein, 277 aa, Thermothielavioides terrestris
SGSGQSTRYWDCCKPSCAWPGKAAVSQPVYACDANFQRLSDFNVQSGCNGGSAYSCADQTPWAVNDNLAYGFAATSIAGGSESSWCCACYALKFTSGPVAGKTMVVQSTSTGGDLGSNHFDIAMPGGGVGIFNGCSSQFGGLPGAQYGGISSRDQCDSFPAPLKPGCQWRFDWFQNADNPTFTFQQVQCPAEIVARSGCKRNDDSSFPVFTPPSGGNGGTGTPTSTAPGSGQTSPGGGSGCTSQKWAQCGGIGFSGCTTCVSGTTCQKLNDYYSQCL

SEQ ID NO: 48701 - protein, 277 aa, Thermothielavioides terrestris
SGSGQSTRYWDCCKPSCAWPGKAAVSQPVYACDANFQRLSDFNVQSGCNGGSAYSCADQTPWAVNDNLAYGFAATSIAGGSESSWCCACYALTFTSGPVAGKTMVVQSTSTGYDLGSNHFDIAMPGGGVGIFNGCSSQFGGLPGAQYGGISSRDQCDSFPAPLKPGCQWRFDWFQNADNPTFTFQQVQCPAEIVARSGCKRNDDSSFPVFTPPSGGNGGTGTPTSTAPGSGQTSPGGGSGCTSQKWAQCGGIGFSGCTTCVSGTTCQKLNDYYSQCL

SEQ ID NO: 48702 - protein, 277 aa, Thermothielavioides terrestris
SGSGQSTRYWDCCKPSCAWPGKAAVSQPVYACDANFQRLSDFNVQSGCNGGSAYSCADQTPWAVNDNLAYGFAATSIAGGSESSWCCACYALTFTSGPVAGKTMVVQSTSTGFDLGSNHFDIAMPGGGVGIFNGCDSQFGGLPGAQYGGISSRDQCDSFPAPLKPGCQWRFDWFQNADNPTFTFQQVQCPAEIVARSGCKRNDDSSFPVFTPPSGGNGGTGTPTSTAPGSGQTSPGGGSGCTSQKWAQCGGIGFSGCTTCVSGTTCQKLNDYYSQCL

SEQ ID NO: 48703 - protein, 277 aa, Thermothielavioides terrestris
SGSGQSTRYWDCCKPSCAWPGKAAVSQPVYACDANFQRLSDFNVQSGCNGGSAYSCADQTPWAVNDNLAYGFAATSIAGGSESSWCCACYALTFTSGPVAGKTMVVQSTSTGGDLGSNHFDIAMPGGGVGIFNGCKSQFGGLPGAQYGGISSRDQCDSFPAPLKPGCQWRFDWFQNATNPTFTFQQVQCPAEIVARSGCKRNDDSSFPVFTPPSGGNGGTGTPTSTAPGSGQTSPGGGSGCTSQKWAQCGGIGFSGCTTCVSGTTCQKLNDYYSQCL

SEQ ID NO: 48704 - protein, 277 aa, Thermothielavioides terrestris
SGSGQSTRYWDCCKPSCAWPGKAAVSQPVYACDANFQRLSDFNVQSGCNGGSAYSCADQTPWAVNDNLAYGFAATSIAGGSESSWCCACYALLFTSGPVAGKTMVVQSTSTGGDLGSNHFDIAMPGGGVGIFNGCSSQFGGLPGAQYGGISSRDQCDSFPAPLKPGCQWRFDWFQNADNPTFTFQQVQCPAEIVARSGCKRNDDSSFPVFTPPSGGNGGTGTPTSTAPGSGQTSPGGGSGCTSQKWAQCGGIGFSGCTTCVSGTTCQKLNDYYSQCL

SEQ ID NO: 48705 - protein, 277 aa, Thermothielavioides terrestris
SGSGQSTRYWDCCKPSCAWPGKAAVSQPVYACDANFQRLSDFNVQSGCNGGSAYSCADQTPWAVNDNLAYGFAATSIAGGSESSWCCACYALQFTSGPVAGKTMVVQSTSTGGDLGSNHFDIAMPGGGVGIFNGCSSQFGGLPGAQYGGISSRDQCDSFPAPLKPGCQWRFDWFQNADNPTFTFQQVQCPAEIVARSGCKRNDDSSFPVFTPPSGGNGGTGTPTSTAPGSGQTSPGGGSGCTSQKWAQCGGIGFSGCTTCVSGTTCQKLNDYYSQCL

SEQ ID NO: 48706 - protein, 277 aa, Thermothielavioides terrestris
SGSGQSTRYWDCCKPSCAWPGKAAVSQPVYACDANFQRLSDFNVQSGCNGGSAYSCADQTPWAVNDNLAYGFAATSIAGGSESSWCCACYALTFTSGPVAGKTMVVQSTSTGGDLGSNHFDIAMPGGGVGRFNGCSSQFGGLPGAQYGGISSRDQCDSFPAPLKPGCQWRFDWFQNADNPTFTFQQVQCPAEIVARSGCKRNDDSSFPVFTPPSGGNGGTGTPTSTAPGSGQTSPGGGSGCTSQKWAQCGGIGFSGCTTCVSGTTCQKLNDYYSQCL

SEQ ID NO: 48707 - protein, 277 aa, Thermothielavioides terrestris
SGSGQSTRYWDCCKPSCAWPGKAAVSQPVYACDANFQRLSDFNVQSGCNGGSAYSCADQTPWAVNDNLAYGFAATSIAGGSESSWCCACYALTFTSGPVAGKTMVVQSTSTGFDLGSNHFDIAMPGGGVGIFNGCSSQFGGLPGAQYGGISSRDQCDDFPAPLKPGCQWRFDWFQNADNPTFTFQQVQCPAEIVARSGCKRNDDSSFPVFTPPSGGNGGTGTPTSTAPGSGQTSPGGGSGCTSQKWAQCGGIGFSGCTTCVSGTTCQKLNDYYSQCL

SEQ ID NO: 48708 - protein, 277 aa, Thermothielavioides terrestris
SGSGQSTRYWDCCKPSCAWPGKAAVSQPVYACDANFQRLSDFNVQSGCNGGSAYSCADQTPWAVNDNLAYGFAATSIAGGSESSWCCACYALTFTSGPVAGKTMVVQSTSTGGDLGSNHFDIAMPGGGVGIFNGCSSQFGGLPGAQYGGISSRDQCDEFPAPLKPGCQWRFDWFQNATNPTFTFQQVQCPAEIVARSGCKRNDDSSFPVFTPPSGGNGGTGTPTSTAPGSGQTSPGGGSGCTSQKWAQCGGIGFSGCTTCVSGTTCQKLNDYYSQCL

SEQ ID NO: 48709 - protein, 277 aa, Thermothielavioides terrestris
SGSGQSTRYWDCCKPSCAWPGKAAVSQPVYACDANFQRLSDFNVQSGCNGGSAYSCADQTPWAVNDNLAYGFAATSIAGGSESSWCCACYALTFTSGPVEGKTMVVQSTSTGGDLGSNHFDIAMPGGGVGIFNGCSSQFGGLPGAQYGGISSRDQCDSFPAPLKPGCQWRFDWFQNADNPTFTFQQVQCPAEIVARSGCKRNDDSSFPVFTPPSGGNGGTGTPTSTAPGSGQTSPGGGSGCTSQKWAQCGGIGFSGCTTCVSGTTCQKLNDYYSQCL

SEQ ID NO: 48710 - protein, 277 aa, Thermothielavioides terrestris
SGSGQSTRYWDCCKPSCAWPGKAAVSQPVYACDANFQRLSDFNVQSGCNGGSAYSCADQTPWAVNDNLAYGFAATSIAGGSESSWCCACYALTFTSGPVAGKTMVVQSTSTGFDLGSNHFDIAMPGGGVGIFNGCSSQFGGLPGAQYGGISSRDQCDEFPAPLKPGCQWRFDWFQNADNPTFTFQQVQCPAEIVARSGCKRNDDSSFPVFTPPSGGNGGTGTPTSTAPGSGQTSPGGGSGCTSQKWAQCGGIGFSGCTTCVSGTTCQKLNDYYSQCL

SEQ ID NO: 48711 - protein, 277 aa, Thermothielavioides terrestris
SGSGQSTRYWDCCKPSCAWPGKAAVSQPVYACDANFQRLSDFNVQSGCNGGSAYSCADQTPWAVNDNLAYGFAATSIAGGSESSWCCACYALTFTSGPVAGKTMVVQSTSTGGDLGSNHFDIAMPGGGVGIFNGCSSQFGGLPGAQYGGISSRDQCDSFPAPLKPGCQWRFDWFQNADNPTFTNQQVQCPAEIVARSGCKRNDDSSFPVFTPPSGGNGGTGTPTSTAPGSGQTSPGGGSGCTSQKWAQCGGIGFSGCTTCVSGTTCQKLNDYYSQCL

SEQ ID NO: 48712 - protein, 277 aa, Thermothielavioides terrestris
SGSGQSTRYWDCCKPSCAWPGKAAVSQPVYACDANFQRLSDFNVQSGCNGGSAYSCADQTPWAVNDNLAYGFAATSIAGGSESSWCCACYALTFTSGPVLGKTMVVQSTSTGGDLGSNHFDIAMPGGGVGIFNGCSSQFGGLPGAQYGGISSRDQCDSFPAPLKPGCQWRFDWFQNADNPTFTFQQVQCPAEIVARSGCKRNDDSSFPVFTPPSGGNGGTGTPTSTAPGSGQTSPGGGSGCTSQKWAQCGGIGFSGCTTCVSGTTCQKLNDYYSQCL

SEQ ID NO: 48713 - protein, 277 aa, Thermothielavioides terrestris
SGSGQSTRYWDCCKPSCAWPGKAAVSQPVYACDANFQRLSDFNVQSGCNGGSAYSCADQTPWAVNDNLAYGFAATSIAGGSESSWCCACYALTFTSGPVAGKTMVVQSTSTGHDLGSNHFDIAMPGGGVGIFNGCSSQFGGLPGAQYGGISSRDQCDSFPAPLKPGCQWRFDWFQNADNPTFTFQQVQCPAEIVARSGCKRNDDSSFPVFTPPSGGNGGTGTPTSTAPGSGQTSPGGGSGCTSQKWAQCGGIGFSGCTTCVSGTTCQKLNDYYSQCL

SEQ ID NO: 48714 - protein, 277 aa, Thermothielavioides terrestris
SGSGQSTRYWDCCKPSCAWPGKAAVSQPVYACDANFQRLSDFNVQSGCNGGSAYSCADQTPWAVNDNLAYGFAATSIAGGSESSWCCACYALTFTSGPTAGKTMVVQSTSTGGDLGSNHFDIAMPGGGVGIFNGCSSQFGGLPGAQYGGISSRDQCDSFPAPLKPGCQWRFDWFQNADNPTFTFQQVQCPAEIVARSGCKRNDDSSFPVFTPPSGGNGGTGTPTSTAPGSGQTSPGGGSGCTSQKWAQCGGIGFSGCTTCVSGTTCQKLNDYYSQCL

SEQ ID NO: 48715 - protein, 277 aa, Thermothielavioides terrestris
SGSGQSTRYWDCCKPSCAWPGKAAVSQPVYACDANFQRLSDFNVQSGCNGGSAYSCADQTPWAVNDNLAYGFAATSIAGGSESSWCCACYALTFRSGPVAGKTMVVQSTSTGGDLGSNHFDIAMPGGGVGIFNGCSSQFGGLPGAQYGGISSRDQCDSFPAPLKPGCQWRFDWFQNADNPTFTFQQVQCPAEIVARSGCKRNDDSSFPVFTPPSGGNGGTGTPTSTAPGSGQTSPGGGSGCTSQKWAQCGGIGFSGCTTCVSGTTCQKLNDYYSQCL

SEQ ID NO: 48716 - protein, 277 aa, Thermothielavioides terrestris
SGSGQSTRYWDCCKPSCAWPGKAAVSQPVYACDANFQRLSDFNVQSGCNGGSAYSCADQTPWAVNDNLAYGFAATSIAGGSESSWCCACYALTFTSGPVAGKTMVVQSTSTGWDLGSNHFDIAMPGGGVGIFNGCRSQFGGLPGAQYGGISSRDQCDSFPAPLKPGCQWRFDWFQNADNPTFTFQQVQCPAEIVARSGCKRNDDSSFPVFTPPSGGNGGTGTPTSTAPGSGQTSPGGGSGCTSQKWAQCGGIGFSGCTTCVSGTTCQKLNDYYSQCL

SEQ ID NO: 48717 - protein, 277 aa, Thermothielavioides terrestris
SGSGQSTRYWDCCKPSCAWPGKAAVSQPVYACDANFQRLSDFNVQSGCNGGSAYSCADQTPWAVNDNLAYGFAATSIAGGSESSWCCACYALTFTSGPVAGKTMVVQSTSTGGDLGSNHFDIAMPGGGVGIFNGCSSQFGGLPGAQYGGISSRDQCDSFPAPLKPGCQWRFDWFQNADNPTFTFQQVQCPAEIVARSGCKRNDDSSFPVLTPPSGGNGGTGTPTSTAPGSGQTSPGGGSGCTSQKWAQCGGIGFSGCTTCVSGTTCQKLNDYYSQCL

SEQ ID NO: 48718 - protein, 277 aa, Thermothielavioides terrestris
SGSGQSTRYWDCCKPSCAWPGKAAVSQPVYACDANFQRLSDFNVQSGCNGGSAYSCADQTPWAVNDNLAYGFAATNIAGGSESSWCCACYALTFTSGPVAGKTMVVQSTSTGGDLGSNHFDIAMPGGGVGIFNGCSSQFGGLPGAQYGGISSRDQCDSFPAPLKPGCQWRFDWFQNADNPTFTFQQVQCPAEIVARSGCKRNDDSSFPVFTPPSGGNGGTGTPTSTAPGSGQTSPGGGSGCTSQKWAQCGGIGFSGCTTCVSGTTCQKLNDYYSQCL

SEQ ID NO: 48719 - protein, 277 aa, Thermothielavioides terrestris
SGSGQSTRYWDCCKPSCAWPGKAAVSQPVYACDANFQRLSDFNVQSGCNGGSAYSCADQTPWAVNDNLAYGFAATSIAGGSESSWCCACYALTFTSGPVAGKTMVVQSTSTGGDLGSNHFDIAMPGGGVGIFNGCSSQFGGLPGDQYGGIKSRDQCDSFPAPLKPGCQWRFDWFQNADNPTFTFQQVQCPAEIVARSGCKRNDDSSFPVFTPPSGGNGGTGTPTSTAPGSGQTSPGGGSGCTSQKWAQCGGIGFSGCTTCVSGTTCQKLNDYYSQCL

SEQ ID NO: 48720 - protein, 277 aa, Thermothielavioides terrestris
SGSGQSTRYWDCCKPSCAWPGKAAVSQPVYACDANFQRLSDFNVQSGCNGGSAYSCADQTPWAVNDNLAYGFAATSIAGGSESSWCCACYALTFTSGPVAGKTMVVQSTSTGWDLGSNHFDIAMPGGGVGIFNGCDSQFGGLPGAQYGGISSRDQCDSFPAPLKPGCQWRFDWFQNADNPTFTFQQVQCPAEIVARSGCKRNDDSSFPVFTPPSGGNGGTGTPTSTAPGSGQTSPGGGSGCTSQKWAQCGGIGFSGCTTCVSGTTCQKLNDYYSQCL

SEQ ID NO: 48721 - protein, 277 aa, Unidentified
SGSGQSTRYWDCCKPSCAWPGKAAVSQPVYACDANFQRLSDFNVQSGCNGGSAYSCADQTPWAVNDNLAYGFAATSIAGGSESSWCCACYALTFTSGPVAGKTMVVQSTSTGGDLGSNQFDIAMPGGGVGIFNGCSSQFGGLPGAQYGGISSRDQCDSFPAPLKPGCQWRFDWFQNADNPTFTFQQVQCPAEIVARSGCKRNDDSSFPVFTPPSGGNGGTGTPTSTAPGSGQTSPGGGSGCTSQKWAQCGGIGFSGCTTCVSGTTCQKLNDYYSQCL

SEQ ID NO: 48722 - protein, 277 aa, Thermothielavioides terrestris
SGSGQSTRYWDCCKPSCAWPGKAAVSQPVYACDANFQRLSDFNVQSGCNGGSAYACADQTPWAVNDNLAYGFAATSIAGGSESSWCCACYALTFTSGPVAGKTMVVQSTSTGGDLGSNHFDIAMPGGGVGIFNGCSSQFGGLPGAQYGGISSRDQCDSFPAPLKPGCQWRFDWFQNADNPTFTFQQVQCPAEIVARSGCKRNDDSSFPVFTPPSGGNGGTGTPTSTAPGSGQTSPGGGSGCTSQKWAQCGGIGFSGCTTCVSGTTCQKLNDYYSQCL

SEQ ID NO: 48723 - protein, 277 aa, Thermothielavioides terrestris
SGSGQSTRYWDCCKPSCAWPGKAAVSQPVYACDANFQRLSDFNVQSGCNGGSAYSCADQTPWAVNDNLAYGFAATSIAGGSESSWCCACYALTFTSGPVAGATMVVQSTSTGGDLGSNHFDIAMPGGGVGIFNGCSSQFGGLPGAQYGGISSRDQCDSFPAPLKPGCQWRFDWFQNADNPTFTFQQVQCPAEIVARSGCKRNDDSSFPVFTPPSGGNGGTGTPTSTAPGSGQTSPGGGSGCTSQKWAQCGGIGFSGCTTCVSGTTCQKLNDYYSQCL

SEQ ID NO: 48724 - protein, 277 aa, Thermothielavioides terrestris
SGSGQSTRYWDCCKPSCAWPGKAAVSQPVYACDANFQRLSDFNVQSGCNGGSAYSCADQTPWAVNDNLAYGFAATSIAGGSESSWCCACYALTFTSGPVAGKTMVVQSTSTGGDLGSNHFDIAMPGGGVGIFNGCSSQFGGLPGAQYGGISSRDQCDSFPAPLKSGCQWRFDWFQNADNPTFTFQQVQCPAEIVARSGCKRNDDSSFPVFTPPSGGNGGTGTPTSTAPGSGQTSPGGGSGCTSQKWAQCGGIGFSGCTTCVSGTTCQKLNDYYSQCL

SEQ ID NO: 48725 - protein, 277 aa, Thermothielavioides terrestris
SGSGQSTRYWDCCKPSCAWPGKAAVSQPVYACDANFQRLSDFNVQSGCNGGSAYSCADQTPWAVNDNLAYGFAATSIAGGSESSWCCACYALTFTSGPVRGKTMVVQSTSTGGDLGSNHFDIAMPGGGVGIFNGCSSQFGGLPGAQYGGISSRDQCDSFPAPLKPGCQWRFDWFQNADNPTFTFQQVQCPAEIVARSGCKRNDDSSFPVFTPPSGGNGGTGTPTSTAPGSGQTSPGGGSGCTSQKWAQCGGIGFSGCTTCVSGTTCQKLNDYYSQCL

SEQ ID NO: 48726 - protein, 277 aa, Thermothielavioides terrestris
SGSGQSTRYWDCCKPSCAWPGKAAVSQPVYACDANFQRLSDFNVQSGCNGGSAYSCADQTPWAVNDNLAYGFAATSIAGGSESSWCCACYALTFTSGPVAGKTMVVQSTSTGGDLGSNHFDIAMPGGGVGIFNGCSSQFGGLPGAQYGGISSRDQCDSFPAPLKPGCQWRFDWFQNADNPTVTFQQVQCPAEIVARSGCKRNDDSSFPVFTPPSGGNGGTGTPTSTAPGSGQTSPGGGSGCTSQKWAQCGGIGFSGCTTCVSGTTCQKLNDYYSQCL

SEQ ID NO: 48727 - protein, 277 aa, Thermothielavioides terrestris
SGSGQSTRYWDCCKPSCAWPGKAAVSQPVYACDANFQRLSDFNVQSGCNGGSAYSCADQTPWAVNDNLAYGFAATSIAGGSESSWCCACYALTFTSGPVAGKTMVVQSTSTGGDLGSNHFDIAMPGGGVGIFNGCSSQFGGLPGAQYGGISSRDQCDSFPAPLKPGCQWRFDWFQNADNPTFTFQQVQCPAEIVARSGCKLNDDSSFPVFTPPSGGNGGTGTPTSTAPGSGQTSPGGGSGCTSQKWAQCGGIGFSGCTTCVSGTTCQKLNDYYSQCL

SEQ ID NO: 48728 - protein, 277 aa, Thermothielavioides terrestris
SGSGQSTRYWDCCKPSCAWPGKAAVSQPVYACDANFQRLSDFNVQSGCNGGSAYSCADQTPWAVNDNLAYGFAATSIAGGSESSWCCACYALTFTSGPVAGKTMVVQSTSTGGDLGSNHFDIAMPGGGVGIFNGCSSQFGGLPGAQYGGISSRDQCDSFPAPLKPGCQWRFDWFQNADNPTFTFQQNQCPAEIVARSGCKRNDDSSFPVFTPPSGGNGGTGTPTSTAPGSGQTSPGGGSGCTSQKWAQCGGIGFSGCTTCVSGTTCQKLNDYYSQCL

SEQ ID NO: 48729 - protein, 277 aa, Thermothielavioides terrestris
SGSGQSTRYWDCCKPSCAWPGKAAVSQPVYACDANFQRLSDFNVQSGCNGGSAYSCADQTPWAVNDNLAYGFAATSIAGGSESSWCCACYALTFTSGPVAGKTMVVQSTSTGGDLGSNHFDIAMPGGGVGIFNGCSSQFGGLPGAQYGGISSRDQCDSFPAPLKPGCQWRFDWFQNATNPTFTFQQVQCPAEIVARSGCKRNDDSSFPVFTPPSGGNGGTGTPTSTAPGSGQTSPGGGSGCTSQKWAQCGGIGFSGCTTCVSGTTCQKLNDYYSQCL

SEQ ID NO: 48730 - protein, 277 aa, Thermothielavioides terrestris
SGSGQSTRYWDCCKPSCAWPGKAAVSQPVYACDANFQRLSDFNVQSGCNGGSAYSCADQTPWAVNDNLAYGFAATSIAGGSESSWCCACYALTFTSGPVAGKTMVVQSTSTGLDLGSNHFDIAMPGGGVGIFNGCSSQFGGLPGAQYGGISSRDQCDSFPAPLKPGCQWRFDWFQNADNPTFTFQQVQCPAEIVARSGCKRNDDSSFPVFTPPSGGNGGTGTPTSTAPGSGQTSPGGGSGCTSQKWAQCGGIGFSGCTTCVSGTTCQKLNDYYSQCL

SEQ ID NO: 48731 - protein, 277 aa, Thermothielavioides terrestris
SGSGQSTRYWDCCKPSCAWPGKAAVSQPVYACDANFQRLSDFNVQSGCNGGSAYSCADQTPWAVNDNLAYGFAATSIAGGSESSWCCACYALTFTSGPVAGKTMVVQSTSTGWDLGSNHFDIAMPGGGVGIFNGCSSQFGGLPGAQYGGISSRDQCDEFPAPLKPGCQWRFDWFQNADNPTFTFQQVQCPAEIVARSGCKRNDDSSFPVFTPPSGGNGGTGTPTSTAPGSGQTSPGGGSGCTSQKWAQCGGIGFSGCTTCVSGTTCQKLNDYYSQCL

SEQ ID NO: 48732 - protein, 277 aa, Thermothielavioides terrestris
SGSGQSTRYWDCCKPSCAWPGKAAVSQPVYACDANFQRLSDFNVQSGCNGGSAYSCADQTPWAVNDNLAYGFAATSIAGGSESSWCCACYALTFTSGPVDGKTMVVQSTSTGGDLGSNHFDIAMPGGGVGIFNGCSSQFGGLPGAQYGGISSRDQCDSFPAPLKPGCQWRFDWFQNADNPTFTFQQVQCPAEIVARSGCKRNDDSSFPVFTPPSGGNGGTGTPTSTAPGSGQTSPGGGSGCTSQKWAQCGGIGFSGCTTCVSGTTCQKLNDYYSQCL

SEQ ID NO: 48733 - protein, 277 aa, Thielavia hyrcaniae
SGSGQSTRYWDCCKPSCAWPGKAAVSQPVYACDANFTRLSDFNVQSGCNGGSAYSCADQTPWAVNDNLAYGFAATSIAGGSESSWCCACYALTFTSGPVAGKTMVVQSTSTGGDLGSNHFDIAMPGGGVGIFNGCSSQFGGLPGAQYGGISSRDQCDSFPAPLKPGCQWRFDWFQNADNPTFTFQQVQCPAEIVARSGCKRNDDSSFPVFTPPSGGNGGTGTPTSTAPGSGQTSPGGGSGCTSQKWAQCGGIGFSGCTTCVSGTTCQKLNDYYSQCL

SEQ ID NO: 48734 - protein, 277 aa, Thermothielavioides terrestris
SGSGQSTRYWDCCKPSCAWPGKAAVSQPVYACDANFQRLSDFNVQSGCNGGSAYSCADQTPWAVNDNLAYGFAATSIAGGSESSWCCACYALTFTSGPVAGKTMVVQSTSTGGDLGSNHFDIAMPGGGVGIYNGCSSQFGGLPGAQYGGISSRDQCDSFPAPLKPGCQWRFDWFQNADNPTFTFQQVQCPAEIVARSGCKRNDDSSFPVFTPPSGGNGGTGTPTSTAPGSGQTSPGGGSGCTSQKWAQCGGIGFSGCTTCVSGTTCQKLNDYYSQCL

SEQ ID NO: 48735 - protein, 277 aa, Thermothielavioides terrestris
SGSGQSTRYWDCCKPSCAWPGKAAVSQPVYACDANFQRLSDFNVQSGCNGGSAYSCADQTPWAVNDNLAYGFAATSIAKGSESSWCCACYALTFTSGPVAGKTMVVQSTSTGGDLGSNHFDIAMPGGGVGIFNGCSSQFGGLPGAQYGGISSRDQCDSFPAPLKPGCQWRFDWFQNADNPTFTFQQVQCPAEIVARSGCKRNDDSSFPVFTPPSGGNGGTGTPTSTAPGSGQTSPGGGSGCTSQKWAQCGGIGFSGCTTCVSGTTCQKLNDYYSQCL

SEQ ID NO: 48736 - protein, 277 aa, Thermothielavioides terrestris
SGSGQSTRYWDCCKPSCAWPGKAAVSQPVYACDANFQRLSDFNVQSGCNGGSAYSCADQTPWAVNDNLAYGFAATSIAGGSESSWCCACYALTFTSGPVAGKTMVVQSTSTGIDLGSNHFDIAMPGGGVGIFNGCSSQFGGLPGAQYGGISSRDQCDSFPAPLKPGCQWRFDWFQNADNPTFTFQQVQCPAEIVARSGCKRNDDSSFPVFTPPSGGNGGTGTPTSTAPGSGQTSPGGGSGCTSQKWAQCGGIGFSGCTTCVSGTTCQKLNDYYSQCL

SEQ ID NO: 48737 - protein, 277 aa, Thermothielavioides terrestris
SGSGQSTRYWDCCKPSCAWPGKAAVSQPVYACDANFQRLSDFNVQSGCNGGSAYSCADQTPWAVNDNLAYGFAATSIAGGSESSWCCACYALTFASGPVAGKTMVVQSTSTGGDLGSNHFDIAMPGGGVGIFNGCSSQFGGLPGAQYGGISSRDQCDSFPAPLKPGCQWRFDWFQNADNPTFTFQQVQCPAEIVARSGCKRNDDSSFPVFTPPSGGNGGTGTPTSTAPGSGQTSPGGGSGCTSQKWAQCGGIGFSGCTTCVSGTTCQKLNDYYSQCL

SEQ ID NO: 48738 - protein, 277 aa, Thermothielavioides terrestris
SGSGQSTRYWDCCKPSCAWPGKAAVSQPVYACDANFQRLSDFNVQSGCNGGSAYSCADQTPWAVNDNLAYGFAATSIAGGSESSWCCACYALTFTSGPVAGKTMVVQSTSTGWDLGSNHFDIAMPGGGVGIFNGCKSQFGGLPGAQYGGISSRDQCDSFPAPLKPGCQWRFDWFQNADNPTFTFQQVQCPAEIVARSGCKRNDDSSFPVFTPPSGGNGGTGTPTSTAPGSGQTSPGGGSGCTSQKWAQCGGIGFSGCTTCVSGTTCQKLNDYYSQCL

SEQ ID NO: 48739 - protein, 277 aa, Thermothielavioides terrestris
SGSGQSTRYWDCCKPSCAWPGKAAVSQPVYACDANFQRLSDFNVQSGCNGGSAYSCADQTPWAVNDNLAYGFAATSIAGGSESSWCCACYALTFTSGPVAGKTMVVQSTSTGGDLGSNHFDIAMPGGGVGIFNGCKSQFGGLPGAQYGGIKSRDQCDSFPAPLKPGCQWRFDWFQNADNPTFTFQQVQCPAEIVARSGCKRNDDSSFPVFTPPSGGNGGTGTPTSTAPGSGQTSPGGGSGCTSQKWAQCGGIGFSGCTTCVSGTTCQKLNDYYSQCL

SEQ ID NO: 48740 - protein, 277 aa, Thermothielavioides terrestris
SGSGQSTRYWDCCKPSCAWPGKAAVSQPVYACDANFQRLSDFNVQSGCNGGSAYSCADQTPWAVNDNLAYGFAATSIAGGSESSWCCACYALTFTSGPVAGKTMVVQSTSTGGDLGSNHFDIAMPGGGVGIFNGCSSQFGGLPGAQYGGISSRDQCDSFPAPLKPGCQWRFDWFQNADNPTFTFQQVQCPAEIVARSGCKGNDDSSFPVFTPPSGGNGGTGTPTSTAPGSGQTSPGGGSGCTSQKWAQCGGIGFSGCTTCVSGTTCQKLNDYYSQCL

SEQ ID NO: 48741 - protein, 277 aa, Thermothielavioides terrestris
SGSGQSTRYWDCCKPSCAWPGKAAVSQPVYACDANFQRLSDFNVQSGCNGGSAYSCADQTPWAVNDNLAYGFAATSIAGGSESSWCCACYALTFTSGPSAGKTMVVQSTSTGGDLGSNHFDIAMPGGGVGIFNGCSSQFGGLPGAQYGGISSRDQCDSFPAPLKPGCQWRFDWFQNADNPTFTFQQVQCPAEIVARSGCKRNDDSSFPVFTPPSGGNGGTGTPTSTAPGSGQTSPGGGSGCTSQKWAQCGGIGFSGCTTCVSGTTCQKLNDYYSQCL

SEQ ID NO: 48742 - protein, 277 aa, Thermothielavioides terrestris
SGSGQSTRYWDCCKPSCAWPGKAAVSQPVYACDANFQRLSDFNVQSGCNGGSAYSCADQTPWAVNDNLAYGFAATSIAGGSESSWCCACYALTFTSGPVAGKTMVVQSTSTGGDLGSNHFDIAMPGGGVGIFNGCSSQFGGLPGAQYGGISDRDQCDSFPAPLKPGCQWRFDWFQNADNPTFTFQQVQCPAEIVARSGCKRNDDSSFPVFTPPSGGNGGTGTPTSTAPGSGQTSPGGGSGCTSQKWAQCGGIGFSGCTTCVSGTTCQKLNDYYSQCL

SEQ ID NO: 48743 - protein, 277 aa, Thermothielavioides terrestris
SGSGQSTRYWDCCKPSCAWPGKAAVSQPVYACDANFQRLSDFNVQSGCNGGSAYSCADQTPWAVNDNLAYGFAATSIAGGSESSWCCACYALTFTSGPVAGKTMVVQSTSTGGDLGSNHFDIAMPGGGVGIFNGCSSQFGGLPGAQYGGIDSRDQCDSFPAPLKPGCQWRFDWFQNADNPTFTFQQVQCPAEIVARSGCKRNDDSSFPVFTPPSGGNGGTGTPTSTAPGSGQTSPGGGSGCTSQKWAQCGGIGFSGCTTCVSGTTCQKLNDYYSQCL

SEQ ID NO: 48744 - protein, 277 aa, Thermothielavioides terrestris
SGSGQSTRYWDCCKPSCAWPGKAAVSQPVYACDANFQRLSDFNVQSGCNGGSAYSCADQTPWAVNDNLAYGFAATSIAGGSESSWCCACYALTFTSGPVAGKTMVVQSTSTGWDLGSNHFDIAMPGGGVGIFNGCESQFGGLPGAQYGGISSRDQCDSFPAPLKPGCQWRFDWFQNADNPTFTFQQVQCPAEIVARSGCKRNDDSSFPVFTPPSGGNGGTGTPTSTAPGSGQTSPGGGSGCTSQKWAQCGGIGFSGCTTCVSGTTCQKLNDYYSQCL

SEQ ID NO: 48745 - protein, 277 aa, Thermothielavioides terrestris
SGSGQSTRYWDCCKPSCAWPGKAAVSQPVYACDANFQRLSDFNVQSGCNGGSAYSCADQTPWAVNDNLAYGFAATSIAGGSESSWCCACYALTFTSGPVAGKTMVVQSTSTGGDLGSNHFDIAMPGGGVGIFNGCDSQFGGLPGAQYGGISSRDQCDSFPAPLKPGCQWRFDWFQNATNPTFTFQQVQCPAEIVARSGCKRNDDSSFPVFTPPSGGNGGTGTPTSTAPGSGQTSPGGGSGCTSQKWAQCGGIGFSGCTTCVSGTTCQKLNDYYSQCL

SEQ ID NO: 48746 - protein, 277 aa, Thermothielavioides terrestris
SGSGQSTRYWDCCKPSCAWPGKAAVSQPVYACDANFQRLSDFNVQSGCNGGSAYSCADQTPWAVNDNLAYGFAATSIAGGSESSWCCACYALTFFSGPVAGKTMVVQSTSTGGDLGSNHFDIAMPGGGVGIFNGCSSQFGGLPGAQYGGISSRDQCDSFPAPLKPGCQWRFDWFQNADNPTFTFQQVQCPAEIVARSGCKRNDDSSFPVFTPPSGGNGGTGTPTSTAPGSGQTSPGGGSGCTSQKWAQCGGIGFSGCTTCVSGTTCQKLNDYYSQCL

SEQ ID NO: 48747 - protein, 277 aa, Thermothielavioides terrestris
SGSGQSTRYWDCCKPSCAWPGKAAVSQPVYACDANFQRLSDFNVQSGCNGGSAYSCADQTPWAVNDNLAYGFAATSIAGGSESSWCCACYALTFTSGPVAGKTMVVQSTSTGADLGSNHFDIAMPGGGVGIFNGCSSQFGGLPGAQYGGISSRDQCDSFPAPLKPGCQWRFDWFQNADNPTFTFQQVQCPAEIVARSGCKRNDDSSFPVFTPPSGGNGGTGTPTSTAPGSGQTSPGGGSGCTSQKWAQCGGIGFSGCTTCVSGTTCQKLNDYYSQCL

SEQ ID NO: 48748 - protein, 277 aa, Thermothielavioides terrestris
SGSGQSTRYWDCCKPSCAWPGKAAVSQPVYACDANFQRLSDFNVQSGCNGGSAYSCADQTPWAVNDNLAYGFAATSIAGGSESSWCCACYALTFTSGPVAGKTMVVQSTSTGGDLGSNHFDIAMPGGGVGIFNGCDSQFGGLPGAQYGGIKSRDQCDSFPAPLKPGCQWRFDWFQNADNPTFTFQQVQCPAEIVARSGCKRNDDSSFPVFTPPSGGNGGTGTPTSTAPGSGQTSPGGGSGCTSQKWAQCGGIGFSGCTTCVSGTTCQKLNDYYSQCL

SEQ ID NO: 48749 - protein, 297 aa, Acremonium thermophilum
MRSSPFLRAALAAALPLSAHALDGKSTRYWDCCKPSCGWAGKASVNQPVFSCSADWQRISDFNAKSGCDGGSAYSCADQTPWAVNDNFSYGFAATAIAGGSESSWCCACYALTFNSGPVAGKTMVVQSTSTGGDLGSNQFDLAIPGGGVGIFNGCASQFGGLPGAQYGGISDRSQCSSFPAPLQPGCQWRFDWFQNADNPTFTFQRVQCPSELTSRTGCKRDDDASYPVFNPPSGGSPSTTSTTTSSPSGPTGNPPGGGGCTAQKWAQCGGTGFTGCTTCVSGTTCQVQNQWYSQCL

SEQ ID NO: 48750 - protein, 299 aa, Thielavia terrestris; identical to SEQ ID NO: 45

SEQ ID NO: 48751 - protein, 957 aa, Bacillus deramificans; identical to SEQ ID NO: 61

SEQ ID NO: 48752 - protein, 821 aa, Bacillus deramificans
AVSNAYLDASNQVLVKLSQPFTLGEGASGFTVHDDTVNKDIPVTSVTDASLGQNVTAVLAGTFQHIFGGSDWAPDNHSTLLKKVNNNLYQFSGDLPEGNYQYKVALNDSWNNPSYPSNNIDLTVPTGGAHVTFSYVPSTHAVYDSINNPGADLPVNGSGVKTDLVTVTLGEDPDVSHTLSIQTDGYQAKQVISRNVLDSSQYYYSGDDLGNTYTHKATTFKVWAPTSTQVNVLLYNSATGSVTKTVPMTASGHGVWEATVNQNLENWYYMYEVTGQGSTRTAVDPYATAIAPNGTRGMIVDLAKTDPAGWNSDKHITPKNIEDEVIYEMDVRDFSIDPNSGMKNKGKYLALTEKGTKGPDNVKTGIDSLKQLGITHVQLMPVFAFNSVDETDPTQDNWGYDPRNYDVPEGQYATNANGTARIKEFKEMVLSLHREHIGVNMDVVYNHTFATQISDFDKIVPEYYYRTDDAGNYTNGSGTGNEIAAERPMVQKFIIDSLKYWVNEYHIDGFRFDLMALLGKDTMSKAASELHAINPGIALYGEPWTGGTSALPEDQLLTKGAQKGMGVAVFNDNLRNALDGNVFDSSAQGFATGATGLTDAIKNGVEGSINDFTSSPGETINYVTSHDNYTLWDKIALSNPNDSEADRIKMDELAQAVVMTSQGVPFMQGGEEMLRTKGGNDNSYNAGDTVNEFDWSRKAQYPDVFNYYSGLIHLRLDHPAFRMTTANEINSHLQFLNSPENTVAYELTDHVNKDKWGNIIVVYNPNKTAATINLPSGKWAINATSGKVGESTLGQAEGSVQVPGISMMILHQEVSPDHGKK

SEQ ID NO: 48753 - protein, 928 aa, Bacillus deramificans
DGSTTTIIVHYFRPAGDYQPWSLWMWPEGGSGAEYDFNGTDSYGEVANVSIPGNPSQVGIIVRTQDWTKDVSADRYIDLSKGHEVWLVQGNSQIFYNEKDAEDAAKPAVSNAYLDASNQVLVKLSQPFTLGEGASGFTVHDDTVNKDIPVTSVTDASLGQNVTAVLAGTFQHIFGGSDWAPDNHSTLLKKVNNNLYQFSGDLPEGNYQYKVALNDSWNNPSYPSNNIDLTVPTGGAHVTFSYVPSTHAVYDSINNPGADLPVNGSGVKTDLVTVTLGEDPDVSHTLSIQTDGYQAKQVISRNVLDSSQYYYSGDDLGNTYTHKATTFKVWAPTSTQVNVLLYNSATGSVTKTVPMTASGHGVWEATVNQNLENWYYMYEVTGQGSTRTAVDPYATAIAPNGTRGMIVDLAKTDPAGWNSDKHITPKNIEDEVIYEMDVRDFSIDPNSGMKNKGKYLALTEKGTKGPDNVKTGIDSLKQLGITHVQLMPVFAFNSVDETDPTQDNWGYDPRNYDVPEGQYATNANGTARIKEFKEMVLSLHREHIGVNMDVVYNHTFATQISDFDKIVPEYYYRTDDAGNYTNGSGTGNEIAAERPMVQKFIIDSLKYWVNEYHIDGFRFDLMALLGKDTMSKAASELHAINPGIALYGEPWTGGTSALPEDQLLTKGAQKGMGVAVFNDNLRNALDGNVFDSSAQGFATGATGLTDAIKNGVEGSINDFTSSPGETINYVTSHDNYTLWDKIALSNPNDSEADRIKMDELAQAVVMTSQGVPFMQGGEEMLRTKGGNDNSYNAGDTVNEFDWSRKAQYPDVFNYYSGLIHLRLDHPAFRMTTANEINSHLQFLNSPENTVAYELTDHVNKDKWGNIIVVYNPNKTAATINLPSGKWAINATSGKVGESTLGQAEGSVQVPGISMMILHQEVSPDHGKK

SEQ ID NO: 48754 - protein, 928 aa, Bacillus deramificans
DGSTTTIIVHYFRPAGDYQPWSLWMWPEGGSGAEYDFNGTDSYGEVANVSIPGNPSQVGIIVRTQDWTKDVSADRYIDLSKGHEVWLVQGNSQIFYNEKDAEDAAKPAVSNAYLDASNQVLVKLSQPFTLGEGASGFTVHDDTVNKDIPVTSVTDASLGQNVTAVLAGTFQHIFGGSDWAPDNHSTLLKKVNNNLYQFSGDLPEGNYQYKVALNDSWNNPSYPSNNIDLTVPTGGAHVTFSYVPSTHAVYDSINNPGADLPVNGSGVKTDLVTVTLGEDPDVSHTLSIQTDGYQAKQVISRNVLDSSQYYYSGDDLGNTYTHKATTFKVWAPTSTQVNVLLYNSATGSVTKTVPMTASGHGVWEATVNQNLENWYYMYEVTGQGSTRTAVDPYATAIAPNGTRGMIVDLAKTDPAGWNSDKHITPKNIEDEVIYEMDVRDFSIDPNSGMKNKGKYLALTEKGTKGPDGVKTGIDSLKQLGITHVQLMPVFAFNSVDETDPTQDNWGYDPRNYDVPEGQYATNANGTARIKEFKEMVLSLHREHIGVNMDVVYNHTFATQISDFDKIVPEYYYRTDDAGNYTNGSGTGNEIAAERPMVQKFIIDSLKYWVNEYHIDGFRFDLMALLGKDTMSKAASELHAINPGIALYGEPWTGGTSALPEDQLLTKGAQKGMGVAVFNDNLRNALDGNVFDSSAQGFATGATGLTDAIKNGVEGSINDFTSSPGETINYVTSHDNYTLWDKIALSNPNDSEADRIKMDELAQAVVMTSQGVPFMQGGEEMLRTKGGNDNSYNAGDTVNEFDWSRKAQYPDVFNYYSGLIHLRLDHPAFRMTTANEINSHLQFLNSPENTVAYELTDHVNKDKWGNIIVVYNPNKTAATINLPSGKWAINATSGKVGESTLGQAEGSVQVPGISMMILHQEVSPDHGKK

SEQ ID NO: 48755 - protein, 928 aa, Bacillus deramificans
DGSTTTIIVHYFRPAGDYQPWSLWMWPEGGSGAEYDFNGTDSYGEVANVSIPGNPSQVGIIVRTQDWTKDVSADRYIDLSKGHEVWLVQGNSQIFYNEKDAEDAAKPAVSNAYLDASNQVLVKLSQPFTLGEGASGFTVHDDTVNKDIPVTSVTDASLGQNVTAVLAGTFQHIFGGSDWAPDNHSTLLKKVNNNLYQFSGDLPEGNYQYKVALNDSWNNPSYPSNNIDLTVPTGGAHVTFSYVPSTHAVYDSINNPGADLPVNGSGVKTDLVTVTLGEDPDVSHTLSIQTDGYQAKQVISRNVLDSSQYYYSGDDLGNTYTHKATTFKVWAPTSTQVNVLLYNSATGSVTKTVPMTASGHGVWEATVNQNLENWYYMYEVTGQGSTRTAVDPYATAIAPNGTRGMIVDLAKTDPAGWNSDKHITPKNIEDEVIYEMDVRDFSIDPNSGMKNKGKYLALTEKGTKGPDNVKTGIDSLKQLGITHVQLMPVFAFNSVDETDPTQDNWGYDPRNYDVPEGQYATNANGTARIKEFKEMVLSLHREHIGVNMDVVYNHTFATQISDFDKIVPEYYYRTDDAGNYTNGSGTGNEIAAERPMVQKFIIDSLKYWVNEYHIDGFRFDLMALLGKDTMSKAASELHAINPGIALYGEPWTGGTSALPEDQLLTKGAQKGMGVAVFNDNLRNALDGNVFDSSAQGFATGATGLTDAIKNGVEGSINDFTSSPSETINYVTSHDNYTLWDKIALSNPNDSEADRIKMDELAQAVVMTSQGVPFMQGGEEMLRTKGGNDNSYNAGDTVNEFDWSRKAQYPDVFNYYSGLIHLRLDHPAFRMTTANEINSHLQFLNSPENTVAYELTDHVNKDKWGNIIVVYNPNKTAATINLPSGKWAINATSGKVGESTLGQAEGSVQVPGISMMILHQEVSPDHGKK

SEQ ID NO: 48756 - protein, 928 aa, Bacillus deramificans
DGNTTTIIVHYFRPAGDYQPWSLWMWPEGGSGAEYDFNGTDSYGEVANVSIPGNPSQVGIIVRTQDWTKDVSADRYIDLSKGHEVWLVQGNSQIFYNEKDAEDAAKPAVSNAYLDASNQVLVKLSQPFTLGEGASGFTVHDDTVNKDIPVTSVTDASLGQNVTAVLAGTFQHIFGGSDWAPDNHSTLLKKVNNNLYQFSGDLPEGNYQYKVALNDSWNNPSYPSNNIDLTVPTGGAHVTFSYVPSTHAVYDSINNPGADLPVNGSGVKTDLVTVTLGEDPDVSHTLSIQTDGYQAKQVISRNVLDSSQYYYSGDDLGNTYTHKATTFKVWAPTSTQVNVLLYNSATGSVTKTVPMTASGHGVWEATVNQNLENWYYMYEVTGQGSTRTAVDPYATAIAPNGTRGMIVDLAKTDPAGWNSDKHITPKNIEDEVIYEMDVRDFSIDPNSGMKNKGKYLALTEKGTKGPDNVKTGIDSLKQLGITHVQLMPVFAFNSVDETDPTQDNWGYDPRNYDVPEGQYATNANGTARIKEFKEMVLSLHREHIGVNMDVVYNHTFATQISDFDKIVPEYYYRTDDAGNYTNGSGTGNEIAAERPMVQKFIIDSLKYWVNEYHIDGFRFDLMALLGKDTMSKAASELHAINPGIALYGEPWTGGTSALPEDQLLTKGAQKGMGVAVFNDNLRNALDGNVFDSSAQGFATGATGLTDAIKNGVEGSINDFTSSPGETINYVTSHDNYTLWDKIALSNPNDSEADRIKMDELAQAVVMTSQGVPFMQGGEEMLRTKGGNDNSYNAGDTVNEFDWSRKAQYPDVFNYYSGLIHLRLDHPAFRMTTANEINSHLQFLNSPENTVAYELTDHVNKDKWGNIIVVYNPNKTAATINLPSGKWAINATSGKVGESTLGQAEGSVQVPGISMMILHQEVSPDHGKK

SEQ ID NO: 48757 - protein, 928 aa, Bacillus deramificans
DGSTTTIIVHYFRPAGDYQPWSLWMWPEGGSGAEYDFNGTDSYGEVANVSIPGNPSQVGIIVRTQDWTKDVSADRYIDLSKGHEVWLVQGNSQIFYNEKDAEDAAKPAVSNAYLDASNQVLVKLSQPFTLGEGASGFTVHDDTVNKDIPVTSVTDASLGQNVTAVLAGTFQHIFGGSDWAPDNHSTLLKKVNNNLYQFSGDLPEGNYQYKVALNDSWNNPSYPSNNIDLTVPTGGAHVTFSYVPSTHAVYDSINNPGADLPVNGSGVKTDLVTVTLGEDPDVSHTLSIQTDGYQAKQVISRNVLDSSQYYYSGDDLGNTYTHKATTFKVWAPTSTQVNVLLYNSATGSVTKTVPMTASGHGVWEATVNQNLENWYYMYEVTGQGSTRTAVDPYATAIAPNGTRGMIVDLAKTDPAGWNSDKHITPKNIEDEVIYEMDVRDFSIDPNSGMKNKGKYLALTEKGTKGPDNVKTGIDSLKQLGITHVQLMPVFAFNSVDETDPTQDNWGYDPRNYDVPEGQYATNANGTARIKEFKEMVLSLHREHIGVNMDVVYNHTFATQISDFDKIVPEYYYRTDDAGNYTNGSGTGNEIASERPMVQKFIIDSLKYWVNEYHIDGFRFDLMALLGKDTMSKAASELHAINPGIALYGEPWTGGTSALPEDQLLTKGAQKGMGVAVFNDNLRNALDGNVFDSSAQGFATGATGLTDAIKNGVEGSINDFTSSPGETINYVTSHDNYTLWDKIALSNPNDSEADRIKMDELAQAVVMTSQGVPFMQGGEEMLRTKGGNDNSYNAGDTVNEFDWSRKAQYPDVFNYYSGLIHLRLDHPAFRMTTANEINSHLQFLNSPENTVAYELTDHVNKDKWGNIIVVYNPNKTAATINLPSGKWAINATSGKVGESTLGQAEGSVQVPGISMMILHQEVSPDHGKK

SEQ ID NO: 48758 - protein, 928 aa, Bacillus deramificans
DGSTTTIIVHYFRPAGDYQPWSLWMWPEGGSGAEYDFNGTDSYGEVANVSIPGNPSQVGIIVRTQDWTKDVSADRYIDLSKGHEVWLVQGNSQIFYNEKDAEDAAKPAVSNAYLDASNQVLVKLSQPFTLGEGASGFTVHDDTVNKDIPVTSVTDASLGQNVTAVLAGTFQHIFGGSDWAPDNHSTLLKKVNNNLYQFSGDLPEGNYQYKVALNDSWNNPSYPSNNIDLTVPTGGAHVTFSYVPSTHAVYDSINNPGADLPVNGSGVKTDLVTVTLGEDPDVSHTLSIQTDGYQAKQVISRNVLDSSQYYYSGDDLGNTYTHKATTFKVWAPTSTQVNVLLYNSATGSVTKTVPMTASGHGVWEATVNQNLENWYYMYEVTGQGSTRTAVDPYATAIAPNGTRGMIVDLAKTDPAGWNSDKHITPKNIEDEVIYEMDVRDFSIDPNSGMKNKGKYLALTEKGTKGPDNVKTGIDSLKQLGITHVQLMPVFAFASVDETDPTQDNWGYDPRNYDVPEGQYATNANGTARIKEFKEMVLSLHREHIGVNMDVVYNHTFATQISDFDKIVPEYYYRTDDAGNYTNGSGTGNEIAAERPMVQKFIIDSLKYWVNEYHIDGFRFDLMALLGKDTMSKAASELHAINPGIALYGEPWTGGTSALPEDQLLTKGAQKGMGVAVFNDNLRNALDGNVFDSSAQGFATGATGLTDAIKNGVEGSINDFTSSPGETINYVTSHDNYTLWDKIALSNPNDSEADRIKMDELAQAVVMTSQGVPFMQGGEEMLRTKGGNDNSYNAGDTVNEFDWSRKAQYPDVFNYYSGLIHLRLDHPAFRMTTANEINSHLQFLNSPENTVAYELTDHVNKDKWGNIIVVYNPNKTAATINLPSGKWAINATSGKVGESTLGQAEGSVQVPGISMMILHQEVSPDHGKK

SEQ ID NO: 48759 - protein, 928 aa, Bacillus deramificans
DGSTTTIIVHYFRPAGDYQPWSLWMWPEGGSGAEYDFNGTDSYGEVANVSIPGNPSQVGIIVRTQDWTKDVSADRYIDLSKGHEVWLVQGNSQIFYNEKDAEDAAKPAVSNAYLDASNQVLVKLSQPFTLGEGASGFTVHDDTVNKDIPVTSVTDASLGQNVTAVLAGTFQHIFGGSDWAPDNHSTLLKKVNNNLYQFSGDLPEGNYQYKVALNDSWNNPSYPSNNIDLTVPTGGAHVTFSYVPSTHAVYDSINNPGADLPVNGSGVKTDLVTVTLGEDPDVSHTLSIQTDGYQAKQVISRNVLDSSQYYYSGDDLGNTYTHKATTFKVWAPTSTQVNVLLYNSATGSVTKTVPMTASGHGVWEATVNQNLENWYYMYEVTGQGSTRTAVDPYATAIAPNGTRGMIVDLAKTDPAGWNSDKHITPKNIEDEVIYEMDVRDFSIDPNSGMKNKGKYLALTEKGTKGPDNVKTGIDSLKQLGITHVQLMPVFAFNSVDETDPTQDNWGYDPRNYDVPEGQYATNANGTARIKEFKEMVLSLHREHIGVNMDVVYNHTFATQISDFDKIVPEYYYRTDDAGNYTNGSGTGNEIAAERPMVQKFIIDSLKYWVNEYHIDGFRFDLMALLGKDTMSKAASELHAINPGIALYGEPWTGGTSALPEDQLLTKGAQKGMGVAVFNDNLRNALDGNVFDSSAQGFATGATGLTDAIKRGVEGSINDFTSSPGETINYVTSHDNYTLWDKIALSNPNDSEADRIKMDELAQAVVMTSQGVPFMQGGEEMLRTKGGNDNSYNAGDTVNEFDWSRKAQYPDVFNYYSGLIHLRLDHPAFRMTTANEINSHLQFLNSPENTVAYELTDHVNKDKWGNIIVVYNPNKTAATINLPSGKWAINATSGKVGESTLGQAEGSVQVPGISMMILHQEVSPDHGKK

SEQ ID NO: 48760 - protein, 928 aa, Bacillus deramificans
DGSTTTIIVHYFRPAGDYQPWSLWMWPEGGSGAEYDFNGTDSYGEVANVSIPGNPSQVGIIVRTQDWTKDVSADRYIDLSKGHEVWLVQGNSQIFYNEKDAEDAAKPAVSNAYLDASNQVLVKLSQPFTLGEGASGFTVHDDTVNKDIPVTSVTDASLGQNVTAVLAGTFQHIFGGSDWAPDNHSTLLKKVNNNLYQFSGDLPEGNYQYKVALNDSWNNPSYPSNNIDLTVPTGGAHVTFSYVPSTHAVYDSINNPGADLPVNGSGVKTDLVTVTLGEDPDVSHTLSIQTDGYQAKQVISRNVLDSSQYYYSGDDLGNTYTHKATTFKVWAPTSTQVNVLLYNSATGSVTKTVPMTASGHGVWEATVNQNLENWYYMYEVTGQGSTRTAVDPYATAIAPNGTRGMIVDLAKTDPAGWNSDKHITPKNIEDEVIYEMDVRDFSIDPNSGMKNKGKYLALTEKGTKGPDNVKTGIDSLKQLGITHVQLMPVFAFASVDETDPTQDNWGYDPRNYDVPEGQYATNANGTARIKEFKEMVLSLHREHIGVNMDVVYNHTFATQISDFDKIVPEYYYRTDDAGNYTNGSGTGNEIAAERPMVQKFIIDSLKYWVNEYHIDGFRFDLMALLGKDTMSKAASELHAINPGIALYGEPWTGGTSALPEDQLLTKGAQKGMGVAVFNDNLRNALDGNVFDSSAQGFATGATGLTDAIKRGVEGSINDFTSSPGETINYVTSHDNYTLWDKIALSNPNDSEADRIKMDELAQAVVMTSQGVPFMQGGEEMLRTKGGNDNSYNAGDTVNEFDWSRKAQYPDVFNYYSGLIHLRLDHPAFRMTTANEINSHLQFLNSPENTVAYELTDHVNKDKWGNIIVVYNPNKTAATINLPSGKWAINATSGKVGESTLGQAEGSVQVPGISMMILHQEVSPDHGKK

SEQ ID NO: 48761 - protein, 928 aa, Bacillus deramificans
DGSTTTIIVHYFRPAGDYQPWSLWMWPEGGSGAEYDFNGTDSYGEVANVSIPGNPSQVGIIVRTQDWTKDVSADRYIDLSKGHEVWLVQGNSQIFYNEKDAEDAAKPAVSNAYLDASNQVLVKLSQPFTLGEGASGFTVHDDTVNKDIPVTSVTDASLGQNVTAVLAGTFQHIFGGSDWAPDNHSTLLKKVNNNLYQFSGDLPEGNYQYKVALNDSWNNPSYPSNNIDLTVPTGGAHVTFSYVPSTHAVYDSINNPGADLPVNGSGVKTDLVTVTLGEDPDVSHTLSIQTDGYQAKQVISRNVLDSSQYYYSGDDLGNTYTHKATTFKVWAPTSTQVNVLLYNSATGSVTKTVPMTASGHGVWEATVNQNLENWYYMYEVTGQGSTRTAVDPYATAIAPNGTRGMIVDLAKTDPAGWNSDKHITPKNIEDEVIYEMDVRDFSIDPNSGMKNKGKYLALTEKGTKGPDNVKTGIDSLKQLGITHVQLMPVFAFNSVDETDPTQDNWGYDPRNYDVPEGQYATNANGTARIKEFKEMVLSLHREHIGVNMDVVYNHTFATQISDFDKIVPEYYYRTDDAGNYTNGSGTGNEIAAERPMVQKFIIDSLKYWVNEYHIDGFRFDLMALLGKDTMSKAASELHAINPGIALYGEPWTGGTSALPEDQLLTKGAQKGMGVAVFNDNLRNALDGNVFDSSAQGFATGATGLTDAIKNGVEGSINDFTSSPGETINYVSCHDNYTLWDKIALSNPNDSEADRIKMDELAQAVVMTSQGVPFMQGGEEMLRTKGGNDNSYNAGDTVNEFDWSRKAQYPDVFNYYSGLIHLRLDHPAFRMTTANEINSHLQFLNSPENTVAYELTDHVNKDKWGNIIVVYNPNKTAATINLPSGKWAINATSGKVGESTLGQAEGSVQVPGISMMILHQEVSPDHGKK

SEQ ID NO: 48762 - protein, 928 aa, Bacillus deramificans
DGSTTTIIVHYFRPAGDYQPWSLWMWPEGGSGAEYDFNGTDSYGEVANVSIPGNPSQVGIIVRTQDWTKDVSADRYIDLSKGHEVWLVQGNSQIFYNEKDAEDAAKPAVSNAYLDASNQVLVKLSQPFTLGEGASGFTVHDDTVNKDIPVTSVTDASLGQNVTAVLAGTFQHIFGGSDWAPDNHSTLLKKVNNNLYQFSGDLPEGNYQYKVALNDSWNNPSYPSNNIDLTVPTGGAHVTFSYVPSTHAVYDSINNPGADLPVNGSGVKTDLVTVTLGEDPDVSHTLSIQTDGYQAKQVISRNVLDSSQYYYSGDDLGNTYTHKATTFKVWAPTSTQVNVLLYNSATGSVTKTVPMTASGHGVWEATVNQNLENWYYMYEVTGQGSTRTAVDPYATAIAPNGTRGMIVDLAKTDPAGWNSDKHITPKNIEDEVIYEMDVRDFSIDPNSGMKNKGKYLALTEKGTKGPDGVKTGIDSLKQLGITHVQLMPVFAFASVDETDPTQDNWGYDPRNYDVPEGQYATNANGTARIKEFKEMVLSLHREHIGVNMDVVYNHTFATQISDFDKIVPEYYYRTDDAGNYTNGSGTGNEIAAERPMVQKFIIDSLKYWVNEYHIDGFRFDLMALLGKDTMSKAASELHAINPGIALYGEPWTGGTSALPEDQLLTKGAQKGMGVAVFNDNLRNALDGNVFDSSAQGFATGATGLTDAIKNGVEGSINDFTSSPGETINYVTSHDNYTLWDKIALSNPNDSEADRIKMDELAQAVVMTSQGVPFMQGGEEMLRTKGGNDNSYNAGDTVNEFDWSRKAQYPDVFNYYSGLIHLRLDHPAFRMTTANEINSHLQFLNSPENTVAYELTDHVNKDKWGNIIVVYNPNKTAATINLPSGKWAINATSGKVGESTLGQAEGSVQVPGISMMILHQEVSPDHGKK

SEQ ID NO: 48763 - protein, 928 aa, Bacillus deramificans
DGSTTTIIVHYFRPAGDYQPWSLWMWPEGGSGAEYDFNGTDSYGEVANVSIPGNPSQVGIIVRTQDWTKDVSADRYIDLSKGHEVWLVQGNSQIFYNEKDAEDAAKPAVSNAYLDASNQVLVKLSQPFTLGEGASGFTVHDDTVNKDIPVTSVTDASLGQNVTAVLAGTFQHIFGGSDWAPDNHSTLLKKVNNNLYQFSGDLPEGNYQYKVALNDSWNNPSYPSNNIDLTVPTGGAHVTFSYVPSTHAVYDSINNPGADLPVNGSGVKTDLVTVTLGEDPDVSHTLSIQTDGYQAKQVISRNVLDSSQYYYSGDDLGNTYTHKATTFKVWAPTSTQVNVLLYNSATGSVTKTVPMTASGHGVWEATVNQNLENWYYMYEVTGQGSTRTAVDPYATAIAPNGTRGMIVDLAKTDPAGWNSDKHITPKNIEDEVIYEMDVRDFSIDPNSGMKNKGKYLALTEKGTKGPDGVKTGIDSLKQLGITHVQLMPVFAFASVDETDPTQDNWGYDPRNYDVPEGQYATNANGTARIKEFKEMVLSLHREHIGVNMDVVYNHTFATQISDFDKIVPEYYYRTDDAGNYTNGSGTGNEIAAERPMVQKFIIDSLKYWVNEYHIDGFRFDLMALLGKDTMSKAASELHAINPGIALYGEPWTGGTSALPEDQLLTKGAQKGMGVAVFNDNLRNALDGNVFDSSAQGFATGATGLTDAIKRGVEGSINDFTSSPGETINYVTSHDNYTLWDKIALSNPNDSEADRIKMDELAQAVVMTSQGVPFMQGGEEMLRTKGGNDNSYNAGDTVNEFDWSRKAQYPDVFNYYSGLIHLRLDHPAFRMTTANEINSHLQFLNSPENTVAYELTDHVNKDKWGNIIVVYNPNKTAATINLPSGKWAINATSGKVGESTLGQAEGSVQVPGISMMILHQEVSPDHGKK

SEQ ID NO: 48764 - protein, 928 aa, Bacillus deramificans
DGSTTTIIVHYFRPAGDYQPWSLWMWPEGGSGAEYDFNGTDSYGEVANVSIPGNPSQVGIIVRTQDWTKDVSADRYIDLSKGHEVWLVQGNSQIFYNEKDAEDAAKPAVSNAYLDASNQVLVKLSQPFTLGEGASGFTVHDDTVNKDIPVTSVTDASLGQNVTAVLAGTFQHIFGGSDWAPDNHSTLLKKVNNNLYQFSGDLPEGNYQYKVALNDSWNNPSYPSNNIDLTVPTGGAHVTFSYVPSTHAVYDSINNPGADLPVNGSGVKTDLVTVTLGEDPDVSHTLSIQTDGYQAKQVISRNVLDSSQYYYSGDDLGNTYTHKATTFKVWAPTSTQVNVLLYNSATGSVTKTVPMTASGHGVWEATVNQNLENWYYMYEVTGQGSTRTAVDPYATAIAPNGTRGMIVDLAKTDPAGWNSDKHITPKNIEDEVIYEMDVRDFSIDPNSGMKNKGKYLALTEKGTKGPDGVKTGIDSLKQLGITHVQLMPVFAFASVDETDPTQDNWGYDPRNYDVPEGQYATNANGTARIKEFKEMVLSLHREHIGVNMDVVYNHTFATQISDFDKIVPEYYYRTDDAGNYTNGSGTGNEIASERPMVQKFIIDSLKYWVNEYHIDGFRFDLMALLGKDTMSKAASELHAINPGIALYGEPWTGGTSALPEDQLLTKGAQKGMGVAVFNDNLRNALDGNVFDSSAQGFATGATGLTDAIKNGVEGSINDFTSSPGETINYVTSHDNYTLWDKIALSNPNDSEADRIKMDELAQAVVMTSQGVPFMQGGEEMLRTKGGNDNSYNAGDTVNEFDWSRKAQYPDVFNYYSGLIHLRLDHPAFRMTTANEINSHLQFLNSPENTVAYELTDHVNKDKWGNIIVVYNPNKTAATINLPSGKWAINATSGKVGESTLGQAEGSVQVPGISMMILHQEVSPDHGKK

SEQ ID NO: 48765 - protein, 928 aa, Bacillus deramificans
DGSTTTIIVHYFRPAGDYQPWSLWMWPEGGSGAEYDFNGTDSYGEVANVSIPGNPSQVGIIVRTQDWTKDVSADRYIDLSKGHEVWLVQGNSQIFYNEKDAEDAAKPAVSNAYLDASNQVLVKLSQPFTLGEGASGFTVHDDTVNKDIPVTSVTDASLGQNVTAVLAGTFQHIFGGSDWAPDNHSTLLKKVNNNLYQFSGDLPEGNYQYKVALNDSWNNPSYPSNNIDLTVPTGGAHVTFSYVPSTHAVYDSINNPGADLPVNGSGVKTDLVTVTLGEDPDVSHTLSIQTDGYQAKQVISRNVLDSSQYYYSGDDLGNTYTHKATTFKVWAPTSTQVNVLLYNSATGSVTKTVPMTASGHGVWEATVNQNLENWYYMYEVTGQGSTRTAVDPYATAIAPNGTRGMIVDLAKTDPAGWNSDKHITPKNIEDEVIYEMDVRDFSIDPNSGMKNKGKYLALTEKGTKGPDGVKTGIDSLKQLGITHVQLMPVFAFASVDETDPTQDNWGYDPRNYDVPEGQYATNANGTARIKEFKEMVLSLHREHIGVNMDVVYNHTFATQISDFDKIVPEYYYRTDDAGNYTNGSGTGNEIAAERPMVQKFIIDSLKYWVNEYHIDGFRFDLMALLGKDTMSKAASELHAINPGIALYGEPWTGGTSALPEDQLLTKGAQKGMGVAVFNDNLRNALDGNVFDSSAQGFATGATGLTDAIKRGVEGSINDFTSSPSETINYVTSHDNYTLWDKIALSNPNDSEADRIKMDELAQAVVMTSQGVPFMQGGEEMLRTKGGNDNSYNAGDTVNEFDWSRKAQYPDVFNYYSGLIHLRLDHPAFRMTTANEINSHLQFLNSPENTVAYELTDHVNKDKWGNIIVVYNPNKTAATINLPSGKWAINATSGKVGESTLGQAEGSVQVPGISMMILHQEVSPDHGKK

SEQ ID NO: 48766 - protein, 928 aa, Bacillus deramificans
DGSTTTIIVHYFRPAGDYQPWSLWMWPEGGSGAEYDFNGTDSYGEVANVSIPGNPSQVGIIVRTQDWTKDVSADRYIDLSKGHEVWLVQGNSQIFYNEKDAEDAAKPAVSNAYLDASNQVLVKLSQPFTLGEGASGFTVHDDTVNKDIPVTSVTDASLGQNVTAVLAGTFQHIFGGSDWAPDNHSTLLKKVNNNLYQFSGDLPEGNYQYKVALNDSWNNPSYPSNNIDLTVPTGGAHVTFSYVPSTHAVYDSINNPGADLPVNGSGVKTDLVTVTLGEDPDVSHTLSIQTDGYQAKQVISRNVLDSSQYYYSGDDLGNTYTHKATTFKVWAPTSTQVNVLLYNSATGSVTKTVPMTASGHGVWEATVNQNLENWYYMYEVTGQGSTRTAVDPYATAIAPNGTRGMIVDLAKTDPAGWNSDKHITPKNIEDEVIYEMDVRDFSIDPNSGMKNKGKYLALTEKGTKGPDNVKTGIDSLKQLGITHVQLMPVFAFNSVDETDPTQDNWGYDPRNYDVPEGQYATNANGTARIKEFKEMVLSLHREHIGVNMDVVYNHTFATQISDFDKIVPEYYYRTDDAGNYTNGSGTGNEIAAERPMVQKFIIDSLKYWVNEYHIDGFRFDLMALLGKDTMSKAASELHAINPGIALYGEPWTGGTSALPEDQLLTKGAQKGMGVAVFNDNLRNALDGNVFDSSAQGFATGATGLTDAIKRGVEGSINDFTSSPSETINYVSCHDNYTLWDKIALSNPNDSEADRIKMDELAQAVVMTSQGVPFMQGGEEMLRTKGGNDNSYNAGDTVNEFDWSRKAQYPDVFNYYSGLIHLRLDHPAFRMTTANEINSHLQFLNSPENTVAYELTDHVNKDKWGNIIVVYNPNKTAATINLPSGKWAINATSGKVGESTLGQAEGSVQVPGISMMILHQEVSPDHGKK

SEQ ID NO: 48767 - protein, 928 aa, Bacillus deramificans
DGSTTTIIVHYFRPAGDYQPWSLWMWPEGGSGAEYDFNGTDSYGEVANVSIPGNPSQVGIIVRTQDWTKDVSADRYIDLSKGHEVWLVQGNSQIFYNEKDAEDAAKPAVSNAYLDASNQVLVKLSQPFTLGEGASGFTVHDDTVNKDIPVTSVTDASLGQNVTAVLAGTFQHIFGGSDWAPDNHSTLLKKVNNNLYQFSGDLPEGNYQYKVALNDSWNNPSYPSNNIDLTVPTGGAHVTFSYVPSTHAVYDSINNPGADLPVNGSGVKTDLVTVTLGEDPDVSHTLSIQTDGYQAKQVISRNVLDSSQYYYSGDDLGNTYTHKATTFKVWAPTSTQVNVLLYNSATGSVTKTVPMTASGHGVWEATVNQNLENWYYMYEVTGQGSTRTAVDPYATAIAPNGTRGMIVDLAKTDPAGWNSDKHITPKNIEDEVIYEMDVRDFSIDPNSGMKNKGKYLALTEKGTKGPDGVKTGIDSLKQLGITHVQLMPVFAFASVDETDPTQDNWGYDPRNYDVPEGQYATNANGTARIKEFKEMVLSLHREHIGVNMDVVYNHTFATQISDFDKIVPEYYYRTDDAGNYTNGSGTGNEIASERPMVQKFIIDSLKYWVNEYHIDGFRFDLMALLGKDTMSKAASELHAINPGIALYGEPWTGGTSALPEDQLLTKGAQKGMGVAVFNDNLRNALDGNVFDSSAQGFATGATGLTDAIKRGVEGSINDFTSSPSETINYVSCHDNYTLWDKIALSNPNDSEADRIKMDELAQAVVMTSQGVPFMQGGEEMLRTKGGNDNSYNAGDTVNEFDWSRKAQYPDVFNYYSGLIHLRLDHPAFRMTTANEINSHLQFLNSPENTVAYELTDHVNKDKWGNIIVVYNPNKTAATINLPSGKWAINATSGKVGESTLGQAEGSVQVPGISMMILHQEVSPDHGKK

SEQ ID NO: 48768 - protein, 620 aa, Bacillus deramificans
YYYSGDDLGNTYTQKATTFKVWAPTSTQVNVLLYDSATGSVTKIVPMTASGHGVWEATVNQNLENWYYMYEVTGQGSTRTAVDPYATAIAPNGTRGMIVDLAKTDPAGWNSDKHITPKNIEDEVIYEMDVRDFSIDPNSGMKNKGKYLALTEKGTKGPDNVKTGIDSLKQLGITHVQLMPVFASNSVDETDPTQDNWGYDPRNYDVPEGQYATNANGNARIKEFKEMVLSLHREHIGVNMDVVYNHTFATQISDFDKIVPEYYYRTDDAGNYTNGSGTGNEIAAERPMVQKFIIDSLKYWVNEYHIDGFRFDLMALLGKDTMSKAASELHAINPGIALYGEPWTGGTSALPDDQLLTKGAQKGMGVAVFNDNLRNALDGNVFDSSAQGFATGATGLTDAIKNGVEGSINDFTSSPGETINYVTSHDNYTLWDKIALSNPNDSEADRIKMDELAQAVVMTSQGVPFMQGGEEMLRTKGGNDNSYNAGDAVNEFDWSRKAQYPDVFNYYSGLIHLRLDHPAFRMTTANEINSHLQFLNSPENTVAYELTDHVNKDKWGNIIVVYNPNKTVATINLPSGKWAINATSGKVGESTLGQAEGSVQVPGISMMILHQEVSPDHGKK

SEQ ID NO: 48769 - protein, 664 aa, Bacillus subtilis
SGVKTDLVTVTLGEDPDVSHTLSIQTDGYQAKQVIPRNVLNSSQYYYSGDDLGNTYTQKATTFKVWAPTSTQVNVLLYDSATGSVTKIVPMTASGHGVWEATVNQNLENWYYMYEVTGQGSTRTAVDPYATAIAPNGTRGMIVDLAKTDPAGWNSDKHITPKNIEDEVIYEMHVRDFSIDPNSGMKNKGKYLALTEKGTKGPDNVKTGIDSLKQLGITHVQLMPVFASNSVDETDPTQYNWGYDPRNYDVPEGQYATNANGNARIKEFKEMVLSLHREHIGVNMDVVYNHTFATQISDFDKIVPEYYYRTDDAGNYTNGSGTGNEIAAERPMVQKFIIDSLKYWVNEYHIDGFRFDLMALLGKDTMSKAASELHAINPGIALYGEPWTGGTSALPDDQLLTKGAQKGMGVAVFNDNLRNALDGNVFDSSAQGFATGATGLTDAIKNGVEGSINDFTSSPGETINYVTSHDNYTLWDKIALSNPNDSEADRIKMDELAQAVVMTSQGVPFMQGGEEMLRTKGGNDNSYNAGDAVNEFDWSRKAQYPDVFNYYSGLIHLRLDHPAFRMTTANEINSHLQFLNSPENTVAYELTDHVNKDKWGNIIVVYNPNKTVATINLPSGKWAINATSGKVGESTLGQAEGSVQVPGISMMILHQEVSPDHGKK

SEQ ID NO: 48770 - protein, 834 aa, Bacillus deramificans
IFYNEKDAEDAAKPAVSNAYLDASNQVLVKLSQPLTLGEGASGFTVHDDTANKDIPVTSVKDASLGQDVTAVLAGTFQHIFGGSDWAPDNHSTLLKKVTNNLYQFSGDLPEGNYQYKVALNDSWNNPSYPSDNINLTVPAGGAHVTFSYIPSTHAVYDTINNPNADLQVESGVKTDLVTVTLGEDPDVSHTLSIQTDGYQAKQVIPRNVLNSSQYYYSGDDLGNTYTQKATTFKVWAPTSTQVNVLLYDSATGSVTKIVPMTASGHGVWEATVNQNLENWYYMYEVTGQGSTRTAVDPYATAIAPNGTRGMIVDLAKTDPAGWNSDKHITPKNIEDEVIYEMDVRDFSIDPNSGMKNKGKYLALTEKGTKGPDNVKTGIDSLKQLGITHVQLMPVFASNSVDETDPTQDNWGYDPRNYDVPEGQYATNANGNARIKEFKEMVLSLHREHIGVNMDVVYNHTFATQISDFDKIVPEYYYRTDDAGNYTNGSGTGNEIAAERPMVQKFIIDSLKYWVNEYHIDGFRFDLMALLGKDTMSKAASELHAINPGIALYGEPWTGGTSALPDDQLLTKGAQKGMGVAVFNDNLRNALDGNVFDSSAQGFATGATGLTDAIKNGVEGSINDFTSSPGETINYVTSHDNYTLWDKIALSNPNDSEADRIKMDELAQAVVMTSQGVPFMQGGEEMLRTKGGNDNSYNAGDAVNEFDWSRKAQYPDVFNYYSGLIHLRLDHPAFRMTTANEINSHLQFLNSPENTVAYELTDHVNKDKWGNIIVVYNPNKTVATINLPSGKWAINATSGKVGESTLGQAEGSVQVPGISMMILHQEVSPDHGKK

SEQ ID NO: 48771 - protein, 826 aa, Bacillus deramificans
EDAAKPAVSNAYLDASNQVLVKLSQPLTLGEGASGFTVHDDTANKDIPVTSVKDASLGQDVTAVLAGTFQHIFGGSDWAPDNHSTLLKKVTNNLYQFSGDLPEGNYQYKVALNDSWNNPSYPSDNINLTVPAGGAHVTFSYIPSTHAVYDTINNPNADLQVESGVKTDLVTVTLGEDPDVSHTLSIQTDGYQAKQVIPRNVLNSSQYYYSGDDLGNTYTQKATTFKVWAPTSTQVNVLLYDSATGSVTKIVPMTASGHGVWEATVNQNLENWYYMYEVTGQGSTRTAVDPYATAIAPNGTRGMIVDLAKTDPAGWNSDKHITPKNIEDEVIYEMDVRDFSIDPNSGMKNKGKYLALTEKGTKGPDNVKTGIDSLKQLGITHVQLMPVFASNSVDETDPTQDNWGYDPRNYDVPEGQYATNANGNARIKEFKEMVLSLHREHIGVNMDVVYNHTFATQISDFDKIVPEYYYRTDDAGNYTNGSGTGNEIAAERPMVQKFIIDSLKYWVNEYHIDGFRFDLMALLGKDTMSKAASELHAINPGIALYGEPWTGGTSALPDDQLLTKGAQKGMGVAVFNDNLRNALDGNVFDSSAQGFATGATGLTDAIKNGVEGSINDFTSSPGETINYVTSHDNYTLWDKIALSNPNDSEADRIKMDELAQAVVMTSQGVPFMQGGEEMLRTKGGNDNSYNAGDAVNEFDWSRKAQYPDVFNYYSGLIHLRLDHPAFRMTTANEINSHLQFLNSPENTVAYELTDHVNKDKWGNIIVVYNPNKTVATINLPSGKWAINATSGKVGESTLGQAEGSVQVPGISMMILHQEVSPDHGKK

SEQ ID NO: 48772 - protein, 824 aa, Bacillus deramificans
AAKPAVSNAYLDASNQVLVKLSQPLTLGEGASGFTVHDDTANKDIPVTSVKDASLGQDVTAVLAGTFQHIFGGSDWAPDNHSTLLKKVTNNLYQFSGDLPEGNYQYKVALNDSWNNPSYPSDNINLTVPAGGAHVTFSYIPSTHAVYDTINNPNADLQVESGVKTDLVTVTLGEDPDVSHTLSIQTDGYQAKQVIPRNVLNSSQYYYSGDDLGNTYTQKATTFKVWAPTSTQVNVLLYDSATGSVTKIVPMTASGHGVWEATVNQNLENWYYMYEVTGQGSTRTAVDPYATAIAPNGTRGMIVDLAKTDPAGWNSDKHITPKNIEDEVIYEMDVRDFSIDPNSGMKNKGKYLALTEKGTKGPDNVKTGIDSLKQLGITHVQLMPVFASNSVDETDPTQDNWGYDPRNYDVPEGQYATNANGNARIKEFKEMVLSLHREHIGVNMDVVYNHTFATQISDFDKIVPEYYYRTDDAGNYTNGSGTGNEIAAERPMVQKFIIDSLKYWVNEYHIDGFRFDLMALLGKDTMSKAASELHAINPGIALYGEPWTGGTSALPDDQLLTKGAQKGMGVAVFNDNLRNALDGNVFDSSAQGFATGATGLTDAIKNGVEGSINDFTSSPGETINYVTSHDNYTLWDKIALSNPNDSEADRIKMDELAQAVVMTSQGVPFMQGGEEMLRTKGGNDNSYNAGDAVNEFDWSRKAQYPDVFNYYSGLIHLRLDHPAFRMTTANEINSHLQFLNSPENTVAYELTDHVNKDKWGNIIVVYNPNKTVATINLPSGKWAINATSGKVGESTLGQAEGSVQVPGISMMILHQEVSPDHGKK

SEQ ID NO: 48773 - protein, 817 aa, Bacillus deramificans
NAYLDASNQVLVKLSQPLTLGEGASGFTVHDDTANKDIPVTSVKDASLGQDVTAVLAGTFQHIFGGSDWAPDNHSTLLKKVTNNLYQFSGDLPEGNYQYKVALNDSWNNPSYPSDNINLTVPAGGAHVTFSYIPSTHAVYDTINNPNADLQVESGVKTDLVTVTLGEDPDVSHTLSIQTDGYQAKQVIPRNVLNSSQYYYSGDDLGNTYTQKATTFKVWAPTSTQVNVLLYDSATGSVTKIVPMTASGHGVWEATVNQNLENWYYMYEVTGQGSTRTAVDPYATAIAPNGTRGMIVDLAKTDPAGWNSDKHITPKNIEDEVIYEMDVRDFSIDPNSGMKNKGKYLALTEKGTKGPDNVKTGIDSLKQLGITHVQLMPVFASNSVDETDPTQDNWGYDPRNYDVPEGQYATNANGNARIKEFKEMVLSLHREHIGVNMDVVYNHTFATQISDFDKIVPEYYYRTDDAGNYTNGSGTGNEIAAERPMVQKFIIDSLKYWVNEYHIDGFRFDLMALLGKDTMSKAASELHAINPGIALYGEPWTGGTSALPDDQLLTKGAQKGMGVAVFNDNLRNALDGNVFDSSAQGFATGATGLTDAIKNGVEGSINDFTSSPGETINYVTSHDNYTLWDKIALSNPNDSEADRIKMDELAQAVVMTSQGVPFMQGGEEMLRTKGGNDNSYNAGDAVNEFDWSRKAQYPDVFNYYSGLIHLRLDHPAFRMTTANEINSHLQFLNSPENTVAYELTDHVNKDKWGNIIVVYNPNKTVATINLPSGKWAINATSGKVGESTLGQAEGSVQVPGISMMILHQEVSPDHGKK

SEQ ID NO: 48774 - protein, 815 aa, Bacillus deramificans
YLDASNQVLVKLSQPLTLGEGASGFTVHDDTANKDIPVTSVKDASLGQDVTAVLAGTFQHIFGGSDWAPDNHSTLLKKVTNNLYQFSGDLPEGNYQYKVALNDSWNNPSYPSDNINLTVPAGGAHVTFSYIPSTHAVYDTINNPNADLQVESGVKTDLVTVTLGEDPDVSHTLSIQTDGYQAKQVIPRNVLNSSQYYYSGDDLGNTYTQKATTFKVWAPTSTQVNVLLYDSATGSVTKIVPMTASGHGVWEATVNQNLENWYYMYEVTGQGSTRTAVDPYATAIAPNGTRGMIVDLAKTDPAGWNSDKHITPKNIEDEVIYEMDVRDFSIDPNSGMKNKGKYLALTEKGTKGPDNVKTGIDSLKQLGITHVQLMPVFASNSVDETDPTQDNWGYDPRNYDVPEGQYATNANGNARIKEFKEMVLSLHREHIGVNMDVVYNHTFATQISDFDKIVPEYYYRTDDAGNYTNGSGTGNEIAAERPMVQKFIIDSLKYWVNEYHIDGFRFDLMALLGKDTMSKAASELHAINPGIALYGEPWTGGTSALPDDQLLTKGAQKGMGVAVFNDNLRNALDGNVFDSSAQGFATGATGLTDAIKNGVEGSINDFTSSPGETINYVTSHDNYTLWDKIALSNPNDSEADRIKMDELAQAVVMTSQGVPFMQGGEEMLRTKGGNDNSYNAGDAVNEFDWSRKAQYPDVFNYYSGLIHLRLDHPAFRMTTANEINSHLQFLNSPENTVAYELTDHVNKDKWGNIIVVYNPNKTVATINLPSGKWAINATSGKVGESTLGQAEGSVQVPGISMMILHQEVSPDHGKK

SEQ ID NO: 48775 - protein, 664 aa, Bacillus acidopullulyticus
SSEQTDLVQLTLASAPDVSHTIQVGAAGYEAVNLIPRNVLDSSQYYYSGDDLGNTYTHKATTFKVWAPTSTQVNVLLYNSATGSVTKTVPMTASGHGVWEATVNQNLENWYYMYEVTGQGSTRTAVDPYATAIAPNGTRGMIVDLAKTDPAGWNSDKHITPKNIEDEVIYEMDVRDFSIDPNSGMKNKGKYLALTEKGTKGPDNVKTGIDSLKQLGITHVQLMPVFAFNSVDETDPTQDNWGYDPRNYDVPEGQYATNANGTARIKEFKEMVLSLHREHIGVNMDVVYNHTFATQISDFDKIVPEYYYRTDDAGNYTNGSGTGNEIAAERPMVQKFIIDSLKYWVNEYHIDGFRFDLMALLGKDTMSKAASELHAINPGIALYGEPWTGGTSALPEDQLLTKGAQKGMGVAVFNDNLRNALDGNVFDSSAQGFATGATGLTDAIKNGVEGSINDFTSSPGETINYVTSHDNYTLWDKIALSNPNDSEADRIKMDELAQAVVMTSQGVPFMQGGEEMLRTKGGNDNSYNAGDTVNEFDWSRKAQYPDVFNYYSGLIHLRLDHPAFRMTTANEINSHLQFLNSPENTVAYELTDHVNKDKWGNIIVVYNPNKTAATINLPSGKWAINATSGKVGESTLGQAEGSVQVPGISMMILHQEVSPDHGKK

SEQ ID NO: 48776 - protein, 827 aa, Bacillus deramificans
ASAAAKPAVSNAYLDASNQVLVKLSQPLTLGEGASGFTVHDDTANKDIPVTSVKDASLGQDVTAVLAGTFQHIFGGSDWAPDNHSTLLKKVTNNLYQFSGDLPEGNYQYKVALNDSWNNPSYPSDNINLTVPAGGAHVTFSYIPSTHAVYDTINNPNADLQVESGVKTDLVTVTLGEDPDVSHTLSIQTDGYQAKQVIPRNVLNSSQYYYSGDDLGNTYTQKATTFKVWAPTSTQVNVLLYDSATGSVTKIVPMTASGHGVWEATVNQNLENWYYMYEVTGQGSTRTAVDPYATAIAPNGTRGMIVDLAKTDPAGWNSDKHITPKNIEDEVIYEMDVRDFSIDPNSGMKNKGKYLALTEKGTKGPDNVKTGIDSLKQLGITHVQLMPVFASNSVDETDPTQDNWGYDPRNYDVPEGQYATNANGNARIKEFKEMVLSLHREHIGVNMDVVYNHTFATQISDFDKIVPEYYYRTDDAGNYTNGSGTGNEIAAERPMVQKFIIDSLKYWVNEYHIDGFRFDLMALLGKDTMSKAASELHAINPGIALYGEPWTGGTSALPDDQLLTKGAQKGMGVAVFNDNLRNALDGNVFDSSAQGFATGATGLTDAIKNGVEGSINDFTSSPGETINYVTSHDNYTLWDKIALSNPNDSEADRIKMDELAQAVVMTSQGVPFMQGGEEMLRTKGGNDNSYNAGDAVNEFDWSRKAQYPDVFNYYSGLIHLRLDHPAFRMTTANEINSHLQFLNSPENTVAYELTDHVNKDKWGNIIVVYNPNKTVATINLPSGKWAINATSGKVGESTLGQAEGSVQVPGISMMILHQEVSPDHGKK

SEQ ID NO: 48777 - protein, 664 aa, Synthetic construct
SSEQTDLVQLTLASAPDVSHTIQVGAAGYEAVNLIPRNVLDSSQYYYSGDDLGNTYTHKATTFKVWAPTSTQVNVLLYNSATGSVTKTVPMTASGHGVWEATVNQNLENWYYMYEVTGQGSTRTAVDPYATAIAPNGTRGMIVDLAKTDPAGWNSDKHITPKNIEDEVIYEMDVRDFSIDPNSGMKNKGKYLALTEKGTKGPDGVKTGIDSLKQLGITHVQLMPVFAFASVDETDPTQDNWGYDPRNYDVPEGQYATNANGTARIKEFKEMVLSLHREHIGVNMDVVYNHTFATQISDFDKIVPEYYYRTDDAGNYTNGSGTGNEIASERPMVQKFIIDSLKYWVNEYHIDGFRFDLMALLGKDTMSKAASELHAINPGIALYGEPWTGGTSALPEDQLLTKGAQKGMGVAVFNDNLRNALDGNVFDSSAQGFATGATGLTDAIKNGVEGSINDFTSSPGETINYVTSHDNYTLWDKIALSNPNDSEADRIKMDELAQAVVMTSQGVPFMQGGEEMLRTKGGNDNSYNAGDTVNEFDWSRKAQYPDVFNYYSGLIHLRLDHPAFRMTTANEINSHLQFLNSPENTVAYELTDHVNKDKWGNIIVVYNPNKTAATINLPSGKWAINATSGKVGESTLGQAEGSVQVPGISMMILHQEVSPDHGKK

SEQ ID NO: 48778 - protein, 664 aa, Bacillus deramificans
SSEQTDLVQLTLASAPDVSHTIQVGAAGYEAVNLIPRNVLDSSQYYYSGDDLGNTYTHKATTFKVWAPTSTQVNVLLYNSATGSVTKTVPMTASGHGVWEATVNQNLENWYYMYEVTGQGSTRTAVDPYATAIAPNGTRGMIVDLAKTDPAGWNSDKHITPKNIEDEVIYEMDVRDFSIDPNSGMKNKGKYLALTEKGTKGPDGVKTGIDSLKQLGITHVQLMPVFAFASVDETDPTQDNWGYDPRNYDVPEGQYATNANGTARIKEFKEMVLSLHREHIGVNMDVVYNHTFATQISDFDKIVPEYYYRTDDAGNYTNGSGTGNEIAAERPMVQKFIIDSLKYWVNEYHIDGFRFDLMALLGKDTMSKAASELHAINPGIALYGEPWTGGTSALPEDQLLTKGAQKGMGVAVFNDNLRNALDGNVFDSSAQGFATGATGLTDAIKRGVEGSINDFTSSPSETINYVTSHDNYTLWDKIALSNPNDSEADRIKMDELAQAVVMTSQGVPFMQGGEEMLRTKGGNDNSYNAGDTVNEFDWSRKAQYPDVFNYYSGLIHLRLDHPAFRMTTANEINSHLQFLNSPENTVAYELTDHVNKDKWGNIIVVYNPNKTAATINLPSGKWAINATSGKVGESTLGQAEGSVQVPGISMMILHQEVSPDHGKK

SEQ ID NO: 48779 - protein, 957 aa, Geobacillus thermodenitrificans
MAKKLIYVCLSVCLVLTWAFNVKGQSAHADGNTTTIIVHYFRPAGDYQPWSLWMWPKDGGGAEYDFNQPADSFGAVASADIPGNPSQVGIIVRTQDWTKDVSADRYIDLSKGNEVWLVEGNSQIFYNEKDAEDAAKPAVSNAYLDASNQVLVKLSQPLTLGEGASGFTVHDDTANKDIPVTSVKDASLGQDVTAVLAGTFQHIFGGSDWAPDNHSTLLKKVTNNLYQFSGDLPEGNYQYKVALNDSWNNPSYPSDNINLTVPAGGAHVTFSYIPSTHAVYDTINNPNADLQVESGVKTDLVTVTLGEDPDVSHTLSIQTDGYQAKQVIPRNVLNSSQYYYSGDDLGNTYTQKATTFKVWAPTSTQVNVLLYDSATGSVTKIVPMTASGHGVWEATVNQNLENWYYMYEVTGQGSTRTAVDPYATAIAPNGTRGMIVDLAKTDPAGWNSDKHITPKNIEDEVIYEMDVRDFSIDPNSGMKNKGKYLALTEKGTKGPDNVKTGIDSLKQLGITHVQLMPVFASNSVDETDPTQDNWGYDPRNYDVPEGQYATNANGNARIKEFKEMVLSLHREHIGVNMDVVYNHTFATQISDFDKIVPEYYYRTDDAGNYTNGSGTGNEIAAERPMVQKFIIDSLKYWVNEYHIDGFRFDLMALLGKDTMSKAASELHAINPGIALYGEPWTGGTSALPDDQLLTKGAQKGMGVAVFNDNLRNALDGNVFDSSAQGFATGATGLTDAIKNGVEGSINDFTSSPGETINYVTSHDNYTLWDKIALSNPNDSEADRIKMDELAQAVVMTSQGVPFMQGGEEMLRTKGGNDNSYNAGDAVNEFDWSRKAQYPDVFNYYSGLIHLRLDHPAFRMTTANEINSHLQFLNSPENTVAYELTDHVNKDKWGNIIVVYNPNKTVATINLPSGKWAINATSGKVGESTLGQAEGSVQVPGISMMILHQEVSPDHGKK

SEQ ID NO: 48780 - protein, 928 aa, Bacillus deramificans
DGNTTTIIVHYFRPAGDYQPWSLWMWPKDGGGAEYDFNQPADSFGAVASADIPGNPSQVGIIVRTQDWTKDVSADRYIDLSKGNEVWLVEGNSQIFYNEKDAEDAAKPAVSNAYLDASNQVLVKLSQPLTLGEGASGFTVHDDTANKDIPVTSVKDASLGQDVTAVLAGTFQHIFGGSDWAPDNHSTLLKKVTNNLYQFSGDLPEGNYQYKVALNDSWNNPSYPSDNINLTVPAGGAHVTFSYIPSTHAVYDTINNPNADLQVESGVKTDLVTVTLGEDPDVSHTLSIQTDGYQAKQVIPRNVLNSSQYYYSGDDLGNTYTQKATTFKVWAPTSTQVNVLLYDSATGSVTKIVPMTASGHGVWEATVNQNLENWYYMYEVTGQGSTRTAVDPYATAIAPNGTRGMIVDLAKTDPAGWNSDKHITPKNIEDEVIYEMDVRDFSIDPNSGMKNKGKYLALTEKGTKGPDNVKTGIDSLKQLGITHVQLMPVFAFNSVDETDPTQDNWGYDPRNYDVPEGQYATNANGNARIKEFKEMVLSLHREHIGVNMDVVYNHTFATQISDFDKIVPEYYYRTDDAGNYTNGSGTGNEIAAERPMVQKFIIDSLKYWVNEYHIDGFRFDLMALLGKDTMSKAASELHAINPGIALYGEPWTGGTSALPDDQLLTKGAQKGMGVAVFNDNLRNALDGNVFDSSAQGFATGATGLTDAIKNGVEGSINDFTSSPGETINYVTSHDNYTLWDKIALSNPNDSEADRIKMDELAQAVVMTSQGVPFMQGGEEMLRTKGGNDNSYNAGDAVNEFDWSRKAQYPDVFNYYSGLIHLRLDHPAFRMTTANEINSHLQFLNSPENTVAYELTDHVNKDKWGNIIVVYNPNKTVATINLPSGKWAINATSGKVGESTLGQAEGSVQVPGISMMILHQEVSPDHGKK

SEQ ID NO: 48781 - protein, 928 aa, Bacillus deramificans
DGNTTTIIVHYFRPAGDYQPWSLWMWPKDGGGAEYDFNQPADSFGAVASADIPGNPSQVGIIVRTQDWTKDVSADRYIDLSKGNEVWLVEGNSQIFYNEKDAEDAAKPAVSNAYLDASNQVLVKLSQPLTLGEGASGFTVHDDTANKDIPVTSVKDASLGQDVTAVLAGTFQHIFGGSDWAPDNHSTLLKKVTNNLYQFSGDLPEGNYQYKVALNDSWNNPSYPSDNINLTVPAGGAHVTFSYIPSTHAVYDTINNPNADLQVESGVKTDLVTVTLGEDPDVSHTLSIQTDGYQAKQVIPRNVLNSSQYYYSGDDLGNTYTQKATTFKVWAPTSTQVNVLLYDSATGSVTKIVPMTASGHGVWEATVNQNLENWYYMYEVTGQGSTRTAVDPYATAIAPNGTRGMIVDLAKTDPAGWNSDKHITPKNIEDEVIYEMDVRDFSIDPNSGMKNKGKYLALTEKGTKGPDNVKTGIDSLKQLGITHVQLMPVFASNSVDETDPTQDNWGYDPRNYDVPEGQYATNANGNARIKEFKEMVLSLHREHIGVNMDVVYNHTFATQISDFDKIVPEYYYRTDDAGNYTNGSGTGNEIAAERPMVQKFIIDSLKYWVNEYHIDGFRFDLMALLGKDTMSKAASELHAINPGIALYGEPWTGGTSALPDDQLLTKGAQKGMGVAVFNDNLRNALDGNVFDSSAQGFATGATGLTDAIKNGVEGSINDFTSSPGETINYVTSHDNYTLWDKIALSNPNDSEADRIKMDELAQAVVMTSQGVPFMQGGEEMLRTKGGNDNSYNAGDAVNEFDWSRKAQYPDVFNYYSGLIHLRLDHPAFRMTTANEINSHLQFLNSPENTVAYELTDHVNKDKWGNIIVVYNPNKTVATINLPSGKWAINATSGKVGESTLGQAEGSVQVPGISMMILHQEVSPDHGKK

SEQ ID NO: 48782 - protein, 928 aa, Bacillus deramificans
DGNTTTIIVHYFRPAGDYQPWSLWMWPKDGGGAEYDFNQPADSFGAVASADIPGNPSQVGIIVRTQDWTKDVSADRYIDLSKGNEVWLVEGNSQIFYNEKDAEDAAKPAVSNAYLDASNQVLVKLSQPLTLGEGASGFTVHDDTANKDIPVTSVKDASLGQDVTAVLAGTFQHIFGGSDWAPDNHSTLLKKVTNNLYQFSGDLPEGNYQYKVALNDSWNNPSYPSDNINLTVPAGGAHVTFSYIPSTHAVYDTINNPNADLQVESGVKTDLVTVTLGEDPDVSHTLSIQTDGYQAKQVIPRNVLNSSQYYYSGDDLGNTYTQKATTFKVWAPTSTQVNVLLYDSATGSVTKIVPMTASGHGVWEATVNQNLENWYYMYEVTGQGSTRTAVDPYATAIAPNGTRGMIVDLAKTDPAGWNSDKHITPKNIEDEVIYEMDVRDFSIDPNSGMKNKGKYLALTEKGTKGPDNVKTGIDSLKQLGITHVQLMPVFASNSVDETDPTQDNWGYDPRNYDVPEGQYATNANGNARIKEFKEMVLSLHREHIGVNMDVVYNHTFATQISDFDKIVPEYYYRTDDAGNYTNGSGTGNEIAAERPMVQKFIIDSLKYWVNEYHIDGFRFDLMALLGKDTMSKAASELHAINPGIALYGEPWTGGTSALPDDQLLTKGAQKGMGVAVFNDNLRNALDGNVFDSSAQGFATGATGLTDAIKNGVEGSINDFTSSPGETINYVTSHDNYTLWDKIALSNPNDSEADRIKMDELAQAVVMTSQGVPFMQGGEEMLRTKGGNDNSYNAPDAVNEFDWSRKAQYPDVFNYYSGLIHLRLDHPAFRMTTANEINSHLQFLNSPENTVAYELTDHVNKDKWGNIIVVYNPNKTVATINLPSGKWAINATSGKVGESTLGQAEGSVQVPGISMMILHQEVSPDHGKK

SEQ ID NO: 48783 - protein, 928 aa, Bacillus deramificans
DGNTTTIIVHYFRPAGDYQPWSLWMWPKDGGGAEYDFNQPADSFGAVASADIPGNPSQVGIIVRTQDWTKDVSADRYIDLSKGNEVWLVEGNSQIFYNEKDAEDAAKPAVSNAYLDASNQVLVKLSQPLTLGEGASGFTVHDDTANKDIPVTSVKDASLGQDVTAVLAGTFQHIFGGSDWAPDNHSTLLKKVTNNLYQFSGDLPEGNYQYKVALNDSWNNPSYPSDNINLTVPAGGAHVTFSYIPSTHAVYDTINNPNADLQVESGVKTDLVTVTLGEDPDVSHTLSIQTDGYQAKQVIPRNVLNSSQYYYSGDDLGNTYTQKATTFKVWAPTSTQVNVLLYDSATGSVTKIVPMTASGHGVWEATVNQNLENWYYMYEVTGQGSTRTAVDPYATAIAPNGTRGMIVDLAKTDPAGWNSDKHITPKNIEDEVIYEMDVRDFSIDPNSGMKNKGKYLALTEKGTKGPDNVKTGIDSLKQLGITHVQLMPVFASNSSDETDPTQDNWGYDPRNYDVPEGQYATNANGNARIKEFKEMVLSLHREHIGVNMDVVYNHTFATQISDFDKIVPEYYYRTDDAGNYTNGSGTGNEIAAERPMVQKFIIDSLKYWVNEYHIDGFRFDLMALLGKDTMSKAASELHAINPGIALYGEPWTGGTSALPDDQLLTKGAQKGMGVAVFNDNLRNALDGNVFDSSAQGFATGATGLTDAIKNGVEGSINDFTSSPGETINYVTSHDNYTLWDKIALSNPNDSEADRIKMDELAQAVVMTSQGVPFMQGGEEMLRTKGGNDNSYNAGDAVNEFDWSRKAQYPDVFNYYSGLIHLRLDHPAFRMTTANEINSHLQFLNSPENTVAYELTDHVNKDKWGNIIVVYNPNKTVATINLPSGKWAINATSGKVGESTLGQAEGSVQVPGISMMILHQEVSPDHGKK

SEQ ID NO: 48784 - protein, 928 aa, Bacillus deramificans
DGNTTTIIVHYFRPAGDYQPWSLWMWPKDGGGAEYDFNQPADSFGAVASADIPGNPSQVGIIVRTQDWTKDVSADRYIDLSKGNEVWLVEGNSQIFYNEKDAEDAAKPAVSNAYLDASNQVLVKLSQPLTLGEGASGFTVHDDTANKDIPVTSVKDASLGQDVTAVLAGTFQHIFGGSDWAPDNHSTLLKKVTNNLYQFSGDLPEGNYQYKVALNDSWNNPSYPSDNINLTVPAGGAHVTFSYIPSTHAVYDTINNPNADLQVESGVKTDLVTVTLGEDPDVSHTLSIQTDGYQAKQVIPRNVLNSSQYYYSGDDLGNTYTQKATTFKVWAPTSTQVNVLLYDSATGSVTKIVPMTASGHGVWEATVNQNLENWYYMYEVTGQGSTRTAVDPYATAIAPNGTRGMIVDLAKTDPAGWNSDKHITPKNIEDEVIYEMDVRDFSIKPNSGMKNKGKYLALTEKGTKGPDNVKTGIDSLKQLGITHVQLMPVFASNSVDETDPTQDNWGYDPRNYDVPEGQYATNANGNARIKEFKEMVLSLHREHIGVNMDVVYNHTFATQISDFDKIVPEYYYRTDDAGNYTNGSGTGNEIAAERPMVQKFIIDSLKYWVNEYHIDGFRFDLMALLGKDTMSKAASELHAINPGIALYGEPWTGGTSALPDDQLLTKGAQKGMGVAVFNDNLRNALDGNVFDSSAQGFATGATGLTDAIKNGVEGSINDFTSSPGETINYVTSHDNYTLWDKIALSNPNDSEADRIKMDELAQAVVMTSQGVPFMQGGEEMLRTKGGNDNSYNAGDAVNEFDWSRKAQYPDVFNYYSGLIHLRLDHPAFRMTTANEINSHLQFLNSPENTVAYELTDHVNKDKWGNIIVVYNPNKTVATINLPSGKWAINATSGKVGESTLGQAEGSVQVPGISMMILHQEVSPDHGKK

SEQ ID NO: 48785 - protein, 928 aa, Bacillus deramificans
DGNTTTIIVHYFRPAGDYQPWSLWMWPKDGGGAEYDFNQPADSFGAVASADIPGNPSQVGIIVRTQDWTKDVSADRYIDLSKGNEVWLVEGNSQIFYNEKDAEDAAKPAVSNAYLDASNQVLVKLSQPLTLGEGASGFTVHDDTANKDIPVTSVKDASLGQDVTAVLAGTFQHIFGGSDWAPDNHSTLLKKVTNNLYQFSGDLPEGNYQYKVALNDSWNNPSYPSDNINLTVPAGGAHVTFSYIPSTHAVYDTINNPNADLQVESGVKTDLVTVTLGEDPDVSHTLSIQTDGYQAKQVIPRNVLNSSQYYYSGDDLGNTYTQKATTFKVWAPTSTQVNVLLYDSATGSVTKIVPMTASGHGVWEATVNQNLENWYYMYEVTGQGSTRTAVDPYATAIAPFGTRGMIVDLAKTDPAGWNSDKHITPKNIEDEVIYEMDVRDFSIDPNSGMKNKGKYLALTEKGTKGPDNVKTGIDSLKQLGITHVQLMPVFASNSVDETDPTQDNWGYDPRNYDVPEGQYATNANGNARIKEFKEMVLSLHREHIGVNMDVVYNHTFATQISDFDKIVPEYYYRTDDAGNYTNGSGTGNEIAAERPMVQKFIIDSLKYWVNEYHIDGFRFDLMALLGKDTMSKAASELHAINPGIALYGEPWTGGTSALPDDQLLTKGAQKGMGVAVFNDNLRNALDGNVFDSSAQGFATGATGLTDAIKNGVEGSINDFTSSPGETINYVTSHDNYTLWDKIALSNPNDSEADRIKMDELAQAVVMTSQGVPFMQGGEEMLRTKGGNDNSYNAGDAVNEFDWSRKAQYPDVFNYYSGLIHLRLDHPAFRMTTANEINSHLQFLNSPENTVAYELTDHVNKDKWGNIIVVYNPNKTVATINLPSGKWAINATSGKVGESTLGQAEGSVQVPGISMMILHQEVSPDHGKK

SEQ ID NO: 48786 - protein, 928 aa, Bacillus deramificans
DGNTTTIIVHYFRPAGDYQPWSLWMWPKDGGGAEYDFNQPADSFGAVASADIPGNPSQVGIIVRTQDWTKDVSADRYIDLSKGNEVWLVEGNSQIFYNEKDAEDAAKPAVSNAYLDASNQVLVKLSQPLTLGEGASGFTVHDDTANKDIPVTSVKDASLGQDVTAVLAGTFQHIFGGSDWAPDNHSTLLKKVTNNLYQFSGDLPEGNYQYKVALNDSWNNPSYPSDNINLTVPAGGAHVTFSYIPSTHAVYDTINNPNADLQVESGVKTDLVTVTLGEDPDVSHTLSIQTDGYQAKQVIPRNVLNSSQYYYSGDDLGNTYTQKATTFKVWAPTSTQVNVLLYDSATGSVTKIVPMTASGHGVWEATVNQNLENWYYMYEVTGQGSTRTAVDPYATAIAPNGTRGMIVDLAKTDPAGWNSDKHITPKNIEDEVIYEMDVRDFSIDPNSGMKNKGKYLALTEKGTKGPDNVKTGIDSLKQLGITHVQLMPVFASNSVDETDPTQDNWGYDPRNYDVPEGQYATNANGNARIKEFKEMVLSLHREHIGVNMDVVYNHTFATQISDFDKIVPEYYYRTDDAGNYTNGSGTGNEIAAERPMVQKFIIDSLKYWVNEYHIDGFRFDLMALLGKDTMSKAASELHAINPGIALYGEPWTGGTSALPDDQLLTKGAQKGMGVAVFNDNLRNALDGNVFDSSAQGFATGATGLTDAIKNGVEGSINDFTSSPGETINYVTSHDFYTLWDKIALSNPNDSEADRIKMDELAQAVVMTSQGVPFMQGGEEMLRTKGGNDNSYNAGDAVNEFDWSRKAQYPDVFNYYSGLIHLRLDHPAFRMTTANEINSHLQFLNSPENTVAYELTDHVNKDKWGNIIVVYNPNKTVATINLPSGKWAINATSGKVGESTLGQAEGSVQVPGISMMILHQEVSPDHGKK

SEQ ID NO: 48787 - protein, 928 aa, Bacillus deramificans
DGNTTTIIVHYFRPAGDYQPWSLWMWPKDGGGAEYDFNQPADSFGAVASADIPGNPSQVGIIVRTQDWTKDVSADRYIDLSKGNEVWLVEGNSQIFYNEKDAEDAAKPAVSNAYLDASNQVLVKLSQPLTLGEGASGFTVHDDTANKDIPVTSVKDASLGQDVTAVLAGTFQHIFGGSDWAPDNHSTLLKKVTNNLYQFSGDLPEGNYQYKVALNDSWNNPSYPSDNINLTVPAGGAHVTFSYIPSTHAVYDTINNPNADLQVESGVKTDLVTVTLGEDPDVSHTLSIQTDGYQAKQVIPRNVLNSSQYYYSGDDLGNTYTQKATTFKVWAPTSTQVNVLLYDSATGSVTKIVPMTASGHGVWEATVNQNLENWYYMYEVTGQGSTRTAVDPYATAIAPNGTRGMIVDLAKTDPAGWNSDKHITPKNIEDEVIYEMDVRDFSIDPNSGMKNKGKYLALTEKGTKGPDNVKTGIDSLKQLGITHVQLMPVFASNSVDETDPTQDLWGYDPRNYDVPEGQYATNANGNARIKEFKEMVLSLHREHIGVNMDVVYNHTFATQISDFDKIVPEYYYRTDDAGNYTNGSGTGNEIAAERPMVQKFIIDSLKYWVNEYHIDGFRFDLMALLGKDTMSKAASELHAINPGIALYGEPWTGGTSALPDDQLLTKGAQKGMGVAVFNDNLRNALDGNVFDSSAQGFATGATGLTDAIKNGVEGSINDFTSSPGETINYVTSHDNYTLWDKIALSNPNDSEADRIKMDELAQAVVMTSQGVPFMQGGEEMLRTKGGNDNSYNAGDAVNEFDWSRKAQYPDVFNYYSGLIHLRLDHPAFRMTTANEINSHLQFLNSPENTVAYELTDHVNKDKWGNIIVVYNPNKTVATINLPSGKWAINATSGKVGESTLGQAEGSVQVPGISMMILHQEVSPDHGKK

SEQ ID NO: 48788 - protein, 928 aa, Bacillus deramificans
DGNTTTIIVHYFRPAGDYQPWSLWMWPKDGGGAEYDFNQPADSFGAVASADIPGNPSQVGIIVRTQDWTKDVSADRYIDLSKGNEVWLVEGNSQIFYNEKDAEDAAKPAVSNAYLDASNQVLVKLSQPLTLGEGASGFTVHDDTANKDIPVTSVKDASLGQDVTAVLAGTFQHIFGGSDWAPDNHSTLLKKVTNNLYQFSGDLPEGNYQYKVALNDSWNNPSYPSDNINLTVPAGGAHVTFSYIPSTHAVYDTINNPNADLQVESGVKTDLVTVTLGEDPDVSHTLSIQTDGYQAKQVIPRNVLNSSQYYYSGDDLGNTYTQKATTFKVWAPTSTQVNVLLYDSATGSVTKIVPMTASGHGVWEATVNQNLENWYYMYEVTGQGSTRTAVDPYATAIAPNGTRGMIVDLAKTDPAGWNSDKHITPKNIEDEVIYEMDVRDFSIDPSSGMKNKGKYLALTEKGTKGPDNVKTGIDSLKQLGITHVQLMPVFASNSVDETDPTQDNWGYDPRNYDVPEGQYATNANGNARIKEFKEMVLSLHREHIGVNMDVVYNHTFATQISDFDKIVPEYYYRTDDAGNYTNGSGTGNEIAAERPMVQKFIIDSLKYWVNEYHIDGFRFDLMALLGKDTMSKAASELHAINPGIALYGEPWTGGTSALPDDQLLTKGAQKGMGVAVFNDNLRNALDGNVFDSSAQGFATGATGLTDAIKNGVEGSINDFTSSPGETINYVTSHDNYTLWDKIALSNPNDSEADRIKMDELAQAVVMTSQGVPFMQGGEEMLRTKGGNDNSYNAGDAVNEFDWSRKAQYPDVFNYYSGLIHLRLDHPAFRMTTANEINSHLQFLNSPENTVAYELTDHVNKDKWGNIIVVYNPNKTVATINLPSGKWAINATSGKVGESTLGQAEGSVQVPGISMMILHQEVSPDHGKK

SEQ ID NO: 48789 - protein, 928 aa, Bacillus deramificans
DGNTTTIIVHYFRPAGDYQPWSLWMWPKDGGGAEYDFNQPADSFGAVASADIPGNPSQVGIIVRTQDWTKDVSADRYIDLSKGNEVWLVEGNSQIFYNEKDAEDAAKPAVSNAYLDASNQVLVKLSQPLTLGEGASGFTVHDDTANKDIPVTSVKDASLGQDVTAVLAGTFQHIFGGSDWAPDNHSTLLKKVTNNLYQFSGDLPEGNYQYKVALNDSWNNPSYPSDNINLTVPAGGAHVTFSYIPSTHAVYDTINNPNADLQVESGVKTDLVTVTLGEDPDVSHTLSIQTDGYQAKQVIPRNVLNSSQYYYSGDDLGNTYTQKATTFKVWAPTSTQVNVLLYDSATGSVTKIVPMTASGHGVWEATVNQNLENWYYMYEVTGQGSTRTAVDPYATAIAPNGTRGMIVDLAKTDPAGWNSDKHITPKNIEDEVIYEMDVRDFSIDPNSGMKNKGKYLALTEKGTKGPDNVKTGIDSLKQLGITHVQLMPVFASNSVDETDPTQDNWGYDPRNYDVPEGQYATNANGNARIKEFKEMVLSLHREHIGVNMDVVYNHTFATQISDFDKIVPEYYYRTDDAGNYTNGSGTGNEIAAERPMVQKFIIDSLKYWVNEYHIDGFRFDLMALLGKDTMSKAASELHAINPGIALYGEPWTGGTSALPDDQLLTKGAQKGMGVAVFNDNLRNALDGNVFDSSAQGFATGATGLTDAIKNGVEGSINDFTSSPGETINYVTSHDLYTLWDKIALSNPNDSEADRIKMDELAQAVVMTSQGVPFMQGGEEMLRTKGGNDNSYNAGDAVNEFDWSRKAQYPDVFNYYSGLIHLRLDHPAFRMTTANEINSHLQFLNSPENTVAYELTDHVNKDKWGNIIVVYNPNKTVATINLPSGKWAINATSGKVGESTLGQAEGSVQVPGISMMILHQEVSPDHGKK

SEQ ID NO: 48790 - protein, 928 aa, Bacillus deramificans
DGNTTTIIVHYFRPAGDYQPWSLWMWPKDGGGAEYDFNQPADSFGAVASADIPGNPSQVGIIVRTQDWTKDVSADRYIDLSKGNEVWLVEGNSQIFYNEKDAEDAAKPAVSNAYLDASNQVLVKLSQPLTLGEGASGFTVHDDTANKDIPVTSVKDASLGQDVTAVLAGTFQHIFGGSDWAPDNHSTLLKKVTNNLYQFSGDLPEGNYQYKVALNDSWNNPSYPSDNINLTVPAGGAHVTFSYIPSTHAVYDTINNPNADLQVESGVKTDLVTVTLGEDPDVSHTLSIQTDGYQAKQVIPRNVLNSSQYYYSGDDLGNTYTQKATTFKVWAPTSTQVNVLLYDSATGSVTKIVPMTASGHGVWEATVNQNLENWYYMYEVTGQGSTRTAVDPYATAIAPNGTRGMIVDLAKTDPAGWNSDKHITPKNIEDEVIYEMDVRDFSIDPNSGMKNKGKYLALTEKGTKGPDNVKTGIDSLKQLGITHVQLMPVFASNSVDETDPTQDNWGYDPRNYDVPEGQYATNANGNARIKEFKEMVLSLHREHIGVNMDVVYNHTFATQISDFDKIVPEYYYRTDDAGNYTNGSGTGNEIAAERPMVQKFIIDSLKYWVNEYHIDGFRFDLMALLGKDTMSKAASELHAINPGIALYGAPWTGGTSALPDDQLLTKGAQKGMGVAVFNDNLRNALDGNVFDSSAQGFATGATGLTDAIKNGVEGSINDFTSSPGETINYVTSHDNYTLWDKIALSNPNDSEADRIKMDELAQAVVMTSQGVPFMQGGEEMLRTKGGNDNSYNAGDAVNEFDWSRKAQYPDVFNYYSGLIHLRLDHPAFRMTTANEINSHLQFLNSPENTVAYELTDHVNKDKWGNIIVVYNPNKTVATINLPSGKWAINATSGKVGESTLGQAEGSVQVPGISMMILHQEVSPDHGKK

SEQ ID NO: 48791 - protein, 928 aa, Bacillus deramificans
DGNTTTIIVHYFRPAGDYQPWSLWMWPKDGGGAEYDFNQPADSFGAVASADIPGNPSQVGIIVRTQDWTKDVSADRYIDLSKGNEVWLVEGNSQIFYNEKDAEDAAKPAVSNAYLDASNQVLVKLSQPLTLGEGASGFTVHDDTANKDIPVTSVKDASLGQDVTAVLAGTFQHIFGGSDWAPDNHSTLLKKVTNNLYQFSGDLPEGNYQYKVALNDSWNNPSYPSDNINLTVPAGGAHVTFSYIPSTHAVYDTINNPNADLQVESGVKTDLVTVTLGEDPDVSHTLSIQTDGYQAKQVIPRNVLNSSQYYYSGDDLGNTYTQKATTFKVWAPTSTQVNVLLYDSATGSVTKIVPMTASGHGVWEATVNQNLENWYYMYEVTGQGSTRTAVDPYATAIAPNGTRGMIVDLAKTDPAGWNSDKHITPKNIEDEVIYEMDVRDFSIDPNSGMKNKGKYLALTEKGTKGPDNVKTGIDSLKQLGITHVQLMPVFASNSVDETDPTQDNWGYDPRNYDVPEGQYATNANGNARIKEFKEMVLSLHREHIGVNMDVVYNHTFATQISDFDKAVPEYYYRTDDAGNYTNGSGTGNEIAAERPMVQKFIIDSLKYWVNEYHIDGFRFDLMALLGKDTMSKAASELHAINPGIALYGEPWTGGTSALPDDQLLTKGAQKGMGVAVFNDNLRNALDGNVFDSSAQGFATGATGLTDAIKNGVEGSINDFTSSPGETINYVTSHDNYTLWDKIALSNPNDSEADRIKMDELAQAVVMTSQGVPFMQGGEEMLRTKGGNDNSYNAGDAVNEFDWSRKAQYPDVFNYYSGLIHLRLDHPAFRMTTANEINSHLQFLNSPENTVAYELTDHVNKDKWGNIIVVYNPNKTVATINLPSGKWAINATSGKVGESTLGQAEGSVQVPGISMMILHQEVSPDHGKK

SEQ ID NO: 48792 - protein, 928 aa, Bacillus deramificans
DGNTTTIIVHYFRPAGDYQPWSLWMWPKDGGGAEYDFNQPADSFGAVASADIPGNPSQVGIIVRTQDWTKDVSADRYIDLSKGNEVWLVEGNSQIFYNEKDAEDAAKPAVSNAYLDASNQVLVKLSQPLTLGEGASGFTVHDDTANKDIPVTSVKDASLGQDVTAVLAGTFQHIFGGSDWAPDNHSTLLKKVTNNLYQFSGDLPEGNYQYKVALNDSWNNPSYPSDNINLTVPAGGAHVTFSYIPSTHAVYDTINNPNADLQVESGVKTDLVTVTLGEDPDVSHTLSIQTDPYQAKQVIPRNVLNSSQYYYSGDDLGNTYTQKATTFKVWAPTSTQVNVLLYDSATGSVTKIVPMTASGHGVWEATVNQNLENWYYMYEVTGQGSTRTAVDPYATAIAPNGTRGMIVDLAKTDPAGWNSDKHITPKNIEDEVIYEMDVRDFSIDPNSGMKNKGKYLALTEKGTKGPDNVKTGIDSLKQLGITHVQLMPVFASNSVDETDPTQDNWGYDPRNYDVPEGQYATNANGNARIKEFKEMVLSLHREHIGVNMDVVYNHTFATQISDFDKIVPEYYYRTDDAGNYTNGSGTGNEIAAERPMVQKFIIDSLKYWVNEYHIDGFRFDLMALLGKDTMSKAASELHAINPGIALYGEPWTGGTSALPDDQLLTKGAQKGMGVAVFNDNLRNALDGNVFDSSAQGFATGATGLTDAIKNGVEGSINDFTSSPGETINYVTSHDNYTLWDKIALSNPNDSEADRIKMDELAQAVVMTSQGVPFMQGGEEMLRTKGGNDNSYNAGDAVNEFDWSRKAQYPDVFNYYSGLIHLRLDHPAFRMTTANEINSHLQFLNSPENTVAYELTDHVNKDKWGNIIVVYNPNKTVATINLPSGKWAINATSGKVGESTLGQAEGSVQVPGISMMILHQEVSPDHGKK

SEQ ID NO: 48793 - protein, 928 aa, Bacillus deramificans
DGNTTTIIVHYFRPAGDYQPWSLWMWPKDGGGAEYDFNQPADSFGAVASADIPGNPSQVGIIVRTQDWTKDVSADRYIDLSKGNEVWLVEGNSQIFYNEKDAEDAAKPAVSNAYLDASNQVLVKLSQPLTLGEGASGFTVHDDTANKDIPVTSVKDASLGQDVTAVLAGTFQHIFGGSDWAPDNHSTLLKKVTNNLYQFSGDLPEGNYQYKVALNDSWNNPSYPSDNINLTVPAGGAHVTFSYIPSTHAVYDTINNPNADLQVESGVKTDLVTVTLGEDPDVSHTLSIQTDGYQAKQVIPRNVLNSSQYYYSGDDLGNTYTQKATTFKVWAPTSTQVNVLLYDSATGSVTKIVPMTASGHGVWEATVNQNLENWYYMYEVTGQGSTRTAVDPYATAIAPNGTRGMIVDLAKTDPAGWNSDKHITPKNIEDEVIYEMDVRDFSIDPNSGMKNKGKYLALTEKGTKGPDNVKTGIDSLKQLGITHVQLMPVFASNSVDETDPTQDNWGYDPRNYDVPEGQYATNANGNARIKEFKEMVLSLHREHIGVNMDVIYNHTFATQISDFDKIVPEYYYRTDDAGNYTNGSGTGNEIAAERPMVQKFIIDSLKYWVNEYHIDGFRFDLMALLGKDTMSKAASELHAINPGIALYGEPWTGGTSALPDDQLLTKGAQKGMGVAVFNDNLRNALDGNVFDSSAQGFATGATGLTDAIKNGVEGSINDFTSSPGETINYVTSHDNYTLWDKIALSNPNDSEADRIKMDELAQAVVMTSQGVPFMQGGEEMLRTKGGNDNSYNAGDAVNEFDWSRKAQYPDVFNYYSGLIHLRLDHPAFRMTTANEINSHLQFLNSPENTVAYELTDHVNKDKWGNIIVVYNPNKTVATINLPSGKWAINATSGKVGESTLGQAEGSVQVPGISMMILHQEVSPDHGKK

SEQ ID NO: 48794 - protein, 928 aa, Bacillus deramificans
DGNTTTIIVHYFRPAGDYQPWSLWMWPKDGGGAEYDFNQPADSFGAVASADIPGNPSQVGIIVRTQDWTKDVSADRYIDLSKGNEVWLVEGNSQIFYNEKDAEDAAKPAVSNAYLDASNQVLVKLSQPLTLGEGASGFTVHDDTANKDIPVTSVKDASLGQDVTAVLAGTFQHIFGGSDWAPDNHSTLLKKVTNNLYQFSGDLPEGNYQYKVALNDSWNNPSYPSDNINLTVPAGGAHVTFSYIPSTHAVYDTINNPNADLQVESGVKTDLVTVTLGEDPDVSHTLSIQTDGYQAKQVIPRNVLNSSQYYYSGDDLGNTYTQKATTFKVWAPTSTQVNVLLYDSATGSVTKIVPMTASGHGVWEATVNQNLENWYYMYEVTGQGSTRTAVDPYATAIAPNGTRGMIVDLAKTDPAGWNSDKHITPKNIEDEVIYEMDVRDFSIDPNSGMKNKGKYLALTEKGTKGPDNVKTGIDSLKQLGITHVQLMPVFASNSVDETDPTQDFWGYDPRNYDVPEGQYATNANGNARIKEFKEMVLSLHREHIGVNMDVVYNHTFATQISDFDKIVPEYYYRTDDAGNYTNGSGTGNEIAAERPMVQKFIIDSLKYWVNEYHIDGFRFDLMALLGKDTMSKAASELHAINPGIALYGEPWTGGTSALPDDQLLTKGAQKGMGVAVFNDNLRNALDGNVFDSSAQGFATGATGLTDAIKNGVEGSINDFTSSPGETINYVTSHDNYTLWDKIALSNPNDSEADRIKMDELAQAVVMTSQGVPFMQGGEEMLRTKGGNDNSYNAGDAVNEFDWSRKAQYPDVFNYYSGLIHLRLDHPAFRMTTANEINSHLQFLNSPENTVAYELTDHVNKDKWGNIIVVYNPNKTVATINLPSGKWAINATSGKVGESTLGQAEGSVQVPGISMMILHQEVSPDHGKK

SEQ ID NO: 48795 - protein, 928 aa, Bacillus deramificans
DGNTTTIIVHYFRPAGDYQPWSLWMWPKDGGGAEYDFNQPADSFGAVASADIPGNPSQVGIIVRTQDWTKDVSADRYIDLSKGNEVWLVEGNSQIFYNEKDAEDAAKPAVSNAYLDASNQVLVKLSQPLTLGEGASGFTVHDDTANKDIPVTSVKDASLGQDVTAVLAGTFQHIFGGSDWAPDNHSTLLKKVTNNLYQFSGDLPEGNYQYKVALNDSWNNPSYPSDNINLTVPAGGAHVTFSYIPSTHAVYDTINNPNADLQVESGVKTDLVTVTLGEDPDVSHTLSIQTDGYQAKQVIPRNVLNSSQYYYSGDDLGNTYTQKATTFKVWAPTSTQVNVLLYDSATGSVTKIVPMTASGHGVWEATVNQNLENWYYMYEVTGQGSTRTAVDPYATAIAPSGTRGMIVDLAKTDPAGWNSDKHITPKNIEDEVIYEMDVRDFSIDPNSGMKNKGKYLALTEKGTKGPDNVKTGIDSLKQLGITHVQLMPVFASNSVDETDPTQDNWGYDPRNYDVPEGQYATNANGNARIKEFKEMVLSLHREHIGVNMDVVYNHTFATQISDFDKIVPEYYYRTDDAGNYTNGSGTGNEIAAERPMVQKFIIDSLKYWVNEYHIDGFRFDLMALLGKDTMSKAASELHAINPGIALYGEPWTGGTSALPDDQLLTKGAQKGMGVAVFNDNLRNALDGNVFDSSAQGFATGATGLTDAIKNGVEGSINDFTSSPGETINYVTSHDNYTLWDKIALSNPNDSEADRIKMDELAQAVVMTSQGVPFMQGGEEMLRTKGGNDNSYNAGDAVNEFDWSRKAQYPDVFNYYSGLIHLRLDHPAFRMTTANEINSHLQFLNSPENTVAYELTDHVNKDKWGNIIVVYNPNKTVATINLPSGKWAINATSGKVGESTLGQAEGSVQVPGISMMILHQEVSPDHGKK

SEQ ID NO: 48796 - protein, 928 aa, Bacillus deramificans
DGNTTTIIVHYFRPAGDYQPWSLWMWPKDGGGAEYDFNQPADSFGAVASADIPGNPSQVGIIVRTQDWTKDVSADRYIDLSKGNEVWLVEGNSQIFYNEKDAEDAAKPAVSNAYLDASNQVLVKLSQPLTLGEGASGFTVHDDTANKDIPVTSVKDASLGQDVTAVLAGTFQHIFGGSDWAPDNHSTLLKKVTNNLYQFSGDLPEGNYQYKVALNDSWNNPSYPSDNINLTVPAGGAHVTFSYIPSTHAVYDTINNPNADLQVESGVKTDLVTVTLGEDPDVSHTLSIQTDGYQAKQVIPRNVLNSSQYYYSGDDLGNTYTQKATTFKVWAPTSTQVNVLLYDSATGSVTKIVPMTASGHGVWEATVNQNLENWYYMYEVTGQGSTRTAVDPYATAIAPLGTRGMIVDLAKTDPAGWNSDKHITPKNIEDEVIYEMDVRDFSIDPNSGMKNKGKYLALTEKGTKGPDNVKTGIDSLKQLGITHVQLMPVFASNSVDETDPTQDNWGYDPRNYDVPEGQYATNANGNARIKEFKEMVLSLHREHIGVNMDVVYNHTFATQISDFDKIVPEYYYRTDDAGNYTNGSGTGNEIAAERPMVQKFIIDSLKYWVNEYHIDGFRFDLMALLGKDTMSKAASELHAINPGIALYGEPWTGGTSALPDDQLLTKGAQKGMGVAVFNDNLRNALDGNVFDSSAQGFATGATGLTDAIKNGVEGSINDFTSSPGETINYVTSHDNYTLWDKIALSNPNDSEADRIKMDELAQAVVMTSQGVPFMQGGEEMLRTKGGNDNSYNAGDAVNEFDWSRKAQYPDVFNYYSGLIHLRLDHPAFRMTTANEINSHLQFLNSPENTVAYELTDHVNKDKWGNIIVVYNPNKTVATINLPSGKWAINATSGKVGESTLGQAEGSVQVPGISMMILHQEVSPDHGKK

SEQ ID NO: 48797 - protein, 928 aa, Bacillus deramificans
DGNTTTIIVHYFRPAGDYQPWSLWMWPKDGGGAEYDFNQPADSFGAVASADIPGNPSQVGIIVRTQDWTKDVSADRYIDLSKGNEVWLVEGNSQIFYNEKDAEDAAKPAVSNAYLDASNQVLVKLSQPLTLGEGASGFTVHDDTANKDIPVTSVKDASLGQDVTAVLAGTFQHIFGGSDWAPDNHSTLLKKVTNNLYQFSGDLPEGNYQYKVALNDSWNNPSYPSDNINLTVPAGGAHVTFSYIPSTHAVYDTINNPNADLQVESGVKTDLVTVTLGEDPDVSHTLSIQTDGYQAKQVIPRNVLNSSQYYYSGDDLGNTYTQKATTFKVWAPTSTQVNVLLYDSATGSVTKIVPMTASGHGVWEATVNQNLENWYYMYEVTGQGSTRTAVDPYATAIAPNGTRGMIVDLAKTDPAGWNSDKHITPKNIEDEVIYEMDVRDFSIDPNSGMKNKGKYLALTEKGTKGPDNVKTGIDSLKQLGITHVQLMPVFASNSVDETDPTQDNWGYDPRNYDVPEGQYATNANGNARIKEFKEMVLSLHREHIGVNMDVVYNHTFATQISDFDKIVPEYYYRTDDAGNYTNGSGTGNEIAAERPMVQKFIIDSLKYWVNEYHIDGFRFDLMALLGKDTMSKAASELHAINPGIALYGEPWTGGTSALPDDQLLTKGAQKGMGVAVFNDNLRNALDGNVFDSSAQGFATGATGLTDAIKNGVEGSINDFTSSPGETINYVTSHDNYTLWDKIALSNPNDSEADRIKMDELAQAVVMTSQGVPFMQGGEEMLRTKGGNDSSYNAGDAVNEFDWSRKAQYPDVFNYYSGLIHLRLDHPAFRMTTANEINSHLQFLNSPENTVAYELTDHVNKDKWGNIIVVYNPNKTVATINLPSGKWAINATSGKVGESTLGQAEGSVQVPGISMMILHQEVSPDHGKK

SEQ ID NO: 48798 - protein, 928 aa, Bacillus deramificans
DGNTTTIIVHYFRPAGDYQPWSLWMWPKDGGGAEYDFNQPADSFGAVASADIPGNPSQVGIIVRTQDWTKDVSADRYIDLSKGNEVWLVEGNSQIFYNEKDAEDAAKPAVSNAYLDASNQVLVKLSQPLTLGEGASGFTVHDDTANKPIPVTSVKDASLGQDVTAVLAGTFQHIFGGSDWAPDNHSTLLKKVTNNLYQFSGDLPEGNYQYKVALNDSWNNPSYPSDNINLTVPAGGAHVTFSYIPSTHAVYDTINNPNADLQVESGVKTDLVTVTLGEDPDVSHTLSIQTDGYQAKQVIPRNVLNSSQYYYSGDDLGNTYTQKATTFKVWAPTSTQVNVLLYDSATGSVTKIVPMTASGHGVWEATVNQNLENWYYMYEVTGQGSTRTAVDPYATAIAPNGTRGMIVDLAKTDPAGWNSDKHITPKNIEDEVIYEMDVRDFSIDPNSGMKNKGKYLALTEKGTKGPDNVKTGIDSLKQLGITHVQLMPVFASNSVDETDPTQDNWGYDPRNYDVPEGQYATNANGNARIKEFKEMVLSLHREHIGVNMDVVYNHTFATQISDFDKIVPEYYYRTDDAGNYTNGSGTGNEIAAERPMVQKFIIDSLKYWVNEYHIDGFRFDLMALLGKDTMSKAASELHAINPGIALYGEPWTGGTSALPDDQLLTKGAQKGMGVAVFNDNLRNALDGNVFDSSAQGFATGATGLTDAIKNGVEGSINDFTSSPGETINYVTSHDNYTLWDKIALSNPNDSEADRIKMDELAQAVVMTSQGVPFMQGGEEMLRTKGGNDNSYNAGDAVNEFDWSRKAQYPDVFNYYSGLIHLRLDHPAFRMTTANEINSHLQFLNSPENTVAYELTDHVNKDKWGNIIVVYNPNKTVATINLPSGKWAINATSGKVGESTLGQAEGSVQVPGISMMILHQEVSPDHGKK

SEQ ID NO: 48799 - protein, 928 aa, Bacillus deramificans
DGNTTTIIVHYFRPAGDYQPWSLWMWPKDGGGAEYDFNQPADSLGAVASADIPGNPSQVGIIVRTQDWTKDVSADRYIDLSKGNEVWLVEGNSQIFYSEKDAEDAAKPAVSNAYLDASNQVLVKLSQPLTLGEGASGFTVHDDTANKDIPVTSVKDASLGQDVTAVLAGTFQHIFGGSDWAPDNHSTLLKKVTNNLYQFSGDLPEGNYQYKVALNDSWNNPSYPSDNINLTVPAGGAHVTFSYIPSTHAVYDTINNPNADLQVESGVKTDLVTVTLGEDPDVSHTLSIQTDGYQAKQVIPRNVLNSSQYYYSGDDLGNTYTQKATTFKVWAPTSTQVNVLLYDSATGSVTKIVPMTASGHGVWEATVNQNLENWYYMYEVTGQGSTRTAVDPYATAIAPNGTRGMIVDLAKTDPAGWNSDKHITPKNIEDEVIYEMDVRDFSIDPNSGMKNKGKYLALTEKGTKGPDNVKTGIDSLKQLGITHVQLMPVFASNSVDETDPTQDNWGYDPRNYDVPEGQYATNANGNARIKEFKEMVLSLHREHIGVNMDVVYNHTFATQISDFDKIVPEYYYRTDDAGNYTNGSGTGNEIAAERPMVQKFIIDSLKYWVNEYHIDGFRFDLMALLGKDTMSKAASELHAINPGIALYGEPWTGGTSALPDDQLLTKGAQKGMGVAVFNDNLRNALDGNVFDSSAQGFATGATGLTDAIKNGVEGSINDFTSSPGETINYVTSHDNYTLWDKIALSNPNDSEADRIKMDELAQAVVMTSQGVPFMQGGEEMLRTKGGNDNSYNAGDAVNEFDWSRKAQYPDVFNYYSGLIHLRLDHPAFRMTTANEINSHLQFLNSPENTVAYELTDHVNKDKWGNIIVVYNPNKTVATINLPSGKWAINATSGKVGESTLGQAEGSVQVPGISMMILHQEVSPDHGKK

SEQ ID NO: 48800 - protein, 928 aa, Bacillus deramificans
DGNTTTIIVHYFRPAGDYQPWSLWMWPKDGGGAEYDFNQPADSFGAVASADIPGNPSQVGIIVRTQDWTKDVSADRYIDLSKGNEVWLVEGNSQIFYNEKDAEDAAKPAVSNAYLDASNQVLVKLSQPLTLGEGASGFTVHDDTANKDIPVTSVKDASLGQDVTAVLAGTFQHIFGGSDWAPDNHSTLLKKVTNNLYQFSGDLPEGNYQYKVALNDSWNNPSYPSDNINLTVPAGGAHVTFSYIPSTHAVYDTINNPNADLQVESGVKTDLVTVTLGEDPDVSHTLSIQTDGYQAKQVIPRNVLNSSQYYYSGDDLGNTYTQKATTFKVWAPTSTQVNVLLYDSATGSVTKIVPMTASGHGVWEATVNQNLENWYYMYEVTGQGSTRTAVDPYATAIAPNGTRGMIVDLAKTDPAGWNSDKHITPKNIEDEVIYEMDVRDFSIDPNSGMKNKGKYLALTEKGTKGPDNVKTGIDSLKQLGITHVQLMPVFASNSVDETDPTQDNWGYDPRNYDVPEGQYATNANGNARIKEFKEMVLSLHREHIGVNMDVVYNHTFATQISDFDKIVPEYYYRTDDAGNYTNGSGTGNEIAAERPMVQKFIIDSLKYWVNEYHIDGFRFDLMALLGKDTMSKAASELHAINPGIALYGEPWTGGTSALPDDQLLTKGAQKGMGVAVFNDNLRNALDGNVFDSSAQGFATGATGLTDAIKNGVEGSINDFTSSPGETINYVTSHDNYTLWDKIALSNPNDSEADRIKMDELAQAVVMTSQGVPFMQGGEEMLRTKGGNDFSYNAGDAVNEFDWSRKAQYPDVFNYYSGLIHLRLDHPAFRMTTANEINSHLQFLNSPENTVAYELTDHVNKDKWGNIIVVYNPNKTVATINLPSGKWAINATSGKVGESTLGQAEGSVQVPGISMMILHQEVSPDHGKK

SEQ ID NO: 48801 - protein, 928 aa, Bacillus deramificans
DGNTTTIIVHYFRPAGDYQPWSLWMWPKDGGGAEYDFNQPADSFGAVASADIPGNPSQVGIIVRTQDWTKDVSADRYIDLSKGNEVWLVEGNSQIFYNEKDAEDAAKPAVSNAYLDASNQVLVKLSQPLTLGEGASGFTVHDDTANKDIPVTSVKDASLGQDVTAVLAGTFQHIFGGSDWAPDNHSTLLKKVTNNLYQFSGDLPEGNYQYKVALNDSWNNPSYPSDNINLTVPAGGAHVTFSYIPSTHAVYDTINNPNADLQVESGVKTDLVTVTLGEDPDVSHTLSIQTDGYQAKQVIPRNVLNSSQYYYSGDDLGNTYTQKATTFKVWAPTSTQVNVLLYDSATGSVTKIVPMTASGHGVWEATVNQNLENWYYMYEVTGQGSTRTAVDPYATAIAPNGTRGMIVDLAKTDPAGWNSDKHITPKNIEDEVIYEMDVRDFSIDPLSGMKNKGKYLALTEKGTKGPDNVKTGIDSLKQLGITHVQLMPVFASNSVDETDPTQDNWGYDPRNYDVPEGQYATNANGNARIKEFKEMVLSLHREHIGVNMDVVYNHTFATQISDFDKIVPEYYYRTDDAGNYTNGSGTGNEIAAERPMVQKFIIDSLKYWVNEYHIDGFRFDLMALLGKDTMSKAASELHAINPGIALYGEPWTGGTSALPDDQLLTKGAQKGMGVAVFNDNLRNALDGNVFDSSAQGFATGATGLTDAIKNGVEGSINDFTSSPGETINYVTSHDNYTLWDKIALSNPNDSEADRIKMDELAQAVVMTSQGVPFMQGGEEMLRTKGGNDNSYNAGDAVNEFDWSRKAQYPDVFNYYSGLIHLRLDHPAFRMTTANEINSHLQFLNSPENTVAYELTDHVNKDKWGNIIVVYNPNKTVATINLPSGKWAINATSGKVGESTLGQAEGSVQVPGISMMILHQEVSPDHGKK

SEQ ID NO: 48802 - protein, 928 aa, Bacillus deramificans
DGNTTTIIVHYFRPAGDYQPWSLWMWPKDGGGAEYDFNQPADSFGAVASADIPGNPSQVGIIVRTQDWTKDVSADRYIDLSKGNEVWLVEGNSQIFYNEKDAEDAAKPAVSNAYLDASPQVLVKLSQPLTLGEGASGFTVHDDTANKDIPVTSVKDASLGQDVTAVLAGTFQHIFGGSDWAPDNHSTLLKKVTNNLYQFSGDLPEGNYQYKVALNDSWNNPSYPSDNINLTVPAGGAHVTFSYIPSTHAVYDTINNPNADLQVESGVKTDLVTVTLGEDPDVSHTLSIQTDGYQAKQVIPRNVLNSSQYYYSGDDLGNTYTQKATTFKVWAPTSTQVNVLLYDSATGSVTKIVPMTASGHGVWEATVNQNLENWYYMYEVTGQGSTRTAVDPYATAIAPNGTRGMIVDLAKTDPAGWNSDKHITPKNIEDEVIYEMDVRDFSIDPNSGMKNKGKYLALTEKGTKGPDNVKTGIDSLKQLGITHVQLMPVFASNSVDETDPTQDNWGYDPRNYDVPEGQYATNANGNARIKEFKEMVLSLHREHIGVNMDVVYNHTFATQISDFDKIVPEYYYRTDDAGNYTNGSGTGNEIAAERPMVQKFIIDSLKYWVNEYHIDGFRFDLMALLGKDTMSKAASELHAINPGIALYGEPWTGGTSALPDDQLLTKGAQKGMGVAVFNDNLRNALDGNVFDSSAQGFATGATGLTDAIKNGVEGSINDFTSSPGETINYVTSHDNYTLWDKIALSNPNDSEADRIKMDELAQAVVMTSQGVPFMQGGEEMLRTKGGNDNSYNAGDAVNEFDWSRKAQYPDVFNYYSGLIHLRLDHPAFRMTTANEINSHLQFLNSPENTVAYELTDHVNKDKWGNIIVVYNPNKTVATINLPSGKWAINATSGKVGESTLGQAEGSVQVPGISMMILHQEVSPDHGKK

SEQ ID NO: 48803 - protein, 928 aa, Bacillus deramificans
DGNTTTIIVHYFRPAGDYQPWSLWMWPKDGGGAEYDFNQPADSFGAVASADIPGNPSQVGIIVRTQDWTKDVSADRYIDLSKGNEVWLVEGNSQIFYNEKDAEDAAKPAVSNAYLDASNQVLVKLSQPLTLGEGASGFTVHDDTANKDIPVTSVKDASLGQDVTAVLAGTFQHIFGGSDWAPDNHSTLLKKVTNNLYQFSGDLPEGNYQYKVALNDSWNNPSYPSDNINLTVPAGGAHVTFSYIPSTHAVYDTINNPNADLQVESGVKTDLVTVTLGEDPDVSHTLSIQTDGYQAKQVIPRNVLNSSQYYYSGDDLGNTYTQKATTFKVWAPTSTQVNVLLYDSATGSVTKIVPMTASGHGVWEATVNQNLENWYYMYEVTGQGSTRTAVDPYATAIAPNGTRGMIVDLAKTDPAGWNSDKHITPKNIEDEVIYEMDVRDFSIDPNSGMKNKGKYLALTEKGTKGPDNVKTGIDSLKQLGITHVQLMPVFASNSVDETDPTQDSWGYDPRNYDVPEGQYATNANGNARIKEFKEMVLSLHREHIGVNMDVVYNHTFATQISDFDKIVPEYYYRTDDAGNYTNGSGTGNEIAAERPMVQKFIIDSLKYWVNEYHIDGFRFDLMALLGKDTMSKAASELHAINPGIALYGEPWTGGTSALPDDQLLTKGAQKGMGVAVFNDNLRNALDGNVFDSSAQGFATGATGLTDAIKNGVEGSINDFTSSPGETINYVTSHDNYTLWDKIALSNPNDSEADRIKMDELAQAVVMTSQGVPFMQGGEEMLRTKGGNDNSYNAGDAVNEFDWSRKAQYPDVFNYYSGLIHLRLDHPAFRMTTANEINSHLQFLNSPENTVAYELTDHVNKDKWGNIIVVYNPNKTVATINLPSGKWAINATSGKVGESTLGQAEGSVQVPGISMMILHQEVSPDHGKK

SEQ ID NO: 48804 - protein, 928 aa, Bacillus deramificans
DGNTTTIIVHYFRPAGDYQPWSLWMWPKDGGGAEYDFNQPADSFGAVASADIPGNPSQVGIIVRTQDWTKDVSADRYIDLSKGNEVWLVEGNSQIFYNEKDAEDAAKPAVSNAYLDASNQVLVKLSQPLTLGEGASGFTVHDDTANKDIPVTSVKDASLGQDVTAVLAGTFQHIFGGSDWAPDNHSTLLKKVTNNLYQFSGDLPEGNYQYKVALNDSWNNPSYPSDNINLTVPAGGAHVTFSYIPSTHAVYDTINNPNADLQVESGVKTDLVTVTLGEDPDVSHTLSIQTDGYQAKQVIPRNVLNSSQYYYSGDDLGNTYTQKATTFKVWAPTSTQVNVLLYDSATGSVTKIVPMTASGHGVWEATVNQNLENWYYMYEVTGQGSTRTAVDPYATAIAPNGTRGMIVDLAKTDPAGWNSDKHITPKNIEDEVIYEMDVRDFSIDPNSGMKNKGKYLALTEKGTKGPDNVKTGIDSLKQLGITHVQLMPVFASNSNDETDPTQDNWGYDPRNYDVPEGQYATNANGNARIKEFKEMVLSLHREHIGVNMDVVYNHTFATQISDFDKIVPEYYYRTDDAGNYTNGSGTGNEIAAERPMVQKFIIDSLKYWVNEYHIDGFRFDLMALLGKDTMSKAASELHAINPGIALYGEPWTGGTSALPDDQLLTKGAQKGMGVAVFNDNLRNALDGNVFDSSAQGFATGATGLTDAIKNGVEGSINDFTSSPGETINYVTSHDNYTLWDKIALSNPNDSEADRIKMDELAQAVVMTSQGVPFMQGGEEMLRTKGGNDNSYNAGDAVNEFDWSRKAQYPDVFNYYSGLIHLRLDHPAFRMTTANEINSHLQFLNSPENTVAYELTDHVNKDKWGNIIVVYNPNKTVATINLPSGKWAINATSGKVGESTLGQAEGSVQVPGISMMILHQEVSPDHGKK

SEQ ID NO: 48805 - protein, 928 aa, Bacillus deramificans
DGNTTTIIVHYFRPAGDYQPWSLWMWPKDGGGAEYDFNQPADSFGAVASADIPGNPSQVGIIVRTQDWTKDVSADRYIDLSKGNEVWLVEGNSQIFYNEKDAEDAAKPAVSNAYLDASNQVLVKLSQPLTLGEGASGFTVHDDTANKDIPVTSVKDASLGQDVTAVLAGTFQHIFGGSDWAPDNHSTLLKKVTNNLYQFSGDLPEGNYQYKVALNDSWNNPSYPSDNINLTVPAGGAHVTFSYIPSTHAVYDTINNPNADLQVESGVKTDLVTVTLGEDPDVSHTLSIQTDGYQAKQVIPRNVLNSSQYYYSGDDLGNTYTQKATTFKVWAPTSTQVNVLLYDSATGSVTKIVPMTASGHGVWEATVNQNLENWYYMYEVTGQGSTRTAVDPYATAIAPNGTRGMIVDLAKTDPAGWNSDKHITPKNIEDEVIYEMDVRDFSIDPNSGMKNKGKYLALTEKGTKGPDNVKTGIDSLKQLGITHVQLMPVFASNSVDETDPTQDNWGYDPRNYDVPEGQYATNANGNARIKEFKEMVLSLHREHIGVNMDVVYNHTFATQISDFDKIVPEYYYRTDDAGNYTNGSGTGNEIAAERPMVQKFIIDSLKYWVNEYHIDGFRFALMALLGKDTMSKAASELHAINPGIALYGEPWTGGTSALPDDQLLTKGAQKGMGVAVFNDNLRNALDGNVFDSSAQGFATGATGLTDAIKNGVEGSINDFTSSPGETINYVTSHDNYTLWDKIALSNPNDSEADRIKMDELAQAVVMTSQGVPFMQGGEEMLRTKGGNDNSYNAGDAVNEFDWSRKAQYPDVFNYYSGLIHLRLDHPAFRMTTANEINSHLQFLNSPENTVAYELTDHVNKDKWGNIIVVYNPNKTVATINLPSGKWAINATSGKVGESTLGQAEGSVQVPGISMMILHQEVSPDHGKK

SEQ ID NO: 48806 - protein, 928 aa, Bacillus deramificans
DGNTTTIIVHYFRPAGDYQPWSLWMWPKDGGGAEYDFNQPADSFGAVASADIPGNPSQVGIIVRTQDWTKDVSADRYIDLSKGNEVWLVEGNSQIFYNEKDAEDAAKPAVSNAYLDASNQVLVKLSQPLTLGEGASGFTVHDDTANKDIPVTSVKDASLGQDVTAVLAGTFQHIFGGSDWAPDNHSTLLKKVTNNLYQFSGDLPEGNYQYKVALNDSWNNPSYPSDNINLTVPAGGAHVTFSYIPSTHAVYDTINNPNADLQVESGVKTDLVTVTLGEDPDVSHTLSIQTDGYQAKQVIPRNVLNSSQYYYSGDDLGNTYTQKATTFKVWAPTSTQVNVLLYDSATGSVTKIVPMTASGHGVWEATVNQNLENWYYMYEVTGQGSTRTAVDPYATAIAPNGTRGMIVDLAKTDPAGWNSDKHITPKNIEDEVIYEMDVRDFSIDPFSGMKNKGKYLALTEKGTKGPDNVKTGIDSLKQLGITHVQLMPVFASNSVDETDPTQDNWGYDPRNYDVPEGQYATNANGNARIKEFKEMVLSLHREHIGVNMDVVYNHTFATQISDFDKIVPEYYYRTDDAGNYTNGSGTGNEIAAERPMVQKFIIDSLKYWVNEYHIDGFRFDLMALLGKDTMSKAASELHAINPGIALYGEPWTGGTSALPDDQLLTKGAQKGMGVAVFNDNLRNALDGNVFDSSAQGFATGATGLTDAIKNGVEGSINDFTSSPGETINYVTSHDNYTLWDKIALSNPNDSEADRIKMDELAQAVVMTSQGVPFMQGGEEMLRTKGGNDNSYNAGDAVNEFDWSRKAQYPDVFNYYSGLIHLRLDHPAFRMTTANEINSHLQFLNSPENTVAYELTDHVNKDKWGNIIVVYNPNKTVATINLPSGKWAINATSGKVGESTLGQAEGSVQVPGISMMILHQEVSPDHGKK

SEQ ID NO: 48807 - protein, 928 aa, Bacillus deramificans
DGNTTTIIVHYFRPAGDYQPWSLWMWPKDGGGAEYDFNQPADSFGAVASADIPGNPSQVGIIVRTQDWTKDVSADRYIDLSKGNEVWLVEGNSQIFYNEKDAEDAAKPAVSNAYLDASNQVLVKLSQPLTLGEGASGFTVHDDTANKDIPVTSVKDASLGQDVTAVLAGTFQHIFGGSDWAPDNHSTLLKKVTNNLYQFSGDLPEGNYQYKVALNDSWNNPSYPSDNINLTVPAGGAHVTFSYIPSTHAVYDTINNPNADLQVESGVKTDLVTVTLGEDPDVSHTLSIQTDGYQAKQVIPRNVLNSSQYYYSGDDLGNTYTQKATTFKVWAPTSTQVNVLLYDSATGSVTKIVPMTASGHGVWEATVNQNLENWYYMYEVTGQGSTRTAVDPYATAIAPNGTRGMIVDLAKTDPAGWNSDKHITPKNIEDEVIYEMDVRDFSIDPNSGMKNKGKYLALTEKGTKGPDNVKTGIDSLKQLGITHVQLMPVFASNSVDETDPTQDNWGYDPRNYDVPEGQYATNANGNARIKEFKEMVLSLHREHIGVNMDVVYNHTFATQISDFDKIVPEYYYRTDDAGNYTNGSGTGNEIAAERPMVQKFIIDSLKYWVNEYHIDGFRFDLMALLGKDTMSKAASELHAINPGIALYGEPWTGGTSALPDDQLLTKGAQKGMGVAVFNDNLRNALDGNVFDSSAQGFATGATGLTDAIKNGVEGSINDFTSSPGETINYVTSHDSYTLWDKIALSNPNDSEADRIKMDELAQAVVMTSQGVPFMQGGEEMLRTKGGNDNSYNAGDAVNEFDWSRKAQYPDVFNYYSGLIHLRLDHPAFRMTTANEINSHLQFLNSPENTVAYELTDHVNKDKWGNIIVVYNPNKTVATINLPSGKWAINATSGKVGESTLGQAEGSVQVPGISMMILHQEVSPDHGKK

SEQ ID NO: 48808 - protein, 928 aa, Bacillus deramificans
DGNTTTIIVHYFRPAGDYQPWSLWMWPKDGGGAEYDFNQPADSFGAVASADIPGNPSQVGIIVRTQDWTKDVSADRYIDLSKGNEVWLVEGNSQIFYNEKDAEDAAKPAVSNAYLDASNQVLVKLSQPLTLGEGASGFTVHDDTANKDIPVTSVKDASLGQDVTAVLAGTFQHIFGGSDWAPDNHSTLLKKVTNNLYQFSGDLPEGNYQYKVALNDSWNNPSYPSDNINLTVPAGGAHVTFSYIPSTHAVYDTINNPNADLQVESGVKTDLVTVTLGEDPDVSHTLSIQTDGYQAKQVIPRNVLNSSQYYYSGDDLGNTYTQKATTFKVWAPTSTQVNVLLYDSATGSVTKIVPMTASGHGVWEATVNQNLENWYYMYEVTGQGSTRTAVDPYATAIAPNGTRGMIVDLAKTDPAGWNSDKHITPKNIEDEVIYEMDVRDFSIRPNSGMKNKGKYLALTEKGTKGPDNVKTGIDSLKQLGITHVQLMPVFASNSVDETDPTQDNWGYDPRNYDVPEGQYATNANGNARIKEFKEMVLSLHREHIGVNMDVVYNHTFATQISDFDKIVPEYYYRTDDAGNYTNGSGTGNEIAAERPMVQKFIIDSLKYWVNEYHIDGFRFDLMALLGKDTMSKAASELHAINPGIALYGEPWTGGTSALPDDQLLTKGAQKGMGVAVFNDNLRNALDGNVFDSSAQGFATGATGLTDAIKNGVEGSINDFTSSPGETINYVTSHDNYTLWDKIALSNPNDSEADRIKMDELAQAVVMTSQGVPFMQGGEEMLRTKGGNDNSYNAGDAVNEFDWSRKAQYPDVFNYYSGLIHLRLDHPAFRMTTANEINSHLQFLNSPENTVAYELTDHVNKDKWGNIIVVYNPNKTVATINLPSGKWAINATSGKVGESTLGQAEGSVQVPGISMMILHQEVSPDHGKK

SEQ ID NO: 48809 - protein, 928 aa, Bacillus deramificans
DGNTTTIIVHYFRPAGDYQPWSLWMWPKDGGGAEYDFNQPADSFGAVASADIPGNPSQVGIIVRTQDWTKDVSADRYIDLSKGNEVWLVEGNSQIFYNEKDAEDAAKPAVSNAYLDASNQVLVKLSQPLTLGEGASGFTVHDDTANKDIPVTSVKDASLGQDVTAVLAGTFQHIFGGSDWAPDNHSTLLKKVTNNLYQFSGDLPEGNYQYKVALNDSWNNPSYPSDNINLTVPAGGAHVTFSYIPSTHAVYDTINNPNADLQVESGVKTDLVTVTLGEDPDVSHTLSIQTDGYQAKQVIPRNVLNSSQYYYSGDDLGNTYTQKATTFKVWAPTSTQVNVLLYDSATGSVTKIVPMTASGHGVWEATVNQNLENWYYMYEVTGQGSTRTAVDPYATAIAPNGTRGMIVDLAKTDPAGWNSDKHITPKNIEDEVIYEMDVRDFSIDPNSGMKNKGKYLALTEKGTKGPDNVKTGIDSLKQLGITHVHLMPVFASNSVDETDPTQDNWGYDPRNYDVPEGQYATNANGNARIKEFKEMVLSLHREHIGVNMDVVYNHTFATQISDFDKIVPEYYYRTDDAGNYTNGSGTGNEIAAERPMVQKFIIDSLKYWVNEYHIDGFRFDLMALLGKDTMSKAASELHAINPGIALYGEPWTGGTSALPDDQLLTKGAQKGMGVAVFNDNLRNALDGNVFDSSAQGFATGATGLTDAIKNGVEGSINDFTSSPGETINYVTSHDNYTLWDKIALSNPNDSEADRIKMDELAQAVVMTSQGVPFMQGGEEMLRTKGGNDNSYNAGDAVNEFDWSRKAQYPDVFNYYSGLIHLRLDHPAFRMTTANEINSHLQFLNSPENTVAYELTDHVNKDKWGNIIVVYNPNKTVATINLPSGKWAINATSGKVGESTLGQAEGSVQVPGISMMILHQEVSPDHGKK

SEQ ID NO: 48810 - protein, 928 aa, Bacillus deramificans
DGNTTTIIVHYFRPAGDYQPWSLWMWPKDGGGAEYDFNQPADSFGAVASADIPGNPSQVGIIVRTQDWTKDVSADRYIDLSKGNEVWLVEGNSQIFYNEKDAEDAAKPAVSNAYLDASNQVLVKLSQPLTLGEGASGFTVHDDTANKDIPVTSVKDASLGQDVTAVLAGTFQHIFGGSDWAPDNHSTLLKKVTNNLYQFSGDLPEGNYQYKVALNDSWNNPSYPSDNINLTVPAGGAHVTFSYIPSTHAVYDTINNPNADLQVESGVKTDLVTVTLGEDPDVSHTLSIQTDGYQAKQVIPRNVLNSSQYYYSGDDLGNTYTQKATTFKVWAPTSTQVNVLLYDSATGSVTKIVPMTASGHGVWEATVNQNLENWYYMYEVTGQGSTRTAVDPYATAIAPNGTRGMIVDLAKTDPAGWNSDKHITPKNIEDEVIYEMDVRDFSIDPNSGMKNKGKYLALTEKGTKGPDNVKTGIDSLKQLGITHVQLMPVFASNSVDETDPTQDNWGYDPRNYDVPEGQYATNANGNARIKEFKEMVLSLHREHIGVNMDVVYNHTFATQISPFDKIVPEYYYRTDDAGNYTNGSGTGNEIAAERPMVQKFIIDSLKYWVNEYHIDGFRFDLMALLGKDTMSKAASELHAINPGIALYGEPWTGGTSALPDDQLLTKGAQKGMGVAVFNDNLRNALDGNVFDSSAQGFATGATGLTDAIKNGVEGSINDFTSSPGETINYVTSHDNYTLWDKIALSNPNDSEADRIKMDELAQAVVMTSQGVPFMQGGEEMLRTKGGNDNSYNAGDAVNEFDWSRKAQYPDVFNYYSGLIHLRLDHPAFRMTTANEINSHLQFLNSPENTVAYELTDHVNKDKWGNIIVVYNPNKTVATINLPSGKWAINATSGKVGESTLGQAEGSVQVPGISMMILHQEVSPDHGKK

SEQ ID NO: 48811 - protein, 928 aa, Bacillus deramificans
DGNTTTIIVHYFRPAGDYQPWSLWMWPKDGGGAEYDFNQPADSFGAVASADIPGNPSQVGIIVRTQDWTKDVSADRYIDLSKGNEVWLVEGNSQIFYNEKDAEDAAKPAVSNAYLDASNQVLVKLSQPLTLGEGASGFTVHDDTANKDIPVTSVKDASLGQDVTAVLAGTFQHIFGGSDWAPDNHSTLLKKVTNNLYQFSGDLPEGNYQYKVALNDSWNNPSYPSDNINLTVPAGGAHVTFSYIPSTHAVYDTINNPNADLQVESGVKTDLVTVTLGEDPDVSHTLSIQTDGYQAKQVIPRNVLNSSQYYYSGDDLGNTYTQKATTFKVWAPTSTQVNVLLYDSATGSVTKIVPMTASGHGVWEATVNQNLENWYYMYEVTGQGSTRTAVDPYATAIAPNGTRGMIVDLAKTDPAGWNSDKHITPKNIEDEVIYEMDVRDFSIDPNSGMKNKGKYLALTEKGTKGPDNVKTGIDSLKQLGITHVQLMPVFASNSVDETDPTQDNWGYDPRNYDVPEGQYATNANGNARIKEFKEMVLSLHREHIGVNMDVVYNHTFATQISDFDKIVPEYYYRTDDAGNYTNGSGTGNEIAAERPMVQKFIIDSLKYWVNEYHIDGFRFDLMALLGKDTMSKAASELHAINPGIALYGEPWTGGTSALPDDQLLTKGAQKGMGVAVFNDNLRNALDGNVFDSSAQGFATGATGLTDAIKNGVEGSINDFTSSPGETINYVTSHDNYTLWDKIALSNPNDSEADRIKMDELAQAVVMTSQGVPFMQGGEEMLRTKGGNDLSYNAGDAVNEFDWSRKAQYPDVFNYYSGLIHLRLDHPAFRMTTANEINSHLQFLNSPENTVAYELTDHVNKDKWGNIIVVYNPNKTVATINLPSGKWAINATSGKVGESTLGQAEGSVQVPGISMMILHQEVSPDHGKK

SEQ ID NO: 48812 - protein, 931 aa, Bacillus deramificans
DGNTTTIIVHYFRPAGDYQPWSLWMWPKDGGGAEYDFNQPADSFGAVASADIPGNPSQVGIIVRTQDWTKDVSADRYIDLSKGNEVWLVEGNSQIFYNEKDAEDAAKPAVSNAYLDASNQVLVKLSQPLTLGEGASGFTVHDDTANKDIPVTSVKDASLGQDVTAVLAGTFQHIFGGSDWAPDNHSTLLKKVTNNLYQFSGDLPEGNYQYKVALNDSWNNPSYPSDNINLTVPAGGAHVTFSYIPSTHAVYDTINNPNADLQVESGVKTDLVTVTLGEDPDVSHTLSIQTDGYQAKQVIPRNVLNKEFDSQYYYSGDDLGNTYTQKATTFKVWAPTSTQVNVLLYDSATGSVTKIVPMTASGHGVWEATVNQNLENWYYMYEVTGQGSTRTAVDPYATAIAPNGTRGMIVDLAKTDPAGWNSDKHITPKNIEDEVIYEMDVRDFSIDPNSGMKNKGKYLALTEKGTKGPDNVKTGIDSLKQLGITHVQLMPVFASNSVDETDPTQDNWGYDPRNYDVPEGQYATNANGNARIKEFKEMVLSLHREHIGVNMDVVYNHTFATQISDFDKIVPEYYYRTDDAGNYTNGSGTGNEIAAERPMVQKFIIDSLKYWVNEYHIDGFRFDLMALLGKDTMSKAASELHAINPGIALYGEPWTGGTSALPDDQLLTKGAQKGMGVAVFNDNLRNALDGNVFDSSAQGFATGATGLTDAIKNGVEGSINDFTSSPGETINYVTSHDNYTLWDKIALSNPNDSEADRIKMDELAQAVVMTSQGVPFMQGGEEMLRTKGGNDNSYNAGDAVNEFDWSRKAQYPDVFNYYSGLIHLRLDHPAFRMTTANEINSHLQFLNSPENTVAYELTDHVNKDKWGNIIVVYNPNKTVATINLPSGKWAINATSGKVGESTLGQAEGSVQVPGISMMILHQEVSPDHGKK

SEQ ID NO: 48813 - protein, 931 aa, Bacillus deramificans
DGNTTTIIVHYFRPAGDYQPWSLWMWPKDGGGAEYDFNQPADSFGAVASADIPGNPSQVGIIVRTQDWTKDVSADRYIDLSKGNEVWLVEGNSQIFYNEKDAEDAAKPAVSNAYLDNYHRSNQVLVKLSQPLTLGEGASGFTVHDDTANKDIPVTSVKDASLGQDVTAVLAGTFQHIFGGSDWAPDNHSTLLKKVTNNLYQFSGDLPEGNYQYKVALNDSWNNPSYPSDNINLTVPAGGAHVTFSYIPSTHAVYDTINNPNADLQVESGVKTDLVTVTLGEDPDVSHTLSIQTDGYQAKQVIPRNVLNSSQYYYSGDDLGNTYTQKATTFKVWAPTSTQVNVLLYDSATGSVTKIVPMTASGHGVWEATVNQNLENWYYMYEVTGQGSTRTAVDPYATAIAPNGTRGMIVDLAKTDPAGWNSDKHITPKNIEDEVIYEMDVRDFSIDPNSGMKNKGKYLALTEKGTKGPDNVKTGIDSLKQLGITHVQLMPVFASNSVDETDPTQDNWGYDPRNYDVPEGQYATNANGNARIKEFKEMVLSLHREHIGVNMDVVYNHTFATQISDFDKIVPEYYYRTDDAGNYTNGSGTGNEIAAERPMVQKFIIDSLKYWVNEYHIDGFRFDLMALLGKDTMSKAASELHAINPGIALYGEPWTGGTSALPDDQLLTKGAQKGMGVAVFNDNLRNALDGNVFDSSAQGFATGATGLTDAIKNGVEGSINDFTSSPGETINYVTSHDNYTLWDKIALSNPNDSEADRIKMDELAQAVVMTSQGVPFMQGGEEMLRTKGGNDNSYNAGDAVNEFDWSRKAQYPDVFNYYSGLIHLRLDHPAFRMTTANEINSHLQFLNSPENTVAYELTDHVNKDKWGNIIVVYNPNKTVATINLPSGKWAINATSGKVGESTLGQAEGSVQVPGISMMILHQEVSPDHGKK

SEQ ID NO: 48814 - protein, 928 aa, Bacillus deramificans
DGNTTTIIVHYFRPAGDYQPWSLWMWPKDGGGAEYDFNQPADSFGAVASADIPGNPSQVGIIVRTQDWTKDVSADRYIDLSKGNEVWLVEGNSQIFYNEKDAEDAAKPAVSNAYLDASNQVLVKLSQPLTLGEGASGFTVHDDTANKDIPVTSVKDASLGQDVTAVLAGTFQHIFGGSDWAPDNHSTLLKKVTNNLYQFSGDLPEGNYQYKVALNDSWNNPSYPSDNINLTVPAGGAHVTFSYIPSTHAVYDTINNPNADLQVESGVKTDLVTVTLGEDPDVSHTLSIQTDGYQAKQVIPRNVLNSSQYYYSGDDLGNTYTQKATTFKVWAPTSTQVNVLLYDSATGSVTKIVPMTASGHGVWEATVNQNLENWYYMYEVTGQGSTRTAVDPYATAIAPNGTRGMIVDLAKTDPAGWNSDKHITPKNIEDEVIYEMHVRDFSIDPNSGMKNKGKYLALTEKGTKGPDNVKTGIDSLKQLGITHVQLMPVFASNSVDETDPTQYNWGYDPRNYDVPEGQYATNANGNARIKEFKEMVLSLHREHIGVNMDVVYNHTFATQISDFDKIVPEYYYRTDDAGNYTNGSGTGNEIAAERPMVQKFIIDSLKYWVNEYHIDGFRFDLMALLGKDTMSKAASELHAINPGIALYGEPWTGGTSALPDDQLLTKGAQKGMGVAVFNDNLRNALDGNVFDSSAQGFATGATGLTDAIKNGVEGSINDFTSSPGETINYVTSHDNYTLWDKIALSNPNDSEADRIKMDELAQAVVMTSQGVPFMQGGEEMLRTKGGNDNSYNAGDAVNEFDWSRKAQYPDVFNYYSGLIHLRLDHPAFRMTTANEINSHLQFLNSPENTVAYELTDHVNKDKWGNIIVVYNPNKTVATINLPSGKWAINATSGKVGESTLGQAEGSVQVPGISMMILHQEVSPDHGKK

SEQ ID NO: 48815 - protein, 934 aa, Bacillus deramificans
DGNTTTIIVHYFRPAGDYQPWSLWMWPKDGGGAEYDFNQPADSFGAVASADIPGNPSQVGIIVRTQDWTKDVSADRYIDLSKGNEVWLVEGNSQIFYNEKDAEDAAKPAVSNAYLDNYHRSNQVLVKLSQPLTLGEGASGFTVHDDTANKDIPVTSVKDASLGQDVTAVLAGTFQHIFGGSDWAPDNHSTLLKKVTNNLYQFSGDLPEGNYQYKVALNDSWNNPSYPSDNINLTVPAGGAHVTFSYIPSTHAVYDTINNPNADLQVESGVKTDLVTVTLGEDPDVSHTLSIQTDGYQAKQVIPRNVLNKEFDSQYYYSGDDLGNTYTQKATTFKVWAPTSTQVNVLLYDSATGSVTKIVPMTASGHGVWEATVNQNLENWYYMYEVTGQGSTRTAVDPYATAIAPNGTRGMIVDLAKTDPAGWNSDKHITPKNIEDEVIYEMDVRDFSIDPNSGMKNKGKYLALTEKGTKGPDNVKTGIDSLKQLGITHVQLMPVFASNSVDETDPTQDNWGYDPRNYDVPEGQYATNANGNARIKEFKEMVLSLHREHIGVNMDVVYNHTFATQISDFDKIVPEYYYRTDDAGNYTNGSGTGNEIAAERPMVQKFIIDSLKYWVNEYHIDGFRFDLMALLGKDTMSKAASELHAINPGIALYGEPWTGGTSALPDDQLLTKGAQKGMGVAVFNDNLRNALDGNVFDSSAQGFATGATGLTDAIKNGVEGSINDFTSSPGETINYVTSHDNYTLWDKIALSNPNDSEADRIKMDELAQAVVMTSQGVPFMQGGEEMLRTKGGNDNSYNAGDAVNEFDWSRKAQYPDVFNYYSGLIHLRLDHPAFRMTTANEINSHLQFLNSPENTVAYELTDHVNKDKWGNIIVVYNPNKTVATINLPSGKWAINATSGKVGESTLGQAEGSVQVPGISMMILHQEVSPDHGKK

SEQ ID NO: 48816 - protein, 928 aa, Bacillus deramificans
DGNTTTIIVHYFRPAGDYQPWSLWMWPKDGGGAEYDFNQPADSFGAVASADIPGNPSQVGIIVRTQDWTKDVSADRYIDLSKGNEVWLVEGNSQIFYNEKDAEDAAKPAVSNAYLDASNQVLVKLSQPLTLGEGASGFTVHDDTANKDIPVTSVKDASLGQDVTAVLAGTFQHIFGGSDWAPDNHSTLLKKVTNNLYQFSGDLPEGNYQYKVALNDSWNNPSYPSDNINLTVPAGGAHVTFSYIPSTHAVYDTINNPNADLQVESGVKTDLVTVTLGEDPDVSHTLSIQTDGYQAKQVIPRNVLNSSQYYYSGDDLGNTYTQKATTFKVWAPTSTQVNVLLYDSATGSVTKIVPMTASGHGVWEATVNQNLENWYYMYEVTGQGSTRTAVDPYATAIAPNGTRGMIVDLAKTDPAGWNSDKHITPKNIEDEVIYEMHVRDFSIDPNSGMKNKGKYLALTEKGTKGPDNVKTGIDSLKQLGITHVQLMPVFASNSSDETDPTQYNWGYDPRNYDVPEGQYATNANGNARIKEFKEMVLSLHREHIGVNMDVVYNHTFATQISDFDKIVPEYYYRTDDAGNYTNGSGTGNEIAAERPMVQKFIIDSLKYWVNEYHIDGFRFDLMALLGKDTMSKAASELHAINPGIALYGEPWTGGTSALPDDQLLTKGAQKGMGVAVFNDNLRNALDGNVFDSSAQGFATGATGLTDAIKNGVEGSINDFTSSPGETINYVTSHDNYTLWDKIALSNPNDSEADRIKMDELAQAVVMTSQGVPFMQGGEEMLRTKGGNDNSYNAGDAVNEFDWSRKAQYPDVFNYYSGLIHLRLDHPAFRMTTANEINSHLQFLNSPENTVAYELTDHVNKDKWGNIIVVYNPNKTVATINLPSGKWAINATSGKVGESTLGQAEGSVQVPGISMMILHQEVSPDHGKK

SEQ ID NO: 48817 - protein, 928 aa, Bacillus deramificans
DGNTTTIIVHYFRPAGDYQPWSLWMWPKDGGGAEYDFNQPADSFGAVASADIPGNPSQVGIIVRTQDWTKDVSADRYIDLSKGNEVWLVEGNSQIFYNEKDAEDAAKPAVSNAYLDASNQVLVKLSQPLTLGEGASGFTVHDDTANKDIPVTSVKDASLGQDVTAVLAGTFQHIFGGSDWAPDNHSTLLKKVTNNLYQFSGDLPEGNYQYKVALNDSWNNPSYPSDNINLTVPAGGAHVTFSYIPSTHAVYDTINNPNADLQVESGVKTDLVTVTLGEDPDVSHTLSIQTDGYQAKQVIPRNVLNSSQYYYSGDDLGNTYTQKATTFKVWAPTSTQVNVLLYDSATGSVTKIVPMTASGHGVWEATVNQNLENWYYMYEVTGQGSTRTAVDPYATAIAPNGTRGMIVDLAKTDPAGWNSDKHITPKNIEDEVIYEMHVRDFSIDPNSGMKNKGKYLALTEKGTKGPDNVKTGIDSLKQLGITHVQLMPVFASNSNDETDPTQYNWGYDPRNYDVPEGQYATNANGNARIKEFKEMVLSLHREHIGVNMDVVYNHTFATQISDFDKIVPEYYYRTDDAGNYTNGSGTGNEIAAERPMVQKFIIDSLKYWVNEYHIDGFRFDLMALLGKDTMSKAASELHAINPGIALYGEPWTGGTSALPDDQLLTKGAQKGMGVAVFNDNLRNALDGNVFDSSAQGFATGATGLTDAIKNGVEGSINDFTSSPGETINYVTSHDNYTLWDKIALSNPNDSEADRIKMDELAQAVVMTSQGVPFMQGGEEMLRTKGGNDNSYNAGDAVNEFDWSRKAQYPDVFNYYSGLIHLRLDHPAFRMTTANEINSHLQFLNSPENTVAYELTDHVNKDKWGNIIVVYNPNKTVATINLPSGKWAINATSGKVGESTLGQAEGSVQVPGISMMILHQEVSPDHGKK

SEQ ID NO: 48818 - protein, 830 aa, Bacillus deramificans
EKDAEDAAKPAVSNAYLDASNQVLVKLSQPLTLGEGXSGFTVHDDTANKDIPVTSVKDASLGQDVTAVLAGTFQHIFGGSDWAPDNHSTLLKKVTNNLYQFSGDLPEGNYQYKVALNDSWNNPSYPSDNINLTVPAGGAHVTFSYIPSTHAVYDTINNPNADLQVESGVKTDLVTVTLGEDPDVSHTLSIQTDGYQAKQVIPRNVLNSSQYYYSGDDLGNTYTQKATTFKVWAPTSTQVNVLLYDSATGSVTKIVPMTASGHGVWEATVNQNLENWYYMYEVTGQGSTRTAVDPYATAIAPNGTRGMIVDLAKTDPAGWNSDKHITPKNIEDEVIYEMDVRDFSIDPNSGMKNKGKYLALTEKGTKGPDNVKTGIDSLKQLGITHVQLMPVFASNSVDETDPTQDNWGYDPRNYDVPEGQYATNANGNARIKEFKEMVLSLHREHIGVNMDVVYNHTFATQISDFDKIVPEYYYRTMIQVIIPTDQVLEMKLXAERPMVQKFIIDSLKYWVNEYHIDGFRFDLMALLGKDTMSKAASELHAINPGIALYGEPWTGGTSALPDDQLLTKGAQKGMGVAVFNDNLRNALDGNVFDSSAQGFATGATGLTDAIKNGVEGSINDFTSSPGETINYVTSHDNYTLWDKIALSNPNDSEADRIKMDELAQAVVMTSQGVPFMQGGEEMLRXKGGNDNSYNAGDAVNEFDWSRKAQYPDVFNYYSGLIHLRLDHPAFRMTTANEINSHLQFLNSPENTVAYELTDHVNKDKWGNIIVVYNPNKTVATINLPSGKWAINATSGKVGESTLGQAEGSVQVPGISMMILHQEVSPDHGKK

SEQ ID NO: 48819 - protein, 826 aa, Bacillus deramificans
EDAAKPAVSNAYLDASNQVLVKLSQPLTLGEGXSGFTVHDDTANKDIPVTSVKDASLGQDVTAVLAGTFQHIFGGSDWAPDNHSTLLKKVTNNLYQFSGDLPEGNYQYKVALNDSWNNPSYPSDNINLTVPAGGAHVTFSYIPSTHAVYDTINNPNADLQVESGVKTDLVTVTLGEDPDVSHTLSIQTDGYQAKQVIPRNVLNSSQYYYSGDDLGNTYTQKATTFKVWAPTSTQVNVLLYDSATGSVTKIVPMTASGHGVWEATVNQNLENWYYMYEVTGQGSTRTAVDPYATAIAPNGTRGMIVDLAKTDPAGWNSDKHITPKNIEDEVIYEMDVRDFSIDPNSGMKNKGKYLALTEKGTKGPDNVKTGIDSLKQLGITHVQLMPVFASNSVDETDPTQDNWGYDPRNYDVPEGQYATNANGNARIKEFKEMVLSLHREHIGVNMDVVYNHTFATQISDFDKIVPEYYYRTMIQVIIPTDQVLEMKLXAERPMVQKFIIDSLKYWVNEYHIDGFRFDLMALLGKDTMSKAASELHAINPGIALYGEPWTGGTSALPDDQLLTKGAQKGMGVAVFNDNLRNALDGNVFDSSAQGFATGATGLTDAIKNGVEGSINDFTSSPGETINYVTSHDNYTLWDKIALSNPNDSEADRIKMDELAQAVVMTSQGVPFMQGGEEMLRXKGGNDNSYNAGDAVNEFDWSRKAQYPDVFNYYSGLIHLRLDHPAFRMTTANEINSHLQFLNSPENTVAYELTDHVNKDKWGNIIVVYNPNKTVATINLPSGKWAINATSGKVGESTLGQAEGSVQVPGISMMILHQEVSPDHGKK

SEQ ID NO: 48820 - protein, 933 aa, Bacillus acidopullulyticus
DSTSTEVIVHYHRFDSNYANWDLWMWPYQPVNGNGAAYEFSGKDDFGVKADVQVPGDDTQVGLIVRTNDWSQKNTSDDLHIDLTKGHEIWIVQGDPNIYYNLSDAQAAATPKAVSNAYLDASNQVLVKLSQPFTLGEGASGFTVHDDTVNKDIPVTSVTDASLGQNVTAVLAGTFQHIFGGSDWAPDNHSTLLKKVNNNLYQFSGDLPEGNYQYKVALNDSWNNPSYPSNNIDLTVPTGGAHVTFSYVPSTHAVYDSINNPGADLPVNGSGVKTDLVTVTLGEDPDVSHTLSIQTDGYQAKQVISRNVLDSSQYYYSGDDLGNTYTHKATTFKVWAPTSTQVNVLLYNSATGSVTKTVPMTASGHGVWEATVNQNLENWYYMYEVTGQGSTRTAVDPYATAIAPNGTRGMIVDLAKTDPAGWNSDKHITPKNIEDEVIYEMDVRDFSIDPNSGMKNKGKYLALTEKGTKGPDNVKTGIDSLKQLGITHVQLMPVFAFNSVDETDPTQDNWGYDPRNYDVPEGQYATNANGTARIKEFKEMVLSLHREHIGVNMDVVYNHTFATQISDFDKIVPEYYYRTDDAGNYTNGSGTGNEIAAERPMVQKFIIDSLKYWVNEYHIDGFRFDLMALLGKDTMSKAASELHAINPGIALYGEPWTGGTSALPEDQLLTKGAQKGMGVAVFNDNLRNALDGNVFDSSAQGFATGATGLTDAIKNGVEGSINDFTSSPGETINYVTSHDNYTLWDKIALSNPNDSEADRIKMDELAQAVVMTSQGVPFMQGGEEMLRTKGGNDNSYNAGDTVNEFDWSRKAQYPDVFNYYSGLIHLRLDHPAFRMTTANEINSHLQFLNSPENTVAYELTDHVNKDKWGNIIVVYNPNKTAATINLPSGKWAINATSGKVGESTLGQAEGSVQVPGISMMILHQEVSPDHGKK

SEQ ID NO: 48821 - protein, 957 aa, Bacillus deramificans
MAKKLIYVCLSVCLVLTWAFNVKGQSAHADGNTTTIIVHYFCPAGDYQPWSLWMWPKDGGGAEYDFNQPADSFGAVASADIPGNPSQVGIIVRTQDWTKDVSADRYIDLSKGNEVWLVEGNSQIFYNEKDAEDAAKPAVSNAYLDASNQVLVKLSQPLTLGEGXSGFTVHDDTANKDIPVTSVKDASLGQDVTAVLAGTFQHIFGGSDWAPDNHSTLLKKVTNNLYQFSGDLPEGNYQYKVALNDSWNNPSYPSDNINLTVPAGGAHVTFSYIPSTHAVYDTINNPNADLQVESGVKTDLVTVTLGEDPDVSHTLSIQTDGYQAKQVIPRNVLNSSQYYYSGDDLGNTYTQKATTFKVWAPTSTQVNVLLYDSATGSVTKIVPMTASGHGVWEATVNQNLENWYYMYEVTGQGSTRTAVDPYATAIAPNGTRGMIVDLAKTDPAGWNSDKHITPKNIEDEVIYEMDVRDFSIDPNSGMKNKGKYLALTEKGTKGPDNVKTGIDSLKQLGITHVQLMPVFASNSVDETDPTQDNWGYDPRNYDVPEGQYATNANGNARIKEFKEMVLSLHREHIGVNMDVVYNHTFATQISDFDKIVPEYYYRTMMQVIIPTDQVLEMKLXAERPMVQKFIIDSLKYWVNEYHIDGFRFDLMALLGKDTMSKAASELHAINPGIALYGEPWTGGTSALPDDQLLTKGAQKGMGVAVFNDNLRNALDGNVFDSSAQGFATGATGLTDAIKNGVEGSINDFTSSPGETINYVTSHDNYTLWDKIALSNPNDSEADRIKMDELAQAVVMTSQGVPFMQGGEEMLRXKGGNDNSYNAGDAVNEFDWSRKAQYPDVFNYYSGLIHLRLDHPAFRMTTANEINSHLQFLNSPENTVAYELTDHVNKDKWGNIIVVYNPNKTVATINLPSGKWAINATSGKVGESTLGQAEGSVQVPGISMMILHQEVSPDHGKK

SEQ ID NO: 48822 - protein, 956 aa, Unidentified
MAKKLIYVCLSVCLVLTWAFNVKGQSAHADGNTTTIIVHYFCPAGDYQPWSLWMWPKDGGGAEYDFNQPADSFGAVASADIPGNPSQVGIIVRTQDWTKDVSADRYIDLSKGNEVWLVEGNSQIFYNEKDAEDAAKPAVSNAYLDASNQVLVKLSQPLTLGEGXSGFTVHDDTANKDIPVTSVKDASLGQDVTAVLAGTFQHIFGGSDWAPDNHSTLLKKVTNNLYQFSGDLPEGNYQYKVALNDSWNNSYPSDNINLTVPAGGAHVTFSYIPSTHAVYDTINNPNADLQVESGVKTDLVTVTLGEDPDVSHTLSIQTDGYQAKQVIPRNVLNSSQYYYSGDDLGNTYTQKATTFKVWAPTSTQVNVLLYDSATGSVTKIVPMTASGHGVWEATVNQNLENWYYMYEVTGQGSTRTAVDPYATAIAPNGTRGMIVDLAKTDPAGWNSDKHITPKNIEDEVIYEMDVRDFSIDPNSGMKNKGKYLALTEKGTKGPDNVKTGIDSLKQLGITHVQLMPVFASNSVDETDPTQDNWGYDPRNYDVPEGQYATNANGNARIKEFKEMVLSLHREHIGVNMDVVYNHTFATQISDFDKIVPEYYYRTMIQVIIPTDQVLEMKLXAERPMVQKFIIDSLKYWVNEYHIDGFRFDLMALLGKDTMSKAASELHAINPGIALYGEPWTGGTSALPDDQLLTKGAQKGMGVAVFNDNLRNALDGNVFDSSAQGFATGATGLTDAIKNGVEGSINDFTSSPGETINYVTSHDNYTLWDKIALSNPNDSEADRIKMDELAQAVVMTSQGVPFMQGGEEMLRXKGGNDNSYNAGDAVNEFDWSRKAQYPDVFNYYSGLIHLRLDHPAFRMTTANEINSHLQFLNSPENTVAYELTDHVNKDKWGNIIVVYNPNKTVATINLPSGKWAINATSGKVGESTLGQAEGSVQVPGISMMILHQEVSPDHGKK

SEQ ID NO: 48823 - protein, 954 aa, Bacillus deramificans
QKRLYARLLTLLFALIFLLPHSAASADGNTTTIIVHYFRPAGDYQPWSLWMWPKDGGGAEYDFNQPADSLGAVASADIPGNPSQVGIIVRTQDWTKDVSADRYIDLSKGNEVWLVEGNSQIFYSEKDAEDAAKPAVSNAYLDASNQVLVKLSQPLTLGEGASGFTVHDDTANKDIPVTSVKDASLGQDVTAVLAGTFQHIFGGSDWAPDNHSTLLKKVTNNLYQFSGDLPEGNYQYKVALNDSWNNPSYPSDNINLTVPAGGAHVTFSYIPSTHAVYDTINNPNADLQVESGVKTDLVTVTLGEDPDVSHTLSIQTDGYQAKQVIPRNVLNSSQYYYSGDDLGNTYTQKATTFKVWAPTSTQVNVLLYDSATGSVTKIVPMTASGHGVWEATVNQNLENWYYMYEVTGQGSTRTAVDPYATAIAPNGTRGMIVDLAKTDPAGWNSDKHITPKNIEDEVIYEMDVRDFSIDPNSGMKNKGKYLALTEKGTKGPDNVKTGIDSLKQLGITHVQLMPVFASNSVDETDPTQDNWGYDPRNYDVPEGQYATNANGNARIKEFKEMVLSLHREHIGVNMDVVYNHTFATQISDFDKIVPEYYYRTDDAGNYTNGSGTGNEIAAERPMVQKFIIDSLKYWVNEYHIDGFRFDLMALLGKDTMSKAASELHAINPGIALYGEPWTGGTSALPDDQLLTKGAQKGMGVAVFNDNLRNALDGNVFDSSAQGFATGATGLTDAIKNGVEGSINDFTSSPGETINYVTSHDNYTLWDKIALSNPNDSEADRIKMDELAQAVVMTSQGVPFMQGGEEMLRTKGGNDNSYNAGDAVNEFDWSRKAQYPDVFNYYSGLIHLRLDHPAFRMTTANEINSHLQFLNSPENTVAYELTDHVNKDKWGNIIVVYNPNKTVATINLPSGKWAINATSGKVGESTLGQAEGSVQVPGISMMILHQEVSPDHGKK

SEQ ID NO: 48824 - protein, 928 aa, Bacillus deramificans
DGNTTTIIVHYFCPAGDYQPWSLWMWPKDGGGAEYDFNQPADSFGAVASADIPGNPSQVGIIVRTQDWTKDVSADRYIDLSKGNEVWLVEGNSQIFYNEKDAEDAAKPAVSNAYLDASNQVLVKLSQPLTLGEGXSGFTVHDDTANKDIPVTSVKDASLGQDVTAVLAGTFQHIFGGSDWAPDNHSTLLKKVTNNLYQFSGDLPEGNYQYKVALNDSWNNPSYPSDNINLTVPAGGAHVTFSYIPSTHAVYDTINNPNADLQVESGVKTDLVTVTLGEDPDVSHTLSIQTDGYQAKQVIPRNVLNSSQYYYSGDDLGNTYTQKATTFKVWAPTSTQVNVLLYDSATGSVTKIVPMTASGHGVWEATVNQNLENWYYMYEVTGQGSTRTAVDPYATAIAPNGTRGMIVDLAKTDPAGWNSDKHITPKNIEDEVIYEMDVRDFSIDPNSGMKNKGKYLALTEKGTKGPDNVKTGIDSLKQLGITHVQLMPVFASNSVDETDPTQDNWGYDPRNYDVPEGQYATNANGNARIKEFKEMVLSLHREHIGVNMDVVYNHTFATQISDFDKIVPEYYYRTMMQVIIPTDQVLEMKLXAERPMVQKFIIDSLKYWVNEYHIDGFRFDLMALLGKDTMSKAASELHAINPGIALYGEPWTGGTSALPDDQLLTKGAQKGMGVAVFNDNLRNALDGNVFDSSAQGFATGATGLTDAIKNGVEGSINDFTSSPGETINYVTSHDNYTLWDKIALSNPNDSEADRIKMDELAQAVVMTSQGVPFMQGGEEMLRXKGGNDNSYNAGDAVNEFDWSRKAQYPDVFNYYSGLIHLRLDHPAFRMTTANEINSHLQFLNSPENTVAYELTDHVNKDKWGNIIVVYNPNKTVATINLPSGKWAINATSGKVGESTLGQAEGSVQVPGISMMILHQEVSPDHGKK

SEQ ID NO: 48825 - protein, 928 aa, Bacillus deramificans
DGNTTTIIVHYFCPAGDYQPWSLWMWPKDGGGAEYDFNQPADSFGAVASADIPGNPSQVGIIVRTQDWTKDVSADRYIDLSKGNEVWLVEGNSQIFYNEKDAEDAAKPAVSNAYLDASNQVLVKLSQPLTLGEGXSGFTVHDDTANKDIPVTSVKDASLGQDVTAVLAGTFQHIFGGSDWAPDNHSTLLKKVTNNLYQFSGDLPEGNYQYKVALNDSWNNPSYPSDNINLTVPAGGAHVTFSYIPSTHAVYDTINNPNADLQVESGVKTDLVTVTLGEDPDVSHTLSIQTDGYQAKQVIPRNVLNSSQYYYSGDDLGNTYTQKATTFKVWAPTSTQVNVLLYDSATGSVTKIVPMTASGHGVWEATVNQNLENWYYMYEVTGQGSTRTAVDPYATAIAPNGTRGMIVDLAKTDPAGWNSDKHITPKNIEDEVIYEMDVRDFSIDPNSGMKNKGKYLALTEKGTKGPDNVKTGIDSLKQLGITHVQLMPVFASNSVDETDPTQDNWGYDPRNYDVPEGQYATNANGNARIKEFKEMVLSLHREHIGVNMDVVYNHTFATQISDFDKIVPEYYYRTMIQVIIPTDQVLEMKLXAERPMVQKFIIDSLKYWVNEYHIDGFRFDLMALLGKDTMSKAASELHAINPGIALYGEPWTGGTSALPDDQLLTKGAQKGMGVAVFNDNLRNALDGNVFDSSAQGFATGATGLTDAIKNGVEGSINDFTSSPGETINYVTSHDNYTLWDKIALSNPNDSEADRIKMDELAQAVVMTSQGVPFMQGGEEMLRXKGGNDNSYNAGDAVNEFDWSRKAQYPDVFNYYSGLIHLRLDHPAFRMTTANEINSHLQFLNSPENTVAYELTDHVNKDKWGNIIVVYNPNKTVATINLPSGKWAINATSGKVGESTLGQAEGSVQVPGISMMILHQEVSPDHGKK

SEQ ID NO: 48826 - protein, 954 aa, Bacillus deramificans
QKRLYARLLTLLFALIFLLPHSAASADGNTTTIIVHYFRPAGDYQPWSLWMWPKDGGGAEYDFNQPADSLGAVASADIPGNPSQVGIIVRTQDWTKDVSADRYIDLSKGNEVWLVEGNSQIFYSQKDAQDAAKPAVSNAYLDASNQVLVKLSQPLTLGEGASGFTVHDDTANKDIPVTSVKDASLGQDVTAVLAGTFQHIFGGSDWAPDNHSTLLKKVTNNLYQFSGDLPEGNYQYKVALNDSWNNPSYPSDNINLTVPAGGAHVTFSYIPSTHAVYDTINNPNADLQVESGVKTDLVTVTLGEDPDVSHTLSIQTDGYQAKQVIPRNVLNSSQYYYSGDDLGNTYTQKATTFKVWAPTSTQVNVLLYDSATGSVTKIVPMTASGHGVWEATVNQNLENWYYMYEVTGQGSTRTAVDPYATAIAPNGTRGMIVDLAKTDPAGWNSDKHITPKNIEDEVIYEMDVRDFSIDPNSGMKNKGKYLALTEKGTKGPDNVKTGIDSLKQLGITHVQLMPVFASNSVDETDPTQDNWGYDPRNYDVPEGQYATNANGNARIKEFKEMVLSLHREHIGVNMDVVYNHTFATQISDFDKIVPEYYYRTDDAGNYTNGSGTGNEIAAERPMVQKFIIDSLKYWVNEYHIDGFRFDLMALLGKDTMSKAASELHAINPGIALYGEPWTGGTSALPDDQLLTKGAQKGMGVAVFNDNLRNALDGNVFDSSAQGFATGATGLTDAIKNGVEGSINDFTSSPGETINYVTSHDNYTLWDKIALSNPNDSEADRIKMDELAQAVVMTSQGVPFMQGGEEMLRTKGGNDNSYNAGDAVNEFDWSRKAQYPDVFNYYSGLIHLRLDHPAFRMTTANEINSHLQFLNSPENTVAYELTDHVNKDKWGNIIVVYNPNKTVATINLPSGKWAINATSGKVGESTLGQAEGSVQVPGISMMILHQEVSPDHGKK

SEQ ID NO: 48827 - protein, 915 aa, Bacillus deramificans
DGNTTTIIVHYFRPAGDYQPWSLWMWPKDGGGAEYDFNQPADSFGAVASADIPGNPSQVGIIVRTQDWTKDVSADRYIDLSKGNEVWLVEGNSQIFYNEKDAEDAAKPAVSNAYLDASNQVLVKLSQPLTLGEGASGFTVHDDTANKDIPVTSVKDASLGQDVTAVLAGTFQHIFGGSDWAPDNHSTLLKKVTNNLYQFSGDLPEGNYQYKVAMSHSAQPVTSVQAVWPGRPYPLGATWDGLGVNFALYSESGVKTDLVTVTLGEDPDVSHTLSIQTDGYQAKQVIPRNVLNSSQYYYSGDDLGNTYTQKATTFKVWAPTSTQVNVLLYDSATGSVTKIVPMTASGHGVWEATVNQNLENWYYMYEVTGQGSTRTAVDPYATAIAPNGTRGMIVDLAKTDPAGWNSDKHITPKNIEDEVIYEMDVRDFSIDPNSGMKNKGKYLALTEKGTKGPDNVKTGIDSLKQLGITHVQLMPVFASNSVDETDPTQDNWGYDPRNYDVPEGQYATNANGNARIKEFKEMVLSLHREHIGVNMDVVYNHTFATQISDFDKIVPEYYYRTDDAGNYTNGSGTGNEIAAERPMVQKFIIDSLKYWVNEYHIDGFRFDLMALLGKDTMSKAASELHAINPGIALYGEPWTGGTSALPDDQLLTKGAQKGMGVAVFNDNLRNALDGNVFDSSAQGFATGATGLTDAIKNGVEGSINDFTSSPGETINYVTSHDNYTLWDKIALSNPNDSEADRIKMDELAQAVVMTSQGVPFMQGGEEMLRTKGGNDNSYNAGDAVNEFDWSRKAQYPDVFNYYSGLIHLRLDHPAFRMTTANEINSHLQFLNSPENTVAYELTDHVNKDKWGNIIVVYNPNKTVATINLPSGKWAINATSGKVGESTLGQAEGSVQVPGISMMILHQEVSPDHGKK

SEQ ID NO: 48828 - protein, 926 aa, Synthetic construct
DGNTTNIVVHYFRPSGDYTDWNLWMWPENGDGAEYDFNQPTDSYGEVASVDIPGNPSQVGIIVRKGNWDAKDIDSDRYIDLSKGHEIWLVQGNSQIFYSEKDAEAAAQPAVSNAYLDASNQVLVKLSQPFTLGEGSSGFTVHDDTANKDIPVTSVSDANQVTAVLAGTFQHIFGGSDWAPDNHNTLLKKVNSNLYQFSGNLPEGNYQYKVALNDSWNNPSYPSDNINLTVPAGGAHVTFSYIPSTHAVYDTINNPNADLQVESGVKTDLVTVTLGEDPDVSHTLSIQTDGYQAKQVIPRNVLNSSQYYYSGDDLGNTYTQKATTFKVWAPTSTQVNVLLYDSATGSVTKIVPMTASGHGVWEATVNQNLENWYYMYEVTGQGSTRTAVDPYATAIAPNGTRGMIVDLAKTDPAGWNSDKHITPKNIEDEVIYEMDVRDFSIDPNSGMKNKGKYLALTEKGTKGPDNVKTGIDSLKQLGITHVQLMPVFASNSVDETDPTQDNWGYDPRNYDVPEGQYATNANGNARIKEFKEMVLSLHREHIGVNMDVVYNHTFATQISDFDKIVPEYYYRTDDAGNYTNGSGTGNEIAAERPMVQKFIIDSLKFWVNEYHVDGFRFDLMALLGKDTMSKAATQLHAIDPGIALYGEPWTGGTSALPADQLLTKGAQKGMGVAVFNDNLRNGLDGSVFDSSAQGFATGATGLTDAIKNGVEGSINDFTASPGETINYVTSHDNYTLWDKIAQSNPNDSEADRIKMDELAQAIVMTSQGIPFMQGGEEMLRTKGGNDNSYNAGDAVNEFDWSRKAQYPDVFNYYSGLIHLRLDHPAFRMTTANEINSHLQFLNSPENTVAYELTDHVNKDKWGNIIVVYNPNKTVATINLPSGKWAINATSGKVGESTLGQAEGSVQVPGISMMILHQEVSPDHGKK

SEQ ID NO: 48829 - protein, 818 aa, Pullulanibacillus naganoensis
PAVSNAYLDASNQVLVKLSQPFTLGEGSSGFTVHDDTANKDIPVTSVSDANQVTAVLAGTFQHIFGGSDWAPDNHNTLLKKVNSNLYQFSGNLPEGNYQYKVALNDSWNNPSYPSDNINLTVPAGGAHVTFSYIPSTHAVYDTINNPNADLQVDSSGVKTDLVAVTLGENPDVSHTLSIQTEDYQAGQVIPRKVLDSSQYYYSGDDLGNTYTKNATTFKVWAPTSTQVNVLLYNSATGAVTKTVPMTASGHGVWEATVNQDLENWYYMYEVTGQGSTRTAVDPYATAIAPNGTRGMIVDLAKTDPAGWESDKHITPKNIEDEVIYEMDVRDFSIDSNSGMKNKGKYLALTEKGTKGPDNVKTGVDSLKQLGITHVQLQPVFAFNSVDENDPTQYNWGYDPRNYNVPEGQYATNANGTTRIKEFKEMVLSLHQDHIGVNMDVVYNHTFATQISDFDKIVPEYYYRTDDAGNYTNGSGTGNEIAAERPMVQKFIIDSLKFWVNEYHVDGFRFDLMALLGKDTMSKAATQLHAIDPGIALYGEPWTGGTSALPADQLLTKGAQKGMGVAVFNDNLRNGLDGSVFDSSAQGFATGATGLTDAIKNGVEGSINDFTASPGETINYVTSHDNYTLWDKIAQSNPNDSEADRIKMDELAQAIVMTSQGIPFMQGGEEMLRTKGGNDNSYNAGDVVNEFDWSRKAQYPDVFNYYSGLIHLRLDHPAFRMTTANEINSHLQFLNSPENTVAYELSDHANKDTWGNIVVIYNPNKTAETINLPSGKWEINATSGKVGESTLGQAEGSVQVPGISMMILHQEVSPSDGK

SEQ ID NO: 48830 - protein, 818 aa, Pullulanibacillus naganoensis
PAVSNAYLDASNQVLVKLSQPFTLGEGSSGFTVHDDTANKDIPVTSVSDANQVTAVLAGTFQHIFGGSDWAPDNHNTLLKKVNSNLYQFSGNLPEGNYQYKVALNDSWNNPSYPSDNINLTVPAGGAHVTFSYIPSTHAVYDTINNPNADLQVDSSGVKTDLVAVTLGENPDVSHTLSIQTEDYQAGQVIPRKVLDSSQYYYSGDDLGNTYTKNATTFKVWAPTSTQVNVLLYNSATGAVTKTVPMTASGHGVWEATVNQDLENWYYMYEVTGQGSTRTAVDPYATAIAPNGTRGMIVDLAKTDPAGWESDKHITPKNIEDEVIYEMHVRDFSIDSNSGMKNKGKYLALTEKGTKGPDNVKTGVDSLKQLGITHVQLQPVFAFNSVDENDPTQYNWGYDPRNYNVPEGQYATNANGTTRIKEFKEMVLSLHQDHIGVNMDVVYNHTFATQISDFDKIVPEYYYRTDDAGNYTNGSGTGNEIAAERPMVQKFIIDSLKFWVNEYHVDGFRFDLMALLGKDTMSKAATQLHAIDPGIALYGEPWTGGTSALPADQLLTKGAQKGMGVAVFNDNLRNGLDGSVFDSSAQGFATGATGLTDAIKNGVEGSINDFTASPGETINYVTSHDNYTLWDKIAQSNPNDSEADRIKMDELAQAIVMTSQGIPFMQGGEEMLRTKGGNDNSYNAGDVVNEFDWSRKAQYPDVFNYYSGLIHLRLDHPAFRMTTANEINSHLQFLNSPENTVAYELSDHANKDTWGNIVVIYNPNKTAETINLPSGKWEINATSGKVGESTLGQAEGSVQVPGISMMILHQEVSPSDGK

SEQ ID NO: 48831 - protein, 818 aa, Pullulanibacillus naganoensis
PAVSNAYLDASNQVLVKLSQPFTLGEGSSGFTVHDDTANKDIPVTSVSDANQVTAVLAGTFQHIFGGSDWAPDNHNTLLKKVNSNLYQFSGNLPEGNYQYKVALNDSWNNPSYPSDNINLTVPAGGAHVTFSYIPSTHAVYDTINNPNADLQVDSSGVKTDLVAVTLGENPDVSHTLSIQTEDYQAGQVIPRKVLDSSQYYYSGDDLGNTYTKNATTFKVWAPTSTQVNVLLYNSATGAVTKTVPMTASGHGVWEATVNQDLENWYYMYEVTGQGSTRTAVDPYATAIAPNGTRGMIVDLAKTDPAGWESDKHITPKNIEDEVIYEMDVRDFSIDSNSGMKNKGKYLALTEKGTKGPDNVKTGVDSLKQLGITHVQLQPVFAFNSVNENDPTQYNWGYDPRNYNVPEGQYATNANGTTRIKEFKEMVLSLHQDHIGVNMDVVYNHTFATQISDFDKIVPEYYYRTDDAGNYTNGSGTGNEIAAERPMVQKFIIDSLKFWVNEYHVDGFRFDLMALLGKDTMSKAATQLHAIDPGIALYGEPWTGGTSALPADQLLTKGAQKGMGVAVFNDNLRNGLDGSVFDSSAQGFATGATGLTDAIKNGVEGSINDFTASPGETINYVTSHDNYTLWDKIAQSNPNDSEADRIKMDELAQAIVMTSQGIPFMQGGEEMLRTKGGNDNSYNAGDVVNEFDWSRKAQYPDVFNYYSGLIHLRLDHPAFRMTTANEINSHLQFLNSPENTVAYELSDHANKDTWGNIVVIYNPNKTAETINLPSGKWEINATSGKVGESTLGQAEGSVQVPGISMMILHQEVSPSDGK

SEQ ID NO: 48832 - protein, 820 aa, Pullulanibacillus naganoensis
AQPAVSNAYLDASNQVLVKLSQPFTLGEGSSGFTVHDDTANKDIPVTSVSDANQVTAVLAGTFQHIFGGSDWAPDNHNTLLKKVNSNLYQFSGNLPEGNYQYKVALNDSWNNPSYPSDNINLTVPAGGAHVTFSYIPSTHAVYDTINNPNADLQVDSSGVKTDLVAVTLGENPDVSHTLSIQTEDYQAGQVIPRKVLDSSQYYYSGDDLGNTYTKNATTFKVWAPTSTQVNVLLYNSATGAVTKTVPMTASGHGVWEATVNQDLENWYYMYEVTGQGSTRTAVDPYATAIAPNGTRGMIVDLAKTDPAGWESDKHITPKNIEDEVIYEMDVRDFSIDSNSGMKNKGKYLALTEKGTKGPDNVKTGVDSLKQLGITHVQLQPVFAFNSVNENDPTQYNWGYDPRNYNVPEGQYATNANGTTRIKEFKEMVLSLHQDHIGVNMDVVYNHTFATQISDFDKIVPEYYYRTDDAGNYTNGSGTGNEIAAERPMVQKFIIDSLKFWVNEYHVDGFRFDLMALLGKDTMSKAATQLHAIDPGIALYGEPWTGGTSALPADQLLTKGAQKGMGVAVFNDNLRNGLDGSVFDSSAQGFATGATGLTDAIKNGVEGSINDFTASPGETINYVTSHDNYTLWDKIAQSNPNDSEADRIKMDELAQAIVMTSQGIPFMQGGEEMLRTKGGNDNSYNAGDVVNEFDWSRKAQYPDVFNYYSGLIHLRLDHPAFRMTTANEINSHLQFLNSPENTVAYELSDHANKDTWGNIVVIYNPNKTAETINLPSGKWEINATSGKVGESTLGQAEGSVQVPGISMMILHQEVSPSDGK

SEQ ID NO: 48833 - protein, 818 aa, Pullulanibacillus naganoensis
PAVSNAYLDASNQVLVKLSQPFTLGEGSSGFTVHDDTANKDIPVTSVSDANQVTAVLAGTFQHIFGGSDWAPDNHNTLLKKVNSNLYQFSGNLPEGNYQYKVALNDSWNNPSYPSDNINLTVPAGGAHVTFSYIPSTHAVYDTINNPNADLQVDSSGVKTDLVAVTLGENPDVSHTLSIQTEDYQAGQVIPRKVLDSSQYYYSGDDLGNTYTKNATTFKVWAPTSTQVNVLLYNSATGAVTKTVPMTASGHGVWEATVNQDLENWYYMYEVTGQGSTRTAVDPYATAIAPNGTRGMIVDLAKTDPAGWESDKHITPKNIEDEVIYEMDVRDFSIDSNSGMKNKGKYLALTEKGTKGPDNVKTGVDSLKQLGITHVQLQPVFAFNSVNENDPTQYNWGYDPRNYNVPEGQYATNPNGTTRIKEFKEMVLSLHQDHIGVNMDVVYNHTFATQISDFDKIVPEYYYRTDDAGNYTNGSGTGNEIAAERPMVQKFIIDSLKFWVNEYHVDGFRFDLMALLGKDTMSKAATQLHAIDPGIALYGEPWTGGTSALPADQLLTKGAQKGMGVAVFNDNLRNGLDGSVFDSSAQGFATGATGLTDAIKNGVEGSINDFTASPGETINYVTSHDNYTLWDKIAQSNPNDSEADRIKMDELAQAIVMTSQGIPFMQGGEEMLRTKGGNDNSYNAGDVVNEFDWSRKAQYPDVFNYYSGLIHLRLDHPAFRMTTANEINSHLQFLNSPENTVAYELSDHANKDTWGNIVVIYNPNKTAETINLPSGKWEINATSGKVGESTLGQAEGSVQVPGISMMILHQEVSPSDGK

SEQ ID NO: 48834 - protein, 818 aa, Pullulanibacillus naganoensis
PAVSNAYLDASNQVLVKLSQPFTLGEGSSGFTVHDDTANKDIPVTSVSDANQVTAVLAGTFQHIFGGSDWAPDNHNTLLKKVNSNLYQFSGNLPEGNYQYKVALNDSWNNPSYPSDNINLTVPAGGAHVTFSYIPSTHAVYDTINNPNADLQVDSSGVKTDLVAVTLGENPDVSHTLSIQTEDYQAGQVIPRKVLDSSQYYYSGDDLGNTYTKNATTFKVWAPTSTQVNVLLYNSATGAVTKTVPMTASGHGVWEATVNQDLENWYYMYEVTGQGSTRTAVDPYATAIAPNGTRGMIVDLAKTDPAGWESDKHITPKNIEDEVIYEMHVRDFSIDSNSGMKNKGKYLALTEKGTKGPDNVKTGVDSLKQLGITHVQLQPVFAFNSVNENDPTQYNWGYDPRNYNVPEGQYATNANGTTRIKEFKEMVLSLHQDHIGVNMDVVYNHTFATQISDFDKIVPEYYYRTDDAGNYTNGSGTGNEIAAERPMVQKFIIDSLKFWVNEYHVDGFRFDLMALLGKDTMSKAATQLHAIDPGIALYGEPWTGGTSALPADQLLTKGAQKGMGVAVFNDNLRNGLDGSVFDSSAQGFATGATGLTDAIKNGVEGSINDFTASPGETINYVTSHDNYTLWDKIAQSNPNDSEADRIKMDELAQAIVMTSQGIPFMQGGEEMLRTKGGNDNSYNAGDVVNEFDWSRKAQYPDVFNYYSGLIHLRLDHPAFRMTTANEINSHLQFLNSPENTVAYELSDHANKDTWGNIVVIYNPNKTAETINLPSGKWEINATSGKVGESTLGQAEGSVQVPGISMMILHQEVSPSDGK

SEQ ID NO: 48835 - protein, 818 aa, Pullulanibacillus naganoensis
PAVSNAYLDASNQVLVKLSQPFTLGEGSSGFTVHDDTANKDIPVTSVSDANQVTAVLAGTFQHIFGGSDWAPDNHNTLLKKVNSNLYQFSGNLPEGNYQYKVALNDSWNNPSYPSDNINLTVPAGGAHVTFSYIPSTHAVYDTINNPNADLQVDSSGVKTDLVAVTLGENPDVSHTLSIQTEDYQAGQVIPRKVLDSSQYYYSGDDLGNTYTKNATTFKVWAPTSTQVNVLLYNSATGAVTKTVPMTASGHGVWEATVNQDLENWYYMYEVTGQGSTRTAVDPYATAIAPNGTRGMIVDLAKTDPAGWESDKHITPKNIEDEVIYEMHVRDFSIDSNSGMKNKGKYLALTEKGTKGPDNVKTGVDSLKQLGITHVQLQPVFAFNSVDENDPTQYNWGYDPRNYNVPEGQYATNPNGTTRIKEFKEMVLSLHQDHIGVNMDVVYNHTFATQISDFDKIVPEYYYRTDDAGNYTNGSGTGNEIAAERPMVQKFIIDSLKFWVNEYHVDGFRFDLMALLGKDTMSKAATQLHAIDPGIALYGEPWTGGTSALPADQLLTKGAQKGMGVAVFNDNLRNGLDGSVFDSSAQGFATGATGLTDAIKNGVEGSINDFTASPGETINYVTSHDNYTLWDKIAQSNPNDSEADRIKMDELAQAIVMTSQGIPFMQGGEEMLRTKGGNDNSYNAGDVVNEFDWSRKAQYPDVFNYYSGLIHLRLDHPAFRMTTANEINSHLQFLNSPENTVAYELSDHANKDTWGNIVVIYNPNKTAETINLPSGKWEINATSGKVGESTLGQAEGSVQVPGISMMILHQEVSPSDGK

SEQ ID NO: 48836 - protein, 848 aa, Pullulanibacillus naganoensis
IDLSKGHEIWLVQGNSQIFYSEKDAEAAAQPAVSNAYLDASNQVLVKLSQPFTLGEGSSGFTVHDDTANKDIPVTSVSDANQVTAVLAGTFQHIFGGSDWAPDNHNTLLKKVNSNLYQFSGNLPEGNYQYKVALNDSWNNPSYPSDNINLTVPAGGAHVTFSYIPSTHAVYDTINNPNADLQVDSSGVKTDLVAVTLGENPDVSHTLSIQTEDYQAGQVIPRKVLDSSQYYYSGDDLGNTYTKNATTFKVWAPTSTQVNVLLYNSATGAVTKTVPMTASGHGVWEATVNQDLENWYYMYEVTGQGSTRTAVDPYATAIAPNGTRGMIVDLAKTDPAGWESDKHITPKNIEDEVIYEMDVRDFSIDSNSGMKNKGKYLALTEKGTKGPDNVKTGVDSLKQLGITHVQLQPVFAFNSVNENDPTQYNWGYDPRNYNVPEGQYATNANGTTRIKEFKEMVLSLHQDHIGVNMDVVYNHTFATQISDFDKIVPEYYYRTDDAGNYTNGSGTGNEIAAERPMVQKFIIDSLKFWVNEYHVDGFRFDLMALLGKDTMSKAATQLHAIDPGIALYGEPWTGGTSALPADQLLTKGAQKGMGVAVFNDNLRNGLDGSVFDSSAQGFATGATGLTDAIKNGVEGSINDFTASPGETINYVTSHDNYTLWDKIAQSNPNDSEADRIKMDELAQAIVMTSQGIPFMQGGEEMLRTKGGNDNSYNAGDVVNEFDWSRKAQYPDVFNYYSGLIHLRLDHPAFRMTTANEINSHLQFLNSPENTVAYELSDHANKDTWGNIVVIYNPNKTAETINLPSGKWEINATSGKVGESTLGQAEGSVQVPGISMMILHQEVSPSDGK

SEQ ID NO: 48837 - protein, 827 aa, Pullulanibacillus naganoensis
EKDAEAAAQPAVSNAYLDASNQVLVKLSQPFTLGEGSSGFTVHDDTANKDIPVTSVSDANQVTAVLAGTFQHIFGGSDWAPDNHNTLLKKVNSNLYQFSGNLPEGNYQYKVALNDSWNNPSYPSDNINLTVPAGGAHVTFSYIPSTHAVYDTINNPNADLQVDSSGVKTDLVAVTLGENPDVSHTLSIQTEDYQAGQVIPRKVLDSSQYYYSGDDLGNTYTKNATTFKVWAPTSTQVNVLLYNSATGAVTKTVPMTASGHGVWEATVNQDLENWYYMYEVTGQGSTRTAVDPYATAIAPNGTRGMIVDLAKTDPAGWESDKHITPKNIEDEVIYEMHVRDFSIDSNSGMKNKGKYLALTEKGTKGPDNVKTGVDSLKQLGITHVQLQPVFAFNSVNENDPTQYNWGYDPRNYNVPEGQYATNANGTTRIKEFKEMVLSLHQDHIGVNMDVVYNHTFATQISDFDKIVPEYYYRTDDAGNYTNGSGTGNEIAAERPMVQKFIIDSLKFWVNEYHVDGFRFDLMALLGKDTMSKAATQLHAIDPGIALYGEPWTGGTSALPADQLLTKGAQKGMGVAVFNDNLRNGLDGSVFDSSAQGFATGATGLTDAIKNGVEGSINDFTASPGETINYVTSHDNYTLWDKIAQSNPNDSEADRIKMDELAQAIVMTSQGIPFMQGGEEMLRTKGGNDNSYNAGDVVNEFDWSRKAQYPDVFNYYSGLIHLRLDHPAFRMTTANEINSHLQFLNSPENTVAYELSDHANKDTWGNIVVIYNPNKTAETINLPSGKWEINATSGKVGESTLGQAEGSVQVPGISMMILHQEVSPSDGK

SEQ ID NO: 48838 - protein, 928 aa, Bacillus deramificans
DGSTTTIIVHYFRPAGDYQPWSLWMWPEGGSGAEYDFNGTDSYGEVANVSIPGNPSQVGIIVRTQDWTKDVSADRYIDLSKGHEVWLVQGNSQIFYNEKDAEDAAKPAVSNAYLDASNQVLVKLSQPFTLGEGASGFTVHDDTVNKDIPVTSVTDASLGQNVTAVLAGTFQHIFGGSDWAPDNHSTLLKKVNNNLYQFSGDLPEGNYQYKVALNDSWNNPSYPSNNIDLTVPTGGAHVTFSYVPSTHAVYDSINNPGADLPVNGSGVKTDLVTVTLGEDPDVSHTLSIQTDGYQAKQVISRNVLDSSQYYYSGDDLGNTYTHKATTFKVWAPTSTQVNVLLYNSATGSVTKTVPMTASGHGVWEATVNQNLENWYYMYEVTGQGSTRTAVDPYATAIAPNGTRGMIVDLEDTNPPGWKEDHQQTPANPVDEVIYEVHVRDFSIDANSGMKNKGKYLAFTEHGTKGPDNVKTGIDSLKELGINAVQLQPIEEFNSIDETQPNMYNWGYDPRNYNVPEGAYATTPEGTARITQLKQLIQSIHKDRIAINMDVVYNHTFNVGVSDFDKIVPQYYYRTDSAGNYTNGSGVGNEIATERPMVQKFVLDSVKYWVKEYHIDGFRFDLMALLGKDTMAKISKELHAINPGIVLYGEPWTGGTSGLSSDQLVTKGQQKGLGIGVFNDNLRNALDGNVFDSSAQGFATGATGLTDAIKNGVEGSINDFTSSPGETINYVTSHDNYTLWDKIALSNPNDSEADRIKMDELAQAVVMTSQGVPFMQGGEEMLRTKGGNDNSYNAGDTVNEFDWSRKAQYPDVFNYYSGLIHLRLDHPAFRMTTANEINSHLQFLNSPENTVAYELTDHVNKDKWGNIIVVYNPNKTAATINLPSGKWAINATSGKVGESTLGQAEGSVQVPGISMMILHQEVSPDHGKK

SEQ ID NO: 48839 - protein, 925 aa, Synthetic construct
DGSTTTIIVHYFRPAGDYQPWSLWMWPEGGSGAEYDFNGTDSYGEVANVSIPGNPSQVGIIVRTQDWTKDVSADRYIDLSKGHEVWLVQGNSQIFYNEKDAEDAAKPAVSNAYLDASNQVLVKLSQPFTLGEGASGFTVHDDTVNKDIPVTSVTDASNVTAVLAGTFQHIFGGSDWAPDNHSTLLKKVNNNLYQFSGDLPEGNYQYKVALNDSWNNPSYPSNNIDLTVPTGGAHVTFSYVPSTHAVYDSINNPGADLPVNGSGVKTDLVTVTLGEDPDVSHTLSIQTDGYQAKQVISRNVLDSSQYYYSGDDLGNTYTHKATTFKVWAPTSTQVNVLLYNSATGSVTKTVPMTASGHGVWEATVNQNLENWYYMYEVTGQGSTRTAVDPYATAIAPNGTRGMIVDLEDTNPPGWKEDHQQTPANPVDEVIYEVHVRDFSIDANSGMKNKGKYLAFTEHGTKGPDNVKTGIDSLKELGINAVQLQPIEEFNSIDETQPNMYNWGYDPRNYNVPEGAYATTPEGTARITQLKQLIQSIHKDRIAINMDVVYNHTFNVGVSDFDKIVPQYYYRTDSAGNYTNGSGVGNEIATERPMVQKFVLDSVKYWVKEYHIDGFRFDLMALLGKDTMAKISKELHAINPGIVLYGEPWTGGTSGLSSDQLVTKGQQKGLGIGVFNDNLRNALDGNVFDSSAQGFATGATGLTDAIKNGVEGSINDFTSSPGETINYVTSHDNYTLWDKIALSNPNDSEADRIKMDELAQAVVMTSQGVPFMQGGEEMLRTKGGNDNSYNAGDTVNEFDWSRKAQYPDVFNYYSGLIHLRLDHPAFRMTTANEINSHLQFLNSPENTVAYELTDHVNKDKWGNIIVVYNPNKTAATINLPSGKWAINATSGKVGESTLGQAEGSVQVPGISMMILHQEVSPDHGKK

SEQ ID NO: 48840 - protein, 860 aa, Pullulanibacillus naganoensis
NWDAKDIDSDRYIDLSKGHEIWLVQGNSQIFYSEKDAEAAAQPAVSNAYLDASNQVLVKLSQPFTLGEGSSGFTVHDDTANKDIPVTSVSDANQVTAVLAGTFQHIFGGSDWAPDNHNTLLKKVNSNLYQFSGNLPEGNYQYKVALNDSWNNPSYPSDNINLTVPAGGAHVTFSYIPSTHAVYDTINNPNADLQVDSSGVKTDLVAVTLGENPDVSHTLSIQTEDYQAGQVIPRKVLDSSQYYYSGDDLGNTYTKNATTFKVWAPTSTQVNVLLYNSATGAVTKTVPMTASGHGVWEATVNQDLENWYYMYEVTGQGSTRTAVDPYATAIAPNGTRGMIVDLAKTDPAGWESDKHITPKNIEDEVIYEMDVRDFSIDSNSGMKNKGKYLALTEKGTKGPDNVKTGVDSLKQLGITHVQLQPVFAFNSVNENDPTQYNWGYDPRNYNVPEGQYATNANGTTRIKEFKEMVLSLHQDHIGVNMDVVYNHTFATQISDFDKIVPEYYYRTDDAGNYTNGSGTGNEIAAERPMVQKFIIDSLKFWVNEYHVDGFRFDLMALLGKDTMSKAATQLHAIDPGIALYGEPWTGGTSALPADQLLTKGAQKGMGVAVFNDNLRNGLDGSVFDSSAQGFATGATGLTDAIKNGVEGSINDFTASPGETINYVTSHDNYTLWDKIAQSNPNDSEADRIKMDELAQAIVMTSQGIPFMQGGEEMLRTKGGNDNSYNAGDVVNEFDWSRKAQYPDVFNYYSGLIHLRLDHPAFRMTTANEINSHLQFLNSPENTVAYELSDHANKDTWGNIVVIYNPNKTAETINLPSGKWEINATSGKVGESTLGQAEGSVQVPGISMMILHQEVSPSDGK

SEQ ID NO: 48841 - protein, 928 aa, Bacillus deramificans
DGSTTTIIVHYFRPAGDYQPWSLWMWPEGGSGAEYDFNGTDSYGEVANVSIPGNPSQVGIIVRTQDWTKDVSADRYIDLSKGHEVWLVQGNSQIFYNEKDAEDAAKPAVSNAYLDASNQVLVKLSQPFTLGEGASGFTVHDDTVNKDIPVTSVTDASLGQNVTAVLAGTFQHIFGGSDWAPDNHSTLLKKVNNNLYQFSGDLPEGNYQYKVALNDSWNNPSYPSNNIDLTVPTGGAHVTFSYVPSTHAVYDSINNPGADLPVNGSGVKTDLVTVTLGEDPDVSHTLSIQTDGYQAKQVISRNVLDSSQYYYSGDDLGNTYTHKATTFKVWAPTSTQVNVLLYNSATGSVTKTVPMTASGHGVWEATVNQNLENWYYMYEVTGQGSTRTAVDPYATAIAPNGTRGMIVDLEDTNPPGWKEDHQQTPANPVDEVIYEVHVRDFSIDANSGMKNKGKYLAFTEHGTKGPDNVKTGIDSLKELGINAVQLQPIEEFASIDETQPNMYNWGYDPRNYNVPEGAYATTPEGTARITQLKQLIQSIHKDRIAINMDVVYNHTFNVGVSDFDKIVPQYYYRTDSAGNYTNGSGCGNEIASERPMVQKFVLDSVKYWVKEYHIDGFRFDLMALLGKDTMAKISKELHAINPGIVLYGEPWTGGTSGLSSDQLVTKGQQKGLGIGVFNDNLRNALDGNVFDSSAQGFATGATGLTDAIKRGVEGSINDFTSSPSETINYVSCHDNYTLWDKIALSNPNDSEADRIKMDELAQAVVMTSQGVPFMQGGEEMLRTKGGNDNSYNAGDTVNEFDWSRKAQYPDVFNYYSGLIHLRLDHPAFRMTTANEINSHLQFLNSPENTVAYELTDHVNKDKWGNIIVVYNPNKTAATINLPSGKWAINATSGKVGESTLGQAEGSVQVPGISMMILHQEVSPDHGKK

SEQ ID NO: 48842 - protein, 881 aa, Pullulanibacillus naganoensis
EVASVDIPGNPSQVGIIVRKGNWDAKDIDSDRYIDLSKGHEIWLVQGNSQIFYSEKDAEAAAQPAVSNAYLDASNQVLVKLSQPFTLGEGSSGFTVHDDTANKDIPVTSVSDANQVTAVLAGTFQHIFGGSDWAPDNHNTLLKKVNSNLYQFSGNLPEGNYQYKVALNDSWNNPSYPSDNINLTVPAGGAHVTFSYIPSTHAVYDTINNPNADLQVDSSGVKTDLVAVTLGENPDVSHTLSIQTEDYQAGQVIPRKVLDSSQYYYSGDDLGNTYTKNATTFKVWAPTSTQVNVLLYNSATGAVTKTVPMTASGHGVWEATVNQDLENWYYMYEVTGQGSTRTAVDPYATAIAPNGTRGMIVDLAKTDPAGWESDKHITPKNIEDEVIYEMDVRDFSIDSNSGMKNKGKYLALTEKGTKGPDNVKTGVDSLKQLGITHVQLQPVFAFNSVNENDPTQYNWGYDPRNYNVPEGQYATNANGTTRIKEFKEMVLSLHQDHIGVNMDVVYNHTFATQISDFDKIVPEYYYRTDDAGNYTNGSGTGNEIAAERPMVQKFIIDSLKFWVNEYHVDGFRFDLMALLGKDTMSKAATQLHAIDPGIALYGEPWTGGTSALPADQLLTKGAQKGMGVAVFNDNLRNGLDGSVFDSSAQGFATGATGLTDAIKNGVEGSINDFTASPGETINYVTSHDNYTLWDKIAQSNPNDSEADRIKMDELAQAIVMTSQGIPFMQGGEEMLRTKGGNDNSYNAGDVVNEFDWSRKAQYPDVFNYYSGLIHLRLDHPAFRMTTANEINSHLQFLNSPENTVAYELSDHANKDTWGNIVVIYNPNKTAETINLPSGKWEINATSGKVGESTLGQAEGSVQVPGISMMILHQEVSPSDGK

SEQ ID NO: 48843 - protein, 904 aa, Pullulanibacillus naganoensis
LWMWPENGDGAEYDFNQPTDSYGEVASVDIPGNPSQVGIIVRKGNWDAKDIDSDRYIDLSKGHEIWLVQGNSQIFYSEKDAEAAAQPAVSNAYLDASNQVLVKLSQPFTLGEGSSGFTVHDDTANKDIPVTSVSDANQVTAVLAGTFQHIFGGSDWAPDNHNTLLKKVNSNLYQFSGNLPEGNYQYKVALNDSWNNPSYPSDNINLTVPAGGAHVTFSYIPSTHAVYDTINNPNADLQVDSSGVKTDLVAVTLGENPDVSHTLSIQTEDYQAGQVIPRKVLDSSQYYYSGDDLGNTYTKNATTFKVWAPTSTQVNVLLYNSATGAVTKTVPMTASGHGVWEATVNQDLENWYYMYEVTGQGSTRTAVDPYATAIAPNGTRGMIVDLAKTDPAGWESDKHITPKNIEDEVIYEMDVRDFSIDSNSGMKNKGKYLALTEKGTKGPDNVKTGVDSLKQLGITHVQLQPVFAFNSVNENDPTQYNWGYDPRNYNVPEGQYATNANGTTRIKEFKEMVLSLHQDHIGVNMDVVYNHTFATQISDFDKIVPEYYYRTDDAGNYTNGSGTGNEIAAERPMVQKFIIDSLKFWVNEYHVDGFRFDLMALLGKDTMSKAATQLHAIDPGIALYGEPWTGGTSALPADQLLTKGAQKGMGVAVFNDNLRNGLDGSVFDSSAQGFATGATGLTDAIKNGVEGSINDFTASPGETINYVTSHDNYTLWDKIAQSNPNDSEADRIKMDELAQAIVMTSQGIPFMQGGEEMLRTKGGNDNSYNAGDVVNEFDWSRKAQYPDVFNYYSGLIHLRLDHPAFRMTTANEINSHLQFLNSPENTVAYELSDHANKDTWGNIVVIYNPNKTAETINLPSGKWEINATSGKVGESTLGQAEGSVQVPGISMMILHQEVSPSDGK

SEQ ID NO: 48844 - protein, 821 aa, Bacillus deramificans
AVSNAYLDASNQVLVKLSQPFTLGEGASGFTVHDDTVNKDIPVTSVTDASLGQNVTAVLAGTFQHIFGGSDWAPDNHSTLLKKVNNNLYQFSGDLPEGNYQYKVALNDSWNNPSYPSNNIDLTVPTGGAHVTFSYVPSTHAVYDSINNPGADLPVNGSGVKTDLVTVTLGEDPDVSHTLSIQTDGYQAKQVISRNVLDSSQYYYSGDDLGNTYTHKATTFKVWAPTSTQVNVLLYNSATGSVTKTVPMTASGHGVWEATVNQNLENWYYMYEVTGQGSTRTAVDPYATAIAPNGTRGMIVDLEDTNPPGWKEDHQQTPANPVDEVIYEVHVRDFSIDANSGMKNKGKYLAFTEHGTKGPDNVKTGIDSLKELGINAVQLQPIEEFNSIDETQPNMYNWGYDPRNYNVPEGAYATTPEGTARITQLKQLIQSIHKDRIAINMDVVYNHTFNVGVSDFDKIVPQYYYRTDSAGNYTNGSGVGNEIATERPMVQKFVLDSVKYWVKEYHIDGFRFDLMALLGKDTMAKISKELHAINPGIVLYGEPWTGGTSGLSSDQLVTKGQQKGLGIGVFNDNLRNALDGNVFDSSAQGFATGATGLTDAIKNGVEGSINDFTSSPGETINYVTSHDNYTLWDKIALSNPNDSEADRIKMDELAQAVVMTSQGVPFMQGGEEMLRTKGGNDNSYNAGDTVNEFDWSRKAQYPDVFNYYSGLIHLRLDHPAFRMTTANEINSHLQFLNSPENTVAYELTDHVNKDKWGNIIVVYNPNKTAATINLPSGKWAINATSGKVGESTLGQAEGSVQVPGISMMILHQEVSPDHGKK

SEQ ID NO: 48845 - protein, 920 aa, Pullulanibacillus naganoensis
IVVHYFRPSGDYTDWNLWMWPENGDGAEYDFNQPTDSYGEVASVDIPGNPSQVGIIVRKGNWDAKDIDSDRYIDLSKGHEIWLVQGNSQIFYSEKDAEAAAQPAVSNAYLDASNQVLVKLSQPFTLGEGSSGFTVHDDTANKDIPVTSVSDANQVTAVLAGTFQHIFGGSDWAPDNHNTLLKKVNSNLYQFSGNLPEGNYQYKVALNDSWNNPSYPSDNINLTVPAGGAHVTFSYIPSTHAVYDTINNPNADLQVDSSGVKTDLVAVTLGENPDVSHTLSIQTEDYQAGQVIPRKVLDSSQYYYSGDDLGNTYTKNATTFKVWAPTSTQVNVLLYNSATGAVTKTVPMTASGHGVWEATVNQDLENWYYMYEVTGQGSTRTAVDPYATAIAPNGTRGMIVDLAKTDPAGWESDKHITPKNIEDEVIYEMDVRDFSIDSNSGMKNKGKYLALTEKGTKGPDNVKTGVDSLKQLGITHVQLQPVFAFNSVNENDPTQYNWGYDPRNYNVPEGQYATNANGTTRIKEFKEMVLSLHQDHIGVNMDVVYNHTFATQISDFDKIVPEYYYRTDDAGNYTNGSGTGNEIAAERPMVQKFIIDSLKFWVNEYHVDGFRFDLMALLGKDTMSKAATQLHAIDPGIALYGEPWTGGTSALPADQLLTKGAQKGMGVAVFNDNLRNGLDGSVFDSSAQGFATGATGLTDAIKNGVEGSINDFTASPGETINYVTSHDNYTLWDKIAQSNPNDSEADRIKMDELAQAIVMTSQGIPFMQGGEEMLRTKGGNDNSYNAGDVVNEFDWSRKAQYPDVFNYYSGLIHLRLDHPAFRMTTANEINSHLQFLNSPENTVAYELSDHANKDTWGNIVVIYNPNKTAETINLPSGKWEINATSGKVGESTLGQAEGSVQVPGISMMILHQEVSPSDGK

SEQ ID NO: 48846 - protein, 928 aa, Pullulanibacillus naganoensis
DGNTTNIIVHYFRPAGDYQPWSLWMWPKGGDGAEYDFNQQSDSYGAVASADIPGSPSQVGIIVRTQDWTKDVSVDRYIDLSKGHEVWLVQGNSQIFYNEKDAETAAQPAVSNAYLDASNQLLVKLSQTLTLGEGASGFTVHDDTANKDIPVTSVSDSSTGQDVTAVLAGTFQHIFGGSDWAPDNHSTLLKKVTNNLYQFTGDLPEGNYQYKVALNDSWNNPSYPSDNINLAVPAGGAHVTFSYIPSTHAVYDTINNPNADLQVDDSGLKTDLVTVTLGEDPDVSHTLSIQTEGYQAKQVIPRNVLDSSQYYYSGDDLGNTYTKKATTFKVWAPTSTQVNVLLYNSATGAVTKTVPMAASSNGVWKATVNQDLENWYYMYEVTGQGSTRTAVDPYATAIAPNGTRGMIVDLSKTNPAGWESDTHITPKNIEDEVIYEMHIRDFSIDSNSGMNNKGKYLALTEKGTKGPDNVKTGVDSLKQLGITHVQLQPVFGFNSVDETDPTQYNWGYDPRNYNVPEGQYATNANGTTRIKEFKEMVLSLHRDHIGVNMDVVYNHTFATQISDFDKIVPEYYYRTDDAGNYTNGSGTGNEIAAEKPMVQKFIIDSLKFWVNEYHIDGFRFDLMALLGKDTMSKASEQLHEIDPGIALYGEPWTGGTSALPTDQLLTKGAQKGLGVAVFNDNLRNALDGSVFDSSAQGFATGATGLTDAIKNGVEGSINDFTSSPGETINYVTSHDNYTLWDKIAQSNPNDSEADRIKMDELAQAVVMTSQGVPFMQGGEEMLRTKGGNDNSYNAGDAVNEFDWSRKAQYPDVFNYYSGLIHLRLDHPAFRMTTANEINSHLQFLDSPDNTVAYEISNHANKDIWGNIIVVYNPNKTAATLNLPSGKWAINATTGKIGESTLGQAEGSVQVPGISMMILHQEVSPSDGK

SEQ ID NO: 48847 - protein, 917 aa, Pullulanibacillus naganoensis
DGNTTNIVVHYFRPSGDYTDWNLWMWPENGDGAEYDFNQPTDSYGEVASVDIPGNPSQVGIIVRKGNWDAKDIDSDRYIDLSKGHEIWLVQGNSQIFYSEKDAEAAAQPAVSNAYLDASNQVLVKLSQPFTLGEGSSGFTVHDDTANKDIPVTSVSDANQVTAVLAGTFQHIFGGSDWAPDNHNTLLKKVNSNLYQFSGNLPEGNYQYKVALNDSWNNPSYPSDNINLTVPAGGAHVTFSYIPSTHAVYDTINNPNADLQVDSSGVKTDLVAVTLGENPDVSHTLSIQTEDYQAGQVIPRKVLDSSQYYYSGDDLGNTYTKNATTFKVWAPTSTQVNVLLYNSATGAVTKTVPMTASGHGVWEATVNQDLENWYYMYEVTGQGSTRTAVDPYATAIAPNGTRGMIVDLAKTDPAGWESDKHITPKNIEDEVIYEMDVRDFSIDSNSGMKNKGKYLALTEKGTKGPDNVKTGVDSLKQLGITHVQLQPVFAFNSVNENDPTQYNWGYDPRNYNVPEGQYATNANGTTRIKEFKEMVLSLHQDHIGVNMDVVYNHTFATQISDFDKIVPEYYYRTDDAGNYTNGSGTGNEIAAERPMVQKFIIDSLKFWVNEYHVDGFRFDLMALLGKDTMSKAATQLHAIDPGIALYGEPWTGGTSALPADQLLTKGAQKGMGVAVFNDNLRNGLDGSVFDSSAQGFATGATGLTDAIKNGVEGSINDFTASPGETINYVTSHDNYTLWDKIAQSNPNDSEADRIKMDELAQAIVMTSQGIPFMQGGEEMLRTKGGNDNSYNAGDVVNEFDWSRKAQYPDVFNYYSGLIHLRLDHPAFRMTTANEINSHLQFLNSPENTVAYELSDHANKDTWGNIVVIYNPNKTAETINLPSGKWEINATSGKVGESTLGQAEGSVQVPGISMMILH

SEQ ID NO: 48848 - protein, 824 aa, Bacillus sp.
ASAAVSNAYLDASNQVLVKLSQPFTLGEGASGFTVHDDTVNKDIPVTSVTDASLGQNVTAVLAGTFQHIFGGSDWAPDNHSTLLKKVNNNLYQFSGDLPEGNYQYKVALNDSWNNPSYPSNNIDLTVPTGGAHVTFSYVPSTHAVYDSINNPGADLPVNGSGVKTDLVTVTLGEDPDVSHTLSIQTDGYQAKQVISRNVLDSSQYYYSGDDLGNTYTHKATTFKVWAPTSTQVNVLLYNSATGSVTKTVPMTASGHGVWEATVNQNLENWYYMYEVTGQGSTRTAVDPYATAIAPNGTRGMIVDLEDTNPPGWKEDHQQTPANPVDEVIYEVHVRDFSIDANSGMKNKGKYLAFTEHGTKGPDNVKTGIDSLKELGINAVQLQPIEEFNSIDETQPNMYNWGYDPRNYNVPEGAYATTPEGTARITQLKQLIQSIHKDRIAINMDVVYNHTFNVGVSDFDKIVPQYYYRTDSAGNYTNGSGVGNEIATERPMVQKFVLDSVKYWVKEYHIDGFRFDLMALLGKDTMAKISKELHAINPGIVLYGEPWTGGTSGLSSDQLVTKGQQKGLGIGVFNDNLRNALDGNVFDSSAQGFATGATGLTDAIKNGVEGSINDFTSSPGETINYVTSHDNYTLWDKIALSNPNDSEADRIKMDELAQAVVMTSQGVPFMQGGEEMLRTKGGNDNSYNAGDTVNEFDWSRKAQYPDVFNYYSGLIHLRLDHPAFRMTTANEINSHLQFLNSPENTVAYELTDHVNKDKWGNIIVVYNPNKTAATINLPSGKWAINATSGKVGESTLGQAEGSVQVPGISMMILHQEVSPDHGKK

SEQ ID NO: 48849 - protein, 926 aa, Pullulanibacillus naganoensis
DGNTTNIVVHYFRPSGDYTDWNLWMWPENGDGAEYDFNQPTDSYGEVASVDIPGNPSQVGIIVRKGNWDAKDIDSDRYIDLSKGHEIWLVQGNSQIFYSEKDAEAAAQPAVSNAYLDASNQVLVKLSQPFTLGEGSSGFTVHDDTANKDIPVTSVSDANQVTAVLAGTFQHIFGGSDWAPDNHNTLLKKVNSNLYQFSGNLPEGNYQYKVALNDSWNNPSYPSDNINLTVPAGGAHVTFSYIPSTHAVYDTINNPNADLQVDSSGVKTDLVAVTLGENPDVSHTLSIQTEDYQAGQVIPRKVLDSSQYYYSGDDLGNTYTKNATTFKVWAPTSTQVNVLLYNSATGAVTKTVPMTASGHGVWEATVNQDLENWYYMYEVTGQGSTRTAVDPYATAIAPNGTRGMIVDLAKTDPAGWESDKHITPKNIEDEVIYEMDVRDFSIDSNSGMKNKGKYLALTEKGTKGPDNVKTGVDSLKQLGITHVQLQPVFAFNSVNENDPTQYNWGYDPRNYNVPEGQYATNANGTTRIKEFKEMVLSLHQDHIGVNMDVVYNHTFATQISDFDKIVPEYYYRTDDAGNYTNGSGTGNEIAAERPMVQKFIIDSLKFWVNEYHVDGFRFDLMALLGKDTMSKAATQLHAIDPGIALYGEPWTGGTSALPADQLLTKGAQKGMGVAVFNDNLRNGLDGSVFDSSAQGFATGATGLTDAIKNGVEGSINDFTASPGETINYVTSHDNYTLWDKIAQSNPNDSEADRIKMDELAQAIVMTSQGIPFMQGGEEMLRTKGGNDNSYNAGDVVNEFDWSRKAQYPDVFNYYSGLIHLRLDHPAFRMTTANEINSHLQFLNSPENTVAYELSDHANKDTWGNIVVIYNPNKTAETINLPSGKWEINATSGKVGESTLGQAEGSVQVPGISMMILHQEVSPSDGK

SEQ ID NO: 48850 - protein, 942 aa, Pullulanibacillus naganoensis
DGNTTNIVVHYFRPSGDYTDWNLWMWPENGDGAEYDFNQPTDSYGEVASVDIPGNPSQVGIIVRKGNWDAKDIDSDRYIDLSKGHEIWLVQGNSQIFYSEKDAEAAAQPAVSNAYLDASNQVLVKLSQPFTLGEGSSGFTVHDDTANKDIPVTSVSDANQVTAVLAGTFQHIFGGSDWAPDNHNTLLKKVNSNLYQFSGNLPEGNYQYKVALNDSWNNPSYPSDNINLTVPAGGAHVTFSYIPSTHAVYDTINNPNADLQVDSSGVKTDLVAVTLGENPDVSHTLSIQTEDYQAGQVIPRKVLDSSQYYYSGDDLGNTYTKNATTFKVWAPTSTQVNVLLYNSATGAVTKTVPMTASGHGVWEATVNQDLENWYYMYEVTGQGSTRTAVDPYATAIAPNGTRGMIVDLAKTDPAGWESDKHITPKNIEDEVIYEMDVRDFSIDSNSGMKNKGKYLALTEKGTKGPDNVKTGVDSLKQLGITHVQLQPVFAFNSVNENDPTQYNWGYDPRNYNVPEGQYATNANGTTRIKEFKEMVLSLHQDHIGVNMDVVYNHTFATQISDFDKIVPEYYYRTDDAGNYTNGSGTGNEIAAERPMVQKFIIDSLKFWVNEYHVDGFRFDLMALLGKDTMSKAATQLHAIDPGIALYGEPWTGGTSALPADQLLTKGAQKGMGVAVFNDNLRNGLDGSVFDSSAQGFATGATGLTDAIKNGVEGSINDFTASPGETINYVTSHDNYTLWDKIAQSNPNDSEADRIKMDELAQAIVMTSQGIPFMQGGEEMLRTKGGNDNSYNAGDVVNEFDWSRKAQYPDVFNYYSGLIHLRLDHPAFRMTTANEINSHLQFLNSPENTVAYELSDHANKDTWGNIVVIYNPNKTAETINLPSGKWEINATSGKVGEPSGKWEINATSGKVGESTLGQAEGSVQVPGISMMILHQEVSPSDGK

SEQ ID NO: 48851 - protein, 890 aa, Pullulanibacillus naganoensis
DGNTTNIVVHYFRPSGDYTDWNLWMWPENGDGAEYDFNQPTDSYGEVASVDIPGNPSQVGIIVRKGNWDAKDIDSDRYIDLSKGHEIWLVQGNSQIFYSEKDAEAAAQPAVSNAYLDASNQVLVKLSQPFTLGEGSSGFTVHDDTANKDIPVTSVSDANQVTAVLAGTFQHIFGGSDWAPDNHNTLLKKVNSNLYQFSGNLPEGNYQYKVALNDSWNNPSYPSDNINLTVPAGGAHVTFSYIPSTHAVYDTINNPNADLQVDSSGVKTDLVAVTLGENPDVSHTLSIQTEDYQAGQVIPRKVLDSSQYYYSGDDLGNTYTKNATTFKVWAPTSTQVNVLLYNSATGAVTKTVPMTASGHGVWEATVNQDLENWYYMYEVTGQGSTRTAVDPYATAIAPNGTRGMIVDLAKTDPAGWESDKHITPKNIEDEVIYEMDVRDFSIDSNSGMKNKGKYLALTEKGTKGPDNVKTGVDSLKQLGITHVQLQPVFAFNSVNENDPTQYNWGYDPRNYNVPEGQYATNANGTTRIKEFKEMVLSLHQDHIGVNMDVVYNHTFATQISDFDKIVPEYYYRTDDAGNYTNGSGTGNEIAAERPMVQKFIIDSLKFWVNEYHVDGFRFDLMALLGKDTMSKAATQLHAIDPGIALYGEPWTGGTSALPADQLLTKGAQKGMGVAVFNDNLRNGLDGSVFDSSAQGFATGATGLTDAIKNGVEGSINDFTASPGETINYVTSHDNYTLWDKIAQSNPNDSEADRIKMDELAQAIVMTSQGIPFMQGGEEMLRTKGGNDNSYNAGDVVNEFDWSRKAQYPDVFNYYSGLIHLRLDHPAFRMTTANEINSHLQFLNSPENTVAYELSDHANKDTWGNIVVIYNPNKTAETINLPSGKWEINAT

SEQ ID NO: 48852 - protein, 926 aa, Pullulanibacillus naganoensis
DGNTTNIVVHYFRPSGDYTDWNLWMWPENGDGAEYDFNQPTDSYGEVASVDIPGNPSQVGIIVRKGNWDAKDIDSDRYIDLSKGHEIWLVQGNSQIFYSEKDAEAAAQPAVSNAYLDASNQVLVKLSQPFTLGEGSSGFTVHDDTANKDIPVTSVSDANQVTAVLAGTFQHIFGGSDWAPDNHNTLLKKVNSNLYQFSGNLPEGNYQYKVALNDSWNNPSYPSDNINLTVPAGGAHVTFSYIPSTHAVYDTINNPNADLQVDSSGVKTDLVAVTLGENPDVSHTLSIQTEDYQAGQVIPRKVLDSSQYYYSGDDLGNTYTKNATTFKVWAPTSTQVNVLLYNSATGAVTKTVPMTASGHGVWEATVNQDLENWYYMYEVTGQGSTRTAVDPYATAIAPNGTRGMIVDLAKTDPAGWESDKHITPKNIEDEVIYEMDVRDFSIDSNSGMKNKGKYLALTEKGTKGPDGVKTGVDSLKQLGITHVQLQPVFAFNSVNENDPTQYNWGYDPRNYNVPEGQYATNANGTTRIKEFKEMVLSLHQDHIGVNMDVVYNHTFATQISDFDKIVPEYYYRTDDAGNYTNGSGTGNEIAAERPMVQKFIIDSLKFWVNEYHVDGFRFDLMALLGKDTMSKAATQLHAIDPGIALYGEPWTGGTSALPADQLLTKGAQKGMGVAVFNDNLRNGLDGSVFDSSAQGFATGATGLTDAIKNGVEGSINDFTASPGETINYVSSHDNYTLWDKIAQSNPNDSEADRIKMDELAQAIVMTSQGIPFMQGGEEMLRTKGGNDNSYNAGDVVNEFDWSRKAQYPDVFNYYSGLIHLRLDHPAFRMTTANEINSHLQFLNSPENTVAYELSDHANKDTWGNIVVIYNPNKTAETINLPSGKWEINATSGKVGESTLGQAEGSVQVPGISMMILHQEVSPSDGK

SEQ ID NO: 48853 - protein, 926 aa, Pullulanibacillus naganoensis
DGNTTNIVVHYFRPSGDYTDWNLWMWPENGDGAEYDFNQPTDSYGEVASVDIPGNPSQVGIIVRKGNWDAKDIDSDRYIDLSKGHEIWLVQGNSQIFYSEKDAEAAAQPAVSNAYLDASNQVLVKLSQPFTLGEGSSGFTVHDDTANKDIPVTSVSDANQVTAVLAGTFQHIFGGSDWAPDNHNTLLKKVNSNLYQFSGNLPEGNYQYKVALNDSWNNPSYPSDNINLTVPAGGAHVTFSYIPSTHAVYDTINNPNADLQVDSSGVKTDLVAVTLGENPDVSHTLSIQTEDYQAGQVIPRKVLDSSQYYYSGDDLGNTYTKNATTFKVWAPTSTQVNVLLYNSATGAVTKTVPMTASGHGVWEATVNQDLENWYYMYEVTGQGSTRTAVDPYATAIAPNGTRGMIVDLAKTDPAGWESDKHITPKNIEDEVIYEMDVRDFSIDSNSGMKNKGKYLALTEKGTKGPDGVKTGVDSLKQLGITHVQLQPVFAFNSVNENDPTQYNWGYDPRNYNVPEGQYATNANGTTRIKEFKEMVLSLHQDHIGVNMDVVYNHTFATQISDFDKIVPEYYYRTDDAGNYTNGSGTGNEIAAERPMVQKFIIDSLKFWVNEYHVDGFRFDLMALLGKDTMSKAATQLHAIDPGIALYGEPWTGGTSALPADQLLTKGAQKGMGVAVFNDNLRNGLDGSVFDSSAQGFATGATGLTDAIKNGVEGSINDFTASPGETINYVTCHDNYTLWDKIAQSNPNDSEADRIKMDELAQAIVMTSQGIPFMQGGEEMLRTKGGNDNSYNAGDVVNEFDWSRKAQYPDVFNYYSGLIHLRLDHPAFRMTTANEINSHLQFLNSPENTVAYELSDHANKDTWGNIVVIYNPNKTAETINLPSGKWEINATSGKVGESTLGQAEGSVQVPGISMMILHQEVSPSDGK

SEQ ID NO: 48854 - protein, 926 aa, Pullulanibacillus naganoensis
DGNTTNIVVHYFRPSGDYTDWNLWMWPENGDGAEYDFNQPTDSYGEVASVDIPGNPSQVGIIVRKGNWDAKDIDSDRYIDLSKGHEIWLVQGNSQIFYSEKDAEAAAQPAVSNAYLDASNQVLVKLSQPFTLGEGSSGFTVHDDTANKDIPVTSVSDANQVTAVLAGTFQHIFGGSDWAPDNHNTLLKKVNSNLYQFSGNLPEGNYQYKVALNDSWNNPSYPSDNINLTVPAGGAHVTFSYIPSTHAVYDTINNPNADLQVDSSGVKTDLVAVTLGENPDVSHTLSIQTEDYQAGQVIPRKVLDSSQYYYSGDDLGNTYTKNATTFKVWAPTSTQVNVLLYNSATGAVTKTVPMTASGHGVWEATVNQDLENWYYMYEVTGQGSTRTAVDPYATAIAPNGTRGMIVDLAKTDPAGWESDKHITPKNIEDEVIYEMDVRDFSIDSNSGMKNKGKYLALTEKGTKGPDGVKTGVDSLKQLGITHVQLQPVFAFNSVNENDPTQYNWGYDPRNYNVPEGQYATNANGTTRIKEFKEMVLSLHQDHIGVNMDVVYNHTFATQISDFDKIVPEYYYRTDDAGNYTNGSGTGNEIAAERPMVQKFIIDSLKFWVNEYHVDGFRFDLMALLGKDTMSKAATQLHAIDPGIALYGEPWTGGTSALPADQLLTKGAQKGMGVAVFNDNLRNGLDGSVFDSSAQGFATGATGLTDAIKRGVEGSINDFTASPGETINYVTSHDNYTLWDKIAQSNPNDSEADRIKMDELAQAIVMTSQGIPFMQGGEEMLRTKGGNDNSYNAGDVVNEFDWSRKAQYPDVFNYYSGLIHLRLDHPAFRMTTANEINSHLQFLNSPENTVAYELSDHANKDTWGNIVVIYNPNKTAETINLPSGKWEINATSGKVGESTLGQAEGSVQVPGISMMILHQEVSPSDGK

SEQ ID NO: 48855 - protein, 926 aa, Pullulanibacillus naganoensis
DGNTTNIVVHYFRPSGDYTDWNLWMWPENGDGAEYDFNQPTDSYGEVASVDIPGNPSQVGIIVRKGNWDAKDIDSDRYIDLSKGHEIWLVQGNSQIFYSEKDAEAAAQPAVSNAYLDASNQVLVKLSQPFTLGEGSSGFTVHDDTANKDIPVTSVSDANQVTAVLAGTFQHIFGGSDWAPDNHNTLLKKVNSNLYQFSGNLPEGNYQYKVALNDSWNNPSYPSDNINLTVPAGGAHVTFSYIPSTHAVYDTINNPNADLQVDSSGVKTDLVAVTLGENPDVSHTLSIQTEDYQAGQVIPRKVLDSSQYYYSGDDLGNTYTKNATTFKVWAPTSTQVNVLLYNSATGAVTKTVPMTASGHGVWEATVNQDLENWYYMYEVTGQGSTRTAVDPYATAIAPNGTRGMIVDLAKTDPAGWESDKHITPKNIEDEVIYEMDVRDFSIDSNSGMKNKGKYLALTEKGTKGPDGVKTGVDSLKQLGITHVQLQPVFAFASVNENDPTQYNWGYDPRNYNVPEGQYATNANGTTRIKEFKEMVLSLHQDHIGVNMDVVYNHTFATQISDFDKIVPEYYYRTDDAGNYTNGSGTGNEIAAERPMVQKFIIDSLKFWVNEYHVDGFRFDLMALLGKDTMSKAATQLHAIDPGIALYGEPWTGGTSALPADQLLTKGAQKGMGVAVFNDNLRNGLDGSVFDSSAQGFATGATGLTDAIKNGVEGSINDFTASPGETINYVTSHDNYTLWDKIAQSNPNDSEADRIKMDELAQAIVMTSQGIPFMQGGEEMLRTKGGNDNSYNAGDVVNEFDWSRKAQYPDVFNYYSGLIHLRLDHPAFRMTTANEINSHLQFLNSPENTVAYELSDHANKDTWGNIVVIYNPNKTAETINLPSGKWEINATSGKVGESTLGQAEGSVQVPGISMMILHQEVSPSDGK

SEQ ID NO: 48856 - protein, 926 aa, Pullulanibacillus naganoensis
DGNTTNIVVHYFRPSGDYTDWNLWMWPENGDGAEYDFNQPTDSYGEVASVDIPGNPSQVGIIVRKGNWDAKDIDSDRYIDLSKGHEIWLVQGNSQIFYSEKDAEAAAQPAVSNAYLDASNQVLVKLSQPFTLGEGSSGFTVHDDTANKDIPVTSVSDANQVTAVLAGTFQHIFGGSDWAPDNHNTLLKKVNSNLYQFSGNLPEGNYQYKVALNDSWNNPSYPSDNINLTVPAGGAHVTFSYIPSTHAVYDTINNPNADLQVDSSGVKTDLVAVTLGENPDVSHTLSIQTEDYQAGQVIPRKVLDSSQYYYSGDDLGNTYTKNATTFKVWAPTSTQVNVLLYNSATGAVTKTVPMTASGHGVWEATVNQDLENWYYMYEVTGQGSTRTAVDPYATAIAPNGTRGMIVDLAKTDPAGWESDKHITPKNIEDEVIYEMDVRDFSIDSNSGMKNKGKYLALTEKGTKGPDGVKTGVDSLKQLGITHVQLQPVFAFNSVNENDPTQYNWGYDPRNYNVPEGQYATNANGTTRIKEFKEMVLSLHQDHIGVNMDVVYNHTFATQISDFDKIVPEYYYRTDDAGNYTNGSGTGNEIASERPMVQKFIIDSLKFWVNEYHVDGFRFDLMALLGKDTMSKAATQLHAIDPGIALYGEPWTGGTSALPADQLLTKGAQKGMGVAVFNDNLRNGLDGSVFDSSAQGFATGATGLTDAIKNGVEGSINDFTASPGETINYVTSHDNYTLWDKIAQSNPNDSEADRIKMDELAQAIVMTSQGIPFMQGGEEMLRTKGGNDNSYNAGDVVNEFDWSRKAQYPDVFNYYSGLIHLRLDHPAFRMTTANEINSHLQFLNSPENTVAYELSDHANKDTWGNIVVIYNPNKTAETINLPSGKWEINATSGKVGESTLGQAEGSVQVPGISMMILHQEVSPSDGK

SEQ ID NO: 48857 - protein, 926 aa, Pullulanibacillus naganoensis
DGNTTNIVVHYFRPSGDYTDWNLWMWPENGDGAEYDFNQPTDSYGEVASVDIPGNPSQVGIIVRKGNWDAKDIDSDRYIDLSKGHEIWLVQGNSQIFYSEKDAEAAAQPAVSNAYLDASNQVLVKLSQPFTLGEGSSGFTVHDDTANKDIPVTSVSDANQVTAVLAGTFQHIFGGSDWAPDNHNTLLKKVNSNLYQFSGNLPEGNYQYKVALNDSWNNPSYPSDNINLTVPAGGAHVTFSYIPSTHAVYDTINNPNADLQVDSSGVKTDLVAVTLGENPDVSHTLSIQTEDYQAGQVIPRKVLDSSQYYYSGDDLGNTYTKNATTFKVWAPTSTQVNVLLYNSATGAVTKTVPMTASGHGVWEATVNQDLENWYYMYEVTGQGSTRTAVDPYATAIAPNGTRGMIVDLAKTDPAGWESDKHITPKNIEDEVIYEMDVRDFSIDSNSGMKNKGKYLALTEKGTKGPDGVKTGVDSLKQLGITHVQLQPVFAFNSVNENDPTQYNWGYDPRNYNVPEGQYATNANGTTRIKEFKEMVLSLHQDHIGVNMDVVYNHTFATQISDFDKIVPEYYYRTDDAGNYTNGSGTGNEIAAERPMVQKFIIDSLKFWVNEYHVDGFRFDLMALLGKDTMSKAATQLHAIDPGIALYGEPWTGGTSALPADQLLTKGAQKGMGVAVFNDNLRNGLDGSVFDSSAQGFATGATGLTDAIKNGVEGSINDFTASPSETINYVTSHDNYTLWDKIAQSNPNDSEADRIKMDELAQAIVMTSQGIPFMQGGEEMLRTKGGNDNSYNAGDVVNEFDWSRKAQYPDVFNYYSGLIHLRLDHPAFRMTTANEINSHLQFLNSPENTVAYELSDHANKDTWGNIVVIYNPNKTAETINLPSGKWEINATSGKVGESTLGQAEGSVQVPGISMMILHQEVSPSDGK

SEQ ID NO: 48858 - protein, 926 aa, Pullulanibacillus naganoensis
DGNTTNIVVHYFRPSGDYTDWNLWMWPENGDGAEYDFNQPTDSYGEVASVDIPGNPSQVGIIVRKGNWDAKDIDSDRYIDLSKGHEIWLVQGNSQIFYSEKDAEAAAQPAVSNAYLDASNQVLVKLSQPFTLGEGSSGFTVHDDTANKDIPVTSVSDANQVTAVLAGTFQHIFGGSDWAPDNHNTLLKKVNSNLYQFSGNLPEGNYQYKVALNDSWNNPSYPSDNINLTVPAGGAHVTFSYIPSTHAVYDTINNPNADLQVDSSGVKTDLVAVTLGENPDVSHTLSIQTEDYQAGQVIPRKVLDSSQYYYSGDDLGNTYTKNATTFKVWAPTSTQVNVLLYNSATGAVTKTVPMTASGHGVWEATVNQDLENWYYMYEVTGQGSTRTAVDPYATAIAPNGTRGMIVDLAKTDPAGWESDKHITPKNIEDEVIYEMDVRDFSIDSNSGMKNKGKYLALTEKGTKGPDGVKTGVDSLKQLGITHVQLQPVFAFASVNENDPTQYNWGYDPRNYNVPEGQYATNANGTTRIKEFKEMVLSLHQDHIGVNMDVVYNHTFATQISDFDKIVPEYYYRTDDAGNYTNGSGTGNEIAAERPMVQKFIIDSLKFWVNEYHVDGFRFDLMALLGKDTMSKAATQLHAIDPGIALYGEPWTGGTSALPADQLLTKGAQKGMGVAVFNDNLRNGLDGSVFDSSAQGFATGATGLTDAIKNGVEGSINDFTASPGETINYVSSHDNYTLWDKIAQSNPNDSEADRIKMDELAQAIVMTSQGIPFMQGGEEMLRTKGGNDNSYNAGDVVNEFDWSRKAQYPDVFNYYSGLIHLRLDHPAFRMTTANEINSHLQFLNSPENTVAYELSDHANKDTWGNIVVIYNPNKTAETINLPSGKWEINATSGKVGESTLGQAEGSVQVPGISMMILHQEVSPSDGK

SEQ ID NO: 48859 - protein, 926 aa, Pullulanibacillus naganoensis
DGNTTNIVVHYFRPSGDYTDWNLWMWPENGDGAEYDFNQPTDSYGEVASVDIPGNPSQVGIIVRKGNWDAKDIDSDRYIDLSKGHEIWLVQGNSQIFYSEKDAEAAAQPAVSNAYLDASNQVLVKLSQPFTLGEGSSGFTVHDDTANKDIPVTSVSDANQVTAVLAGTFQHIFGGSDWAPDNHNTLLKKVNSNLYQFSGNLPEGNYQYKVALNDSWNNPSYPSDNINLTVPAGGAHVTFSYIPSTHAVYDTINNPNADLQVDSSGVKTDLVAVTLGENPDVSHTLSIQTEDYQAGQVIPRKVLDSSQYYYSGDDLGNTYTKNATTFKVWAPTSTQVNVLLYNSATGAVTKTVPMTASGHGVWEATVNQDLENWYYMYEVTGQGSTRTAVDPYATAIAPNGTRGMIVDLAKTDPAGWESDKHITPKNIEDEVIYEMDVRDFSIDSNSGMKNKGKYLALTEKGTKGPDGVKTGVDSLKQLGITHVQLQPVFAFASVNENDPTQYNWGYDPRNYNVPEGQYATNANGTTRIKEFKEMVLSLHQDHIGVNMDVVYNHTFATQISDFDKIVPEYYYRTDDAGNYTNGSGTGNEIASERPMVQKFIIDSLKFWVNEYHVDGFRFDLMALLGKDTMSKAATQLHAIDPGIALYGEPWTGGTSALPADQLLTKGAQKGMGVAVFNDNLRNGLDGSVFDSSAQGFATGATGLTDAIKNGVEGSINDFTASPGETINYVTSHDNYTLWDKIAQSNPNDSEADRIKMDELAQAIVMTSQGIPFMQGGEEMLRTKGGNDNSYNAGDVVNEFDWSRKAQYPDVFNYYSGLIHLRLDHPAFRMTTANEINSHLQFLNSPENTVAYELSDHANKDTWGNIVVIYNPNKTAETINLPSGKWEINATSGKVGESTLGQAEGSVQVPGISMMILHQEVSPSDGK

SEQ ID NO: 48860 - protein, 926 aa, Pullulanibacillus naganoensis
DGNTTNIVVHYFRPSGDYTDWNLWMWPENGDGAEYDFNQPTDSYGEVASVDIPGNPSQVGIIVRKGNWDAKDIDSDRYIDLSKGHEIWLVQGNSQIFYSEKDAEAAAQPAVSNAYLDASNQVLVKLSQPFTLGEGSSGFTVHDDTANKDIPVTSVSDANQVTAVLAGTFQHIFGGSDWAPDNHNTLLKKVNSNLYQFSGNLPEGNYQYKVALNDSWNNPSYPSDNINLTVPAGGAHVTFSYIPSTHAVYDTINNPNADLQVDSSGVKTDLVAVTLGENPDVSHTLSIQTEDYQAGQVIPRKVLDSSQYYYSGDDLGNTYTKNATTFKVWAPTSTQVNVLLYNSATGAVTKTVPMTASGHGVWEATVNQDLENWYYMYEVTGQGSTRTAVDPYATAIAPNGTRGMIVDLAKTDPAGWESDKHITPKNIEDEVIYEMDVRDFSIDSNSGMKNKGKYLALTEKGTKGPDGVKTGVDSLKQLGITHVQLQPVFAFNSVNENDPTQYNWGYDPRNYNVPEGQYATNANGTTRIKEFKEMVLSLHQDHIGVNMDVVYNHTFATQISDFDKIVPEYYYRTDDAGNYTNGSGTGNEIASERPMVQKFIIDSLKFWVNEYHVDGFRFDLMALLGKDTMSKAATQLHAIDPGIALYGEPWTGGTSALPADQLLTKGAQKGMGVAVFNDNLRNGLDGSVFDSSAQGFATGATGLTDAIKNGVEGSINDFTASPGETINYVSSHDNYTLWDKIAQSNPNDSEADRIKMDELAQAIVMTSQGIPFMQGGEEMLRTKGGNDNSYNAGDVVNEFDWSRKAQYPDVFNYYSGLIHLRLDHPAFRMTTANEINSHLQFLNSPENTVAYELSDHANKDTWGNIVVIYNPNKTAETINLPSGKWEINATSGKVGESTLGQAEGSVQVPGISMMILHQEVSPSDGK

SEQ ID NO: 48861 - protein, 926 aa, Pullulanibacillus naganoensis
DGNTTNIVVHYFRPSGDYTDWNLWMWPENGDGAEYDFNQPTDSYGEVASVDIPGNPSQVGIIVRKGNWDAKDIDSDRYIDLSKGHEIWLVQGNSQIFYSEKDAEAAAQPAVSNAYLDASNQVLVKLSQPFTLGEGSSGFTVHDDTANKDIPVTSVSDANQVTAVLAGTFQHIFGGSDWAPDNHNTLLKKVNSNLYQFSGNLPEGNYQYKVALNDSWNNPSYPSDNINLTVPAGGAHVTFSYIPSTHAVYDTINNPNADLQVDSSGVKTDLVAVTLGENPDVSHTLSIQTEDYQAGQVIPRKVLDSSQYYYSGDDLGNTYTKNATTFKVWAPTSTQVNVLLYNSATGAVTKTVPMTASGHGVWEATVNQDLENWYYMYEVTGQGSTRTAVDPYATAIAPNGTRGMIVDLAKTDPAGWESDKHITPKNIEDEVIYEMDVRDFSIDSNSGMKNKGKYLALTEKGTKGPDGVKTGVDSLKQLGITHVQLQPVFAFNSVNENDPTQYNWGYDPRNYNVPEGQYATNANGTTRIKEFKEMVLSLHQDHIGVNMDVVYNHTFATQISDFDKIVPEYYYRTDDAGNYTNGSGTGNEIASERPMVQKFIIDSLKFWVNEYHVDGFRFDLMALLGKDTMSKAATQLHAIDPGIALYGEPWTGGTSALPADQLLTKGAQKGMGVAVFNDNLRNGLDGSVFDSSAQGFATGATGLTDAIKRGVEGSINDFTASPGETINYVTSHDNYTLWDKIAQSNPNDSEADRIKMDELAQAIVMTSQGIPFMQGGEEMLRTKGGNDNSYNAGDVVNEFDWSRKAQYPDVFNYYSGLIHLRLDHPAFRMTTANEINSHLQFLNSPENTVAYELSDHANKDTWGNIVVIYNPNKTAETINLPSGKWEINATSGKVGESTLGQAEGSVQVPGISMMILHQEVSPSDGK

SEQ ID NO: 48862 - protein, 926 aa, Pullulanibacillus naganoensis
DGNTTNIVVHYFRPSGDYTDWNLWMWPENGDGAEYDFNQPTDSYGEVASVDIPGNPSQVGIIVRKGNWDAKDIDSDRYIDLSKGHEIWLVQGNSQIFYSEKDAEAAAQPAVSNAYLDASNQVLVKLSQPFTLGEGSSGFTVHDDTANKDIPVTSVSDANQVTAVLAGTFQHIFGGSDWAPDNHNTLLKKVNSNLYQFSGNLPEGNYQYKVALNDSWNNPSYPSDNINLTVPAGGAHVTFSYIPSTHAVYDTINNPNADLQVDSSGVKTDLVAVTLGENPDVSHTLSIQTEDYQAGQVIPRKVLDSSQYYYSGDDLGNTYTKNATTFKVWAPTSTQVNVLLYNSATGAVTKTVPMTASGHGVWEATVNQDLENWYYMYEVTGQGSTRTAVDPYATAIAPNGTRGMIVDLAKTDPAGWESDKHITPKNIEDEVIYEMDVRDFSIDSNSGMKNKGKYLALTEKGTKGPDGVKTGVDSLKQLGITHVQLQPVFAFNSVNENDPTQYNWGYDPRNYNVPEGQYATNANGTTRIKEFKEMVLSLHQDHIGVNMDVVYNHTFATQISDFDKIVPEYYYRTDDAGNYTNGSGTGNEIASERPMVQKFIIDSLKFWVNEYHVDGFRFDLMALLGKDTMSKAATQLHAIDPGIALYGEPWTGGTSALPADQLLTKGAQKGMGVAVFNDNLRNGLDGSVFDSSAQGFATGATGLTDAIKNGVEGSINDFTASPGETINYVTCHDNYTLWDKIAQSNPNDSEADRIKMDELAQAIVMTSQGIPFMQGGEEMLRTKGGNDNSYNAGDVVNEFDWSRKAQYPDVFNYYSGLIHLRLDHPAFRMTTANEINSHLQFLNSPENTVAYELSDHANKDTWGNIVVIYNPNKTAETINLPSGKWEINATSGKVGESTLGQAEGSVQVPGISMMILHQEVSPSDGK

SEQ ID NO: 48863 - protein, 926 aa, Pullulanibacillus naganoensis
DGNTTNIVVHYFRPSGDYTDWNLWMWPENGDGAEYDFNQPTDSYGEVASVDIPGNPSQVGIIVRKGNWDAKDIDSDRYIDLSKGHEIWLVQGNSQIFYSEKDAEAAAQPAVSNAYLDASNQVLVKLSQPFTLGEGSSGFTVHDDTANKDIPVTSVSDANQVTAVLAGTFQHIFGGSDWAPDNHNTLLKKVNSNLYQFSGNLPEGNYQYKVALNDSWNNPSYPSDNINLTVPAGGAHVTFSYIPSTHAVYDTINNPNADLQVDSSGVKTDLVAVTLGENPDVSHTLSIQTEDYQAGQVIPRKVLDSSQYYYSGDDLGNTYTKNATTFKVWAPTSTQVNVLLYNSATGAVTKTVPMTASGHGVWEATVNQDLENWYYMYEVTGQGSTRTAVDPYATAIAPNGTRGMIVDLAKTDPAGWESDKHITPKNIEDEVIYEMDVRDFSIDSNSGMKNKGKYLALTEKGTKGPDGVKTGVDSLKQLGITHVQLQPVFAFASVNENDPTQYNWGYDPRNYNVPEGQYATNANGTTRIKEFKEMVLSLHQDHIGVNMDVVYNHTFATQISDFDKIVPEYYYRTDDAGNYTNGSGTGNEIAAERPMVQKFIIDSLKFWVNEYHVDGFRFDLMALLGKDTMSKAATQLHAIDPGIALYGEPWTGGTSALPADQLLTKGAQKGMGVAVFNDNLRNGLDGSVFDSSAQGFATGATGLTDAIKRGVEGSINDFTASPGETINYVTSHDNYTLWDKIAQSNPNDSEADRIKMDELAQAIVMTSQGIPFMQGGEEMLRTKGGNDNSYNAGDVVNEFDWSRKAQYPDVFNYYSGLIHLRLDHPAFRMTTANEINSHLQFLNSPENTVAYELSDHANKDTWGNIVVIYNPNKTAETINLPSGKWEINATSGKVGESTLGQAEGSVQVPGISMMILHQEVSPSDGK

SEQ ID NO: 48864 - protein, 926 aa, Pullulanibacillus naganoensis
DGNTTNIVVHYFRPSGDYTDWNLWMWPENGDGAEYDFNQPTDSYGEVASVDIPGNPSQVGIIVRKGNWDAKDIDSDRYIDLSKGHEIWLVQGNSQIFYSEKDAEAAAQPAVSNAYLDASNQVLVKLSQPFTLGEGSSGFTVHDDTANKDIPVTSVSDANQVTAVLAGTFQHIFGGSDWAPDNHNTLLKKVNSNLYQFSGNLPEGNYQYKVALNDSWNNPSYPSDNINLTVPAGGAHVTFSYIPSTHAVYDTINNPNADLQVDSSGVKTDLVAVTLGENPDVSHTLSIQTEDYQAGQVIPRKVLDSSQYYYSGDDLGNTYTKNATTFKVWAPTSTQVNVLLYNSATGAVTKTVPMTASGHGVWEATVNQDLENWYYMYEVTGQGSTRTAVDPYATAIAPNGTRGMIVDLAKTDPAGWESDKHITPKNIEDEVIYEMDVRDFSIDSNSGMKNKGKYLALTEKGTKGPDGVKTGVDSLKQLGITHVQLQPVFAFASVNENDPTQYNWGYDPRNYNVPEGQYATNANGTTRIKEFKEMVLSLHQDHIGVNMDVVYNHTFATQISDFDKIVPEYYYRTDDAGNYTNGSGTGNEIAAERPMVQKFIIDSLKFWVNEYHVDGFRFDLMALLGKDTMSKAATQLHAIDPGIALYGEPWTGGTSALPADQLLTKGAQKGMGVAVFNDNLRNGLDGSVFDSSAQGFATGATGLTDAIKNGVEGSINDFTASPSETINYVTSHDNYTLWDKIAQSNPNDSEADRIKMDELAQAIVMTSQGIPFMQGGEEMLRTKGGNDNSYNAGDVVNEFDWSRKAQYPDVFNYYSGLIHLRLDHPAFRMTTANEINSHLQFLNSPENTVAYELSDHANKDTWGNIVVIYNPNKTAETINLPSGKWEINATSGKVGESTLGQAEGSVQVPGISMMILHQEVSPSDGK

SEQ ID NO: 48865 - protein, 926 aa, Pullulanibacillus naganoensis
DGNTTNIVVHYFRPSGDYTDWNLWMWPENGDGAEYDFNQPTDSYGEVASVDIPGNPSQVGIIVRKGNWDAKDIDSDRYIDLSKGHEIWLVQGNSQIFYSEKDAEAAAQPAVSNAYLDASNQVLVKLSQPFTLGEGSSGFTVHDDTANKDIPVTSVSDANQVTAVLAGTFQHIFGGSDWAPDNHNTLLKKVNSNLYQFSGNLPEGNYQYKVALNDSWNNPSYPSDNINLTVPAGGAHVTFSYIPSTHAVYDTINNPNADLQVDSSGVKTDLVAVTLGENPDVSHTLSIQTEDYQAGQVIPRKVLDSSQYYYSGDDLGNTYTKNATTFKVWAPTSTQVNVLLYNSATGAVTKTVPMTASGHGVWEATVNQDLENWYYMYEVTGQGSTRTAVDPYATAIAPNGTRGMIVDLAKTDPAGWESDKHITPKNIEDEVIYEMDVRDFSIDSNSGMKNKGKYLALTEKGTKGPDGVKTGVDSLKQLGITHVQLQPVFAFASVNENDPTQYNWGYDPRNYNVPEGQYATNANGTTRIKEFKEMVLSLHQDHIGVNMDVVYNHTFATQISDFDKIVPEYYYRTDDAGNYTNGSGTGNEIAAERPMVQKFIIDSLKFWVNEYHVDGFRFDLMALLGKDTMSKAATQLHAIDPGIALYGEPWTGGTSALPADQLLTKGAQKGMGVAVFNDNLRNGLDGSVFDSSAQGFATGATGLTDAIKNGVEGSINDFTASPGETINYVTCHDNYTLWDKIAQSNPNDSEADRIKMDELAQAIVMTSQGIPFMQGGEEMLRTKGGNDNSYNAGDVVNEFDWSRKAQYPDVFNYYSGLIHLRLDHPAFRMTTANEINSHLQFLNSPENTVAYELSDHANKDTWGNIVVIYNPNKTAETINLPSGKWEINATSGKVGESTLGQAEGSVQVPGISMMILHQEVSPSDGK

SEQ ID NO: 48866 - protein, 926 aa, Pullulanibacillus naganoensis
DGNTTNIVVHYFRPSGDYTDWNLWMWPENGDGAEYDFNQPTDSYGEVASVDIPGNPSQVGIIVRKGNWDAKDIDSDRYIDLSKGHEIWLVQGNSQIFYSEKDAEAAAQPAVSNAYLDASNQVLVKLSQPFTLGEGSSGFTVHDDTANKDIPVTSVSDANQVTAVLAGTFQHIFGGSDWAPDNHNTLLKKVNSNLYQFSGNLPEGNYQYKVALNDSWNNPSYPSDNINLTVPAGGAHVTFSYIPSTHAVYDTINNPNADLQVDSSGVKTDLVAVTLGENPDVSHTLSIQTEDYQAGQVIPRKVLDSSQYYYSGDDLGNTYTKNATTFKVWAPTSTQVNVLLYNSATGAVTKTVPMTASGHGVWEATVNQDLENWYYMYEVTGQGSTRTAVDPYATAIAPNGTRGMIVDLAKTDPAGWESDKHITPKNIEDEVIYEMDVRDFSIDSNSGMKNKGKYLALTEKGTKGPDGVKTGVDSLKQLGITHVQLQPVFAFNSVNENDPTQYNWGYDPRNYNVPEGQYATNANGTTRIKEFKEMVLSLHQDHIGVNMDVVYNHTFATQISDFDKIVPEYYYRTDDAGNYTNGSGTGNEIASERPMVQKFIIDSLKFWVNEYHVDGFRFDLMALLGKDTMSKAATQLHAIDPGIALYGEPWTGGTSALPADQLLTKGAQKGMGVAVFNDNLRNGLDGSVFDSSAQGFATGATGLTDAIKNGVEGSINDFTASPSETINYVTSHDNYTLWDKIAQSNPNDSEADRIKMDELAQAIVMTSQGIPFMQGGEEMLRTKGGNDNSYNAGDVVNEFDWSRKAQYPDVFNYYSGLIHLRLDHPAFRMTTANEINSHLQFLNSPENTVAYELSDHANKDTWGNIVVIYNPNKTAETINLPSGKWEINATSGKVGESTLGQAEGSVQVPGISMMILHQEVSPSDGK

SEQ ID NO: 48867 - protein, 926 aa, Pullulanibacillus naganoensis
DGNTTNIVVHYFRPSGDYTDWNLWMWPENGDGAEYDFNQPTDSYGEVASVDIPGNPSQVGIIVRKGNWDAKDIDSDRYIDLSKGHEIWLVQGNSQIFYSEKDAEAAAQPAVSNAYLDASNQVLVKLSQPFTLGEGSSGFTVHDDTANKDIPVTSVSDANQVTAVLAGTFQHIFGGSDWAPDNHNTLLKKVNSNLYQFSGNLPEGNYQYKVALNDSWNNPSYPSDNINLTVPAGGAHVTFSYIPSTHAVYDTINNPNADLQVDSSGVKTDLVAVTLGENPDVSHTLSIQTEDYQAGQVIPRKVLDSSQYYYSGDDLGNTYTKNATTFKVWAPTSTQVNVLLYNSATGAVTKTVPMTASGHGVWEATVNQDLENWYYMYEVTGQGSTRTAVDPYATAIAPNGTRGMIVDLAKTDPAGWESDKHITPKNIEDEVIYEMDVRDFSIDSNSGMKNKGKYLALTEKGTKGPDGVKTGVDSLKQLGITHVQLQPVFAFASVNENDPTQYNWGYDPRNYNVPEGQYATNANGTTRIKEFKEMVLSLHQDHIGVNMDVVYNHTFATQISDFDKIVPEYYYRTDDAGNYTNGSGTGNEIAAERPMVQKFIIDSLKFWVNEYHVDGFRFDLMALLGKDTMSKAATQLHAIDPGIALYGEPWTGGTSALPADQLLTKGAQKGMGVAVFNDNLRNGLDGSVFDSSAQGFATGATGLTDAIKRGVEGSINDFTASPGETINYVSSHDNYTLWDKIAQSNPNDSEADRIKMDELAQAIVMTSQGIPFMQGGEEMLRTKGGNDNSYNAGDVVNEFDWSRKAQYPDVFNYYSGLIHLRLDHPAFRMTTANEINSHLQFLNSPENTVAYELSDHANKDTWGNIVVIYNPNKTAETINLPSGKWEINATSGKVGESTLGQAEGSVQVPGISMMILHQEVSPSDGK

SEQ ID NO: 48868 - protein, 926 aa, Pullulanibacillus naganoensis
DGNTTNIVVHYFRPSGDYTDWNLWMWPENGDGAEYDFNQPTDSYGEVASVDIPGNPSQVGIIVRKGNWDAKDIDSDRYIDLSKGHEIWLVQGNSQIFYSEKDAEAAAQPAVSNAYLDASNQVLVKLSQPFTLGEGSSGFTVHDDTANKDIPVTSVSDANQVTAVLAGTFQHIFGGSDWAPDNHNTLLKKVNSNLYQFSGNLPEGNYQYKVALNDSWNNPSYPSDNINLTVPAGGAHVTFSYIPSTHAVYDTINNPNADLQVDSSGVKTDLVAVTLGENPDVSHTLSIQTEDYQAGQVIPRKVLDSSQYYYSGDDLGNTYTKNATTFKVWAPTSTQVNVLLYNSATGAVTKTVPMTASGHGVWEATVNQDLENWYYMYEVTGQGSTRTAVDPYATAIAPNGTRGMIVDLAKTDPAGWESDKHITPKNIEDEVIYEMDVRDFSIDSNSGMKNKGKYLALTEKGTKGPDGVKTGVDSLKQLGITHVQLQPVFAFASVNENDPTQYNWGYDPRNYNVPEGQYATNANGTTRIKEFKEMVLSLHQDHIGVNMDVVYNHTFATQISDFDKIVPEYYYRTDDAGNYTNGSGTGNEIAAERPMVQKFIIDSLKFWVNEYHVDGFRFDLMALLGKDTMSKAATQLHAIDPGIALYGEPWTGGTSALPADQLLTKGAQKGMGVAVFNDNLRNGLDGSVFDSSAQGFATGATGLTDAIKRGVEGSINDFTASPGETINYVTCHDNYTLWDKIAQSNPNDSEADRIKMDELAQAIVMTSQGIPFMQGGEEMLRTKGGNDNSYNAGDVVNEFDWSRKAQYPDVFNYYSGLIHLRLDHPAFRMTTANEINSHLQFLNSPENTVAYELSDHANKDTWGNIVVIYNPNKTAETINLPSGKWEINATSGKVGESTLGQAEGSVQVPGISMMILHQEVSPSDGK

SEQ ID NO: 48869 - protein, 926 aa, Pullulanibacillus naganoensis
DGNTTNIVVHYFRPSGDYTDWNLWMWPENGDGAEYDFNQPTDSYGEVASVDIPGNPSQVGIIVRKGNWDAKDIDSDRYIDLSKGHEIWLVQGNSQIFYSEKDAEAAAQPAVSNAYLDASNQVLVKLSQPFTLGEGSSGFTVHDDTANKDIPVTSVSDANQVTAVLAGTFQHIFGGSDWAPDNHNTLLKKVNSNLYQFSGNLPEGNYQYKVALNDSWNNPSYPSDNINLTVPAGGAHVTFSYIPSTHAVYDTINNPNADLQVDSSGVKTDLVAVTLGENPDVSHTLSIQTEDYQAGQVIPRKVLDSSQYYYSGDDLGNTYTKNATTFKVWAPTSTQVNVLLYNSATGAVTKTVPMTASGHGVWEATVNQDLENWYYMYEVTGQGSTRTAVDPYATAIAPNGTRGMIVDLAKTDPAGWESDKHITPKNIEDEVIYEMDVRDFSIDSNSGMKNKGKYLALTEKGTKGPDGVKTGVDSLKQLGITHVQLQPVFAFASVNENDPTQYNWGYDPRNYNVPEGQYATNANGTTRIKEFKEMVLSLHQDHIGVNMDVVYNHTFATQISDFDKIVPEYYYRTDDAGNYTNGSGTGNEIASERPMVQKFIIDSLKFWVNEYHVDGFRFDLMALLGKDTMSKAATQLHAIDPGIALYGEPWTGGTSALPADQLLTKGAQKGMGVAVFNDNLRNGLDGSVFDSSAQGFATGATGLTDAIKRGVEGSINDFTASPGETINYVTSHDNYTLWDKIAQSNPNDSEADRIKMDELAQAIVMTSQGIPFMQGGEEMLRTKGGNDNSYNAGDVVNEFDWSRKAQYPDVFNYYSGLIHLRLDHPAFRMTTANEINSHLQFLNSPENTVAYELSDHANKDTWGNIVVIYNPNKTAETINLPSGKWEINATSGKVGESTLGQAEGSVQVPGISMMILHQEVSPSDGK

SEQ ID NO: 48870 - protein, 926 aa, Pullulanibacillus naganoensis
DGNTTNIVVHYFRPSGDYTDWNLWMWPENGDGAEYDFNQPTDSYGEVASVDIPGNPSQVGIIVRKGNWDAKDIDSDRYIDLSKGHEIWLVQGNSQIFYSEKDAEAAAQPAVSNAYLDASNQVLVKLSQPFTLGEGSSGFTVHDDTANKDIPVTSVSDANQVTAVLAGTFQHIFGGSDWAPDNHNTLLKKVNSNLYQFSGNLPEGNYQYKVALNDSWNNPSYPSDNINLTVPAGGAHVTFSYIPSTHAVYDTINNPNADLQVDSSGVKTDLVAVTLGENPDVSHTLSIQTEDYQAGQVIPRKVLDSSQYYYSGDDLGNTYTKNATTFKVWAPTSTQVNVLLYNSATGAVTKTVPMTASGHGVWEATVNQDLENWYYMYEVTGQGSTRTAVDPYATAIAPNGTRGMIVDLAKTDPAGWESDKHITPKNIEDEVIYEMDVRDFSIDSNSGMKNKGKYLALTEKGTKGPDGVKTGVDSLKQLGITHVQLQPVFAFASVNENDPTQYNWGYDPRNYNVPEGQYATNANGTTRIKEFKEMVLSLHQDHIGVNMDVVYNHTFATQISDFDKIVPEYYYRTDDAGNYTNGSGTGNEIAAERPMVQKFIIDSLKFWVNEYHVDGFRFDLMALLGKDTMSKAATQLHAIDPGIALYGEPWTGGTSALPADQLLTKGAQKGMGVAVFNDNLRNGLDGSVFDSSAQGFATGATGLTDAIKRGVEGSINDFTASPSETINYVTCHDNYTLWDKIAQSNPNDSEADRIKMDELAQAIVMTSQGIPFMQGGEEMLRTKGGNDNSYNAGDVVNEFDWSRKAQYPDVFNYYSGLIHLRLDHPAFRMTTANEINSHLQFLNSPENTVAYELSDHANKDTWGNIVVIYNPNKTAETINLPSGKWEINATSGKVGESTLGQAEGSVQVPGISMMILHQEVSPSDGK

SEQ ID NO: 48871 - protein, 926 aa, Pullulanibacillus naganoensis
DGNTTNIVVHYFRPSGDYTDWNLWMWPENGDGAEYDFNQPTDSYGEVASVDIPGNPSQVGIIVRKGNWDAKDIDSDRYIDLSKGHEIWLVQGNSQIFYSEKDAEAAAQPAVSNAYLDASNQVLVKLSQPFTLGEGSSGFTVHDDTANKDIPVTSVSDANQVTAVLAGTFQHIFGGSDWAPDNHNTLLKKVNSNLYQFSGNLPEGNYQYKVALNDSWNNPSYPSDNINLTVPAGGAHVTFSYIPSTHAVYDTINNPNADLQVDSSGVKTDLVAVTLGENPDVSHTLSIQTEDYQAGQVIPRKVLDSSQYYYSGDDLGNTYTKNATTFKVWAPTSTQVNVLLYNSATGAVTKTVPMTASGHGVWEATVNQDLENWYYMYEVTGQGSTRTAVDPYATAIAPNGTRGMIVDLAKTDPAGWESDKHITPKNIEDEVIYEMDVRDFSIDSNSGMKNKGKYLALTEKGTKGPDGVKTGVDSLKQLGITHVQLQPVFAFASVNENDPTQYNWGYDPRNYNVPEGQYATNANGTTRIKEFKEMVLSLHQDHIGVNMDVVYNHTFATQISDFDKIVPEYYYRTDDAGNYTNGSGTGNEIAAERPMVQKFIIDSLKFWVNEYHVDGFRFDLMALLGKDTMSKAATQLHAIDPGIALYGEPWTGGTSALPADQLLTKGAQKGMGVAVFNDNLRNGLDGSVFDSSAQGFATGATGLTDAIKRGVEGSINDFTASPSETINYVSSHDNYTLWDKIAQSNPNDSEADRIKMDELAQAIVMTSQGIPFMQGGEEMLRTKGGNDNSYNAGDVVNEFDWSRKAQYPDVFNYYSGLIHLRLDHPAFRMTTANEINSHLQFLNSPENTVAYELSDHANKDTWGNIVVIYNPNKTAETINLPSGKWEINATSGKVGESTLGQAEGSVQVPGISMMILHQEVSPSDGK

SEQ ID NO: 48872 - protein, 926 aa, Pullulanibacillus naganoensis
DGNTTNIVVHYFRPSGDYTDWNLWMWPENGDGAEYDFNQPTDSYGEVASVDIPGNPSQVGIIVRKGNWDAKDIDSDRYIDLSKGHEIWLVQGNSQIFYSEKDAEAAAQPAVSNAYLDASNQVLVKLSQPFTLGEGSSGFTVHDDTANKDIPVTSVSDANQVTAVLAGTFQHIFGGSDWAPDNHNTLLKKVNSNLYQFSGNLPEGNYQYKVALNDSWNNPSYPSDNINLTVPAGGAHVTFSYIPSTHAVYDTINNPNADLQVDSSGVKTDLVAVTLGENPDVSHTLSIQTEDYQAGQVIPRKVLDSSQYYYSGDDLGNTYTKNATTFKVWAPTSTQVNVLLYNSATGAVTKTVPMTASGHGVWEATVNQDLENWYYMYEVTGQGSTRTAVDPYATAIAPNGTRGMIVDLAKTDPAGWESDKHITPKNIEDEVIYEMDVRDFSIDSNSGMKNKGKYLALTEKGTKGPDGVKTGVDSLKQLGITHVQLQPVFAFASVNENDPTQYNWGYDPRNYNVPEGQYATNANGTTRIKEFKEMVLSLHQDHIGVNMDVVYNHTFATQISDFDKIVPEYYYRTDDAGNYTNGSGTGNEIASERPMVQKFIIDSLKFWVNEYHVDGFRFDLMALLGKDTMSKAATQLHAIDPGIALYGEPWTGGTSALPADQLLTKGAQKGMGVAVFNDNLRNGLDGSVFDSSAQGFATGATGLTDAIKRGVEGSINDFTASPSETINYVTSHDNYTLWDKIAQSNPNDSEADRIKMDELAQAIVMTSQGIPFMQGGEEMLRTKGGNDNSYNAGDVVNEFDWSRKAQYPDVFNYYSGLIHLRLDHPAFRMTTANEINSHLQFLNSPENTVAYELSDHANKDTWGNIVVIYNPNKTAETINLPSGKWEINATSGKVGESTLGQAEGSVQVPGISMMILHQEVSPSDGK

SEQ ID NO: 48873 - protein, 926 aa, Pullulanibacillus naganoensis
DGNTTNIVVHYFRPSGDYTDWNLWMWPENGDGAEYDFNQPTDSYGEVASVDIPGNPSQVGIIVRKGNWDAKDIDSDRYIDLSKGHEIWLVQGNSQIFYSEKDAEAAAQPAVSNAYLDASNQVLVKLSQPFTLGEGSSGFTVHDDTANKDIPVTSVSDANQVTAVLAGTFQHIFGGSDWAPDNHNTLLKKVNSNLYQFSGNLPEGNYQYKVALNDSWNNPSYPSDNINLTVPAGGAHVTFSYIPSTHAVYDTINNPNADLQVDSSGVKTDLVAVTLGENPDVSHTLSIQTEDYQAGQVIPRKVLDSSQYYYSGDDLGNTYTKNATTFKVWAPTSTQVNVLLYNSATGAVTKTVPMTASGHGVWEATVNQDLENWYYMYEVTGQGSTRTAVDPYATAIAPNGTRGMIVDLAKTDPAGWESDKHITPKNIEDEVIYEMDVRDFSIDSNSGMKNKGKYLALTEKGTKGPDGVKTGVDSLKQLGITHVQLQPVFAFASVNENDPTQYNWGYDPRNYNVPEGQYATNANGTTRIKEFKEMVLSLHQDHIGVNMDVVYNHTFATQISDFDKIVPEYYYRTDDAGNYTNGSGTGNEIASERPMVQKFIIDSLKFWVNEYHVDGFRFDLMALLGKDTMSKAATQLHAIDPGIALYGEPWTGGTSALPADQLLTKGAQKGMGVAVFNDNLRNGLDGSVFDSSAQGFATGATGLTDAIKRGVEGSINDFTASPGETINYVSSHDNYTLWDKIAQSNPNDSEADRIKMDELAQAIVMTSQGIPFMQGGEEMLRTKGGNDNSYNAGDVVNEFDWSRKAQYPDVFNYYSGLIHLRLDHPAFRMTTANEINSHLQFLNSPENTVAYELSDHANKDTWGNIVVIYNPNKTAETINLPSGKWEINATSGKVGESTLGQAEGSVQVPGISMMILHQEVSPSDGK

SEQ ID NO: 48874 - protein, 614 aa, Bacillus sp.
YYYSGEDLGNTYTKKATTFKVWAPTSTKVNVLLYNKAAGALTKTVPMKASGHGVWSVTVPQNLENWYYLYEVTGQGSTRTAVDPYATAIAPNGTRGMVVDLAKTNPTGWKSDKHMTPKNIEDEVIYEMHVRDFSIDSNSGMTNKGKYLALTEKGTKGPENVKTGVDSLKQLGITHVQLQPVFAFNSVDETDPTQYNWGYDPRNYNVPEGQYATDANGTTRIKEFKEMVLSLHRNHIGVNMDVVYNHTFATQISDFDKIVPQYYYRTDDAGNYTNGSGTGNEVAAERPMVQKFIIDSLKYWVNEYHIDGFRFDLMALLGKDTMAKAAQELHAIDPGIALYGEPWTGGTSALPTDQLLTKGVQKGMGVAVFNDNLRNGLDGNVFDASSQGFATGATGLTDVIKKGVEGSINDFTSSPGETINYVTSHDNYTLWDKIAQSNPNDSEADRIKMDELAQAVVVTSQGVPFMQGGEEMLRTKGGNSNSYNAGDAVNEFDWSRKAQYSDVFNYYSGLIHLRLAHPAFRMTTANQIKEHLQFIDSPDNTVAYELTNHANKDKWGNIVVIYNPNKTAETVNLPSGKWAINATNGKIGESTLSHAEGHVQVPGISMMILHQETN

SEQ ID NO: 48875 - protein, 952 aa, Pullulanibacillus naganoensis
KKNIIVSITSLALVAGLSLTAFAATTDGNTTNIVVHYFRPSGDYTDWNLWMWPENGDGAEYDFNQPTDSYGEVASVDIPGNPSQVGIIVRKGNWDAKDIDSDRYIDLSKGHEIWLVQGNSQIFYSEKDAEAAAQPAVSNAYLDASNQVLVKLSQPFTLGEGSSGFTVHDDTANKDIPVTSVSDANQVTAVLAGTFQHIFGGSDWAPDNHNTLLKKVNSNLYQFSGNLPEGNYQYKVALNDSWNNPSYPSDNINLTVPAGGAHVTFSYIPSTHAVYDTINNPNADLQVDSSGVKTDLVAVTLGENPDVSHTLSIQTEDYQAGQVIPRKVLDSSQYYYSGDDLGNTYTKNATTFKVWAPTSTQVNVLLYNSATGAVTKTVPMTASGHGVWEATVNQDLENWYYMYEVTGQGSTRTAVDPYATAIAPNGTRGMIVDLAKTDPAGWESDKHITPKNIEDEVIYEMDVRDFSIDSNSGMKNKGKYLALTEKGTKGPDNVKTGVDSLKQLGITHVQLQPVFAFNSVNENDPTQYNWGYDPRNYNVPEGQYATNANGTTRIKEFKEMVLSLHQDHIGVNMDVVYNHTFATQISDFDKIVPEYYYRTDDAGNYTNGSGTGNEIAAERPMVQKFIIDSLKFWVNEYHVDGFRFDLMALLGKDTMSKAATQLHAIDPGIALYGEPWTGGTSALPADQLLTKGAQKGMGVAVFNDNLRNGLDGSVFDSSAQGFATGATGLTDAIKNGVEGSINDFTASPGETINYVTSHDNYTLWDKIAQSNPNDSEADRIKMDELAQAIVMTSQGIPFMQGGEEMLRTKGGNDNSYNAGDVVNEFDWSRKAQYPDVFNYYSGLIHLRLDHPAFRMTTANEINSHLQFLNSPENTVAYELSDHANKDTWGNIVVIYNPNKTAETINLPSGKWEINATSGKVGESTLGQAEGSVQVPGISMMILHQEVSPSDGK

SEQ ID NO: 48876 - protein, 921 aa, Bacillus sp.
DGTTTNVIVHYFRPGGDYQSWSLWMWPEGGDGNNYNFNGTDSYGEIANVSIPGSPSKVGIIVRTQDWAKDVSQDRYIDLSKGHEVWLVQGNSQIFYNEKDAEDAAEPAVSNAYLDAPNKVLVKLSQPFTLGEGASGFTVHDDTANGDIPVTKVKNANKVEDVTAILAGTFQHIFGGSDWAPDNHSTQLKKVNDNLYQFSGELPGGSYQYKVALNDSWNSSYPSDNINLTVPDGGAHVTFSYVPSTHAVYDTINNPGANLPLDGSGIKTDLVTVTLGENPDVSHTLSIQTDGFKTGRVIPRNVLDFSQYYYSGEDLGNTYTKKATTFKVWAPTSTKVNVLLYNKAAGALTKTVPMKASGHGVWSVTVPQNLENWYYLYEVTGQGSTRTAVDPYATAIAPNGTRGMVVDLAKTNPTGWKSDKHMTPKNIEDEVIYEMHVRDFSIDSNSGMTNKGKYLALTEKGTKGPENVKTGVDSLKQLGITHVQLQPVFAFNSVDETDPTQYNWGYDPRNYNVPEGQYATDANGTTRIKEFKEMVLSLHRNHIGVNMDVVYNHTFATQISDFDKIVPQYYYRTDDAGNYTNGSGTGNEVAAERPMVQKFIIDSLKYWVNEYHIDGFRFDLMALLGKDTMAKAAQELHAIDPGIALYGEPWTGGTSALPTDQLLTKGVQKGMGVAVFNDNLRNGLDGNVFDASSQGFATGATGLTDVIKKGVEGSINDFTSSPGETINYVTSHDNYTLWDKIAQSNPNDSEADRIKMDELAQAVVVTSQGVPFMQGGEEMLRTKGGNSNSYNAGDAVNEFDWSRKAQYSDVFNYYSGLIHLRLAHPAFRMTTANQIKEHLQFIDSPDNTVAYELTNHANKDKWGNIVVIYNPNKTAETVNLPSGKWAINATNGKIGESTLSHAEGHVQVPGISMMILHQETN

SEQ ID NO: 48877 - protein, 933 aa, Bacillus acidopullulyticus
DSTSTEVIVHYHRFDSNYANWDLWMWPYQPVNGNGAAYEFSGKDDFGVKADVQVPGDDTQVGLIVRTNDWSQKNTSDDLHIDLTKGHEIWIVQGDPNIYYNLSDAQAAATPKAVSNAYLDASNQVLVKLSQPFTLGEGASGFTVHDDTVNKDIPVTSVTDASLGQNVTAVLAGTFQHIFGGSDWAPDNHSTLLKKVNNNLYQFSGDLPEGNYQYKVALNDSWNNPSYPSNNIDLTVPTGGAHVTFSYVPSTHAVYDSINNPGADLPVNGSGVKTDLVTVTLGEDPDVSHTLSIQTDGYQAKQVISRNVLDSSQYYYSGDDLGNTYTHKATTFKVWAPTSTQVNVLLYNSATGSVTKTVPMTASGHGVWEATVNQNLENWYYMYEVTGQGSTRTAVDPYATAIAPNGTRGMIVDLEDTNPPGWKEDHQQTPANPVDEVIYEVHVRDFSIDANSGMKNKGKYLAFTEHGTKGPDNVKTGIDSLKELGINAVQLQPIEEFNSIDETQPNMYNWGYDPRNYNVPEGAYATTPEGTARITQLKQLIQSIHKDRIAINMDVVYNHTFNVGVSDFDKIVPQYYYRTDSAGNYTNGSGVGNEIATERPMVQKFVLDSVKYWVKEYHIDGFRFDLMALLGKDTMAKISKELHAINPGIVLYGEPWTGGTSGLSSDQLVTKGQQKGLGIGVFNDNLRNALDGNVFDSSAQGFATGATGLTDAIKNGVEGSINDFTSSPGETINYVTSHDNYTLWDKIALSNPNDSEADRIKMDELAQAVVMTSQGVPFMQGGEEMLRTKGGNDNSYNAGDTVNEFDWSRKAQYPDVFNYYSGLIHLRLDHPAFRMTTANEINSHLQFLNSPENTVAYELTDHVNKDKWGNIIVVYNPNKTAATINLPSGKWAINATSGKVGESTLGQAEGSVQVPGISMMILHQEVSPDHGKK

SEQ ID NO: 48878 - protein, 664 aa, Bacillus acidopullulyticus
SSEQTDLVQLTLASAPDVSHTIQVGAAGYEAVNLIPRNVLNLPRYYYSGNDLGNVYSNKATAFRVWAPTASDVQLLLYNSETGPVTKQLEMQKSDNGTWKLKVPGNLKNWYYLYQVTVNGKTQTAVDPYVRAISVNATRGMIVDLEDTNPPGWKEDHQQTPANPVDEVIYEVHVRDFSIDPNSGMKNKGKYLAFTEHGTKGPDNVKTGIDSLKELGINAVQLQPIEEFNSIDETQPNMYNWGYDPRNYNVPEGAYATTPEGTARITQLKQLIQSIHKDRIAINMDVVYNHTFATQISDFDKIVPEYYYRTDDAGNYTNGSGTGNEIAAERPMVQKFIIDSLKYWVNEYHIDGFRFDLMALLGKDTMSKAASELHAINPGIALYGEPWTGGTSALPEDQLLTKGAQKGMGVAVFNDNLRNALDGNVFDSSAQGFATGATGLTDAIKNGVEGSINDFTSSPGETINYVTSHDNYTLWDKIALSNPNDSEADRIKMDELAQAVVMTSQGVPFMQGGEEMLRTKGGNDNSYNAGDTVNEFDWSRKAQYPDVFNYYSGLIHLRLDHPAFRMTTANEINSHLQFLNSPENTVAYELTDHVNKDKWGNIIVVYNPNKTAATINLPSGKWAINATSGKVGESTLGQAEGSVQVPGISMMILHQEVSPDHGKK

SEQ ID NO: 48879 - protein, 664 aa, Bacillus acidopullulyticus
SSEQTDLVQLTLASAPDVSHTIQVGAAGYEAVTLIPRNVLNLPRYYYSGNDLGNVYSNKATAFRVWAPTASDVQLLLYNSETGPVTKQLEMQKSDNGTWKLKVPGNLKNWYYLYQVTVNGKTQTAVDPYVRAISVNATRGMIVDLEDTNPPGWKEDHQQTPANPVDEVIYEVHVRDFSIDANSGMKNKGKYLAFTEHGTKGPDNVKTGIDSLKELGINAVQLQPIEEFNSIDETQPNMYNWGYDPRNYNVPEGAYATTPEGTARITQLKQLIQSIHKDRIAINMDVVYNHTFATQISDFDKIVPEYYYRTDDAGNYTNGSGTGNEIAAERPMVQKFIIDSLKYWVNEYHIDGFRFDLMALLGKDTMSKAASELHAINPGIALYGEPWTGGTSALPEDQLLTKGAQKGMGVAVFNDNLRNALDGNVFDSSAQGFATGATGLTDAIKNGVEGSINDFTSSPGETINYVTSHDNYTLWDKIALSNPNDSEADRIKMDELAQAVVMTSQGVPFMQGGEEMLRTKGGNDNSYNAGDTVNEFDWSRKAQYPDVFNYYSGLIHLRLDHPAFRMTTANEINSHLQFLNSPENTVAYELTDHVNKDKWGNIIVVYNPNKTAATINLPSGKWAINATSGKVGESTLGQAEGSVQVPGISMMILHQEVSPDHGKK

SEQ ID NO: 48880 - protein, 664 aa, Bacillus acidopullulyticus
SSEQTDLVQLTLASAPDVSHTIQVGAAGYEAVNLIPRNVLNLPRYYYSGNDLGNVYSNKATAFRVWAPTASDVQLLLYNSETGPVTKQLEMQKSDNGTWKLKVPGNLKNWYYLYQVTVNGKTQTAVDPYVRAISVNATRGMIVDLEDTNPPGWKEDHQQTPANPVDEVIYEVHVRDFSIDPNSGMKNKGKYLAFTEHGTKGPDNVKTGIDSLKELGINAVQLQPIEEFNSIDETQPNMYNWGYDPRNYNVPEGAYATTPEGTARITQLKQLIQSIHKDRIAINMDVVYNHTFATQISDFDKIVPEYYYRTDDAGNYTNGSGTGNEIAAERPMVQKFIIDSLKYWVNEYHVDGFRFDLMALLGKDTMSKAASELHAINPGIALYGEPWTGGTSALPEDQLLTKGAQKGMGVAVFNDNLRNALDGNVFDSSAQGFATGATGLTDAIKNGVEGSINDFTSSPGETINYVTSHDNYTLWDKIALSNPNDSEADRIKMDELAQAVVMTSQGVPFMQGGEEMLRTKGGNDNSYNAGDTVNEFDWSRKAQYPDVFNYYSGLIHLRLDHPAFRMTTANEINSHLQFLNSPENTVAYELTDHVNKDKWGNIIVVYNPNKTAATINLPSGKWAINATSGKVGESTLGQAEGSVQVPGISMMILHQEVSPDHGKK

SEQ ID NO: 48881 - protein, 664 aa, Bacillus acidopullulyticus
SSEQTDLVQLTLASAPDVSHTIQVGAAGYEAVNLIPRNVLNLPRYYYSGNDLGNVYSNKATAFRVWAPTASDVQLLLYNSETGPVTKQLEMQKSDNGTWKLKVPGNLKNWYYLYQVTVNGKTQTAVDPYVRAISVNATRGMIVDLEDTNPPGWKEDHQQTPANPVDEVIYEVHVRDFSIDANSGMKNKGKYLAFTEHGTKGPDNVKTGIDSLKELGINAVQLQPIEEFNSIDETQPNSYNWGYDPRNYNVPEGAYATTPEGTARITQLKQLIQSIHKDRIAINMDVVYNHTFATQISDFDKIVPEYYYRTDDAGNYTNGSGTGNEIAAERPMVQKFIIDSLKYWVNEYHIDGFRFDLMALLGKDTMSKAASELHAINPGIALYGEPWTGGTSALPEDQLLTKGAQKGMGVAVFNDNLRNALDGNVFDSSAQGFATGATGLTDAIKNGVEGSINDFTSSPGETINYVTSHDNYTLWDKIALSNPNDSEADRIKMDELAQAVVMTSQGVPFMQGGEEMLRTKGGNDNSYNAGDTVNEFDWSRKAQYPDVFNYYSGLIHLRLDHPAFRMTTANEINSHLQFLNSPENTVAYELTDHVNKDKWGNIIVVYNPNKTAATINLPSGKWAINATSGKVGESTLGQAEGSVQVPGISMMILHQEVSPDHGKK

SEQ ID NO: 48882 - protein, 664 aa, Bacillus acidopullulyticus
SSEQTDLVQLTLASAPDVSHTIQVGAAGYEGVNLIPRNVLNLPRYYYSGNDLGNVYSNKATAFRVWAPTASDVQLLLYNSETGPVTKQLEMQKSDNGTWKLKVPGNLKNWYYLYQVTVNGKTQTAVDPYVRAISVNATRGMIVDLEDTNPPGWKEDHQQTPANPVDEVIYEVHVRDFSIDPNSGMKNKGKYLAFTEHGTKGPDNVKTGIDSLKELGINAVQLQPIEEFNSIDETQPNMYNWGYDPRNYNVPEGAYATTPEGTARITQLKQLIQSIHKDRIAINMDVVYNHTFATQISDFDKIVPEYYYRTDDAGNYTNGSGTGNEIAAERPMVQKFIIDSLKYWVNEYHIDGFRFDLMALLGKDTMSKAASELHAINPGIALYGEPWTGGTSALPEDQLLTKGAQKGMGVAVFNDNLRNALDGNVFDSSAQGFATGATGLTDAIKNGVEGSINDFTSSPGETINYVTSHDNYTLWDKIALSNPNDSEADRIKMDELAQAVVMTSQGVPFMQGGEEMLRTKGGNDNSYNAGDTVNEFDWSRKAQYPDVFNYYSGLIHLRLDHPAFRMTTANEINSHLQFLNSPENTVAYELTDHVNKDKWGNIIVVYNPNKTAATINLPSGKWAINATSGKVGESTLGQAEGSVQVPGISMMILHQEVSPDHGKK

SEQ ID NO: 48883 - protein, 664 aa, Bacillus acidopullulyticus
SSEQTDLVQLTLASAPDVSHTIQVGAAGYEAVNLIPRNVLNLPRYYYSGNDLGNVYSNKATAFRVWAPTASDVQLLLYNSETGPVTKQLEMQKSDNGTWKLKVPGNLKNWYYLYQVTVNGKTQTAVDPYVRAISVNATRGMIVDLEDTNPPGWKEDHQQTPANPVDEVIYEVHVRDFSIDPNSGMKNKGKYLAFTEHGTKGPDNVKTGIDSLKELGINAVQLQPIEEFNSIDETQPNSYNWGYDPRNYNVPEGAYATTPEGTARITQLKQLIQSIHKDRIAINMDVVYNHTFATQISDFDKIVPEYYYRTDDAGNYTNGSGTGNEIAAERPMVQKFIIDSLKYWVNEYHIDGFRFDLMALLGKDTMSKAASELHAINPGIALYGEPWTGGTSALPRDQLLTKGAQKGMGVAVFNDNLRNALDGNVFDSSAQGFATGATGLTDAIKNGVEGSINDFTSSPGETINYVTSHDNYTLWDKIALSNPNDSEADRIKMDELAQAVVMTSQGVPFMQGGEEMLRTKGGNDNSYNAGDTVNEFDWSRKAQYPDVFNYYSGLIHLRLDHPAFRMTTANEINSHLQFLNSPENTVAYELTDHVNKDKWGNIIVVYNPNKTAATINLPSGKWAINATSGKVGESTLGQAEGSVQVPGISMMILHQEVSPDHGKK

SEQ ID NO: 48884 - protein, 664 aa, Bacillus acidopullulyticus
SSEQTDLVQLTLASAPDVSHTIQVGAAGYEAVNLIPRNVLNLPRYYYSGNDLGNVYSNKATAFRVWAPTASDVQLLLYNSETGPVTKQLEMQKSDNGTWKLKVPGNLKNWYYLYQVTVNGKTQTAVDPYVRAISVNATRGMIVDLEDTNPPGWKEDHQQTPANPVDEVIYEVHVRDFSIDPNSGMKNKGKYLAFTEHGTKGPDNVKTGIDSLKELGINAVQLQPIEEFNSIDETQPNMYNWGYDPRNYNVPEGAYATTPEGTARITQLKQLIQSIHKDRIAINMDVVYNHTFATQISDFDKIVPEYYYRTDDAGNYTNGSGTGNEIAAERPMVQKFIIDSLKYWVNEYHIDGFRFDLMALLGKDTMSKAASELHAINPGIALYGEPWTGGTSALPRDQLLTKGAQKGMGVAVFNDNLRNALDGNVFDSSAQGFATGATGLTDAIKNGVEGSINDFTSSPGETINYVTSHDNYTLWDKIALSNPNDSEADRIKMDELAQAVVMTSQGVPFMQGGEEMLRTKGGNDNSYNAGDTVNEFDWSRKAQYPDVFNYYSGLIHLRLDHPAFRMTTANEINSHLQFLNSPENTVAYELTDHVNKDKWGNIIVVYNPNKTAATINLPSGKWAINATSGKVGESTLGQAEGSVQVPGISMMILHQEVSPDHGKK

SEQ ID NO: 48885 - protein, 664 aa, Bacillus acidopullulyticus
SSEQTDLVQLTLASAPDVSHTIQVGAAGYEAVNLIPRNVLNLPRYYYSGNDLGNVYSNKATAFRVWAPTASDVQLLLYNSETGPVTKQLEMQKSDNGTWKLKVPGNLKNWYYLYQVTVNGKTQTAVDPYVRAISVNATRGMIVDLEDTNPPGWKEDHQQTPANPVDEVIYEVHVRDFSIDANSGMKNKGKYLAFTEHGTKGPDNVKTGIDSLKELGINAVQLQPIEEFNSIDETQPNMYNWGYDPRNYNVPEGAYATTPEGTARITQLKQLIQSIHKDRIAINMDVVYNHTFATQISDFDKIVPEYYYRTDDAGNYTNGSGTGNEIAAERPMVQKFIIDSLKYWVNEYHIDGFRFDLMALLGKDTMSKAASELHAINPGIALYGEPWTGGTSALPEDQLLTKGAQKGMGVAVFNDNLRNALDGNVFDSSAQGFATGATGLTDAIKNGVEGSINDFTSSPGETINYVTSHDNYTLWDKIALSNPNDSEADRIKMDELAQAVVMTSQGVPFMQGGEEMLRTKGGNDNSYNAGDTVNEFDWSRKAQYPDVFNYYSGLIHLRLDHPAFRMTTANEINSHLQFLNSPENTVAYELTDHVNKDKWGNIIVVYNPNKTAATINLPSGKWAINATSGKVGESTLGQAEGSVQVPGISMMILHQEVSPDHGKK

SEQ ID NO: 48886 - protein, 664 aa, Bacillus acidopullulyticus
SSEQTDLVQLTLASAPDVSHTIQVGAAGYEGVNLIPRNVLNLPRYYYSGNDLGNVYSNKATAFRVWAPTASDVQLLLYNSETGPVTKQLEMQKSDNGTWKLKVPGNLKNWYYLYQVTVNGKTQTAVDPYVRAISVNATRGMIVDLEDTNPPGWKEDHQQTPANPVDEVIYEVHVRDFSIDANSGMKNKGKYLAFTEHGTKGPDNVKTGIDSLKELGINAVQLQPIEEFNSIDETQPNMYNWGYDPRNYNVPEGAYATTPEGTARITQLKQLIQSIHKDRIAINMDVVYNHTFATQISDFDKIVPEYYYRTDDAGNYTNGSGTGNEIAAERPMVQKFIIDSLKYWVNEYHIDGFRFDLMALLGKDTMSKAASELHAINPGIALYGEPWTGGTSALPEDQLLTKGAQKGMGVAVFNDNLRNALDGNVFDSSAQGFATGATGLTDAIKNGVEGSINDFTSSPGETINYVTSHDNYTLWDKIALSNPNDSEADRIKMDELAQAVVMTSQGVPFMQGGEEMLRTKGGNDNSYNAGDTVNEFDWSRKAQYPDVFNYYSGLIHLRLDHPAFRMTTANEINSHLQFLNSPENTVAYELTDHVNKDKWGNIIVVYNPNKTAATINLPSGKWAINATSGKVGESTLGQAEGSVQVPGISMMILHQEVSPDHGKK

SEQ ID NO: 48887 - protein, 664 aa, Bacillus acidopullulyticus
SSEQTDLVQLTLASAPDVSHTIQVGAAGYEGVNLIPRNVLNLPRYYYSGNDLGNVYSNKATAFRVWAPTASDVQLLLYNSETGPVTKQLEMQKSDNGTWKLKVPGNLKNWYYLYQVTVNGKTQTAVDPYVRAISVNATRGMIVDLEDTNPPGWKEDHQQTPANPVDEVIYEVHVRDFSIDPNSGMKNKGKYLAFTEHGTKGPDNVKTGIDSLKELGINAVQLQPIEEFNSIDETQPNSYNWGYDPRNYNVPEGAYATTPEGTARITQLKQLIQSIHKDRIAINMDVVYNHTFATQISDFDKIVPEYYYRTDDAGNYTNGSGTGNEIAAERPMVQKFIIDSLKYWVNEYHVDGFRFDLMALLGKDTMSKAASELHAINPGIALYGEPWTGGTSALPEDQLLTKGAQKGMGVAVFNDNLRNALDGNVFDSSAQGFATGATGLTDAIKNGVEGSINDFTSSPGETINYVTSHDNYTLWDKIALSNPNDSEADRIKMDELAQAVVMTSQGVPFMQGGEEMLRTKGGNDNSYNAGDTVNEFDWSRKAQYPDVFNYYSGLIHLRLDHPAFRMTTANEINSHLQFLNSPENTVAYELTDHVNKDKWGNIIVVYNPNKTAATINLPSGKWAINATSGKVGESTLGQAEGSVQVPGISMMILHQEVSPDHGKK

SEQ ID NO: 48888 - protein, 664 aa, Bacillus acidopullulyticus
SSEQTDLVQLTLASAPDVSHTIQVGAAGYEAVNLIPRNVLNLPRYYYSGNDLGNVYSNKATAFRVWAPTASDVQLLLYNSETGPVTKQLEMQKSDNGTWKLKVPGNLKNWYYLYQVTVNGKTQTAVDPYVRAISVNATRGMIVDLEDTNPPGWKEDHQQTPANPVDEVIYEVHVRDFSIDANSGMKNKGKYLAFTEHGTKGPDNVKTGIDSLKELGINAVQLQPIEEFNSIDETQPNMYNWGYDPRNYNVPEGAYATTPEGTARITQLKQLIQSIHKDRIAINMDVVYNHTFATQISDFDKIVPEYYYRTDDAGNYTNGSGTGNEIAAERPMVQKFIIDSLKYWVNEYHIDGFRFDLMALLGKDTMSKAASELHAINPGIALYGEPWTGGTSALPEDQLLTKGAQKGMGVAVFNDNLRNALDGNVFDSSAQGFATGATGLTDAIKNGVEGEINDFTSSPGETINYVTSHDNYTLWDKIALSNPNDSEADRIKMDELAQAVVMTSQGVPFMQGGEEMLRTKGGNDNSYNAGDTVNEFDWSRKAQYPDVFNYYSGLIHLRLDHPAFRMTTANEINSHLQFLNSPENTVAYELTDHVNKDKWGNIIVVYNPNKTAATINLPSGKWAINATSGKVGESTLGQAEGSVQVPGISMMILHQEVSPDHGKK

SEQ ID NO: 48889 - protein, 664 aa, Bacillus acidopullulyticus
SSEQTDLVQLTLASAPDVSHTIQVGAAGYEAVNLIPRKVLNLPRYYYSGNDLGNVYSNKATAFRVWAPTASDVQLLLYNSETGPVTKQLEMQKSDNGTWKLKVPGNLKNWYYLYQVTVNGKTQTAVDPYVRAISVNATRGMIVDLEDTNPPGWKEDHQQTPANPVDEVIYEVHVRDFSIDPNSGMKNKGKYLAFTEHGTKGPDNVKTGIDSLKELGINAVQLQPIEEFNSIDETQPNMYNWGYDPRNYNVPEGAYATTPEGTARITQLKQLIQSIHKDRIAINMDVVYNHTFATQISDFDKIVPEYYYRTDDAGNYTNGSGTGNEIAAERPMVQKFIIDSLKYWVNEYHIDGFRFDLMALLGKDTMSKAASELHAINPGIALYGEPWTGGTSALPRDQLLTKGAQKGMGVAVFNDNLRNALDGNVFDSSAQGFATGATGLTDAIKNGVEGSINDFTSSPGETINYVTSHDNYTLWDKIALSNPNDSEADRIKMDELAQAVVMTSQGVPFMQGGEEMLRTKGGNDNSYNAGDTVNEFDWSRKAQYPDVFNYYSGLIHLRLDHPAFRMTTANEINSHLQFLNSPENTVAYELTDHVNKDKWGNIIVVYNPNKTAATINLPSGKWAINATSGKVGESTLGQAEGSVQVPGISMMILHQEVSPDHGKK

SEQ ID NO: 48890 - protein, 664 aa, Bacillus acidopullulyticus
SSEQTDLVQLTLASAPDVSHTIQVGAAGYEAVNLIPRKVLNLPRYYYSGNDLGNVYSNKATAFRVWAPTASDVQLLLYNSETGPVTKQLEMQKSDNGTWKLKVPGNLKNWYYLYQVTVNGKTQTAVDPYVRAISVNATRGMIVDLEDTNPPGWKEDHQQTPANPVDEVIYEVHVRDFSIDPNSGMKNKGKYLAFTEHGTKGPDNVKTGIDSLKELGINAVQLQPIEEFNSIDETQPNSYNWGYDPRNYNVPEGAYATTPEGTARITQLKQLIQSIHKDRIAINMDVVYNHTFATQISDFDKIVPEYYYRTDDAGNYTNGSGTGNEIAAERPMVQKFIIDSLKYWVNEYHIDGFRFDLMALLGKDTMSKAASELHAINPGIALYGEPWTGGTSALPRDQLLTKGAQKGMGVAVFNDNLRNALDGNVFDSSAQGFATGATGLTDAIKNGVEGSINDFTSSPGETINYVTSHDNYTLWDKIALSNPNDSEADRIKMDELAQAVVMTSQGVPFMQGGEEMLRTKGGNDNSYNAGDTVNEFDWSRKAQYPDVFNYYSGLIHLRLDHPAFRMTTANEINSHLQFLNSPENTVAYELTDHVNKDKWGNIIVVYNPNKTAATINLPSGKWAINATSGKVGESTLGQAEGSVQVPGISMMILHQEVSPDHGKK

SEQ ID NO: 48891 - protein, 664 aa, Bacillus acidopullulyticus
SSEQTDLVQLTLASAPDVSHTIQVGAAGYEAVNLIPRNVLNLPRYYYSGNDLGNVYSNKATAFRVWAPTASDVQLLLYNSETGPVTKQLEMQKSDNGTWKLKVPGNLKNWYYLYQVTVNGKTQTAVDPYVRAISVNATRGMIVDLEDTNPPGWKEDHQQTPANPVDEVIYEVHVRDFSIDANSGMKNKGKYLAFTEHGTKGPDNVKTGIDSLKELGINAVQLQPIEEFNSIDETQPNMYNWGYDPRNYNVPEGAYATTPEGTARITQLKQLIQSIHKDRIAINMDVVYNHTFATQISDFDKIVPEYYYRTDDAGHYTNGSGTGNEIAAERPMVQKFIIDSLKYWVNEYHIDGFRFDLMALLGKDTMSKAASELHAINPGIALYGEPWTGGTSALPEDQLLTKGAQKGMGVAVFNDNLRNALDGNVFDSSAQGFATGATGLTDAIKNGVEGSINDFTSSPGETINYVTSHDNYTLWDKIALSNPNDSEADRIKMDELAQAVVMTSQGVPFMQGGEEMLRTKGGNDNSYNAGDTVNEFDWSRKAQYPDVFNYYSGLIHLRLDHPAFRMTTANEINSHLQFLNSPENTVAYELTDHVNKDKWGNIIVVYNPNKTAATINLPSGKWAINATSGKVGESTLGQAEGSVQVPGISMMILHQEVSPDHGKK

SEQ ID NO: 48892 - protein, 664 aa, Bacillus acidopullulyticus
SSEQTDLVQLTLASAPDVSHTIQVGAAGYEAVNLIPRKVLNLPRYYYSGNDLGNVYSNKATAFRVWAPTASDVQLLLYNSETGPVTKQLEMQKSDNGTWKLKVPGNLKNWYYLYQVTVNGKTQTAVDPYVRAISVNATRGMIVDLEDTNPPGWKEDHQQTPANPVDEVIYEVHVRDFSIDANSGMKNKGKYLAFTEHGTKGPDNVKTGIDSLKELGINAVQLQPIEEFNSIDETQPNMYNWGYDPRNYNVPEGAYATTPEGTARITQLKQLIQSIHKDRIAINMDVVYNHTFATQISDFDKIVPEYYYRTDDAGNYTNGSGTGNEIAAERPMVQKFIIDSLKYWVNEYHIDGFRFDLMALLGKDTMSKAASELHAINPGIALYGEPWTGGTSALPEDQLLTKGAQKGMGVAVFNDNLRNALDGNVFDSSAQGFATGATGLTDAIKNGVEGSINDFTSSPGETINYVTSHDNYTLWDKIALSNPNDSEADRIKMDELAQAVVMTSQGVPFMQGGEEMLRTKGGNDNSYNAGDTVNEFDWSRKAQYPDVFNYYSGLIHLRLDHPAFRMTTANEINSHLQFLNSPENTVAYELTDHVNKDKWGNIIVVYNPNKTAATINLPSGKWAINATSGKVGESTLGQAEGSVQVPGISMMILHQEVSPDHGKK

SEQ ID NO: 48893 - protein, 664 aa, Bacillus acidopullulyticus
SSEQTDLVQLTLASAPDVSHTIQVGAAGYEGVNLIPRNVLNLPRYYYSGNDLGNVYSNKATAFRVWAPTASDVQLLLYNSETGPVTKQLEMQKSDNGTWKLKVPGNLKNWYYLYQVTVNGKTQTAVDPYVRAISVNATRGMIVDLEDTNPPGWKEDHQQTPANPVDEVIYEVHVRDFSIDPNSGMKNKGKYLAFTEHGTKGPDNVKTGIDSLKELGINAVQLQPIEEFNSIDETQPNMYNWGYDPRNYNVPEGAYATTPEGTARITQLKQLIQSIHKDRIAINMDVVYNHTWATQISDFDKIVPEYYYRTDDAGNYTNGSGTGNEIAAERPMVQKFIIDSLKYWVNEYHIDGFRFDLMALLGKDTMSKAASELHAINPGIALYGEPWTGGTSALPEDQLLTKGAQKGMGVAVFNDNLRNALDGNVFDSSAQGFATGATGLTDAIKNGVEGSINDFTSSPGETINYVTSHDNYTLWDKIALSNPNDSEADRIKMDELAQAVVMTSQGVPFMQGGEEMLRTKGGNDNSYNAGDTVNEFDWSRKAQYPDVFNYYSGLIHLRLDHPAFRMTTANEINSHLQFLNSPENTVAYELTDHVNKDKWGNIIVVYNPNKTAATINLPSGKWAINATSGKVGESTLGQAEGSVQVPGISMMILHQEVSPDHGKK

SEQ ID NO: 48894 - protein, 664 aa, Bacillus acidopullulyticus
SSEQTDLVQLTLASAPDVSHTIQVGAAGYEAVNLIPRNVLNLPRYYYSGNDLGNVYSNKATAFRVWAPTASDVQLLLYNSETGPVTKQLEMQKSDNGTWKLKVPGNLKNWYYLYQVTVNGKTQTAVDPYVRAISVNATRGMIVDLEDTNPPGWKEDHQQTPANPVDEVIYEVHVRDFSIDANSGMKNKGKYLAFTEHGTKGPDNVKTGIDSLKELGINAVQLQPIEEFNSIDETQPNMYNWGYDPRNYNVPEGAYATTPEGTARITQLKQLIQSIHKDRIAINMDVVYNHTFATQVSDFDKIVPEYYYRTDDAGNYTNGSGTGNEIAAERPMVQKFIIDSLKYWVNEYHIDGFRFDLMALLGKDTMSKAASELHAINPGIALYGEPWTGGTSALPEDQLLTKGAQKGMGVAVFNDNLRNALDGNVFDSSAQGFATGATGLTDAIKNGVEGSINDFTSSPGETINYVTSHDNYTLWDKIALSNPNDSEADRIKMDELAQAVVMTSQGVPFMQGGEEMLRTKGGNDNSYNAGDTVNEFDWSRKAQYPDVFNYYSGLIHLRLDHPAFRMTTANEINSHLQFLNSPENTVAYELTDHVNKDKWGNIIVVYNPNKTAATINLPSGKWAINATSGKVGESTLGQAEGSVQVPGISMMILHQEVSPDHGKK

SEQ ID NO: 48895 - protein, 664 aa, Bacillus acidopullulyticus
SSEQTDLVQLTLASAPDVSHTIQVGAAGYEAVNLIPRNVLNLPRYYYSGNDLGNVYSNKATAFRVWAPTASDVQLLLYNSETGPVTKQLEMQKSDNGTWKLKVPGNLKNWYYLYQVTVNGKTQTAVDPYVRAISVNATRGMIVDLEDTNPPGWKEDHQQTPANPVDEVIYEVHVRDFSIDANSGMKNKGKYLAFTEHGTKGPDNVKTGIDSLKELGINAVQLQPIEEFNSIDETQPNMYNWGYDPRNYNVPEGAYATTPEGTARITQLKQLIQSIHKDRIAINMDVVYNHTFATQISDFDKIVPEYYYRTDDAGNYTNGSGTGNEIAAERPMVQKFIIDSLKYWVNEYHIDGFRFDLMALLGKDTMSKAASELHAINPGIALYGEPWTGGTSALPRDQLLTKGAQKGMGVAVFNDNLRNALDGNVFDSSAQGFATGATGLTDAIKNGVEGSINDFTSSPGETINYVTSHDNYTLWDKIALSNPNDSEADRIKMDELAQAVVMTSQGVPFMQGGEEMLRTKGGNDNSYNAGDTVNEFDWSRKAQYPDVFNYYSGLIHLRLDHPAFRMTTANEINSHLQFLNSPENTVAYELTDHVNKDKWGNIIVVYNPNKTAATINLPSGKWAINATSGKVGESTLGQAEGSVQVPGISMMILHQEVSPDHGKK

SEQ ID NO: 48896 - protein, 664 aa, Bacillus acidopullulyticus
SSEQTDLVQLTLASAPDVSHTIQVGAAGYEAVNLIPRNVLNLPRYYYSGNDLGNVYSNKATAFRVWAPTASDVQLLLYNSETGPVTKQLEMQKSDNGTWKLKVPGNLKNWYYLYQVTVNGKTQTAVDPYVRAISVNATRGMIVDLEDTNPPGWKEDHQQTPANPVDEVIYEVHVRDFSIDANSGMKNKGKYLAFTEHGTKGPDNVKTGIDSLKELGINAVQLQPIEEFNSIDETQPNMYNWGYDPRNYNVPEGAYATTPEGTARITQLKQLIQSIHKDRIAINMDVVYNHTWATQISDFDKIVPEYYYRTDDAGNYTNGSGTGNEIAAERPMVQKFIIDSLKYWVNEYHIDGFRFDLMALLGKDTMSKAASELHAINPGIALYGEPWTGGTSALPEDQLLTKGAQKGMGVAVFNDNLRNALDGNVFDSSAQGFATGATGLTDAIKNGVEGSINDFTSSPGETINYVTSHDNYTLWDKIALSNPNDSEADRIKMDELAQAVVMTSQGVPFMQGGEEMLRTKGGNDNSYNAGDTVNEFDWSRKAQYPDVFNYYSGLIHLRLDHPAFRMTTANEINSHLQFLNSPENTVAYELTDHVNKDKWGNIIVVYNPNKTAATINLPSGKWAINATSGKVGESTLGQAEGSVQVPGISMMILHQEVSPDHGKK

SEQ ID NO: 48897 - protein, 664 aa, Bacillus acidopullulyticus
SSEQTDLVQLTLASAPDVSHTIQVGAAGYEAVNLIPRNVLNLPRYYYSGNDLGNVYSNKATAFRVWAPTASDVQLLLYNSETGPVTKQLEMQKSDNGTWKLKVPGNLKNWYYLYQVTVNGKTQTAVDPYVRAISVNATRGMIVDLEDTNPPGWKEDHQQTPANPVDEVIYEVHVRDFSIDPNSGMKNKGKYLAFTEHGTKGPDNVKTGIDSLKELGINAVQLQPIEEFNSIDETQPNMYNWGYDPRNYNVPEGAYATTPEGTARITQLKQLIQSIHKDRIAINMDVVYNHTFATQVSDFDKIVPEYYYRTDDAGNYTNGSGTGNEIAAERPMVQKFIIDSLKYWVNEYHVDGFRFDLMALLGKDTMSKAASELHAINPGIALYGEPWTGGTSALPEDQLLTKGAQKGMGVAVFNDNLRNALDGNVFDSSAQGFATGATGLTDAIKNGVEGSINDFTSSPGETINYVTSHDNYTLWDKIALSNPNDSEADRIKMDELAQAVVMTSQGVPFMQGGEEMLRTKGGNDNSYNAGDTVNEFDWSRKAQYPDVFNYYSGLIHLRLDHPAFRMTTANEINSHLQFLNSPENTVAYELTDHVNKDKWGNIIVVYNPNKTAATINLPSGKWAINATSGKVGESTLGQAEGSVQVPGISMMILHQEVSPDHGKK

SEQ ID NO: 48898 - protein, 664 aa, Bacillus acidopullulyticus
SSEQTDLVQLTLASAPDVSHTIQVGAAGYEAVNLIPRNVLNLPRYYYSGNDLGNVYSNKATAFRVWAPTASDVQLLLYNSETGPVTKQLEMQKSDNGTWKLKVPGNLKNWYYLYQVTVNGKTQTAVDPYVRAISVNATRGMIVDLEDTNPPGWKEDHQQTPANPVDEVIYEVHVRDFSIDANSGMKNKGKYLAFTEHGTKGPDNVKTGIDSLKELGINAVQLQPIEEFNSIDETQPNMYNWGYDPRNYNVPEGAYATTPEGTARITQLKQLIQSIHKDRIAINMDVVYNHTFATQISDFDKIVPEYYYRTDDAGNYTNGSGTGNEIAAERPMVQKFIIDSLKYWVNEYHVDGFRFDLMALLGKDTMSKAASELHAINPGIALYGEPWTGGTSALPEDQLLTKGAQKGMGVAVFNDNLRNALDGNVFDSSAQGFATGATGLTDAIKNGVEGSINDFTSSPGETINYVTSHDNYTLWDKIALSNPNDSEADRIKMDELAQAVVMTSQGVPFMQGGEEMLRTKGGNDNSYNAGDTVNEFDWSRKAQYPDVFNYYSGLIHLRLDHPAFRMTTANEINSHLQFLNSPENTVAYELTDHVNKDKWGNIIVVYNPNKTAATINLPSGKWAINATSGKVGESTLGQAEGSVQVPGISMMILHQEVSPDHGKK

SEQ ID NO: 48899 - protein, 664 aa, Bacillus acidopullulyticus
SSEQTDLVQLTLASAPDVSHTIQVGAAGYEGVNLIPRNVLNLPRYYYSGNDLGNVYSNKATAFRVWAPTASDVQLLLYNSETGPVTKQLEMQKSDNGTWKLKVPGNLKNWYYLYQVTVNGKTQTAVDPYVRAISVNATRGMIVDLEDTNPPGWKEDHQQTPANPVDEVIYEVHVRDFSIDPNSGMKNKGKYLAFTEHGTKGPDNVKTGIDSLKELGINAVQLQPIEEFNSIDETQPNMYNWGYDPRNYNVPEGAYATTPEGTARITQLKQLIQSIHKDRIAINMDVVYNHTFATQVSDFDKIVPEYYYRTDDAGNYTNGSGTGNEIAAERPMVQKFIIDSLKYWVNEYHVDGFRFDLMALLGKDTMSKAASELHAINPGIALYGEPWTGGTSALPEDQLLTKGAQKGMGVAVFNDNLRNALDGNVFDSSAQGFATGATGLTDAIKNGVEGSINDFTSSPGETINYVTSHDNYTLWDKIALSNPNDSEADRIKMDELAQAVVMTSQGVPFMQGGEEMLRTKGGNDNSYNAGDTVNEFDWSRKAQYPDVFNYYSGLIHLRLDHPAFRMTTANEINSHLQFLNSPENTVAYELTDHVNKDKWGNIIVVYNPNKTAATINLPSGKWAINATSGKVGESTLGQAEGSVQVPGISMMILHQEVSPDHGKK

SEQ ID NO: 48900 - protein, 664 aa, Bacillus acidopullulyticus
SSEQTDLVQLTLASAPDVSHTIQVGAAGYEAVTLIPRNVLNLPRYYYSGNDLGNVYSNKATAFRVWAPTASDVQLLLYNSETGPVTKQLEMQKSDNGTWKLKVPGNLKNWYYLYQVTVNGKTQTAVDPYVRAISVNATRGMIVDLEDTNPPGWKEDHQQTPANPVDEVIYEVHVRDFSIDPNSGMKNKGKYLAFTEHGTKGPDNVKTGIDSLKELGINAVQLQPIEEFNSIDETQPNSYNWGYDPRNYNVPEGAYATTPEGTARITQLKQLIQSIHKDRIAINMDVVYNHTFATQVSDFDKIVPEYYYRTDDAGNYTNGSGTGNEIAAERPMVQKFIIDSLKYWVNEYHVDGFRFDLMALLGKDTMSKAASELHAINPGIALYGEPWTGGTSALPRDQLLTKGAQKGMGVAVFNDNLRNALDGNVFDSSAQGFATGATGLTDAIKNGVEGSINDFTSSPGETINYVTSHDNYTLWDKIALSNPNDSEADRIKMDELAQAVVMTSQGVPFMQGGEEMLRTKGGNDNSYNAGDTVNEFDWSRKAQYPDVFNYYSGLIHLRLDHPAFRMTTANEINSHLQFLNSPENTVAYELTDHVNKDKWGNIIVVYNPNKTAATINLPSGKWAINATSGKVGESTLGQAEGSVQVPGISMMILHQEVSPDHGKK

SEQ ID NO: 48901 - protein, 664 aa, Bacillus acidopullulyticus
SSEQTDLVQLTLASAPDVSHTIQVGAAGYEGVNLIPRNVLNLPRYYYSGNDLGNVYSNKATAFRVWAPTASDVQLLLYNSETGPVTKQLEMQKSDNGTWKLKVPGNLKNWYYLYQVTVNGKTQTAVDPYVRAISVNATRGMIVDLEDTNPPGWKEDHQQTPANPVDEVIYEVHVRDFSIDPNSGMKNKGKYLAFTEHGTKGPDNVKTGIDSLKELGINAVQLQPIEEFNSIDETQPNSYNWGYDPRNYNVPEGAYATTPEGTARITQLKQLIQSIHKDRIAINMDVVYNHTFATQVSDFDKIVPEYYYRTDDAGNYTNGSGTGNEIAAERPMVQKFIIDSLKYWVNEYHVDGFRFDLMALLGKDTMSKAASELHAINPGIALYGEPWTGGTSALPRDQLLTKGAQKGMGVAVFNDNLRNALDGNVFDSSAQGFATGATGLTDAIKNGVEGSINDFTSSPGETINYVTSHDNYTLWDKIALSNPNDSEADRIKMDELAQAVVMTSQGVPFMQGGEEMLRTKGGNDNSYNAGDTVNEFDWSRKAQYPDVFNYYSGLIHLRLDHPAFRMTTANEINSHLQFLNSPENTVAYELTDHVNKDKWGNIIVVYNPNKTAATINLPSGKWAINATSGKVGESTLGQAEGSVQVPGISMMILHQEVSPDHGKK

SEQ ID NO: 48902 - protein, 664 aa, Bacillus acidopullulyticus
SSEQTDLVQLTLASAPDVSHTIQVGAAGYEGVNLIPRKVLNLPRYYYSGNDLGNVYSNKATAFRVWAPTASDVQLLLYNSETGPVTKQLEMQKSDNGTWKLKVPGNLKNWYYLYQVTVNGKTQTAVDPYVRAISVNATRGMIVDLEDTNPPGWKEDHQQTPANPVDEVIYEVHVRDFSIDPNSGMKNKGKYLAFTEHGTKGPDNVKTGIDSLKELGINAVQLQPIEEFNSIDETQPNSYNWGYDPRNYNVPEGAYATTPEGTARITQLKQLIQSIHKDRIAINMDVVYNHTFATQVSDFDKIVPEYYYRTDDAGNYTNGSGTGNEIAAERPMVQKFIIDSLKYWVNEYHVDGFRFDLMALLGKDTMSKAASELHAINPGIALYGEPWTGGTSALPEDQLLTKGAQKGMGVAVFNDNLRNALDGNVFDSSAQGFATGATGLTDAIKNGVEGSINDFTSSPGETINYVTSHDNYTLWDKIALSNPNDSEADRIKMDELAQAVVMTSQGVPFMQGGEEMLRTKGGNDNSYNAGDTVNEFDWSRKAQYPDVFNYYSGLIHLRLDHPAFRMTTANEINSHLQFLNSPENTVAYELTDHVNKDKWGNIIVVYNPNKTAATINLPSGKWAINATSGKVGESTLGQAEGSVQVPGISMMILHQEVSPDHGKK

SEQ ID NO: 48903 - protein, 664 aa, Bacillus acidopullulyticus
SSEQTDLVQLTLASAPDVSHTIQVGAAGYEGVNLIPRNVLNLPRYYYSGNDLGNVYSNKATAFRVWAPTASDVQLLLYNSETGPVTKQLEMQKSDNGTWKLKVPGNLKNWYYLYQVTVNGKTQTAVDPYVRAISVNATRGMIVDLEDTNPPGWKEDHQQTPANPVDEVIYEVHVRDFSIDPNSGMKNKGKYLAFTEHGTKGPDNVKTGIDSLKELGINAVQLQPIEEFNSIDETQPNSYNWGYDPRNYNVPEGAYATTPEGTARITQLKQLIQSIHKDRIAINMDVVYNHTWATQVSDFDKIVPEYYYRTDDAGNYTNGSGTGNEIAAERPMVQKFIIDSLKYWVNEYHVDGFRFDLMALLGKDTMSKAASELHAINPGIALYGEPWTGGTSALPEDQLLTKGAQKGMGVAVFNDNLRNALDGNVFDSSAQGFATGATGLTDAIKNGVEGSINDFTSSPGETINYVTSHDNYTLWDKIALSNPNDSEADRIKMDELAQAVVMTSQGVPFMQGGEEMLRTKGGNDNSYNAGDTVNEFDWSRKAQYPDVFNYYSGLIHLRLDHPAFRMTTANEINSHLQFLNSPENTVAYELTDHVNKDKWGNIIVVYNPNKTAATINLPSGKWAINATSGKVGESTLGQAEGSVQVPGISMMILHQEVSPDHGKK

SEQ ID NO: 48904 - protein, 664 aa, unidentified
SSEQTDLVQLTLASAPDVSHTIRVGAAGYEAVNLIPRNVLNLPRYYYSGNDLGNVYSPKATAFRVWAPTASDVQLLLYNSETGPVTKALEMRKSDNGTWKLKVPGNLKNWYYLYQVTVNGKTQTAVDPYVRAISVNATRGMIVDLAKTNPPGWKEDHQQTPANPVDEVIYEVHVRDFSIDANSGMKNKGKYLAFTEHGTKGPDGVKTGIDSLKELGINAVQLLPIEEFASIDETQPNMYNWGYDPRNYNVPEGAYATTPEGTARITEFKQLIQSIHKDRIAINMDVVYNHTFATGISDFDKIVPEYYYRTDDAGNYTNGSGTGNEIAAERPMVQKFIIDSLKYWVNEYHIDGFRFDLMALLGKDTMSKAASELHAINPGIALYGEPWTGGTSALPEDQLLTKGAQKGMGVAVFNDNLRNALDGNVFDSSAQGFATGATGLTDAIKRGVEGSINDFTSSPSETINYVSCHDNYTLWDKIALSNPNDSEADRIKMDELAQAVVMTSQGVPFMQGGEEMLRTKGGNDNSYNAGDTVNEFDWSRKAQYPDVFNYYSGLIHLRLDHPAFRMTTANEINSHLQFLNSPENTVAYELTDHVNKDKWGNIIVVYNPNKTAATINLPSGKWAINATSGKVGESTLGQAEGSVQVPGISMMILHQEVSPDHGKK

SEQ ID NO: 48905 - protein, 664 aa, Bacillus acidopullulyticus
SSEQTDLVQLTLASAPDVSHTIQVGAAGYEGVNLIPRKVLNLPRYYYSGNDLGNVYSNKATAFRVWAPTASDVQLLLYNSETGPVTKQLEMQKSDNGTWKLKVPGNLKNWYYLYQVTVNGKTQTAVDPYVRAISVNATRGMIVDLEDTNPPGWKEDHQQTPANPVDEVIYEVHVRDFSIDPNSGMKNKGKYLAFTEHGTKGPDNVKTGIDSLKELGINAVQLQPIEEFNSIDETQPNSYNWGYDPRNYNVPEGAYATTPEGTARITQLKQLIQSIHKDRIAINMDVVYNHTFATQVSDFDKIVPEYYYRTDDAGNYTNGSGTGNEIAAERPMVQKFIIDSLKYWVNEYHVDGFRFDLMALLGKDTMSKAASELHAINPGIALYGEPWTGGTSALPRDQLLTKGAQKGMGVAVFNDNLRNALDGNVFDSSAQGFATGATGLTDAIKNGVEGSINDFTSSPGETINYVTSHDNYTLWDKIALSNPNDSEADRIKMDELAQAVVMTSQGVPFMQGGEEMLRTKGGNDNSYNAGDTVNEFDWSRKAQYPDVFNYYSGLIHLRLDHPAFRMTTANEINSHLQFLNSPENTVAYELTDHVNKDKWGNIIVVYNPNKTAATINLPSGKWAINATSGKVGESTLGQAEGSVQVPGISMMILHQEVSPDHGKK

SEQ ID NO: 48906 - protein, 664 aa, Bacillus acidopullulyticus
SSEQTDLVQLTLASAPDVSHTIQVGAAGYEGVNLIPRNVLNLPRYYYSGNDLGNVYSNKATAFRVWAPTASDVQLLLYNSETGPVTKQLEMQKSDNGTWKLKVPGNLKNWYYLYQVTVNGKTQTAVDPYVRAISVNATRGMIVDLEDTNPPGWKEDHQQTPANPVDEVIYEVHVRDFSIDPNSGMKNKGKYLAFTEHGTKGPDNVKTGIDSLKELGINAVQLQPIEEFNSIDETQPNSYNWGYDPRNYNVPEGAYATTPEGTARITQLKQLIQSIHKDRIAINMDVVYNHTWATQVSDFDKIVPEYYYRTDDAGNYTNGSGTGNEIAAERPMVQKFIIDSLKYWVNEYHVDGFRFDLMALLGKDTMSKAASELHAINPGIALYGEPWTGGTSALPRDQLLTKGAQKGMGVAVFNDNLRNALDGNVFDSSAQGFATGATGLTDAIKNGVEGSINDFTSSPGETINYVTSHDNYTLWDKIALSNPNDSEADRIKMDELAQAVVMTSQGVPFMQGGEEMLRTKGGNDNSYNAGDTVNEFDWSRKAQYPDVFNYYSGLIHLRLDHPAFRMTTANEINSHLQFLNSPENTVAYELTDHVNKDKWGNIIVVYNPNKTAATINLPSGKWAINATSGKVGESTLGQAEGSVQVPGISMMILHQEVSPDHGKK

SEQ ID NO: 48907 - protein, 664 aa, Bacillus acidopullulyticus
SSEQTDLVQLTLASAPDVSHTIQVGAAGYEGVTLIPRKVLNLPRYYYSGNDLGNVYSNKATAFRVWAPTASDVQLLLYNSETGPVTKQLEMQKSDNGTWKLKVPGNLKNWYYLYQVTVNGKTQTAVDPYVRAISVNATRGMIVDLEDTNPPGWKEDHQQTPANPVDEVIYEVHVRDFSIDPNSGMKNKGKYLAFTEHGTKGPDNVKTGIDSLKELGINAVQLQPIEEFNSIDETQPNSYNWGYDPRNYNVPEGAYATTPEGTARITQLKQLIQSIHKDRIAINMDVVYNHTFATQVSDFDKIVPEYYYRTDDAGNYTNGSGTGNEIAAERPMVQKFIIDSLKYWVNEYHVDGFRFDLMALLGKDTMSKAASELHAINPGIALYGEPWTGGTSALPRDQLLTKGAQKGMGVAVFNDNLRNALDGNVFDSSAQGFATGATGLTDAIKNGVEGSINDFTSSPGETINYVTSHDNYTLWDKIALSNPNDSEADRIKMDELAQAVVMTSQGVPFMQGGEEMLRTKGGNDNSYNAGDTVNEFDWSRKAQYPDVFNYYSGLIHLRLDHPAFRMTTANEINSHLQFLNSPENTVAYELTDHVNKDKWGNIIVVYNPNKTAATINLPSGKWAINATSGKVGESTLGQAEGSVQVPGISMMILHQEVSPDHGKK

SEQ ID NO: 48908 - protein, 664 aa, Bacillus acidopullulyticus
SSEQTDLVQLTLASAPDVSHTIQVGAAGYEGVNLIPRKVLNLPRYYYSGNDLGNVYSNKATAFRVWAPTASDVQLLLYNSETGPVTKILEMQKSDNGTWKLKVPGNLKNWYYLYQVTVNGKTQTAVDPYVRAISVNATRGMIVDLEDTNPPGWKEDHQQTPANPVDEVIYEVHVRDFSIDPNSGMKNKGKYLAFTEHGTKGPDNVKTGIDSLKELGINAVQLQPIEEFNSIDETQPNSYNWGYDPRNYNVPEGAYATTPEGTARITQLKQLIQSIHKDRIAINMDVVYNHTFATQVSDFDKIVPEYYYRTDDAGNYTNGSGTGNEIAAERPMVQKFIIDSLKYWVNEYHVDGFRFDLMALLGKDTMSKAASELHAINPGIALYGEPWTGGTSALPRDQLLTKGAQKGMGVAVFNDNLRNALDGNVFDSSAQGFATGATGLTDAIKNGVEGSINDFTSSPGETINYVTSHDNYTLWDKIALSNPNDSEADRIKMDELAQAVVMTSQGVPFMQGGEEMLRTKGGNDNSYNAGDTVNEFDWSRKAQYPDVFNYYSGLIHLRLDHPAFRMTTANEINSHLQFLNSPENTVAYELTDHVNKDKWGNIIVVYNPNKTAATINLPSGKWAINATSGKVGESTLGQAEGSVQVPGISMMILHQEVSPDHGKK

SEQ ID NO: 48909 - protein, 664 aa, Bacillus acidopullulyticus
SSEQTDLVQLTLASAPDVSHTIQVGAAGYEGVNLIPRNVLNLPRYYYSGNDLGNVYSNKATAFRVWAPTASDVQLLLYNSETGPVTKQLEMQKSDNGTWKLKVPGNLKNWYYLYQVTVNGKTQTAVDPYVRAISVNATRGMIVDLEDTNPPGWKEDHQQTPANPVDEVIYEVHVRDFSIDPNSGMKNKGKYLAFTEHGTKGPDNVKTGIDSLKELGINAVQLQPIEEFNSIDETQPNSYNWGYDPRNYNVPEGAYATTPEGTARITQLKQLIQSIHKDRIAINMDVVYNHTFATQVSDFDKIVPEYYYRTDDAGHYTNGSGTGNEIAAERPMVQKFIIDSLKYWVNEYHVDGFRFDLMALLGKDTMSKAASELHAINPGIALYGEPWTGGTSALPRDQLLTKGAQKGMGVAVFNDNLRNALDGNVFDSSAQGFATGATGLTDAIKNGVEGSINDFTSSPGETINYVTSHDNYTLWDKIALSNPNDSEADRIKMDELAQAVVMTSQGVPFMQGGEEMLRTKGGNDNSYNAGDTVNEFDWSRKAQYPDVFNYYSGLIHLRLDHPAFRMTTANEINSHLQFLNSPENTVAYELTDHVNKDKWGNIIVVYNPNKTAATINLPSGKWAINATSGKVGESTLGQAEGSVQVPGISMMILHQEVSPDHGKK

SEQ ID NO: 48910 - protein, 664 aa, Bacillus acidopullulyticus
SSEQTDLVQLTLASAPDVSHTIQVGAAGYEGVTLIPRNVLNLPRYYYSGNDLGNVYSNKATAFRVWAPTASDVQLLLYNSETGPVTKQLEMQKSDNGTWKLKVPGNLKNWYYLYQVTVNGKTQTAVDPYVRAISVNATRGMIVDLEDTNPPGWKEDHQQTPANPVDEVIYEVHVRDFSIDPNSGMKNKGKYLAFTEHGTKGPDNVKTGIDSLKELGINAVQLQPIEEFNSIDETQPNSYNWGYDPRNYNVPEGAYATTPEGTARITQLKQLIQSIHKDRIAINMDVVYNHTWATQVSDFDKIVPEYYYRTDDAGNYTNGSGTGNEIAAERPMVQKFIIDSLKYWVNEYHVDGFRFDLMALLGKDTMSKAASELHAINPGIALYGEPWTGGTSALPRDQLLTKGAQKGMGVAVFNDNLRNALDGNVFDSSAQGFATGATGLTDAIKNGVEGSINDFTSSPGETINYVTSHDNYTLWDKIALSNPNDSEADRIKMDELAQAVVMTSQGVPFMQGGEEMLRTKGGNDNSYNAGDTVNEFDWSRKAQYPDVFNYYSGLIHLRLDHPAFRMTTANEINSHLQFLNSPENTVAYELTDHVNKDKWGNIIVVYNPNKTAATINLPSGKWAINATSGKVGESTLGQAEGSVQVPGISMMILHQEVSPDHGKK

SEQ ID NO: 48911 - protein, 664 aa, unidentified
SSEQTDLVQLTLASAPDVSHTIQVGAAGYEAVNLIPRNVLNLPRYYYSGNDLGNVYSPKATAFRVWAPTASDVQLLLYNSETGPVTKALEMRKSDNGTWKLKVPGNLKNWYYLYQVTVNGKTQTAVDPYVRAISVNATRGMIVDLEDTNPPGWKEDHQQTPANPVDEVIYEVHVRDFSIDANSGMKNKGKYLAFTEHGTKGPDGVKTGIDSLKELGINAVQLQPIEEFASIDETQPNMYNWGYDPRNYNVPEGAYATTPEGTARITEFKQLIQSIHKDRIAINMDVVYNHTFATQISDFDKIVPEYYYRTDDAGNYTNGSGTGNEIAAERPMVQKFIIDSLKYWVNEYHIDGFRFDLMALLGKDTMSKAASELHAINPGIALYGEPWTGGTSALPEDQLLTKGAQKGMGVAVFNDNLRNALDGNVFDSSAQGFATGATGLTDAIKRGVEGSINDFTSSPSETINYVSCHDNYTLWDKIALSNPNDSEADRIKMDELAQAVVMTSQGVPFMQGGEEMLRTKGGNDNSYNAGDTVNEFDWSRKAQYPDVFNYYSGLIHLRLDHPAFRMTTANEINSHLQFLNSPENTVAYELTDHVNKDKWGNIIVVYNPNKTAATINLPSGKWAINATSGKVGESTLGQAEGSVQVPGISMMILHQEVSPDHGKK

SEQ ID NO: 48912 - protein, 664 aa, Bacillus deramificans
SSEQTDLVQLTLASAPDVSHTIQVGAAGYEAVNLIPRNVLNLPRYYYSGNDLGNVYSNKATAFRVWAPTASDVQLLLYNSETGPVTKQLEMQKSDNGTWKLKVPGNLKNWYYLYQVTVNGKTQTAVDPYVRAISVNATRGMIVDLEDTNPPGWKEDHQQTPANPVDEVIYEVHVRDFSIDANSGMKNKGKYLAFTEHGTKGPDGVKTGIDSLKELGINAVQLQPIEEFASIDETQPNMYNWGYDPRNYNVPEGAYATTPEGTARITEFKQLIQSIHKDRIAINMDVVYNHTFATQISDFDKIVPEYYYRTDDAGNYTNGSGTGNEIAAERPMVQKFIIDSLKYWVNEYHIDGFRFDLMALLGKDTMSKAASELHAINPGIALYGEPWTGGTSALPEDQLLTKGAQKGMGVAVFNDNLRNALDGNVFDSSAQGFATGATGLTDAIKRGVEGSINDFTSSPSETINYVSCHDNYTLWDKIALSNPNDSEADRIKMDELAQAVVMTSQGVPFMQGGEEMLRTKGGNDNSYNAGDTVNEFDWSRKAQYPDVFNYYSGLIHLRLDHPAFRMTTANEINSHLQFLNSPENTVAYELTDHVNKDKWGNIIVVYNPNKTAATINLPSGKWAINATSGKVGESTLGQAEGSVQVPGISMMILHQEVSPDHGKK

SEQ ID NO: 48913 - protein, 664 aa, Bacillus acidopullulyticus
SSEQTDLVQLTLASAPDVSHTIQVGAAGYEGVTLIPRKVLNLPRYYYSGNDLGNVYSNKATAFRVWAPTASDVQLLLYNSETGPVTKQLEMQKSDNGTWKLKVPGNLKNWYYLYQVTVNGKTQTAVDPYVRAISVNATRGMIVDLEDTNPPGWKEDHQQTPANPVDEVIYEVHVRDFSIDPNSGMKNKGKYLAFTEHGTKGPDNVKTGIDSLKELGINAVQLQPIEEFNSIDETQPNSYNWGYDPRNYNVPEGAYATTPEGTARITQLKQLIQSIHKDRIAINMDVVYNHTWATQVSDFDKIVPEYYYRTDDAGNYTNGSGTGNEIAAERPMVQKFIIDSLKYWVNEYHVDGFRFDLMALLGKDTMSKAASELHAINPGIALYGEPWTGGTSALPRDQLLTKGAQKGMGVAVFNDNLRNALDGNVFDSSAQGFATGATGLTDAIKNGVEGSINDFTSSPGETINYVTSHDNYTLWDKIALSNPNDSEADRIKMDELAQAVVMTSQGVPFMQGGEEMLRTKGGNDNSYNAGDTVNEFDWSRKAQYPDVFNYYSGLIHLRLDHPAFRMTTANEINSHLQFLNSPENTVAYELTDHVNKDKWGNIIVVYNPNKTAATINLPSGKWAINATSGKVGESTLGQAEGSVQVPGISMMILHQEVSPDHGKK

SEQ ID NO: 48914 - protein, 664 aa, Bacillus acidopullulyticus
SSEQTDLVQLTLASAPDVSHTIQVGAAGYEGVNLIPRKVLNLPRYYYSGNDLGNVYSNKATAFRVWAPTASDVQLLLYNSETGPVTKQLEMQKSDNGTWKLKVPGNLKNWYYLYQVTVNGKTQTAVDPYVRAISVNATRGMIVDLEDTNPPGWKEDHQQTPANPVDEVIYEVHVRDFSIDPNSGMKNKGKYLAFTEHGTKGPDNVKTGIDSLKELGINAVQLQPIEEFNSIDETQPNSYNWGYDPRNYNVPEGAYATTPEGTARITQLKQLIQSIHKDRIAINMDVVYNHTFATQVSDFDKIVPEYYYRTDDAGNYTNGSGTGNEIAAERPMVQKFIIDSLKYWVNEYHVDGFRFDLMALLGKDTMSKAASELHAINPGIALYGEPWTGGTSALPRDQLLTKGAQKGMGVAVFNDNLRNALDGNVFDSSAQGFATGATGLTDAIKNGVEGEINDFTSSPGETINYVTSHDNYTLWDKIALSNPNDSEADRIKMDELAQAVVMTSQGVPFMQGGEEMLRTKGGNDNSYNAGDTVNEFDWSRKAQYPDVFNYYSGLIHLRLDHPAFRMTTANEINSHLQFLNSPENTVAYELTDHVNKDKWGNIIVVYNPNKTAATINLPSGKWAINATSGKVGESTLGQAEGSVQVPGISMMILHQEVSPDHGKK

SEQ ID NO: 48915 - protein, 664 aa, Bacillus acidopullulyticus
SSEQTDLVQLTLASAPDVSHTIQVGAAGYEGVNLIPRKVLNLPRYYYSGNDLGNVYSNKATAFRVWAPTASDVQLLLYNSETGPVTKQLEMQKSDNGTWKLKVPGNLKNWYYLYQVTVNGKTQTAVDPYVRAISVNATRGMIVDLEDTNPPGWKEDHQQTPANPVDEVIYEVHVRDFSIDPNSGMKNKGKYLAFTEHGTKGPDNVKTGIDSLKELGINAVQLQPIEEFNSIDETQPNSYNWGYDPRNYNVPEGAYATTPEGTARITQLKQLIQSIHKDRIAINMDVVYNHTWATQVSDFDKIVPEYYYRTDDAGNYTNGSGTGNEIAAERPMVQKFIIDSLKYWVNEYHVDGFRFDLMALLGKDTMSKAASELHAINPGIALYGEPWTGGTSALPRDQLLTKGAQKGMGVAVFNDNLRNALDGNVFDSSAQGFATGATGLTDAIKNGVEGSINDFTSSPGETINYVTSHDNYTLWDKIALSNPNDSEADRIKMDELAQAVVMTSQGVPFMQGGEEMLRTKGGNDNSYNAGDTVNEFDWSRKAQYPDVFNYYSGLIHLRLDHPAFRMTTANEINSHLQFLNSPENTVAYELTDHVNKDKWGNIIVVYNPNKTAATINLPSGKWAINATSGKVGESTLGQAEGSVQVPGISMMILHQEVSPDHGKK

SEQ ID NO: 48916 - protein, 664 aa, Bacillus acidopullulyticus
SSEQTDLVQLTLASAPDVSHTIQVGAAGYEGVNLIPRNVLNLPRYYYSGNDLGNVYSNKATAFRVWAPTASDVQLLLYNSETGPVTKQLEMQKSDNGTWKLKVPGNLKNWYYLYQVTVNGKTQTAVDPYVRAISVNATRGMIVDLEDTNPPGWKEDHQQTPANPVDEVIYEVHVRDFSIDPNSGMKNKGKYLAFTEHGTKGPDNVKTGIDSLKELGINAVQLQPIEEFNSIDETQPNSYNWGYDPRNYNVPEGAYATTPEGTARITQLKQLIQSIHKDRIAINMDVVYNHTWATQVSDFDKIVPEYYYRTDDAGHYTNGSGTGNEIAAERPMVQKFIIDSLKYWVNEYHVDGFRFDLMALLGKDTMSKAASELHAINPGIALYGEPWTGGTSALPRDQLLTKGAQKGMGVAVFNDNLRNALDGNVFDSSAQGFATGATGLTDAIKNGVEGSINDFTSSPGETINYVTSHDNYTLWDKIALSNPNDSEADRIKMDELAQAVVMTSQGVPFMQGGEEMLRTKGGNDNSYNAGDTVNEFDWSRKAQYPDVFNYYSGLIHLRLDHPAFRMTTANEINSHLQFLNSPENTVAYELTDHVNKDKWGNIIVVYNPNKTAATINLPSGKWAINATSGKVGESTLGQAEGSVQVPGISMMILHQEVSPDHGKK

SEQ ID NO: 48917 - protein, 664 aa, Bacillus deramificans
SSEQTDLVQLTLASAPDVSHTIRVGAAGYEAVNLIPRNVLNLPRYYYSGNDLGNVYSNKATAFRVWAPTASDVQLLLYNSETGPVTKQLEMQKSDNGTWKLKVPGNLKNWYYLYQVTVNGKTQTAVDPYVRAISVNATRGMIVDLEDTNPPGWKEDHQQTPANPVDEVIYEVHVRDFSIDANSGMKNKGKYLAFTEHGTKGPDGVKTGIDSLKELGINAVQLQPIEEFASIDETQPNMYNWGYDPRNYNVPEGAYATTPEGTARITEFKQLIQSIHKDRIAINMDVVYNHTFATQISDFDKIVPEYYYRTDDAGNYTNGSGTGNEIAAERPMVQKFIIDSLKYWVNEYHIDGFRFDLMALLGKDTMSKAASELHAINPGIALYGEPWTGGTSALPEDQLLTKGAQKGMGVAVFNDNLRNALDGNVFDSSAQGFATGATGLTDAIKRGVEGSINDFTSSPSETINYVSCHDNYTLWDKIALSNPNDSEADRIKMDELAQAVVMTSQGVPFMQGGEEMLRTKGGNDNSYNAGDTVNEFDWSRKAQYPDVFNYYSGLIHLRLDHPAFRMTTANEINSHLQFLNSPENTVAYELTDHVNKDKWGNIIVVYNPNKTAATINLPSGKWAINATSGKVGERTLGQAEGSVQVPGISMMILHQEVSPDHGKK

SEQ ID NO: 48918 - protein, 664 aa, Bacillus deramificans
SSEQTDLVQLTLASAPDVSHTIRVGAAGYEAVNLIPRNVLNLPRYYYSGNDLGNVYSNKATAFRVWAPTASDVQLLLYNSETGPVTKQLEMQKSDNGTWKLKVPGNLKNWYYLYQVTVNGKTQTAVDPYVRAISVNATRGMIVDLAKTNPPGWKEDHQQTPANPVDEVIYEVHVRDFSIDANSGMKNKGKYLAFTEHGTKGPDGVKTGIDSLKELGINAVQLLPIEEFASIDETQPNMYNWGYDPRNYNVPEGAYATTPEGTARITEFKQLIQSIHKDRIAINMDVVYNHTFATQISDFDKIVPEYYYRTDDAGNYTNGSGTGNEIAAERPMVQKFIIDSLKYWVNEYHIDGFRFDLMALLGKDTMSKAASELHAINPGIALYGEPWTGGTSALPEDQLLTKGAQKGMGVAVFNDNLRNALSGNVFDSSAQGFATGATGLTDAIKRGVEGSINDFTSSPSETINYVSCHDNYTLWDKIALSNPNDSEADRIKMDELAQAVVMTSQGVPFMQGGEEMLRTKGGNDNSYNAGDTVNRFDWSRKAQYPDVFNYYSGLIHLRLDHPAFRMTTANEINSHLQFLNSPENTVAYELTDHVNKDKWGNIIVVYNPNKTAATINLPSGKWAINATSGKVGERTLGQAEGSVQVPGISMMILHQEVSPDHGKK

SEQ ID NO: 48919 - protein, 664 aa, Bacillus acidopullulyticus
SSEQTDLVQLTLASAPDVSHTIQVGAAGYEAVNLIPRNVLNLPRYYYSGNDLGNVYSNKATAFRVWAPTASDVQLLLYNSETGPVTKQLEMQKSDNGTWKLKVPGNLKNWYYLYQVTVNGKTQTAVDPYVRAISVNATRGMIVDLEDTNPPGWKEDHQQTPANPVDEVIYEVHVRDFSIDANSGMKNKGKYLAFTEHGTKGPDGVKTGIDSLKELGINAVQLQPIEEFASIDETQPNMYNWGYDPRNYNVPEGAYATTPEGTARITEFKQLIQSIHKDRIAINMDVVYNHTFATQISDFDKIVPEYYYRTDDAGNYTNGSGTGNEIASERPMVQKFIIDSLKYWVNEYHIDGFRFDLMALLGKDTMSKAASELHAINPGIALYGEPWTGGTSALPEDQLLTKGAQKGMGVAVFNDNLRNALDGNVFDSSAQGFATGATGLTDAIKRGVEGSINDFTSSPSETINYVSCHDNYTLWDKIALSNPNDSEADRIKMDELAQAVVMTSQGVPFMQGGEEMLRTKGGNDNSYNAGDTVNEFDWSRKAQYPDVFNYYSGLIHLRLDHPAFRMTTANEINSHLQFLNSPENTVAYELTDHVNKDKWGNIIVVYNPNKTAATINLPSGKWAINATSGKVGESTLGQAEGSVQVPGISMMILHQEVSPDHGKK

SEQ ID NO: 48920 - protein, 664 aa, Bacillus acidopullulyticus
SSEQTDLVQLTLASAPDVSHTIQVGAAGYEGVNLIPRKVLNLPRYYYSGNDLGNVYSNKATAFRVWAPTASDVQLLLYNSETGPVTKQLEMQKSDNGTWKLKVPGNLKNWYYLYQVTVNGKTQTAVDPYVRAISVNATRGMIVDLEDTNPPGWKEDHQQTPANPVDEVIYEVHVRDFSIDPNSGMKNKGKYLAFTEHGTKGPDNVKTGIDSLKELGINAVQLQPIEEFNSIDETQPNSYNWGYDPRNYNVPEGAYATTPEGTARITQLKQLIQSIHKDRIAINMDVVYNHTWATQVSDFDKIVPEYYYRTDDAGHYTNGSGTGNEIAAERPMVQKFIIDSLKYWVNEYHVDGFRFDLMALLGKDTMSKAASELHAINPGIALYGEPWTGGTSALPRDQLLTKGAQKGMGVAVFNDNLRNALDGNVFDSSAQGFATGATGLTDAIKNGVEGSINDFTSSPGETINYVTSHDNYTLWDKIALSNPNDSEADRIKMDELAQAVVMTSQGVPFMQGGEEMLRTKGGNDNSYNAGDTVNEFDWSRKAQYPDVFNYYSGLIHLRLDHPAFRMTTANEINSHLQFLNSPENTVAYELTDHVNKDKWGNIIVVYNPNKTAATINLPSGKWAINATSGKVGESTLGQAEGSVQVPGISMMILHQEVSPDHGKK

SEQ ID NO: 48921 - protein, 664 aa, Bacillus acidopullulyticus
SSEQTDLVQLTLASAPDVSHTIQVGAAGYEGVTLIPRKVLNLPRYYYSGNDLGNVYSNKATAFRVWAPTASDVQLLLYNSETGPVTKQLEMQKSDNGTWKLKVPGNLKNWYYLYQVTVNGKTQTAVDPYVRAISVNATRGMIVDLEDTNPPGWKEDHQQTPANPVDEVIYEVHVRDFSIDPNSGMKNKGKYLAFTEHGTKGPDNVKTGIDSLKELGINAVQLQPIEEFNSIDETQPNSYNWGYDPRNYNVPEGAYATTPEGTARITQLKQLIQSIHKDRIAINMDVVYNHTWATQVSDFDKIVPEYYYRTDDAGHYTNGSGTGNEIAAERPMVQKFIIDSLKYWVNEYHVDGFRFDLMALLGKDTMSKAASELHAINPGIALYGEPWTGGTSALPRDQLLTKGAQKGMGVAVFNDNLRNALDGNVFDSSAQGFATGATGLTDAIKNGVEGSINDFTSSPGETINYVTSHDNYTLWDKIALSNPNDSEADRIKMDELAQAVVMTSQGVPFMQGGEEMLRTKGGNDNSYNAGDTVNEFDWSRKAQYPDVFNYYSGLIHLRLDHPAFRMTTANEINSHLQFLNSPENTVAYELTDHVNKDKWGNIIVVYNPNKTAATINLPSGKWAINATSGKVGESTLGQAEGSVQVPGISMMILHQEVSPDHGKK

SEQ ID NO: 48922 - protein, 664 aa, Bacillus acidopullulyticus
SSEQTDLVQLTLASAPDVSHTIRVGAAGYEAVNLIPRNVLNLPRYYYSGNDLGNVYSPKATAFRVWAPTASDVQLLLYNSETGPVTKALEMRKSDNGTWKLKVPGNLKNWYYLYQVTVNGKTQTAVDPYVRAISVNATRGMIVDLAKTNPPGWKEDHQQTPANPVDEVIYEVHVRDFSIDPNSGMKNKGKYLAFTEHGTKGPDGVKTGIDSLKELGINAVQLLPIEEFASIDETQPNMYNWGYDPRNYNVPEGAYATTPEGTARITEFKQLIQSIHKDRIAINMDVVYNHTFATGISDFDKIVPEYYYRTDDAGNYTNGSGTGNEIASERPMVQKFIIDSLKYWVNEYHIDGFRFDLMALLGKDTMSKAASELHAINPGIALYGEPWTGGTSALPEDQLLTKGAQKGMGVAVFNDNLRNALSGNVFDSSAQGFATGATGLTDAIKRGVEGSINDFTSSPSETINYVSCHDNYTLWDKIALSNPNDSEADRIKMDELAQAVVMTSQGVPFMQGGEEMLRTKGGNDNSYNAGDTVNRFDWSRKAQYPDVFNYYSGLIHLRLDHPAFRMTTANEINSHLQFLNSPENTVAYELTDHVNKDKWGNIIVVYNPNKTAATINLPSGKWAINATSGKVGERTLGQAEGSVQVPGISMMILHQEVSPDHGKK

SEQ ID NO: 48923 - protein, 664 aa, Bacillus deramificans
SSEQTDLVQLTLASAPDVSHTIRVGAAGYEAVNLIPRNVLNLPRYYYSGNDLGNVYSNKATAFRVWAPTASDVQLLLYNSETGPVTKQLEMQKSDNGTWKLKVPGNLKNWYYLYQVTVNGKTQTAVDPYVRAISVNATRGMIVDLEDTNPPGWKEDHQQTPANPVDEVIYEVHVRDFSIDANSGMKNKGKYLAFTEHGTKGPDGVKTGIDSLKELGINAVQLLPIEEFASIDETQPNMYNWGYDPRNYNVPEGAYATTPEGTARITEFKQLIQSIHKDRIAINMDVVYNHTFATQISDFDKIVPEYYYRTDDAGNYTNGSGTGNEIAAERPMVQKFIIDSLKYWVNEYHIDGFRFDLMALLGKDTMSKAASELHAINPGIALYGEPWTGGTSALPEDQLLTKGAQKGMGVAVFNDNLRNALSGNVFDSSAQGFATGATGLTDAIKRGVEGSINDFTSSPSETINYVSSHDNYTLWDKIALSNPNDSEADRIKMDELAQAVVMTSQGVPFMQGGEEMLRTKGGNDNSYNAGDTVNRFDWSRKAQYPDVFNYYSGLIHLRLDHPAFRMTTANEINSHLQFLNSPENTVAYELTDHVNKDKWGNIIVVYNPNKTAATINLPSGKWAINATSGKVGERTLGQAEGSVQVPGISMMILHQEVSPDHGKK

SEQ ID NO: 48924 - protein, 664 aa, Bacillus deramificans
SSEQTDLVQLTLASAPDVSHTIRVGAAGYEAVNLIPRNVLNLPRYYYSGNDLGNVYSNKATAFRVWAPTASDVQLLLYNSETGPVTKQLEMQKSDNGTWKLKVPGNLKNWYYLYQVTVNGKTQTAVDPYVRAISVNATRGMIVDLEDTNPPGWKEDHQQTPANPVDEVIYEVHVRDFSIDANSGMKNKGKYLAFTEHGTKGPDGVKTGIDSLKELGINAVQLQPIEEFASIDETQPNMYNWGYDPRNYNVPEGAYATTPEGTARITEFKQLIQSIHKDRIAINMDVVYNHTFATQISDFDKIVPEYYYRTDDAGNYTNGSGTGNEIAAERPMVQKFIIDSLKYWVNEYHIDGFRFDLMALLGKDTMSKAASELHAINPGIALYGEPWTGGTSALPEDQLLTKGAQKGMGVAVFNDNLRNALSGNVFDSSAQGFATGATGLTDAIKRGVEGSINDFTSSPSETINYVSCHDNYTLWDKIALSNPNDSEADRIKMDELAQAVVMTSQGVPFMQGGEEMLRTKGGNDNSYNAGDTVNEFDWSRKAQYPDVFNYYSGLIHLRLDHPAFRMTTANEINSHLQFLNSPENTVAYELTDHVNKDKWGNIIVVYNPNKTAATINLPSGKWAINATSGKVGERTLGQAEGSVQVPGISMMILHQEVSPDHGKK

SEQ ID NO: 48925 - protein, 664 aa, Bacillus deramificans
SSEQTDLVQLTLASAPDVSHTIRVGAAGYEAVNLIPRNVLNLPRYYYSGNDLGNVYSNKATAFRVWAPTASDVQLLLYNSETGPVTKQLEMQKSDNGTWKLKVPGNLKNWYYLYQVTVNGKTQTAVDPYVRAISVNATRGMIVDLAKTNPPGWKEDHQQTPANPVDEVIYEVHVRDFSIDANSGMKNKGKYLAFTEHGTKGPDGVKTGIDSLKELGINAVQLLPIEEFASIDETQPNMYNWGYDPRNYNVPEGAYATTPEGTARITEFKQLIQSIHKDRIAINMDVVYNHTFATGISDFDKIVPEYYYRTDDAGNYTNGSGTGNEIAAERPMVQKFIIDSLKYWVNEYHIDGFRFDLMALLGKDTMSKAASELHAINPGIALYGEPWTGGTSALPEDQLLTKGAQKGMGVAVFNDNLRNALSGNVFDSSAQGFATGATGLTDAIKRGVEGSINDFTSSPSETINYVSCHDNYTLWDKIALSNPNDSEADRIKMDELAQAVVMTSQGVPFMQGGEEMLRTKGGNDNSYNAGDTVNRFDWSRKAQYPDVFNYYSGLIHLRLDHPAFRMTTANEINSHLQFLNSPENTVAYELTDHVNKDKWGNIIVVYNPNKTAATINLPSGKWAINATSGKVGERTLGQAEGSVQVPGISMMILHQEVSPDHGKK

SEQ ID NO: 48926 - protein, 664 aa, Bacillus acidopullulyticus
SSEQTDLVQLTLASAPDVSHTIRVGAAGYEAVNLIPRNVLNLPRYYYSGNDLGNVYSPKATAFRVWAPTASDVQLLLYNSETGPVTKALEMRKSDNGTWKLKVPGNLKNWYYLYQVTVNGKTQTAVDPYVRAISVNATRGMIVDLAKTNPPGWKEDHQQTPANPVDEVIYEVHVRDFSIDANSGMKNKGKYLAFTEHGTKGPDGVKTGIDSLKELGINAVQLLPIEEFASIDETQPNMYNWGYDPRNYNVPEGAYATTPEGTARITEFKQLIQSIHKDRIAINMDVVYNHTFATGISDFDKIVPEYYYRTDDAGNYTNGSGTGNEIAAERPMVQKFIIDSLKYWVNEYHIDGFRFDLMALLGKDTMSKAASELHAINPGIALYGEPWTGGTSALPEDQLLTKGAQKGMGVAVFNDNLRNALSGNVFDSSAQGFATGATGLTDAIKRGVEGSINDFTSSPSETINYVSCHDNYTLWDKIALSNPNDSEADRIKMDELAQAVVMTSQGVPFMQGGEEMLRTKGGNDNSYNAGDTVNRFDWSRKAQYPDVFNYYSGLIHLRLDHPAFRMTTANEINSHLQFLNSPENTVAYELTDHVNKDKWGNIIVVYNPNKTAATINLPSGKWAINATSGKVGERTLGQAEGSVQVPGISMMILHQEVSPDHGKK

SEQ ID NO: 48927 - protein, 664 aa, Bacillus acidopullulyticus
SSEQTDLVQLTLASAPDVSHTIRVGAAGYEAVNLIPRNVLNLPRYYYSGNDLGNVYSPKATAFRVWAPTASDVQLLLYNSETGPVTKALEMRKSDNGTWKLKVPGNLKNWYYLYQVTVNGKTQTAVDPYVRAISVNATRGMIVDLAKTNPPGWKEDHQQTPANPVDEVIYEVHVRDFSIDPNSGMKNKGKYLAFTEHGTKGPDGVKTGIDSLKELGINAVQLLPIEEFASIDETQPNMYNWGYDPRNYNVPEGAYATTPEGTARITEFKQLIQSIHKDRIAINMDVVYNHTFATGISDFDKIVPEYYYRTDDAGNYTNGSGTGNEIASERPMVQKFIIDSLKYWVNEYHVDGFRFDLMALLGKDTMSKAASELHAINPGIALYGEPWTGGTSALPEDQLLTKGAQKGMGVAVFNDNLRNALSGNVFDSSAQGFATGATGLTDAIKRGVEGSINDFTSSPSETINYVSCHDNYTLWDKIALSNPNDSEADRIKMDELAQAVVMTSQGVPFMQGGEEMLRTKGGNDNSYNAGDTVNRFDWSRKAQYPDVFNYYSGLIHLRLDHPAFRMTTANEINSHLQFLNSPENTVAYELTDHVNKDKWGNIIVVYNPNKTAATINLPSGKWAINATSGKVGERTLGQAEGSVQVPGISMMILHQEVSPDHGKK

SEQ ID NO: 48928 - protein, 664 aa, Bacillus acidopullulyticus
SSEQTDLVQLTLASAPDVSHTIRVGAAGYEAVNLIPRNVLNLPRYYYSGNDLGNVYSPKATAFRVWAPTASDVQLLLYNSETGPVTKALEMRKSDNGTWKLKVPGNLKNWYYLYQVTVNGKTQTAVDPYVRAISVNATRGMIVDLAKTNPPGWKEDHQQTPANPVDEVIYEVHVRDFSIDPNSGMKNKGKYLAFTEHGTKGPDGVKTGIDSLKELGINAVQLLPIEEFASIDETQPNMYNWGYDPRNYNVPEGAYATTPEGTARITEFKQLIQSIHKDRIAINMDVVYNHTFATGISDFDKIVPEYYYRTDDAGNYTNGSGTGNEIASERPMVQKFIIDSLKYWVNEYHIDGFRFDLMALLGKDTMSKAASELHAINPGIALYGEPWTGGTSALPRDQLLTKGAQKGMGVAVFNDNLRNALSGNVFDSSAQGFATGATGLTDAIKRGVEGSINDFTSSPSETINYVSCHDNYTLWDKIALSNPNDSEADRIKMDELAQAVVMTSQGVPFMQGGEEMLRTKGGNDNSYNAGDTVNRFDWSRKAQYPDVFNYYSGLIHLRLDHPAFRMTTANEINSHLQFLNSPENTVAYELTDHVNKDKWGNIIVVYNPNKTAATINLPSGKWAINATSGKVGERTLGQAEGSVQVPGISMMILHQEVSPDHGKK

SEQ ID NO: 48929 - protein, 664 aa, Bacillus acidopullulyticus
SSEQTDLVQLTLASAPDVSHTIRVGAAGYEAVTLIPRNVLNLPRYYYSGNDLGNVYSPKATAFRVWAPTASDVQLLLYNSETGPVTKALEMRKSDNGTWKLKVPGNLKNWYYLYQVTVNGKTQTAVDPYVRAISVNATRGMIVDLAKTNPPGWKEDHQQTPANPVDEVIYEVHVRDFSIDANSGMKNKGKYLAFTEHGTKGPDGVKTGIDSLKELGINAVQLLPIEEFASIDETQPNMYNWGYDPRNYNVPEGAYATTPEGTARITEFKQLIQSIHKDRIAINMDVVYNHTFATGISDFDKIVPEYYYRTDDAGNYTNGSGTGNEIASERPMVQKFIIDSLKYWVNEYHIDGFRFDLMALLGKDTMSKAASELHAINPGIALYGEPWTGGTSALPEDQLLTKGAQKGMGVAVFNDNLRNALSGNVFDSSAQGFATGATGLTDAIKRGVEGSINDFTSSPSETINYVSCHDNYTLWDKIALSNPNDSEADRIKMDELAQAVVMTSQGVPFMQGGEEMLRTKGGNDNSYNAGDTVNRFDWSRKAQYPDVFNYYSGLIHLRLDHPAFRMTTANEINSHLQFLNSPENTVAYELTDHVNKDKWGNIIVVYNPNKTAATINLPSGKWAINATSGKVGERTLGQAEGSVQVPGISMMILHQEVSPDHGKK

SEQ ID NO: 48930 - protein, 664 aa, Bacillus acidopullulyticus
SSEQTDLVQLTLASAPDVSHTIRVGAAGYEAVNLIPRNVLNLPRYYYSGNDLGNVYSPKATAFRVWAPTASDVQLLLYNSETGPVTKALEMRKSDNGTWKLKVPGNLKNWYYLYQVTVNGKTQTAVDPYVRAISVNATRGMIVDLAKTNPPGWKEDHQQTPANPVDEVIYEVHVRDFSIDANSGMKNKGKYLAFTEHGTKGPDGVKTGIDSLKELGINAVQLLPIEEFASIDETQPNSYNWGYDPRNYNVPEGAYATTPEGTARITEFKQLIQSIHKDRIAINMDVVYNHTFATGISDFDKIVPEYYYRTDDAGNYTNGSGTGNEIASERPMVQKFIIDSLKYWVNEYHIDGFRFDLMALLGKDTMSKAASELHAINPGIALYGEPWTGGTSALPEDQLLTKGAQKGMGVAVFNDNLRNALSGNVFDSSAQGFATGATGLTDAIKRGVEGSINDFTSSPSETINYVSCHDNYTLWDKIALSNPNDSEADRIKMDELAQAVVMTSQGVPFMQGGEEMLRTKGGNDNSYNAGDTVNRFDWSRKAQYPDVFNYYSGLIHLRLDHPAFRMTTANEINSHLQFLNSPENTVAYELTDHVNKDKWGNIIVVYNPNKTAATINLPSGKWAINATSGKVGERTLGQAEGSVQVPGISMMILHQEVSPDHGKK

SEQ ID NO: 48931 - protein, 664 aa, Bacillus acidopullulyticus
SSEQTDLVQLTLASAPDVSHTIRVGAAGYEAVNLIPRNVLNLPRYYYSGNDLGNVYSPKATAFRVWAPTASDVQLLLYNSETGPVTKALEMRKSDNGTWKLKVPGNLKNWYYLYQVTVNGKTQTAVDPYVRAISVNATRGMIVDLAKTNPPGWKEDHQQTPANPVDEVIYEVHVRDFSIDPNSGMKNKGKYLAFTEHGTKGPDGVKTGIDSLKELGINAVQLLPIEEFASIDETQPNSYNWGYDPRNYNVPEGAYATTPEGTARITEFKQLIQSIHKDRIAINMDVVYNHTFATGISDFDKIVPEYYYRTDDAGNYTNGSGTGNEIASERPMVQKFIIDSLKYWVNEYHIDGFRFDLMALLGKDTMSKAASELHAINPGIALYGEPWTGGTSALPRDQLLTKGAQKGMGVAVFNDNLRNALSGNVFDSSAQGFATGATGLTDAIKRGVEGSINDFTSSPSETINYVSCHDNYTLWDKIALSNPNDSEADRIKMDELAQAVVMTSQGVPFMQGGEEMLRTKGGNDNSYNAGDTVNRFDWSRKAQYPDVFNYYSGLIHLRLDHPAFRMTTANEINSHLQFLNSPENTVAYELTDHVNKDKWGNIIVVYNPNKTAATINLPSGKWAINATSGKVGERTLGQAEGSVQVPGISMMILHQEVSPDHGKK

SEQ ID NO: 48932 - protein, 664 aa, Bacillus acidopullulyticus
SSEQTDLVQLTLASAPDVSHTIRVGAAGYEGVNLIPRNVLNLPRYYYSGNDLGNVYSPKATAFRVWAPTASDVQLLLYNSETGPVTKALEMRKSDNGTWKLKVPGNLKNWYYLYQVTVNGKTQTAVDPYVRAISVNATRGMIVDLAKTNPPGWKEDHQQTPANPVDEVIYEVHVRDFSIDPNSGMKNKGKYLAFTEHGTKGPDGVKTGIDSLKELGINAVQLLPIEEFASIDETQPNMYNWGYDPRNYNVPEGAYATTPEGTARITEFKQLIQSIHKDRIAINMDVVYNHTFATGISDFDKIVPEYYYRTDDAGNYTNGSGTGNEIASERPMVQKFIIDSLKYWVNEYHIDGFRFDLMALLGKDTMSKAASELHAINPGIALYGEPWTGGTSALPEDQLLTKGAQKGMGVAVFNDNLRNALSGNVFDSSAQGFATGATGLTDAIKRGVEGSINDFTSSPSETINYVSCHDNYTLWDKIALSNPNDSEADRIKMDELAQAVVMTSQGVPFMQGGEEMLRTKGGNDNSYNAGDTVNRFDWSRKAQYPDVFNYYSGLIHLRLDHPAFRMTTANEINSHLQFLNSPENTVAYELTDHVNKDKWGNIIVVYNPNKTAATINLPSGKWAINATSGKVGERTLGQAEGSVQVPGISMMILHQEVSPDHGKK

SEQ ID NO: 48933 - protein, 664 aa, Bacillus acidopullulyticus
SSEQTDLVQLTLASAPDVSHTIRVGAAGYEAVNLIPRNVLNLPRYYYSGNDLGNVYSPKATAFRVWAPTASDVQLLLYNSETGPVTKALEMRKSDNGTWKLKVPGNLKNWYYLYQVTVNGKTQTAVDPYVRAISVNATRGMIVDLAKTNPPGWKEDHQQTPANPVDEVIYEVHVRDFSIDANSGMKNKGKYLAFTEHGTKGPDGVKTGIDSLKELGINAVQLLPIEEFASIDETQPNMYNWGYDPRNYNVPEGAYATTPEGTARITEFKQLIQSIHKDRIAINMDVVYNHTFATGISDFDKIVPEYYYRTDDAGNYTNGSGTGNEIASERPMVQKFIIDSLKYWVNEYHIDGFRFDLMALLGKDTMSKAASELHAINPGIALYGEPWTGGTSALPEDQLLTKGAQKGMGVAVFNDNLRNALSGNVFDSSAQGFATGATGLTDAIKRGVEGSINDFTSSPSETINYVSCHDNYTLWDKIALSNPNDSEADRIKMDELAQAVVMTSQGVPFMQGGEEMLRTKGGNDNSYNAGDTVNRFDWSRKAQYPDVFNYYSGLIHLRLDHPAFRMTTANEINSHLQFLNSPENTVAYELTDHVNKDKWGNIIVVYNPNKTAATINLPSGKWAINATSGKVGERTLGQAEGSVQVPGISMMILHQEVSPDHGKK

SEQ ID NO: 48934 - protein, 664 aa, Bacillus deramificans
SSEQTDLVQLTLASAPDVSHTIRVGAAGYEARNLIPRNVLNLPRYYYSGNDLGNVYSNKATAFRVWAPTASDVQLLLYNSETGPVTKQLEMQKSDNGTWKLKVPGNLKNWYYLYQVTVNGKTQTAVDPYVRAISVNATRGMIVDLEDTNPPGWKEDHQQTPANPVDEVIYEVHVRDFSIDANSGMKNKGKYLAFTEHGTKGPDGVKTGIDSLKELGINAVQLLPIEEFASIDETQPNMYNWGYDPRNYNVPEGAYATTPEGTARITEFKQLIQSIHKDRIAINMDVVYNHTFATQISDFDKIVPEYYYRTDDAGNYTNGSGCGNEIAAERPMVQKFIIDSLKYWVNEYHIDGFRFDLMALLGKDTMSKAASELHAINPGIALYGEPWTGGTSALPEDQLLTKGAQKGMGVAVFNDNLRNALSGNVFDSSAQGFATGATGLTDAIKRGVEGSINDFTSSPSETINYVSSHDNYTLWDKIALSNPNDSEADRIKMDELAQAVVMTSQGVPFMQGGEEMLRTKGGNDNSYNAGDTVNRFDWSRKAQYPDVFNYYSGLIHLRLDHPAFRMTTANEINSHLQFLNSPENTVAYELTDHVNKDKWGNIIVVYNPNKTAATINLPSGKWAINATSGKVGERTLGQAEGSVQVPGISMMILHQEVSPDHGKK

SEQ ID NO: 48935 - protein, 664 aa, Bacillus deramificans
SSEQTDLVQLTLASAPDVSHTIRVGAAGYEAVNLIPRNVLNLPRYYYSGNDLGNVYSNKATAFRVWAPTASDVQLLLYNSETGPVTKQLEMQKSDNGTWKLKVPGNLKNWYYLYQVTVNGKTQTAVDPYVRAISVNATRGMIVDLEDTNPPGWKEDHQQTPANPVDEVIYEVHVRDFSIDANSGMKNKGKYLAFTEHGTKGPDGVKTGIDSLKELGINAVQLLPIEEFASIDETQPNMYNWGYDPRNYNVPEGAYATTPEGTARITEFKQLIQSIHKDRIAINMDVVYNHTFATQISDFDKIVPEYYYRTDDAGNYTNGSGTGNEIAAERPMVQKFIIDSLKYWVNEYHIDGFRFDLMALLGKDTMSKAASELHAINPGIALYGEPWTGGTSALPEDQLLTKGAQKGMGVAVFNDNLRNALSGNVFDSSAQGFATGATGLTDAIKRGVEGSINDFTSSPSETINYVSCHDNYTLWDKIALSNPNDSEADRIKMDELAQAVVMTSQGVPFMQGGEEMLRTKGGNDNSYNAGDTVNRFDWSRKAQYPDVFNYYSGLIHLRLDHPAFRMTTANEINSHLQFLNSPENTVAYELTDHVNKDKWGNIIVVYNPNKTAATINLPSGKWAINATSGKVGERTLGQAEGSVQVPGISMMILHQEVSPDHGKK

SEQ ID NO: 48936 - protein, 664 aa, Bacillus deramificans
SSEQTDLVQLTLASAPDVSHTIRVGAAGYEAVNLIPRNVLNLPRYYYSGNDLGNVYSNKATAFRVWAPTASDVQLLLYNSETGPVTKQLEMQKSDNGTWKLKVPGNLKNWYYLYQVTVNGKTQTAVDPYVRAISVNATRGMIVDLEDTNPPGWKEDEQQTPANPVDEVIYEVHVRDFSIDANSGMKNKGKYLAFTEHGTKGPDGVKTGIDSLKELGINAVQLLPIEEFASIDETQPNMYNWGYDPRNYNVPEGAYATTPEGTARITEFKQLIQSIHKDRIAINMDVVYNHTFATQISDFDKIVPEYYYRTDDAGNYTNGSGTGNEIAAERPMVQKFIIDSLKYWVNEYHIDGFRFDLMALLGKDTMSKAASELHAINPGIALYGEPWTGGTSALPEDQLLTKGAQKGMGVAVFNDNLRNALSGNVFDSSAQGFATGATGLTDAIKRGVEGSINDFTSSPSETINYVSCHDNYTLWDKIALSNPNDSEADRIKMDELAQAVVMTSQGVPFMQGGEEMLRTKGGNDNSYNAGDTVNRFDWSRKAQYPDVFNYYSGLIHLRLDHPAFRMTTANEINSHLQFLNSPENTVAYELTDHVNKDKWGNIIVVYNPNKTAATINLPSGKWAINATSGKVGERTLGQAEGSVQVPGISMMILHQEVSPDHGKK

SEQ ID NO: 48937 - protein, 664 aa, Bacillus acidopullulyticus
SSEQTDLVQLTLASAPDVSHTIRVGAAGYEAVNLIPRNVLNLPRYYYSGNDLGNVYSNKATAFRVWAPTASDVQLLLYNSETGPVTKQLEMQKSDNGTWKLKVPGNLKNWYYLYQVTVNGKTQTAVDPYVRAISVNATRGMIVDLAKTNPPGWKEDHQQTPANPVDEVIYEVHVRDFSIDANSGMKNKGKYLAFTEHGTKGPDGVKTGIDSLKELGINAVQLLPIEEFASIDETQPNMYNWGYDPRNYNVPEGAYATTPEGTARITEFKQLIQSIHKDRIAINMDVVYNHTFATGISDFDKIVPEYYYRTDDAGNYTNGSGTGNEIASERPMVQKFIIDSLKYWVNEYHIDGFRFDLMALLGKDTMSKAASELHAINPGIALYGEPWTGGTSALPEDQLLTKGAQKGMGVAVFNDNLRNALSGNVFDSSAQGFATGATGLTDAIKRGVEGSINDFTSSPSETINYVSCHDNYTLWDKIALSNPNDSEADRIKMDELAQAVVMTSQGVPFMQGGEEMLRTKGGNDNSYNAGDTVNRFDWSRKAQYPDVFNYYSGLIHLRLDHPAFRMTTANEINSHLQFLNSPENTVAYELTDHVNKDKWGNIIVVYNPNKTAATINLPSGKWAINATSGKVGERTLGQAEGSVQVPGISMMILHQEVSPDHGKK

SEQ ID NO: 48938 - protein, 664 aa, Bacillus deramificans
SSEQTDLVQLTLASAPDVSHTIRVGAAGYEAVNLIPRNVLNLPRYYYSGNDLGNVYSNKATAFRVWAPTASDVQLLLYNSETGPVTKQLEMQKSDNGTWKLKVPGNLKNWYYLYQVTVNGKTQTAVDPYVRAISVNATRGMIVDLEDTNPPGWKEDHQQTPANPVDEVIYEVHVRDFSIDANSGMKNKGKYLAFTEHGTKGPDGVKTGIDSLKELGINAVQLQPIEEFASIDETQPNMYNWGYDPRNYNVPEGAYATTPEGTARITEFKQLIQSIHKDRIAINMDVVYNHTFATQISDFDKIVPEYYYRTDDAGNYTNGSGTGNEIAAERPMVQKFIIDSLKYWVNEYHIDGFRFDLMALLGKDTMSKAASELHAINPGIALYGEPWTGGTSALPEDQLLTKGAQKGMGVAVFNDNLRNALSGNVFDSSAQGFATGATGLTDAIKRGVEGSINDFTSSPSETINYVSCHDNYTLWDKIALSNPNDSEADRIKMDELAQAVVMTSQGVPFMQGGEEMLRTKGGNDNSYNAGDTVNRFDWSRKAQYPDVFNYYSGLIHLRLDHPAFRMTTANEINSHLQFLNSPENTVAYELTDHVNKDKWGNIIVVYNPNKTAATINLPSGKWAINATSGKVGERTLGQAEGSVQVPGISMMILHQEVSPDHGKK

SEQ ID NO: 48939 - protein, 664 aa, Bacillus acidopullulyticus
SSEQTDLVQLTLASAPDVSHTIRVGAAGYEAVNLIPRNVLNLPRYYYSGNDLGNVYSPKATAFRVWAPTASDVQLLLYNSETGPVTKALEMRKSDNGTWKLKVPGNLKNWYYLYQVTVNGKTQTAVDPYVRAISVNATRGMIVDLAKTNPPGWKEDHQQTPANPVDEVIYEVHVRDFSIDANSGMKNKGKYLAFTEHGTKGPDGVKTGIDSLKELGINAVQLLPIEEFASIDETQPNMYNWGYDPRNYNVPEGAYATTPEGTARITEFKQLIQSIHKDRIAINMDVVYNHTFATGISDFDKIVPEYYYRTDDAGNYTNGSGTGNEIASERPMVQKFIIDSLKYWVNEYHIDGFRFDLMALLGKDTMSKAASELHAINPGIALYGEPWTGGTSALPRDQLLTKGAQKGMGVAVFNDNLRNALSGNVFDSSAQGFATGATGLTDAIKRGVEGSINDFTSSPSETINYVSCHDNYTLWDKIALSNPNDSEADRIKMDELAQAVVMTSQGVPFMQGGEEMLRTKGGNDNSYNAGDTVNRFDWSRKAQYPDVFNYYSGLIHLRLDHPAFRMTTANEINSHLQFLNSPENTVAYELTDHVNKDKWGNIIVVYNPNKTAATINLPSGKWAINATSGKVGERTLGQAEGSVQVPGISMMILHQEVSPDHGKK

SEQ ID NO: 48940 - protein, 664 aa, Bacillus acidopullulyticus
SSEQTDLVQLTLASAPDVSHTIRVGAAGYEAVNLIPRNVLNLPRYYYSGNDLGNVYSPKATAFRVWAPTASDVQLLLYNSETGPVTKALEMRKSDNGTWKLKVPGNLKNWYYLYQVTVNGKTQTAVDPYVRAISVNATRGMIVDLAKTNPPGWKEDHQQTPANPVDEVIYEVHVRDFSIDANSGMKNKGKYLAFTEHGTKGPDGVKTGIDSLKELGINAVQLLPIEEFASIDETQPNMYNWGYDPRNYNVPEGAYATTPEGTARITEFKQLIQSIHKDRIAINMDVVYNHTFATGISDFDKIVPEYYYRTDDAGNYTNGSGTGNEIASERPMVQKFIIDSLKYWVNEYHIDGFRFDLMALLGKDTMSKAASELHAINPGIALYGEPWTGGTSALPEDQLLTKGAQKGMGVAVFNDNLRNALSGNVFDSSAQGFATGATGLTDAIKRGVEGEINDFTSSPSETINYVSCHDNYTLWDKIALSNPNDSEADRIKMDELAQAVVMTSQGVPFMQGGEEMLRTKGGNDNSYNAGDTVNRFDWSRKAQYPDVFNYYSGLIHLRLDHPAFRMTTANEINSHLQFLNSPENTVAYELTDHVNKDKWGNIIVVYNPNKTAATINLPSGKWAINATSGKVGERTLGQAEGSVQVPGISMMILHQEVSPDHGKK

SEQ ID NO: 48941 - protein, 664 aa, Bacillus acidopullulyticus
SSEQTDLVQLTLASAPDVSHTIRVGAAGYEAVNLIPRKVLNLPRYYYSGNDLGNVYSPKATAFRVWAPTASDVQLLLYNSETGPVTKALEMRKSDNGTWKLKVPGNLKNWYYLYQVTVNGKTQTAVDPYVRAISVNATRGMIVDLAKTNPPGWKEDHQQTPANPVDEVIYEVHVRDFSIDANSGMKNKGKYLAFTEHGTKGPDGVKTGIDSLKELGINAVQLLPIEEFASIDETQPNMYNWGYDPRNYNVPEGAYATTPEGTARITEFKQLIQSIHKDRIAINMDVVYNHTFATGISDFDKIVPEYYYRTDDAGNYTNGSGTGNEIASERPMVQKFIIDSLKYWVNEYHIDGFRFDLMALLGKDTMSKAASELHAINPGIALYGEPWTGGTSALPEDQLLTKGAQKGMGVAVFNDNLRNALSGNVFDSSAQGFATGATGLTDAIKRGVEGSINDFTSSPSETINYVSCHDNYTLWDKIALSNPNDSEADRIKMDELAQAVVMTSQGVPFMQGGEEMLRTKGGNDNSYNAGDTVNRFDWSRKAQYPDVFNYYSGLIHLRLDHPAFRMTTANEINSHLQFLNSPENTVAYELTDHVNKDKWGNIIVVYNPNKTAATINLPSGKWAINATSGKVGERTLGQAEGSVQVPGISMMILHQEVSPDHGKK

SEQ ID NO: 48942 - protein, 664 aa, Bacillus acidopullulyticus
SSEQTDLVQLTLASAPDVSHTIRVGAAGYEAVNLIPRNVLNLPRYYYSGNDLGNVYSPKATAFRVWAPTASDVQLLLYNSETGPVTKALEMRKSDNGTWKLKVPGNLKNWYYLYQVTVNGKTQTAVDPYVRAISVNATRGMIVDLAKTNPPGWKEDHQQTPANPVDEVIYEVHVRDFSIDPNSGMKNKGKYLAFTEHGTKGPDGVKTGIDSLKELGINAVQLLPIEEFASIDETQPNMYNWGYDPRNYNVPEGAYATTPEGTARITEFKQLIQSIHKDRIAINMDVVYNHTFATGVSDFDKIVPEYYYRTDDAGNYTNGSGTGNEIASERPMVQKFIIDSLKYWVNEYHVDGFRFDLMALLGKDTMSKAASELHAINPGIALYGEPWTGGTSALPEDQLLTKGAQKGMGVAVFNDNLRNALSGNVFDSSAQGFATGATGLTDAIKRGVEGSINDFTSSPSETINYVSCHDNYTLWDKIALSNPNDSEADRIKMDELAQAVVMTSQGVPFMQGGEEMLRTKGGNDNSYNAGDTVNRFDWSRKAQYPDVFNYYSGLIHLRLDHPAFRMTTANEINSHLQFLNSPENTVAYELTDHVNKDKWGNIIVVYNPNKTAATINLPSGKWAINATSGKVGERTLGQAEGSVQVPGISMMILHQEVSPDHGKK

SEQ ID NO: 48943 - protein, 664 aa, Bacillus acidopullulyticus
SSEQTDLVQLTLASAPDVSHTIRVGAAGYEGVNLIPRNVLNLPRYYYSGNDLGNVYSPKATAFRVWAPTASDVQLLLYNSETGPVTKALEMRKSDNGTWKLKVPGNLKNWYYLYQVTVNGKTQTAVDPYVRAISVNATRGMIVDLAKTNPPGWKEDHQQTPANPVDEVIYEVHVRDFSIDPNSGMKNKGKYLAFTEHGTKGPDGVKTGIDSLKELGINAVQLLPIEEFASIDETQPNSYNWGYDPRNYNVPEGAYATTPEGTARITEFKQLIQSIHKDRIAINMDVVYNHTFATGISDFDKIVPEYYYRTDDAGNYTNGSGTGNEIASERPMVQKFIIDSLKYWVNEYHVDGFRFDLMALLGKDTMSKAASELHAINPGIALYGEPWTGGTSALPEDQLLTKGAQKGMGVAVFNDNLRNALSGNVFDSSAQGFATGATGLTDAIKRGVEGSINDFTSSPSETINYVSCHDNYTLWDKIALSNPNDSEADRIKMDELAQAVVMTSQGVPFMQGGEEMLRTKGGNDNSYNAGDTVNRFDWSRKAQYPDVFNYYSGLIHLRLDHPAFRMTTANEINSHLQFLNSPENTVAYELTDHVNKDKWGNIIVVYNPNKTAATINLPSGKWAINATSGKVGERTLGQAEGSVQVPGISMMILHQEVSPDHGKK

SEQ ID NO: 48944 - protein, 664 aa, Bacillus acidopullulyticus
SSEQTDLVQLTLASAPDVSHTIRVGAAGYEAVNLIPRKVLNLPRYYYSGNDLGNVYSPKATAFRVWAPTASDVQLLLYNSETGPVTKALEMRKSDNGTWKLKVPGNLKNWYYLYQVTVNGKTQTAVDPYVRAISVNATRGMIVDLAKTNPPGWKEDHQQTPANPVDEVIYEVHVRDFSIDPNSGMKNKGKYLAFTEHGTKGPDGVKTGIDSLKELGINAVQLLPIEEFASIDETQPNMYNWGYDPRNYNVPEGAYATTPEGTARITEFKQLIQSIHKDRIAINMDVVYNHTFATGISDFDKIVPEYYYRTDDAGNYTNGSGTGNEIASERPMVQKFIIDSLKYWVNEYHIDGFRFDLMALLGKDTMSKAASELHAINPGIALYGEPWTGGTSALPRDQLLTKGAQKGMGVAVFNDNLRNALSGNVFDSSAQGFATGATGLTDAIKRGVEGSINDFTSSPSETINYVSCHDNYTLWDKIALSNPNDSEADRIKMDELAQAVVMTSQGVPFMQGGEEMLRTKGGNDNSYNAGDTVNRFDWSRKAQYPDVFNYYSGLIHLRLDHPAFRMTTANEINSHLQFLNSPENTVAYELTDHVNKDKWGNIIVVYNPNKTAATINLPSGKWAINATSGKVGERTLGQAEGSVQVPGISMMILHQEVSPDHGKK

SEQ ID NO: 48945 - protein, 664 aa, Bacillus acidopullulyticus
SSEQTDLVQLTLASAPDVSHTIRVGAAGYEAVNLIPRNVLNLPRYYYSGNDLGNVYSPKATAFRVWAPTASDVQLLLYNSETGPVTKALEMRKSDNGTWKLKVPGNLKNWYYLYQVTVNGKTQTAVDPYVRAISVNATRGMIVDLAKTNPPGWKEDHQQTPANPVDEVIYEVHVRDFSIDANSGMKNKGKYLAFTEHGTKGPDGVKTGIDSLKELGINAVQLLPIEEFASIDETQPNMYNWGYDPRNYNVPEGAYATTPEGTARITEFKQLIQSIHKDRIAINMDVVYNHTWATGISDFDKIVPEYYYRTDDAGNYTNGSGTGNEIASERPMVQKFIIDSLKYWVNEYHIDGFRFDLMALLGKDTMSKAASELHAINPGIALYGEPWTGGTSALPEDQLLTKGAQKGMGVAVFNDNLRNALSGNVFDSSAQGFATGATGLTDAIKRGVEGSINDFTSSPSETINYVSCHDNYTLWDKIALSNPNDSEADRIKMDELAQAVVMTSQGVPFMQGGEEMLRTKGGNDNSYNAGDTVNRFDWSRKAQYPDVFNYYSGLIHLRLDHPAFRMTTANEINSHLQFLNSPENTVAYELTDHVNKDKWGNIIVVYNPNKTAATINLPSGKWAINATSGKVGERTLGQAEGSVQVPGISMMILHQEVSPDHGKK

SEQ ID NO: 48946 - protein, 664 aa, Bacillus acidopullulyticus
SSEQTDLVQLTLASAPDVSHTIRVGAAGYEAVNLIPRNVLNLPRYYYSGNDLGNVYSPKATAFRVWAPTASDVQLLLYNSETGPVTKALEMRKSDNGTWKLKVPGNLKNWYYLYQVTVNGKTQTAVDPYVRAISVNATRGMIVDLAKTNPPGWKEDHQQTPANPVDEVIYEVHVRDFSIDANSGMKNKGKYLAFTEHGTKGPDGVKTGIDSLKELGINAVQLLPIEEFASIDETQPNMYNWGYDPRNYNVPEGAYATTPEGTARITEFKQLIQSIHKDRIAINMDVVYNHTFATGISDFDKIVPEYYYRTDDAGHYTNGSGTGNEIASERPMVQKFIIDSLKYWVNEYHIDGFRFDLMALLGKDTMSKAASELHAINPGIALYGEPWTGGTSALPEDQLLTKGAQKGMGVAVFNDNLRNALSGNVFDSSAQGFATGATGLTDAIKRGVEGSINDFTSSPSETINYVSCHDNYTLWDKIALSNPNDSEADRIKMDELAQAVVMTSQGVPFMQGGEEMLRTKGGNDNSYNAGDTVNRFDWSRKAQYPDVFNYYSGLIHLRLDHPAFRMTTANEINSHLQFLNSPENTVAYELTDHVNKDKWGNIIVVYNPNKTAATINLPSGKWAINATSGKVGERTLGQAEGSVQVPGISMMILHQEVSPDHGKK

SEQ ID NO: 48947 - protein, 664 aa, Bacillus acidopullulyticus
SSEQTDLVQLTLASAPDVSHTIRVGAAGYEGVNLIPRNVLNLPRYYYSGNDLGNVYSPKATAFRVWAPTASDVQLLLYNSETGPVTKALEMRKSDNGTWKLKVPGNLKNWYYLYQVTVNGKTQTAVDPYVRAISVNATRGMIVDLAKTNPPGWKEDHQQTPANPVDEVIYEVHVRDFSIDPNSGMKNKGKYLAFTEHGTKGPDGVKTGIDSLKELGINAVQLLPIEEFASIDETQPNMYNWGYDPRNYNVPEGAYATTPEGTARITEFKQLIQSIHKDRIAINMDVVYNHTWATGISDFDKIVPEYYYRTDDAGNYTNGSGTGNEIASERPMVQKFIIDSLKYWVNEYHIDGFRFDLMALLGKDTMSKAASELHAINPGIALYGEPWTGGTSALPEDQLLTKGAQKGMGVAVFNDNLRNALSGNVFDSSAQGFATGATGLTDAIKRGVEGSINDFTSSPSETINYVSCHDNYTLWDKIALSNPNDSEADRIKMDELAQAVVMTSQGVPFMQGGEEMLRTKGGNDNSYNAGDTVNRFDWSRKAQYPDVFNYYSGLIHLRLDHPAFRMTTANEINSHLQFLNSPENTVAYELTDHVNKDKWGNIIVVYNPNKTAATINLPSGKWAINATSGKVGERTLGQAEGSVQVPGISMMILHQEVSPDHGKK

SEQ ID NO: 48948 - protein, 664 aa, Bacillus acidopullulyticus
SSEQTDLVQLTLASAPDVSHTIRVGAAGYEAVNLIPRKVLNLPRYYYSGNDLGNVYSPKATAFRVWAPTASDVQLLLYNSETGPVTKALEMRKSDNGTWKLKVPGNLKNWYYLYQVTVNGKTQTAVDPYVRAISVNATRGMIVDLAKTNPPGWKEDHQQTPANPVDEVIYEVHVRDFSIDPNSGMKNKGKYLAFTEHGTKGPDGVKTGIDSLKELGINAVQLLPIEEFASIDETQPNSYNWGYDPRNYNVPEGAYATTPEGTARITEFKQLIQSIHKDRIAINMDVVYNHTFATGISDFDKIVPEYYYRTDDAGNYTNGSGTGNEIASERPMVQKFIIDSLKYWVNEYHIDGFRFDLMALLGKDTMSKAASELHAINPGIALYGEPWTGGTSALPRDQLLTKGAQKGMGVAVFNDNLRNALSGNVFDSSAQGFATGATGLTDAIKRGVEGSINDFTSSPSETINYVSCHDNYTLWDKIALSNPNDSEADRIKMDELAQAVVMTSQGVPFMQGGEEMLRTKGGNDNSYNAGDTVNRFDWSRKAQYPDVFNYYSGLIHLRLDHPAFRMTTANEINSHLQFLNSPENTVAYELTDHVNKDKWGNIIVVYNPNKTAATINLPSGKWAINATSGKVGERTLGQAEGSVQVPGISMMILHQEVSPDHGKK

SEQ ID NO: 48949 - protein, 664 aa, Bacillus acidopullulyticus
SSEQTDLVQLTLASAPDVSHTIRVGAAGYEAVNLIPRNVLNLPRYYYSGNDLGNVYSPKATAFRVWAPTASDVQLLLYNSETGPVTKALEMRKSDNGTWKLKVPGNLKNWYYLYQVTVNGKTQTAVDPYVRAISVNATRGMIVDLAKTNPPGWKEDHQQTPANPVDEVIYEVHVRDFSIDANSGMKNKGKYLAFTEHGTKGPDGVKTGIDSLKELGINAVQLLPIEEFASIDETQPNMYNWGYDPRNYNVPEGAYATTPEGTARITEFKQLIQSIHKDRIAINMDVVYNHTFATGVSDFDKIVPEYYYRTDDAGNYTNGSGTGNEIASERPMVQKFIIDSLKYWVNEYHIDGFRFDLMALLGKDTMSKAASELHAINPGIALYGEPWTGGTSALPEDQLLTKGAQKGMGVAVFNDNLRNALSGNVFDSSAQGFATGATGLTDAIKRGVEGSINDFTSSPSETINYVSCHDNYTLWDKIALSNPNDSEADRIKMDELAQAVVMTSQGVPFMQGGEEMLRTKGGNDNSYNAGDTVNRFDWSRKAQYPDVFNYYSGLIHLRLDHPAFRMTTANEINSHLQFLNSPENTVAYELTDHVNKDKWGNIIVVYNPNKTAATINLPSGKWAINATSGKVGERTLGQAEGSVQVPGISMMILHQEVSPDHGKK

SEQ ID NO: 48950 - protein, 664 aa, Bacillus acidopullulyticus
SSEQTDLVQLTLASAPDVSHTIRVGAAGYEGVNLIPRNVLNLPRYYYSGNDLGNVYSPKATAFRVWAPTASDVQLLLYNSETGPVTKALEMRKSDNGTWKLKVPGNLKNWYYLYQVTVNGKTQTAVDPYVRAISVNATRGMIVDLAKTNPPGWKEDHQQTPANPVDEVIYEVHVRDFSIDANSGMKNKGKYLAFTEHGTKGPDGVKTGIDSLKELGINAVQLLPIEEFASIDETQPNMYNWGYDPRNYNVPEGAYATTPEGTARITEFKQLIQSIHKDRIAINMDVVYNHTFATGISDFDKIVPEYYYRTDDAGNYTNGSGTGNEIASERPMVQKFIIDSLKYWVNEYHIDGFRFDLMALLGKDTMSKAASELHAINPGIALYGEPWTGGTSALPEDQLLTKGAQKGMGVAVFNDNLRNALSGNVFDSSAQGFATGATGLTDAIKRGVEGSINDFTSSPSETINYVSCHDNYTLWDKIALSNPNDSEADRIKMDELAQAVVMTSQGVPFMQGGEEMLRTKGGNDNSYNAGDTVNRFDWSRKAQYPDVFNYYSGLIHLRLDHPAFRMTTANEINSHLQFLNSPENTVAYELTDHVNKDKWGNIIVVYNPNKTAATINLPSGKWAINATSGKVGERTLGQAEGSVQVPGISMMILHQEVSPDHGKK

SEQ ID NO: 48951 - protein, 664 aa, Bacillus acidopullulyticus
SSEQTDLVQLTLASAPDVSHTIRVGAAGYEAVNLIPRNVLNLPRYYYSGNDLGNVYSPKATAFRVWAPTASDVQLLLYNSETGPVTKALEMRKSDNGTWKLKVPGNLKNWYYLYQVTVNGKTQTAVDPYVRAISVNATRGMIVDLAKTNPPGWKEDHQQTPANPVDEVIYEVHVRDFSIDANSGMKNKGKYLAFTEHGTKGPDGVKTGIDSLKELGINAVQLLPIEEFASIDETQPNMYNWGYDPRNYNVPEGAYATTPEGTARITEFKQLIQSIHKDRIAINMDVVYNHTFATGISDFDKIVPEYYYRTDDAGNYTNGSGTGNEIASERPMVQKFIIDSLKYWVNEYHVDGFRFDLMALLGKDTMSKAASELHAINPGIALYGEPWTGGTSALPEDQLLTKGAQKGMGVAVFNDNLRNALSGNVFDSSAQGFATGATGLTDAIKRGVEGSINDFTSSPSETINYVSCHDNYTLWDKIALSNPNDSEADRIKMDELAQAVVMTSQGVPFMQGGEEMLRTKGGNDNSYNAGDTVNRFDWSRKAQYPDVFNYYSGLIHLRLDHPAFRMTTANEINSHLQFLNSPENTVAYELTDHVNKDKWGNIIVVYNPNKTAATINLPSGKWAINATSGKVGERTLGQAEGSVQVPGISMMILHQEVSPDHGKK

SEQ ID NO: 48952 - protein, 664 aa, Bacillus deramificans
SSEQTDLVQLTLASAPDVSHTIRVGAAGYEAVNLIPRNVLNLPRYYYSGNDLGNVYSNKATAFRVWAPTASDVQLLLYNSETGPVTKQLEMQKSDNGTWKLKVPGNLKNWYYLYQVTVNGKTQTAVDPYVRAISVNATRGMIVDLEDTNPPGWKEDHQQTPANPVDEVIYEVHVRDFSIDANSGMKNKGKYLAFTEHGTKGPDGVKTGIDSLKELGINAVQLLPIEEFASIDETQPNMYNWGYDPRNYNVPEGAYATTPEGTARITEFKQLIQSIHKDRIAINMDVVYNHTFATQISDFDKIVPEYYYRTDDAGNYTNGSGCGNEIAAERPMVQKFIIDSLKYWVNEYHIDGFRFDLMALLGKDTMSKAASELHAINPGIALYGEPWTGGTSALPEDQLLTKGAQKGMGVAVFNDNLRNALSGNVFDSSAQGFATGATGLTDAIKRGVEGSINDFTSSPSETINYVSSHDNYTLWDKIALSNPNDSEADRIKMDELAQAVVMTSQGVPFMLGGEEMLRTKGGNDNSYNAGDTVNRFDWSRKAQYPDVFNYYSGLIHLRLDHPAFRMTTANEINSHLQFLNSPENTVAYELTDHVNKDKWGNIIVVYNPNKTAATINLPSGKWAINATSGKVGERTLGQAEGSVQVPGISMMILHQEVSPDHGKK

SEQ ID NO: 48953 - protein, 664 aa, Bacillus deramificans
SSEQTDLVQLTLASAPDVSHTIRVGAAGYEARNLIPRNVLNLPRYYYSGNDLGNVYSNKATAFRVWAPTASDVQLLLYNSETGPVTKQLEMQKSDNGTWKLKVPGNLKNWYYLYQVTVNGKTQTAVDPYVRAISVNATRGMIVDLEDTNPPGWKEDHQQTPANPVDEVIYEVHVRDFSIDANSGMKNKGKYLAFTEHGTKGPDGVKTGIDSLKELGINAVQLLPIEEFASIDETQPNMYNWGYDPRNYNVPEGAYATTPEGTARITEFKQLIQSIHKDRIAINMDVVYNHTFATQISDFDKIVPEYYYRTDDAGNYTNGSGCGNEIAAERPMVQKFIIDSLKYWVNEYHIDGFRFDLMALLGKDTMSKAASELHAINPGIALYGEPWTGGTSALPEDQLLTKGAQKGMGVAVFNDNLRNALSGNVFDSSAQGFATGATGLTDAIKRGVEGSINDFTSSPSETINYVSSHDNYTLWDKIALSNPNDSEADRIKMDELAQAVVMTSQGVPFMLGGEEMLRTKGGNDNSYNAGDTVNRFDWSRKAQYPDVFNYYSGLIHLRLDHPAFRMTTANEINSHLQFLNSPENTVAYELTDHVNKDKWGNIIVVYNPNKTAATINLPSGKWAINATSGKVGERTLGQAEGSVQVPGISMMILHQEVSPDHGKK

SEQ ID NO: 48954 - protein, 664 aa, Bacillus deramificans
SSEQTDLVQLTLASAPDVSHTIRVGAAGYEAVNLIPRNVLNLPRYYYSGNDLGNVYSNKATAFRVWAPTASDVQLLLYNSETGPVTKQLEMQKSDNGTWKLKVPGNLKNWYYLYQVTVNGKTQTAVDPYVRAISVNATRGMIVDLEDTNPPGWKEDHQQTPANPVDEVIYEVHVRDFSIDANSGMKNKGKYLAFTEHGTKGPDGVKTGIDSLKELGINAVQLLPIEEFASIDETQPNMYNWGYDPRNYNVPEGAYATTPEGTARITEFKQLIQSIHKDRIAINMDVVYNHTFATQISDFDKIVPEYYYRTDDAGNYTNGSGCGNEIAAERPMVQKFIIDSLKYWVNEYHIDGFRFDLMALLGKDTMSKAASELHAINPGIALYGEPWTGGTSALPEDQLLTKGAQKGMGVAVFNDNLRNALSGNVFDSSAQGFATGATGLTDAIKRGVEGSINDFTSSPSETINYVSCHDNYTLWDKIALSNPNDSEADRIKMDELAQAVVMTSQGVPFMQGGEEMLRTKGGNDNSYNAGDTVNRFDWSRKAQYPDVFNYYSGLIHLRLDHPAFRMTTANEINSHLQFLNSPENTVAYELTDHVNKDKWGNIIVVYNPNKTAATINLPSGKWAINATSGKVGERTLGQAEGSVQVPGISMMILHQEVSPDHGKK

SEQ ID NO: 48955 - protein, 664 aa, Bacillus deramificans
SSEQTDLVQLTLASAPDVSHTIRVGAAGYEAVNLIPRNVLNLPRYYYSGNDLGNVYSNKATAFRVWAPTASDVQLLLYNSETGPVTKQLEMQKSDNGTWKLKVPGNLKNWYYLYQVTVNGKTQTAVDPYVRAISVNATRGMIVDLEDTNPPGWKEDHQQTPANPVDEVIYEVHVRDFSIDANSGMKNKGKYLAFTEHGTKGPDGVKTGIDSLKELGINAVQLQPIEEFASIDETQPNMYNWGYDPRNYNVPEGAYATTPEGTARITEFKQLIQSIHKDRIAINMDVVYNHTFATQISDFDKIVPEYYYRTDDAGNYTNGSGCGNEIAAERPMVQKFIIDSLKYWVNEYHIDGFRFDLMALLGKDTMSKAASELHAINPGIALYGEPWTGGTSALPEDQLLTKGAQKGMGVAVFNDNLRNALSGNVFDSSAQGFATGATGLTDAIKRGVEGSINDFTSSPSETINYVSCHDNYTLWDKIALSNPNDSEADRIKMDELAQAVVMTSQGVPFMQGGEEMLRTKGGNDNSYNAGDTVNRFDWSRKAQYPDVFNYYSGLIHLRLDHPAFRMTTANEINSHLQFLNSPENTVAYELTDHVNKDKWGNIIVVYNPNKTAATINLPSGKWAINATSGKVGERTLGQAEGSVQVPGISMMILHQEVSPDHGKK

SEQ ID NO: 48956 - protein, 664 aa, Bacillus deramificans
SSEQTDLVQLTLASAPDVSHTIRVGAAGYEAVNLIPRNVLNLPRYYYSGNDLGNVYSNKATAFRVWAPTASDVQLLLYNSETGPVTKQLEMQKSDNGTWKLKVPGNLKNWYYLYQVTVNGKTQTAVDPYVRAISVNATRGMIVDLEDTNPPGWKEDHQQTPANPVDEVIYEVHVRDFSIDANSGMKNKGKYLAFTEHGTKGPDGVKTGIDSLKELGINAVQLLPIEEFASIDETQPNMYNWGYDPRNYNVPEGAYATTPEGTARITEFKQLIQSIHKDRIAINMDVVYNHTFATGISDFDKIVPEYYYRTDDAGNYTNGSGCGNEIAAERPMVQKFIIDSLKYWVNEYHIDGFRFDLMALLGKDTMSKAASELHAINPGIALYGEPWTGGTSALPEDQLLTKGAQKGMGVAVFNDNLRNALCGNVFDSSAQGFATGATGLTDAIKRGVEGSINDFTSSPSETINYVSSHDNYTLWDKIALSNPNDSEADRIKMDELAQAVVMTSQGVPFMQGGEEMLRTKGGNDNSYNAGDTVNRFDWSRKAQYPDVFNYYSGLIHLRLDHPAFRMTTANEINSHLQFLNSPENTVAYELTDHVNKDKWGNIIVVYNPNKTAATINLPSGKWAINATSGKVGERTLGQAEGSVQVPGISMMILHQEVSPDHGKK

SEQ ID NO: 48957 - protein, 664 aa, Bacillus deramificans
SSEQTDLVQLTLASAPDVSHTIRVGAAGYEAVNLIPRNVLNLPRYYYSGNDLGNVYSNKATAFRVWAPTASDVQLLLYNSETGPVTKQLEMQKSDNGTWKLKVPGNLKNWYYLYQVTVNGKTQTAVDPYVRAISVNATRGMIVDLEDTNPPGWKEDHQQTPANPVDEVIYEVHVRDFSIDANSGMKNKGKYLAFTEHGTKGPDGVKTGIDSLKELGINAVQLLPIEEFASIDETQPNMYNWGYDPRNYNVPEGAYATTPEGTARITEFKQLIQSIHKDRIAINMDVVYNHTFATGISDFDKIVPEYYYRTDDAGNYTNGSGTGNEIAAERPMVQKFIIDSLKYWVNEYHIDGFRFDLMALLGKDTMSKAASELHAINPGIALYGEPWTGGTSALPEDQLLTKGAQKGMGVAVFNDNLRNALSGNVFDSSAQGFATGATGLTDAIKRGVEGSINDFTSSPSETINYVSCHDNYTLWDKIALSNPNDSEADRIKMDELAQAVVMTSQGVPFMQGGEEMLRTKGGNDNSYNAGDTVNRFDWSRKAQYPDVFNYYSGLIHLRLDHPAFRMTTANEINSHLQFLNSPENTVAYELTDHVNKDKWGNIIVVYNPNKTAATINLPSGKWAINATSGKVGERTLGQAEGSVQVPGISMMILHQEVSPDHGKK

SEQ ID NO: 48958 - protein, 664 aa, Bacillus acidopullulyticus
SSEQTDLVQLTLASAPDVSHTIRVGAAGYEAVTLIPRNVLNLPRYYYSGNDLGNVYSPKATAFRVWAPTASDVQLLLYNSETGPVTKALEMRKSDNGTWKLKVPGNLKNWYYLYQVTVNGKTQTAVDPYVRAISVNATRGMIVDLAKTNPPGWKEDHQQTPANPVDEVIYEVHVRDFSIDPNSGMKNKGKYLAFTEHGTKGPDGVKTGIDSLKELGINAVQLLPIEEFASIDETQPNSYNWGYDPRNYNVPEGAYATTPEGTARITEFKQLIQSIHKDRIAINMDVVYNHTFATGVSDFDKIVPEYYYRTDDAGNYTNGSGTGNEIASERPMVQKFIIDSLKYWVNEYHVDGFRFDLMALLGKDTMSKAASELHAINPGIALYGEPWTGGTSALPRDQLLTKGAQKGMGVAVFNDNLRNALSGNVFDSSAQGFATGATGLTDAIKRGVEGSINDFTSSPSETINYVSCHDNYTLWDKIALSNPNDSEADRIKMDELAQAVVMTSQGVPFMQGGEEMLRTKGGNDNSYNAGDTVNRFDWSRKAQYPDVFNYYSGLIHLRLDHPAFRMTTANEINSHLQFLNSPENTVAYELTDHVNKDKWGNIIVVYNPNKTAATINLPSGKWAINATSGKVGERTLGQAEGSVQVPGISMMILHQEVSPDHGKK

SEQ ID NO: 48959 - protein, 664 aa, Bacillus acidopullulyticus
SSEQTDLVQLTLASAPDVSHTIRVGAAGYEGVNLIPRNVLNLPRYYYSGNDLGNVYSPKATAFRVWAPTASDVQLLLYNSETGPVTKALEMRKSDNGTWKLKVPGNLKNWYYLYQVTVNGKTQTAVDPYVRAISVNATRGMIVDLAKTNPPGWKEDHQQTPANPVDEVIYEVHVRDFSIDPNSGMKNKGKYLAFTEHGTKGPDGVKTGIDSLKELGINAVQLLPIEEFASIDETQPNMYNWGYDPRNYNVPEGAYATTPEGTARITEFKQLIQSIHKDRIAINMDVVYNHTFATGVSDFDKIVPEYYYRTDDAGNYTNGSGTGNEIASERPMVQKFIIDSLKYWVNEYHVDGFRFDLMALLGKDTMSKAASELHAINPGIALYGEPWTGGTSALPEDQLLTKGAQKGMGVAVFNDNLRNALSGNVFDSSAQGFATGATGLTDAIKRGVEGSINDFTSSPSETINYVSCHDNYTLWDKIALSNPNDSEADRIKMDELAQAVVMTSQGVPFMQGGEEMLRTKGGNDNSYNAGDTVNRFDWSRKAQYPDVFNYYSGLIHLRLDHPAFRMTTANEINSHLQFLNSPENTVAYELTDHVNKDKWGNIIVVYNPNKTAATINLPSGKWAINATSGKVGERTLGQAEGSVQVPGISMMILHQEVSPDHGKK

SEQ ID NO: 48960 - protein, 664 aa, Bacillus deramificans
SSEQTDLVQLTLASAPDVSHTIRVGAAGYEAVNLIPRNVLNLPRYYYSGNDLGNVYSNKATAFRVWAPTASDVQLLLYNSETGPVTKQLEMQKSDNGTWKLKVPGNLKNWYYLYQVTVNGKTQTAVDPYVRAISVNATRGMIVDLEDTNPPGWKEDHQQTPANPVDEVIYEVHVRDFSIDANSGMKNKGKYLAFTEHGTKGPDGVKTGIDSLKELGINAVELQPIEEFASIDETQPNMYNWGYDPRNYNVPEGAYATTPEGTARITEFKQLIQSIHKDRIAINMDVVYNHTFATQISDFDKIVPEYYYRTDDAGNYTNGSGCGNEIAAERPMVQKFIIDSLKYWVNEYHIDGFRFDLMALLGKDTMSKAASELHAINPGIALYGEPWTGGTSALPEDQLLTKGAQKGMGVAVFNDNLRNALSGNVFDSSAQGFATGATGLTDAIKRGVEGSINDFTSSPSETINYVSCHDNYTLWDKIALSNPNDSEADRIKMDELAQAVVMTSQGVPFMQGGEEMLRTKGGNDNSYNAGDTVNRFDWSRKAQYPDVFNYYSGLIHLRLDHPAFRMTTANEINSHLQFLNSPENTVAYELTDHVNKDKWGNIIVVYNPNKTAATINLPSGKWAINATSGKVGERTLGQAEGSVQVPGISMMILHQEVSPDHGKK

SEQ ID NO: 48961 - protein, 664 aa, Bacillus deramificans
SSEQTDLVQLTLASAPDVSHTIRVGAAGYEARNLIPRNVLNLPRYYYSGNDLGNVYSNKATAFRVWAPTASDVQLLLYNSETGPVTKQLEMQKSDNGTWKLKVPGNLKNWYYLYQVTVNGKTQTAVDPYVRAISVNATRGMIVDLEDTNPPGWKEDHQQTPANPVDEVIYEVHVRDFSIDANSGMKNKGKYLAFTEHGTKGPDGVKTGIDSLKELGINAVQLLPIEEFASIDETQPNMYNWGYDPRNYNVPEGAYATTPEGTARITEFKQLIQSIHKDRIAINMDVVYNHTFATGISDFDKIVPEYYYRTDDAGNYTNGSGCGNEIAAERPMVQKFIIDSLKYWVNEYHIDGFRFDLMALLGKDTMSKAASELHAINPGIALYGEPWTGGTSALPEDQLLTKGAQKGMGVAVFNDNLRNALSGNVFDSSAQGFATGATGLTDAIKRGVEGSINDFTSSPSETINYVSSHDNYTLWDKIALSNPNDSEADRIKMDELAQAVVMTSQGVPFMLGGEEMLRTKGGNDNSYNAGDTVNRFDWSRKAQYPDVFNYYSGLIHLRLDHPAFRMTTANEINSHLQFLNSPENTVAYELTDHVNKDKWGNIIVVYNPNKTAATINLPSGKWAINATSGKVGERTLGQAEGSVQVPGISMMILHQEVSPDHGKK

SEQ ID NO: 48962 - protein, 664 aa, Bacillus acidopullulyticus
SSEQTDLVQLTLASAPDVSHTIRVGAAGYEGVNLIPRKVLNLPRYYYSGNDLGNVYSPKATAFRVWAPTASDVQLLLYNSETGPVTKALEMRKSDNGTWKLKVPGNLKNWYYLYQVTVNGKTQTAVDPYVRAISVNATRGMIVDLAKTNPPGWKEDHQQTPANPVDEVIYEVHVRDFSIDPNSGMKNKGKYLAFTEHGTKGPDGVKTGIDSLKELGINAVQLLPIEEFASIDETQPNSYNWGYDPRNYNVPEGAYATTPEGTARITEFKQLIQSIHKDRIAINMDVVYNHTFATGVSDFDKIVPEYYYRTDDAGNYTNGSGTGNEIASERPMVQKFIIDSLKYWVNEYHVDGFRFDLMALLGKDTMSKAASELHAINPGIALYGEPWTGGTSALPEDQLLTKGAQKGMGVAVFNDNLRNALSGNVFDSSAQGFATGATGLTDAIKRGVEGSINDFTSSPSETINYVSCHDNYTLWDKIALSNPNDSEADRIKMDELAQAVVMTSQGVPFMQGGEEMLRTKGGNDNSYNAGDTVNRFDWSRKAQYPDVFNYYSGLIHLRLDHPAFRMTTANEINSHLQFLNSPENTVAYELTDHVNKDKWGNIIVVYNPNKTAATINLPSGKWAINATSGKVGERTLGQAEGSVQVPGISMMILHQEVSPDHGKK

SEQ ID NO: 48963 - protein, 664 aa, Bacillus acidopullulyticus
SSEQTDLVQLTLASAPDVSHTIRVGAAGYEGVNLIPRNVLNLPRYYYSGNDLGNVYSPKATAFRVWAPTASDVQLLLYNSETGPVTKALEMRKSDNGTWKLKVPGNLKNWYYLYQVTVNGKTQTAVDPYVRAISVNATRGMIVDLAKTNPPGWKEDHQQTPANPVDEVIYEVHVRDFSIDPNSGMKNKGKYLAFTEHGTKGPDGVKTGIDSLKELGINAVQLLPIEEFASIDETQPNSYNWGYDPRNYNVPEGAYATTPEGTARITEFKQLIQSIHKDRIAINMDVVYNHTWATGVSDFDKIVPEYYYRTDDAGNYTNGSGTGNEIASERPMVQKFIIDSLKYWVNEYHVDGFRFDLMALLGKDTMSKAASELHAINPGIALYGEPWTGGTSALPEDQLLTKGAQKGMGVAVFNDNLRNALSGNVFDSSAQGFATGATGLTDAIKRGVEGSINDFTSSPSETINYVSCHDNYTLWDKIALSNPNDSEADRIKMDELAQAVVMTSQGVPFMQGGEEMLRTKGGNDNSYNAGDTVNRFDWSRKAQYPDVFNYYSGLIHLRLDHPAFRMTTANEINSHLQFLNSPENTVAYELTDHVNKDKWGNIIVVYNPNKTAATINLPSGKWAINATSGKVGERTLGQAEGSVQVPGISMMILHQEVSPDHGKK

SEQ ID NO: 48964 - protein, 664 aa, Bacillus acidopullulyticus
SSEQTDLVQLTLASAPDVSHTIRVGAAGYEGVNLIPRNVLNLPRYYYSGNDLGNVYSPKATAFRVWAPTASDVQLLLYNSETGPVTKALEMRKSDNGTWKLKVPGNLKNWYYLYQVTVNGKTQTAVDPYVRAISVNATRGMIVDLAKTNPPGWKEDHQQTPANPVDEVIYEVHVRDFSIDPNSGMKNKGKYLAFTEHGTKGPDGVKTGIDSLKELGINAVQLLPIEEFASIDETQPNSYNWGYDPRNYNVPEGAYATTPEGTARITEFKQLIQSIHKDRIAINMDVVYNHTFATGVSDFDKIVPEYYYRTDDAGNYTNGSGTGNEIASERPMVQKFIIDSLKYWVNEYHVDGFRFDLMALLGKDTMSKAASELHAINPGIALYGEPWTGGTSALPRDQLLTKGAQKGMGVAVFNDNLRNALSGNVFDSSAQGFATGATGLTDAIKRGVEGSINDFTSSPSETINYVSCHDNYTLWDKIALSNPNDSEADRIKMDELAQAVVMTSQGVPFMQGGEEMLRTKGGNDNSYNAGDTVNRFDWSRKAQYPDVFNYYSGLIHLRLDHPAFRMTTANEINSHLQFLNSPENTVAYELTDHVNKDKWGNIIVVYNPNKTAATINLPSGKWAINATSGKVGERTLGQAEGSVQVPGISMMILHQEVSPDHGKK

SEQ ID NO: 48965 - protein, 664 aa, Bacillus acidopullulyticus
SSEQTDLVQLTLASAPDVSHTIRVGAAGYEGVTLIPRKVLNLPRYYYSGNDLGNVYSPKATAFRVWAPTASDVQLLLYNSETGPVTKALEMRKSDNGTWKLKVPGNLKNWYYLYQVTVNGKTQTAVDPYVRAISVNATRGMIVDLAKTNPPGWKEDHQQTPANPVDEVIYEVHVRDFSIDPNSGMKNKGKYLAFTEHGTKGPDGVKTGIDSLKELGINAVQLLPIEEFASIDETQPNSYNWGYDPRNYNVPEGAYATTPEGTARITEFKQLIQSIHKDRIAINMDVVYNHTFATGVSDFDKIVPEYYYRTDDAGNYTNGSGTGNEIASERPMVQKFIIDSLKYWVNEYHVDGFRFDLMALLGKDTMSKAASELHAINPGIALYGEPWTGGTSALPRDQLLTKGAQKGMGVAVFNDNLRNALSGNVFDSSAQGFATGATGLTDAIKRGVEGSINDFTSSPSETINYVSCHDNYTLWDKIALSNPNDSEADRIKMDELAQAVVMTSQGVPFMQGGEEMLRTKGGNDNSYNAGDTVNRFDWSRKAQYPDVFNYYSGLIHLRLDHPAFRMTTANEINSHLQFLNSPENTVAYELTDHVNKDKWGNIIVVYNPNKTAATINLPSGKWAINATSGKVGERTLGQAEGSVQVPGISMMILHQEVSPDHGKK

SEQ ID NO: 48966 - protein, 664 aa, Bacillus acidopullulyticus
SSEQTDLVQLTLASAPDVSHTIRVGAAGYEGVNLIPRNVLNLPRYYYSGNDLGNVYSPKATAFRVWAPTASDVQLLLYNSETGPVTKALEMRKSDNGTWKLKVPGNLKNWYYLYQVTVNGKTQTAVDPYVRAISVNATRGMIVDLAKTNPPGWKEDHQQTPANPVDEVIYEVHVRDFSIDPNSGMKNKGKYLAFTEHGTKGPDGVKTGIDSLKELGINAVQLLPIEEFASIDETQPNSYNWGYDPRNYNVPEGAYATTPEGTARITEFKQLIQSIHKDRIAINMDVVYNHTWATGVSDFDKIVPEYYYRTDDAGNYTNGSGTGNEIASERPMVQKFIIDSLKYWVNEYHVDGFRFDLMALLGKDTMSKAASELHAINPGIALYGEPWTGGTSALPRDQLLTKGAQKGMGVAVFNDNLRNALSGNVFDSSAQGFATGATGLTDAIKRGVEGSINDFTSSPSETINYVSCHDNYTLWDKIALSNPNDSEADRIKMDELAQAVVMTSQGVPFMQGGEEMLRTKGGNDNSYNAGDTVNRFDWSRKAQYPDVFNYYSGLIHLRLDHPAFRMTTANEINSHLQFLNSPENTVAYELTDHVNKDKWGNIIVVYNPNKTAATINLPSGKWAINATSGKVGERTLGQAEGSVQVPGISMMILHQEVSPDHGKK

SEQ ID NO: 48967 - protein, 664 aa, Bacillus acidopullulyticus
SSEQTDLVQLTLASAPDVSHTIRVGAAGYEGVNLIPRNVLNLPRYYYSGNDLGNVYSPKATAFRVWAPTASDVQLLLYNSETGPVTKALEMRKSDNGTWKLKVPGNLKNWYYLYQVTVNGKTQTAVDPYVRAISVNATRGMIVDLAKTNPPGWKEDHQQTPANPVDEVIYEVHVRDFSIDPNSGMKNKGKYLAFTEHGTKGPDGVKTGIDSLKELGINAVQLLPIEEFASIDETQPNSYNWGYDPRNYNVPEGAYATTPEGTARITEFKQLIQSIHKDRIAINMDVVYNHTFATGVSDFDKIVPEYYYRTDDAGHYTNGSGTGNEIASERPMVQKFIIDSLKYWVNEYHVDGFRFDLMALLGKDTMSKAASELHAINPGIALYGEPWTGGTSALPRDQLLTKGAQKGMGVAVFNDNLRNALSGNVFDSSAQGFATGATGLTDAIKRGVEGSINDFTSSPSETINYVSCHDNYTLWDKIALSNPNDSEADRIKMDELAQAVVMTSQGVPFMQGGEEMLRTKGGNDNSYNAGDTVNRFDWSRKAQYPDVFNYYSGLIHLRLDHPAFRMTTANEINSHLQFLNSPENTVAYELTDHVNKDKWGNIIVVYNPNKTAATINLPSGKWAINATSGKVGERTLGQAEGSVQVPGISMMILHQEVSPDHGKK

SEQ ID NO: 48968 - protein, 664 aa, Bacillus acidopullulyticus
SSEQTDLVQLTLASAPDVSHTIRVGAAGYEGVTLIPRNVLNLPRYYYSGNDLGNVYSPKATAFRVWAPTASDVQLLLYNSETGPVTKALEMRKSDNGTWKLKVPGNLKNWYYLYQVTVNGKTQTAVDPYVRAISVNATRGMIVDLAKTNPPGWKEDHQQTPANPVDEVIYEVHVRDFSIDPNSGMKNKGKYLAFTEHGTKGPDGVKTGIDSLKELGINAVQLLPIEEFASIDETQPNSYNWGYDPRNYNVPEGAYATTPEGTARITEFKQLIQSIHKDRIAINMDVVYNHTWATGVSDFDKIVPEYYYRTDDAGNYTNGSGTGNEIASERPMVQKFIIDSLKYWVNEYHVDGFRFDLMALLGKDTMSKAASELHAINPGIALYGEPWTGGTSALPRDQLLTKGAQKGMGVAVFNDNLRNALSGNVFDSSAQGFATGATGLTDAIKRGVEGSINDFTSSPSETINYVSCHDNYTLWDKIALSNPNDSEADRIKMDELAQAVVMTSQGVPFMQGGEEMLRTKGGNDNSYNAGDTVNRFDWSRKAQYPDVFNYYSGLIHLRLDHPAFRMTTANEINSHLQFLNSPENTVAYELTDHVNKDKWGNIIVVYNPNKTAATINLPSGKWAINATSGKVGERTLGQAEGSVQVPGISMMILHQEVSPDHGKK

SEQ ID NO: 48969 - protein, 664 aa, Bacillus acidopullulyticus
SSEQTDLVQLTLASAPDVSHTIRVGAAGYEGVNLIPRKVLNLPRYYYSGNDLGNVYSPKATAFRVWAPTASDVQLLLYNSETGPVTKILEMRKSDNGTWKLKVPGNLKNWYYLYQVTVNGKTQTAVDPYVRAISVNATRGMIVDLAKTNPPGWKEDHQQTPANPVDEVIYEVHVRDFSIDPNSGMKNKGKYLAFTEHGTKGPDGVKTGIDSLKELGINAVQLLPIEEFASIDETQPNSYNWGYDPRNYNVPEGAYATTPEGTARITEFKQLIQSIHKDRIAINMDVVYNHTFATGVSDFDKIVPEYYYRTDDAGNYTNGSGTGNEIASERPMVQKFIIDSLKYWVNEYHVDGFRFDLMALLGKDTMSKAASELHAINPGIALYGEPWTGGTSALPRDQLLTKGAQKGMGVAVFNDNLRNALSGNVFDSSAQGFATGATGLTDAIKRGVEGSINDFTSSPSETINYVSCHDNYTLWDKIALSNPNDSEADRIKMDELAQAVVMTSQGVPFMQGGEEMLRTKGGNDNSYNAGDTVNRFDWSRKAQYPDVFNYYSGLIHLRLDHPAFRMTTANEINSHLQFLNSPENTVAYELTDHVNKDKWGNIIVVYNPNKTAATINLPSGKWAINATSGKVGERTLGQAEGSVQVPGISMMILHQEVSPDHGKK

SEQ ID NO: 48970 - protein, 664 aa, Bacillus acidopullulyticus
SSEQTDLVQLTLASAPDVSHTIRVGAAGYEGVNLIPRKVLNLPRYYYSGNDLGNVYSPKATAFRVWAPTASDVQLLLYNSETGPVTKALEMRKSDNGTWKLKVPGNLKNWYYLYQVTVNGKTQTAVDPYVRAISVNATRGMIVDLAKTNPPGWKEDHQQTPANPVDEVIYEVHVRDFSIDPNSGMKNKGKYLAFTEHGTKGPDGVKTGIDSLKELGINAVQLLPIEEFASIDETQPNSYNWGYDPRNYNVPEGAYATTPEGTARITEFKQLIQSIHKDRIAINMDVVYNHTFATGVSDFDKIVPEYYYRTDDAGNYTNGSGTGNEIASERPMVQKFIIDSLKYWVNEYHVDGFRFDLMALLGKDTMSKAASELHAINPGIALYGEPWTGGTSALPRDQLLTKGAQKGMGVAVFNDNLRNALSGNVFDSSAQGFATGATGLTDAIKRGVEGSINDFTSSPSETINYVSCHDNYTLWDKIALSNPNDSEADRIKMDELAQAVVMTSQGVPFMQGGEEMLRTKGGNDNSYNAGDTVNRFDWSRKAQYPDVFNYYSGLIHLRLDHPAFRMTTANEINSHLQFLNSPENTVAYELTDHVNKDKWGNIIVVYNPNKTAATINLPSGKWAINATSGKVGERTLGQAEGSVQVPGISMMILHQEVSPDHGKK

SEQ ID NO: 48971 - protein, 664 aa, Bacillus acidopullulyticus
SSEQTDLVQLTLASAPDVSHTIRVGAAGYEGVTLIPRKVLNLPRYYYSGNDLGNVYSPKATAFRVWAPTASDVQLLLYNSETGPVTKALEMRKSDNGTWKLKVPGNLKNWYYLYQVTVNGKTQTAVDPYVRAISVNATRGMIVDLAKTNPPGWKEDHQQTPANPVDEVIYEVHVRDFSIDPNSGMKNKGKYLAFTEHGTKGPDGVKTGIDSLKELGINAVQLLPIEEFASIDETQPNSYNWGYDPRNYNVPEGAYATTPEGTARITEFKQLIQSIHKDRIAINMDVVYNHTWATGVSDFDKIVPEYYYRTDDAGNYTNGSGTGNEIASERPMVQKFIIDSLKYWVNEYHVDGFRFDLMALLGKDTMSKAASELHAINPGIALYGEPWTGGTSALPRDQLLTKGAQKGMGVAVFNDNLRNALSGNVFDSSAQGFATGATGLTDAIKRGVEGSINDFTSSPSETINYVSCHDNYTLWDKIALSNPNDSEADRIKMDELAQAVVMTSQGVPFMQGGEEMLRTKGGNDNSYNAGDTVNRFDWSRKAQYPDVFNYYSGLIHLRLDHPAFRMTTANEINSHLQFLNSPENTVAYELTDHVNKDKWGNIIVVYNPNKTAATINLPSGKWAINATSGKVGERTLGQAEGSVQVPGISMMILHQEVSPDHGKK

SEQ ID NO: 48972 - protein, 664 aa, Bacillus acidopullulyticus
SSEQTDLVQLTLASAPDVSHTIRVGAAGYEGVNLIPRKVLNLPRYYYSGNDLGNVYSPKATAFRVWAPTASDVQLLLYNSETGPVTKALEMRKSDNGTWKLKVPGNLKNWYYLYQVTVNGKTQTAVDPYVRAISVNATRGMIVDLAKTNPPGWKEDHQQTPANPVDEVIYEVHVRDFSIDPNSGMKNKGKYLAFTEHGTKGPDGVKTGIDSLKELGINAVQLLPIEEFASIDETQPNSYNWGYDPRNYNVPEGAYATTPEGTARITEFKQLIQSIHKDRIAINMDVVYNHTWATGVSDFDKIVPEYYYRTDDAGNYTNGSGTGNEIASERPMVQKFIIDSLKYWVNEYHVDGFRFDLMALLGKDTMSKAASELHAINPGIALYGEPWTGGTSALPRDQLLTKGAQKGMGVAVFNDNLRNALSGNVFDSSAQGFATGATGLTDAIKRGVEGSINDFTSSPSETINYVSCHDNYTLWDKIALSNPNDSEADRIKMDELAQAVVMTSQGVPFMQGGEEMLRTKGGNDNSYNAGDTVNRFDWSRKAQYPDVFNYYSGLIHLRLDHPAFRMTTANEINSHLQFLNSPENTVAYELTDHVNKDKWGNIIVVYNPNKTAATINLPSGKWAINATSGKVGERTLGQAEGSVQVPGISMMILHQEVSPDHGKK

SEQ ID NO: 48973 - protein, 664 aa, Bacillus acidopullulyticus
SSEQTDLVQLTLASAPDVSHTIRVGAAGYEGVNLIPRNVLNLPRYYYSGNDLGNVYSPKATAFRVWAPTASDVQLLLYNSETGPVTKALEMRKSDNGTWKLKVPGNLKNWYYLYQVTVNGKTQTAVDPYVRAISVNATRGMIVDLAKTNPPGWKEDHQQTPANPVDEVIYEVHVRDFSIDPNSGMKNKGKYLAFTEHGTKGPDGVKTGIDSLKELGINAVQLLPIEEFASIDETQPNSYNWGYDPRNYNVPEGAYATTPEGTARITEFKQLIQSIHKDRIAINMDVVYNHTWATGVSDFDKIVPEYYYRTDDAGHYTNGSGTGNEIASERPMVQKFIIDSLKYWVNEYHVDGFRFDLMALLGKDTMSKAASELHAINPGIALYGEPWTGGTSALPRDQLLTKGAQKGMGVAVFNDNLRNALSGNVFDSSAQGFATGATGLTDAIKRGVEGSINDFTSSPSETINYVSCHDNYTLWDKIALSNPNDSEADRIKMDELAQAVVMTSQGVPFMQGGEEMLRTKGGNDNSYNAGDTVNRFDWSRKAQYPDVFNYYSGLIHLRLDHPAFRMTTANEINSHLQFLNSPENTVAYELTDHVNKDKWGNIIVVYNPNKTAATINLPSGKWAINATSGKVGERTLGQAEGSVQVPGISMMILHQEVSPDHGKK

SEQ ID NO: 48974 - protein, 664 aa, unidentified
SSEQTDLVQLTLASAPDVSHTIRVGAAGYEGVTLIPRKVLNLPRYYYSGNDLGNVYSPKATAFRVWAPTASDVQLLLYNSETGPVTKALEMRKSDNGTWKLKVPGNLKNWYYLYQVTVNGKTQTAVDPYVRAISVNATRGMIVDLAKTNPPGWKEDHQQTPANPVDEVIYEVHVRDFSIDPNSGMKNKGKYLAFTEHGTKGPDGVKTGIDSLKELGINAVQLLPIEEFASIDETQPNSYNWGYDPRNYNVPEGAYATTPEGTARITEFKQLIQSIHKDRIAINMDVVYNHTWATGVSDFDKIVPEYYYRTDDAGHYTNGSGTGNEIAAERPMVQKFIIDSLKYWVNEYHVDGFRFDLMALLGKDTMSKAASELHAINPGIALYGEPWTGGTSALPRDQLLTKGAQKGMGVAVFNDNLRNALSGNVFDSSAQGFATGATGLTDAIKRGVEGSINDFTSSPSETINYVSCHDNYTLWDKIALSNPNDSEADRIKMDELAQAVVMTSQGVPFMQGGEEMLRTKGGNDNSYNAGDTVNRFDWSRKAQYPDVFNYYSGLIHLRLDHPAFRMTTANEINSHLQFLNSPENTVAYELTDHVNKDKWGNIIVVYNPNKTAATINLPSGKWAINATSGKVGERTLGQAEGSVQVPGISMMILHQEVSPDHGKK

SEQ ID NO: 48975 - protein, 664 aa, Bacillus acidopullulyticus
SSEQTDLVQLTLASAPDVSHTIRVGAAGYEGVNLIPRKVLNLPRYYYSGNDLGNVYSPKATAFRVWAPTASDVQLLLYNSETGPVTKALEMRKSDNGTWKLKVPGNLKNWYYLYQVTVNGKTQTAVDPYVRAISVNATRGMIVDLAKTNPPGWKEDHQQTPANPVDEVIYEVHVRDFSIDPNSGMKNKGKYLAFTEHGTKGPDGVKTGIDSLKELGINAVQLLPIEEFASIDETQPNSYNWGYDPRNYNVPEGAYATTPEGTARITEFKQLIQSIHKDRIAINMDVVYNHTFATGVSDFDKIVPEYYYRTDDAGNYTNGSGTGNEIASERPMVQKFIIDSLKYWVNEYHVDGFRFDLMALLGKDTMSKAASELHAINPGIALYGEPWTGGTSALPRDQLLTKGAQKGMGVAVFNDNLRNALSGNVFDSSAQGFATGATGLTDAIKRGVEGEINDFTSSPSETINYVSCHDNYTLWDKIALSNPNDSEADRIKMDELAQAVVMTSQGVPFMQGGEEMLRTKGGNDNSYNAGDTVNRFDWSRKAQYPDVFNYYSGLIHLRLDHPAFRMTTANEINSHLQFLNSPENTVAYELTDHVNKDKWGNIIVVYNPNKTAATINLPSGKWAINATSGKVGERTLGQAEGSVQVPGISMMILHQEVSPDHGKK

SEQ ID NO: 48976 - protein, 664 aa, Bacillus acidopullulyticus
SSEQTDLVQLTLASAPDVSHTIRVGAAGYEGVNLIPRKVLNLPRYYYSGNDLGNVYSPKATAFRVWAPTASDVQLLLYNSETGPVTKALEMRKSDNGTWKLKVPGNLKNWYYLYQVTVNGKTQTAVDPYVRAISVNATRGMIVDLAKTNPPGWKEDHQQTPANPVDEVIYEVHVRDFSIDPNSGMKNKGKYLAFTEHGTKGPDGVKTGIDSLKELGINAVQLLPIEEFASIDETQPNSYNWGYDPRNYNVPEGAYATTPEGTARITEFKQLIQSIHKDRIAINMDVVYNHTWATGVSDFDKIVPEYYYRTDDAGHYTNGSGTGNEIASERPMVQKFIIDSLKYWVNEYHVDGFRFDLMALLGKDTMSKAASELHAINPGIALYGEPWTGGTSALPRDQLLTKGAQKGMGVAVFNDNLRNALSGNVFDSSAQGFATGATGLTDAIKRGVEGSINDFTSSPSETINYVSCHDNYTLWDKIALSNPNDSEADRIKMDELAQAVVMTSQGVPFMQGGEEMLRTKGGNDNSYNAGDTVNRFDWSRKAQYPDVFNYYSGLIHLRLDHPAFRMTTANEINSHLQFLNSPENTVAYELTDHVNKDKWGNIIVVYNPNKTAATINLPSGKWAINATSGKVGERTLGQAEGSVQVPGISMMILHQEVSPDHGKK

SEQ ID NO: 48977 - protein, 664 aa, Bacillus acidopullulyticus
SSEQTDLVQLTLASAPDVSHTIRVGAAGYEGVTLIPRKVLNLPRYYYSGNDLGNVYSPKATAFRVWAPTASDVQLLLYNSETGPVTKALEMRKSDNGTWKLKVPGNLKNWYYLYQVTVNGKTQTAVDPYVRAISVNATRGMIVDLAKTNPPGWKEDHQQTPANPVDEVIYEVHVRDFSIDPNSGMKNKGKYLAFTEHGTKGPDGVKTGIDSLKELGINAVQLLPIEEFASIDETQPNSYNWGYDPRNYNVPEGAYATTPEGTARITEFKQLIQSIHKDRIAINMDVVYNHTWATGVSDFDKIVPEYYYRTDDAGHYTNGSGTGNEIASERPMVQKFIIDSLKYWVNEYHVDGFRFDLMALLGKDTMSKAASELHAINPGIALYGEPWTGGTSALPRDQLLTKGAQKGMGVAVFNDNLRNALSGNVFDSSAQGFATGATGLTDAIKRGVEGSINDFTSSPSETINYVSCHDNYTLWDKIALSNPNDSEADRIKMDELAQAVVMTSQGVPFMQGGEEMLRTKGGNDNSYNAGDTVNRFDWSRKAQYPDVFNYYSGLIHLRLDHPAFRMTTANEINSHLQFLNSPENTVAYELTDHVNKDKWGNIIVVYNPNKTAATINLPSGKWAINATSGKVGERTLGQAEGSVQVPGISMMILHQEVSPDHGKK

SEQ ID NO: 48978 - protein, 664 aa, Bacillus deramificans
SSEQTDLVQLTLASAPDVSHTIQVGAAGYEAVNLIPRNVLNLPRYYYSGNDLGNVYSNKATAFRVWAPTASDVQLLLYNSETGPVTKQLEMQKSDNGTWKLKVPGNLKNWYYLYQVTVNGKTQTAVDPYVRAISVNATRGMIVDLEDTNPPGWKEDHQQTPANPVDEVIYEVHVRDFSIDANSGMKNKGKYLAFTEHGTKGPDNVKTGIDSLKELGINAVQLQPIEEFNSIDETQPNMYNWGYDPRNYNVPEGAYATTPEGTARITQLKQLIQSIHKDRIAINMDVVYNHTFNVGVSDFDKIVPQYYYRTDSAGNYTNGSGVGNEIAAERPMVQKFVLDSVKYWVKEYHIDGFRFDLMALLGKDTMAKISKELHAINPGIVLYGEPWTGGTSGLSSDQLVTKGQQKGLGIGVFNDNLRNALDGNVFDSSAQGFATGATGLTDAIKNGVEGSINDFTSSPGETINYVTSHDNYTLWDKIALSNPNDSEADRIKMDELAQAVVMTSQGVPFMQGGEEMLRTKGGNDNSYNAGDTVNEFDWSRKAQYPDVFNYYSGLIHLRLDHPAFRMTTANEINSHLQFLNSPENTVAYELTDHVNKDKWGNIIVVYNPNKTAATINLPSGKWAINATSGKVGESTLGQAEGSVQVPGISMMILHQEVSPDHGKK

SEQ ID NO: 48979 - protein, 664 aa, Bacillus deramificans
SSEQTDLVQLTLASAPDVSHTIQVGAAGYEAVNLIPRNVLNLPRYYYSGNDLGNVYSNKATAFRVWAPTASDVQLLLYNSETGPVTKQLEMQKSDNGTWKLKVPGNLKNWYYLYQVTVNGKTQTAVDPYVRAISVNATRGMIVDLEDTNPPGWKEDHQQTPANPVDEVIYEVHVRDFSIDANSGMKNKGKYLAFTEHGTKGPDNVKTGIDSLKELGINAVQLQPIEEFNSIDETQPNMYNWGYDPRNYNVPEGAYATTPEGTARITQLKQLIQSIHKDRIAINMDVVYNHTFNVGVSDFDKIVPQYYYRTDSAGNYTNGSGCGNEIAAERPMVQKFVLDSVKYWVKEYHIDGFRFDLMALLGKDTMAKISKELHAINPGIVLYGEPWTGGTSGLSSDQLVTKGQQKGLGIGVFNDNLRNALDGNVFDSSAQGFATGATGLTDAIKNGVEGSINDFTSSPGETINYVTSHDNYTLWDKIALSNPNDSEADRIKMDELAQAVVMTSQGVPFMQGGEEMLRTKGGNDNSYNAGDTVNEFDWSRKAQYPDVFNYYSGLIHLRLDHPAFRMTTANEINSHLQFLNSPENTVAYELTDHVNKDKWGNIIVVYNPNKTAATINLPSGKWAINATSGKVGESTLGQAEGSVQVPGISMMILHQEVSPDHGKK

SEQ ID NO: 48980 - protein, 664 aa, Bacillus deramificans
SSEQTDLVQLTLASAPDVSHTIQVGAAGYEAVNLIPRNVLNLPRYYYSGNDLGNVYSNKATAFRVWAPTASDVQLLLYNSETGPVTKQLEMQKSDNGTWKLKVPGNLKNWYYLYQVTVNGKTQTAVDPYVRAISVNATRGMIVDLEDTNPPGWKEDHQQTPANPVDEVIYEVHVRDFSIDANSGMKNKGKYLAFTEHGTKGPDNVKTGIDSLKELGINAVQLQPIEEFNSIDETQPNMYNWGYDPRNYNVPEGAYATTPEGTARITQLKQLIQSIHKDRIAINMDVVYNHTFNVGVSDFDKIVPQYYYRTDSAGNYTNGSGCGNEIASERPMVQKFVLDSVKYWVKEYHIDGFRFDLMALLGKDTMAKISKELHAINPGIVLYGEPWTGGTSGLSSDQLVTKGQQKGLGIGVFNDNLRNALDGNVFDSSAQGFATGATGLTDAIKNGVEGSINDFTSSPGETINYVTSHDNYTLWDKIALSNPNDSEADRIKMDELAQAVVMTSQGVPFMQGGEEMLRTKGGNDNSYNAGDTVNEFDWSRKAQYPDVFNYYSGLIHLRLDHPAFRMTTANEINSHLQFLNSPENTVAYELTDHVNKDKWGNIIVVYNPNKTAATINLPSGKWAINATSGKVGESTLGQAEGSVQVPGISMMILHQEVSPDHGKK

SEQ ID NO: 48981 - protein, 664 aa, Bacillus deramificans
SSEQTDLVQLTLASAPDVSHTIQVGAAGYEAVNLIPRNVLNLPRYYYSGNDLGNVYSNKATAFRVWAPTASDVQLLLYNSETGPVTKQLEMQKSDNGTWKLKVPGNLKNWYYLYQVTVNGKTQTAVDPYVRAISVNATRGMIVDLEDTNPPGWKEDHQQTPANPVDEVIYEVHVRDFSIDANSGMKNKGKYLAFTEHGTKGPDNVKTGIDSLKELGINAVQLQPIEEFNSIDETQPNMYNWGYDPRNYNVPEGAYATTPEGTARITQLKQLIQSIHKDRIAINMDVVYNHTFNVGVSDFDKIVPQYYYRTDSAGNYTNGSGVGNEIASERPMVQKFVLDSVKYWVKEYHIDGFRFDLMALLGKDTMAKISKELHAINPGIVLYGEPWTGGTSGLSSDQLVTKGQQKGLGIGVFNDNLRNALDGNVFDSSAQGFATGATGLTDAIKNGVEGSINDFTSSPGETINYVTSHDNYTLWDKIALSNPNDSEADRIKMDELAQAVVMTSQGVPFMQGGEEMLRTKGGNDNSYNAGDTVNEFDWSRKAQYPDVFNYYSGLIHLRLDHPAFRMTTANEINSHLQFLNSPENTVAYELTDHVNKDKWGNIIVVYNPNKTAATINLPSGKWAINATSGKVGESTLGQAEGSVQVPGISMMILHQEVSPDHGKK

SEQ ID NO: 48982 - protein, 664 aa, Bacillus acidopullulyticus
SSEQTDLVQLTLASAPDVSHTIQVGAAGYEAVNLIPRNVLNLPRYYYSGNDLGNVYSNKATAFRVWAPTASDVQLLLYNSETGPVTKQLEMQKSDNGTWKLKVPGNLKNWYYLYQVTVNGKTQTAVDPYVRAISVNATRGMIVDLEDTNPPGWKEDHQQTPANPVDEVIYEVHVRDFSIDANSGMKNKGKYLAFTEHGTKGPDNVKTGIDSLKELGINAVQLQPIEEFNSIDETQPNMYNWGYDPRNYNVPEGAYATTPEGTARITQLKQLIQSIHKDRIAINMDVVYNHTFNVGVSDFDKIVPQYYYRTDSAGNYTNGSGVGNEIATERPMVQKFVLDSVKYWVKEYHIDGFRFDLMALLGKDTMAKISKELHAINPGIVLYGEPWTGGTSGLSSDQLVTKGQQKGLGIGVFNDNLRNALDGNVFDSSAQGFATGATGLTDAIKNGVEGSINDFTSSPGETINYVTSHDNYTLWDKIALSNPNDSEADRIKMDELAQAVVMTSQGVPFMQGGEEMLRTKGGNDNSYNAGDTVNEFDWSRKAQYPDVFNYYSGLIHLRLDHPAFRMTTANEINSHLQFLNSPENTVAYELTDHVNKDKWGNIIVVYNPNKTAATINLPSGKWAINATSGKVGESTLGQAEGSVQVPGISMMILHQEVSPDHGKK

SEQ ID NO: 48983 - protein, 664 aa, Bacillus deramificans
SSEQTDLVQLTLASAPDVSHTIQVGAAGYEAVNLIPRNVLNLPRYYYSGNDLGNVYSNKATAFRVWAPTASDVQLLLYNSETGPVTKQLEMQKSDNGTWKLKVPGNLKNWYYLYQVTVNGKTQTAVDPYVRAISVNATRGMIVDLEDTNPPGWKEDHQQTPANPVDEVIYEVHVRDFSIDANSGMKNKGKYLAFTEHGTKGPDGVKTGIDSLKELGINAVQLQPIEEFNSIDETQPNMYNWGYDPRNYNVPEGAYATTPEGTARITQLKQLIQSIHKDRIAINMDVVYNHTFNVGVSDFDKIVPQYYYRTDSAGNYTNGSGVGNEIATERPMVQKFVLDSVKYWVKEYHIDGFRFDLMALLGKDTMAKISKELHAINPGIVLYGEPWTGGTSGLSSDQLVTKGQQKGLGIGVFNDNLRNALDGNVFDSSAQGFATGATGLTDAIKNGVEGSINDFTSSPGETINYVTSHDNYTLWDKIALSNPNDSEADRIKMDELAQAVVMTSQGVPFMQGGEEMLRTKGGNDNSYNAGDTVNEFDWSRKAQYPDVFNYYSGLIHLRLDHPAFRMTTANEINSHLQFLNSPENTVAYELTDHVNKDKWGNIIVVYNPNKTAATINLPSGKWAINATSGKVGESTLGQAEGSVQVPGISMMILHQEVSPDHGKK

SEQ ID NO: 48984 - protein, 664 aa, Bacillus deramificans
SSEQTDLVQLTLASAPDVSHTIQVGAAGYEAVNLIPRNVLNLPRYYYSGNDLGNVYSNKATAFRVWAPTASDVQLLLYNSETGPVTKQLEMQKSDNGTWKLKVPGNLKNWYYLYQVTVNGKTQTAVDPYVRAISVNATRGMIVDLEDTNPPGWKEDHQQTPANPVDEVIYEVHVRDFSIDANSGMKNKGKYLAFTEHGTKGPDGVKTGIDSLKELGINAVQLQPIEEFASIDETQPNMYNWGYDPRNYNVPEGAYATTPEGTARITQLKQLIQSIHKDRIAINMDVVYNHTFNVGVSDFDKIVPQYYYRTDSAGNYTNGSGVGNEIAAERPMVQKFVLDSVKYWVKEYHIDGFRFDLMALLGKDTMAKISKELHAINPGIVLYGEPWTGGTSGLSSDQLVTKGQQKGLGIGVFNDNLRNALDGNVFDSSAQGFATGATGLTDAIKNGVEGSINDFTSSPGETINYVTSHDNYTLWDKIALSNPNDSEADRIKMDELAQAVVMTSQGVPFMQGGEEMLRTKGGNDNSYNAGDTVNEFDWSRKAQYPDVFNYYSGLIHLRLDHPAFRMTTANEINSHLQFLNSPENTVAYELTDHVNKDKWGNIIVVYNPNKTAATINLPSGKWAINATSGKVGESTLGQAEGSVQVPGISMMILHQEVSPDHGKK

SEQ ID NO: 48985 - protein, 664 aa, Bacillus deramificans
SSEQTDLVQLTLASAPDVSHTIQVGAAGYEAVNLIPRNVLNLPRYYYSGNDLGNVYSNKATAFRVWAPTASDVQLLLYNSETGPVTKQLEMQKSDNGTWKLKVPGNLKNWYYLYQVTVNGKTQTAVDPYVRAISVNATRGMIVDLEDTNPPGWKEDHQQTPANPVDEVIYEVHVRDFSIDANSGMKNKGKYLAFTEHGTKGPDNVKTGIDSLKELGINAVQLQPIEEFASIDETQPNMYNWGYDPRNYNVPEGAYATTPEGTARITQLKQLIQSIHKDRIAINMDVVYNHTFNVGVSDFDKIVPQYYYRTDSAGNYTNGSGVGNEIATERPMVQKFVLDSVKYWVKEYHIDGFRFDLMALLGKDTMAKISKELHAINPGIVLYGEPWTGGTSGLSSDQLVTKGQQKGLGIGVFNDNLRNALDGNVFDSSAQGFATGATGLTDAIKNGVEGSINDFTSSPGETINYVTSHDNYTLWDKIALSNPNDSEADRIKMDELAQAVVMTSQGVPFMQGGEEMLRTKGGNDNSYNAGDTVNEFDWSRKAQYPDVFNYYSGLIHLRLDHPAFRMTTANEINSHLQFLNSPENTVAYELTDHVNKDKWGNIIVVYNPNKTAATINLPSGKWAINATSGKVGESTLGQAEGSVQVPGISMMILHQEVSPDHGKK

SEQ ID NO: 48986 - protein, 664 aa, Bacillus deramificans
SSEQTDLVQLTLASAPDVSHTIRVGAAGYEAVNLIPRNVLNLPRYYYSGNDLGNVYSNKATAFRVWAPTASDVQLLLYNSETGPVTKQLEMQKSDNGTWKLKVPGNLKNWYYLYQVTVNGKTQTAVDPYVRAISVNATRGMIVDLEDTNPPGWKEDHQQTPANPVDEVIYEVHVRDFSIDANSGMKNKGKYLAFTEHGTKGPDNVKTGIDSLKELGINAVQLQPIEEFNSIDETQPNMYNWGYDPRNYNVPEGAYATTPEGTARITQLKQLIQSIHKDRIAINMDVVYNHTFNVGVSDFDKIVPQYYYRTDSAGNYTNGSGVGNEIATERPMVQKFVLDSVKYWVKEYHIDGFRFDLMALLGKDTMAKISKELHAINPGIVLYGEPWTGGTSGLSSDQLVTKGQQKGLGIGVFNDNLRNALDGNVFDSSAQGFATGATGLTDAIKNGVEGSINDFTSSPGETINYVTSHDNYTLWDKIALSNPNDSEADRIKMDELAQAVVMTSQGVPFMQGGEEMLRTKGGNDNSYNAGDTVNEFDWSRKAQYPDVFNYYSGLIHLRLDHPAFRMTTANEINSHLQFLNSPENTVAYELTDHVNKDKWGNIIVVYNPNKTAATINLPSGKWAINATSGKVGERTLGQAEGSVQVPGISMMILHQEVSPDHGKK

SEQ ID NO: 48987 - protein, 664 aa, Bacillus deramificans
SSEQTDLVQLTLASAPDVSHTIQVGAAGYEAVNLIPRNVLNLPRYYYSGNDLGNVYSNKATAFRVWAPTASDVQLLLYNKETGPVTKQLEMQKSDNGTWKLKVPGNLKNWYYLYQVTVNGKTQTAVDPYVRAISVNATRGMIVDLEDTNPPGWKEDHQQTPANPVDEVIYEVHVRDFSIDANSGMKNKGKYLAFTEHGTKGPDNVKTGIDSLKELGINAVQLQPIEEFNSIDETQPNMYNWGYDPRNYNVPEGAYATTPEGTARITQLKQLIQSIHKDRIAINMDVVYNHTFNVGVSDFDKIVPQYYYRTDSAGNYTNGSGVGNEIATERPMVQKFVLDSVKYWVKEYHIDGFRFDLMALLGKDTMAKISKELHAINPGIVLYGEPWTGGTSGLSSDQLVTKGQQKGLGIGVFNDNLRNALDGNVFDSSAQGFATGATGLTDAIKNGVEGSINDFTSSPGETINYVTSHDNYTLWDKIALSNPNDSEADRIKMDELAQAVVMTSQGVPFMQGGEEMLRTKGGNDNSYNAGDTVNEFDWSRKAQYPDVFNYYSGLIHLRLDHPAFRMTTANEINSHLQFLNSPENTVAYELTDHVNKDKWGNIIVVYNPNKTAATINLPSGKWAINATSGKVGESTLGQAEGSVQVPGISMMILHQEVSPDHGKK

SEQ ID NO: 48988 - protein, 664 aa, Bacillus deramificans
SSEQTDLVQLTLASAPDVSHTIQVGAAGYEAVNLIPRNVLNLPRYYYSGNDLGNVYSNKATAFRVWAPTASDVQLLLYNSETGPVTKQLEMQKSDNGTWKLKVPGNLKNWYYLYQVTVNGKTQTAVDPYVRAISVNATRGMIVDLEDTNPPGWKEDHQQTPANPVDEVIYEVHVRDFSIDANSGMKNKGKYLAFTEHGTKGPDNVKTGIDSLKELGINAVQLQPIEEFNSIDETQPNMYNWGYDPRNYNVPEGAYATTPEGTARITQLKQLIQSIHKDRIAINMDVVYNHTFNVGVSDFDKIVPQYYYRTDSAGNYTNGSGVGNEIATERPMVQKFVLDSVKYWVKEYHIDGFRFDLMALLGKDTMAKISKELHAINPGIVLYGEPWTGGTSGLSSDQLVTKGQQKGLGIGVFNDNLRNALDGNVFDSSAQGFATGATGLTDAIKNGVEGSINDFTSSPGETINYVTSHDNYTLWDKIALSNPNDSEADRIKMDELAQAVVMTSQGVPFMQGGEEMLRTKGGNDNSYNAGDTVNRFDWSRKAQYPDVFNYYSGLIHLRLDHPAFRMTTANEINSHLQFLNSPENTVAYELTDHVNKDKWGNIIVVYNPNKTAATINLPSGKWAINATSGKVGESTLGQAEGSVQVPGISMMILHQEVSPDHGKK

SEQ ID NO: 48989 - protein, 664 aa, Bacillus deramificans
SSEQTDLVQLTLASAPDVSHTIQVGAAGYEAVNLIPRNVLNLPRYYYSGNDLGNVYSNKATAFRVWAPTASDVQLLLYNSETGPVTKQLEMQKSDNGTWKLKVPGNLKNWYYLYQVTVNGKTQTAVDPYVRAISVNATRGMIVDLEDTNPPGWKEDHQQTPANPVDEVIYEVHVRDFSIDASSGMKNKGKYLAFTEHGTKGPDNVKTGIDSLKELGINAVQLQPIEEFNSIDETQPNMYNWGYDPRNYNVPEGAYATTPEGTARITQLKQLIQSIHKDRIAINMDVVYNHTFNVGVSDFDKIVPQYYYRTDSAGNYTNGSGVGNEIATERPMVQKFVLDSVKYWVKEYHIDGFRFDLMALLGKDTMAKISKELHAINPGIVLYGEPWTGGTSGLSSDQLVTKGQQKGLGIGVFNDNLRNALDGNVFDSSAQGFATGATGLTDAIKNGVEGSINDFTSSPGETINYVTSHDNYTLWDKIALSNPNDSEADRIKMDELAQAVVMTSQGVPFMQGGEEMLRTKGGNDNSYNAGDTVNEFDWSRKAQYPDVFNYYSGLIHLRLDHPAFRMTTANEINSHLQFLNSPENTVAYELTDHVNKDKWGNIIVVYNPNKTAATINLPSGKWAINATSGKVGESTLGQAEGSVQVPGISMMILHQEVSPDHGKK

SEQ ID NO: 48990 - protein, 664 aa, Bacillus deramificans
SSEQTDLVQLTLASAPDVSHTIQVGAAGYEAVNLIPRNVLNLPRYYYSGNDLGNVYSNKATAFRVWAPTASDVQLLLYNSETGPVTKQLEMQKSDNGTWKLKVPGNLKNWYYLYQVTVNGKTQTAVDPYVRAISVNATRGMIVDLEDTNPPGWKEDHQQTPANPVDEVIYEVHVRDFSIDANSGMKNKGKYLAFTEHGTKGPDNVKTGIDSLKELGINAVQLQPIEEFNSIDETQPNMYNWGYDPRNYNVPEGAYATTPEGTARITQLKQLIQSIHKDRIAINMDVVYNHTANVGVSDFDKIVPQYYYRTDSAGNYTNGSGVGNEIATERPMVQKFVLDSVKYWVKEYHIDGFRFDLMALLGKDTMAKISKELHAINPGIVLYGEPWTGGTSGLSSDQLVTKGQQKGLGIGVFNDNLRNALDGNVFDSSAQGFATGATGLTDAIKNGVEGSINDFTSSPGETINYVTSHDNYTLWDKIALSNPNDSEADRIKMDELAQAVVMTSQGVPFMQGGEEMLRTKGGNDNSYNAGDTVNEFDWSRKAQYPDVFNYYSGLIHLRLDHPAFRMTTANEINSHLQFLNSPENTVAYELTDHVNKDKWGNIIVVYNPNKTAATINLPSGKWAINATSGKVGESTLGQAEGSVQVPGISMMILHQEVSPDHGKK

SEQ ID NO: 48991 - protein, 664 aa, Bacillus deramificans
SSEQTDLVQLTLASAPDVSHTIQVGAAGYEAVNLIPRNVLNLPRYYYSGNDLGNVYSNKATAFRVWAPTASDVQLLLYNSETGPVTKQLEMQKSDNGTWKLKVPGNLKNWYYLYQVTVNGKTQTAVDPYVRAISVNATRGMIVDLEDTNPPGWKEDHQQTPANPVDEVIYEVHVRDFSIDANSGMKNKGKYLAFTEHGTKGPDNVKTGIDSLKELGINAVQLQPIEEFNSIDETQPNMYNWGYDPRNYNVPEGAYATTPEGTARITQLKQLIQSIHKDRIAINMDVVYNHTFNVGVSDFDKIVPQYYYRTDSAGNYTNGSGVGNEIATERPMVQKFVLDSVKYWVKEYHIDGFRFDLMALLGKDTMAKISKELHAINPGIVLYGEPWTGGTSGLSSDQLVTKGQQKGLGIGVFNDNLRNALDGNVFDSSAQGFATGATGLTDAIKNGVEGSINDFTSSPSETINYVTSHDNYTLWDKIALSNPNDSEADRIKMDELAQAVVMTSQGVPFMQGGEEMLRTKGGNDNSYNAGDTVNEFDWSRKAQYPDVFNYYSGLIHLRLDHPAFRMTTANEINSHLQFLNSPENTVAYELTDHVNKDKWGNIIVVYNPNKTAATINLPSGKWAINATSGKVGESTLGQAEGSVQVPGISMMILHQEVSPDHGKK

SEQ ID NO: 48992 - protein, 664 aa, Bacillus deramificans
SSEQTDLVQLTLASAPDVSHTIQVGAAGYEAVNLIPRNVLNLPRYYYSGNDLGNVYSNKATAFRVWAPTASDVQLLLYNSETGPVTKQLEMQKSDNGTWKLKVPGNLKNWYYLYQVTVNGKTQTAVDPYVRAISVNATRGMIVDLEDTNPPGWKEDHQQTPANPVDEVIYEVHVRDFSIDANSGMKNKGKYLAFTEHGTKGPDNVKTGIDSLKELGINAVQLQPIEEFNSIDETQPNMYNWGYDPRNYNVPEGAYATTPEGTARITQLKQLIQSIHKDRIAINMDVVYNHTFNVGVSDFDKIVPQYYYRTDSAGNYTNGSGVGNEIATERPMVQKFVLDSVKYWVKEYHIDGFRFDLMALLGKDTMAKISKELHAINPGIVLYGEPWTGGTSGLSSDQLVTKGQQKGLGIGVFNDNLRNALDGNVFDSSAQGFATGATGLTDAIKLGVEGSINDFTSSPGETINYVTSHDNYTLWDKIALSNPNDSEADRIKMDELAQAVVMTSQGVPFMQGGEEMLRTKGGNDNSYNAGDTVNEFDWSRKAQYPDVFNYYSGLIHLRLDHPAFRMTTANEINSHLQFLNSPENTVAYELTDHVNKDKWGNIIVVYNPNKTAATINLPSGKWAINATSGKVGESTLGQAEGSVQVPGISMMILHQEVSPDHGKK

SEQ ID NO: 48993 - protein, 664 aa, Bacillus deramificans
SSEQTDLVQLTLASAPDVSHTIRVGAAGYEAVNLIPRNVLNLPRYYYSGNDLGNVYSNKATAFRVWAPTASDVQLLLYNSETGPVTKQLEMQKSDNGTWKLKVPGNLKNWYYLYQVTVNGKTQTAVDPYVRAISVNATRGMIVDLAKTNPPGWKEDHQQTPANPVDEVIYEVHVRDFSIDANSGMKNKGKYLAFTEHGTKGPDNVKTGIDSLKELGINAVQLLPIEEFNSIDETQPNMYNWGYDPRNYNVPEGAYATTPEGTARITQLKQLIQSIHKDRIAINMDVVYNHTFNVGVSDFDKIVPQYYYRTDSAGNYTNGSGVGNEIATERPMVQKFVLDSVKYWVKEYHIDGFRFDLMALLGKDTMAKISKELHAINPGIVLYGEPWTGGTSGLSSDQLVTKGQQKGLGIGVFNDNLRNALSGNVFDSSAQGFATGATGLTDAIKNGVEGSINDFTSSPGETINYVTSHDNYTLWDKIALSNPNDSEADRIKMDELAQAVVMTSQGVPFMQGGEEMLRTKGGNDNSYNAGDTVNRFDWSRKAQYPDVFNYYSGLIHLRLDHPAFRMTTANEINSHLQFLNSPENTVAYELTDHVNKDKWGNIIVVYNPNKTAATINLPSGKWAINATSGKVGERTLGQAEGSVQVPGISMMILHQEVSPDHGKK

SEQ ID NO: 48994 - protein, 664 aa, Bacillus deramificans
SSEQTDLVQLTLASAPDVSHTIQVGAAGYEAVNLIPRNVLNLPRYYYSGNDLGNVYSNKATAFRVWAPTASDVQLLLYNSETGPVTKQLEMQKSDNGTWKLKVPGNLKNWYYLYQVTVNGKTQTAVDPYVRAISVNATRGMIVDLEDTNPPGWKEDHQQTPANPVDEVIYEVHVRDFSIDANSGMKNKGKYLAFTEHGTKGPDGVKTGIDSLKELGINAVQLQPIEEFNSIDETQPNTYNWGYDPRNYNVPEGAYATTPEGTARITQLKQLIQSIHKDRIAINMDVVYNHTFNVGVSDFDKIVPQYYYRTDSAGNYTNGSGVGNEIATERPMVQKFVLDSVKYWVKEYHIDGFRFDLMALLGKDTMAKISKELHAINPGIVLYGEPWTGGTSGLSSDQLVTKGQQKGLGIGVFNDNLRNALDGNVFDSSAQGFATGATGLTDAIKNGVEGSINDFTSSPGETINYVTSHDNYTLWDKIALSNPNDSEADRIKMDELAQAVVMTSQGVPFMQGGEEMLRTKGGNDNSYNAGDTVNEFDWSRKAQYPDVFNYYSGLIHLRLDHPAFRMTTANEINSHLQFLNSPENTVAYELTDHVNKDKWGNIIVVYNPNKTAATINLPSGKWAINATSGKVGESTLGQAEGSVQVPGISMMILHQEVSPDHGKK

SEQ ID NO: 48995 - protein, 664 aa, Bacillus deramificans
SSEQTDLVQLTLASAPDVSHTIQVGAAGYEAVNLIPRNVLNLPRYYYSGNDLGNVYSNKATAFRVWAPTASDVQLLLYNSETGPVTKQLEMQKSDNGTWKLKVPGNLKNWYYLYQVTVNGKTQTAVDPYVRAISVNATRGMIVDLEDTNPPGWKEDHQQTPANPVDEVIYEVHVRDFSIDANSGMKNKGKYLAFTEHGTKGPDNVKTGIDSLKELGINAVQLQPIEEFNSIDETQPNMYNWGYDPRNYNVPEGAYATTPEGTARITQLKQLIQSIHKDRIAINMDVVYNHTFNVGVSDFDKIVPQYYYRTDSAGNYTNGSGVGNEIATERPMVQKFVLDSVKYWVKEYHIDGFRFDLMALLGKDTMAKISKELHAINPGIVLYGEPWTGGTSGLSSDQLVTKGQQKGLGIGVFNDNLRNALDGNVFDSSAQGFATGATGLTDAIKRGVEGSINDFTSSPGETINYVTSHDNYTLWDKIALSNPNDSEADRIKMDELAQAVVMTSQGVPFMQGGEEMLRTKGGNDNSYNAGDTVNEFDWSRKAQYPDVFNYYSGLIHLRLDHPAFRMTTANEINSHLQFLNSPENTVAYELTDHVNKDKWGNIIVVYNPNKTAATINLPSGKWAINATSGKVGESTLGQAEGSVQVPGISMMILHQEVSPDHGKK

SEQ ID NO: 48996 - protein, 664 aa, Bacillus deramificans
SSEQTDLVQLTLASAPDVSHTIQVGAAGYEAVNLIPRNVLNLPRYYYSGNDLGNVYSNKATAFRVWAPTASDVQLLLYNSETGPVTKQLEMQKSDNGTWKLKVPGNLKNWYYLYQVTVNGKTQTAVDPYVRAISVNATRGMIVDLEDTNPPGWKEDHQQTPANPVDEVIYEVHVRDFSIDANSGMKNKGKYLAFTEHGTKGPDNVKTGIDSLKELGINAVQLQPIEEFNSIDETQPNMYNWGYDPRNYNVPEGAYATTPEGTARITQLKQLIQSIHKDRIAINMDVVYNHTFNVGVSDFDKIVPQYYYRTDSAGNYTNGSGCGNEIAAERPMVQKFVLDSVKYWVKEYHIDGFRFDLMALLGKDTMAKISKELHAINPGIVLYGEPWTGGTSGLSSDQLVTKGQQKGLGIGVFNDNLRNALDGNVFDSSAQGFATGATGLTDAIKNGVEGSINDFTSSPGETINYVSCHDNYTLWDKIALSNPNDSEADRIKMDELAQAVVMTSQGVPFMQGGEEMLRTKGGNDNSYNAGDTVNEFDWSRKAQYPDVFNYYSGLIHLRLDHPAFRMTTANEINSHLQFLNSPENTVAYELTDHVNKDKWGNIIVVYNPNKTAATINLPSGKWAINATSGKVGESTLGQAEGSVQVPGISMMILHQEVSPDHGKK

SEQ ID NO: 48997 - protein, 664 aa, Bacillus deramificans
SSEQTDLVQLTLASAPDVSHTIQVGAAGYEAVNLIPRNVLNLPRYYYSGNDLGNVYSNKATAFRVWAPTASDVQLLLYESETGPVTKQLEMQKSDNGTWKLKVPGNLKNWYYLYQVTVNGKTQTAVDPYVRAISVNATRGMIVDLEDTNPPGWKEDHQQTPANPVDEVIYEVHVRDFSIDANSGMKNKGKYLAFTEHGTKGPDNVKTGIDSLKELGINAVQLQPIEEFNSIDETQPNMYNWGYDPRNYNVPEGAYATTPEGTARITQLKQLIQSIHKDRIAINMDVVYNHTFNVGVSDFDKIVPQYYYRTDSAGNYTNGSGVGNEIATERPMVQKFVLDSVKYWVKEYHIDGFRFDLMALLGKDTMAKISKELHAINPGIVLYGEPWTGGTSGLSSDQLVTKGQQKGLGIGVFNDNLRNALDGNVFDSSAQGFATGATGLTDAIKNGVEGSINDFTSSPGETINYVTSHDNYTLWDKIALSNPNDSEADRIKMDELAQAVVMTSQGVPFMQGGEEMLRTKGGNDNSYNAGDTVNEFDWSRKAQYPDVFNYYSGLIHLRLDHPAFRMTTANEINSHLQFLNSPENTVAYELTDHVNKDKWGNIIVVYNPNKTAATINLPSGKWAINATSGKVGESTLGQAEGSVQVPGISMMILHQEVSPDHGKK

SEQ ID NO: 48998 - protein, 664 aa, Bacillus deramificans
SSEQTDLVQLTLASAPDVSHTIRVGAAGYEAVNLIPRNVLNLPRYYYSGNDLGNVYSNKATAFRVWAPTASDVQLLLYNSETGPVTKQLEMQKSDNGTWKLKVPGNLKNWYYLYQVTVNGKTQTAVDPYVRAISVNATRGMIVDLEDTNPPGWKEDHQQTPANPVDEVIYEVHVRDFSIDANSGMKNKGKYLAFTEHGTKGPDNVKTGIDSLKELGINAVQLQPIEEFNSIDETQPNMYNWGYDPRNYNVPEGAYATTPEGTARITQLKQLIQSIHKDRIAINMDVVYNHTFNVGVSDFDKIVPQYYYRTDSAGNYTNGSGVGNEIATERPMVQKFVLDSVKYWVKEYHIDGFRFDLMALLGKDTMAKISKELHAINPGIVLYGEPWTGGTSGLSSDQLVTKGQQKGLGIGVFNDNLRNALSGNVFDSSAQGFATGATGLTDAIKNGVEGSINDFTSSPGETINYVTSHDNYTLWDKIALSNPNDSEADRIKMDELAQAVVMTSQGVPFMQGGEEMLRTKGGNDNSYNAGDTVNEFDWSRKAQYPDVFNYYSGLIHLRLDHPAFRMTTANEINSHLQFLNSPENTVAYELTDHVNKDKWGNIIVVYNPNKTAATINLPSGKWAINATSGKVGERTLGQAEGSVQVPGISMMILHQEVSPDHGKK

SEQ ID NO: 48999 - protein, 664 aa, Bacillus deramificans
SSEQTDLVQLTLASAPDVSHTIQVGAAGYEAVNLIPRNVLNLPRYYYSGNDLGNVYSNKATAFRVWAPTASDVQLLLYNSETGPVTKQLEMQKSDNGTWKLKVPGNLKNWYYLYQVTVNGKTQTAVDPYVRAISVNATRGMIVDLEDTNPPGWKEDHQQTPANPVDEVIYEVHVRDFSIDANSGMKNKGKYLAFTEHGTKGPDGVKTGIDSLKELGINAVQLQPIEEFASIDETQPNMYNWGYDPRNYNVPEGAYATTPEGTARITQLKQLIQSIHKDRIAINMDVVYNHTFNVGVSDFDKIVPQYYYRTDSAGNYTNGSGVGNEIASERPMVQKFVLDSVKYWVKEYHIDGFRFDLMALLGKDTMAKISKELHAINPGIVLYGEPWTGGTSGLSSDQLVTKGQQKGLGIGVFNDNLRNALDGNVFDSSAQGFATGATGLTDAIKNGVEGSINDFTSSPGETINYVTSHDNYTLWDKIALSNPNDSEADRIKMDELAQAVVMTSQGVPFMQGGEEMLRTKGGNDNSYNAGDTVNEFDWSRKAQYPDVFNYYSGLIHLRLDHPAFRMTTANEINSHLQFLNSPENTVAYELTDHVNKDKWGNIIVVYNPNKTAATINLPSGKWAINATSGKVGESTLGQAEGSVQVPGISMMILHQEVSPDHGKK

SEQ ID NO: 49000 - protein, 664 aa, Bacillus deramificans
SSEQTDLVQLTLASAPDVSHTIQVGAAGYEAVNLIPRNVLNLPRYYYSGNDLGNVYSNKATAFRVWAPTASDVQLLLYNSETGPVTKQLEMQKSDNGTWKLKVPGNLKNWYYLYQVTVNGKTQTAVDPYVRAISVNATRGMIVDLEDTNPPGWKEDHQQTPANPVDEVIYEVHVRDFSIDANSGMKNKGKYLAFTEHGTKGPDGVKTGIDSLKELGINAVQLQPIEEFASIDETQPNMYNWGYDPRNYNVPEGAYATTPEGTARITQLKQLIQSIHKDRIAINMDVVYNHTFNVGVSDFDKIVPQYYYRTDSAGNYTNGSGVGNEIATERPMVQKFVLDSVKYWVKEYHIDGFRFDLMALLGKDTMAKISKELHAINPGIVLYGEPWTGGTSGLSSDQLVTKGQQKGLGIGVFNDNLRNALDGNVFDSSAQGFATGATGLTDAIKNGVEGSINDFTSSPGETINYVTSHDNYTLWDKIALSNPNDSEADRIKMDELAQAVVMTSQGVPFMQGGEEMLRTKGGNDNSYNAGDTVNEFDWSRKAQYPDVFNYYSGLIHLRLDHPAFRMTTANEINSHLQFLNSPENTVAYELTDHVNKDKWGNIIVVYNPNKTAATINLPSGKWAINATSGKVGESTLGQAEGSVQVPGISMMILHQEVSPDHGKK

SEQ ID NO: 49001 - protein, 664 aa, Bacillus deramificans
SSEQTDLVQLTLASAPDVSHTIQVGAAGYEAVNLIPRNVLNLPRYYYSGNDLGNVYSNKATAFRVWAPTASDVQLLLYNSETGPVTKQLEMQKSDNGTWKLKVPGNLKNWYYLYQVTVNGKTQTAVDPYVRAISVNATRGMIVDLEDTNPPGWKEDHQQTPANPVDEVIYEVHVRDFSIDANSGMKNKGKYLAFTEHGTKGPDNVKTGIDSLKELGINAVQLQPIEEFASIDETQPNMYNWGYDPRNYNVPEGAYATTPEGTARITQLKQLIQSIHKDRIAINMDVVYNHTFNVGVSDFDKIVPQYYYRTDSAGNYTNGSGVGNEIATERPMVQKFVLDSVKYWVKEYHIDGFRFDLMALLGKDTMAKISKELHAINPGIVLYGEPWTGGTSGLSSDQLVTKGQQKGLGIGVFNDNLRNALDGNVFDSSAQGFATGATGLTDAIKRGVEGSINDFTSSPGETINYVTSHDNYTLWDKIALSNPNDSEADRIKMDELAQAVVMTSQGVPFMQGGEEMLRTKGGNDNSYNAGDTVNEFDWSRKAQYPDVFNYYSGLIHLRLDHPAFRMTTANEINSHLQFLNSPENTVAYELTDHVNKDKWGNIIVVYNPNKTAATINLPSGKWAINATSGKVGESTLGQAEGSVQVPGISMMILHQEVSPDHGKK

SEQ ID NO: 49002 - protein, 664 aa, Bacillus deramificans
SSEQTDLVQLTLASAPDVSHTIQVGAAGYEAVNLIPRNVLNLPRYYYSGNDLGNVYSNKATAFRVWAPTASDVQLLLYNSETGPVTKQLEMQKSDNGTWKLKVPGNLKNWYYLYQVTVNGKTQTAVDPYVRAISVNATRGMIVDLEDTNPPGWKEDHQQTPANPVDEVIYEVHVRDFSIDANSGMKNKGKYLAFTEHGTKGPDNVKTGIDSLKELGINAVQLQPIEEFASIDETQPNMYNWGYDPRNYNVPEGAYATTPEGTARITEFKQLIQSIHKDRIAINMDVVYNHTFNVGVSDFDKIVPQYYYRTDSAGNYTNGSGCGNEIAAERPMVQKFVLDSVKYWVKEYHIDGFRFDLMALLGKDTMAKISKELHAINPGIVLYGEPWTGGTSGLSSDQLVTKGQQKGLGIGVFNDNLRNALDGNVFDSSAQGFATGATGLTDAIKRGVEGSINDFTSSPSETINYVSCHDNYTLWDKIALSNPNDSEADRIKMDELAQAVVMTSQGVPFMQGGEEMLRTKGGNDNSYNAGDTVNEFDWSRKAQYPDVFNYYSGLIHLRLDHPAFRMTTANEINSHLQFLNSPENTVAYELTDHVNKDKWGNIIVVYNPNKTAATINLPSGKWAINATSGKVGESTLGQAEGSVQVPGISMMILHQEVSPDHGKK

SEQ ID NO: 49003 - protein, 664 aa, Bacillus deramificans
SSEQTDLVQLTLASAPDVSHTIQVGAAGYEAVNLIPRNVLNLPRYYYSGNDLGNVYSNKATAFRVWAPTASDVQLLLYNSETGPVTKQLEMQKSDNGTWKLKVPGNLKNWYYLYQVTVNGKTQTAVDPYVRAISVNATRGMIVDLEDTNPPGWKEDHQQTPANPVDEVIYEVHVRDFSIDANSGMKNKGKYLAFTEHGTKGPDNVKTGIDSLKELGINAVQLQPIEEFNSIDETQPNMYNWGYDPRNYNVPEGAYATTPEGTARITQLKQLIQSIHKDRIAINMDVVYNHTFNVGVSDFDKIVPQYYYRTDSAGNYTNGSGCGNEIASERPMVQKFVLDSVKYWVKEYHIDGFRFDLMALLGKDTMAKISKELHAINPGIVLYGEPWTGGTSGLSSDQLVTKGQQKGLGIGVFNDNLRNALDGNVFDSSAQGFATGATGLTDAIKNGVEGSINDFTSSPGETINYVSCHDNYTLWDKIALSNPNDSEADRIKMDELAQAVVMTSQGVPFMQGGEEMLRTKGGNDNSYNAGDTVNEFDWSRKAQYPDVFNYYSGLIHLRLDHPAFRMTTANEINSHLQFLNSPENTVAYELTDHVNKDKWGNIIVVYNPNKTAATINLPSGKWAINATSGKVGESTLGQAEGSVQVPGISMMILHQEVSPDHGKK

SEQ ID NO: 49004 - protein, 664 aa, Bacillus deramificans
SSEQTDLVQLTLASAPDVSHTIRVGAAGYEAVNLIPRNVLNLPRYYYSGNDLGNVYSNKATAFRVWAPTASDVQLLLYNSETGPVTKQLEMQKSDNGTWKLKVPGNLKNWYYLYQVTVNGKTQTAVDPYVRAISVNATRGMIVDLEDTNPPGWKEDHQQTPANPVDEVIYEVHVRDFSIDANSGMKNKGKYLAFTEHGTKGPDNVKTGIDSLKELGINAVQLQPIEEFNSIDETQPNMYNWGYDPRNYNVPEGAYATTPEGTARITQLKQLIQSIHKDRIAINMDVVYNHTFNVGVSDFDKIVPQYYYRTDSAGNYTNGSGSGNEIATERPMVQKFVLDSVKYWVKEYHIDGFRFDLMALLGKDTMAKISKELHAINPGIVLYGEPWTGGTSGLSSDQLVTKGQQKGLGIGVFNDNLRNALSGNVFDSSAQGFATGATGLTDAIKNGVEGSINDFTSSPGETINYVTSHDNYTLWDKIALSNPNDSEADRIKMDELAQAVVMTSQGVPFMQGGEEMLRTKGGNDNSYNAGDTVNEFDWSRKAQYPDVFNYYSGLIHLRLDHPAFRMTTANEINSHLQFLNSPENTVAYELTDHVNKDKWGNIIVVYNPNKTAATINLPSGKWAINATSGKVGERTLGQAEGSVQVPGISMMILHQEVSPDHGKK

SEQ ID NO: 49005 - protein, 664 aa, Bacillus deramificans
SSEQTDLVQLTLASAPDVSHTIQVGAAGYEAVNLIPRNVLNLPRYYYSGNDLGNVYSNKATAFRVWAPTASDVQLLLYNSETGPVTKQLEMQKSDNGTWKLKVPGNLKNWYYLYQVTVNGKTQTAVDPYVRAISVNATRGMIVDLEDTNPPGWKEDHQQTPANPVDEVIYEVHVRDFSIDANSGMKNKGKYLAFTEHGTKGPDNVKTGIDSLKELGINAVQLQPIEEFASIDETQPNMYNWGYDPRNYNVPEGAYATTPEGTARIREFKQLIQSIHKDRIAINMDVVYNHTFNVGVSDFDKIVPQYYYRTDSAGNYTNGSGCGNEIAAERPMVQKFVLDSVKYWVKEYHIDGFRFDLMALLGKDTMAKISKELHAINPGIVLYGEPWTGGTSGLSSDQLVTKGQQKGLGIGVFNDNLRNALDGNVFDSSAQGFATGATGLTDAIKRGVEGSINDFTSSPSETINYVSCHDNYTLWDKIALSNPNDSEADRIKMDELAQAVVMTSQGVPFMQGGEEMLRTKGGNDNSYNAGDTVNEFDWSRKAQYPDVFNYYSGLIHLRLDHPAFRMTTANEINSHLQFLNSPENTVAYELTDHVNKDKWGNIIVVYNPNKTAATINLPSGKWAINATSGKVGESTLGQAEGSVQVPGISMMILHQEVSPDHGKK

SEQ ID NO: 49006 - protein, 664 aa, Bacillus deramificans
SSEQTDLVQLTLASAPDVSHTIQVGAAGYEAVNLIPRNVLNLPRYYYSGNDLGNVYSNKATAFRVWAPTASDVQLLLYNSETGPVTKQLEMQKSDNGTWKLKVPGNLKNWYYLYQVTVNGKTQTAVDPYVRAISVNATRGMIVDLEDTNPPGWKEDHQQTPANPVDEVIYEVHVRDFSIDANSGMKNKGKYLAFTEHGTKGPDNVKTGIDSLKELGINAVQLQPIEEFNSIDETQPNMYNWGYDPRNYNVPEGAYATTPEGTARITQLKQLIQSIHKDRIAINMDVVYNHTFNVGVSDFDKIVPQYYYRTDSAGNYTNGSGVGNEIATERPMVQKFVLDSVKYWVKEYHIDGFRFDLMALLGKDTMAKISKELHAINPGIVLYGEPWTGGTSGLSSDQLVTKGQQKGLGIGVFNDNLRNALDGNVFDSSAQGFATGATGLTDAIKNGVEGSINDFTSSPGETINYVSCHDNYTLWDKIALSNPNDSEADRIKMDELAQAVVMTSQGVPFMQGGEEMLRTKGGNDNSYNAGDTVNEFDWSRKAQYPDVFNYYSGLIHLRLDHPAFRMTTANEINSHLQFLNSPENTVAYELTDHVNKDKWGNIIVVYNPNKTAATINLPSGKWAINATSGKVGESTLGQAEGSVQVPGISMMILHQEVSPDHGKK

SEQ ID NO: 49007 - protein, 664 aa, Bacillus deramificans
SSEQTDLVQLTLASAPDVSHTIQVGAAGYEAVNLIPRNVLNLPRYYYSGNDLGNVYSNKATAFRVWAPTASDVQLLLYNSETGPVTKQLEMQKSDNGTWKLKVPGNLKNWYYLYQVTVNGKTQTAVDPYVRAISVNATRGMIVDLEDTNPPGWKEDHQQTPANPVDEVIYEVHVRDFSIDANSGMKNKGKYLAFTEHGTKGPDNVKTGIDSLKELGINAVQLQPIEEFASIDETQPNMYNWGYDPRNYNVPEGAYATTPEGTARITQLKQLIQSIHKDRIAINMDVVYNHTFNVGVSDFDKIVPQYYYRTDSAGNYTNGSGCGNEIAAERPMVQKFVLDSVKYWVKEYHIDGFRFDLMALLGKDTMAKISKELHAINPGIVLYGEPWTGGTSGLSSDQLVTKGQQKGLGIGVFNDNLRNALDGNVFDSSAQGFATGATGLTDAIKNGVEGSINDFTSSPGETINYVSCHDNYTLWDKIALSNPNDSEADRIKMDELAQAVVMTSQGVPFMQGGEEMLRTKGGNDNSYNAGDTVNEFDWSRKAQYPDVFNYYSGLIHLRLDHPAFRMTTANEINSHLQFLNSPENTVAYELTDHVNKDKWGNIIVVYNPNKTAATINLPSGKWAINATSGKVGESTLGQAEGSVQVPGISMMILHQEVSPDHGKK

SEQ ID NO: 49008 - protein, 664 aa, Bacillus deramificans
SSEQTDLVQLTLASAPDVSHTIQVGAAGYEAVNLIPRNVLNLPRYYYSGNDLGNVYSNKATAFRVWAPTASDVQLLLYNSETGPVTKQLEMQKSDNGTWKLKVPGNLKNWYYLYQVTVNGKTQTAVDPYVRAISVNATRGMIVDLEDTNPPGWKEDHQQTPANPVDEVIYEVHVRDFSIDANSGMKNKGKYLAFTEHGTKGPDNVKTGIDSLKELGINAVQLQPIEEFASIDETQPNMYNWGYDPRNYNVPEGAYATTPEGTARITQLKQLIQSIHKDRIAINMDVVYNHTFNVGVSDFDKIVPQYYYRTDSAGNYTNGSGVGNEIATERPMVQKFVLDSVKYWVKEYHIDGFRFDLMALLGKDTMAKISKELHAINPGIVLYGEPWTGGTSGLSSDQLVTKGQQKGLGIGVFNDNLRNALDGNVFDSSAQGFATGATGLTDAIKNGVEGSINDFTSSPSETINYVTCHDNYTLWDKIALSNPNDSEADRIKMDELAQAVVMTSQGVPFMQGGEEMLRTKGGNDNSYNAGDTVNEFDWSRKAQYPDVFNYYSGLIHLRLDHPAFRMTTANEINSHLQFLNSPENTVAYELTDHVNKDKWGNIIVVYNPNKTAATINLPSGKWAINATSGKVGESTLGQAEGSVQVPGISMMILHQEVSPDHGKK

SEQ ID NO: 49009 - protein, 664 aa, Bacillus deramificans
SSEQTDLVQLTLASAPDVSHTIQVGAAGYEAVNLIPRNVLNLPRYYYSGNDLGNVYSNKATAFRVWAPTASDVQLLLYNSETGPVTKQLEMQKSDNGTWKLKVPGNLKNWYYLYQVTVNGKTQTAVDPYVRAISVNATRGMIVDLEDTNPPGWKEDHQQTPANPVDEVIYEVHVRDFSIDANSGMKNKGKYLAFTEHGTKGPDNVKTGIDSLKELGINAVQLQPIEEFASIDETQPNMYNWGYDPRNYNVPEGAYATTPEGTARITQLKQLIQSIHKDRIAINMDVVYNHTFNVGVSDFDKIVPQYYYRTDSAGNYTNGSGCGNEIASERPMVQKFVLDSVKYWVKEYHIDGFRFDLMALLGKDTMAKISKELHAINPGIVLYGEPWTGGTSGLSSDQLVTKGQQKGLGIGVFNDNLRNALDGNVFDSSAQGFATGATGLTDAIKNGVEGSINDFTSSPGETINYVSCHDNYTLWDKIALSNPNDSEADRIKMDELAQAVVMTSQGVPFMQGGEEMLRTKGGNDNSYNAGDTVNEFDWSRKAQYPDVFNYYSGLIHLRLDHPAFRMTTANEINSHLQFLNSPENTVAYELTDHVNKDKWGNIIVVYNPNKTAATINLPSGKWAINATSGKVGESTLGQAEGSVQVPGISMMILHQEVSPDHGKK

SEQ ID NO: 49010 - protein, 664 aa, Bacillus deramificans
SSEQTDLVQLTLASAPDVSHTIQVGAAGYEAVNLIPRNVLNLPRYYYSGNDLGNVYSNKATAFRVWAPTASDVQLLLYNSETGPVTKQLEMQKSDNGTWKLKVPGNLKNWYYLYQVTVNGKTQTAVDPYVRAISVNATRGMIVDLEDTNPPGWKEDHQQTPANPVDEVIYEVHVRDFSIDANSGMKNKGKYLAFTEHGTKGPDNVKTGIDSLKELGINAVQLQPIEEFASIDETQPNMYNWGYDPRNYNVPEGAYATTPEGTARIREFKQLIQSIHKDRIAINMDVVYNHTFNVGVSDFDKIVPQYYYRTDSAGNYTNGSGCGNEIASERPMVQKFVLDSVKYWVKEYHIDGFRFDLMALLGKDTMAKISKELHAINPGIVLYGEPWTGGTSGLSSDQLVTKGQQKGLGIGVFNDNLRNALDGNVFDSSAQGFATGATGLTDAIKRGVEGSINDFTSSPSETINYVSCHDNYTLWDKIALSNPNDSEADRIKMDELAQAVVMTSQGVPFMQGGEEMLRTKGGNDNSYNAGDTVNEFDWSRKAQYPDVFNYYSGLIHLRLDHPAFRMTTANEINSHLQFLNSPENTVAYELTDHVNKDKWGNIIVVYNPNKTAATINLPSGKWAINATSGKVGESTLGQAEGSVQVPGISMMILHQEVSPDHGKK

SEQ ID NO: 49011 - protein, 664 aa, Bacillus deramificans
SSEQTDLVQLTLASAPDVSHTIQVGAAGYEAVNLIPRNVLNLPRYYYSGNDLGNVYSNKATAFRVWAPTASDVQLLLYNSETGPVTKQLEMQKSDNGTWKLKVPGNLKNWYYLYQVTVNGKTQTAVDPYVRAISVNATRGMIVDLEDTNPPGWKEDHQQTPANPVDEVIYEVHVRDFSIDPNSGMKNKGKYLAFTEHGTKGPDNVKTGIDSLKELGINAVQLQPIEEFASIDETQPNMYNWGYDPRNYNVPEGAYATTPEGTARITQLKQLIQSIHKDRIAINMDVVYNHTFNVGVSDFDKIVPQYYYRTDSAGNYTNGSGCGNEIAAERPMVQKFVLDSVKYWVKEYHIDGFRFDLMALLGKDTMAKISKELHAINPGIVLYGEPWTGGTSGLSSDQLVTKGQQKGLGIGVFNDNLRNALDGNVFDSSAQGFATGATGLTDAIKRGVEGSINDFTSSPSETINYVSCHDNYTLWDKIALSNPNDSEADRIKMDELAQAVVMTSQGVPFMQGGEEMLRTKGGNDNSYNAGDTVNEFDWSRKAQYPDVFNYYSGLIHLRLDHPAFRMTTANEINSHLQFLNSPENTVAYELTDHVNKDKWGNIIVVYNPNKTAATINLPSGKWAINATSGKVGESTLGQAEGSVQVPGISMMILHQEVSPDHGKK

SEQ ID NO: 49012 - protein, 664 aa, Bacillus deramificans
SSEQTDLVQLTLASAPDVSHTIRVGAAGYEARNLIPRNVLNLPRYYYSGNDLGNVYSNKATAFRVWAPTASDVQLLLYNSETGPVTKQLEMQKSDNGTWKLKVPGNLKNWYYLYQVTVNGKTQTAVDPYVRAISVNATRGMIVDLEDTNPPGWKEDHQQTPANPVDEVIYEVHVRDFSIDANSGMKNKGKYLAFTEHGTKGPDNVKTGIDSLKELGINAVQLLPIEEFNSIDETQPNMYNWGYDPRNYNVPEGAYATTPEGTARITQLKQLIQSIHKDRIAINMDVVYNHTFNVGVSDFDKIVPQYYYRTDSAGNYTNGSGCGNEIATERPMVQKFVLDSVKYWVKEYHIDGFRFDLMALLGKDTMAKISKELHAINPGIVLYGEPWTGGTSGLSSDQLVTKGQQKGLGIGVFNDNLRNALSGNVFDSSAQGFATGATGLTDAIKNGVEGSINDFTSSPGETINYVTSHDNYTLWDKIALSNPNDSEADRIKMDELAQAVVMTSQGVPFMQGGEEMLRTKGGNDNSYNAGDTVNRFDWSRKAQYPDVFNYYSGLIHLRLDHPAFRMTTANEINSHLQFLNSPENTVAYELTDHVNKDKWGNIIVVYNPNKTAATINLPSGKWAINATSGKVGERTLGQAEGSVQVPGISMMILHQEVSPDHGKK

SEQ ID NO: 49013 - protein, 664 aa, Bacillus deramificans
SSEQTDLVQLTLASAPDVSHTIRVGAAGYEAVNLIPRNVLNLPRYYYSGNDLGNVYSNKATAFRVWAPTASDVQLLLYNSETGPVTKQLEMQKSDNGTWKLKVPGNLKNWYYLYQVTVNGKTQTAVDPYVRAISVNATRGMIVDLEDTNPPGWKEDHQQTPANPVDEVIYEVHVRDFSIDANSGMKNKGKYLAFTEHGTKGPDNVKTGIDSLKELGINAVQLQPIEEFNSIDETQPNMYNWGYDPRNYNVPEGAYATTPEGTARITQLKQLIQSIHKDRIAINMDVVYNHTFNVGVSDFDKIVPQYYYRTDSAGNYTNGSGCGNEIATERPMVQKFVLDSVKYWVKEYHIDGFRFDLMALLGKDTMAKISKELHAINPGIVLYGEPWTGGTSGLSSDQLVTKGQQKGLGIGVFNDNLRNALSGNVFDSSAQGFATGATGLTDAIKNGVEGSINDFTSSPGETINYVTSHDNYTLWDKIALSNPNDSEADRIKMDELAQAVVMTSQGVPFMQGGEEMLRTKGGNDNSYNAGDTVNRFDWSRKAQYPDVFNYYSGLIHLRLDHPAFRMTTANEINSHLQFLNSPENTVAYELTDHVNKDKWGNIIVVYNPNKTAATINLPSGKWAINATSGKVGERTLGQAEGSVQVPGISMMILHQEVSPDHGKK

SEQ ID NO: 49014 - protein, 664 aa, Bacillus deramificans
SSEQTDLVQLTLASAPDVSHTIQVGAAGYEAVNLIPRNVLNLPRYYYSGNDLGNVYSNKATAFRVWAPTASDVQLLLYNSETGPVTKQLEMQKSDNGTWKLKVPGNLKNWYYLYQVTVNGKTQTAVDPYVRAISVNATRGMIVDLEDTNPPGWKEDHQQTPANPVDEVIYEVHVRDFSIDANSGMKNKGKYLAFTEHGTKGPDNVKTGIDSLKELGINAVQLQPIEEFASIDETQPNMYNWGYDPRNYNVPEGAYATTPEGTARITQLKQLIQSIHKDRIAINMDVVYNHTFNVGVSDFDKIVPQYYYRTDSAGNYTNGSGCGNEIAAERPMVQKFVLDSVKYWVKEYHIDGFRFDLMALLGKDTMAKISKELHAINPGIVLYGEPWTGGTSGLSSDQLVTKGQQKGLGIGVFNDNLRNALDGNVFDSSAQGFATGATGLTDAIKNGVEGSINDFTSSPSETINYVSCHDNYTLWDKIALSNPNDSEADRIKMDELAQAVVMTSQGVPFMQGGEEMLRTKGGNDNSYNAGDTVNEFDWSRKAQYPDVFNYYSGLIHLRLDHPAFRMTTANEINSHLQFLNSPENTVAYELTDHVNKDKWGNIIVVYNPNKTAATINLPSGKWAINATSGKVGESTLGQAEGSVQVPGISMMILHQEVSPDHGKK

SEQ ID NO: 49015 - protein, 664 aa, Bacillus deramificans
SSEQTDLVQLTLASAPDVSHTIRVGAAGYEAVNLIPRNVLNLPRYYYSGNDLGNVYSNKATAFRVWAPTASDVQLLLYNSETGPVTKQLEMQKSDNGTWKLKVPGNLKNWYYLYQVTVNGKTQTAVDPYVRAISVNATRGMIVDLEDTNPPGWKEDHQQTPANPVDEVIYEVHVRDFSIDANSGMKNKGKYLAFTEHGTKGPDNVKTGIDSLKELGINAVQLLPIEEFNSIDETQPNMYNWGYDPRNYNVPEGAYATTPEGTARITQLKQLIQSIHKDRIAINMDVVYNHTFNVGVSDFDKIVPQYYYRTDSAGNYTNGSGVGNEIATERPMVQKFVLDSVKYWVKEYHIDGFRFDLMALLGKDTMAKISKELHAINPGIVLYGEPWTGGTSGLSSDQLVTKGQQKGLGIGVFNDNLRNALSGNVFDSSAQGFATGATGLTDAIKNGVEGSINDFTSSPGETINYVTSHDNYTLWDKIALSNPNDSEADRIKMDELAQAVVMTSQGVPFMQGGEEMLRTKGGNDNSYNAGDTVNRFDWSRKAQYPDVFNYYSGLIHLRLDHPAFRMTTANEINSHLQFLNSPENTVAYELTDHVNKDKWGNIIVVYNPNKTAATINLPSGKWAINATSGKVGERTLGQAEGSVQVPGISMMILHQEVSPDHGKK

SEQ ID NO: 49016 - protein, 664 aa, Bacillus deramificans
SSEQTDLVQLTLASAPDVSHTIQVGAAGYEAVNLIPRNVLNLPRYYYSGNDLGNVYSNKATAFRVWAPTASDVQLLLYNSETGPVTKQLEMQKSDNGTWKLKVPGNLKNWYYLYQVTVNGKTQTAVDPYVRAISVNATRGMIVDLEDTNPPGWKEDHQQTPANPVDEVIYEVHVRDFSIDANSGMKNKGKYLAFTEHGTKGPDGVKTGIDSLKELGINAVQLQPIEEFASIDETQPNMYNWGYDPRNYNVPEGAYATTPEGTARITEFKQLIQSIHKDRIAINMDVVYNHTFNVGVSDFDKIVPQYYYRTDSAGNYTNGSGVGNEIAAERPMVQKFVLDSVKYWVKEYHIDGFRFDLMALLGKDTMAKISKELHAINPGIVLYGEPWTGGTSGLSSDQLVTKGQQKGLGIGVFNDNLRNALDGNVFDSSAQGFATGATGLTDAIKRGVEGSINDFTSSPSETINYVSCHDNYTLWDKIALSNPNDSEADRIKMDELAQAVVMTSQGVPFMQGGEEMLRTKGGNDNSYNAGDTVNEFDWSRKAQYPDVFNYYSGLIHLRLDHPAFRMTTANEINSHLQFLNSPENTVAYELTDHVNKDKWGNIIVVYNPNKTAATINLPSGKWAINATSGKVGESTLGQAEGSVQVPGISMMILHQEVSPDHGKK

SEQ ID NO: 49017 - protein, 664 aa, Bacillus deramificans
SSEQTDLVQLTLASAPDVSHTIQVGAAGYEAVNLIPRNVLNLPRYYYSGNDLGNVYSNKATAFRVWAPTASDVQLLLYNSETGPVTKQLEMQKSDNGTWKLKVPGNLKNWYYLYQVTVNGKTQTAVDPYVRAISVNATRGMIVDLEDTNPPGWKEDHQQTPANPVDEVIYEVHVRDFSIDANSGMKNKGKYLAFTEHGTKGPDGVKTGIDSLKELGINAVQLQPIEEFASIDETQPNMYNWGYDPRNYNVPEGAYATTPEGTARITQLKQLIQSIHKDRIAINMDVVYNHTFNVGVSDFDKIVPQYYYRTDSAGNYTNGSGVGNEIATERPMVQKFVLDSVKYWVKEYHIDGFRFDLMALLGKDTMAKISKELHAINPGIVLYGEPWTGGTSGLSSDQLVTKGQQKGLGIGVFNDNLRNALDGNVFDSSAQGFATGATGLTDAIKRGVEGSINDFTSSPGETINYVTSHDNYTLWDKIALSNPNDSEADRIKMDELAQAVVMTSQGVPFMQGGEEMLRTKGGNDNSYNAGDTVNEFDWSRKAQYPDVFNYYSGLIHLRLDHPAFRMTTANEINSHLQFLNSPENTVAYELTDHVNKDKWGNIIVVYNPNKTAATINLPSGKWAINATSGKVGESTLGQAEGSVQVPGISMMILHQEVSPDHGKK

SEQ ID NO: 49018 - protein, 664 aa, Bacillus deramificans
SSEQTDLVQLTLASAPDVSHTIRVGAAGYEAVNLIPRNVLNLPRYYYSGNDLGNVYSNKATAFRVWAPTASDVQLLLYNSETGPVTKQLEMQKSDNGTWKLKVPGNLKNWYYLYQVTVNGKTQTAVDPYVRAISVNATRGMIVDLEDTNPPGWKEDEQQTPANPVDEVIYEVHVRDFSIDANSGMKNKGKYLAFTEHGTKGPDNVKTGIDSLKELGINAVQLLPIEEFNSIDETQPNMYNWGYDPRNYNVPEGAYATTPEGTARITQLKQLIQSIHKDRIAINMDVVYNHTFNVGVSDFDKIVPQYYYRTDSAGNYTNGSGVGNEIATERPMVQKFVLDSVKYWVKEYHIDGFRFDLMALLGKDTMAKISKELHAINPGIVLYGEPWTGGTSGLSSDQLVTKGQQKGLGIGVFNDNLRNALSGNVFDSSAQGFATGATGLTDAIKNGVEGSINDFTSSPGETINYVTSHDNYTLWDKIALSNPNDSEADRIKMDELAQAVVMTSQGVPFMQGGEEMLRTKGGNDNSYNAGDTVNRFDWSRKAQYPDVFNYYSGLIHLRLDHPAFRMTTANEINSHLQFLNSPENTVAYELTDHVNKDKWGNIIVVYNPNKTAATINLPSGKWAINATSGKVGERTLGQAEGSVQVPGISMMILHQEVSPDHGKK

SEQ ID NO: 49019 - protein, 664 aa, Bacillus deramificans
SSEQTDLVQLTLASAPDVSHTIQVGAAGYEAVNLIPRNVLNLPRYYYSGNDLGNVYSNKATAFRVWAPTASDVQLLLYNSETGPVTKQLEMQKSDNGTWKLKVPGNLKNWYYLYQVTVNGKTQTAVDPYVRAISVNATRGMIVDLEDTNPPGWKEDHQQTPANPVDEVIYEVHVRDFSIDANSGMKNKGKYLAFTEHGTKGPDNVKTGIDSLKELGINAVQLQPIEEFASIDETQPNMYNWGYDPRNYNVPEGAYATTPEGTARVREFKQLIQSIHKDRIAINMDVVYNHTFNVGVSDFDKIVPQYYYRTDSAGNYTNGSGCGNEIAAERPMVQKFVLDSVKYWVKEYHIDGFRFDLMALLGKDTMAKISKELHAINPGIVLYGEPWTGGTSGLSSDQLVTKGQQKGLGIGVFNDNLRNALDGNVFDSSAQGFATGATGLTDAIKRGVEGSINDFTSSPSETINYVSCHDNYTLWDKIALSNPNDSEADRIKMDELAQAVVMTSQGVPFMQGGEEMLRTKGGNDNSYNAGDTVNEFDWSRKAQYPDVFNYYSGLIHLRLDHPAFRMTTANEINSHLQFLNSPENTVAYELTDHVNKDKWGNIIVVYNPNKTAATINLPSGKWAINATSGKVGESTLGQAEGSVQVPGISMMILHQEVSPDHGKK

SEQ ID NO: 49020 - protein, 664 aa, Bacillus deramificans
SSEQTDLVQLTLASAPDVSHTIRVGAAGYEAVNLIPRNVLNLPRYYYSGNDLGNVYSNKATAFRVWAPTASDVQLLLYNSETGPVTKQLEMQKSDNGTWKLKVPGNLKNWYYLYQVTVNGKTQTAVDPYVRAISVNATRGMIVDLEDTNPPGWKEDHQQTPANPVDEVIYEVHVRDFSIDANSGMKNKGKYLAFTEHGTKGPDNVKTGIDSLKELGINAVQLQPIEEFNSIDETQPNMYNWGYDPRNYNVPEGAYATTPEGTARITQLKQLIQSIHKDRIAINMDVVYNHTFNVGVSDFDKIVPQYYYRTDSAGNYTNGSGVGNEIATERPMVQKFVLDSVKYWVKEYHIDGFRFDLMALLGKDTMAKISKELHAINPGIVLYGEPWTGGTSGLSSDQLVTKGQQKGLGIGVFNDNLRNALSGNVFDSSAQGFATGATGLTDAIKNGVEGSINDFTSSPGETINYVTSHDNYTLWDKIALSNPNDSEADRIKMDELAQAVVMTSQGVPFMQGGEEMLRTKGGNDNSYNAGDTVNRFDWSRKAQYPDVFNYYSGLIHLRLDHPAFRMTTANEINSHLQFLNSPENTVAYELTDHVNKDKWGNIIVVYNPNKTAATINLPSGKWAINATSGKVGERTLGQAEGSVQVPGISMMILHQEVSPDHGKK

SEQ ID NO: 49021 - protein, 664 aa, Bacillus deramificans
SSEQTDLVQLTLASAPDVSHTIQVGAAGYEAVNLIPRNVLNLPRYYYSGNDLGNVYSNKATAFRVWAPTASDVQLLLYNSETGPVTKQLEMQKSDNGTWKLKVPGNLKNWYYLYQVTVNGKTQTAVDPYVRAISVNATRGMIVDLEDTNPPGWKEDHQQTPANPVDEVIYEVHVRDFSIDANSGMKNKGKYLAFTEHGTKGPDNVKTGIDSLKELGINAVQLQPIEEFNSIDETQPNMYNWGYDPRNYNVPEGAYATTPEGTARITQLKQLIQSIHKDRIAINMDVVYNHTFNVGVSDFDKIVPQYYYRTDSAGNYTNGSGVGNEIATERPMVQKFVLDSVKYWVKEYHIDGFRFDLMALLGKDTMAKISKELHAINPGIVLYGEPWTGGTSGLSSDQLVTKGQQKGLGIGVFNDNLRNALDGNVFDSSAQGFATGATGLTDAIKNGVEGSINDFTSSPGETINYVSCHDNYTLWDKIALSNPNDSEADRIKMDELAQAVVMTSQGVPFMQGGEEMLRTKGGNDNSYNAGDTVNRFDWSRKAQYPDVFNYYSGLIHLRLDHPAFRMTTANEINSHLQFLNSPENTVAYELTDHVNKDKWGNIIVVYNPNKTAATINLPSGKWAINATSGKVGESTLGQAEGSVQVPGISMMILHQEVSPDHGKK

SEQ ID NO: 49022 - protein, 664 aa, Bacillus deramificans
SSEQTDLVQLTLASAPDVSHTIQVGAAGYEAVNLIPRNVLNLPRYYYSGNDLGNVYSNKATAFRVWAPTASDVQLLLYNSETGPVTKQLEMQKSDNGTWKLKVPGNLKNWYYLYQVTVNGKTQTAVDPYVRAISVNATRGMIVDLEDTNPPGWKEDHQQTPANPVDEVIYEVHVRDFSIDANSGMKNKGKYLAFTEHGTKGPDGVKTGIDSLKELGINAVQLQPIEEFASIDETQPNMYNWGYDPRNYNVPEGAYATTPEGTARITQLKQLIQSIHKDRIAINMDVVYNHTFNVGVSDFDKIVPQYYYRTDSAGNYTNGSGVGNEIAAERPMVQKFVLDSVKYWVKEYHIDGFRFDLMALLGKDTMAKISKELHAINPGIVLYGEPWTGGTSGLSSDQLVTKGQQKGLGIGVFNDNLRNALDGNVFDSSAQGFATGATGLTDAIKRGVEGSINDFTSSPSETINYVTSHDNYTLWDKIALSNPNDSEADRIKMDELAQAVVMTSQGVPFMQGGEEMLRTKGGNDNSYNAGDTVNEFDWSRKAQYPDVFNYYSGLIHLRLDHPAFRMTTANEINSHLQFLNSPENTVAYELTDHVNKDKWGNIIVVYNPNKTAATINLPSGKWAINATSGKVGESTLGQAEGSVQVPGISMMILHQEVSPDHGKK

SEQ ID NO: 49023 - protein, 664 aa, Bacillus deramificans
SSEQTDLVQLTLASAPDVSHTIQVGAAGYEAVNLIPRNVLNLPRYYYSGNDLGNVYSNKATAFRVWAPTASDVQLLLYNSETGPVTKQLEMQKSDNGTWKLKVPGNLKNWYYLYQVTVNGKTQTAVDPYVRAISVNATRGMIVDLEDTNPPGWKEDHQQTPANPVDEVIYEVHVRDFSIDANSGMKNKGKYLAFTEHGTKGPDNVKTGIDSLKELGINAVQLQPIEEFASIDETQPNMYNWGYDPRNYNVPEGAYATTPEGTARITQLKQLIQSIHKDRIAINMDVVYNHTFNVGVSDFDKIVPQYYYRTDSAGNYTNGSGVGNEIATERPMVQKFVLDSVKYWVKEYHIDGFRFDLMALLGKDTMAKISKELHAINPGIVLYGEPWTGGTSGLSSDQLVTKGQQKGLGIGVFNDNLRNALDGNVFDSSAQGFATGATGLTDAIKNGVEGSINDFTSSPGETINYVSCHDNYTLWDKIALSNPNDSEADRIKMDELAQAVVMTSQGVPFMQGGEEMLRTKGGNDNSYNAGDTVNEFDWSRKAQYPDVFNYYSGLIHLRLDHPAFRMTTANEINSHLQFLNSPENTVAYELTDHVNKDKWGNIIVVYNPNKTAATINLPSGKWAINATSGKVGESTLGQAEGSVQVPGISMMILHQEVSPDHGKK

SEQ ID NO: 49024 - protein, 664 aa, Bacillus deramificans
SSEQTDLVQLTLASAPDVSHTIQVGAAGYEAVNLIPRNVLNLPRYYYSGNDLGNVYSNKATAFRVWAPTASDVQLLLYNSETGPVTKQLEMQKSDNGTWKLKVPGNLKNWYYLYQVTVNGKTQTAVDPYVRAISVNATRGMIVDLEDTNPPGWKEDHQQTPANPVDEVIYEVHVRDFSIDANSGMKNKGKYLAFTEHGTKGPDNVKTGIDSLKELGINAVQLQPIEEFASIDETQPNMYNWGYDPRNYNVPEGAYATTPEGTARITEFKQLIQSIHKDRIAINMDVVYNHTFNVGVSDFDKIVPQYYYRTDSAGNYTNGSGCGNEIASERPMVQKFVLDSVKYWVKEYHIDGFRFDLMALLGKDTMAKISKELHAINPGIVLYGEPWTGGTSGLSSDQLVTKGQQKGLGIGVFNDNLRNALDGNVFDSSAQGFATGATGLTDAIKRGVEGSINDFTSSPSETINYVSCHDNYTLWDKIALSNPNDSEADRIKMDELAQAVVMTSQGVPFMQGGEEMLRTKGGNDNSYNAGDTVNEFDWSRKAQYPDVFNYYSGLIHLRLDHPAFRMTTANEINSHLQFLNSPENTVAYELTDHVNKDKWGNIIVVYNPNKTAATINLPSGKWAINATSGKVGESTLGQAEGSVQVPGISMMILHQEVSPDHGKK

SEQ ID NO: 49025 - protein, 664 aa, Bacillus deramificans
SSEQTDLVQLTLASAPDVSHTIRVGAAGYEAVNLIPRNVLNLPRYYYSGNDLGNVYSNKATAFRVWAPTASDVQLLLYNSETGPVTKQLEMQKSDNGTWKLKVPGNLKNWYYLYQVTVNGKTQTAVDPYVRAISVNATRGMIVDLEDTNPPGWKEDHQQTPANPVDEVIYEVHVRDFSIDANSGMKNKGKYLAFTEHGTKGPDNVKTGIDSLKELGINAVQLLPIEEFNSIDETQPNMYNWGYDPRNYNVPEGAYATTPEGTARITQLKQLIQSIHKDRIAINMDVVYNHTFNVGVSDFDKIVPQYYYRTDSAGNYTNGSGCGNEIATERPMVQKFVLDSVKYWVKEYHIDGFRFDLMALLGKDTMAKISKELHAINPGIVLYGEPWTGGTSGLSSDQLVTKGQQKGLGIGVFNDNLRNALSGNVFDSSAQGFATGATGLTDAIKNGVEGSINDFTSSPGETINYVTSHDNYTLWDKIALSNPNDSEADRIKMDELAQAVVMTSQGVPFMQGGEEMLRTKGGNDNSYNAGDTVNRFDWSRKAQYPDVFNYYSGLIHLRLDHPAFRMTTANEINSHLQFLNSPENTVAYELTDHVNKDKWGNIIVVYNPNKTAATINLPSGKWAINATSGKVGERTLGQAEGSVQVPGISMMILHQEVSPDHGKK

SEQ ID NO: 49026 - protein, 664 aa, Bacillus deramificans
SSEQTDLVQLTLASAPDVSHTIQVGAAGYEAVNLIPRNVLNLPRYYYSGNDLGNVYSNKATAFRVWAPTASDVQLLLYNSETGPVTKQLEMQKSDNGTWKLKVPGNLKNWYYLYQVTVNGKTQTAVDPYVRAISVNATRGMIVDLEDTNPPGWKEDHQQTPANPVDEVIYEVHVRDFSIDANSGMKNKGKYLAFTEHGTKGPDNVKTGIDSLKELGINAVQLQPIEEFASIDETQPNMYNWGYDPRNYNVPEGAYATTPEGTARVREFKQLIQSIHKDRIAINMDVVYNHTFNVGVSDFDKIVPQYYYRTDSAGNYTNGSGCGNEIASERPMVQKFVLDSVKYWVKEYHIDGFRFDLMALLGKDTMAKISKELHAINPGIVLYGEPWTGGTSGLSSDQLVTKGQQKGLGIGVFNDNLRNALDGNVFDSSAQGFATGATGLTDAIKRGVEGSINDFTSSPSETINYVSCHDNYTLWDKIALSNPNDSEADRIKMDELAQAVVMTSQGVPFMQGGEEMLRTKGGNDNSYNAGDTVNEFDWSRKAQYPDVFNYYSGLIHLRLDHPAFRMTTANEINSHLQFLNSPENTVAYELTDHVNKDKWGNIIVVYNPNKTAATINLPSGKWAINATSGKVGESTLGQAEGSVQVPGISMMILHQEVSPDHGKK

SEQ ID NO: 49027 - protein, 664 aa, Bacillus deramificans
SSEQTDLVQLTLASAPDVSHTIQVGAAGYEAVNLIPRNVLNLPRYYYSGNDLGNVYSNKATAFRVWAPTASDVQLLLYNSETGPVTKQLEMQKSDNGTWKLKVPGNLKNWYYLYQVTVNGKTQTAVDPYVRAISVNATRGMIVDLEDTNPPGWKEDHQQTPANPVDEVIYEVHVRDFSIDANSGMKNKGKYLAFTEHGTKGPDNVKTGIDSLKELGINAVQLQPIEEFASIDETQPNMYNWGYDPRNYNVPEGAYATTPEGTARITQLKQLIQSIHKDRIAINMDVVYNHTFNVGVSDFDKIVPQYYYRTDSAGNYTNGSGVGNEIATERPMVQKFVLDSVKYWVKEYHIDGFRFDLMALLGKDTMAKISKELHAINPGIVLYGEPWTGGTSGLSSDQLVTKGQQKGLGIGVFNDNLRNALDGNVFDSSAQGFATGATGLTDAIKRGVEGSINDFTSSPGETINYVSCHDNYTLWDKIALSNPNDSEADRIKMDELAQAVVMTSQGVPFMQGGEEMLRTKGGNDNSYNAGDTVNEFDWSRKAQYPDVFNYYSGLIHLRLDHPAFRMTTANEINSHLQFLNSPENTVAYELTDHVNKDKWGNIIVVYNPNKTAATINLPSGKWAINATSGKVGESTLGQAEGSVQVPGISMMILHQEVSPDHGKK

SEQ ID NO: 49028 - protein, 664 aa, Bacillus deramificans
SSEQTDLVQLTLASAPDVSHTIQVGAAGYEAVNLIPRNVLNLPRYYYSGNDLGNVYSNKATAFRVWAPTASDVQLLLYNSETGPVTKQLEMQKSDNGTWKLKVPGNLKNWYYLYQVTVNGKTQTAVDPYVRAISVNATRGMIVDLEDTNPPGWKEDHQQTPANPVDEVIYEVHVRDFSIDANSGMKNKGKYLAFTEHGTKGPDNVKTGIDSLKELGINAVQLQPIEEFASIDETQPNMYNWGYDPRNYNVPEGAYATTPEGTARITQLKQLIQSIHKDRIAINMDVVYNHTFNVGVSDFDKIVPQYYYRTDSAGNYTNGSGCGNEIASERPMVQKFVLDSVKYWVKEYHIDGFRFDLMALLGKDTMAKISKELHAINPGIVLYGEPWTGGTSGLSSDQLVTKGQQKGLGIGVFNDNLRNALDGNVFDSSAQGFATGATGLTDAIKNGVEGSINDFTSSPSETINYVSCHDNYTLWDKIALSNPNDSEADRIKMDELAQAVVMTSQGVPFMQGGEEMLRTKGGNDNSYNAGDTVNEFDWSRKAQYPDVFNYYSGLIHLRLDHPAFRMTTANEINSHLQFLNSPENTVAYELTDHVNKDKWGNIIVVYNPNKTAATINLPSGKWAINATSGKVGESTLGQAEGSVQVPGISMMILHQEVSPDHGKK

SEQ ID NO: 49029 - protein, 664 aa, Bacillus deramificans
SSEQTDLVQLTLASAPDVSHTIQVGAAGYEAVNLIPRNVLNLPRYYYSGNDLGNVYSNKATAFRVWAPTASDVQLLLYNSETGPVTKQLEMQKSDNGTWKLKVPGNLKNWYYLYQVTVNGKTQTAVDPYVRAISVNATRGMIVDLEDTNPPGWKEDHQQTPANPVDEVIYEVHVRDFSIDPNSGMKNKGKYLAFTEHGTKGPDNVKTGIDSLKELGINAVQLQPIEEFASIDETQPNMYNWGYDPRNYNVPEGAYATTPEGTARITQLKQLIQSIHKDRIAINMDVVYNHTFNVGVSDFDKIVPQYYYRTDSAGNYTNGSGCGNEIASERPMVQKFVLDSVKYWVKEYHIDGFRFDLMALLGKDTMAKISKELHAINPGIVLYGEPWTGGTSGLSSDQLVTKGQQKGLGIGVFNDNLRNALDGNVFDSSAQGFATGATGLTDAIKRGVEGSINDFTSSPSETINYVSCHDNYTLWDKIALSNPNDSEADRIKMDELAQAVVMTSQGVPFMQGGEEMLRTKGGNDNSYNAGDTVNEFDWSRKAQYPDVFNYYSGLIHLRLDHPAFRMTTANEINSHLQFLNSPENTVAYELTDHVNKDKWGNIIVVYNPNKTAATINLPSGKWAINATSGKVGESTLGQAEGSVQVPGISMMILHQEVSPDHGKK

SEQ ID NO: 49030 - protein, 664 aa, Bacillus deramificans
SSEQTDLVQLTLASAPDVSHTIQVGAAGYEAVNLIPRNVLNLPRYYYSGNDLGNVYSNKATAFRVWAPTASDVQLLLYNSETGPVTKQLEMQKSDNGTWKLKVPGNLKNWYYLYQVTVNGKTQTAVDPYVRAISVNATRGMIVDLEDTNPPGWKEDHQQTPANPVDEVIYEVHVRDFSIDPNSGMKNKGKYLAFTEHGTKGPDGVKTGIDSLKELGINAVQLQPIEEFASIDETQPNMYNWGYDPRNYNVPEGAYATTPEGTARITQLKQLIQSIHKDRIAINMDVVYNHTFNVGVSDFDKIVPQYYYRTDSAGNYTNGSGVGNEIAAERPMVQKFVLDSVKYWVKEYHIDGFRFDLMALLGKDTMAKISKELHAINPGIVLYGEPWTGGTSGLSSDQLVTKGQQKGLGIGVFNDNLRNALDGNVFDSSAQGFATGATGLTDAIKRGVEGSINDFTSSPSETINYVSCHDNYTLWDKIALSNPNDSEADRIKMDELAQAVVMTSQGVPFMQGGEEMLRTKGGNDNSYNAGDTVNEFDWSRKAQYPDVFNYYSGLIHLRLDHPAFRMTTANEINSHLQFLNSPENTVAYELTDHVNKDKWGNIIVVYNPNKTAATINLPSGKWAINATSGKVGESTLGQAEGSVQVPGISMMILHQEVSPDHGKK

SEQ ID NO: 49031 - protein, 664 aa, Bacillus deramificans
SSEQTDLVQLTLASAPDVSHTIQVGAAGYEAVNLIPRNVLNLPRYYYSGNDLGNVYSNKATAFRVWAPTASDVQLLLYNSETGPVTKQLEMQKSDNGTWKLKVPGNLKNWYYLYQVTVNGKTQTAVDPYVRAISVNATRGMIVDLEDTNPPGWKEDHQQTPANPVDEVIYEVHVRDFSIDANSGMKNKGKYLAFTEHGTKGPDNVKTGIDSLKELGINAVQLQPIEEFASIDETQPNMYNWGYDPRNYNVPEGAYATTPEGTARITQLKQLIQSIHKDRIAINMDVVYNHTFNVGVSDFDKIVPQYYYRTDSAGNYTNGSGCGNEIAAERPMVQKFVLDSVKYWVKEYHIDGFRFDLMALLGKDTMAKISKELHAINPGIVLYGEPWTGGTSGLSSDQLVTKGQQKGLGIGVFNDNLRNALDGNVFDSSAQGFATGATGLTDAIKRGVEGSINDFTSSPSETINYVSCHDNYTLWDKIALSNPNDSEADRIKMDELAQAVVMTSQGVPFMQGGEEMLRTKGGNDNSYNAGDTVNEFDWSRKAQYPDVFNYYSGLIHLRLDHPAFRMTTANEINSHLQFLNSPENTVAYELTDHVNKDKWGNIIVVYNPNKTAATINLPSGKWAINATSGKVGESTLGQAEGSVQVPGISMMILHQEVSPDHGKK

SEQ ID NO: 49032 - protein, 664 aa, Bacillus deramificans
SSEQTDLVQLTLASAPDVSHTIRVGAAGYEARNLIPRNVLNLPRYYYSGNDLGNVYSNKATAFRVWAPTASDVQLLLYNSETGPVTKQLEMQKSDNGTWKLKVPGNLKNWYYLYQVTVNGKTQTAVDPYVRAISVNATRGMIVDLEDTNPPGWKEDHQQTPANPVDEVIYEVHVRDFSIDANSGMKNKGKYLAFTEHGTKGPDNVKTGIDSLKELGINAVQLLPIEEFNSIDETQPNMYNWGYDPRNYNVPEGAYATTPEGTARITQLKQLIQSIHKDRIAINMDVVYNHTFNVGVSDFDKIVPQYYYRTDSAGNYTNGSGCGNEIATERPMVQKFVLDSVKYWVKEYHIDGFRFDLMALLGKDTMAKISKELHAINPGIVLYGEPWTGGTSGLSSDQLVTKGQQKGLGIGVFNDNLRNALSGNVFDSSAQGFATGATGLTDAIKNGVEGSINDFTSSPGETINYVTSHDNYTLWDKIALSNPNDSEADRIKMDELAQAVVMTSQGVPFMLGGEEMLRTKGGNDNSYNAGDTVNRFDWSRKAQYPDVFNYYSGLIHLRLDHPAFRMTTANEINSHLQFLNSPENTVAYELTDHVNKDKWGNIIVVYNPNKTAATINLPSGKWAINATSGKVGERTLGQAEGSVQVPGISMMILHQEVSPDHGKK

SEQ ID NO: 49033 - protein, 664 aa, Bacillus deramificans
SSEQTDLVQLTLASAPDVSHTIQVGAAGYEAVNLIPRNVLNLPRYYYSGNDLGNVYSNKATAFRVWAPTASDVQLLLYNSETGPVTKQLEMQKSDNGTWKLKVPGNLKNWYYLYQVTVNGKTQTAVDPYVRAISVNATRGMIVDLEDTNPPGWKEDHQQTPANPVDEVIYEVHVRDFSIDANSGMKNKGKYLAFTEHGTKGPDGVKTGIDSLKELGINAVQLQPIEEFASIDETQPNMYNWGYDPRNYNVPEGAYATTPEGTARITEFKQLIQSIHKDRIAINMDVVYNHTFNVGVSDFDKIVPQYYYRTDSAGNYTNGSGVGNEIATERPMVQKFVLDSVKYWVKEYHIDGFRFDLMALLGKDTMAKISKELHAINPGIVLYGEPWTGGTSGLSSDQLVTKGQQKGLGIGVFNDNLRNALDGNVFDSSAQGFATGATGLTDAIKRGVEGSINDFTSSPSETINYVSCHDNYTLWDKIALSNPNDSEADRIKMDELAQAVVMTSQGVPFMQGGEEMLRTKGGNDNSYNAGDTVNEFDWSRKAQYPDVFNYYSGLIHLRLDHPAFRMTTANEINSHLQFLNSPENTVAYELTDHVNKDKWGNIIVVYNPNKTAATINLPSGKWAINATSGKVGESTLGQAEGSVQVPGISMMILHQEVSPDHGKK

SEQ ID NO: 49034 - protein, 664 aa, Bacillus deramificans
SSEQTDLVQLTLASAPDVSHTIRVGAAGYEAVNLIPRNVLNLPRYYYSGNDLGNVYSNKATAFRVWAPTASDVQLLLYNSETGPVTKQLEMQKSDNGTWKLKVPGNLKNWYYLYQVTVNGKTQTAVDPYVRAISVNATRGMIVDLEDTNPPGWKEDHQQTPANPVDEVIYEVHVRDFSIDANSGMKNKGKYLAFTEHGTKGPDNVKTGIDSLKELGINAVQLLPIEEFNSIDETQPNMYNWGYDPRNYNVPEGAYATTPEGTARITQLKQLIQSIHKDRIAINMDVVYNHTFNVGVSDFDKIVPQYYYRTDSAGNYTNGSGCGNEIATERPMVQKFVLDSVKYWVKEYHIDGFRFDLMALLGKDTMAKISKELHAINPGIVLYGEPWTGGTSGLSSDQLVTKGQQKGLGIGVFNDNLRNALSGNVFDSSAQGFATGATGLTDAIKNGVEGSINDFTSSPGETINYVTSHDNYTLWDKIALSNPNDSEADRIKMDELAQAVVMTSQGVPFMLGGEEMLRTKGGNDNSYNAGDTVNRFDWSRKAQYPDVFNYYSGLIHLRLDHPAFRMTTANEINSHLQFLNSPENTVAYELTDHVNKDKWGNIIVVYNPNKTAATINLPSGKWAINATSGKVGERTLGQAEGSVQVPGISMMILHQEVSPDHGKK

SEQ ID NO: 49035 - protein, 664 aa, Bacillus deramificans
SSEQTDLVQLTLASAPDVSHTIQVGAAGYEAVNLIPRNVLNLPRYYYSGNDLGNVYSNKATAFRVWAPTASDVQLLLYNSETGPVTKQLEMQKSDNGTWKLKVPGNLKNWYYLYQVTVNGKTQTAVDPYVRAISVNATRGMIVDLEDTNPPGWKEDHQQTPANPVDEVIYEVHVRDFSIDANSGMKNKGKYLAFTEHGTKGPDNVKTGIDSLKELGINAVQLQPIEEFASIDETQPNMYNWGYDPRNYNVPEGAYATTPEGTARITQLKQLIQSIHKDRIAINMDVVYNHTFNVGVSDFDKIVPQYYYRTDSAGNYTNGSGVGNEIAAERPMVQKFVLDSVKYWVKEYHIDGFRFDLMALLGKDTMAKISKELHAINPGIVLYGEPWTGGTSGLSSDQLVTKGQQKGLGIGVFNDNLRNALDGNVFDSSAQGFATGATGLTDAIKRGVEGSINDFTSSPSETINYVSCHDNYTLWDKIALSNPNDSEADRIKMDELAQAVVMTSQGVPFMQGGEEMLRTKGGNDNSYNAGDTVNEFDWSRKAQYPDVFNYYSGLIHLRLDHPAFRMTTANEINSHLQFLNSPENTVAYELTDHVNKDKWGNIIVVYNPNKTAATINLPSGKWAINATSGKVGESTLGQAEGSVQVPGISMMILHQEVSPDHGKK

SEQ ID NO: 49036 - protein, 664 aa, Bacillus deramificans
SSEQTDLVQLTLASAPDVSHTIQVGAAGYEAVNLIPRNVLNLPRYYYSGNDLGNVYSNKATAFRVWAPTASDVQLLLYNSETGPVTKQLEMQKSDNGTWKLKVPGNLKNWYYLYQVTVNGKTQTAVDPYVRAISVNATRGMIVDLEDTNPPGWKEDHQQTPANPVDEVIYEVHVRDFSIDANSGMKNKGKYLAFTEHGTKGPDNVKTGIDSLKELGINAVQLQPIEEFASIDETQPNMYNWGYDPRNYNVPEGAYATTPEGTARVTELKQLIQSIHKDRIAINMDVVYNHTFNVGVSDFDKIVPQYYYRTDSAGNYTNGSGCGNEIAAERPMVQKFVLDSVKYWVKEYHIDGFRFDLMALLGKDTMAKISKELHAINPGIVLYGEPWTGGTSGLSSDQLVTKGQQKGLGIGVFNDNLRNALDGNVFDSSAQGFATGATGLTDAIKRGVEGSINDFTSSPSETINYVSCHDNYTLWDKIALSNPNDSEADRIKMDELAQAVVMTSQGVPFMQGGEEMLRTKGGNDNSYNAGDTVNEFDWSRKAQYPDVFNYYSGLIHLRLDHPAFRMTTANEINSHLQFLNSPENTVAYELTDHVNKDKWGNIIVVYNPNKTAATINLPSGKWAINATSGKVGESTLGQAEGSVQVPGISMMILHQEVSPDHGKK

SEQ ID NO: 49037 - protein, 664 aa, Bacillus deramificans
SSEQTDLVQLTLASAPDVSHTIQVGAAGYEAVNLIPRNVLNLPRYYYSGNDLGNVYSNKATAFRVWAPTASDVQLLLYNSETGPVTKQLEMQKSDNGTWKLKVPGNLKNWYYLYQVTVNGKTQTAVDPYVRAISVNATRGMIVDLEDTNPPGWKEDHQQTPANPVDEVIYEVHVRDFSIDANSGMKNKGKYLAFTEHGTKGPDGVKTGIDSLKELGINAVQLQPIEEFASIDETQPNMYNWGYDPRNYNVPEGAYATTPEGTARITQLKQLIQSIHKDRIAINMDVVYNHTFNVGVSDFDKIVPQYYYRTDSAGNYTNGSGVGNEIASERPMVQKFVLDSVKYWVKEYHIDGFRFDLMALLGKDTMAKISKELHAINPGIVLYGEPWTGGTSGLSSDQLVTKGQQKGLGIGVFNDNLRNALDGNVFDSSAQGFATGATGLTDAIKRGVEGSINDFTSSPSETINYVTSHDNYTLWDKIALSNPNDSEADRIKMDELAQAVVMTSQGVPFMQGGEEMLRTKGGNDNSYNAGDTVNEFDWSRKAQYPDVFNYYSGLIHLRLDHPAFRMTTANEINSHLQFLNSPENTVAYELTDHVNKDKWGNIIVVYNPNKTAATINLPSGKWAINATSGKVGESTLGQAEGSVQVPGISMMILHQEVSPDHGKK

SEQ ID NO: 49038 - protein, 664 aa, Bacillus deramificans
SSEQTDLVQLTLASAPDVSHTIQVGAAGYEAVNLIPRNVLNLPRYYYSGNDLGNVYSNKATAFRVWAPTASDVQLLLYNSETGPVTKQLEMQKSDNGTWKLKVPGNLKNWYYLYQVTVNGKTQTAVDPYVRAISVNATRGMIVDLEDTNPPGWKEDHQQTPANPVDEVIYEVHVRDFSIDANSGMKNKGKYLAFTEHGTKGPDGVKTGIDSLKELGINAVQLQPIEEFASIDETQPNMYNWGYDPRNYNVPEGAYATTPEGTARITEFKQLIQSIHKDRIAINMDVVYNHTFNVGVSDFDKIVPQYYYRTDSAGNYTNGSGVGNEIASERPMVQKFVLDSVKYWVKEYHIDGFRFDLMALLGKDTMAKISKELHAINPGIVLYGEPWTGGTSGLSSDQLVTKGQQKGLGIGVFNDNLRNALDGNVFDSSAQGFATGATGLTDAIKRGVEGSINDFTSSPSETINYVSCHDNYTLWDKIALSNPNDSEADRIKMDELAQAVVMTSQGVPFMQGGEEMLRTKGGNDNSYNAGDTVNEFDWSRKAQYPDVFNYYSGLIHLRLDHPAFRMTTANEINSHLQFLNSPENTVAYELTDHVNKDKWGNIIVVYNPNKTAATINLPSGKWAINATSGKVGESTLGQAEGSVQVPGISMMILHQEVSPDHGKK

SEQ ID NO: 49039 - protein, 664 aa, Bacillus deramificans
SSEQTDLVQLTLASAPDVSHTIQVGAAGYEAVNLIPRNVLNLPRYYYSGNDLGNVYSNKATAFRVWAPTASDVQLLLYNSETGPVTKQLEMQKSDNGTWKLKVPGNLKNWYYLYQVTVNGKTQTAVDPYVRAISVNATRGMIVDLEDTNPPGWKEDHQQTPANPVDEVIYEVHVRDFSIDANSGMKNKGKYLAFTEHGTKGPDNVKTGIDSLKELGINAVQLQPIEEFASIDETQPNMYNWGYDPRNYNVPEGAYATTPEGTARITQLKQLIQSIHKDRIAINMDVVYNHTFNVGVSDFDKIVPQYYYRTDSAGNYTNGSGVGNEIATERPMVQKFVLDSVKYWVKEYHIDGFRFDLMALLGKDTMAKISKELHAINPGIVLYGEPWTGGTSGLSSDQLVTKGQQKGLGIGVFNDNLRNALDGNVFDSSAQGFATGATGLTDAIKNGVEGSINDFTSSPSETINYVSCHDNYTLWDKIALSNPNDSEADRIKMDELAQAVVMTSQGVPFMQGGEEMLRTKGGNDNSYNAGDTVNEFDWSRKAQYPDVFNYYSGLIHLRLDHPAFRMTTANEINSHLQFLNSPENTVAYELTDHVNKDKWGNIIVVYNPNKTAATINLPSGKWAINATSGKVGESTLGQAEGSVQVPGISMMILHQEVSPDHGKK

SEQ ID NO: 49040 - protein, 664 aa, Bacillus deramificans
SSEQTDLVQLTLASAPDVSHTIRVGAAGYEAVNLIPRNVLNLPRYYYSGNDLGNVYSNKATAFRVWAPTASDVQLLLYNSETGPVTKQLEMQKSDNGTWKLKVPGNLKNWYYLYQVTVNGKTQTAVDPYVRAISVNATRGMIVDLEDTNPPGWKEDHQQTPANPVDEVIYEVHVRDFSIDANSGMKNKGKYLAFTEHGTKGPDNVKTGIDSLKELGINAVELQPIEEFNSIDETQPNMYNWGYDPRNYNVPEGAYATTPEGTARITQLKQLIQSIHKDRIAINMDVVYNHTFNVGVSDFDKIVPQYYYRTDSAGNYTNGSGCGNEIATERPMVQKFVLDSVKYWVKEYHIDGFRFDLMALLGKDTMAKISKELHAINPGIVLYGEPWTGGTSGLSSDQLVTKGQQKGLGIGVFNDNLRNALSGNVFDSSAQGFATGATGLTDAIKNGVEGSINDFTSSPGETINYVTSHDNYTLWDKIALSNPNDSEADRIKMDELAQAVVMTSQGVPFMQGGEEMLRTKGGNDNSYNAGDTVNRFDWSRKAQYPDVFNYYSGLIHLRLDHPAFRMTTANEINSHLQFLNSPENTVAYELTDHVNKDKWGNIIVVYNPNKTAATINLPSGKWAINATSGKVGERTLGQAEGSVQVPGISMMILHQEVSPDHGKK

SEQ ID NO: 49041 - protein, 664 aa, Bacillus deramificans
SSEQTDLVQLTLASAPDVSHTIQVGAAGYEAVNLIPRNVLNLPRYYYSGNDLGNVYSNKATAFRVWAPTASDVQLLLYNSETGPVTKQLEMQKSDNGTWKLKVPGNLKNWYYLYQVTVNGKTQTAVDPYVRAISVNATRGMIVDLEDTNPPGWKEDHQQTPANPVDEVIYEVHVRDFSIDANSGMKNKGKYLAFTEHGTKGPDNVKTGIDSLKELGINAVQLQPIEEFASIDETQPNMYNWGYDPRNYNVPEGAYATTPEGTARITQLKQLIQSIHKDRIAINMDVVYNHTFNVGVSDFDKIVPQYYYRTDSAGNYTNGSGVGNEIATERPMVQKFVLDSVKYWVKEYHIDGFRFDLMALLGKDTMAKISKELHAINPGIVLYGEPWTGGTSGLSSDQLVTKGQQKGLGIGVFNDNLRNALDGNVFDSSAQGFATGATGLTDAIKRGVEGSINDFTSSPSETINYVSCHDNYTLWDKIALSNPNDSEADRIKMDELAQAVVMTSQGVPFMQGGEEMLRTKGGNDNSYNAGDTVNEFDWSRKAQYPDVFNYYSGLIHLRLDHPAFRMTTANEINSHLQFLNSPENTVAYELTDHVNKDKWGNIIVVYNPNKTAATINLPSGKWAINATSGKVGESTLGQAEGSVQVPGISMMILHQEVSPDHGKK

SEQ ID NO: 49042 - protein, 664 aa, Bacillus deramificans
SSEQTDLVQLTLASAPDVSHTIQVGAAGYEAVNLIPRNVLNLPRYYYSGNDLGNVYSNKATAFRVWAPTASDVQLLLYNSETGPVTKQLEMQKSDNGTWKLKVPGNLKNWYYLYQVTVNGKTQTAVDPYVRAISVNATRGMIVDLEDTNPPGWKEDHQQTPANPVDEVIYEVHVRDFSIDANSGMKNKGKYLAFTEHGTKGPDNVKTGIDSLKELGINAVQLQPIEEFASIDETQPNMYNWGYDPRNYNVPEGAYATTPEGTARVTELKQLIQSIHKDRIAINMDVVYNHTFNVGVSDFDKIVPQYYYRTDSAGNYTNGSGCGNEIASERPMVQKFVLDSVKYWVKEYHIDGFRFDLMALLGKDTMAKISKELHAINPGIVLYGEPWTGGTSGLSSDQLVTKGQQKGLGIGVFNDNLRNALDGNVFDSSAQGFATGATGLTDAIKRGVEGSINDFTSSPSETINYVSCHDNYTLWDKIALSNPNDSEADRIKMDELAQAVVMTSQGVPFMQGGEEMLRTKGGNDNSYNAGDTVNEFDWSRKAQYPDVFNYYSGLIHLRLDHPAFRMTTANEINSHLQFLNSPENTVAYELTDHVNKDKWGNIIVVYNPNKTAATINLPSGKWAINATSGKVGESTLGQAEGSVQVPGISMMILHQEVSPDHGKK

SEQ ID NO: 49043 - protein, 664 aa, Bacillus deramificans
SSEQTDLVQLTLASAPDVSHTIQVGAAGYEAVNLIPRNVLNLPRYYYSGNDLGNVYSNKATAFRVWAPTASDVQLLLYNSETGPVTKQLEMQKSDNGTWKLKVPGNLKNWYYLYQVTVNGKTQTAVDPYVRAISVNATRGMIVDLEDTNPPGWKEDHQQTPANPVDEVIYEVHVRDFSIDANSGMKNKGKYLAFTEHGTKGPDNVKTGIDSLKELGINAVQLQPIEEFASIDETQPNMYNWGYDPRNYNVPEGAYATTPEGTARITQLKQLIQSIHKDRIAINMDVVYNHTFNVGVSDFDKIVPQYYYRTDSAGNYTNGSGCGNEIAAERPMVQKFVLDSVKYWVKEYHIDGFRFDLMALLGKDTMAKISKELHAINPGIVLYGEPWTGGTSGLSSDQLVTKGQQKGLGIGVFNDNLRNALDGNVFDSSAQGFATGATGLTDAIKRGVEGSINDFTSSPSETINYVSCHDNYTLWDKIALSNPNDSEADRIKMDELAQAVVMTSQGVPFMQGGEEMLRTKGGNDNSYNAGDTVNRFDWSRKAQYPDVFNYYSGLIHLRLDHPAFRMTTANEINSHLQFLNSPENTVAYELTDHVNKDKWGNIIVVYNPNKTAATINLPSGKWAINATSGKVGESTLGQAEGSVQVPGISMMILHQEVSPDHGKK

SEQ ID NO: 49044 - protein, 664 aa, Bacillus deramificans
SSEQTDLVQLTLASAPDVSHTIQVGAAGYEAVNLIPRNVLNLPRYYYSGNDLGNVYSNKATAFRVWAPTASDVQLLLYNSETGPVTKQLEMQKSDNGTWKLKVPGNLKNWYYLYQVTVNGKTQTAVDPYVRAISVNATRGMIVDLEDTNPPGWKEDHQQTPANPVDEVIYEVHVRDFSIDASSGMKNKGKYLAFTEHGTKGPDNVKTGIDSLKELGINAVQLQPIEEFASIDETQPNMYNWGYDPRNYNVPEGAYATTPEGTARITQLKQLIQSIHKDRIAINMDVVYNHTFNVGVSDFDKIVPQYYYRTDSAGNYTNGSGCGNEIAAERPMVQKFVLDSVKYWVKEYHIDGFRFDLMALLGKDTMAKISKELHAINPGIVLYGEPWTGGTSGLSSDQLVTKGQQKGLGIGVFNDNLRNALDGNVFDSSAQGFATGATGLTDAIKRGVEGSINDFTSSPSETINYVSCHDNYTLWDKIALSNPNDSEADRIKMDELAQAVVMTSQGVPFMQGGEEMLRTKGGNDNSYNAGDTVNEFDWSRKAQYPDVFNYYSGLIHLRLDHPAFRMTTANEINSHLQFLNSPENTVAYELTDHVNKDKWGNIIVVYNPNKTAATINLPSGKWAINATSGKVGESTLGQAEGSVQVPGISMMILHQEVSPDHGKK

SEQ ID NO: 49045 - protein, 664 aa, Bacillus deramificans
SSEQTDLVQLTLASAPDVSHTIQVGAAGYEAVNLIPRNVLNLPRYYYSGNDLGNVYSNKATAFRVWAPTASDVQLLLYNSETGPVTKQLEMQKSDNGTWKLKVPGNLKNWYYLYQVTVNGKTQTAVDPYVRAISVNATRGMIVDLEDTNPPGWKEDHQQTPANPVDEVIYEVHVRDFSIDANSGMKNKGKYLAFTEHGTKGPDNVKTGIDSLKELGINAVQLQPIEEFASIDETQPNMYNWGYDPRNYNVPEGAYATTPEGTARITQLKQLIQSIHKDRIAINMDVVYNHTFNVGVSDFDKIVPQYYYRTDSAGNYTNGSGVGNEIASERPMVQKFVLDSVKYWVKEYHIDGFRFDLMALLGKDTMAKISKELHAINPGIVLYGEPWTGGTSGLSSDQLVTKGQQKGLGIGVFNDNLRNALDGNVFDSSAQGFATGATGLTDAIKRGVEGSINDFTSSPSETINYVSCHDNYTLWDKIALSNPNDSEADRIKMDELAQAVVMTSQGVPFMQGGEEMLRTKGGNDNSYNAGDTVNEFDWSRKAQYPDVFNYYSGLIHLRLDHPAFRMTTANEINSHLQFLNSPENTVAYELTDHVNKDKWGNIIVVYNPNKTAATINLPSGKWAINATSGKVGESTLGQAEGSVQVPGISMMILHQEVSPDHGKK

SEQ ID NO: 49046 - protein, 664 aa, Bacillus deramificans
SSEQTDLVQLTLASAPDVSHTIQVGAAGYEAVNLIPRNVLNLPRYYYSGNDLGNVYSNKATAFRVWAPTASDVQLLLYNSETGPVTKQLEMQKSDNGTWKLKVPGNLKNWYYLYQVTVNGKTQTAVDPYVRAISVNATRGMIVDLEDTNPPGWKEDHQQTPANPVDEVIYEVHVRDFSIDANSGMKNKGKYLAFTEHGTKGPDNVKTGIDSLKELGVTAVELLPIEEFASIDETQPNMYNWGYDPRNYNVPEGAYATTPEGTARITQLKQLIQSIHKDRIAINMDVVYNHTFNVGVSDFDKIVPQYYYRTDSAGNYTNGSGCGNEIAAERPMVQKFVLDSVKYWVKEYHIDGFRFDLMALLGKDTMAKISKELHAINPGIVLYGEPWTGGTSGLSSDQLVTKGQQKGLGIGVFNDNLRNALDGNVFDSSAQGFATGATGLTDAIKRGVEGSINDFTSSPSETINYVSCHDNYTLWDKIALSNPNDSEADRIKMDELAQAVVMTSQGVPFMQGGEEMLRTKGGNDNSYNAGDTVNEFDWSRKAQYPDVFNYYSGLIHLRLDHPAFRMTTANEINSHLQFLNSPENTVAYELTDHVNKDKWGNIIVVYNPNKTAATINLPSGKWAINATSGKVGESTLGQAEGSVQVPGISMMILHQEVSPDHGKK

SEQ ID NO: 49047 - protein, 664 aa, Bacillus deramificans
SSEQTDLVQLTLASAPDVSHTIQVGAAGYEAVNLIPRNVLNLPRYYYSGNDLGNVYSNKATAFRVWAPTASDVQLLLYNSETGPVTKQLEMQKSDNGTWKLKVPGNLKNWYYLYQVTVNGKTQTAVDPYVRAISVNATRGMIVDLEDTNPPGWKEDHQQTPANPVDEVIYEVHVRDFSIDPNSGMKNKGKYLAFTEHGTKGPDGVKTGIDSLKELGINAVQLQPIEEFASIDETQPNMYNWGYDPRNYNVPEGAYATTPEGTARITQLKQLIQSIHKDRIAINMDVVYNHTFNVGVSDFDKIVPQYYYRTDSAGNYTNGSGVGNEIASERPMVQKFVLDSVKYWVKEYHIDGFRFDLMALLGKDTMAKISKELHAINPGIVLYGEPWTGGTSGLSSDQLVTKGQQKGLGIGVFNDNLRNALDGNVFDSSAQGFATGATGLTDAIKRGVEGSINDFTSSPSETINYVSCHDNYTLWDKIALSNPNDSEADRIKMDELAQAVVMTSQGVPFMQGGEEMLRTKGGNDNSYNAGDTVNEFDWSRKAQYPDVFNYYSGLIHLRLDHPAFRMTTANEINSHLQFLNSPENTVAYELTDHVNKDKWGNIIVVYNPNKTAATINLPSGKWAINATSGKVGESTLGQAEGSVQVPGISMMILHQEVSPDHGKK

SEQ ID NO: 49048 - protein, 664 aa, Bacillus acidopullulyticus
SSEQTDLVQLTLASAPDVSHTIQVGAAGYEAVNLIPRNVLNLPRYYYSGNDLGNVYSNKATAFRVWAPTASDVQLLLYNSETGPVTKQLEMQKSDNGTWKLKVPGNLKNWYYLYQVTVNGKTQTAVDPYVRAISVNATRGMIVDLEDTNPPGWKEDHQQTPANPVDEVIYEVHVRDFSIDANSGMKNKGKYLAFTEHGTKGPDNVKTGIDSLKELGINAVQLQPIEEFASIDETQPNMYNWGYDPRNYNVPEGAYATTPEGTARITQLKQLIQSIHKDRIAINMDVVYNHTFNVGVSDFDKIVPQYYYRTDSAGNYTNGSGCGNEIASERPMVQKFVLDSVKYWVKEYHIDGFRFDLMALLGKDTMAKISKELHAINPGIVLYGEPWTGGTSGLSSDQLVTKGQQKGLGIGVFNDNLRNALDGNVFDSSAQGFATGATGLTDAIKRGVEGSINDFTSSPSETINYVSCHDNYTLWDKIALSNPNDSEADRIKMDELAQAVVMTSQGVPFMQGGEEMLRTKGGNDNSYNAGDTVNEFDWSRKAQYPDVFNYYSGLIHLRLDHPAFRMTTANEINSHLQFLNSPENTVAYELTDHVNKDKWGNIIVVYNPNKTAATINLPSGKWAINATSGKVGESTLGQAEGSVQVPGISMMILHQEVSPDHGKK

SEQ ID NO: 49049 - protein, 664 aa, Bacillus deramificans
SSEQTDLVQLTLASAPDVSHTIQVGAAGYEAVNLIPRNVLNLPRYYYSGNDLGNVYSNKATAFRVWAPTASDVQLLLYNSETGPVTKQLEMQKSDNGTWKLKVPGNLKNWYYLYQVTVNGKTQTAVDPYVRAISVNATRGMIVDLEDTNPPGWKEDHQQTPANPVDEVIYEVHVRDFSIDANSGMKNKGKYLAFTEHGTKGPDGVKTGIDSLKELGINAVQLQPIEEFASIDETQPNMYNWGYDPRNYNVPEGAYATTPEGTARITQLKQLIQSIHKDRIAINMDVVYNHTFNVGVSDFDKIVPQYYYRTDSAGNYTNGSGCGNEIAAERPMVQKFVLDSVKYWVKEYHIDGFRFDLMALLGKDTMAKISKELHAINPGIVLYGEPWTGGTSGLSSDQLVTKGQQKGLGIGVFNDNLRNALDGNVFDSSAQGFATGATGLTDAIKRGVEGSINDFTSSPSETINYVSCHDNYTLWDKIALSNPNDSEADRIKMDELAQAVVMTSQGVPFMQGGEEMLRTKGGNDNSYNAGDTVNEFDWSRKAQYPDVFNYYSGLIHLRLDHPAFRMTTANEINSHLQFLNSPENTVAYELTDHVNKDKWGNIIVVYNPNKTAATINLPSGKWAINATSGKVGESTLGQAEGSVQVPGISMMILHQEVSPDHGKK

SEQ ID NO: 49050 - protein, 664 aa, Bacillus deramificans
SSEQTDLVQLTLASAPDVSHTIQVGAAGYEAVNLIPRNVLNLPRYYYSGNDLGNVYSNKATAFRVWAPTASDVQLLLYNSETGPVTKQLEMQKSDNGTWKLKVPGNLKNWYYLYQVTVNGKTQTAVDPYVRAISVNATRGMIVDLEDTNPPGWKEDHQQTPANPVDEVIYEVHVRDFSIDPNSGMKNKGKYLAFTEHGTKGPDGVKTGIDSLKELGVNAVELLPIEEFASIDETQPNMYNWGYDPRNYNVPEGAYATTPEGTARITEFKQLIQSIHKDRIAINMDVVYNHTFNVGVSDFDKIVPQYYYRTDSAGNYTNGSGVGNEIASERPMVQKFVLDSVKYWVKEYHIDGFRFDLMALLGKDTMAKISKELHAINPGIVLYGEPWTGGTSGLSSDQLVTKGQQKGLGIGVFNDNLRNALDGNVFDSSAQGFATGATGLTDAIKRGVEGSINDFTSSPSETINYVSCHDNYTLWDKIALSNPNDSEADRIKMDELAQAVVMTSQGVPFMQGGEEMLRTKGGNDNSYNAGDTVNEFDWSRKAQYPDVFNYYSGLIHLRLDHPAFRMTTANEINSHLQFLNSPENTVAYELTDHVNKDKWGNIIVVYNPNKTAATINLPSGKWAINATSGKVGESTLGQAEGSVQVPGISMMILHQEVSPDHGKK

SEQ ID NO: 49051 - protein, 664 aa, Bacillus deramificans
SSEQTDLVQLTLASAPDVSHTIQVGAAGYEAVNLIPRNVLNLPRYYYSGNDLGNVYSNKATAFRVWAPTASDVQLLLYNSETGPVTKQLEMQKSDNGTWKLKVPGNLKNWYYLYQVTVNGKTQTAVDPYVRAISVNATRGMIVDLEDTNPPGWKEDHQQTPANPVDEVIYEVHVRDFSIDANSGMKNKGKYLAFTEHGTKGPDGVKTGIDSLKELGINAVQLQPIEEFASIDETQPNMYNWGYDPRNYNVPEGAYATTPEGTARITQLKQLIQSIHKDRIAINMDVVYNHTFNVGVSDFDKIVPQYYYRTDSAGNYTNGSGVGNEIAAERPMVQKFVLDSVKYWVKEYHIDGFRFDLMALLGKDTMAKISKELHAINPGIVLYGEPWTGGTSGLSSDQLVTKGQQKGLGIGVFNDNLRNALDGNVFDSSAQGFATGATGLTDAIKRGVEGSINDFTSSPSETINYVSCHDNYTLWDKIALSNPNDSEADRIKMDELAQAVVMTSQGVPFMQGGEEMLRTKGGNDNSYNAGDTVNEFDWSRKAQYPDVFNYYSGLIHLRLDHPAFRMTTANEINSHLQFLNSPENTVAYELTDHVNKDKWGNIIVVYNPNKTAATINLPSGKWAINATSGKVGESTLGQAEGSVQVPGISMMILHQEVSPDHGKK

SEQ ID NO: 49052 - protein, 664 aa, Bacillus deramificans
SSEQTDLVQLTLASAPDVSHTIQVGAAGYEAVNLIPRNVLNLPRYYYSGNDLGNVYSNKATAFRVWAPTASDVQLLLYNSETGPVTKQLEMQKSDNGTWKLKVPGNLKNWYYLYQVTVNGKTQTAVDPYVRAISVNATRGMIVDLEDTNPPGWKEDHQQTPANPVDEVIYEVHVRDFSIDANSGMKNKGKYLAFTEHGTKGPDNVKTGIDSLKELGINAVQLQPIEEFASIDETQPNMYNWGYDPRNYNVPEGAYATTPEGTARITQLKQLIQSIHKDRIAINMDVVYNHTANVGVSDFDKIVPQYYYRTDSAGNYTNGSGCGNEIAAERPMVQKFVLDSVKYWVKEYHIDGFRFDLMALLGKDTMAKISKELHAINPGIVLYGEPWTGGTSGLSSDQLVTKGQQKGLGIGVFNDNLRNALDGNVFDSSAQGFATGATGLTDAIKRGVEGSINDFTSSPSETINYVSCHDNYTLWDKIALSNPNDSEADRIKMDELAQAVVMTSQGVPFMQGGEEMLRTKGGNDNSYNAGDTVNEFDWSRKAQYPDVFNYYSGLIHLRLDHPAFRMTTANEINSHLQFLNSPENTVAYELTDHVNKDKWGNIIVVYNPNKTAATINLPSGKWAINATSGKVGESTLGQAEGSVQVPGISMMILHQEVSPDHGKK

SEQ ID NO: 49053 - protein, 664 aa, Bacillus deramificans
SSEQTDLVQLTLASAPDVSHTIQVGAAGYEAVNLIPRNVLNLPRYYYSGNDLGNVYSNKATAFRVWAPTASDVQLLLYNSETGPVTKQLEMQKSDNGTWKLKVPGNLKNWYYLYQVTVNGKTQTAVDPYVRAISVNATRGMIVDLEDTNPPGWKEDHQQTPANPVDEVIYEVHVRDFSIDANSGMKNKGKYLAFTEHGTKGPDGVKTGIDSLKELGVNAVELLPIEEFASIDETQPNMYNWGYDPRNYNVPEGAYATTPEGTARITEFKQLIQSIHKDRIAINMDVVYNHTFNVGVSDFDKIVPQYYYRTDSAGNYTNGSGVGNEIASERPMVQKFVLDSVKYWVKEYHIDGFRFDLMALLGKDTMAKISKELHAINPGIVLYGEPWTGGTSGLSSDQLVTKGQQKGLGIGVFNDNLRNALDGNVFDSSAQGFATGATGLTDAIKRGVEGSINDFTSSPSETINYVSCHDNYTLWDKIALSNPNDSEADRIKMDELAQAVVMTSQGVPFMQGGEEMLRTKGGNDNSYNAGDTVNEFDWSRKAQYPDVFNYYSGLIHLRLDHPAFRMTTANEINSHLQFLNSPENTVAYELTDHVNKDKWGNIIVVYNPNKTAATINLPSGKWAINATSGKVGESTLGQAEGSVQVPGISMMILHQEVSPDHGKK

SEQ ID NO: 49054 - protein, 664 aa, Bacillus deramificans
SSEQTDLVQLTLASAPDVSHTIQVGAAGYEAVNLIPRNVLNLPRYYYSGNDLGNVYSNKATAFRVWAPTASDVQLLLYNSETGPVTKQLEMQKSDNGTWKLKVPGNLKNWYYLYQVTVNGKTQTAVDPYVRAISVNATRGMIVDLEDTNPPGWKEDHQQTPANPVDEVIYEVHVRDFSIDANSGMKNKGKYLAFTEHGTKGPDGVKTGIDSLKELGINAVQLQPIEEFASIDETQPNMYNWGYDPRNYNVPEGAYATTPEGTARITQLKQLIQSIHKDRIAINMDVVYNHTFNVGVSDFDKIVPQYYYRTDSAGNYTNGSGCGNEIASERPMVQKFVLDSVKYWVKEYHIDGFRFDLMALLGKDTMAKISKELHAINPGIVLYGEPWTGGTSGLSSDQLVTKGQQKGLGIGVFNDNLRNALDGNVFDSSAQGFATGATGLTDAIKRGVEGSINDFTSSPSETINYVSCHDNYTLWDKIALSNPNDSEADRIKMDELAQAVVMTSQGVPFMQGGEEMLRTKGGNDNSYNAGDTVNEFDWSRKAQYPDVFNYYSGLIHLRLDHPAFRMTTANEINSHLQFLNSPENTVAYELTDHVNKDKWGNIIVVYNPNKTAATINLPSGKWAINATSGKVGESTLGQAEGSVQVPGISMMILHQEVSPDHGKK

SEQ ID NO: 49055 - protein, 664 aa, Bacillus deramificans
SSEQTDLVQLTLASAPDVSHTIQVGAAGYEAVNLIPRNVLNLPRYYYSGNDLGNVYSNKATAFRVWAPTASDVQLLLYNSETGPVTKQLEMQKSDNGTWKLKVPGNLKNWYYLYQVTVNGKTQTAVDPYVRAISVNATRGMIVDLEDTNPPGWKEDHQQTPANPVDEVIYEVHVRDFSIDPNSGMKNKGKYLAFTEHGTKGPDGVKTGIDSLKELGVNAVELLPIEEFASIDETQPNMYNWGYDPRNYNVPEGAYATTPEGTARITEFKQLIQSIHKDRIAINMDVVYNHTFNVGVSDFDKIVPQYYYRTDSAGNYTNGSGVGNEIASERPMVQKFVLDSVKYWVKEYHIDGFRFDLMALLGKDTMAKISKELHAINPGIVLYGEPWTGGTSGLSSDQLVTKGQQKGLGIGVFNDNLRNALDGNVFDSSAQGFATGATGLTDAIKRGVEGSINDFTSSPSETINYVSCHDNYTLWDKIALSNPNDSEADRIKMDELAQAVIMTSQGVPFMQGGEEMLRTKGGNDNSYNAGDTVNEFDWSRKAQYPDVFNYYSGLIHLRLDHPAFRMTTANEINSHLQFLNSPENTVAYELTDHVNKDKWGNIIVVYNPNKTAATINLPSGKWAINATSGKVGESTLGQAEGSVQVPGISMMILHQEVSPDHGKK

SEQ ID NO: 49056 - protein, 664 aa, Bacillus deramificans
SSEQTDLVQLTLASAPDVSHTIQVGAAGYEAVNLIPRNVLNLPRYYYSGNDLGNVYSNKATAFRVWAPTASDVQLLLYNSETGPVTKQLEMQKSDNGTWKLKVPGNLKNWYYLYQVTVNGKTQTAVDPYVRAISVNATRGMIVDLEDTNPPGWKEDHQQTPANPVDEVIYEVHVRDFSIDANSGMKNKGKYLAFTEHGTKGPDNVKTGIDSLKELGVTAVELLPIEEFASIDETQPNMYNWGYDPRNYNVPEGAYATTPEGTARITQLKQLIQSIHKDRIAINMDVVYNHTFNVGVSDFDKIVPQYYYRTDSAGNYTNGSGCGNEIASERPMVQKFVLDSVKYWVKEYHIDGFRFDLMALLGKDTMAKISKELHAINPGIVLYGEPWTGGTSGLSSDQLVTKGQQKGLGIGVFNDNLRNALDGNVFDSSAQGFATGATGLTDAIKRGVEGSINDFTSSPSETINYVSCHDNYTLWDKIALSNPNDSEADRIKMDELAQAVVMTSQGVPFMQGGEEMLRTKGGNDNSYNAGDTVNEFDWSRKAQYPDVFNYYSGLIHLRLDHPAFRMTTANEINSHLQFLNSPENTVAYELTDHVNKDKWGNIIVVYNPNKTAATINLPSGKWAINATSGKVGESTLGQAEGSVQVPGISMMILHQEVSPDHGKK

SEQ ID NO: 49057 - protein, 664 aa, Bacillus deramificans
SSEQTDLVQLTLASAPDVSHTIQVGAAGYEAVNLIPRNVLNLPRYYYSGNDLGNVYSNKATAFRVWAPTASDVQLLLYNSETGPVTKQLEMQKSDNGTWKLKVPGNLKNWYYLYQVTVNGKTQTAVDPYVRAISVNATRGMIVDLEDTNPPGWKEDHQQTPANPVDEVIYEVHVRDFSIDANSGMKNKGKYLAFTEHGTKGPDNVKTGIDSLKELGINAVQLQPIEEFASIDETQPNMYNWGYDPRNYNVPEGAYATTPEGTARITQLKQLIQSIHKDRIAINMDVVYNHTFNVGVSDFDKIVPQYYYRTDSAGNYTNGSGCGNEIASERPMVQKFVLDSVKYWVKEYHIDGFRFDLMALLGKDTMAKISKELHAINPGIVLYGEPWTGGTSGLSSDQLVTKGQQKGLGIGVFNDNLRNALDGNVFDSSAQGFATGATGLTDAIKRGVEGSINDFTSSPSETINYVSCHDNYTLWDKIALSNPNDSEADRIKMDELAQAVVMTSQGVPFMQGGEEMLRTKGGNDNSYNAGDTVNRFDWSRKAQYPDVFNYYSGLIHLRLDHPAFRMTTANEINSHLQFLNSPENTVAYELTDHVNKDKWGNIIVVYNPNKTAATINLPSGKWAINATSGKVGESTLGQAEGSVQVPGISMMILHQEVSPDHGKK

SEQ ID NO: 49058 - protein, 664 aa, Bacillus deramificans
SSEQTDLVQLTLASAPDVSHTIQVGAAGYEAVNLIPRNVLNLPRYYYSGNDLGNVYSNKATAFRVWAPTASDVQLLLYNSETGPVTKQLEMQKSDNGTWKLKVPGNLKNWYYLYQVTVNGKTQTAVDPYVRAISVNATRGMIVDLEDTNPPGWKEDHQQTPANPVDEVIYEVHVRDFSIDANSGMKNKGKYLAFTEHGTKGPDNVKTGIDSLKELGINAVQLQPIEEFASIDETQPNMYNWGYDPRNYNVPEGAYATTPEGTARITQLKQLIQSIHKDRIAINMDVVYNHTANVGVSDFDKIVPQYYYRTDSAGNYTNGSGCGNEIASERPMVQKFVLDSVKYWVKEYHIDGFRFDLMALLGKDTMAKISKELHAINPGIVLYGEPWTGGTSGLSSDQLVTKGQQKGLGIGVFNDNLRNALDGNVFDSSAQGFATGATGLTDAIKRGVEGSINDFTSSPSETINYVSCHDNYTLWDKIALSNPNDSEADRIKMDELAQAVVMTSQGVPFMQGGEEMLRTKGGNDNSYNAGDTVNEFDWSRKAQYPDVFNYYSGLIHLRLDHPAFRMTTANEINSHLQFLNSPENTVAYELTDHVNKDKWGNIIVVYNPNKTAATINLPSGKWAINATSGKVGESTLGQAEGSVQVPGISMMILHQEVSPDHGKK

SEQ ID NO: 49059 - protein, 664 aa, Bacillus deramificans
SSEQTDLVQLTLASAPDVSHTIQVGAAGYEAVNLIPRNVLNLPRYYYSGNDLGNVYSNKATAFRVWAPTASDVQLLLYNSETGPVTKQLEMQKSDNGTWKLKVPGNLKNWYYLYQVTVNGKTQTAVDPYVRAISVNATRGMIVDLEDTNPPGWKEDHQQTPANPVDEVIYEVHVRDFSIDANSGMKNKGKYLAFTEHGTKGPDNVKTGIDSLKELGVNAVELLPIEEFASIDETQPNMYNWGYDPRNYNVPEGAYATTPEGTARITQLKQLIQSIHKDRIAINMDVVYNHTFNVGVSDFDKIVPQYYYRTDSAGNYTNGSGCGNEIAAERPMVQKFVLDSVKYWVKEYHIDGFRFDLMALLGKDTMAKISKELHAINPGIVLYGEPWTGGTSGLSSDQLVTKGQQKGLGIGVFNDNLRNALDGNVFDSSAQGFATGATGLTDAIKRGVEGSINDFTSSPSETINYVSCHDNYTLWDKIALSNPNDSEADRIKMDELAQAVVMTSQGVPFMQGGEEMLRTKGGNDNSYNAGDTVNEFDWSRKAQYPDVFNYYSGLIHLRLDHPAFRMTTANEINSHLQFLNSPENTVAYELTDHVNKDKWGNIIVVYNPNKTAATINLPSGKWAINATSGKVGESTLGQAEGSVQVPGISMMILHQEVSPDHGKK

SEQ ID NO: 49060 - protein, 664 aa, Bacillus deramificans
SSEQTDLVQLTLASAPDVSHTIQVGAAGYEAVNLIPRNVLNLPRYYYSGNDLGNVYSPKATAFRVWAPTASDVQLLLYNSETGPVTKALEMRKSDNGTWKLKVPGNLKNWYYLYQVTVNGKTQTAVDPYVRAISVNATRGMIVDLEDTNPPGWKEDHQQTPANPVDEVIYEVHVRDFSIDANSGMKNKGKYLAFTEHGTKGPDGVKTGIDSLKELGINAVQLQPIEEFASIDETQPNMYNWGYDPRNYNVPEGAYATTPEGTARITQLKQLIQSIHKDRIAINMDVVYNHTFNVGVSDFDKIVPQYYYRTDSAGNYTNGSGVGNEIASERPMVQKFVLDSVKYWVKEYHIDGFRFDLMALLGKDTMAKISKELHAINPGIVLYGEPWTGGTSGLSSDQLVTKGQQKGLGIGVFNDNLRNALDGNVFDSSAQGFATGATGLTDAIKRGVEGSINDFTSSPSETINYVSCHDNYTLWDKIALSNPNDSEADRIKMDELAQAVVMTSQGVPFMQGGEEMLRTKGGNDNSYNAGDTVNEFDWSRKAQYPDVFNYYSGLIHLRLDHPAFRMTTANEINSHLQFLNSPENTVAYELTDHVNKDKWGNIIVVYNPNKTAATINLPSGKWAINATSGKVGESTLGQAEGSVQVPGISMMILHQEVSPDHGKK

SEQ ID NO: 49061 - protein, 664 aa, Bacillus deramificans
SSEQTDLVQLTLASAPDVSHTIQVGAAGYEAVNLIPRNVLNLPRYYYSGNDLGNVYSNKATAFRVWAPTASDVQLLLYNSETGPVTKQLEMQKSDNGTWKLKVPGNLKNWYYLYQVTVNGKTQTAVDPYVRAISVNATRGMIVDLEDTNPPGWKEDHQQTPANPVDEVIYEVHVRDFSIDASSGMKNKGKYLAFTEHGTKGPDNVKTGIDSLKELGINAVQLQPIEEFASIDETQPNMYNWGYDPRNYNVPEGAYATTPEGTARITQLKQLIQSIHKDRIAINMDVVYNHTFNVGVSDFDKIVPQYYYRTDSAGNYTNGSGCGNEIASERPMVQKFVLDSVKYWVKEYHIDGFRFDLMALLGKDTMAKISKELHAINPGIVLYGEPWTGGTSGLSSDQLVTKGQQKGLGIGVFNDNLRNALDGNVFDSSAQGFATGATGLTDAIKRGVEGSINDFTSSPSETINYVSCHDNYTLWDKIALSNPNDSEADRIKMDELAQAVVMTSQGVPFMQGGEEMLRTKGGNDNSYNAGDTVNEFDWSRKAQYPDVFNYYSGLIHLRLDHPAFRMTTANEINSHLQFLNSPENTVAYELTDHVNKDKWGNIIVVYNPNKTAATINLPSGKWAINATSGKVGESTLGQAEGSVQVPGISMMILHQEVSPDHGKK

SEQ ID NO: 49062 - protein, 664 aa, Bacillus deramificans
SSEQTDLVQLTLASAPDVSHTIQVGAAGYEAVNLIPRNVLNLPRYYYSGNDLGNVYSNKATAFRVWAPTASDVQLLLYNSETGPVTKQLEMQKSDNGTWKLKVPGNLKNWYYLYQVTVNGKTQTAVDPYVRAISVNATRGMIVDLEDTNPPGWKEDHQQTPANPVDEVIYEVHVRDFSIDPNSGMKNKGKYLAFTEHGTKGPDGVKTGIDSLKELGVNAVELLPIEEFASIDETQPNMYNWGYDPRNYNVPEGAYATTPEGTARITQLKQLIQSIHKDRIAINMDVVYNHTFNVGVSDFDKIVPQYYYRTDSAGNYTNGSGVGNEIAAERPMVQKFVLDSVKYWVKEYHIDGFRFDLMALLGKDTMAKISKELHAINPGIVLYGEPWTGGTSGLSSDQLVTKGQQKGLGIGVFNDNLRNALDGNVFDSSAQGFATGATGLTDAIKRGVEGSINDFTSSPSETINYVSCHDNYTLWDKIALSNPNDSEADRIKMDELAQAVVMTSQGVPFMQGGEEMLRTKGGNDNSYNAGDTVNEFDWSRKAQYPDVFNYYSGLIHLRLDHPAFRMTTANEINSHLQFLNSPENTVAYELTDHVNKDKWGNIIVVYNPNKTAATINLPSGKWAINATSGKVGESTLGQAEGSVQVPGISMMILHQEVSPDHGKK

SEQ ID NO: 49063 - protein, 664 aa, Bacillus acidopullulyticus
SSEQTDLVQLTLASAPDVSHTIQVGAAGYEAVNLIPRNVLNLPRYYYSGNDLGNVYSNKATAFRVWAPTASDVQLLLYNSETGPVTKQLEMQKSDNGTWKLKVPGNLKNWYYLYQVTVNGKTQTAVDPYVRAISVNATRGMIVDLEDTNPPGWKEDHQQTPANPVDEVIYEVHVRDFSIDANSGMKNKGKYLAFTEHGTKGPDGVKTGIDSLKELGINAVQLQPIEEFASIDETQPNMYNWGYDPRNYNVPEGAYATTPEGTARITQLKQLIQSIHKDRIAINMDVVYNHTFNVGVSDFDKIVPQYYYRTDSAGNYTNGSGVGNEIASERPMVQKFVLDSVKYWVKEYHIDGFRFDLMALLGKDTMAKISKELHAINPGIVLYGEPWTGGTSGLSSDQLVTKGQQKGLGIGVFNDNLRNALDGNVFDSSAQGFATGATGLTDAIKRGVEGSINDFTSSPSETINYVSCHDNYTLWDKIALSNPNDSEADRIKMDELAQAVVMTSQGVPFMQGGEEMLRTKGGNDNSYNAGDTVNEFDWSRKAQYPDVFNYYSGLIHLRLDHPAFRMTTANEINSHLQFLNSPENTVAYELTDHVNKDKWGNIIVVYNPNKTAATINLPSGKWAINATSGKVGESTLGQAEGSVQVPGISMMILHQEVSPDHGKK

SEQ ID NO: 49064 - protein, 664 aa, Bacillus deramificans
SSEQTDLVQLTLASAPDVSHTIQVGAAGYEAVNLIPRNVLNLPRYYYSGNDLGNVYSNKATAFRVWAPTASDVQLLLYNSETGPVTKQLEMQKSDNGTWKLKVPGNLKNWYYLYQVTVNGKTQTAVDPYVRAISVNATRGMIVDLEDTNPPGWKEDHQQTPANPVDEVIYEVHVRDFSIDANSGMKNKGKYLAFTEHGTKGPDGVKTGIDSLKELGINAVQLQPIEEFASIDETQPNMYNWGYDPRNYNVPEGAYATTPEGTARITQLKQLIQSIHKDRIAINMDVVYNHTFNVGVSDFDKIVPQYYYRTDSAGNYTNGSGVGNEIATERPMVQKFVLDSVKYWVKEYHIDGFRFDLMALLGKDTMAKISKELHAINPGIVLYGEPWTGGTSGLSSDQLVTKGQQKGLGIGVFNDNLRNALDGNVFDSSAQGFATGATGLTDAIKRGVEGSINDFTSSPSETINYVSCHDNYTLWDKIALSNPNDSEADRIKMDELAQAVVMTSQGVPFMQGGEEMLRTKGGNDNSYNAGDTVNEFDWSRKAQYPDVFNYYSGLIHLRLDHPAFRMTTANEINSHLQFLNSPENTVAYELTDHVNKDKWGNIIVVYNPNKTAATINLPSGKWAINATSGKVGESTLGQAEGSVQVPGISMMILHQEVSPDHGKK

SEQ ID NO: 49065 - protein, 664 aa, Bacillus deramificans
SSEQTDLVQLTLASAPDVSHTIQVGAAGYEAVNLIPRNVLNLPRYYYSGNDLGNVYSNKATAFRVWAPTASDVQLLLYNSETGPVTKQLEMQKSDNGTWKLKVPGNLKNWYYLYQVTVNGKTQTAVDPYVRAISVNATRGMIVDLEDTNPPGWKEDHQQTPANPVDEVIYEVHVRDFSIDANSGMKNKGKYLAFTEHGTKGPDGVSTGLDSLKELGINAVQLQPIEEFASIDETQPNMYNWGYDPRNYNVPEGAYATTPEGTARITQLKQLIQSIHKDRIAINMDVVYNHTFNVGVSDFDKIVPQYYYRTDSAGNYTNGSGCGNEIAAERPMVQKFVLDSVKYWVKEYHIDGFRFDLMALLGKDTMAKISKELHAINPGIVLYGEPWTGGTSGLSSDQLVTKGQQKGLGIGVFNDNLRNALDGNVFDSSAQGFATGATGLTDAIKRGVEGSINDFTSSPSETINYVSCHDNYTLWDKIALSNPNDSEADRIKMDELAQAVVMTSQGVPFMQGGEEMLRTKGGNDNSYNAGDTVNEFDWSRKAQYPDVFNYYSGLIHLRLDHPAFRMTTANEINSHLQFLNSPENTVAYELTDHVNKDKWGNIIVVYNPNKTAATINLPSGKWAINATSGKVGESTLGQAEGSVQVPGISMMILHQEVSPDHGKK

SEQ ID NO: 49066 - protein, 664 aa, Bacillus deramificans
SSEQTDLVQLTLASAPDVSHTIQVGAAGYEAVNLIPRNVLNLPRYYYSGNDLGNVYSNKATAFRVWAPTASDVQLLLYNSETGPVTKQLEMQKSDNGTWKLKVPGNLKNWYYLYQVTVNGKTQTAVDPYVRAISVNATRGMIVDLEDTNPPGWKEDHQQTPANPVDEVIYEVHVRDFSIDPNSGMKNKGKYLAFTEHGTKGPDGVKTGIDSLKELGVNAVELLPIEEFASIDETQPNMYNWGYDPRNYNVPEGAYATTPEGTARITQLKQLIQSIHKDRIAINMDVVYNHTFNVGVSDFDKIVPQYYYRTDSAGNYTNGSGVGNEIASERPMVQKFVLDSVKYWVKEYHIDGFRFDLMALLGKDTMAKISKELHAINPGIVLYGEPWTGGTSGLSSDQLVTKGQQKGLGIGVFNDNLRNALDGNVFDSSAQGFATGATGLTDAIKRGVEGSINDFTSSPSETINYVSCHDNYTLWDKIALSNPNDSEADRIKMDELAQAVVMTSQGVPFMQGGEEMLRTKGGNDNSYNAGDTVNEFDWSRKAQYPDVFNYYSGLIHLRLDHPAFRMTTANEINSHLQFLNSPENTVAYELTDHVNKDKWGNIIVVYNPNKTAATINLPSGKWAINATSGKVGESTLGQAEGSVQVPGISMMILHQEVSPDHGKK

SEQ ID NO: 49067 - protein, 664 aa, Bacillus deramificans
SSEQTDLVQLTLASAPDVSHTIQVGAAGYEAVNLIPRNVLNLPRYYYSGNDLGNVYSNKATAFRVWAPTASDVQLLLYNSETGPVTKQLEMQKSDNGTWKLKVPGNLKNWYYLYQVTVNGKTQTAVDPYVRAISVNATRGMIVDLEDTNPPGWKEDHQQTPANPVDEVIYEVHVRDFSIDANSGMKNKGKYLAFTEHGTKGPDGVKTGIDSLKELGVNAVELLPIEEFASIDETQPNMYNWGYDPRNYNVPEGAYATTPEGTARITQLKQLIQSIHKDRIAINMDVVYNHTFNVGVSDFDKIVPQYYYRTDSAGNYTNGSGVGNEIAAERPMVQKFVLDSVKYWVKEYHIDGFRFDLMALLGKDTMAKISKELHAINPGIVLYGEPWTGGTSGLSSDQLVTKGQQKGLGIGVFNDNLRNALDGNVFDSSAQGFATGATGLTDAIKRGVEGSINDFTSSPSETINYVSCHDNYTLWDKIALSNPNDSEADRIKMDELAQAVVMTSQGVPFMQGGEEMLRTKGGNDNSYNAGDTVNEFDWSRKAQYPDVFNYYSGLIHLRLDHPAFRMTTANEINSHLQFLNSPENTVAYELTDHVNKDKWGNIIVVYNPNKTAATINLPSGKWAINATSGKVGESTLGQAEGSVQVPGISMMILHQEVSPDHGKK

SEQ ID NO: 49068 - protein, 664 aa, Bacillus deramificans
SSEQTDLVQLTLASAPDVSHTIQVGAAGYEAVNLIPRNVLNLPRYYYSGNDLGNVYSNKATAFRVWAPTASDVQLLLYNSETGPVTKQLEMQKSDNGTWKLKVPGNLKNWYYLYQVTVNGKTQTAVDPYVRAISVNATRGMIVDLEDTNPPGWKEDHQQTPANPVDEVIYEVHVRDFSIDANSGMKNKGKYLAFTEHGTKGPDNVKTGIDSLKELGVNAVELLPIEEFASIDETQPNMYNWGYDPRNYNVPEGAYATTPEGTARITQLKQLIQSIHKDRIAINMDVVYNHTFNVGVSDFDKIVPQYYYRTDSAGNYTNGSGCGNEIASERPMVQKFVLDSVKYWVKEYHIDGFRFDLMALLGKDTMAKISKELHAINPGIVLYGEPWTGGTSGLSSDQLVTKGQQKGLGIGVFNDNLRNALDGNVFDSSAQGFATGATGLTDAIKRGVEGSINDFTSSPSETINYVSCHDNYTLWDKIALSNPNDSEADRIKMDELAQAVVMTSQGVPFMQGGEEMLRTKGGNDNSYNAGDTVNEFDWSRKAQYPDVFNYYSGLIHLRLDHPAFRMTTANEINSHLQFLNSPENTVAYELTDHVNKDKWGNIIVVYNPNKTAATINLPSGKWAINATSGKVGESTLGQAEGSVQVPGISMMILHQEVSPDHGKK

SEQ ID NO: 49069 - protein, 664 aa, Bacillus deramificans
SSEQTDLVQLTLASAPDVSHTIQVGAAGYEAVNLIPRNVLNLPRYYYSGNDLGNVYSNKATAFRVWAPTASDVQLLLYNSETGPVTKQLEMQKSDNGTWKLKVPGNLKNWYYLYQVTVNGKTQTAVDPYVRAISVNATRGMIVDLEDTNPPGWKEDHQQTPANPVDEVIYEVHVRDFSIDPNSGMKNKGKYLAFTEHGTKGPDGVKTGIDSLKELGVNAVELLPIEEFASIDETQPNMYNWGYDPRNYNVPEGAYATTPEGTARITQLKQLIQSIHKDRIAINMDVVYNHTFNVGVSDFDKIVPQYYYRTDSAGNYTNGSGVGNEIAAERPMVQKFVLDSVKYWVKEYHIDGFRFDLMALLGKDTMAKISKELHAINPGIVLYGEPWTGGTSGLSSDQLVTKGQQKGLGIGVFNDNLRNALDGNVFDSSAQGFATGATGLTDAIKRGVEGSINDFTSSPSETINYVSCHDNYTLWDKIALSNPNDSEADRIKMDELAQAVIMTSQGVPFMQGGEEMLRTKGGNDNSYNAGDTVNEFDWSRKAQYPDVFNYYSGLIHLRLDHPAFRMTTANEINSHLQFLNSPENTVAYELTDHVNKDKWGNIIVVYNPNKTAATINLPSGKWAINATSGKVGESTLGQAEGSVQVPGISMMILHQEVSPDHGKK

SEQ ID NO: 49070 - protein, 664 aa, Bacillus deramificans
SSEQTDLVQLTLASAPDVSHTIQVGAAGYEAVNLIPRNVLNLPRYYYSGNDLGNVYSNKATAFRVWAPTASDVQLLLYNSETGPVTKQLEMQKSDNGTWKLKVPGNLKNWYYLYQVTVNGKTQTAVDPYVRAISVNATRGMIVDLEDTNPPGWKEDHQQTPANPVDEVIYEVHVRDFSIDPNSGMKNKGKYLAFTEHGTKGPDGVKTGIDSLKELGVNAVELLPIEEFASIDETQPNMYNWGYDPRNYNVPEGAYATTPEGTARITQLKQLIQSIHKDRIAINMDVVYNHTFNVGVSDFDKIVPQYYYRTDSAGNYTNGSGVGNEIASERPMVQKFVLDSVKYWVKEYHIDGFRFDLMALLGKDTMAKISKELHAINPGIVLYGEPWTGGTSGLSSDQLVTKGQQKGLGIGVFNDNLRNALDGNVFDSSAQGFATGATGLTDAIKRGVEGSINDFTSSPSETINYVSCHDNYTLWDKIALSNPNDSEADRIKMDELAQAVIMTSQGVPFMQGGEEMLRTKGGNDNSYNAGDTVNEFDWSRKAQYPDVFNYYSGLIHLRLDHPAFRMTTANEINSHLQFLNSPENTVAYELTDHVNKDKWGNIIVVYNPNKTAATINLPSGKWAINATSGKVGESTLGQAEGSVQVPGISMMILHQEVSPDHGKK

SEQ ID NO: 49071 - protein, 664 aa, Bacillus deramificans
SSEQTDLVQLTLASAPDVSHTIQVGAAGYEAVNLIPRNVLNLPRYYYSGNDLGNVYSNKATAFRVWAPTASDVQLLLYNSETGPVTKQLEMQKSDNGTWKLKVPGNLKNWYYLYQVTVNGKTQTAVDPYVRAISVNATRGMIVDLEDTNPPGWKEDHQQTPANPVDEVIYEVHVRDFSIDANSGMKNKGKYLAFTEHGTKGPDGVSTGLDSLKELGINAVQLQPIEEFASIDETQPNMYNWGYDPRNYNVPEGAYATTPEGTARITQLKQLIQSIHKDRIAINMDVVYNHTFNVGVSDFDKIVPQYYYRTDSAGNYTNGSGCGNEIASERPMVQKFVLDSVKYWVKEYHIDGFRFDLMALLGKDTMAKISKELHAINPGIVLYGEPWTGGTSGLSSDQLVTKGQQKGLGIGVFNDNLRNALDGNVFDSSAQGFATGATGLTDAIKRGVEGSINDFTSSPSETINYVSCHDNYTLWDKIALSNPNDSEADRIKMDELAQAVVMTSQGVPFMQGGEEMLRTKGGNDNSYNAGDTVNEFDWSRKAQYPDVFNYYSGLIHLRLDHPAFRMTTANEINSHLQFLNSPENTVAYELTDHVNKDKWGNIIVVYNPNKTAATINLPSGKWAINATSGKVGESTLGQAEGSVQVPGISMMILHQEVSPDHGKK

SEQ ID NO: 49072 - protein, 664 aa, Bacillus deramificans
SSEQTDLVQLTLASAPDVSHTIQVGAAGYEAVNLIPRNVLNLPRYYYSGNDLGNVYSNKATAFRVWAPTASDVQLLLYNSETGPVTKQLEMQKSDNGTWKLKVPGNLKNWYYLYQVTVNGKTQTAVDPYVRAISVNATRGMIVDLEDTNPPGWKEDHQQTPANPVDEVIYEVHVRDFSIDANSGMKNKGKYLAFTEHGTKGPDGVKTGIDSLKELGVNAVELLPIEEFASIDETQPNMYNWGYDPRNYNVPEGAYATTPEGTARITQLKQLIQSIHKDRIAINMDVVYNHTFNVGVSDFDKIVPQYYYRTDSAGNYTNGSGVGNEIASERPMVQKFVLDSVKYWVKEYHIDGFRFDLMALLGKDTMAKISKELHAINPGIVLYGEPWTGGTSGLSSDQLVTKGQQKGLGIGVFNDNLRNALDGNVFDSSAQGFATGATGLTDAIKRGVEGSINDFTSSPSETINYVSCHDNYTLWDKIALSNPNDSEADRIKMDELAQAVVMTSQGVPFMQGGEEMLRTKGGNDNSYNAGDTVNEFDWSRKAQYPDVFNYYSGLIHLRLDHPAFRMTTANEINSHLQFLNSPENTVAYELTDHVNKDKWGNIIVVYNPNKTAATINLPSGKWAINATSGKVGESTLGQAEGSVQVPGISMMILHQEVSPDHGKK

SEQ ID NO: 49073 - protein, 930 aa, Bacillus acidopullulyticus
DSTSTKVIVHYHRFDSNYTNWDVWMWPYQPVNGNGAAYQFTGTNDDFGAVADTQVPGDNTQVGLIVRKNDWSEKNTPNDLHIDLAKGHEVWIVQGDPTIYYNLSDAQAAAIPSVSNAYLDDEKTVLAKLSMPMTLADAASGFTVIDKTTGEKIPVTSAVSANPVTAVLVGDLQQALGAANNWSPDDDHTLLKKINPNLYQLSGTLPAGTYQYKIALDHSWNTSYPGNNVSLTVPQGGEKVTFTYIPSTNQVFDSVNHPNQAFPTSSAGVQTNLVQLTLASAPDVTHNLDVAADGYKAHNILPRNVLNLPRYDYSGNDLGNVYSKDATSFRVWAPTASNVQLLLYNSEKGSITKQLEMQKSDNGTWKLQVSGNLENWYYLYQVTVNGTTQTAVDPYARAISVNATRGMIVDLKATDPAGWQGDHEQTPANPVDEVIYEAHVRDFSIDANSGMKNKGKYLAFTEHGTKGPDHVKTGIDSLKQLGITHVQLMPVFASNSVDETDPTQDNWGYDPRNYDVPEGQYATNANGNARIKEFKEMVLSLHREHIGVNMDVVYNHTFATQISDFDKIVPEYYYRTDDAGNYTNGSGTGNEIAAERPMVQKFIIDSLKYWVNEYHIDGFRFDLMALLGKDTMSKAASELHAINPGIALYGEPWTGGTSALPDDQLLTKGAQKGMGVAVFNDNLRNALDGNVFDSSAQGFATGATGLTDAIKNGVEGSINDFTSSPGETINYVTSHDNYTLWDKIALSNPNDSEADRIKMDELAQAVVMTSQGVPFMQGGEEMLRTKGGNDNSYNAGDAVNEFDWSRKAQYPDVFNYYSGLIHLRLDHPAFRMTTANEINSHLQFLNSPENTVAYELTDHVNKDKWGNIIVVYNPNKTVATINLPSGKWAINATSGKVGESTLGQAEGSVQVPGISMMILHQEVSPDHGKK

SEQ ID NO: 49074 - protein, 927 aa, Bacillus deramificans
SSTEVIVHYHRFDANYANWDLWMWPYQPVNGNGAAYEFSGTDEFGVTADVQVPGDNTQVGLIVRKNDWSQKNTPDDLHIDLSKGHEVWINQGDPTIYYNLNDAEAAAVPAVSNAYLDNEKTVLAKLSSPMTLTDGASGFTVTDETTGEQIPVVSAESANPVTAVLVGDFQQALGASGNWSPDDDHTKLSKINSNLYQFTGTLPAGTYQYKVALDHSWSASYPNNNVNLTVPAGGTKVTFTYIPSTHQVFDSINNPDQTFPSSSAGTQSDLVQLTLASAPDITHDLQVVADGYKGGKILPRNVLNLPRYYYSGNDLGNVYSNKATAFRVWAPTASDVQLLLYNSETGPVTKQLEMQKSDNGTWKLKVPGNLKNWYYLYQVTVNGKTQTAVDPYVRAISVNATRGMIVDLEDTNPPGWKEDHQQTPANPVDEVIYEVHVRDFSIDANSGMKNKGKYLAFTEHGTKGPDNVKTGIDSLKELGINAVQLQPIEEFNSIDETQPNMYNWGYDPRNYNVPEGAYATTPEGTARITQLKQLIQSIHKDRIAINMDVVYNHTFATQISDFDKIVPEYYYRTDDAGNYTNGSGTGNEIAAERPMVQKFIIDSLKYWVNEYHIDGFRFDLMALLGKDTMSKAASELHAINPGIALYGEPWTGGTSALPEDQLLTKGAQKGMGVAVFNDNLRNALDGNVFDSSAQGFATGATGLTDAIKNGVEGSINDFTSSPGETINYVTSHDNYTLWDKIALSNPNDSEADRIKMDELAQAVVMTSQGVPFMQGGEEMLRTKGGNDNSYNAGDTVNEFDWSRKAQYPDVFNYYSGLIHLRLDHPAFRMTTANEINSHLQFLNSPENTVAYELTDHVNKDKWGNIIVVYNPNKTAATINLPSGKWAINATSGKVGESTLGQAEGSVQVPGISMMILHQEVSPDHGKK

SEQ ID NO: 49075 - protein, 927 aa, Bacillus deramificans
SSTEVIVHYHRFDANYANWDLWMWPYQPVNGNGAAYEFSGTDEFGVTADVQVPGDNTQVGLIVRKNDWSQKNTPDDLHIDLSKGHEVWINQGDPTIYYNLNDAEAAAVPAVSNAYLDNEKTVLAKLSSPMTLTDGASGFTVTDETTGEQIPVVSAESANPVTAVLVGDFQQALGASGNWSPDDDHTKLSKINSNLYQFTGTLPAGTYQYKVALDHSWSASYPNNNVNLTVPAGGTKVTFTYIPSTHQVFDSINNPDATFPSSSAGTQSDLVQLTLASAPDITHDLQVVADGYKGGKILPRNVLNLPRYYYSGNDLGNVYSNKATAFRVWAPTASDVQLLLYNSETGPVTKQLEMQKSDNGTWKLKVPGNLKNWYYLYQVTVNGKTQTAVDPYVRAISVNATRGMIVDLEDTNPPGWKEDHQQTPANPVDEVIYEVHVRDFSIDANSGMKNKGKYLAFTEHGTKGPDGVKTGIDSLKELGINAVQLQPIEEFASIDETQPNMYNWGYDPRNYNVPEGAYATTPEGTARITEFKQLIQSIHKDRIAINMDVVYNHTFATQISDFDKIVPEYYYRTDDAGNYTNGSGTGNEIAAERPMVQKFIIDSLKYWVNEYHIDGFRFDLMALLGKDTMSKAASELHAINPGIALYGEPWTGGTSALPEDQLLTKGAQKGMGVAVFNDNLRNALDGNVFDSSAQGFATGATGLTDAIKRGVEGSINDFTSSPSETINYVSCHDNYTLWDKIALSNPNDSEADRIKMDELAQAVVMTSQGVPFMQGGEEMLRTKGGNDNSYNAGDTVNEFDWSRKAQYPDVFNYYSGLIHLRLDHPAFRMTTANEINSHLQFLNSPENTVAYELTDHVNKDKWGNIIVVYNPNKTAATINLPSGKWAINATSGKVGESTLGQAEGSVQVPGISMMILHQEVSPDHGKK

SEQ ID NO: 49076 - protein, 927 aa, Bacillus deramificans
SSTEVIVHYHRFDANYANWDLWMWPKQPVNGNGAAYEFSGTDEFGVTADVQVPGDNTQVGLIVRKNDWSQKNTPDDLYIDLSKGHEVWINQGDPTIYYNLNDAEAAAVPAVSNAYLDNEKTVLAKLSSPMTLTDGASGFTVTDETTGEQIPVVSAESANPVTAVLVGDFQQALGASGNWSPDDDHTKLSKINSNLYQFTGTLPAGTYQYKIALDHSWSASYPNNNVNLTVPAGGTKVTFTYIPSTHQVFDSINNPDATFPSSSAGTQSDLVQLTLASAPDITHDLRVVADGYKGGKILPRNVLNLPRYYYSGNDLGNVYSNKATAFRVWAPTASDVQLLLYNSETGPVTKALEMRKSDNGTWKLKVPGNLKNWYYLYQVTVNGKTQTAVDPYVRAISVNATRGMIVDLEDTNPPGWKEDHQQTPANPVDEVIYEVHVRDFSIDANSGMKNKGKYLAFTEHGTKGPDGVKTGIDSLKELGINAVQLQPIEEFASIDETQPNMYNWGYDPRNYNVPEGAYATTPEGTARITEFKQLIQSIHKDRIAINMDVVYNHTFATQISDFDKIVPEYYYRTDDAGNYTNGSGTGNEIAAERPMVQKFIIDSLKYWVNEYHIDGFRFDLMALLGKDTMSKAASELHAINPGIALYGEPWTGGTSALPEDQLLTKGAQKGMGVAVFNDNLRNALDGNVFDSSAQGFATGATGLTDAIKRGVEGSINDFTSSPSETINYVSCHDNYTLWDKIALSNPNDSEADRIKMDELAQAVVMTSQGVPFMQGGEEMLRTKGGNDNSYNAGDTVNEFDWSRKAQYPDVFNYYSGLIHLRLDHPAFRMTTANEINSHLQFLNSPENTVAYELTDHVNKDKWGNIIVVYNPNKTAATINLPSGKWAINATSGKVGESTLGQAEGSVQVPGISMMILHQEVSPDHGKK

SEQ ID NO: 49077 - protein, 927 aa, Bacillus deramificans
SSTEVIVHYHRFDANYANWDLWMWPKQPVNGNGAAYEFSGTDEFGVTADVQVPGDNTQVGLIVRKNDWSQKNTPDDLYIDLSKGHEVWINQGDPTIYYNLNDAEAAAVPAVSNAYLDNEKTVLAKLSSPMTLTDGASGFTVTDETTGEQIPVVSAESANPVTAVLVGDFQQALGASGNWSPDDDATKLSKINSNLYQFTGTLPAGTYQYKIALDHSWSASYPNNNVNLTVPAGGTKVTFTYIPSTHQVFDSINNPDATFPSSSAGTQSDLVQLTLASAPDITHDLRVVADGYKGGKILPRNVLNLPRYYYSGNDLGNVYSNKATAFRVWAPTASDVQLLLYNSETGPVTKALEMRKSDNGTWKLKVPGNLKNWYYLYQVTVNGKTQTAVDPYVRAISVNATRGMIVDLEDTNPPGWKEDHQQTPANPVDEVIYEVHVRDFSIDANSGMKNKGKYLAFTEHGTKGPDGVKTGIDSLKELGINAVQLQPIEEFASIDETQPNMYNWGYDPRNYNVPEGAYATTPEGTARITEFKQLIQSIHKDRIAINMDVVYNHTFATQISDFDKIVPEYYYRTDDAGNYTNGSGTGNEIAAERPMVQKFIIDSLKYWVNEYHIDGFRFDLMALLGKDTMSKAASELHAINPGIALYGEPWTGGTSALPEDQLLTKGAQKGMGVAVFNDNLRNALDGNVFDSSAQGFATGATGLTDAIKRGVEGSINDFTSSPSETINYVSCHDNYTLWDKIALSNPNDSEADRIKMDELAQAVVMTSQGVPFMQGGEEMLRTKGGNDNSYNAGDTVNEFDWSRKAQYPDVFNYYSGLIHLRLDHPAFRMTTANEINSHLQFLNSPENTVAYELTDHVNKDKWGNIIVVYNPNKTAATINLPSGKWAINATSGKVGESTLGQAEGSVQVPGISMMILHQEVSPDHGKK

SEQ ID NO: 49078 - protein, 927 aa, Bacillus deramificans
SSTEVIVHYHRFDANYANWDLWMWPYQPVNGNGAAYEFSGTDEFGVTADVQVPGDNTQVGLIVRKNDWSQKNTPDDLHIDLSKGHEVWINQGDPTIYYNLNDAEAAAVPAVSNAYLDNEKTVLAKLSSPMTLTDGASGFTVTDETTGEQIPVVSAESANPVTAVLVGDFQQALGASGNWSPDDDHTKLSKINSNLYQFTGTLPAGTYQYKVALDHSWSASYPNNNVNLTVPAGGTKVTFTYIPSTHQVFDSINNPDATFPSSSAGTQSDLVQLTLASAPDITHDLRVVADGYKGGKILPRNVLNLPRYYYSGNDLGNVYSNKATAFRVWAPTASDVQLLLYNSETGPVTKALEMRKSDNGTWKLKVPGNLKNWYYLYQVTVNGKTQTAVDPYVRAISVNATRGMIVDLEDTNPPGWKEDHQQTPANPVDEVIYEVHVRDFSIDANSGMKNKGKYLAFTEHGTKGPDGVKTGIDSLKELGINAVQLQPIEEFASIDETQPNMYNWGYDPRNYNVPEGAYATTPEGTARITEFKQLIQSIHKDRIAINMDVVYNHTFATQISDFDKIVPEYYYRTDDAGNYTNGSGTGNEIAAERPMVQKFIIDSLKYWVNEYHIDGFRFDLMALLGKDTMSKAASELHAINPGIALYGEPWTGGTSALPEDQLLTKGAQKGMGVAVFNDNLRNALDGNVFDSSAQGFATGATGLTDAIKRGVEGSINDFTSSPSETINYVSCHDNYTLWDKIALSNPNDSEADRIKMDELAQAVVMTSQGVPFMQGGEEMLRTKGGNDNSYNAGDTVNEFDWSRKAQYPDVFNYYSGLIHLRLDHPAFRMTTANEINSHLQFLNSPENTVAYELTDHVNKDKWGNIIVVYNPNKTAATINLPSGKWAINATSGKVGESTLGQAEGSVQVPGISMMILHQEVSPDHGKK

SEQ ID NO: 49079 - protein, 927 aa, Bacillus deramificans
SSTEVIVHYHRFDANYANWDLWMWPYQPVNGNGAAYEFSGTDEFGVTADVQVPGDNTQVGLIVRKNDWSQKNTPDDLHIDLSKGHEVWINQGDPTIYYNLNDAEAAAVPAVSNAYLDNEKTVLAKLSSPMTLTDGASGFTVTDETTGEQIPVVSAESANPVTAVLVGDFQQALGASGNWSPDDDHTKLSKINSNLYQFTGTLPAGTYQYKVALDHSWSASYPNNNVNLTVPAGGTKVTFTYIPSTHQVFDSINNPDATFPSSSAGTQSDLVQLTLASAPDITHDLRVVADGYKGGKILPRNVLNLPRYYYSGNDLGNVYSPKATAFRVWAPTASDVQLLLYNSETGPVTKALEMRKSDNGTWKLKVPGNLKNWYYLYQVTVNGKTQTAVDPYVRAISVNATRGMIVDLEDTNPPGWKEDHQQTPANPVDEVIYEVHVRDFSIDANSGMKNKGKYLAFTEHGTKGPDGVKTGIDSLKELGINAVQLQPIEEFASIDETQPNMYNWGYDPRNYNVPEGAYATTPEGTARITEFKQLIQSIHKDRIAINMDVVYNHTFATQISDFDKIVPEYYYRTDDAGNYTNGSGTGNEIAAERPMVQKFIIDSLKYWVNEYHIDGFRFDLMALLGKDTMSKAASELHAINPGIALYGEPWTGGTSALPEDQLLTKGAQKGMGVAVFNDNLRNALDGNVFDSSAQGFATGATGLTDAIKRGVEGSINDFTSSPSETINYVSCHDNYTLWDKIALSNPNDSEADRIKMDELAQAVVMTSQGVPFMQGGEEMLRTKGGNDNSYNAGDTVNEFDWSRKAQYPDVFNYYSGLIHLRLDHPAFRMTTANEINSHLQFLNSPENTVAYELTDHVNKDKWGNIIVVYNPNKTAATINLPSGKWAINATSGKVGESTLGQAEGSVQVPGISMMILHQEVSPDHGKK

SEQ ID NO: 49080 - protein, 927 aa, Bacillus deramificans
SSTEVIVHYHRFDANYANWDLWMWPKQPVNGNGAAYEFSGTDEFGVTADVQVPGDNTQVGLIVRKNDWSQKNTPDDLYIDLSKGHEVWINQGDPTIYYNLNDAEAAAVPAVSNAYLDNEKTVLAKLSSPMTLTDGASGFTVTDETTGEQIPVVSAESANPVTAVLVGDFQQALGASGNWSPDDDATKLSKINSNLYQFTGTLPAGTYQYKIALDHSWSASYPNNNVNLTVPAGGTKVTFTYIPSTHQVFDSINNPDATFPSSSAGTQSDLVQLTLASAPDITHDLRVVADGYKGGKILPRNVLNLPRYYYSGNDLGNVYSPKATAFRVWAPTASDVQLLLYNSETGPVTKALEMRKSDNGTWKLKVPGNLKNWYYLYQVTVNGKTQTAVDPYVRAISVNATRGMIVDLEDTNPPGWKEDHQQTPANPVDEVIYEVHVRDFSIDANSGMKNKGKYLAFTEHGTKGPDGVKTGIDSLKELGINAVQLQPIEEFASIDETQPNMYNWGYDPRNYNVPEGAYATTPEGTARITEFKQLIQSIHKDRIAINMDVVYNHTFATQISDFDKIVPEYYYRTDDAGNYTNGSGTGNEIAAERPMVQKFIIDSLKYWVNEYHIDGFRFDLMALLGKDTMSKAASELHAINPGIALYGEPWTGGTSALPEDQLLTKGAQKGMGVAVFNDNLRNALDGNVFDSSAQGFATGATGLTDAIKRGVEGSINDFTSSPSETINYVSCHDNYTLWDKIALSNPNDSEADRIKMDELAQAVVMTSQGVPFMQGGEEMLRTKGGNDNSYNAGDTVNEFDWSRKAQYPDVFNYYSGLIHLRLDHPAFRMTTANEINSHLQFLNSPENTVAYELTDHVNKDKWGNIIVVYNPNKTAATINLPSGKWAINATSGKVGESTLGQAEGSVQVPGISMMILHQEVSPDHGKK

SEQ ID NO: 49081 - protein, 927 aa, Bacillus deramificans
SSTEVIVHYHRFDANYANWDLWMWPYQPVNGNGAAYEFSGTDEFGVTADVQVPGDNTQVGLIVRKNDWSQKNTPDDLHIDLSKGHEVWINQGDPTIYYNLNDAEAAAVPAVSNAYLDNEKTVLAKLSSPMTLTDGASGFTVTDETTGEQIPVVSAESANPVTAVLVGDFQQALGASGNWSPDDDHTKLSKINSNLYQFTGTLPAGTYQYKVALDHSWSASYPNNNVNLTVPAGGTKVTFTYIPSTHQVFDSINNPDATFPSSSAGTQSDLVQLTLASAPDITHDLQVVADGYKGGKILPRNVLNLPRYYYSGNDLGNVYSNKATAFRVWAPTASDVQLLLYNSETGPVTKALEMRKSDNGTWKLKVPGNLKNWYYLYQVTVNGKTQTAVDPYVRAISVNATRGMIVDLEDTNPPGWKEDHQQTPANPVDEVIYEVHVRDFSIDANSGMKNKGKYLAFTEHGTKGPDGVKTGIDSLKELGINAVQLQPIEEFASIDETQPNMYNWGYDPRNYNVPEGAYATTPEGTARITEFKQLIQSIHKDRIAINMDVVYNHTFATQISDFDKIVPEYYYRTDDAGNYTNGSGTGNEIAAERPMVQKFIIDSLKYWVNEYHIDGFRFDLMALLGKDTMSKAASELHAINPGIALYGEPWTGGTSALPEDQLLTKGAQKGMGVAVFNDNLRNALDGNVFDSSAQGFATGATGLTDAIKRGVEGSINDFTSSPSETINYVSCHDNYTLWDKIALSNPNDSEADRIKMDELAQAVVMTSQGVPFMQGGEEMLRTKGGNDNSYNAGDTVNEFDWSRKAQYPDVFNYYSGLIHLRLDHPAFRMTTANEINSHLQFLNSPENTVAYELTDHVNKDKWGNIIVVYNPNKTAATINLPSGKWAINATSGKVGESTLGQAEGSVQVPGISMMILHQEVSPDHGKK

SEQ ID NO: 49082 - protein, 927 aa, Bacillus deramificans
SSTEVIVHYHRFDANYANWDLWMWPYQPVNGNGAAYEFSGTDEFGVTADVQVPGDNTQVGLIVRKNDWSQKNTPDDLHIDLSKGHEVWINQGDPTIYYNLNDAEAAAVPAVSNAYLDNEKTVLAKLSSPMTLTDGASGFTVTDETTGEQIPVVSAESANPVTAVLVGDFQQALGASGNWSPDDDATKLSKINSNLYQFTGTLPAGTYQYKIALDHSWSASYPNNNVNLTVPAGGTKVTFTYIPSTHQVFDSINNPDATFPSSSAGTQSDLVQLTLASAPDITHDLRVVADGYKGGKILPRNVLNLPRYYYSGNDLGNVYSNKATAFRVWAPTASDVQLLLYNSETGPVTKALEMRKSDNGTWKLKVPGNLKNWYYLYQVTVNGKTQTAVDPYVRAISVNATRGMIVDLEDTNPPGWKEDHQQTPANPVDEVIYEVHVRDFSIDANSGMKNKGKYLAFTEHGTKGPDGVKTGIDSLKELGINAVQLQPIEEFASIDETQPNMYNWGYDPRNYNVPEGAYATTPEGTARITEFKQLIQSIHKDRIAINMDVVYNHTFATQISDFDKIVPEYYYRTDDAGNYTNGSGTGNEIAAERPMVQKFIIDSLKYWVNEYHIDGFRFDLMALLGKDTMSKAASELHAINPGIALYGEPWTGGTSALPEDQLLTKGAQKGMGVAVFNDNLRNALDGNVFDSSAQGFATGATGLTDAIKRGVEGSINDFTSSPSETINYVSCHDNYTLWDKIALSNPNDSEADRIKMDELAQAVVMTSQGVPFMQGGEEMLRTKGGNDNSYNAGDTVNEFDWSRKAQYPDVFNYYSGLIHLRLDHPAFRMTTANEINSHLQFLNSPENTVAYELTDHVNKDKWGNIIVVYNPNKTAATINLPSGKWAINATSGKVGESTLGQAEGSVQVPGISMMILHQEVSPDHGKK

SEQ ID NO: 49083 - protein, 927 aa, Bacillus deramificans
SSTEVIVHYHRFDANYANWDLWMWPYQPVNGNGAAYEFSGTDEFGVTADVQVPGDNTQVGLIVRKNDWSQKNTPDDLHIDLSKGHEVWINQGDPTIYYNLNDAEAAAVPAVSNAYLDNEKTVLAKLSSPMTLTDGASGFTVTDETTGEQIPVVSAESANPVTAVLVGDFQQALGASGNWSPDDDATKLSKINSNLYQFTGTLPAGTYQYKVALDHSWSASYPNNNVNLTVPAGGTKVTFTYIPSTHQVFDSINNPDQTFPSSSAGTQSDLVQLTLASAPDITHDLQVVADGYKGGKILPRNVLNLPRYYYSGNDLGNVYSNKATAFRVWAPTASDVQLLLYNSETGPVTKQLEMQKSDNGTWKLKVPGNLKNWYYLYQVTVNGKTQTAVDPYVRAISVNATRGMIVDLEDTNPPGWKEDHQQTPANPVDEVIYEVHVRDFSIDANSGMKNKGKYLAFTEHGTKGPDGVKTGIDSLKELGINAVQLQPIEEFASIDETQPNMYNWGYDPRNYNVPEGAYATTPEGTARITEFKQLIQSIHKDRIAINMDVVYNHTFATQISDFDKIVPEYYYRTDDAGNYTNGSGTGNEIAAERPMVQKFIIDSLKYWVNEYHIDGFRFDLMALLGKDTMSKAASELHAINPGIALYGEPWTGGTSALPEDQLLTKGAQKGMGVAVFNDNLRNALDGNVFDSSAQGFATGATGLTDAIKRGVEGSINDFTSSPSETINYVSCHDNYTLWDKIALSNPNDSEADRIKMDELAQAVVMTSQGVPFMQGGEEMLRTKGGNDNSYNAGDTVNEFDWSRKAQYPDVFNYYSGLIHLRLDHPAFRMTTANEINSHLQFLNSPENTVAYELTDHVNKDKWGNIIVVYNPNKTAATINLPSGKWAINATSGKVGESTLGQAEGSVQVPGISMMILHQEVSPDHGKK

SEQ ID NO: 49084 - protein, 927 aa, Bacillus deramificans
SSTEVIVHYHRFDANYANWDLWMWPYQPVNGNGAAYEFSGTDEFGVTADVQVPGDNTQVGLIVRKNDWSQKNTPDDLHIDLSKGHEVWINQGDPTIYYNLNDAEAAAVPAVSNAYLDNEKTVLAKLSSPMTLTDGASGFTVTDETTGEQIPVVSAESANPVTAVLVGDFQQALGASGNWSPDDDHTKLSKINSNLYQFTGTLPAGTYQYKVALDHSWSASYPNNNVNLTVPAGGTKVTFTYIPSTHQVFDSINNPDQTFPSSSAGTQSDLVQLTLASAPDITHDLQVVADGYKGGKILPRNVLNLPRYYYSGNDLGNVYSNKATAFRVWAPTASDVQLLLYNSETGPVTKQLEMQKSDNGTWKLKVPGNLKNWYYLYQVTVNGKTQTAVDPYVRAISVNATRGMIVDLEDTNPPGWKEDHQQTPANPVDEVIYEVHVRDFSIDANSGMKNKGKYLAFTEHGTKGPDGVKTGIDSLKELGINAVQLQPIEEFASIDETQPNMYNWGYDPRNYNVPEGAYATTPEGTARITEFKQLIQSIHKDRIAINMDVVYNHTFATQISDFDKIVPEYYYRTDDAGNYTNGSGTGNEIAAERPMVQKFIIDSLKYWVNEYHIDGFRFDLMALLGKDTMSKAASELHAINPGIALYGEPWTGGTSALPEDQLLTKGAQKGMGVAVFNDNLRNALDGNVFDSSAQGFATGATGLTDAIKRGVEGSINDFTSSPSETINYVSCHDNYTLWDKIALSNPNDSEADRIKMDELAQAVVMTSQGVPFMQGGEEMLRTKGGNDNSYNAGDTVNEFDWSRKAQYPDVFNYYSGLIHLRLDHPAFRMTTANEINSHLQFLNSPENTVAYELTDHVNKDKWGNIIVVYNPNKTAATINLPSGKWAINATSGKVGESTLGQAEGSVQVPGISMMILHQEVSPDHGKK

SEQ ID NO: 49085 - protein, 927 aa, Bacillus deramificans
SSTEVIVHYHRFDANYANWDLWMWPYQPVNGNGAAYEFSGTDEFGVTADVQVPGDNTQVGLIVRKNDWSQKNTPDDLHIDLSKGHEVWINQGDPTIYYNLNDAEAAAVPAVSNAYLDNEKTVLAKLSSPMTLTDGASGFTVTDETTGEQIPVVSAESANPVTAVLVGDFQQALGASGNWSPDDDHTKLSKINSNLYQFTGTLPAGTYQYKVALDHSWSASYPNNNVNLTVPAGGTKVTFTYIPSTHQVFDSINNPDQTFPSSSAGTQSDLVQLTLASAPDITHDLQVVADGYKGGKILPRNVLNLPRYYYSGNDLGNVYSNKATAFRVWAPTASDVQLLLYNSETGPVTKALEMQKSDNGTWKLKVPGNLKNWYYLYQVTVNGKTQTAVDPYVRAISVNATRGMIVDLEDTNPPGWKEDHQQTPANPVDEVIYEVHVRDFSIDANSGMKNKGKYLAFTEHGTKGPDGVKTGIDSLKELGINAVQLQPIEEFASIDETQPNMYNWGYDPRNYNVPEGAYATTPEGTARITEFKQLIQSIHKDRIAINMDVVYNHTFATQISDFDKIVPEYYYRTDDAGNYTNGSGTGNEIAAERPMVQKFIIDSLKYWVNEYHIDGFRFDLMALLGKDTMSKAASELHAINPGIALYGEPWTGGTSALPEDQLLTKGAQKGMGVAVFNDNLRNALDGNVFDSSAQGFATGATGLTDAIKRGVEGSINDFTSSPSETINYVSCHDNYTLWDKIALSNPNDSEADRIKMDELAQAVVMTSQGVPFMQGGEEMLRTKGGNDNSYNAGDTVNEFDWSRKAQYPDVFNYYSGLIHLRLDHPAFRMTTANEINSHLQFLNSPENTVAYELTDHVNKDKWGNIIVVYNPNKTAATINLPSGKWAINATSGKVGESTLGQAEGSVQVPGISMMILHQEVSPDHGKK

SEQ ID NO: 49086 - protein, 927 aa, Bacillus deramificans
SSTEVIVHYHRFDANYANWDLWMWPKQPVNGNGAAYEFSGTDEFGVTADVQVPGDNTQVGLIVRKNDWSQKNTPDDLYIDLSKGHEVWINQGDPTIYYNLNDAEAAAVPAVSNAYLDNEKTVLAKLSSPMTLTDGASGFTVTDETTGEQIPVVSAESANPVTAVLVGDFQQALGASGNWSPDDDATKLSKINSNLYQFTGTLPAGTYQYKIALDHSWSASYPNNNVNLTVPAGGTKVTFTYIPSTHQVFDSINNPDATFPSSSAGTQSDLVQLTLASAPDITHDLRVVADGYKGGKILPRNVLNLPRYYYSGNDLGNVYSPKATAFRVWAPTASDVQLLLYNSETGPVTKALEMRKSDNGTWKLKVPGNLKNWYYLYQVTVNGKTQTAVDPYVRAISVNATRGMIVDLEDTNPPGWKEDHQQTPANPVDEVIYEVHVRDFSIDANSGMKNKGKYLAFTEHGTKGPDGVKTGIDSLKELGINAVQLQPIEEFASIDETQPNMYNWGYDPRNYNVPEGAYATTPEGTARITEFKQLIQSIHKDRIAINMDVVYNHTFATQISDFDKIVPEYYYRTDDAGNYTNGSGTGNEIAAERPMVQKFIIDSLKYWVNEYHIDGFRFDLMALLGKDTMSKAASELHAINPGIALYGEPWTGGTSALPEDQLLTKGAQKGMGVAVFNDNLRNALSGNVFDSSAQGFATGATGLTDAIKRGVEGSINDFTSSPSETINYVSCHDNYTLWDKIALSNPNDSEADRIKMDELAQAVVMTSQGVPFMQGGEEMLRTKGGNDNSYNAGDTVNEFDWSRKAQYPDVFNYYSGLIHLRLDHPAFRMTTANEINSHLQFLNSPENTVAYELTDHVNKDKWGNIIVVYNPNKTAATINLPSGKWAINATSGKVGESTLGQAEGSVQVPGISMMILHQEVSPDHGKK

SEQ ID NO: 49087 - protein, 927 aa, Bacillus deramificans
SSTEVIVHYHRFDANYAGWDLWMWPKQPVNGNGAAYEFSGTDEFGVTADVQVPGDNTQVGLIVRKNDWSQKNTPDDLYIDLSKGHEVWINQGDPTIYYNLNDAEAAAVPAVSNAYLDNEKTVLAKLSSPMTLTDGASGFTVTDETTGEQIPVVSAESANPVTAVLVGDFQQALGASGNWSPDDDATKLSKINSNLYQFTGTLPAGTYQYKIALDHSWSASYPNNNVNLTVPAGGTKVTFTYIPSTHQVFDSINNPDATFPSSSAGTQSDLVQLTLASAPDITHDLRVVADGYKGGKILPRNVLNLPRYYYSGNDLGNVYSPKATAFRVWAPTASDVQLLLYNSETGPVTKALEMRKSDNGTWKLKVPGNLKNWYYLYQVTVNGKTQTAVDPYVRAISVNATRGMIVDLEDTNPPGWKEDHQQTPANPVDEVIYEVHVRDFSIDANSGMKNKGKYLAFTEHGTKGPDGVKTGIDSLKELGINAVQLLPIEEFASIDETQPNMYNWGYDPRNYNVPEGAYATTPEGTARITEFKQLIQSIHKDRIAINMDVVYNHTFATQISDFDKIVPEYYYRTDDAGNYTNGSGTGNEIAAERPMVQKFIIDSLKYWVNEYHIDGFRFDLMALLGKDTMSKAASELHAINPGIALYGEPWTGGTSALPEDQLLTKGAQKGMGVAVFNDNLRNALSGNVFDSSAQGFATGATGLTDAIKRGVEGSINDFTSSPSETINYVSSHDNYTLWDKIALSNPNDSEADRIKMDELAQAVVMTSQGVPFMQGGEEMLRTKGGNDNSYNAGDTVNRFDWSRKAQYPDVFNYYSGLIHLRLDHPAFRMTTANEINSHLQFLNSPENTVAYELTDHVNKDKWGNIIVVYNPNKTAATINLPSGKWAINATSGKVGESTLGQAEGSVQVPGISMMILHQEVSPDHGKK

SEQ ID NO: 49088 - protein, 927 aa, Bacillus deramificans
SSTEVIVHYHRFDANYAGWDLWMWPKQPVNGNGAAYEFSGTDEFGVTADVQVPGDNTQVGLIVRKNDWSQKNTPDDLYIDLSKGHEVWINQGDPTIYYNLNDAEAAAVPAVSNAYLDNEKTVLAKLSSPMTLTDGASGFTVTDETTGEQIPVVSAESANPVTAVLVGDFQQALGASGNWSPDDDATKLSKINSNLYQFTGTLPAGTYQYKIALDHSWSASYPNNNVNLTVPAGGTKVTFTYIPSTHQVFDSINNPDATFPSSSAGTQSDLVQLTLASAPDITHDLRVVADGYKGRKILPRNVLNLPRYYYSGNDLGNVYSPKATAFRVWAPTASDVQLLLYNSETGPVTKALEMRKSDNGTWKLKVPGNLKNWYYLYQVTVNGKTQTAVDPYVRAISVNATRGMIVDLEDTNPPGWKEDHQQTPANPVDEVIYEVHVRDFSIDANSGMKNKGKYLAFTEHGTKGPDGVKTGIDSLKELGINAVQLQPIEEFASIDETQPNMYNWGYDPRNYNVPEGAYATTPEGTARITEFKQLIQSIHKDRIAINMDVVYNHTFATQISDFDKIVPEYYYRTDDAGNYTNGSGTGNEIAAERPMVQKFIIDSLKYWVNEYHIDGFRFDLMALLGKDTMSKAASELHAINPGIALYGEPWTGGTSALPEDQLLTKGAQKGMGVAVFNDNLRNALSGNVFDSSAQGFATGATGLTDAIKRGVEGSINDFTSSPSETINYVSCHDNYTLWDKIALSNPNDSEADRIKMDELAQAVVMTSQGVPFMQGGEEMLRTKGGNDNSYNAGDTVNEFDWSRKAQYPDVFNYYSGLIHLRLDHPAFRMTTANEINSHLQFLNSPENTVAYELTDHVNKDKWGNIIVVYNPNKTAATINLPSGKWAINATSGKVGESTLGQAEGSVQVPGISMMILHQEVSPDHGKK

SEQ ID NO: 49089 - protein, 927 aa, Bacillus deramificans
SSTEVIVHYHRFDANYANWDLWMWPYQPVNGNGAAYEFSGTDEFGVTADVQVPGDNTQVGLIVRKNDWSQKNTPDDLHIDLSKGHEVWINQGDPTIYYNLNDAEAAAVPAVSNAYLDNEKTVLAKLSSPMTLTDGASGFTVTDETTGEQIPVVSAESANPVTAVLVGDFQQALGASGNWSPDDDHTKLSKINSNLYQFTGTLPAGTYQYKVALDHSWSASYPNNNVNLTVPAGGTKVTFTYIPSTHQVFDSINNPDQTFPSSSAGTQSDLVQLTLASAPDITHDLQVVADGYKGGKILPRNVLNLPRYYYSGNDLGNVYSNKATAFRVWAPTASDVQLLLYNSETGPVTKQLEMRKSDNGTWKLKVPGNLKNWYYLYQVTVNGKTQTAVDPYVRAISVNATRGMIVDLEDTNPPGWKEDHQQTPANPVDEVIYEVHVRDFSIDANSGMKNKGKYLAFTEHGTKGPDGVKTGIDSLKELGINAVQLQPIEEFASIDETQPNMYNWGYDPRNYNVPEGAYATTPEGTARITEFKQLIQSIHKDRIAINMDVVYNHTFATQISDFDKIVPEYYYRTDDAGNYTNGSGTGNEIAAERPMVQKFIIDSLKYWVNEYHIDGFRFDLMALLGKDTMSKAASELHAINPGIALYGEPWTGGTSALPEDQLLTKGAQKGMGVAVFNDNLRNALDGNVFDSSAQGFATGATGLTDAIKRGVEGSINDFTSSPSETINYVSCHDNYTLWDKIALSNPNDSEADRIKMDELAQAVVMTSQGVPFMQGGEEMLRTKGGNDNSYNAGDTVNEFDWSRKAQYPDVFNYYSGLIHLRLDHPAFRMTTANEINSHLQFLNSPENTVAYELTDHVNKDKWGNIIVVYNPNKTAATINLPSGKWAINATSGKVGESTLGQAEGSVQVPGISMMILHQEVSPDHGKK

SEQ ID NO: 49090 - protein, 927 aa, Bacillus deramificans
SSTEVIVHYHRFDANYANWDLWMWPYQPVNGNGAAYEFSGTDEFGVTADVQVPGDNTQVGLIVRKNDWSQKNTPDDLHIDLSKGHEVWINQGDPTIYYNLNDAEAAAVPAVSNAYLDNEKTVLAKLSSPMTLTDGASGFTVTDETTGEQIPVVSAESANPVTAVLVGDFQQALGASGNWSPDDDATKLSKINSNLYQFTGTLPAGTYQYKIALDHSWSASYPNNNVNLTVPAGGTKVTFTYIPSTHQVFDSINNPDATFPSSSAGTQSDLVQLTLASAPDITHDLRVVADGYKGGKILPRNVLNLPRYYYSGNDLGNVYSPKATAFRVWAPTASDVQLLLYNSETGPVTKALEMRKSDNGTWKLKVPGNLKNWYYLYQVTVNGKTQTAVDPYVRAISVNATRGMIVDLEDTNPPGWKEDHQQTPANPVDEVIYEVHVRDFSIDANSGMKNKGKYLAFTEHGTKGPDGVKTGIDSLKELGINAVQLQPIEEFASIDETQPNMYNWGYDPRNYNVPEGAYATTPEGTARITEFKQLIQSIHKDRIAINMDVVYNHTFATQISDFDKIVPEYYYRTDDAGNYTNGSGTGNEIAAERPMVQKFIIDSLKYWVNEYHIDGFRFDLMALLGKDTMSKAASELHAINPGIALYGEPWTGGTSALPEDQLLTKGAQKGMGVAVFNDNLRNALDGNVFDSSAQGFATGATGLTDAIKRGVEGSINDFTSSPSETINYVSCHDNYTLWDKIALSNPNDSEADRIKMDELAQAVVMTSQGVPFMQGGEEMLRTKGGNDNSYNAGDTVNEFDWSRKAQYPDVFNYYSGLIHLRLDHPAFRMTTANEINSHLQFLNSPENTVAYELTDHVNKDKWGNIIVVYNPNKTAATINLPSGKWAINATSGKVGESTLGQAEGSVQVPGISMMILHQEVSPDHGKK

SEQ ID NO: 49091 - protein, 927 aa, Bacillus deramificans
SSTEVIVHYHRFDANYANWDLWMWPYQPVNGNGAAYEFSGTDEFGVTADVQVPGDNTQVGLIVRKNDWSQKNTPDDLHIDLSKGHEVWINQGDPTIYYNLNDAEAAAVPAVSNAYLDNEKTVLAKLSSPMTLTDGASGFTVTDETTGEQIPVVSAESANPVTAVLVGDFQQALGASGNWSPDDDHTKLSKINSNLYQFTGTLPAGTYQYKIALDHSWSASYPNNNVNLTVPAGGTKVTFTYIPSTHQVFDSINNPDATFPSSSAGTQSDLVQLTLASAPDITHDLRVVADGYKGGKILPRNVLNLPRYYYSGNDLGNVYSNKATAFRVWAPTASDVQLLLYNSETGPVTKALEMRKSDNGTWKLKVPGNLKNWYYLYQVTVNGKTQTAVDPYVRAISVNATRGMIVDLEDTNPPGWKEDHQQTPANPVDEVIYEVHVRDFSIDANSGMKNKGKYLAFTEHGTKGPDGVKTGIDSLKELGINAVQLQPIEEFASIDETQPNMYNWGYDPRNYNVPEGAYATTPEGTARITEFKQLIQSIHKDRIAINMDVVYNHTFATQISDFDKIVPEYYYRTDDAGNYTNGSGTGNEIAAERPMVQKFIIDSLKYWVNEYHIDGFRFDLMALLGKDTMSKAASELHAINPGIALYGEPWTGGTSALPEDQLLTKGAQKGMGVAVFNDNLRNALDGNVFDSSAQGFATGATGLTDAIKRGVEGSINDFTSSPSETINYVSCHDNYTLWDKIALSNPNDSEADRIKMDELAQAVVMTSQGVPFMQGGEEMLRTKGGNDNSYNAGDTVNEFDWSRKAQYPDVFNYYSGLIHLRLDHPAFRMTTANEINSHLQFLNSPENTVAYELTDHVNKDKWGNIIVVYNPNKTAATINLPSGKWAINATSGKVGESTLGQAEGSVQVPGISMMILHQEVSPDHGKK

SEQ ID NO: 49092 - protein, 927 aa, Bacillus deramificans
SSTEVIVHYHRFDANYANWDLWMWPYQPVNGNGAAYEFSGTDEFGVTADVQVPGDNTQVGLIVRKNDWSQKNTPDDLHIDLSKGHEVWINQGDPTIYYNLNDAEAAAVPAVSNAYLDNEKTVLAKLSSPMTLTDGASGFTVTDETTGEQIPVVSAESANPVTAVLVGDFQQALGASGNWSPDDDHTKLSKINSNLYQFTGTLPAGTYQYKVALDHSWSASYPNNNVNLTVPAGGTKVTFTYIPSTHQVFDSINNPDQTFPSSSAGTQSDLVQLTLASAPDITHDLAVVADGYKGGKILPRNVLNLPRYYYSGNDLGNVYSNKATAFRVWAPTASDVQLLLYNSETGPVTKQLEMQKSDNGTWKLKVPGNLKNWYYLYQVTVNGKTQTAVDPYVRAISVNATRGMIVDLEDTNPPGWKEDHQQTPANPVDEVIYEVHVRDFSIDANSGMKNKGKYLAFTEHGTKGPDGVKTGIDSLKELGINAVQLQPIEEFASIDETQPNMYNWGYDPRNYNVPEGAYATTPEGTARITEFKQLIQSIHKDRIAINMDVVYNHTFATQISDFDKIVPEYYYRTDDAGNYTNGSGTGNEIAAERPMVQKFIIDSLKYWVNEYHIDGFRFDLMALLGKDTMSKAASELHAINPGIALYGEPWTGGTSALPEDQLLTKGAQKGMGVAVFNDNLRNALDGNVFDSSAQGFATGATGLTDAIKRGVEGSINDFTSSPSETINYVSCHDNYTLWDKIALSNPNDSEADRIKMDELAQAVVMTSQGVPFMQGGEEMLRTKGGNDNSYNAGDTVNEFDWSRKAQYPDVFNYYSGLIHLRLDHPAFRMTTANEINSHLQFLNSPENTVAYELTDHVNKDKWGNIIVVYNPNKTAATINLPSGKWAINATSGKVGESTLGQAEGSVQVPGISMMILHQEVSPDHGKK

SEQ ID NO: 49093 - protein, 926 aa, Bacillus deramificans
SSTEVIVHYHRFDANYAGWDLWMWPKQPVNGNGAAYEFSGTDEFGVTADVQVPGDNTQVGLIVRKNWSQKNTPDDLKIDLSKGHEVWINQGDPTIYYNLNDAEAAAVPAVSNAYLDNEKTVLAKLSSPMTLTDGASGFTVTDETTGEQIPVVSAESANPVTAVLVGDFQQALGASGNWSPDDDATKLSKINSNLYQFTGTLPAGTYQYKIALDHSWSASYPNNNVNLTVPAGGTKVTFTYIPSTHQVFDSINNPDATFPSSSAGTQSDLVQLTLASAPDITHDLRVVADGYKGGKILPRNVLNLPRYYYSGNDLGNVYSPKATAFRVWAPTASDVQLLLYNSETGPVTKALEMRKSDNGTWKLKVPGNLKNWYYLYQVTVNGKTQTAVDPYVRAISVNATRGMIVDLEDTNPPGWKEDHQQTPANPVDEVIYEVHVRDFSIDANSGMKNKGKYLAFTEHGTKGPDGVKTGIDSLKELGINAVQLQPIEEFASIDETQPNMYNWGYDPRNYNVPEGAYATTPEGTARITEFKQLIQSIHKDRIAINMDVVYNHTFATQISDFDKIVPEYYYRTDDAGNYTNGSGTGNEIAAERPMVQKFIIDSLKYWVNEYHIDGFRFDLMALLGKDTMSKAASELHAINPGIALYGEPWTGGTSALPEDQLLTKGAQKGMGVAVFNDNLRNALDGNVFDSSAQGFATGATGLTDAIKRGVEGSINDFTSSPSETINYVSCHDNYTLWDKIALSNPNDSEADRIKMDELAQAVVMTSQGVPFMQGGEEMLRTKGGNDNSYNAGDTVNEFDWSRKAQYPDVFNYYSGLIHLRLDHPAFRMTTANEINSHLQFLNSPENTVAYELTDHVNKDKWGNIIVVYNPNKTAATINLPSGKWAINATSGKVGESTLGQAEGSVQVPGISMMILHQEVSPDHGKK

SEQ ID NO: 49094 - protein, 927 aa, Bacillus deramificans
SSTEVIVHYHRFDANYAGWDLWMWPKQPVNGNGAAYEFSGTDEFGVTADVQVPGDNTQVGLIVRKNDWSQKNTPDDLYIDLSKGHEVWINQGDPTIYYNLNDAEAAAVPAVSNAYLDNEKTVLAKLSSPMTLTDGASGFTVTDETTGEQIPVVSAESANPVTAVLVGDFQQALGASGNWSPDDDATKLSKINSNLYQFTGTLPAGTYQYKIALDHSWSASYPNNNVNLTVPAGGTKVTFTYIPSTHQVFDSINNPDATFPSSSAGTQSDLVQLTLASAPDITHDLRVVADGYKGGKILPRNVLNLPRYYYSGNDLGNVYSPKATAFRVWAPTASDVQLLLYNSETGPVTKALEMRKSDNGTWKLKVPGNLKNWYYLYQVTVNGKTQTAVDPYVRAISVNATRGMIVDLEDTNPPGWKEDHQQTPANPVDEVIYEVHVRDFSIDANSGMKNKGKYLAFTEHGTKGPDGVKTGIDSLKELGINAVQLQPIEEFASIDETQPNMYNWGYDPRNYNVPEGAYATTPEGTARITEFKQLIQSIHKDRIAINMDVVYNHTFATQISDFDKIVPEYYYRTDDAGNYTNGSGTGNEIAAERPMVQKFIIDSLKYWVNEYHIDGFRFDLMALLGKDTMSKAASELHAINPGIALYGEPWTGGTSALPEDQLLTKGAQKGMGVAVFNDNLRNALSGNVFDSSAQGFATGATGLTDAIKRGVEGSINDFTSSPSETINYVSCHDNYTLWDKIALSNPNDSEADRIKMDELAQAVVMTSQGVPFMQGGEEMLRTKGGNDNSYNAGDTVNRFDWSRKAQYPDVFNYYSGLIHLRLDHPAFRMTTANEINSHLQFLNSPENTVAYELTDHVNKDKWGNIIVVYNPNKTAATINLPSGKWAINATSGKVGESTLGQAEGSVQVPGISMMILHQEVSPDHGKK

SEQ ID NO: 49095 - protein, 927 aa, Bacillus deramificans
SSTEVIVHYHRFDANYAGWDLWMWPKQPVNGNGAAYEFSGTDEFGVTADVQVPGDNTQVGLIVRKNDWSQKNTPDDLYIDLSKGHEVWINQGDPTIYYNLNDAEAAAVPAVSNAYLDNEKTVLAKLSSPMTLTDGASGFTVTDETTGEQIPVVSAESANPVTAVLVGDFQQALGASGNWSPDDDATKLSKINSNLYQFTGTLPAGTYQYKIALDHSWSASYPNNNVNLTVPAGGTKVTFTYIPSTHQVFDSINNPDATFPSSSAGTQSDLVQLTLASAPDITHDLRVVADGYKGGKILPRNVLNLPRYYYSGNDLGNVYSPKATAFRVWAPTASDVQLLLYNSETGPVTKALEMRKSDNGTWKLKVPGNLKNWYYLYQVTVNGKTQTAVDPYVRAISVNATRGMIVDLEDTNPPGWKEDHQQTPANPVDEVIYEVHVRDFSIDANSGMKNKGKYLAFTEHGTKGPDGVKTGIDSLKELGINAVQLQPIEEFASIDETQPNMYNWGYDPRNYNVPEGAYATTPEGTARITEFKQLIQSIHKDRIAINMDVVYNHTFATQISDFDKIVPEYYYRTDDAGNYTNGSGAGNEIAAERPMVQKFIIDSLKYWVNEYHIDGFRFDLMALLGKDTMSKAASELHAINPGIALYGEPWTGGTSALPEDQLLTKGAQKGMGVAVFNDNLRNALSGNVFDSSAQGFATGATGLTDAIKRGVEGSINDFTSSPSETINYVSCHDNYTLWDKIALSNPNDSEADRIKMDELAQAVVMTSQGVPFMQGGEEMLRTKGGNDNSYNAGDTVNEFDWSRKAQYPDVFNYYSGLIHLRLDHPAFRMTTANEINSHLQFLNSPENTVAYELTDHVNKDKWGNIIVVYNPNKTAATINLPSGKWAINATSGKVGESTLGQAEGSVQVPGISMMILHQEVSPDHGKK

SEQ ID NO: 49096 - protein, 927 aa, Bacillus deramificans
SSTEVIVHYHRFDANYAGWDLWMWPKQPVNGNGAAYEFSGTDEFGVTADVQVPGDNTQVGLIVRKNDWSQKNTPDDLYIDLSKGHEVWINQGDPTIYYNLNDAEAAAVPAVSNAYLDNEKTVLAKLSSPMTLTDGASGFTVTDETTGEQIPVVSAESANPVTAVLVGDFQQALGASGNWSPDDDATKLSKINSNLYQFTGTLPAGTYQYKIALDHSWSASYPNNNVNLTVPAGGTKVTFTYIPSTHQVFDSINNPDATFPSSSAGTQSDLVQLTLASAPDITHDLRVVADGYKGGKILPRNVLNLPRYYYSGNDLGNVYSPKATAFRVWAPTASDVQLLLYNSETGPVTKALEMRKSDNGTWKLKVPGNLKNWYYLYQVTVNGKTQTAVDPYVRAISVNATRGMIVDLEDTNPPGWKEDHQQTPANPVDEVIYEVHVRDFSIDANSGMKNKGKYLAFTEHGTKGPDGVKTGIDSLKELGINAVQLLPIEEFASIDETQPNMYNWGYDPRNYNVPEGAYATTPEGTARITEFKQLIQSIHKDRIAINMDVVYNHTFATQISDFDKIVPEYYYRTDDAGNYTNGSGTGNEIAAERPMVQKFIIDSLKYWVNEYHIDGFRFDLMALLGKDTMSKAASELHAINPGIALYGEPWTGGTSALPEDQLLTKGAQKGMGVAVFNDNLRNALSGNVFDSSAQGFATGATGLTDAIKRGVEGSINDFTSSPSETINYVSCHDNYTLWDKIALSNPNDSEADRIKMDELAQAVVMTSQGVPFMQGGEEMLRTKGGNDNSYNAGDTVNRFDWSRKAQYPDVFNYYSGLIHLRLDHPAFRMTTANEINSHLQFLNSPENTVAYELTDHVNKDKWGNIIVVYNPNKTAATINLPSGKWAINATSGKVGESTLGQAEGSVQVPGISMMILHQEVSPDHGKK

SEQ ID NO: 49097 - protein, 927 aa, Bacillus deramificans
SSTEVIVHYHRFDANYANWDLWMWPKQPVNGNGAAYEFSGTDEFGVTADVQVPGDNTQVGLIVRKNDWSQKNTPDDLYIDLSKGHEVWINQGDPTIYYNLNDAEAAAVPAVSNAYLDNEKTVLAKLSSPMTLTDGASGFTVTDETTGEQIPVVSAESANPVTAVLVGDFQQALGASGNWSPDDDATKLSKINSNLYQFTGTLPAGTYQYKIALDHSWSASYPNNNVNLTVPAGGTKVTFTYIPSTHQVFDSINNPDATFPSSSAGTQSDLVQLTLASAPDITHDLRVVADGYKGGKILPRNVLNLPRYYYSGNDLGNVYSPKATAFRVWAPTASDVQLLLYNSETGPVTKALEMRKSDNGTWKLKVPGNLKNWYYLYQVTVNGKTQTAVDPYVRAISVNATRGMIVDLEDTNPPGWKEDHQQTPANPVDEVIYEVHVRDFSIDANSGMKNKGKYLAFTEHGTKGPDGVKTGIDSLKELGINAVQLQPIEEFASIDETQPNMYNWGYDPRNYNVPEGAYATTPEGTARITEFKQLIQSIHKDRIAINMDVVYNHTFATQISDFDKIVPEYYYRTDDAGNYTNGSGTGNEIAAERPMVQKFIIDSLKYWVNEYHIDGFRFDLMALLGKDTMSKAASELHAINPGIALYGEPWTGGTSALPEDQLLTKGAQKGMGVAVFNDNLRNALSGNVFDSSAQGFATGATGLTDAIKRGVEGSINDFTSSPSETINYVSCHDNYTLWDKIALSNPNDSEADRIKMDELAQAVVMTSQGVPFMQGGEEMLRTKGGNDNSYNAGDTVNRFDWSRKAQYPDVFNYYSGLIHLRLDHPAFRMTTANEINSHLQFLNSPENTVAYELTDHVNKDKWGNIIVVYNPNKTAATINLPSGKWAINATSGKVGESTLGQAEGSVQVPGISMMILHQEVSPDHGKK

SEQ ID NO: 49098 - protein, 927 aa, Bacillus deramificans
SSTEVIVHYHRFDANYANWDLWMWPKQPVNGNGAAYEFSGTDEFGVTADVQVPGDNTQVGLIVRKNDWSQKNTPDDLYIDLSKGHEVWINQGDPTIYYNLNDAEAAAVPAVSNAYLDNEKTVLAKLSSPMTLTDGASGFTVTDETTGEQIPVVSAESANPVTAVLVGDFQQALGASGNWSPDDDATKLSKINSNLYQFTGTLPAGTYQYKIALDHSWSASYPNNNVNLTVPAGGTKVTFTYIPSTHQVFDSINNPDATFPSSSAGTQSDLVQLTLASAPDITHDLRVVADGYKGGKILPRNVLNLPRYYYSGNDLGNVYSPKATAFRVWAPTASDVQLLLYNSETGPVTKALEMRKSDNGTWKLKVPGNLKNWYYLYQVTVNGKTQTAVDPYVRAISVNATRGMIVDLEDTNPPGWKEDHQQTPANPVDEVIYEVHVRDFSIDANSGMKNKGKYLAFTEHGTKGPDGVKTGIDSLKELGINAVQLQPIEEFASIDETQPNMYNWGYDPRNYNVPEGAYATTPEGTARITEFKQLIQSIHKDRIAINMDVVYNHTFATQISDFDKIVPEYYYRTDDAGNYTNGSGAGNEIAAERPMVQKFIIDSLKYWVNEYHIDGFRFDLMALLGKDTMSKAASELHAINPGIALYGEPWTGGTSALPEDQLLTKGAQKGMGVAVFNDNLRNALSGNVFDSSAQGFATGATGLTDAIKRGVEGSINDFTSSPSETINYVSCHDNYTLWDKIALSNPNDSEADRIKMDELAQAVVMTSQGVPFMQGGEEMLRTKGGNDNSYNAGDTVNEFDWSRKAQYPDVFNYYSGLIHLRLDHPAFRMTTANEINSHLQFLNSPENTVAYELTDHVNKDKWGNIIVVYNPNKTAATINLPSGKWAINATSGKVGESTLGQAEGSVQVPGISMMILHQEVSPDHGKK

SEQ ID NO: 49099 - protein, 927 aa, Bacillus deramificans
SSTEVIVHYHRFDANYANWDLWMWPYQPVNGNGAAYEFSGTDEFGVTADVQVPGDNTQVGLIVRKNDWSQKNTPDDLHIDLSKGHEVWINQGDPTIYYNLNDAEAAAVPAVSNAYLDNEKTVLAKLSSPMTLTDGASGFTVTDETTGEQIPVVSAESANPVTAVLVGDFQQALGASGNWSPDDDHTKLSKINSNLYQFTGTLPAGTYQYKIALDHSWSASYPNNNVNLTVPAGGTKVTFTYIPSTHQVFDSINNPDQTFPSSSAGTQSDLVQLTLASAPDITHDLQVVADGYKGGKILPRNVLNLPRYYYSGNDLGNVYSNKATAFRVWAPTASDVQLLLYNSETGPVTKQLEMQKSDNGTWKLKVPGNLKNWYYLYQVTVNGKTQTAVDPYVRAISVNATRGMIVDLEDTNPPGWKEDHQQTPANPVDEVIYEVHVRDFSIDANSGMKNKGKYLAFTEHGTKGPDGVKTGIDSLKELGINAVQLQPIEEFASIDETQPNMYNWGYDPRNYNVPEGAYATTPEGTARITEFKQLIQSIHKDRIAINMDVVYNHTFATQISDFDKIVPEYYYRTDDAGNYTNGSGTGNEIAAERPMVQKFIIDSLKYWVNEYHIDGFRFDLMALLGKDTMSKAASELHAINPGIALYGEPWTGGTSALPEDQLLTKGAQKGMGVAVFNDNLRNALDGNVFDSSAQGFATGATGLTDAIKRGVEGSINDFTSSPSETINYVSCHDNYTLWDKIALSNPNDSEADRIKMDELAQAVVMTSQGVPFMQGGEEMLRTKGGNDNSYNAGDTVNEFDWSRKAQYPDVFNYYSGLIHLRLDHPAFRMTTANEINSHLQFLNSPENTVAYELTDHVNKDKWGNIIVVYNPNKTAATINLPSGKWAINATSGKVGESTLGQAEGSVQVPGISMMILHQEVSPDHGKK

SEQ ID NO: 49100 - protein, 927 aa, Bacillus deramificans
SSTEVIVHYHRFDANYAGWDLWMWPKQPVNGNGAAYEFSGTDEFGVTADVQVPGDNTQVGLIVRKNDWSQKNTPDDLYIDLSKGHEVWINQGDPTIYYNLNDAEAAAVPAVSNAYLDNEKTVLAKLSSPMTLTDGASGFTVTDETTGEQIPVVSAESANPVTAVLVGDFQQALGASGNWSPDDDATKLSKINSNLYQFTGTLPAGTYQYKIALDHSWSASYPNNNVNLTVPAGGTKVTFTYIPSTHQVFDSINNPDATFPSSSAGTQSDLVQLTLASAPDITHDLRVVADGYKGGKILPRNVLNLPRYYYSGNDLGNVYSPKATAFRVWAPTASDVQLLLYNSETGPVTKALEMRKSDNGTWKLKVPGNLKNWYYLYQVTVNGKTQTAVDPYVRAISVNATRGMIVDLEDTNPPGWKEDHQQTPANPVDEVIYEVHVRDFSIDANSGMKNKGKYLAFTEHGTKGPDGVKTGIDSLKELGINAVELQPIEEFASIDETQPNMYNWGYDPRNYNVPEGAYATTPEGTARITEFKQLIQSIHKDRIAINMDVVYNHTFATQISDFDKIVPEYYYRTDDAGNYTNGSGTGNEIAAERPMVQKFIIDSLKYWVNEYHIDGFRFDLMALLGKDTMSKAASELHAINPGIALYGEPWTGGTSALPEDQLLTKGAQKGMGVAVFNDNLRNALSGNVFDSSAQGFATGATGLTDAIKRGVEGSINDFTSSPSETINYVSCHDNYTLWDKIALSNPNDSEADRIKMDELAQAVVMTSQGVPFMQGGEEMLRTKGGNDNSYNAGDTVNRFDWSRKAQYPDVFNYYSGLIHLRLDHPAFRMTTANEINSHLQFLNSPENTVAYELTDHVNKDKWGNIIVVYNPNKTAATINLPSGKWAINATSGKVGESTLGQAEGSVQVPGISMMILHQEVSPDHGKK

SEQ ID NO: 49101 - protein, 927 aa, Bacillus deramificans
SSTEVIVHYHRFDANYAGWDLWMWPKQPVNGNGAAYEFSGTDEFGVTADVQVPGDNTQVGLIVRKNDWSQKNTPDDLYIDLSKGHEVWINQGDPTIYYNLNDAEAAAVPAVSNAYLDNEKTVLAKLSSPMTLTDGASGFTVTDETTGEQIPVVSAESANPVTAVLVGDFQQALGASGNWSPDDDATKLSKINSNLYQFTGTLPAGTYQYKIALDHSWSASYPNNNVNLTVPAGGTKVTFTYIPSTHQVFDSINNPDATFPSSSAGTQSDLVQLTLASAPDITHDLRVVADGYKGRKILPRNVLNLPRYYYSGNDLGNVYSPKATAFRVWAPTASDVQLLLYNSETGPVTKALEMRKSDNGTWKLKVPGNLKNWYYLYQVTVNGKTQTAVDPYVRAISVNATRGMIVDLEDTNPPGWKEDHQQTPANPVDEVIYEVHVRDFSIDANSGMKNKGKYLAFTEHGTKGPDGVKTGIDSLKELGINAVQLQPIEEFASIDETQPNMYNWGYDPRNYNVPEGAYATTPEGTARITEFKQLIQSIHKDRIAINMDVVYNHTFATQISDFDKIVPEYYYRTDDAGNYTNGSGAGNEIAAERPMVQKFIIDSLKYWVNEYHIDGFRFDLMALLGKDTMSKAASELHAINPGIALYGEPWTGGTSALPEDQLLTKGAQKGMGVAVFNDNLRNALSGNVFDSSAQGFATGATGLTDAIKRGVEGSINDFTSSPSETINYVSCHDNYTLWDKIALSNPNDSEADRIKMDELAQAVVMTSQGVPFMQGGEEMLRTKGGNDNSYNAGDTVNRFDWSRKAQYPDVFNYYSGLIHLRLDHPAFRMTTANEINSHLQFLNSPENTVAYELTDHVNKDKWGNIIVVYNPNKTAATINLPSGKWAINATSGKVGESTLGQAEGSVQVPGISMMILHQEVSPDHGKK

SEQ ID NO: 49102 - protein, 927 aa, Bacillus deramificans
SSTEVIVHYHRFDANYAGWDLWMWPKQPVNGNGAAYEFSGTDEFGVTADVQVPGDNTQVGLIVRKNDWSQKNTPDDLYIDLSKGHEVWINQGDPTIYYNLNDAEAAAVPAVSNAYLDNEKTVLAKLSSPMTLTDGASGFTVTDETTGEQIPVVSAESANPVTAVLVGDFQQALGASGNWSPDDDATKLSKINSNLYQFTGTLPAGTYQYKIALDHSWSASYPNNNVNLTVPAGGTKVTFTYIPSTHQVFDSINNPDATFPSSSAGTQSDLVQLTLASAPDITHDLRVVADGYKGGKILPRNVLNLPRYYYSGNDLGNVYSPKATAFRVWAPTASDVQLLLYNSETGPVTKALEMRKSDNGTWKLKVPGNLKNWYYLYQVTVNGKTQTAVDPYVRAISVNATRGMIVDLEDTNPPGWKEDHQQTPANPVDEVIYEVHVRDFSIDANSGMKNKGKYLAFTEHGTKGPDGVKTGIDSLKELGINAVQLQPIEEFASIDETQPNMYNWGYDPRNYNVPEGAYATTPEGTARITEFKQLIQSIHKDRIAINMDVVYNHTFATQISDFDKIVPEYYYRTDDAGNYTNGSGAGNEIAAERPMVQKFIIDSLKYWVNEYHIDGFRFDLMALLGKDTMSKAASELHAINPGIALYGEPWTGGTSALPEDQLLTKGAQKGMGVAVFNDNLRNALSGNVFDSSAQGFATGATGLTDAIKRGVEGSINDFTSSPSETINYVSCHDNYTLWDKIALSNPNDSEADRIKMDELAQAVVMTSQGVPFMQGGEEMLRTKGGNDNSYNAGDTVNRFDWSRKAQYPDVFNYYSGLIHLRLDHPAFRMTTANEINSHLQFLNSPENTVAYELTDHVNKDKWGNIIVVYNPNKTAATINLPSGKWAINATSGKVGESTLGQAEGSVQVPGISMMILHQEVSPDHGKK

SEQ ID NO: 49103 - protein, 927 aa, Bacillus deramificans
SSTEVIVHYHRFDANYAGWDLWMWPKQPVNGNGAAYEFSGTDEFGVTADVQVPGDNTQVGLIVRKNDWSQKNTPDDLYIDLSKGHEVWINQGDPTIYYNLNDAEAAAVPAVSNAYLDNEKTVLAKLSSPMTLTDGASGFTVTDETTGEQIPVVSAESANPVTAVLVGDFQQALGASGNWSPDDDATKLSKINSNLYQFTGTLPAGTYQYKIALDHSWSASYPNNNVNLTVPAGGTKVTFTYIPSTHQVFDSINNPDATFPSSSAGTQSDLVQLTLASAPDITHDLRVVADGYKGGKILPRNVLNLPRYYYSGNDLGNVYSPKATAFRVWAPTASDVQLLLYNSETGPVTKALEMRKSDNGTWKLKVPGNLKNWYYLYQVTVNGKTQTAVDPYVRAISVNATRGMIVDLEDTNPPGWKEDHQQTPANPVDEVIYEVHVRDFSIDANSGMKNKGKYLAFTEHGTKGPDGVKTGIDSLKELGINAVQLLPIEEFASIDETQPNMYNWGYDPRNYNVPEGAYATTPEGTARITEFKQLIQSIHKDRIAINMDVVYNHTFATGISDFDKIVPEYYYRTDDAGNYTNGSGTGNEIAAERPMVQKFIIDSLKYWVNEYHIDGFRFDLMALLGKDTMSKAASELHAINPGIALYGEPWTGGTSALPEDQLLTKGAQKGMGVAVFNDNLRNALSGNVFDSSAQGFATGATGLTDAIKRGVEGSINDFTSSPSETINYVSCHDNYTLWDKIALSNPNDSEADRIKMDELAQAVVMTSQGVPFMQGGEEMLRTKGGNDNSYNAGDTVNRFDWSRKAQYPDVFNYYSGLIHLRLDHPAFRMTTANEINSHLQFLNSPENTVAYELTDHVNKDKWGNIIVVYNPNKTAATINLPSGKWAINATSGKVGESTLGQAEGSVQVPGISMMILHQEVSPDHGKK

SEQ ID NO: 49104 - protein, 927 aa, Bacillus deramificans
SSTEVIVHYHRFDANYANWDLWMWPYQPVNGNGAAYEFSGTDEFGVTADVQVPGDNTQVGLIVRKNDWSQKNTPDDLHIDLSKGHEVWINQGDPTIYYNLNDAEAAAVPAVSNAYLDNEKTVLAKLSSPMTLTDGASGFTVTDETTGEQIPVVSAESANPVTAVLVGDFQQALGASGNWSPDDDHTKLSKINSNLYQFTGTLPAGTYQYKVALDHSWSASYPNNNVNLTVPAGGTKVTFTYIPSTHQVFDSINNPDQTFPSSSAGTQSDLVQLTLASAPDITHDLQVVADGYKGGKILPRNVLNLPRYYYSGNDLGNVYSNKATAFRVWAPTASDVQLLLYNSETGPVTKQLEMQKSDNGTWKLKVPGNLKNWYYLYQVTVNGKTQTAVDPYVRAISVNATRGMIVDLEDTNPPGWKEDHQQTPANPVDEVIYEVHVRDFSIDANSGMKNKGKYLAFTEHGTKGPDGVKTGIDSLKELGINAVQLQPIEEFASIDETQPNMYNWGYDPRNYNVPEGAYATTPEGTARITQLKQLIQSIHKDRIAINMDVVYNHTFATQISDFDKIVPEYYYRTDDAGNYTNGSGTGNEIAAERPMVQKFIIDSLKYWVNEYHIDGFRFDLMALLGKDTMSKAASELHAINPGIALYGEPWTGGTSALPEDQLLTKGAQKGMGVAVFNDNLRNALDGNVFDSSAQGFATGATGLTDAIKRGVEGSINDFTSSPSETINYVSCHDNYTLWDKIALSNPNDSEADRIKMDELAQAVVMTSQGVPFMQGGEEMLRTKGGNDNSYNAGDTVNEFDWSRKAQYPDVFNYYSGLIHLRLDHPAFRMTTANEINSHLQFLNSPENTVAYELTDHVNKDKWGNIIVVYNPNKTAATINLPSGKWAINATSGKVGESTLGQAEGSVQVPGISMMILHQEVSPDHGKK

SEQ ID NO: 49105 - protein, 927 aa, Bacillus deramificans
SSTEVIVHYHRFDANYAGWDLWMWPKQPVNGNGAAYEFSGTDEFGVTADVQVPGDNTQVGLIVRKNDWSQKNTPDDLYIDLSKGHEVWINQGDPTIYYNLNDAEAAAVPAVSNAYLDNEKTVLAKLSSPMTLTDGASGFTVTDETTGEQIPVVSAESANPVTAVLVGDFQQALGASGNWSPDDDATKLSKINSNLYQFTGTLPAGTYQYKIALDHSWSASYPNNNVNLTVPAGGTKVTFTYIPSTHQVFDSINNPDATFPSSSAGTQSDLVQLTLASAPDITHDLRVVADGYKGRKILPRNVLNLPRYYYSGNDLGNVYSPKATAFRVWAPTASDVQLLLYNSETGPVTKALEMRKSDNGTWKLKVPGNLKNWYYLYQVTVNGKTQTAVDPYVRAISVNATRGMIVDLEDTNPPGWKEDHQQTPANPVDEVIYEVHVRDFSIDANSGMKNKGKYLAFTEHGTKGPDGVKTGIDSLKELGINAVQLLPIEEFASIDETQPNMYNWGYDPRNYNVPEGAYATTPEGTARITEFKQLIQSIHKDRIAINMDVVYNHTFATQISDFDKIVPEYYYRTDDAGNYTNGSGAGNEIAAERPMVQKFIIDSLKYWVNEYHIDGFRFDLMALLGKDTMSKAASELHAINPGIALYGEPWTGGTSALPEDQLLTKGAQKGMGVAVFNDNLRNALSGNVFDSSAQGFATGATGLTDAIKRGVEGSINDFTSSPSETINYVSCHDNYTLWDKIALSNPNDSEADRIKMDELAQAVVMTSQGVPFMQGGEEMLRTKGGNDNSYNAGDTVNRFDWSRKAQYPDVFNYYSGLIHLRLDHPAFRMTTANEINSHLQFLNSPENTVAYELTDHVNKDKWGNIIVVYNPNKTAATINLPSGKWAINATSGKVGESTLGQAEGSVQVPGISMMILHQEVSPDHGKK

SEQ ID NO: 49106 - protein, 927 aa, Bacillus deramificans
SSTEVIVHYHRFDANYAGWDLWMWPKQPVNGNGAAYEFSGTDEFGVTADVQVPGDNTQVGLIVRKNDWSQKNTPDDLYIDLSKGHEVWINQGDPTIYYNLNDAEAAAVPAVSNAYLDNEKTVLAKLSSPMTLTDGASGFTVTDETTGEQIPVVSAESANPVTAVLVGDFQQALGASGNWSPDDDATKLSKINSNLYQFTGTLPAGTYQYKIALDHSWSASYPNNNVNLTVPAGGTKVTFTYIPSTHQVFDSINNPDATFPSSSAGTQSDLVQLTLASAPDITHDLRVVADGYKGGKILPRNVLNLPRYYYSGNDLGNVYSPKATAFRVWAPTASDVQLLLYNSETGPVTKALEMRKSDNGTWKLKVPGNLKNWYYLYQVTVNGKTQTAVDPYVRAISVNATRGMIVDLEDTNPPGWKEDEQQTPANPVDEVIYEVHVRDFSIDANSGMKNKGKYLAFTEHGTKGPDGVKTGIDSLKELGINAVQLLPIEEFASIDETQPNMYNWGYDPRNYNVPEGAYATTPEGTARITEFKQLIQSIHKDRIAINMDVVYNHTFATGISDFDKIVPEYYYRTDDAGNYTNGSGAGNEIAAERPMVQKFIIDSLKYWVNEYHIDGFRFDLMALLGKDTMSKAASELHAINPGIALYGEPWTGGTSALPEDQLLTKGAQKGMGVAVFNDNLRNALSGNVFDSSAQGFATGATGLTDAIKRGVEGSINDFTSSPSETINYVSCHDNYTLWDKIALSNPNDSEADRIKMDELAQAVVMTSQGVPFMQGGEEMLRTKGGNDNSYNAGDTVNRFDWSRKAQYPDVFNYYSGLIHLRLDHPAFRMTTANEINSHLQFLNSPENTVAYELTDHVNKDKWGNIIVVYNPNKTAATINLPSGKWAINATSGKVGESTLGQAEGSVQVPGISMMILHQEVSPDHGKK

SEQ ID NO: 49107 - protein, 934 aa, Bacillus acidopullulyticus
DGSTTTIIVHYFRPAGDYQPWSLWMWPEGGSGAEYDFNGTDSYGEVANVSIPGNPSQVGIIVRTQDWTKDVSADRYIDLSKGHEVWLVQGNSQIFYNEKDAEDAAKDSTSTEVIVHYHRFDSNYANWDLWMWPYQPVNGNGAAYEFSGKDDFGVKADVQVPGDDTQVGLIVRTNDWSQKNTSDDLHIDLTKGHEIWIVQGDPNIYYNLSDAQAAATPKVSNAYLDNEKTVLAKLTNPMTLSDGSSGFTVTDKTTGEQIPVTAATNANSASSSEQTDLVQLTLASAPDVSHTIQVGAAGYEAVNLIPRNVLNLPRYYYSGNDLGNVYSNKATAFRVWAPTASDVQLLLYNSETGPVTKQLEMQKSDNGTWKLKVPGNLKNWYYLYQVTVNGKTQTAVDPYVRAISVNATRGMIVDLEDTNPPGWKEDHQQTPANPVDEVIYEVHVRDFSIDANSGMKNKGKYLAFTEHGTKGPDNVKTGIDSLKELGINAVQLQPIEEFNSIDETQPNMYNWGYDPRNYNVPEGAYATTPEGTARITQLKQLIQSIHKDRIAINMDVVYNHTFNVGVSDFDKIVPQYYYRTDSAGNYTNGSGVGNEIATERPMVQKFVLDSVKYWVKEYHIDGFRFDLMALLGKDTMAKISKELHAINPGIVLYGEPWTGGTSGLSSDQLVTKGQQKGLGIGVFNDNLRNALDGNVFDSSAQGFATGATGLTDAIKNGVEGSINDFTSSPGETINYVTSHDNYTLWDKIALSNPNDSEADRIKMDELAQAVVMTSQGVPFMQGGEEMLRTKGGNDNSYNAGDTVNEFDWSRKAQYPDVFNYYSGLIHLRLDHPAFRMTTANEINSHLQFLNSPENTVAYELTDHVNKDKWGNIIVVYNPNKTAATINLPSGKWAINATSGKVGESTLGQAEGSVQVPGISMMILHQEVSPDHGKK

SEQ ID NO: 49108 - protein, 929 aa, Bacillus acidopullulyticus
DSTSTEVIVHYHRFDSNYANWDLWMWPYQPVNGNGAAYEFSGKDDFGVKADVQVPGDDTQVGLIVRTNDWSQKNTSDDLHIDLTKGHEIWIVQGDPNIYYNLSDAQAAATPKVSNAYLDNEKTVLAKLTNPMTLSDGSSGFTVTDKTTGEQIPVTSAVSANTVTAVLVGDLQQALGAGGNWAPTDDHTLMTKINANLYQFTGTLPAGTYQYKVALDHSWNASYPNNNVSLTVPSGGEKVTFTYIPSTHQVYDSINNSNQTFPASSAGIQTDLVQLTLASAPDVSHTIQVGAAGYEAVNLIPRNVLNLPRYYYSGNDLGNVYSNKATAFRVWAPTASDVQLLLYNSETGPVTKQLEMQKSDNGTWKLKVPGNLKNWYYLYQVTVNGKTQTAVDPYVRAISVNATRGMIVDLEDTNPPGWKEDHQQTPANPVDEVIYEVHVRDFSIDANSGMKNKGKYLAFTEHGTKGPDNVKTGIDSLKELGINAVQLQPIEEFNSIDETQPNMYNWGYDPRNYNVPEGAYATTPEGTARITQLKQLIQSIHKDRIAINMDVVYNHTFNVGVSDFDKIVPQYYYRTDSAGNYTNGSGVGNEIATERPMVQKFVLDSVKYWVKEYHIDGFRFDLMALLGKDTMAKISKELHAINPGIVLYGEPWTGGTSGLSSDQLVTKGQQKGLGIGVFNDNLRNALDGNVFDSSAQGFATGATGLTDAIKNGVEGSINDFTSSPGETINYVTSHDNYTLWDKIALSNPNDSEADRIKMDELAQAVVMTSQGVPFMQGGEEMLRTKGGNDNSYNAGDTVNEFDWSRKAQYPDVFNYYSGLIHLRLDHPAFRMTTANEINSHLQFLNSPENTVAYELTDHVNKDKWGNIIVVYNPNKTAATINLPSGKWAINATSGKVGESTLGQAEGSVQVPGISMMILHQEVSPDHGKK

SEQ ID NO: 49109 - protein, 929 aa, Bacillus sp.
DSTSTEVIVHYHRFDSNYANWDLWMWPYQPVNGNGAAYEFSGKDDFGVKADVQVPGDDTQVGLIVRTNDWSQKNTSDDLHIDLTKGHEIWIVQGDPNIYYNLSDAQAAATPKVSNAYLDNEKTVLAKLTNPMTLSDGSSGFTVTDKTTGEQIPVVSAESANPVTAVLVGDFQQALGASGNWSPDDDHTKLSKINSNLYQFTGTLPAGTYQYKVALDHSWSASYPNNNVNLTVPAGGTKVTFTYIPSTHQVFDSINNPDQTFPSSSAGTQSDLVQLTLASAPDVSHTIQVGAAGYEAVNLIPRNVLNLPRYYYSGNDLGNVYSNKATAFRVWAPTASDVQLLLYNSETGPVTKQLEMQKSDNGTWKLKVPGNLKNWYYLYQVTVNGKTQTAVDPYVRAISVNATRGMIVDLEDTNPPGWKEDHQQTPANPVDEVIYEVHVRDFSIDANSGMKNKGKYLAFTEHGTKGPDNVKTGIDSLKELGINAVQLQPIEEFNSIDETQPNMYNWGYDPRNYNVPEGAYATTPEGTARITQLKQLIQSIHKDRIAINMDVVYNHTFNVGVSDFDKIVPQYYYRTDSAGNYTNGSGVGNEIATERPMVQKFVLDSVKYWVKEYHIDGFRFDLMALLGKDTMAKISKELHAINPGIVLYGEPWTGGTSGLSSDQLVTKGQQKGLGIGVFNDNLRNALDGNVFDSSAQGFATGATGLTDAIKNGVEGSINDFTSSPGETINYVTSHDNYTLWDKIALSNPNDSEADRIKMDELAQAVVMTSQGVPFMQGGEEMLRTKGGNDNSYNAGDTVNEFDWSRKAQYPDVFNYYSGLIHLRLDHPAFRMTTANEINSHLQFLNSPENTVAYELTDHVNKDKWGNIIVVYNPNKTAATINLPSGKWAINATSGKVGESTLGQAEGSVQVPGISMMILHQEVSPDHGKK

SEQ ID NO: 49110 - protein, 927 aa, Bacillus deramificans
SSTEVIVHYHRFDANYANWDLWMWPYQPVNGNGAAYEFSGTDEFGVTADVQVPGDNTQVGLIVRKNDWSQKNTPDDLHIDLSKGHEVWINQGDPTIYYNLNDAEAAAVPAVSNAYLDNEKTVLAKLSSPMTLTDGASGFTVTDETTGEQIPVVSAESANPVTAVLVGDFQQALGASGNWSPDDDHTKLSKINSNLYQFTGTLPAGTYQYKVALDHSWSASYPNNNVNLTVPAGGTKVTFTYIPSTHQVFDSINNPDQTFPSSSAGTQSDLVQLTLASAPDITHDLQVVADGYKGGKILPRNVLNLPRYYYSGNDLGNVYSNKATAFRVWAPTASDVQLLLYNSETGPVTKQLEMQKSDNGTWKLKVPGNLKNWYYLYQVTVNGKTQTAVDPYVRAISVNATRGMIVDLEDTNPPGWKEDHQQTPANPVDEVIYEVHVRDFSIDANSGMKNKGKYLAFTEHGTKGPDNVKTGIDSLKELGINAVQLQPIEEFNSIDETQPNMYNWGYDPRNYNVPEGAYATTPEGTARITQLKQLIQSIHKDRIAINMDVVYNHTFSTLISDFDKIVPQYYYRTDDAGNYTNGSGVGNEFATEHPMARKFVLDSLKYWVTQYHIDGFRFDLMALLGKNTMAEASKELHAINPGIVLYGEPWTGGTSGITGDQLLTKGVQKGLGIGVFNDNLRNALDGNVFDSSAQGFATGATGLTDAIKNGVEGSINDFTSSPNETINYVTSHDNYTLWDKIALSNPNDSEADRIKMDELAQAVVMTSQGVPFMQGGEEMLRTKGGNDNSYNAGDTVNEFDWSRKAQYPDVFNYYSGLIHLRLDHPAFRMTTANEINSHLQFLNSPENTVAYELTDHVNKDKWGNIIVVYNPNKTAATINLPSGKWAINATSGKVGESTLGQAEGSVQVPGISMMILHQEVSPDHGKK

SEQ ID NO: 49111 - protein, 929 aa, Bacillus acidopullulyticus
DSTSTEVIVHYHRFDSNYANWDLWMWPYQPVNGNGAAYEFSGKDDFGVKADVQVPGDDTQVGLIVRTNDWSQKNTSDDLHIDLTKGHEIWIVQGDPNIYYNLSDAQAAATPKVSNAYLDNEKTVLAKLSSPMTLTDGASGFTVTDETTGEQIPVVSAESANPVTAVLVGDFQQALGASGNWSPDDDHTKLSKINSNLYQFTGTLPAGTYQYKVALDHSWSASYPNNNVNLTVPAGGTKVTFTYIPSTHQVFDSINNPDQTFPSSSAGTQSDLVQLTLASAPDITHDLQVVADGYKGGKILPRNVLNLPRYYYSGNDLGNVYSNKATAFRVWAPTASDVQLLLYNSETGPVTKQLEMQKSDNGTWKLKVPGNLKNWYYLYQVTVNGKTQTAVDPYVRAISVNATRGMIVDLEDTNPPGWKEDHQQTPANPVDEVIYEVHVRDFSIDANSGMKNKGKYLAFTEHGTKGPDNVKTGIDSLKELGINAVQLQPIEEFNSIDETQPNMYNWGYDPRNYNVPEGAYATTPEGTARITQLKQLIQSIHKDRIAINMDVVYNHTFNVGVSDFDKIVPQYYYRTDSAGNYTNGSGVGNEIATERPMVQKFVLDSVKYWVKEYHIDGFRFDLMALLGKDTMAKISKELHAINPGIVLYGEPWTGGTSGLSSDQLVTKGQQKGLGIGVFNDNLRNALDGNVFDSSAQGFATGATGLTDAIKNGVEGSINDFTSSPGETINYVTSHDNYTLWDKIALSNPNDSEADRIKMDELAQAVVMTSQGVPFMQGGEEMLRTKGGNDNSYNAGDTVNEFDWSRKAQYPDVFNYYSGLIHLRLDHPAFRMTTANEINSHLQFLNSPENTVAYELTDHVNKDKWGNIIVVYNPNKTAATINLPSGKWAINATSGKVGESTLGQAEGSVQVPGISMMILHQEVSPDHGKK

SEQ ID NO: 49112 - protein, 927 aa, Bacillus deramificans
SSTEVIVHYHRFDANYANWDLWMWPYQPVNGNGAAYEFSGTDEFGVTADVQVPGDNTQVGLIVRKNDWSQKNTPDDLHIDLSKGHEVWINQGDPTIYYNLNDAEAAAVPAVSNAYLDNEKTVLAKLSSPMTLTDGASGFTVTDETTGEQIPVVSAESANPVTAVLVGDFQQALGASGNWSPDDDHTKLSKINSNLYQFTGTLPAGTYQYKVALDHSWSASYPNNNVNLTVPAGGTKVTFTYIPSTHQVFDSINNPDATFPSSSAGTQSDLVQLTLASAPDITHDLRVVADGYKGGKILPRNVLNLPRYYYSGNDLGNVYSPKATAFRVWAPTASDVQLLLYNSETGPVTKALEMRKSDNGTWKLKVPGNLKNWYYLYQVTVNGKTQTAVDPYVRAISVNATRGMIVDLEDTNPPGWKEDHQQTPANPVDEVIYEVHVRDFSIDANSGMKNKGKYLAFTEHGTKGPDGVKTGIDSLKELGINAVQLQPIEEFASIDETQPNMYNWGYDPRNYNVPEGAYATTPEGTARITEFKQLIQSIHKDRIAINMDVVYNHTFSTLISDFDKIVPQYYYRTDDAGNYTNGSGVGNEFATEHPMARKFVLDSLKYWVTQYHIDGFRFDLMALLGKNTMAEASKELHAINPGIVLYGEPWTGGTSGITGDQLLTKGVQKGLGIGVFNDNLRNALDGNVFDSSAQGFATGATGLTDAIKRGVEGSINDFTSSPSETINYVSCHDNYTLWDKIALSNPNDSEADRIKMDELAQAVVMTSQGVPFMQGGEEMLRTKGGNDNSYNAGDTVNEFDWSRKAQYPDVFNYYSGLIHLRLDHPAFRMTTANEINSHLQFLNSPENTVAYELTDHVNKDKWGNIIVVYNPNKTAATINLPSGKWAINATSGKVGESTLGQAEGSVQVPGISMMILHQEVSPDHGKK

SEQ ID NO: 49113 - protein, 927 aa, Bacillus deramificans
SSTEVIVHYHRFDANYANWDLWMWPYQPVNGNGAAYEFSGTDEFGVTADVQVPGDNTQVGLIVRKNDWSQKNTPDDLHIDLSKGHEVWINQGDPTIYYNLNDAEAAAVPAVSNAYLDNEKTVLAKLSSPMTLTDGASGFTVTDETTGEQIPVVSAESANPVTAVLVGDFQQALGASGNWSPDDDHTKLSKINSNLYQFTGTLPAGTYQYKVALDHSWSASYPNNNVNLTVPAGGTKVTFTYIPSTHQVFDSINNPDATFPSSSAGTQSDLVQLTLASAPDITHDLQVVADGYKGGKILPRNVLNLPRYYYSGNDLGNVYSNKATAFRVWAPTASDVQLLLYNSETGPVTKALEMRKSDNGTWKLKVPGNLKNWYYLYQVTVNGKTQTAVDPYVRAISVNATRGMIVDLEDTNPPGWKEDHQQTPANPVDEVIYEVHVRDFSIDANSGMKNKGKYLAFTEHGTKGPDGVKTGIDSLKELGINAVQLQPIEEFASIDETQPNMYNWGYDPRNYNVPEGAYATTPEGTARITEFKQLIQSIHKDRIAINMDVVYNHTFSTLISDFDKIVPQYYYRTDDAGNYTNGSGVGNEFATEHPMARKFVLDSLKYWVTQYHIDGFRFDLMALLGKNTMAEASKELHAINPGIVLYGEPWTGGTSGITGDQLLTKGVQKGLGIGVFNDNLRNALDGNVFDSSAQGFATGATGLTDAIKRGVEGSINDFTSSPSETINYVSCHDNYTLWDKIALSNPNDSEADRIKMDELAQAVVMTSQGVPFMQGGEEMLRTKGGNDNSYNAGDTVNEFDWSRKAQYPDVFNYYSGLIHLRLDHPAFRMTTANEINSHLQFLNSPENTVAYELTDHVNKDKWGNIIVVYNPNKTAATINLPSGKWAINATSGKVGESTLGQAEGSVQVPGISMMILHQEVSPDHGKK

SEQ ID NO: 49114 - protein, 927 aa, Bacillus deramificans
SSTEVIVHYHRFDANYANWDLWMWPYQPVNGNGAAYEFSGTDEFGVTADVQVPGDNTQVGLIVRKNDWSQKNTPDDLHIDLSKGHEVWINQGDPTIYYNLNDAEAAAVPAVSNAYLDNEKTVLAKLSSPMTLTDGASGFTVTDETTGEQIPVVSAESANPVTAVLVGDFQQALGASGNWSPDDDHTKLSKINSNLYQFTGTLPAGTYQYKVALDHSWSASYPNNNVNLTVPAGGTKVTFTYIPSTHQVFDSINNPDATFPSSSAGTQSDLVQLTLASAPDITHDLRVVADGYKGGKILPRNVLNLPRYYYSGNDLGNVYSNKATAFRVWAPTASDVQLLLYNSETGPVTKALEMRKSDNGTWKLKVPGNLKNWYYLYQVTVNGKTQTAVDPYVRAISVNATRGMIVDLEDTNPPGWKEDHQQTPANPVDEVIYEVHVRDFSIDANSGMKNKGKYLAFTEHGTKGPDGVKTGIDSLKELGINAVQLQPIEEFASIDETQPNMYNWGYDPRNYNVPEGAYATTPEGTARITEFKQLIQSIHKDRIAINMDVVYNHTFSTLISDFDKIVPQYYYRTDDAGNYTNGSGVGNEFATEHPMARKFVLDSLKYWVTQYHIDGFRFDLMALLGKNTMAEASKELHAINPGIVLYGEPWTGGTSGITGDQLLTKGVQKGLGIGVFNDNLRNALDGNVFDSSAQGFATGATGLTDAIKRGVEGSINDFTSSPSETINYVSCHDNYTLWDKIALSNPNDSEADRIKMDELAQAVVMTSQGVPFMQGGEEMLRTKGGNDNSYNAGDTVNEFDWSRKAQYPDVFNYYSGLIHLRLDHPAFRMTTANEINSHLQFLNSPENTVAYELTDHVNKDKWGNIIVVYNPNKTAATINLPSGKWAINATSGKVGESTLGQAEGSVQVPGISMMILHQEVSPDHGKK

SEQ ID NO: 49115 - protein, 927 aa, Bacillus deramificans
SSTEVIVHYHRFDANYANWDLWMWPYQPVNGNGAAYEFSGTDEFGVTADVQVPGDNTQVGLIVRKNDWSQKNTPDDLHIDLSKGHEVWINQGDPTIYYNLNDAEAAAVPAVSNAYLDNEKTVLAKLSSPMTLTDGASGFTVTDETTGEQIPVVSAESANPVTAVLVGDFQQALGASGNWSPDDDHTKLSKINSNLYQFTGTLPAGTYQYKVALDHSWSASYPNNNVNLTVPAGGTKVTFTYIPSTHQVFDSINNPDATFPSSSAGTQSDLVQLTLASAPDITHDLQVVADGYKGGKILPRNVLNLPRYYYSGNDLGNVYSNKATAFRVWAPTASDVQLLLYNSETGPVTKQLEMQKSDNGTWKLKVPGNLKNWYYLYQVTVNGKTQTAVDPYVRAISVNATRGMIVDLEDTNPPGWKEDHQQTPANPVDEVIYEVHVRDFSIDANSGMKNKGKYLAFTEHGTKGPDGVKTGIDSLKELGINAVQLQPIEEFASIDETQPNMYNWGYDPRNYNVPEGAYATTPEGTARITEFKQLIQSIHKDRIAINMDVVYNHTFSTLISDFDKIVPQYYYRTDDAGNYTNGSGVGNEFATEHPMARKFVLDSLKYWVTQYHIDGFRFDLMALLGKNTMAEASKELHAINPGIVLYGEPWTGGTSGITGDQLLTKGVQKGLGIGVFNDNLRNALDGNVFDSSAQGFATGATGLTDAIKRGVEGSINDFTSSPSETINYVSCHDNYTLWDKIALSNPNDSEADRIKMDELAQAVVMTSQGVPFMQGGEEMLRTKGGNDNSYNAGDTVNEFDWSRKAQYPDVFNYYSGLIHLRLDHPAFRMTTANEINSHLQFLNSPENTVAYELTDHVNKDKWGNIIVVYNPNKTAATINLPSGKWAINATSGKVGESTLGQAEGSVQVPGISMMILHQEVSPDHGKK

SEQ ID NO: 49116 - protein, 927 aa, Bacillus deramificans
SSTEVIVHYHRFDANYANWDLWMWPKQPVNGNGAAYEFSGTDEFGVTADVQVPGDNTQVGLIVRKNDWSQKNTPDDLYIDLSKGHEVWINQGDPTIYYNLNDAEAAAVPAVSNAYLDNEKTVLAKLSSPMTLTDGASGFTVTDETTGEQIPVVSAESANPVTAVLVGDFQQALGASGNWSPDDDHTKLSKINSNLYQFTGTLPAGTYQYKIALDHSWSASYPNNNVNLTVPAGGTKVTFTYIPSTHQVFDSINNPDATFPSSSAGTQSDLVQLTLASAPDITHDLRVVADGYKGGKILPRNVLNLPRYYYSGNDLGNVYSNKATAFRVWAPTASDVQLLLYNSETGPVTKALEMRKSDNGTWKLKVPGNLKNWYYLYQVTVNGKTQTAVDPYVRAISVNATRGMIVDLEDTNPPGWKEDHQQTPANPVDEVIYEVHVRDFSIDANSGMKNKGKYLAFTEHGTKGPDGVKTGIDSLKELGINAVQLQPIEEFASIDETQPNMYNWGYDPRNYNVPEGAYATTPEGTARITEFKQLIQSIHKDRIAINMDVVYNHTFSTLISDFDKIVPQYYYRTDDAGNYTNGSGVGNEFATEHPMARKFVLDSLKYWVTQYHIDGFRFDLMALLGKNTMAEASKELHAINPGIVLYGEPWTGGTSGITGDQLLTKGVQKGLGIGVFNDNLRNALDGNVFDSSAQGFATGATGLTDAIKRGVEGSINDFTSSPSETINYVSCHDNYTLWDKIALSNPNDSEADRIKMDELAQAVVMTSQGVPFMQGGEEMLRTKGGNDNSYNAGDTVNEFDWSRKAQYPDVFNYYSGLIHLRLDHPAFRMTTANEINSHLQFLNSPENTVAYELTDHVNKDKWGNIIVVYNPNKTAATINLPSGKWAINATSGKVGESTLGQAEGSVQVPGISMMILHQEVSPDHGKK

SEQ ID NO: 49117 - protein, 927 aa, Bacillus acidopullulyticus
SSTEVIVHYHRFDANYANWDLWMWPYQPVNGNGAAYEFSGTDEFGVTADVQVPGDNTQVGLIVRKNDWSQKNTPDDLHIDLSKGHEVWINQGDPTIYYNLNDAEAAAVPAVSNAYLDNEKTVLAKLSSPMTLTDGASGFTVTDETTGEQIPVVSAESANPVTAVLVGDFQQALGASGNWSPDDDHTKLSKINSNLYQFTGTLPAGTYQYKVALDHSWSASYPNNNVNLTVPAGGTKVTFTYIPSTHQVFDSINNPDQTFPSSSAGTQSDLVQLTLASAPDITHDLQVVADGYKGGKILPRNVLNLPRYYYSGNDLGNVYSNKATAFRVWAPTASDVQLLLYNSETGPVTKQLEMQKSDNGTWKLKVPGNLKNWYYLYQVTVNGKTQTAVDPYVRAISVNATRGMIVDLEDTNPPGWKEDHQQTPANPVDEVIYEVHVRDFSIDANSGMKNKGKYLAFTEHGTKGPDNVKTGIDSLKELGINAVQLQPIEEFASIDETQPNMYNWGYDPRNYNVPEGAYATTPEGTARITQLKQLIQSIHKDRIAINMDVVYNHTFNVGVSDFDKIVPQYYYRTDSAGNYTNGSGCGNEIASERPMVQKFVLDSVKYWVKEYHIDGFRFDLMALLGKDTMAKISKELHAINPGIVLYGEPWTGGTSGLSSDQLVTKGQQKGLGIGVFNDNLRNALDGNVFDSSAQGFATGATGLTDAIKRGVEGSINDFTSSPSETINYVSCHDNYTLWDKIALSNPNDSEADRIKMDELAQAVVMTSQGVPFMQGGEEMLRTKGGNDNSYNAGDTVNEFDWSRKAQYPDVFNYYSGLIHLRLDHPAFRMTTANEINSHLQFLNSPENTVAYELTDHVNKDKWGNIIVVYNPNKTAATINLPSGKWAINATSGKVGESTLGQAEGSVQVPGISMMILHQEVSPDHGKK

SEQ ID NO: 49118 - protein, 927 aa, Bacillus deramificans
SSTEVIVHYHRFDANYANWDLWMWPKQPVNGNGAAYEFSGTDEFGVTADVQVPGDNTQVGLIVRKNDWSQKNTPDDLYIDLSKGHEVWINQGDPTIYYNLNDAEAAAVPAVSNAYLDNEKTVLAKLSSPMTLTDGASGFTVTDETTGEQIPVVSAESANPVTAVLVGDFQQALGASGNWSPDDDATKLSKINSNLYQFTGTLPAGTYQYKIALDHSWSASYPNNNVNLTVPAGGTKVTFTYIPSTHQVFDSINNPDATFPSSSAGTQSDLVQLTLASAPDITHDLRVVADGYKGGKILPRNVLNLPRYYYSGNDLGNVYSNKATAFRVWAPTASDVQLLLYNSETGPVTKALEMRKSDNGTWKLKVPGNLKNWYYLYQVTVNGKTQTAVDPYVRAISVNATRGMIVDLEDTNPPGWKEDHQQTPANPVDEVIYEVHVRDFSIDANSGMKNKGKYLAFTEHGTKGPDGVKTGIDSLKELGINAVQLQPIEEFASIDETQPNMYNWGYDPRNYNVPEGAYATTPEGTARITEFKQLIQSIHKDRIAINMDVVYNHTFSTLISDFDKIVPQYYYRTDDAGNYTNGSGVGNEFATEHPMARKFVLDSLKYWVTQYHIDGFRFDLMALLGKNTMAEASKELHAINPGIVLYGEPWTGGTSGITGDQLLTKGVQKGLGIGVFNDNLRNALDGNVFDSSAQGFATGATGLTDAIKRGVEGSINDFTSSPSETINYVSCHDNYTLWDKIALSNPNDSEADRIKMDELAQAVVMTSQGVPFMQGGEEMLRTKGGNDNSYNAGDTVNEFDWSRKAQYPDVFNYYSGLIHLRLDHPAFRMTTANEINSHLQFLNSPENTVAYELTDHVNKDKWGNIIVVYNPNKTAATINLPSGKWAINATSGKVGESTLGQAEGSVQVPGISMMILHQEVSPDHGKK

SEQ ID NO: 49119 - protein, 927 aa, Bacillus deramificans
SSTEVIVHYHRFDANYANWDLWMWPKQPVNGNGAAYEFSGTDEFGVTADVQVPGDNTQVGLIVRKNDWSQKNTPDDLYIDLSKGHEVWINQGDPTIYYNLNDAEAAAVPAVSNAYLDNEKTVLAKLSSPMTLTDGASGFTVTDETTGEQIPVVSAESANPVTAVLVGDFQQALGASGNWSPDDDATKLSKINSNLYQFTGTLPAGTYQYKIALDHSWSASYPNNNVNLTVPAGGTKVTFTYIPSTHQVFDSINNPDATFPSSSAGTQSDLVQLTLASAPDITHDLRVVADGYKGGKILPRNVLNLPRYYYSGNDLGNVYSPKATAFRVWAPTASDVQLLLYNSETGPVTKALEMRKSDNGTWKLKVPGNLKNWYYLYQVTVNGKTQTAVDPYVRAISVNATRGMIVDLEDTNPPGWKEDHQQTPANPVDEVIYEVHVRDFSIDANSGMKNKGKYLAFTEHGTKGPDGVKTGIDSLKELGINAVQLQPIEEFASIDETQPNMYNWGYDPRNYNVPEGAYATTPEGTARITEFKQLIQSIHKDRIAINMDVVYNHTFSTLISDFDKIVPQYYYRTDDAGNYTNGSGVGNEFATEHPMARKFVLDSLKYWVTQYHIDGFRFDLMALLGKNTMAEASKELHAINPGIVLYGEPWTGGTSGITGDQLLTKGVQKGLGIGVFNDNLRNALDGNVFDSSAQGFATGATGLTDAIKRGVEGSINDFTSSPSETINYVSCHDNYTLWDKIALSNPNDSEADRIKMDELAQAVVMTSQGVPFMQGGEEMLRTKGGNDNSYNAGDTVNEFDWSRKAQYPDVFNYYSGLIHLRLDHPAFRMTTANEINSHLQFLNSPENTVAYELTDHVNKDKWGNIIVVYNPNKTAATINLPSGKWAINATSGKVGESTLGQAEGSVQVPGISMMILHQEVSPDHGKK

SEQ ID NO: 49120 - protein, 927 aa, unidentified
SSTEVIVHYHRFDANYANWDLWMWPYQPVNGNGAAYEFSGTDEFGVTADVQVPGDNTQVGLIVRKNDWSQKNTPDDLHIDLSKGHEVWINQGDPTIYYNLNDAEAAAVPAVSNAYLDNEKTVLAKLSSPMTLTDGASGFTVTDETTGEQIPVVSAESANPVTAVLVGDFQQALGASGNWSPDDDHTKLSKINSNLYQFTGTLPAGTYQYKVALDHSWSASYPNNNVNLTVPAGGTKVTFTYIPSTHQVFDSINNPDQTFPSSSAGTQSDLVQLTLASAPDITHDLQVVADGYKGGKILPRNVLNLPRYYYSGNDLGNVYSNKATAFRVWAPTASDVQLLLYNSETGPVTKQLEMQKSDNGTWKLKVPGNLKNWYYLYQVTVNGKTQTAVDPYVRAISVNATRGMIVDLEDTNPPGWKEDHQQTPANPVDEVIYEVHVRDFSIDANSGMKNKGKYLAFTEHGTKGPDGVKTGIDSLKELGINAVQLQPIEEFASIDETQPNMYNWGYDPRNYNVPEGAYATTPEGTARITEFKQLIQSIHKDRIAINMDVVYNHTFSTLISDFDKIVPQYYYRTDDAGNYTNGSGVGNEFATEHPMARKFVLDSLKYWVTQYHIDGFRFDLMALLGKNTMAEASKELHAINPGIVLYGEPWTGGTSGITGDQLLTKGVQKGLGIGVFNDNLRNALDGNVFDSSAQGFATGATGLTDAIKRGVEGSINDFTSSPSETINYVSCHDNYTLWDKIALSNPNDSEADRIKMDELAQAVVMTSQGVPFMQGGEEMLRTKGGNDNSYNAGDTVNEFDWSRKAQYPDVFNYYSGLIHLRLDHPAFRMTTANEINSHLQFLNSPENTVAYELTDHVNKDKWGNIIVVYNPNKTAATINLPSGKWAINATSGKVGESTLGQAEGSVQVPGISMMILHQEVSPDHGKK

SEQ ID NO: 49121 - protein, 927 aa, Bacillus deramificans
SSTEVIVHYHRFDANYANWDLWMWPYQPVNGNGAAYEFSGTDEFGVTADVQVPGDNTQVGLIVRKNDWSQKNTPDDLHIDLSKGHEVWINQGDPTIYYNLNDAEAAAVPAVSNAYLDNEKTVLAKLSSPMTLTDGASGFTVTDETTGEQIPVVSAESANPVTAVLVGDFQQALGASGNWSPDDDHTKLSKINSNLYQFTGTLPAGTYQYKVALDHSWSASYPNNNVNLTVPAGGTKVTFTYIPSTHQVFDSINNPDQTFPSSSAGTQSDLVQLTLASAPDITHDLQVVADGYKGGKILPRNVLNLPRYYYSGNDLGNVYSNKATAFRVWAPTASDVQLLLYNSETGPVTKQLEMRKSDNGTWKLKVPGNLKNWYYLYQVTVNGKTQTAVDPYVRAISVNATRGMIVDLEDTNPPGWKEDHQQTPANPVDEVIYEVHVRDFSIDANSGMKNKGKYLAFTEHGTKGPDGVKTGIDSLKELGINAVQLQPIEEFASIDETQPNMYNWGYDPRNYNVPEGAYATTPEGTARITEFKQLIQSIHKDRIAINMDVVYNHTFSTLISDFDKIVPQYYYRTDDAGNYTNGSGVGNEFATEHPMARKFVLDSLKYWVTQYHIDGFRFDLMALLGKNTMAEASKELHAINPGIVLYGEPWTGGTSGITGDQLLTKGVQKGLGIGVFNDNLRNALDGNVFDSSAQGFATGATGLTDAIKRGVEGSINDFTSSPSETINYVSCHDNYTLWDKIALSNPNDSEADRIKMDELAQAVVMTSQGVPFMQGGEEMLRTKGGNDNSYNAGDTVNEFDWSRKAQYPDVFNYYSGLIHLRLDHPAFRMTTANEINSHLQFLNSPENTVAYELTDHVNKDKWGNIIVVYNPNKTAATINLPSGKWAINATSGKVGESTLGQAEGSVQVPGISMMILHQEVSPDHGKK

SEQ ID NO: 49122 - protein, 927 aa, Bacillus deramificans
SSTEVIVHYHRFDANYAGWDLWMWPKQPVNGNGAAYEFSGTDEFGVTADVQVPGDNTQVGLIVRKNDWSQKNTPDDLYIDLSKGHEVWINQGDPTIYYNLNDAEAAAVPAVSNAYLDNEKTVLAKLSSPMTLTDGASGFTVTDETTGEQIPVVSAESANPVTAVLVGDFQQALGASGNWSPDDDATKLSKINSNLYQFTGTLPAGTYQYKIALDHSWSASYPNNNVNLTVPAGGTKVTFTYIPSTHQVFDSINNPDATFPSSSAGTQSDLVQLTLASAPDITHDLRVVADGYKGRKILPRNVLNLPRYYYSGNDLGNVYSPKATAFRVWAPTASDVQLLLYNSETGPVTKALEMRKSDNGTWKLKVPGNLKNWYYLYQVTVNGKTQTAVDPYVRAISVNATRGMIVDLEDTNPPGWKEDHQQTPANPVDEVIYEVHVRDFSIDANSGMKNKGKYLAFTEHGTKGPDGVKTGIDSLKELGINAVQLQPIEEFASIDETQPNMYNWGYDPRNYNVPEGAYATTPEGTARITEFKQLIQSIHKDRIAINMDVVYNHTFSTLISDFDKIVPQYYYRTDDAGNYTNGSGVGNEFATEHPMARKFVLDSLKYWVTQYHIDGFRFDLMALLGKNTMAEASKELHAINPGIVLYGEPWTGGTSGITGDQLLTKGVQKGLGIGVFNDNLRNALSGNVFDSSAQGFATGATGLTDAIKRGVEGSINDFTSSPSETINYVSCHDNYTLWDKIALSNPNDSEADRIKMDELAQAVVMTSQGVPFMQGGEEMLRTKGGNDNSYNAGDTVNEFDWSRKAQYPDVFNYYSGLIHLRLDHPAFRMTTANEINSHLQFLNSPENTVAYELTDHVNKDKWGNIIVVYNPNKTAATINLPSGKWAINATSGKVGESTLGQAEGSVQVPGISMMILHQEVSPDHGKK

SEQ ID NO: 49123 - protein, 927 aa, Bacillus deramificans
SSTEVIVHYHRFDANYANWDLWMWPYQPVNGNGAAYEFSGTDEFGVTADVQVPGDNTQVGLIVRKNDWSQKNTPDDLHIDLSKGHEVWINQGDPTIYYNLNDAEAAAVPAVSNAYLDNEKTVLAKLSSPMTLTDGASGFTVTDETTGEQIPVVSAESANPVTAVLVGDFQQALGASGNWSPDDDHTKLSKINSNLYQFTGTLPAGTYQYKVALDHSWSASYPNNNVNLTVPAGGTKVTFTYIPSTHQVFDSINNPDQTFPSSSAGTQSDLVQLTLASAPDITHDLRVVADGYKGGKILPRNVLNLPRYYYSGNDLGNVYSNKATAFRVWAPTASDVQLLLYNSETGPVTKQLEMQKSDNGTWKLKVPGNLKNWYYLYQVTVNGKTQTAVDPYVRAISVNATRGMIVDLEDTNPPGWKEDHQQTPANPVDEVIYEVHVRDFSIDANSGMKNKGKYLAFTEHGTKGPDGVKTGIDSLKELGINAVQLQPIEEFASIDETQPNMYNWGYDPRNYNVPEGAYATTPEGTARITEFKQLIQSIHKDRIAINMDVVYNHTFSTLISDFDKIVPQYYYRTDDAGNYTNGSGVGNEFATEHPMARKFVLDSLKYWVTQYHIDGFRFDLMALLGKNTMAEASKELHAINPGIVLYGEPWTGGTSGITGDQLLTKGVQKGLGIGVFNDNLRNALDGNVFDSSAQGFATGATGLTDAIKRGVEGSINDFTSSPSETINYVSCHDNYTLWDKIALSNPNDSEADRIKMDELAQAVVMTSQGVPFMQGGEEMLRTKGGNDNSYNAGDTVNEFDWSRKAQYPDVFNYYSGLIHLRLDHPAFRMTTANEINSHLQFLNSPENTVAYELTDHVNKDKWGNIIVVYNPNKTAATINLPSGKWAINATSGKVGESTLGQAEGSVQVPGISMMILHQEVSPDHGKK

SEQ ID NO: 49124 - protein, 927 aa, Bacillus deramificans
SSTEVIVHYHRFDANYAGWDLWMWPKQPVNGNGAAYEFSGTDEFGVTADVQVPGDNTQVGLIVRKNDWSQKNTPDDLYIDLSKGHEVWINQGDPTIYYNLNDAEAAAVPAVSNAYLDNEKTVLAKLSSPMTLTDGASGFTVTDETTGEQIPVVSAESANPVTAVLVGDFQQALGASGNWSPDDDATKLSKINSNLYQFTGTLPAGTYQYKIALDHSWSASYPNNNVNLTVPAGGTKVTFTYIPSTHQVFDSINNPDATFPSSSAGTQSDLVQLTLASAPDITHDLRVVADGYKGGKILPRNVLNLPRYYYSGNDLGNVYSPKATAFRVWAPTASDVQLLLYNSETGPVTKALEMRKSDNGTWKLKVPGNLKNWYYLYQVTVNGKTQTAVDPYVRAISVNATRGMIVDLEDTNPPGWKEDHQQTPANPVDEVIYEVHVRDFSIDANSGMKNKGKYLAFTEHGTKGPDGVKTGIDSLKELGINAVQLQPIEEFASIDETQPNMYNWGYDPRNYNVPEGAYATTPEGTARITEFKQLIQSIHKDRIAINMDVVYNHTFSTLISDFDKIVPQYYYRTDDAGNYTNGSGVGNEFATEHPMARKFVLDSLKYWVTQYHIDGFRFDLMALLGKNTMAEASKELHAINPGIVLYGEPWTGGTSGITGDQLLTKGVQKGLGIGVFNDNLRNALSGNVFDSSAQGFATGATGLTDAIKRGVEGSINDFTSSPSETINYVSCHDNYTLWDKIALSNPNDSEADRIKMDELAQAVVMTSQGVPFMQGGEEMLRTKGGNDNSYNAGDTVNEFDWSRKAQYPDVFNYYSGLIHLRLDHPAFRMTTANEINSHLQFLNSPENTVAYELTDHVNKDKWGNIIVVYNPNKTAATINLPSGKWAINATSGKVGESTLGQAEGSVQVPGISMMILHQEVSPDHGKK

SEQ ID NO: 49125 - protein, 927 aa, Bacillus deramificans
SSTEVIVHYHRFDANYAGWDLWMWPKQPVNGNGAAYEFSGTDEFGVTADVQVPGDNTQVGLIVRKNDWSQKNTPDDLYIDLSKGHEVWINQGDPTIYYNLNDAEAAAVPAVSNAYLDNEKTVLAKLSSPMTLTDGASGFTVTDETTGEQIPVVSAESANPVTAVLVGDFQQALGASGNWSPDDDATKLSKINSNLYQFTGTLPAGTYQYKIALDHSWSASYPNNNVNLTVPAGGTKVTFTYIPSTHQVFDSINNPDATFPSSSAGTQSDLVQLTLASAPDITHDLRVVADGYKGGKILPRNVLNLPRYYYSGNDLGNVYSPKATAFRVWAPTASDVQLLLYNSETGPVTKALEMRKSDNGTWKLKVPGNLKNWYYLYQVTVNGKTQTAVDPYVRAISVNATRGMIVDLEDTNPPGWKEDHQQTPANPVDEVIYEVHVRDFSIDANSGMKNKGKYLAFTEHGTKGPDGVKTGIDSLKELGINAVQLLPIEEFASIDETQPNMYNWGYDPRNYNVPEGAYATTPEGTARITEFKQLIQSIHKDRIAINMDVVYNHTFSTLISDFDKIVPQYYYRTDDAGNYTNGSGVGNEFATEHPMARKFVLDSLKYWVTQYHIDGFRFDLMALLGKNTMAEASKELHAINPGIVLYGEPWTGGTSGITGDQLLTKGVQKGLGIGVFNDNLRNALSGNVFDSSAQGFATGATGLTDAIKRGVEGSINDFTSSPSETINYVSSHDNYTLWDKIALSNPNDSEADRIKMDELAQAVVMTSQGVPFMQGGEEMLRTKGGNDNSYNAGDTVNRFDWSRKAQYPDVFNYYSGLIHLRLDHPAFRMTTANEINSHLQFLNSPENTVAYELTDHVNKDKWGNIIVVYNPNKTAATINLPSGKWAINATSGKVGESTLGQAEGSVQVPGISMMILHQEVSPDHGKK

SEQ ID NO: 49126 - protein, 927 aa, Bacillus deramificans
SSTEVIVHYHRFDANYANWDLWMWPYQPVNGNGAAYEFSGTDEFGVTADVQVPGDNTQVGLIVRKNDWSQKNTPDDLHIDLSKGHEVWINQGDPTIYYNLNDAEAAAVPAVSNAYLDNEKTVLAKLSSPMTLTDGASGFTVTDETTGEQIPVVSAESANPVTAVLVGDFQQALGASGNWSPDDDATKLSKINSNLYQFTGTLPAGTYQYKVALDHSWSASYPNNNVNLTVPAGGTKVTFTYIPSTHQVFDSINNPDQTFPSSSAGTQSDLVQLTLASAPDITHDLQVVADGYKGGKILPRNVLNLPRYYYSGNDLGNVYSNKATAFRVWAPTASDVQLLLYNSETGPVTKQLEMQKSDNGTWKLKVPGNLKNWYYLYQVTVNGKTQTAVDPYVRAISVNATRGMIVDLEDTNPPGWKEDHQQTPANPVDEVIYEVHVRDFSIDANSGMKNKGKYLAFTEHGTKGPDGVKTGIDSLKELGINAVQLQPIEEFASIDETQPNMYNWGYDPRNYNVPEGAYATTPEGTARITEFKQLIQSIHKDRIAINMDVVYNHTFSTLISDFDKIVPQYYYRTDDAGNYTNGSGVGNEFATEHPMARKFVLDSLKYWVTQYHIDGFRFDLMALLGKNTMAEASKELHAINPGIVLYGEPWTGGTSGITGDQLLTKGVQKGLGIGVFNDNLRNALDGNVFDSSAQGFATGATGLTDAIKRGVEGSINDFTSSPSETINYVSCHDNYTLWDKIALSNPNDSEADRIKMDELAQAVVMTSQGVPFMQGGEEMLRTKGGNDNSYNAGDTVNEFDWSRKAQYPDVFNYYSGLIHLRLDHPAFRMTTANEINSHLQFLNSPENTVAYELTDHVNKDKWGNIIVVYNPNKTAATINLPSGKWAINATSGKVGESTLGQAEGSVQVPGISMMILHQEVSPDHGKK

SEQ ID NO: 49127 - protein, 927 aa, Bacillus deramificans
SSTEVIVHYHRFDANYANWDLWMWPYQPVNGNGAAYEFSGTDEFGVTADVQVPGDNTQVGLIVRKNDWSQKNTPDDLHIDLSKGHEVWINQGDPTIYYNLNDAEAAAVPAVSNAYLDNEKTVLAKLSSPMTLTDGASGFTVTDETTGEQIPVVSAESANPVTAVLVGDFQQALGASGNWSPDDDATKLSKINSNLYQFTGTLPAGTYQYKIALDHSWSASYPNNNVNLTVPAGGTKVTFTYIPSTHQVFDSINNPDATFPSSSAGTQSDLVQLTLASAPDITHDLRVVADGYKGGKILPRNVLNLPRYYYSGNDLGNVYSPKATAFRVWAPTASDVQLLLYNSETGPVTKALEMRKSDNGTWKLKVPGNLKNWYYLYQVTVNGKTQTAVDPYVRAISVNATRGMIVDLEDTNPPGWKEDHQQTPANPVDEVIYEVHVRDFSIDANSGMKNKGKYLAFTEHGTKGPDGVKTGIDSLKELGINAVQLQPIEEFASIDETQPNMYNWGYDPRNYNVPEGAYATTPEGTARITEFKQLIQSIHKDRIAINMDVVYNHTFSTLISDFDKIVPQYYYRTDDAGNYTNGSGVGNEFATEHPMARKFVLDSLKYWVTQYHIDGFRFDLMALLGKNTMAEASKELHAINPGIVLYGEPWTGGTSGITGDQLLTKGVQKGLGIGVFNDNLRNALDGNVFDSSAQGFATGATGLTDAIKRGVEGSINDFTSSPSETINYVSCHDNYTLWDKIALSNPNDSEADRIKMDELAQAVVMTSQGVPFMQGGEEMLRTKGGNDNSYNAGDTVNEFDWSRKAQYPDVFNYYSGLIHLRLDHPAFRMTTANEINSHLQFLNSPENTVAYELTDHVNKDKWGNIIVVYNPNKTAATINLPSGKWAINATSGKVGESTLGQAEGSVQVPGISMMILHQEVSPDHGKK

SEQ ID NO: 49128 - protein, 927 aa, Bacillus deramificans
SSTEVIVHYHRFDANYANWDLWMWPKQPVNGNGAAYEFSGTDEFGVTADVQVPGDNTQVGLIVRKNDWSQKNTPDDLYIDLSKGHEVWINQGDPTIYYNLNDAEAAAVPAVSNAYLDNEKTVLAKLSSPMTLTDGASGFTVTDETTGEQIPVVSAESANPVTAVLVGDFQQALGASGNWSPDDDATKLSKINSNLYQFTGTLPAGTYQYKIALDHSWSASYPNNNVNLTVPAGGTKVTFTYIPSTHQVFDSINNPDATFPSSSAGTQSDLVQLTLASAPDITHDLRVVADGYKGGKILPRNVLNLPRYYYSGNDLGNVYSPKATAFRVWAPTASDVQLLLYNSETGPVTKALEMRKSDNGTWKLKVPGNLKNWYYLYQVTVNGKTQTAVDPYVRAISVNATRGMIVDLEDTNPPGWKEDHQQTPANPVDEVIYEVHVRDFSIDANSGMKNKGKYLAFTEHGTKGPDGVKTGIDSLKELGINAVQLQPIEEFASIDETQPNMYNWGYDPRNYNVPEGAYATTPEGTARITEFKQLIQSIHKDRIAINMDVVYNHTFSTLISDFDKIVPQYYYRTDDAGNYTNGSGAGNEFATEHPMARKFVLDSLKYWVTQYHIDGFRFDLMALLGKNTMAEASKELHAINPGIVLYGEPWTGGTSGITGDQLLTKGVQKGLGIGVFNDNLRNALSGNVFDSSAQGFATGATGLTDAIKRGVEGSINDFTSSPSETINYVSCHDNYTLWDKIALSNPNDSEADRIKMDELAQAVVMTSQGVPFMQGGEEMLRTKGGNDNSYNAGDTVNEFDWSRKAQYPDVFNYYSGLIHLRLDHPAFRMTTANEINSHLQFLNSPENTVAYELTDHVNKDKWGNIIVVYNPNKTAATINLPSGKWAINATSGKVGESTLGQAEGSVQVPGISMMILHQEVSPDHGKK

SEQ ID NO: 49129 - protein, 927 aa, Bacillus deramificans
SSTEVIVHYHRFDANYANWDLWMWPYQPVNGNGAAYEFSGTDEFGVTADVQVPGDNTQVGLIVRKNDWSQKNTPDDLHIDLSKGHEVWINQGDPTIYYNLNDAEAAAVPAVSNAYLDNEKTVLAKLSSPMTLTDGASGFTVTDETTGEQIPVVSAESANPVTAVLVGDFQQALGASGNWSPDDDHTKLSKINSNLYQFTGTLPAGTYQYKVALDHSWSASYPNNNVNLTVPAGGTKVTFTYIPSTHQVFDSINNPDQTFPSSSAGTQSDLVQLTLASAPDITHDLQVVADGYKGGKILPRNVLNLPRYYYSGNDLGNVYSNKATAFRVWAPTASDVQLLLYNSETGPVTKALEMQKSDNGTWKLKVPGNLKNWYYLYQVTVNGKTQTAVDPYVRAISVNATRGMIVDLEDTNPPGWKEDHQQTPANPVDEVIYEVHVRDFSIDANSGMKNKGKYLAFTEHGTKGPDGVKTGIDSLKELGINAVQLQPIEEFASIDETQPNMYNWGYDPRNYNVPEGAYATTPEGTARITEFKQLIQSIHKDRIAINMDVVYNHTFSTLISDFDKIVPQYYYRTDDAGNYTNGSGVGNEFATEHPMARKFVLDSLKYWVTQYHIDGFRFDLMALLGKNTMAEASKELHAINPGIVLYGEPWTGGTSGITGDQLLTKGVQKGLGIGVFNDNLRNALDGNVFDSSAQGFATGATGLTDAIKRGVEGSINDFTSSPSETINYVSCHDNYTLWDKIALSNPNDSEADRIKMDELAQAVVMTSQGVPFMQGGEEMLRTKGGNDNSYNAGDTVNEFDWSRKAQYPDVFNYYSGLIHLRLDHPAFRMTTANEINSHLQFLNSPENTVAYELTDHVNKDKWGNIIVVYNPNKTAATINLPSGKWAINATSGKVGESTLGQAEGSVQVPGISMMILHQEVSPDHGKK

SEQ ID NO: 49130 - protein, 927 aa, Bacillus deramificans
SSTEVIVHYHRFDANYAGWDLWMWPKQPVNGNGAAYEFSGTDEFGVTADVQVPGDNTQVGLIVRKNDWSQKNTPDDLYIDLSKGHEVWINQGDPTIYYNLNDAEAAAVPAVSNAYLDNEKTVLAKLSSPMTLTDGASGFTVTDETTGEQIPVVSAESANPVTAVLVGDFQQALGASGNWSPDDDATKLSKINSNLYQFTGTLPAGTYQYKIALDHSWSASYPNNNVNLTVPAGGTKVTFTYIPSTHQVFDSINNPDATFPSSSAGTQSDLVQLTLASAPDITHDLRVVADGYKGGKILPRNVLNLPRYYYSGNDLGNVYSPKATAFRVWAPTASDVQLLLYNSETGPVTKALEMRKSDNGTWKLKVPGNLKNWYYLYQVTVNGKTQTAVDPYVRAISVNATRGMIVDLEDTNPPGWKEDHQQTPANPVDEVIYEVHVRDFSIDANSGMKNKGKYLAFTEHGTKGPDGVKTGIDSLKELGINAVQLQPIEEFASIDETQPNMYNWGYDPRNYNVPEGAYATTPEGTARITEFKQLIQSIHKDRIAINMDVVYNHTFSTLISDFDKIVPQYYYRTDDAGNYTNGSGAGNEFATEHPMARKFVLDSLKYWVTQYHIDGFRFDLMALLGKNTMAEASKELHAINPGIVLYGEPWTGGTSGITGDQLLTKGVQKGLGIGVFNDNLRNALSGNVFDSSAQGFATGATGLTDAIKRGVEGSINDFTSSPSETINYVSCHDNYTLWDKIALSNPNDSEADRIKMDELAQAVVMTSQGVPFMQGGEEMLRTKGGNDNSYNAGDTVNEFDWSRKAQYPDVFNYYSGLIHLRLDHPAFRMTTANEINSHLQFLNSPENTVAYELTDHVNKDKWGNIIVVYNPNKTAATINLPSGKWAINATSGKVGESTLGQAEGSVQVPGISMMILHQEVSPDHGKK

SEQ ID NO: 49131 - protein, 927 aa, Bacillus deramificans
SSTEVIVHYHRFDANYANWDLWMWPKQPVNGNGAAYEFSGTDEFGVTADVQVPGDNTQVGLIVRKNDWSQKNTPDDLYIDLSKGHEVWINQGDPTIYYNLNDAEAAAVPAVSNAYLDNEKTVLAKLSSPMTLTDGASGFTVTDETTGEQIPVVSAESANPVTAVLVGDFQQALGASGNWSPDDDATKLSKINSNLYQFTGTLPAGTYQYKIALDHSWSASYPNNNVNLTVPAGGTKVTFTYIPSTHQVFDSINNPDATFPSSSAGTQSDLVQLTLASAPDITHDLRVVADGYKGGKILPRNVLNLPRYYYSGNDLGNVYSPKATAFRVWAPTASDVQLLLYNSETGPVTKALEMRKSDNGTWKLKVPGNLKNWYYLYQVTVNGKTQTAVDPYVRAISVNATRGMIVDLEDTNPPGWKEDHQQTPANPVDEVIYEVHVRDFSIDANSGMKNKGKYLAFTEHGTKGPDGVKTGIDSLKELGINAVQLQPIEEFASIDETQPNMYNWGYDPRNYNVPEGAYATTPEGTARITEFKQLIQSIHKDRIAINMDVVYNHTFSTLISDFDKIVPQYYYRTDDAGNYTNGSGVGNEFATEHPMARKFVLDSLKYWVTQYHIDGFRFDLMALLGKNTMAEASKELHAINPGIVLYGEPWTGGTSGITGDQLLTKGVQKGLGIGVFNDNLRNALSGNVFDSSAQGFATGATGLTDAIKRGVEGSINDFTSSPSETINYVSCHDNYTLWDKIALSNPNDSEADRIKMDELAQAVVMTSQGVPFMQGGEEMLRTKGGNDNSYNAGDTVNEFDWSRKAQYPDVFNYYSGLIHLRLDHPAFRMTTANEINSHLQFLNSPENTVAYELTDHVNKDKWGNIIVVYNPNKTAATINLPSGKWAINATSGKVGESTLGQAEGSVQVPGISMMILHQEVSPDHGKK

SEQ ID NO: 49132 - protein, 927 aa, Bacillus deramificans
SSTEVIVHYHRFDANYANWDLWMWPYQPVNGNGAAYEFSGTDEFGVTADVQVPGDNTQVGLIVRKNDWSQKNTPDDLHIDLSKGHEVWINQGDPTIYYNLNDAEAAAVPAVSNAYLDNEKTVLAKLSSPMTLTDGASGFTVTDETTGEQIPVVSAESANPVTAVLVGDFQQALGASGNWSPDDDHTKLSKINSNLYQFTGTLPAGTYQYKVALDHSWSASYPNNNVNLTVPAGGTKVTFTYIPSTHQVFDSINNPDQTFPSSSAGTQSDLVQLTLASAPDITHDLQVVADGYKGGKILPRNVLNLPRYYYSGNDLGNVYSNKATAFRVWAPTASDVQLLLYNSETGPVTKQLEMQKSDNGTWKLKVPGNLKNWYYLYQVTVNGKTQTAVDPYVRAISVNATRGMIVDLEDTNPPGWKEDHQQTPANPVDEVIYEVHVRDFSIDANSGMKNKGKYLAFTEHGTKGPDGVKTGIDSLKELGINAVQLQPIEEFASIDETQPNMYNWGYDPRNYNVPEGAYATTPEGTARITQLKQLIQSIHKDRIAINMDVVYNHTFNVGVSDFDKIVPQYYYRTDSAGNYTNGSGVGNEIASERPMVQKFVLDSVKYWVKEYHIDGFRFDLMALLGKDTMAKISKELHAINPGIVLYGEPWTGGTSGLSSDQLVTKGQQKGLGIGVFNDNLRNALDGNVFDSSAQGFATGATGLTDAIKRGVEGSINDFTSSPSETINYVSCHDNYTLWDKIALSNPNDSEADRIKMDELAQAVVMTSQGVPFMQGGEEMLRTKGGNDNSYNAGDTVNEFDWSRKAQYPDVFNYYSGLIHLRLDHPAFRMTTANEINSHLQFLNSPENTVAYELTDHVNKDKWGNIIVVYNPNKTAATINLPSGKWAINATSGKVGESTLGQAEGSVQVPGISMMILHQEVSPDHGKK

SEQ ID NO: 49133 - protein, 927 aa, Bacillus deramificans
SSTEVIVHYHRFDANYAGWDLWMWPKQPVNGNGAAYEFSGTDEFGVTADVQVPGDNTQVGLIVRKNDWSQKNTPDDLYIDLSKGHEVWINQGDPTIYYNLNDAEAAAVPAVSNAYLDNEKTVLAKLSSPMTLTDGASGFTVTDETTGEQIPVVSAESANPVTAVLVGDFQQALGASGNWSPDDDATKLSKINSNLYQFTGTLPAGTYQYKIALDHSWSASYPNNNVNLTVPAGGTKVTFTYIPSTHQVFDSINNPDATFPSSSAGTQSDLVQLTLASAPDITHDLRVVADGYKGGKILPRNVLNLPRYYYSGNDLGNVYSPKATAFRVWAPTASDVQLLLYNSETGPVTKALEMRKSDNGTWKLKVPGNLKNWYYLYQVTVNGKTQTAVDPYVRAISVNATRGMIVDLEDTNPPGWKEDEQQTPANPVDEVIYEVHVRDFSIDANSGMKNKGKYLAFTEHGTKGPDGVKTGIDSLKELGINAVQLLPIEEFASIDETQPNMYNWGYDPRNYNVPEGAYATTPEGTARITEFKQLIQSIHKDRIAINMDVVYNHTFATGISDFDKIVPQYYYRTDDAGNYTNGSGAGNEFATEHPMARKFVLDSLKYWVTQYHIDGFRFDLMALLGKNTMAEASKELHAINPGIVLYGEPWTGGTSGITGDQLLTKGVQKGLGIGVFNDNLRNALSGNVFDSSAQGFATGATGLTDAIKRGVEGSINDFTSSPSETINYVSCHDNYTLWDKIALSNPNDSEADRIKMDELAQAVVMTSQGVPFMQGGEEMLRTKGGNDNSYNAGDTVNRFDWSRKAQYPDVFNYYSGLIHLRLDHPAFRMTTANEINSHLQFLNSPENTVAYELTDHVNKDKWGNIIVVYNPNKTAATINLPSGKWAINATSGKVGESTLGQAEGSVQVPGISMMILHQEVSPDHGKK

SEQ ID NO: 49134 - protein, 927 aa, Bacillus deramificans
SSTEVIVHYHRFDANYAGWDLWMWPKQPVNGNGAAYEFSGTDEFGVTADVQVPGDNTQVGLIVRKNDWSQKNTPDDLYIDLSKGHEVWINQGDPTIYYNLNDAEAAAVPAVSNAYLDNEKTVLAKLSSPMTLTDGASGFTVTDETTGEQIPVVSAESANPVTAVLVGDFQQALGASGNWSPDDDATKLSKINSNLYQFTGTLPAGTYQYKIALDHSWSASYPNNNVNLTVPAGGTKVTFTYIPSTHQVFDSINNPDATFPSSSAGTQSDLVQLTLASAPDITHDLRVVADGYKGGKILPRNVLNLPRYYYSGNDLGNVYSPKATAFRVWAPTASDVQLLLYNSETGPVTKALEMRKSDNGTWKLKVPGNLKNWYYLYQVTVNGKTQTAVDPYVRAISVNATRGMIVDLEDTNPPGWKEDHQQTPANPVDEVIYEVHVRDFSIDANSGMKNKGKYLAFTEHGTKGPDGVKTGIDSLKELGINAVQLLPIEEFASIDETQPNMYNWGYDPRNYNVPEGAYATTPEGTARITEFKQLIQSIHKDRIAINMDVVYNHTFATGISDFDKIVPQYYYRTDDAGNYTNGSGVGNEFATEHPMARKFVLDSLKYWVTQYHIDGFRFDLMALLGKNTMAEASKELHAINPGIVLYGEPWTGGTSGITGDQLLTKGVQKGLGIGVFNDNLRNALSGNVFDSSAQGFATGATGLTDAIKRGVEGSINDFTSSPSETINYVSCHDNYTLWDKIALSNPNDSEADRIKMDELAQAVVMTSQGVPFMQGGEEMLRTKGGNDNSYNAGDTVNRFDWSRKAQYPDVFNYYSGLIHLRLDHPAFRMTTANEINSHLQFLNSPENTVAYELTDHVNKDKWGNIIVVYNPNKTAATINLPSGKWAINATSGKVGESTLGQAEGSVQVPGISMMILHQEVSPDHGKK

SEQ ID NO: 49135 - protein, 927 aa, Bacillus deramificans
SSTEVIVHYHRFDANYANWDLWMWPYQPVNGNGAAYEFSGTDEFGVTADVQVPGDNTQVGLIVRKNDWSQKNTPDDLHIDLSKGHEVWINQGDPTIYYNLNDAEAAAVPAVSNAYLDNEKTVLAKLSSPMTLTDGASGFTVTDETTGEQIPVVSAESANPVTAVLVGDFQQALGASGNWSPDDDHTKLSKINSNLYQFTGTLPAGTYQYKIALDHSWSASYPNNNVNLTVPAGGTKVTFTYIPSTHQVFDSINNPDATFPSSSAGTQSDLVQLTLASAPDITHDLRVVADGYKGGKILPRNVLNLPRYYYSGNDLGNVYSNKATAFRVWAPTASDVQLLLYNSETGPVTKALEMRKSDNGTWKLKVPGNLKNWYYLYQVTVNGKTQTAVDPYVRAISVNATRGMIVDLEDTNPPGWKEDHQQTPANPVDEVIYEVHVRDFSIDANSGMKNKGKYLAFTEHGTKGPDGVKTGIDSLKELGINAVQLQPIEEFASIDETQPNMYNWGYDPRNYNVPEGAYATTPEGTARITEFKQLIQSIHKDRIAINMDVVYNHTFSTLISDFDKIVPQYYYRTDDAGNYTNGSGVGNEFATEHPMARKFVLDSLKYWVTQYHIDGFRFDLMALLGKNTMAEASKELHAINPGIVLYGEPWTGGTSGITGDQLLTKGVQKGLGIGVFNDNLRNALDGNVFDSSAQGFATGATGLTDAIKRGVEGSINDFTSSPSETINYVSCHDNYTLWDKIALSNPNDSEADRIKMDELAQAVVMTSQGVPFMQGGEEMLRTKGGNDNSYNAGDTVNEFDWSRKAQYPDVFNYYSGLIHLRLDHPAFRMTTANEINSHLQFLNSPENTVAYELTDHVNKDKWGNIIVVYNPNKTAATINLPSGKWAINATSGKVGESTLGQAEGSVQVPGISMMILHQEVSPDHGKK

SEQ ID NO: 49136 - protein, 927 aa, Bacillus deramificans
SSTEVIVHYHRFDANYANWDLWMWPYQPVNGNGAAYEFSGTDEFGVTADVQVPGDNTQVGLIVRKNDWSQKNTPDDLHIDLSKGHEVWINQGDPTIYYNLNDAEAAAVPAVSNAYLDNEKTVLAKLSSPMTLTDGASGFTVTDETTGEQIPVVSAESANPVTAVLVGDFQQALGASGNWSPDDDATKLSKINSNLYQFTGTLPAGTYQYKIALDHSWSASYPNNNVNLTVPAGGTKVTFTYIPSTHQVFDSINNPDATFPSSSAGTQSDLVQLTLASAPDITHDLRVVADGYKGGKILPRNVLNLPRYYYSGNDLGNVYSNKATAFRVWAPTASDVQLLLYNSETGPVTKALEMRKSDNGTWKLKVPGNLKNWYYLYQVTVNGKTQTAVDPYVRAISVNATRGMIVDLEDTNPPGWKEDHQQTPANPVDEVIYEVHVRDFSIDANSGMKNKGKYLAFTEHGTKGPDGVKTGIDSLKELGINAVQLQPIEEFASIDETQPNMYNWGYDPRNYNVPEGAYATTPEGTARITEFKQLIQSIHKDRIAINMDVVYNHTFSTLISDFDKIVPQYYYRTDDAGNYTNGSGVGNEFATEHPMARKFVLDSLKYWVTQYHIDGFRFDLMALLGKNTMAEASKELHAINPGIVLYGEPWTGGTSGITGDQLLTKGVQKGLGIGVFNDNLRNALDGNVFDSSAQGFATGATGLTDAIKRGVEGSINDFTSSPSETINYVSCHDNYTLWDKIALSNPNDSEADRIKMDELAQAVVMTSQGVPFMQGGEEMLRTKGGNDNSYNAGDTVNEFDWSRKAQYPDVFNYYSGLIHLRLDHPAFRMTTANEINSHLQFLNSPENTVAYELTDHVNKDKWGNIIVVYNPNKTAATINLPSGKWAINATSGKVGESTLGQAEGSVQVPGISMMILHQEVSPDHGKK

SEQ ID NO: 49137 - protein, 927 aa, Bacillus deramificans
SSTEVIVHYHRFDANYANWDLWMWPYQPVNGNGAAYEFSGTDEFGVTADVQVPGDNTQVGLIVRKNDWSQKNTPDDLHIDLSKGHEVWINQGDPTIYYNLNDAEAAAVPAVSNAYLDNEKTVLAKLSSPMTLTDGASGFTVTDETTGEQIPVVSAESANPVTAVLVGDFQQALGASGNWSPDDDHTKLSKINSNLYQFTGTLPAGTYQYKIALDHSWSASYPNNNVNLTVPAGGTKVTFTYIPSTHQVFDSINNPDQTFPSSSAGTQSDLVQLTLASAPDITHDLQVVADGYKGGKILPRNVLNLPRYYYSGNDLGNVYSNKATAFRVWAPTASDVQLLLYNSETGPVTKQLEMQKSDNGTWKLKVPGNLKNWYYLYQVTVNGKTQTAVDPYVRAISVNATRGMIVDLEDTNPPGWKEDHQQTPANPVDEVIYEVHVRDFSIDANSGMKNKGKYLAFTEHGTKGPDGVKTGIDSLKELGINAVQLQPIEEFASIDETQPNMYNWGYDPRNYNVPEGAYATTPEGTARITEFKQLIQSIHKDRIAINMDVVYNHTFSTLISDFDKIVPQYYYRTDDAGNYTNGSGVGNEFATEHPMARKFVLDSLKYWVTQYHIDGFRFDLMALLGKNTMAEASKELHAINPGIVLYGEPWTGGTSGITGDQLLTKGVQKGLGIGVFNDNLRNALDGNVFDSSAQGFATGATGLTDAIKRGVEGSINDFTSSPSETINYVSCHDNYTLWDKIALSNPNDSEADRIKMDELAQAVVMTSQGVPFMQGGEEMLRTKGGNDNSYNAGDTVNEFDWSRKAQYPDVFNYYSGLIHLRLDHPAFRMTTANEINSHLQFLNSPENTVAYELTDHVNKDKWGNIIVVYNPNKTAATINLPSGKWAINATSGKVGESTLGQAEGSVQVPGISMMILHQEVSPDHGKK

SEQ ID NO: 49138 - protein, 927 aa, Bacillus deramificans
SSTEVIVHYHRFDANYAGWDLWMWPKQPVNGNGAAYEFSGTDEFGVTADVQVPGDNTQVGLIVRKNDWSQKNTPDDLYIDLSKGHEVWINQGDPTIYYNLNDAEAAAVPAVSNAYLDNEKTVLAKLSSPMTLTDGASGFTVTDETTGEQIPVVSAESANPVTAVLVGDFQQALGASGNWSPDDDATKLSKINSNLYQFTGTLPAGTYQYKIALDHSWSASYPNNNVNLTVPAGGTKVTFTYIPSTHQVFDSINNPDATFPSSSAGTQSDLVQLTLASAPDITHDLRVVADGYKGGKILPRNVLNLPRYYYSGNDLGNVYSPKATAFRVWAPTASDVQLLLYNSETGPVTKALEMRKSDNGTWKLKVPGNLKNWYYLYQVTVNGKTQTAVDPYVRAISVNATRGMIVDLEDTNPPGWKEDHQQTPANPVDEVIYEVHVRDFSIDANSGMKNKGKYLAFTEHGTKGPDGVKTGIDSLKELGINAVQLQPIEEFASIDETQPNMYNWGYDPRNYNVPEGAYATTPEGTARITEFKQLIQSIHKDRIAINMDVVYNHTFSTLISDFDKIVPQYYYRTDDAGNYTNGSGVGNEFATEHPMARKFVLDSLKYWVTQYHIDGFRFDLMALLGKNTMAEASKELHAINPGIVLYGEPWTGGTSGITGDQLLTKGVQKGLGIGVFNDNLRNALSGNVFDSSAQGFATGATGLTDAIKRGVEGSINDFTSSPSETINYVSCHDNYTLWDKIALSNPNDSEADRIKMDELAQAVVMTSQGVPFMQGGEEMLRTKGGNDNSYNAGDTVNRFDWSRKAQYPDVFNYYSGLIHLRLDHPAFRMTTANEINSHLQFLNSPENTVAYELTDHVNKDKWGNIIVVYNPNKTAATINLPSGKWAINATSGKVGESTLGQAEGSVQVPGISMMILHQEVSPDHGKK

SEQ ID NO: 49139 - protein, 927 aa, Bacillus deramificans
SSTEVIVHYHRFDANYAGWDLWMWPKQPVNGNGAAYEFSGTDEFGVTADVQVPGDNTQVGLIVRKNDWSQKNTPDDLYIDLSKGHEVWINQGDPTIYYNLNDAEAAAVPAVSNAYLDNEKTVLAKLSSPMTLTDGASGFTVTDETTGEQIPVVSAESANPVTAVLVGDFQQALGASGNWSPDDDATKLSKINSNLYQFTGTLPAGTYQYKIALDHSWSASYPNNNVNLTVPAGGTKVTFTYIPSTHQVFDSINNPDATFPSSSAGTQSDLVQLTLASAPDITHDLRVVADGYKGRKILPRNVLNLPRYYYSGNDLGNVYSPKATAFRVWAPTASDVQLLLYNSETGPVTKALEMRKSDNGTWKLKVPGNLKNWYYLYQVTVNGKTQTAVDPYVRAISVNATRGMIVDLEDTNPPGWKEDHQQTPANPVDEVIYEVHVRDFSIDANSGMKNKGKYLAFTEHGTKGPDGVKTGIDSLKELGINAVQLLPIEEFASIDETQPNMYNWGYDPRNYNVPEGAYATTPEGTARITEFKQLIQSIHKDRIAINMDVVYNHTFSTLISDFDKIVPQYYYRTDDAGNYTNGSGAGNEFATEHPMARKFVLDSLKYWVTQYHIDGFRFDLMALLGKNTMAEASKELHAINPGIVLYGEPWTGGTSGITGDQLLTKGVQKGLGIGVFNDNLRNALSGNVFDSSAQGFATGATGLTDAIKRGVEGSINDFTSSPSETINYVSCHDNYTLWDKIALSNPNDSEADRIKMDELAQAVVMTSQGVPFMQGGEEMLRTKGGNDNSYNAGDTVNRFDWSRKAQYPDVFNYYSGLIHLRLDHPAFRMTTANEINSHLQFLNSPENTVAYELTDHVNKDKWGNIIVVYNPNKTAATINLPSGKWAINATSGKVGESTLGQAEGSVQVPGISMMILHQEVSPDHGKK

SEQ ID NO: 49140 - protein, 927 aa, Bacillus deramificans
SSTEVIVHYHRFDANYAGWDLWMWPKQPVNGNGAAYEFSGTDEFGVTADVQVPGDNTQVGLIVRKNDWSQKNTPDDLYIDLSKGHEVWINQGDPTIYYNLNDAEAAAVPAVSNAYLDNEKTVLAKLSSPMTLTDGASGFTVTDETTGEQIPVVSAESANPVTAVLVGDFQQALGASGNWSPDDDATKLSKINSNLYQFTGTLPAGTYQYKIALDHSWSASYPNNNVNLTVPAGGTKVTFTYIPSTHQVFDSINNPDATFPSSSAGTQSDLVQLTLASAPDITHDLRVVADGYKGGKILPRNVLNLPRYYYSGNDLGNVYSPKATAFRVWAPTASDVQLLLYNSETGPVTKALEMRKSDNGTWKLKVPGNLKNWYYLYQVTVNGKTQTAVDPYVRAISVNATRGMIVDLEDTNPPGWKEDHQQTPANPVDEVIYEVHVRDFSIDANSGMKNKGKYLAFTEHGTKGPDGVKTGIDSLKELGINAVQLQPIEEFASIDETQPNMYNWGYDPRNYNVPEGAYATTPEGTARITEFKQLIQSIHKDRIAINMDVVYNHTFSTLISDFDKIVPQYYYRTDDAGNYTNGSGAGNEFATEHPMARKFVLDSLKYWVTQYHIDGFRFDLMALLGKNTMAEASKELHAINPGIVLYGEPWTGGTSGITGDQLLTKGVQKGLGIGVFNDNLRNALSGNVFDSSAQGFATGATGLTDAIKRGVEGSINDFTSSPSETINYVSCHDNYTLWDKIALSNPNDSEADRIKMDELAQAVVMTSQGVPFMQGGEEMLRTKGGNDNSYNAGDTVNRFDWSRKAQYPDVFNYYSGLIHLRLDHPAFRMTTANEINSHLQFLNSPENTVAYELTDHVNKDKWGNIIVVYNPNKTAATINLPSGKWAINATSGKVGESTLGQAEGSVQVPGISMMILHQEVSPDHGKK

SEQ ID NO: 49141 - protein, 927 aa, Bacillus deramificans
SSTEVIVHYHRFDANYAGWDLWMWPKQPVNGNGAAYEFSGTDEFGVTADVQVPGDNTQVGLIVRKNDWSQKNTPDDLYIDLSKGHEVWINQGDPTIYYNLNDAEAAAVPAVSNAYLDNEKTVLAKLSSPMTLTDGASGFTVTDETTGEQIPVVSAESANPVTAVLVGDFQQALGASGNWSPDDDATKLSKINSNLYQFTGTLPAGTYQYKIALDHSWSASYPNNNVNLTVPAGGTKVTFTYIPSTHQVFDSINNPDATFPSSSAGTQSDLVQLTLASAPDITHDLRVVADGYKGRKILPRNVLNLPRYYYSGNDLGNVYSPKATAFRVWAPTASDVQLLLYNSETGPVTKALEMRKSDNGTWKLKVPGNLKNWYYLYQVTVNGKTQTAVDPYVRAISVNATRGMIVDLEDTNPPGWKEDHQQTPANPVDEVIYEVHVRDFSIDANSGMKNKGKYLAFTEHGTKGPDGVKTGIDSLKELGINAVQLQPIEEFASIDETQPNMYNWGYDPRNYNVPEGAYATTPEGTARITEFKQLIQSIHKDRIAINMDVVYNHTFSTLISDFDKIVPQYYYRTDDAGNYTNGSGAGNEFATEHPMARKFVLDSLKYWVTQYHIDGFRFDLMALLGKNTMAEASKELHAINPGIVLYGEPWTGGTSGITGDQLLTKGVQKGLGIGVFNDNLRNALSGNVFDSSAQGFATGATGLTDAIKRGVEGSINDFTSSPSETINYVSCHDNYTLWDKIALSNPNDSEADRIKMDELAQAVVMTSQGVPFMQGGEEMLRTKGGNDNSYNAGDTVNRFDWSRKAQYPDVFNYYSGLIHLRLDHPAFRMTTANEINSHLQFLNSPENTVAYELTDHVNKDKWGNIIVVYNPNKTAATINLPSGKWAINATSGKVGESTLGQAEGSVQVPGISMMILHQEVSPDHGKK

SEQ ID NO: 49142 - protein, 927 aa, Bacillus deramificans
SSTEVIVHYHRFDANYAGWDLWMWPKQPVNGNGAAYEFSGTDEFGVTADVQVPGDNTQVGLIVRKNDWSQKNTPDDLYIDLSKGHEVWINQGDPTIYYNLNDAEAAAVPAVSNAYLDNEKTVLAKLSSPMTLTDGASGFTVTDETTGEQIPVVSAESANPVTAVLVGDFQQALGASGNWSPDDDATKLSKINSNLYQFTGTLPAGTYQYKIALDHSWSASYPNNNVNLTVPAGGTKVTFTYIPSTHQVFDSINNPDATFPSSSAGTQSDLVQLTLASAPDITHDLRVVADGYKGGKILPRNVLNLPRYYYSGNDLGNVYSPKATAFRVWAPTASDVQLLLYNSETGPVTKALEMRKSDNGTWKLKVPGNLKNWYYLYQVTVNGKTQTAVDPYVRAISVNATRGMIVDLEDTNPPGWKEDHQQTPANPVDEVIYEVHVRDFSIDANSGMKNKGKYLAFTEHGTKGPDGVKTGIDSLKELGINAVQLLPIEEFASIDETQPNMYNWGYDPRNYNVPEGAYATTPEGTARITEFKQLIQSIHKDRIAINMDVVYNHTFSTLISDFDKIVPQYYYRTDDAGNYTNGSGVGNEFATEHPMARKFVLDSLKYWVTQYHIDGFRFDLMALLGKNTMAEASKELHAINPGIVLYGEPWTGGTSGITGDQLLTKGVQKGLGIGVFNDNLRNALSGNVFDSSAQGFATGATGLTDAIKRGVEGSINDFTSSPSETINYVSCHDNYTLWDKIALSNPNDSEADRIKMDELAQAVVMTSQGVPFMQGGEEMLRTKGGNDNSYNAGDTVNRFDWSRKAQYPDVFNYYSGLIHLRLDHPAFRMTTANEINSHLQFLNSPENTVAYELTDHVNKDKWGNIIVVYNPNKTAATINLPSGKWAINATSGKVGESTLGQAEGSVQVPGISMMILHQEVSPDHGKK

SEQ ID NO: 49143 - protein, 927 aa, Bacillus deramificans
SSTEVIVHYHRFDANYANWDLWMWPKQPVNGNGAAYEFSGTDEFGVTADVQVPGDNTQVGLIVRKNDWSQKNTPDDLYIDLSKGHEVWINQGDPTIYYNLNDAEAAAVPAVSNAYLDNEKTVLAKLSSPMTLTDGASGFTVTDETTGEQIPVVSAESANPVTAVLVGDFQQALGASGNWSPDDDATKLSKINSNLYQFTGTLPAGTYQYKIALDHSWSASYPNNNVNLTVPAGGTKVTFTYIPSTHQVFDSINNPDATFPSSSAGTQSDLVQLTLASAPDITHDLRVVADGYKGGKILPRNVLNLPRYYYSGNDLGNVYSPKATAFRVWAPTASDVQLLLYNSETGPVTKALEMRKSDNGTWKLKVPGNLKNWYYLYQVTVNGKTQTAVDPYVRAISVNATRGMIVDLEDTNPPGWKEDHQQTPANPVDEVIYEVHVRDFSIDANSGMKNKGKYLAFTEHGTKGPDGVKTGIDSLKELGINAVQLQPIEEFASIDETQPNMYNWGYDPRNYNVPEGAYATTPEGTARITEFKQLIQSIHKDRIAINMDVVYNHTFSTLISDFDKIVPQYYYRTDDAGNYTNGSGVGNEFATEHPMARKFVLDSLKYWVTQYHIDGFRFDLMALLGKNTMAEASKELHAINPGIVLYGEPWTGGTSGITGDQLLTKGVQKGLGIGVFNDNLRNALSGNVFDSSAQGFATGATGLTDAIKRGVEGSINDFTSSPSETINYVSCHDNYTLWDKIALSNPNDSEADRIKMDELAQAVVMTSQGVPFMQGGEEMLRTKGGNDNSYNAGDTVNRFDWSRKAQYPDVFNYYSGLIHLRLDHPAFRMTTANEINSHLQFLNSPENTVAYELTDHVNKDKWGNIIVVYNPNKTAATINLPSGKWAINATSGKVGESTLGQAEGSVQVPGISMMILHQEVSPDHGKK

SEQ ID NO: 49144 - protein, 930 aa, Bacillus acidopullulyticus
DSTSTEVIVHYHRFDSNYANWDLWMWPYQPVNGNGAAYEFSGKDDFGVKADVQVPGDDTQVGLIVRTNDWSQKNTSDDLHIDLTKGHEIWIVQGDPNIYYNLSDAQAAATPKVSNAYLDNEKTVLAKLTNPMTLSDGSSGFTVTDKTTGEQIPVVSAESANPVTAVLVGDFQQALGASGNWSPDDDHTKLSKINSNLYQFTGTLPAGTYQYKVALDHSWSASYPNNNVNLTVPAGGTKVTFTYIPSTHQVFDSINNPDQTFPSSSAGTQSDLVQLTLASAPDVSHTIQVGAAGYEAVNLIPRRNVLNLPRYYYSGNDLGNVYSNKATAFRVWAPTASDVQLLLYNSETGPVTKQLEMQKSDNGTWKLKVPGNLKNWYYLYQVTVNGKTQTAVDPYVRAISVNATRGMIVDLEDTNPPGWKEDHQQTPANPVDEVIYEVHVRDFSIDANSGMKNKGKYLAFTEHGTKGPDNVKTGIDSLKELGINAVQLQPIEEFASIDETQPNMYNWGYDPRNYNVPEGAYATTPEGTARITQLKQLIQSIHKDRIAINMDVVYNHTFNVGVSDFDKIVPQYYYRTDSAGNYTNGSGCGNEIASERPMVQKFVLDSVKYWVKEYHIDGFRFDLMALLGKDTMAKISKELHAINPGIVLYGEPWTGGTSGLSSDQLVTKGQQKGLGIGVFNDNLRNALDGNVFDSSAQGFATGATGLTDAIKRGVEGSINDFTSSPSETINYVSCHDNYTLWDKIALSNPNDSEADRIKMDELAQAVVMTSQGVPFMQGGEEMLRTKGGNDNSYNAGDTVNEFDWSRKAQYPDVFNYYSGLIHLRLDHPAFRMTTANEINSHLQFLNSPENTVAYELTDHVNKDKWGNIIVVYNPNKTAATINLPSGKWAINATSGKVGESTLGQAEGSVQVPGISMMILHQEVSPDHGKK

SEQ ID NO: 49145 - protein, 927 aa, Bacillus deramificans
SSTEVIVHYHRFDANYANWDLWMWPYQPVNGNGAAYEFSGTDEFGVTADVQVPGDNTQVGLIVRKNDWSQKNTPDDLHIDLSKGHEVWINQGDPTIYYNLNDAEAAAVPAVSNAYLDNEKTVLAKLSSPMTLTDGASGFTVTDETTGEQIPVVSAESANPVTAVLVGDFQQALGASGNWSPDDDHTKLSKINSNLYQFTGTLPAGTYQYKVALDHSWSASYPNNNVNLTVPAGGTKVTFTYIPSTHQVFDSINNPDQTFPSSSAGTQSDLVQLTLASAPDITHDLQVVADGYKGGKILPRNVLNLPRYYYSGNDLGNVYSNKATAFRVWAPTASDVQLLLYNSETGPVTKQLEMQKSDNGTWKLKVPGNLKNWYYLYQVTVNGKTQTAVDPYVRAISVNATRGMIVDLEDTNPPGWKEDHQQTPANPVDEVIYEVHVRDFSIDANSGMKNKGKYLAFTEHGTKGPDGVKTGIDSLKELGINAVQLQPIEEFASIDETQPNMYNWGYDPRNYNVPEGAYATTPEGTARITQLKQLIQSIHKDRIAINMDVVYNHTFSTLISDFDKIVPQYYYRTDDAGNYTNGSGVGNEFATEHPMARKFVLDSLKYWVTQYHIDGFRFDLMALLGKNTMAEASKELHAINPGIVLYGEPWTGGTSGITGDQLLTKGVQKGLGIGVFNDNLRNALDGNVFDSSAQGFATGATGLTDAIKRGVEGSINDFTSSPSETINYVSCHDNYTLWDKIALSNPNDSEADRIKMDELAQAVVMTSQGVPFMQGGEEMLRTKGGNDNSYNAGDTVNEFDWSRKAQYPDVFNYYSGLIHLRLDHPAFRMTTANEINSHLQFLNSPENTVAYELTDHVNKDKWGNIIVVYNPNKTAATINLPSGKWAINATSGKVGESTLGQAEGSVQVPGISMMILHQEVSPDHGKK

SEQ ID NO: 49146 - protein, 927 aa, Bacillus deramificans
SSTEVIVHYHRFDANYAGWDLWMWPKQPVNGNGAAYEFSGTDEFGVTADVQVPGDNTQVGLIVRKNDWSQKNTPDDLYIDLSKGHEVWINQGDPTIYYNLNDAEAAAVPAVSNAYLDNEKTVLAKLSSPMTLTDGASGFTVTDETTGEQIPVVSAESANPVTAVLVGDFQQALGASGNWSPDDDATKLSKINSNLYQFTGTLPAGTYQYKIALDHSWSASYPNNNVNLTVPAGGTKVTFTYIPSTHQVFDSINNPDATFPSSSAGTQSDLVQLTLASAPDITHDLRVVADGYKGGKILPRNVLNLPRYYYSGNDLGNVYSPKATAFRVWAPTASDVQLLLYNSETGPVTKALEMRKSDNGTWKLKVPGNLKNWYYLYQVTVNGKTQTAVDPYVRAISVNATRGMIVDLEDTNPPGWKEDHQQTPANPVDEVIYEVHVRDFSIDANSGMKNKGKYLAFTEHGTKGPDGVKTGIDSLKELGINAVELQPIEEFASIDETQPNMYNWGYDPRNYNVPEGAYATTPEGTARITEFKQLIQSIHKDRIAINMDVVYNHTFSTLISDFDKIVPQYYYRTDDAGNYTNGSGVGNEFATEHPMARKFVLDSLKYWVTQYHIDGFRFDLMALLGKNTMAEASKELHAINPGIVLYGEPWTGGTSGITGDQLLTKGVQKGLGIGVFNDNLRNALSGNVFDSSAQGFATGATGLTDAIKRGVEGSINDFTSSPSETINYVSCHDNYTLWDKIALSNPNDSEADRIKMDELAQAVVMTSQGVPFMQGGEEMLRTKGGNDNSYNAGDTVNRFDWSRKAQYPDVFNYYSGLIHLRLDHPAFRMTTANEINSHLQFLNSPENTVAYELTDHVNKDKWGNIIVVYNPNKTAATINLPSGKWAINATSGKVGESTLGQAEGSVQVPGISMMILHQEVSPDHGKK

SEQ ID NO: 49147 - protein, 929 aa, Bacillus acidopullulyticus
DSTSTEVIVHYHRFDSNYANWDLWMWPYQPVNGNGAAYEFSGKDDFGVKADVQVPGDDTQVGLIVRTNDWSQKNTSDDLHIDLTKGHEIWIVQGDPNIYYNLSDAQAAATPKVSNAYLDNEKTVLAKLSSPMTLTDGASGFTVTDETTGEQIPVVSAESANPVTAVLVGDFQQALGASGNWSPDDDHTKLSKINSNLYQFTGTLPAGTYQYKVALDHSWSASYPNNNVNLTVPAGGTKVTFTYIPSTHQVFDSINNPDQTFPSSSAGTQSDLVQLTLASAPDITHDLQVVADGYKGGKILPRNVLNLPRYYYSGNDLGNVYSNKATAFRVWAPTASDVQLLLYNSETGPVTKQLEMQKSDNGTWKLKVPGNLKNWYYLYQVTVNGKTQTAVDPYVRAISVNATRGMIVDLEDTNPPGWKEDHQQTPANPVDEVIYEVHVRDFSIDANSGMKNKGKYLAFTEHGTKGPDNVKTGIDSLKELGINAVQLQPIEEFASIDETQPNMYNWGYDPRNYNVPEGAYATTPEGTARITQLKQLIQSIHKDRIAINMDVVYNHTFNVGVSDFDKIVPQYYYRTDSAGNYTNGSGCGNEIASERPMVQKFVLDSVKYWVKEYHIDGFRFDLMALLGKDTMAKISKELHAINPGIVLYGEPWTGGTSGLSSDQLVTKGQQKGLGIGVFNDNLRNALDGNVFDSSAQGFATGATGLTDAIKRGVEGSINDFTSSPSETINYVSCHDNYTLWDKIALSNPNDSEADRIKMDELAQAVVMTSQGVPFMQGGEEMLRTKGGNDNSYNAGDTVNEFDWSRKAQYPDVFNYYSGLIHLRLDHPAFRMTTANEINSHLQFLNSPENTVAYELTDHVNKDKWGNIIVVYNPNKTAATINLPSGKWAINATSGKVGESTLGQAEGSVQVPGISMMILHQEVSPDHGKK

SEQ ID NO: 49148 - protein, 956 aa, Bacillus sp.
MKKPLGKIVASTALLISVAFSSSIASADSTSTEVIVHYHRFDSNYANWDLWMWPYQPVNGNGAAYEFSGKDDFGVKADVQVPGDDTQVGLIVRTNDWSQKNTSDDLHIDLTKGHEIWIVQGDPNIYYNLSDAQAAATPKVSNAYLDNEKTVLAKLTNPMTLSDGSSGFTVTDKTTGEQIPVTSAVSANTVTAVLVGDLQQALGAGGNWAPTDDHTLMTKINANLYQFTGTLPAGTYQYKVALDHSWNASYPNNNVSLTVPSGGEKVTFTYIPSTHQVYDSINNSNQTFPASSAGIQTDLVQLTLASAPDVSHTIQVGAAGYEAVNLIPRNVLNLPRYYYSGNDLGNVYSNKATAFRVWAPTASDVQLLLYNSETGPVTKQLEMQKSDNGTWKLKVPGNLKNWYYLYQVTVNGKTQTAVDPYVRAISVNATRGMIVDLEDTNPPGWKEDHQQTPANPVDEVIYEVHVRDFSIDANSGMKNKGKYLAFTEHGTKGPDNVKTGIDSLKELGINAVQLQPIEEFNSIDETQPNMYNWGYDPRNYNVPEGAYATTPEGTARITQLKQLIQSIHKDRIAINMDVVYNHTFNVGVSDFDKIVPQYYYRTDSAGNYTNGSGVGNEIATERPMVQKFVLDSVKYWVKEYHIDGFRFDLMALLGKDTMAKISKELHAINPGIVLYGEPWTGGTSGLSSDQLVTKGQQKGLGIGVFNDNLRNALDGNVFDSSAQGFATGATGLTDAIKNGVEGSINDFTSSPGETINYVTSHDNYTLWDKIALSNPNDSEADRIKMDELAQAVVMTSQGVPFMQGGEEMLRTKGGNDNSYNAGDTVNEFDWSRKAQYPDVFNYYSGLIHLRLDHPAFRMTTANEINSHLQFLNSPENTVAYELTDHVNKDKWGNIIVVYNPNKTAATINLPSGKWAINATSGKVGESTLGQAEGSVQVPGISMMILHQEVSPDHGKK

SEQ ID NO: 49149 - protein, 325 aa, Talaromyces pinophilus; identical to SEQ ID NO: 62

SEQ ID NO: 49150 - protein, 309 aa, Talaromyces pinophilus
SPVPEKRSGCALPSTYKWTSTGPLASPKSGLVALRDYSHVIYNGQHLVYGSTANTAGSYGSMNFGLFSDWSEMSSASQNTMSTGAVAPTIFYFAPKSVWILAYQWGPYAFSYRTSTDPSNANGWSSPQPLFTGTISGSSTGVIDQTVIGDSENMYLFFAGDNGHIYRASMPIGDFPGSFGSASTIVLSDSTNNLFEAVEVYTVEGQNQYLMIVEAIGANGRYFRSFTASSLGGTWTAQASTESNPFAGKANSGATWTNDISSGDLVRTNPDQTQTIDACNLQFLYQGRSTSSGGDYNLLPYQPGLLTLA

SEQ ID NO: 49151 - protein, 302 aa, Talaromyces pinophilus
SGCALPSTYKWTSTGPLASPKSGLVALRDYSHVIYNGQHLVYGSTANTAGSYGSMNFGLFSDWSEMSSASQNTMSTGAVAPTIFYFAPKSVWILAYQWGPYAFSYRTSTDPSNANGWSSPQPLFTGTISGSSTGVIDQTVIGDSENMYLFFAGDNGHIYRASMPIGDFPGSFGSASTIVLSDSTNNLFEAVEVYTVEGQNQYLMIVEAIGANGRYFRSFTASSLGGTWTAQASTESNPFAGKANSGATWTNDISSGDLVRTNPDQTQTIDACNLQFLYQGRSTSSGGDYNLLPYQPGLLTLA

SEQ ID NO: 49152 - protein, 297 aa, Hypocrea jecorina
CTLPSTYRWNSTGALASPKSGWVSLKDFSHVIYNGQHLVWGSTHDTGTIWGSMNFGLFSDWSNMATASQNKMTPGTVAPTVFYFAPKNIWVLAYQWGPTTFSYLTSSNPSSVNGWSSPQPLFSGSISGSSPLDQTVIGDSTNMYLFFAGDDGKIYRASMPIGNFPGSFGSTSTVVLSDERNNLFEAVQVYTVSGQKQYLMIVEAIGANGRYFRSFTATNLGGTWTPQATSESQPFAGKANSGATWTNDISHGDLIRSNPDQTMTIDPCNLQFLYQGRATNSGGDYGLLPYRPGLLTL

SEQ ID NO: 49153 - protein, 301 aa, Unidentified
CTLSSTYRWNSTGALATPKSGWVSLKDFTHVPYNGKHLVYGTTHDSGSSWGSMNFGLFSDWSAMTSASQNAMSQGTVAPTLFYFAPKSIWILSYQWGPTSFSYKTSSDPSNANGWSSAQTLFTGTISGSSTGVIDQTLIADDTNMYLFFAGDNGKIYRASAPIGNFPGSLGSSSTTVLSDTSNNLFEAVQVYTVPGQSGWKYLMIVEAIGSNGRYFRSFTASSLSGSWTAQATSESAPFAGKANSGATWTNDISHGDIIRSNPDQTMTIDPCNLQLLYQGKAPSSGGDYGKLPYRPGLLTL

SEQ ID NO: 49154 - protein, 313 aa, Trichoderma reesei
AVVLSFVTLVAAAPATCTLPSTYRWNSTGALASPKSGWVSLKDFSHVIYNGQHLVWGSTHDTGTIWGSMNFGLFSDWSNMATASQNKMTPGTVAPTVFYFAPKNIWVLAYQWGPTTFSYLTSSNPSSVNGWSSPQPLFSGSISGSSPLDQTVIGDSTNMYLFFAGDDGKIYRASMPIGNFPGSFGSTSTVVLSDERNNLFEAVQVYTVSGQKQYLMIVEAIGANGRYFRSFTATNLGGTWTPQATSESQPFAGKANSGATWTNDISHGDLIRSNPDQTMTIDPCNLQFLYQGRATNSGGDYGLLPYRPGLLTL

SEQ ID NO: 49155 - protein, 304 aa, Unidentified
SGACSLPSTYKWSSTGALVTPKSGWASLKDFTHVPYNGQHLVYATTHDTGSTWSSMNFGLFTDWSAMGSASQNAMSSGTVAPTLFYFAPKSIWVLTYQWGATAFSYKTSSNPTNANGWSSAQPLYSGTISSSTGPIDQTVIGDSTNMYLFFAGDNGSIYRASMPIGNFPGSFGSSAQVVLSDTSNNLFEAVQFFKVYTVTGTGQYLMIVEAIGANGRYFRSFTATSLSGTWTPQAATESNPFAGKANSGATWTNDISHGDLVRSSADQTMPVDPCNLQLLYQGRAPSSGGDYGLLPYRPGVLTL

SEQ ID NO: 49156 - protein, 304 aa, Unidentified
EVAAQCALPSSYSWSSTNALASPKSGWAAIKDFTSVIYNGQHLVYASFADTSGNYGSMNFSPFSDWSDMASASQNAMSQAAVAPTLFYFAPKDIWILAYQWGPTSFSYKTSSDPTNPNGWSTPQPLFSGTISDSATGCIDQTLIGDSSNMYLFFAGDNGKIYRASMPIDNFPGDFGTESEIIMSDTSNNLFEAVQVYTVDGQNQYLMIVEAIGANGRYFRSFTADSLDGAWTAQAATESQPFAGKANSGASWTNDISHGDLVRSNPDQTMTIDPCNLQLLYQGRDPNASGDYNLLPWVPGVLTL

SEQ ID NO: 49157 - protein, 299 aa, Chaetomium olivicolor
CSLPSTYKWTSSGPLAQPRSGWASLKDFTHVPYNGKHLVYGSYYGGSYGSMNFGLFSDWSEMGSASQNAMSSAAVAPTLFLFAPKNIWILAYQWGPTAFSYRTSTDPTNPNGWSAAQPLFSGTIAGSDTGPIDQTLIGDSTHMYLFFAGDNGKIYKARMPIENFPGNFGTSSEIILNGAKNDFFEAVQVYTVGGQSQPQYLMIIESIGANGQRYFRSYTATDLNGAWTPQATSESNPFAGKANSGATWTDDISHGDLIRSNPDQTMTIDPCNLQLLYQGRSGSSSDYNSLPYRPGLLTL

SEQ ID NO: 49158 - protein, 297 aa, Humicola hyalothermophila
CSLPSSYQWTSTGPLADPKNGWVSLKDFTHVPYNGQHLVYATYFGSNWGSLNFGLFSDWSEMASASQNGMSTGAVAPTLFFFEPKNIWVLAYQWGPTAFSYRTSTDPTNPNGWSSVQPLFTGSISDSDTGPIDQTLIGDDQYMYLFFAGDNGKIYRSRMPIGDFPSSFGSSYEIIMSGSRNDLFEAVQVYTVDGPQKQYLMIVESIGANGRYFRSYTATDLGGSWTPQATSESNPFAGKANSGATWTNDISHGDLIRSKPDQTMTIDPCNLQLLYQGRSGDSSDYNTLPYRPGLLTL

SEQ ID NO: 49159 - protein, 301 aa, Aspergillus terreus
STCALPSKYTWTSTGPLANPKSGYVSLKDFTHVPYNGQHLVYASDVNSAGSYGSMSIGPFADWSAMSSASQNTMSSGTVAPQLFYFRPKSTWVLAYQWGATAFSYRTSSDPTNANGWSSAQPLYSGTLSSSSTGPIDLTLIGDDTTMYLFFAGDNGNIYRASMPIGNFPGNFGSSATVVLSDSQYKLFEAVQVYRVQGQQLYLMIVEAIGSNGRYFRSFTATSLGGAWTAQATTEAAPFAGKANSGATWTNDISHGDLIRSTADETMPVDPCNLQFLYQGRDPSQNPDYNLLPYRPGLLTL

SEQ ID NO: 49160 - protein, 310 aa, Actinoplanes utahensis
SPSPSPSTPGGTCTLPSTYRWSSTGALAQPKSGWVALKDFTNVVYNGKHLVYASDVAGSGYGSMAFTPFTDWSDMAAAGQNGMSQGTVAPTLFYFAPKNIWVLAYQWGPTAFSYKTSTDPTNANGWSAPQTLFTGSITGSGTGVIDQTLIGDGQNMYLFFAGDNGRIYRASMPIANFPGSFGSSYTTVLSDSTNNLFEAVQVYRVQGQNQYLMIVEAIGSRGRYFRSFTASSLGGSWTPQAASESNPFAGAANSGATWTNDISHGDLVRNNPDQTMTVDPCHLQLLYQGKNPGAGGTYDQLPWRPGLLTL

SEQ ID NO: 49161 - protein, 311 aa, Aspergillus oryzae
ALLALVGGAAAQCALPSSYSWTSTGALAEPKAGWAALKDFTNVVFNGQHIVYGSVADTSGNYGSMNFGPFSDWSEMASASQNAMNQGTVAPTLFYFAPKDVWILAYQWGPTSFSYKTSSDPTDANGWSAAQPLFSGTISDSDTGVIDQTVIGDDTNMYLFFAGDNGKIYRASMPIDNFPGDFGTQSEIILSDTKENLFEAVQVYTVDGQNKYLMIVEAMGANGRYFRSFTADSLDGEWTVQAGTESQPFAGKANSGATWTNDISHGDLVRNNPDQTMTVDPCNLQLLYQGRDPNASGDYNLLPWKPGVLTL

SEQ ID NO: 49162 - protein, 311 aa, Aspergillus sojae
ALLALVGGAAAQCALPSSYSWTSTGALAEPKAGWAALKDFTNVVFNGQHIVYGSVADTSGNYGSMNFGPFSDWSEMASASQNAMSQGTVAPTLFYFAPKDVWILAYQWGPTSFSYKTSSDPTDANGWSAAQPLFSGTISDSDTGVIDQTVIGDDTDMYLFFAGDNGKIYRASMPIDNFPGDFGTQSEIILSDTKENLFEAVQVYTVDGQNKYLMIVEAMGANGRYFRSFTADSLDGEWTVQAGTESQPFAGKANSGATWTNDISHGDLVRNNPDQTMTVDPCNLQLLYQGRDPNASGDYNLLPWKPGVLTL

SEQ ID NO: 49163 - protein, 299 aa, Thielavia
CALPSTYRWTSTGPLAQPRSGWVSLKDFTTVPYNGQNLVYATTHDTGSSWGSMNFGLFRNWTDMASASQNAMSFSAVAPTLFYFAPKNIWVLAYQWGPTTFSYRTSSNPTNANGWSSPQPLFTGTISGSDTGPIDQTLIADNQNMYLFFAGDNGKIYRASMPLNNFPGSFGSASTVIMSDTKNNLFEAVQVYKVQGQNQYLMLVESIGANGRYFRSYTATSLAGSWTPQATSESRPFAGKANSGATWTNDISHGDLIRVNPDQTMTVDPCRLQLLYQGRAPNSGGDYGKLPYRPGVLTL

SEQ ID NO: 49164 - protein, 299 aa, Penicillium soppii
CALPSTYSWTSTGPLVNPKSGWVALKDFTNVVFNNKHVVYASTANAAGNYGSMSFSPFSDWSGMASASQNAMSFNAVAPTLFYFQPKNIWVLAYQWGSSTFTYRTSSDPTTNQWSSEQALFSGKIANSGTGAIDQTLIGDSTHMYLFFAGDNGKIYRSSMPINNFPGNFGTNSEVVLSDTTNNLFEAVQVYTVKGQNKYLMIVEAIGSQGQRYFRSFTASSLGGSWTPQATSESNPFAGKANSGATWTNDISHGDLVRTNPDQTMTIDPCNLQLLYQGRDPNAGGQYNALPYKPGLLTL

SEQ ID NO: 49165 - protein, 298 aa, Humicola sp.
CSLPSTYKWTSTGLLANPKSGWASLKDFTHVPYNGKHLVYGSYYGTAYGSMNFGLFSNWSEMGSVSQNAMSSAAVAPTLFLFAPKNIWILAYQWGPTAFSYRTSTDPTNANGWSAAQPLFSGTISGSDTGPIDQTLIGDSTYMYLFFAGDNGKIYRSRMPLGNFPGNFGTSAEVILSGARNDLFEAVQVYTVTGQSSPQYLMIIESIGANGRYFRSYTATNLGGSWTPQATSESAPFAGKANSGVTWTSDISHGDLIRSGPDQTMPIDPCNLQLLYQGRSGDSSDYNKLPYRPGLLTL

SEQ ID NO: 49166 - protein, 306 aa, Humicola hyalothermophila
STLPVARAQCSLPSSYQWTSTGPLADPKNGWVSLKDFTHVPYNGQHLVYATYFGSNWGSLNFGLFSDWSEMASASQNGMSTGAVAPTLFFFEPKNIWVLAYQWGPTAFSYRTSTDPTNPNGWSSVQPLFTGSISDSDTGPIDQTLIGDDQYMYLFFAGDNGKIYRSRMPIGDFPSSFGSSYEIIMSGSRNDLFEAVQVYTVDGPQKQYLMIVESIGANGRYFRSYTATDLGGSWTPQATSESNPFAGKANSGATWTNDISHGDLIRSKPDQTMTIDPCNLQLLYQGRSGDSSDYNTLPYRPGLLTL

SEQ ID NO: 49167 - protein, 301 aa, Chaetomium olivicolor
AACSLPSTYRWNSTGPLAQPKNGWVSLKDFTYAPYNGQHLVYATTHDSSNWGSMGFGLFSSWSQMGSVSQIKMNTGAIAPSLFYFAPKNIWVLAHQWGPTAFSYRTSSNPTNPNGWSSPQPLFTGTISGSDTGPIDQAIIGDSNNMYLFFAGDNGKIYRASMPIGNFPGNFGSASTVVMSDTKNNLFEAVQVYTLKGQTRYLMIVEAVGAQGHRYFRSFTATSLSGSWTPQAATESNPFAGKANSGASWTNDISHGDLIRTSADQTMTVDPCNLQLLYQGRSPNSGGDYVLLPYRPGLLTL

SEQ ID NO: 49168 - protein, 299 aa, Aspergillus wentii
CALPSTYSWTSTGSLADPKSGWTALKDFTNVVSNNKHIVYASTTDASGNYGSMNFASFSDWSDMASASQAATSFTAVAPTLLYFQPKSIWVLAYQWGSSTFTYRTSSDPTNANGWSSEKALFSGKITGSDTGAIDQTLIGDATNMYLFFAGDNGKIYRSSMPIANFPGDFGTASEVVLSDSRNNLFEAVQVYTVEGQNQYLMIVEAIGTNGRYFRSFTASSLDGSWTEQAASENNPFAGKANSGATWTNDISHGDLVRNNPDQTMTIDPCNLQFLYQGRDASAGGNYNTLPWRPGVLTL

SEQ ID NO: 49169 - protein, 299 aa, Unidentified
CSLPSSYKWTSTGPLAQPKSGWASLKDFTHVPYNGKHLVYASNYAGSAYGSMNFGLFTNWSDMATASQNGMSQAAVAPTLFYFEPKKTWVLAYQWGATAFSYRTSSDPTNANGWSAAQPLFSGSISGSDTGPIDQTLIGDANYMYLFFAGDNGKIYRSKMPIGNFPGNFGTSAEVVLSGARNDIFEAVQVYTVGGQSSPLYLMLVESIGANGRYFRSYTATSLGGTFTPQATSESKPFAGKANSGATWTNDISHGDLIRSNPDQTFTVDPCNLQLLYQGLQGTSSDYNKLPYRPGLLTL

SEQ ID NO: 49170 - protein, 317 aa, Xylanibacterium sp.
LVNNSTPPSGTCDLPSTYRWSSTGVLATPKAGWVSLKDFTTAPYNGQHLVYATTNTGASTGTTWGSMNFSLFSNWSDMASATQNTMSSATVAPSLFYFAPKNIWVLTYQWGPGAAFFYRTSNDPTNANGWSSANVLFSGSISGSSTGPIDQTIIGDGTNMYLFFAGDNGFIYRASMPIGNFPGSFGSSSTVVMSDTTNNGWNLFEAPQVYKLKDQNKYLMIVEAIGANGRYFRSFTATSLSGSWTPQAATESNPFAGKANSGATWTNDISHGELIRTSADQTMTIDPCNLQLLYQGRSPSSGGDYGTWPYRPGLLTL

SEQ ID NO: 49171 - protein, 298 aa, Myceliophthora
CELPSSYRWTSTGALAQPKSPWVSLKDFTVVPYNGQHLVYATTNDGTNWGSMGFGLFSDWNAMGSATQTGMSSSAVAPTLFYFEPKNVWILAHQWGPTAFSYRTSNDPTNPNSWSQPQPLFTGTISGSSTGPIDQTVIGDDQNMYLFFCGDNGKIYRASMPIGNFPGNFGSESTVVMSDSTNNLFEAVQVYKVNGRQQYLMLVEAIGAQGRYFRSFTASRLDGEWTPNAVNEASPFAGKANSGASWTNDISHGELVRLSADQTFPIDPCNLQLLYQGRDPSSGGEYNRLPYRPGVLTL

SEQ ID NO: 49172 - protein, 297 aa, Actinomadura rubrobrunea
LPSTYRWTSTGPLAQPKAGWVSLKDFTVAPYNGKHLVYATTHDTGTRWGSMNFSPFGDWSEMAYASQNAMTNAAVAPTLFYFAPKNIWVLAYQWGRTAFSYRTSTDPTNPNGWSAEQELFSGSISGSPTGPIDQTLIADDTTMYLFFAGDNGKIYRASMPIGEFPRSFGTASTVVMSDSTNNLFEAVQVYKLQGQNRYLMLVEAIGSQGRYFRSFTATSLNGSWTPQAATESNPFAGKANSGATWTNDISHGELVRTSADQTFTVDPCNLQLLYQGRDPNSGGDYGLLPYRPGLLTL

SEQ ID NO: 49173 - protein, 305 aa, Penicillium soppii
PAVVADCALPSTYSWTSTGPLVNPKSGWVALKDFTNVVFNNKHVVYASTANAAGNYGSMSFSPFSDWSGMASASQNAMSFNAVAPTLFYFQPKNIWVLAYQWGSSTFTYRTSSDPTTNQWSSEQALFSGKIANSGTGAIDQTLIGDSTHMYLFFAGDNGKIYRSSMPINNFPGNFGTNSEVVLSDTTNNLFEAVQVYTVKGQNKYLMIVEAIGSQGQRYFRSFTASSLGGSWTPQATSESNPFAGKANSGATWTNDISHGDLVRTNPDQTMTIDPCNLQLLYQGRDPNAGGQYNALPYKPGLLTL

SEQ ID NO: 49174 - protein, 299 aa, Actinomadura rubrobrunea
CDLPSTYRWTSTGPLAQPKAGWVSLKDFTVAPYNGKHLVYATTHDTGTRWGSMNFSPFGDWSEMAYASQNAMTNAAVAPTLFYFAPKNIWVLAYQWGRTAFSYRTSTDPTNPNGWSAEQELFSGSISGSPTGPIDQTLIADDTTMYLFFAGDNGKIYRASMPIGEFPRSFGTASTVVMSDSTNNLFEAVQVYKLQGQNRYLMLVEAIGSQGRYFRSFTATSLNGSWTPQAATESNPFAGKANSGATWTNDISHGELVRTSADQTFTVDPCNLQLLYQGRDPNSGGDYGLLPYRPGLLTL

SEQ ID NO: 49175 - protein, 299 aa, Streptomyces albidoflavus
CDLPSSYRWTSTGALAQPKSGWVSLKDFTVVPYDGRQLVYATTHDTGTSWGSMNFDLFGDWSQMASARQNAMSSSTVAPTLFYFAPKNIWVLAYQWGGSAFSYRTSSDPTDPNGWSSPQVLFSGSIAGSDTGPIDQTLIGDGTNMYLFFAGDNGKIYRASMPIGNFPGSFGTTSTVVMSDTTNNLFEAPQVYKLQGQNRYLMIVEAIGSQGRYFRSFTATSLNGSWTPQAATESSPFAGKANSGATWTNDISHGELVRTGPDQTMTVDPCRLQFLYQGRSPGSGGDYGLLPYRPGLLTL

SEQ ID NO: 49176 - protein, 301 aa, Aspergillus terreus
ASCSLPSTYSWTSTEALAEPKSGWTALKDFTNVVSNGQHIVYASTTDSSGNYGSMAFSPFADWSDMASASQNAMSASAVAPTIFYFAPKDVWILAYQWGPTAFSYKTSSDPSDANGWSEAQPLFSGSISDSSTGVIDQTVIGDDTNMYLFFAGDNGRIYRASMSIDNFPGDFGTQSEVVLEDTTNNLFEAVQVYKVDGQDQYLMIVEAIGSAGRYFRSFTASSLDGEWTVQAGTEDQPFAGKANSGASWTNDISHGDLVRNNPDQTFTVDPCNLQLLYQGKDPNSSGDYNQLAWRPGVLTL

SEQ ID NO: 49177 - protein, 313 aa, Humicola sp.
AISLLASGLPVAYSACSLPSTYKWTSTGLLANPKSGWASLKDFTHVPYNGKHLVYGSYYGTAYGSMNFGLFSNWSEMGSVSQNAMSSAAVAPTLFLFAPKNIWILAYQWGPTAFSYRTSTDPTNANGWSAAQPLFSGTISGSDTGPIDQTLIGDSTYMYLFFAGDNGKIYRSRMPLGNFPGNFGTSAEVILSGARNDLFEAVQVYTVTGQSSPQYLMIIESIGANGRYFRSYTATNLGGSWTPQATSESAPFAGKANSGVTWTSDISHGDLIRSGPDQTMPIDPCNLQLLYQGRSGDSSDYNKLPYRPGLLTL

SEQ ID NO: 49178 - protein, 320 aa, Oculimacula yallundae
ANVATTLVTSKAPAATGKSCAIPSSYKWSSTGALANPKSGWIALKDFTTTFYNGKHLVYASNHKDAASGGGYGSMNFGLVSDWSQLASAPQNGMNFNTVAPTLFYFAPKSVWVLAYQWGSSTFTYRTSTDPSNANGWGAEKPLFTGKITGSGTGAIDQTVIGDSTNMYLFFAGDNGKIYRASMPIGNFPGSFGSASTIIMSDTTNNLFEAVQVYTVAGQNKYLMIVEAQGSGGRYFRSFTATSLGGTWTPNAATESNPFAGKANSGATWTNDISHGDLVRTNPDQTFTVDMCNLQLLYQGRTPGNQPYDSLPYRPGVLTL

SEQ ID NO: 49179 - protein, 313 aa, Penicillium sp.
SILFLLASAPAVTADCALPSTYKWTSTGPLATPKSGWAALKDFTNVVFNNKHVVFASTANTAGNYGSMSFSPFSDWSSMASASQNAMSFNAVAPTLFYFQPKNIWVIAYQWGSSTFTYRTASDPTTNQWSSEQALFSGKISNSGTGAIDQTLIGDSSNMYLFFAGDNGKIYRASMPIGNFPGNFGTSSEVVLSDSQNNLFEAVQVYTVKGQNKYLMIVEAIGSQGRYFRSFTASSLGGSWTPQATSESNPFAGKANSGATWTNDISHGDLVRSNPDQTMTVDPCNLQLLYQGRDPSSGGSYNTLPYRPGLLTL

SEQ ID NO: 49180 - protein, 307 aa, Unidentified
PRVLAQCGLPSTYSWTSTGPLAEPKDGWASLKDFTAVPYNGQYLVYATYHDTGTSWGSMNFGLFSNWSDMATASQNAMTQSTVAPTLFYFEPKDVWILAYQWGPTAFSYLTSSDPTDANGWSSPQPLFSGSISDSDTGVIDQTVIGDSTTMYLFFAGDNGRIYRASMPIDQFPGDFGTESEIILSDERNNLFEAVQVYTVSGQSKDTYLMIVEAIGAQGRYFRSFTADSLGGSWTPQAATESAPFAGKANSGATWTDDISHGDLVRSTPDQTMSIDPCNLQLLYQGRDPSLNPGYDLLPYRPGLLTL

SEQ ID NO: 49181 - protein, 310 aa, Streptosporangium
SPSSTPTSPGTCALPSTYRWTSTGPLANPKSGWVSLKDFTNVVHNGKHLVYATTHDTGTSWGSMNFSPFTNWSDMASAGQNKMNFSTVAPTLFYFAPKNIWVLAYQWGGTAFSYRTSSDPTNANGWSAQQTLFTGSISGSGTGPIDQTLIGDGTNMYLFFAGDNGKIYRASMPIGNFPGSFGSNYTTIMSDTTNNLFEGVEVYKLQGQNKYLMLVEAIGSQGRYFRSFTATSLDGTWTPQAATEGNPFAGKANSGATWTNDISHGDLVRSNPDQTKTVDPCNLQLLYQGRSPNSGGDYGLLPYRPGVLTL

SEQ ID NO: 49182 - protein, 299 aa, Acrophialophora fusispora
CPLPSTYRWKSTGVLANPKSGWVSLKDFTVAPYNGKHLVYATTHDTGSSWGSMNFGLFSSWSDMATAPQNGMNQGTVAPTLFYFKPKDIWVLAYQWGPTTFSYKTSKDPTNANGWGSAQTLFSGKISGSSTGAIDQTVIGDDTNMYLFFAGDNGKIYRASMPIDRFPGSFGDQYQTILSDSTNNLFEAVQVYKLQGLNKYLMIVEAIGSNGRYFRSFTADRLDGQWTPQAATESNPFAGKANSGATWTNDISHGELIRVSADQTFTVDPCNLQLLYQGRSPSSGGDYGKLPYRPGLLTL

SEQ ID NO: 49183 - protein, 299 aa, Streptomyces sp
CDLPSSYRWTSTGALAQPKSGWVSLKDFTVVPYDGRQLVYATTHDTGTSWGSMNFDLFGDWSQMASARQNAMSSSTVAPTLFYFAPKNIWVLAYQWGGSAFSYRTSSDPTDPNGWSSPQVLFSGSIAGSDTGPIDQTLIGDGTNMYLFFAGDNGKIYRAGMPIGNFPGSFGTTSTVVMSDTTNNLFEAPQVYKLQGQNRYLMIVEAIGSQGRYFRSFTATSLNGSWTPQAATESSPFAGKANSGATWTNDISHGELIRTGPDQTMTVDPCRLQFLYQGRSPGSGGDYGLLPYRPGLLTL

SEQ ID NO: 49184 - protein, 310 aa, Actinoplanes utahensis
TSSPTPSPSGSTCTLPSSYRWSSTGALAQPKNGWTSLKDFTNVVYNGKHLVYASNVSNGSYGSMNFTPFTNWSDMASAGQNGMSQGTVAPTLFYFAPKNIWVLAYQWGPTSFSYKTSTDPTNANGWSSAQTLFTGTLPDAPYGVIDQTLIGDDQNMYLFFAGDNGKIYRASMPIGNFPGSFGSSYTTVMSDSTNNLFEAVEVYKVQGQNQYLMIVEAIGSQGRYFRSFTASSLGGSWTPQAASESNPFAGTANSGATWTNDISHGDLVRENPDQTKTVDPCHLQLLYQGKDPNAGGDYNNLPWRPGLLTL

SEQ ID NO: 49185 - protein, 308 aa, Aspergillus wentii
SLAPVVIADCALPSTYSWTSTGSLADPKSGWTALKDFTNVVSNNKHIVYASTTDASGNYGSMNFASFSDWSDMASASQAATSFTAVAPTLLYFQPKSIWVLAYQWGSSTFTYRTSSDPTNANGWSSEKALFSGKITGSDTGAIDQTLIGDATNMYLFFAGDNGKIYRSSMPIANFPGDFGTASEVVLSDSRNNLFEAVQVYTVEGQNQYLMIVEAIGTNGRYFRSFTASSLDGSWTEQAASENNPFAGKANSGATWTNDISHGDLVRNNPDQTMTIDPCNLQFLYQGRDASAGGNYNTLPWRPGVLTL

SEQ ID NO: 49186 - protein, 327 aa, Talaromyces pinophilus
ALLLLLPAVSGLALPTDEATQNTTVARSGCPLPSSYSWTSTGPLANPASGFLALKDFTHVPYNGQHLVYASDVNNAGSYGSLNFGLFSDWNSMGSVAQHTMSAGTVAPQLFYFTPKNIWVLAYEWGASPFSYRTSSDPTNANGWSSPQPLYTGSTGSSTGPIDPSLIGDSQNMYLFFAGDNGKIYRASMPIGNFPGNFGSSAQVVLSDSTVNLFEAVQVYSVQGQNQYLMIVEARDPSENRYFRSFTASSLSGSWAPQATSVSAPFAGKANSGASWTNDISSGDLIRASADQTMPVDACNLQLLYQGRATNSGGSYNDLPYRPGLLT

SEQ ID NO: 49187 - protein, 317 aa, Unidentified
LAAIIAFLAAGLPVAQGACSLPSSYKWTSTGPLAQPKSGWASLKDFTHVPYNGKHLVYASNYAGSAYGSMNFGLFTNWSDMATASQNGMSQAAVAPTLFYFEPKKTWVLAYQWGATAFSYRTSSDPTNANGWSAAQPLFSGSISGSDTGPIDQTLIGDANYMYLFFAGDNGKIYRSKMPIGNFPGNFGTSAEVVLSGARNDIFEAVQVYTVGGQSSPLYLMLVESIGANGRYFRSYTATSLGGTFTPQATSESKPFAGKANSGATWTNDISHGDLIRSNPDQTFTVDPCNLQLLYQGLQGTSSDYNKLPYRPGLLTL

SEQ ID NO: 49188 - protein, 298 aa, Myceliophthora thermophila
CELPSSYRWTSTGALAQPKSPWVSLKDFTVVPYDGQHLVYATTNDGTNWGSMGFSLFSDWDAMGSATQTGMSSSAVAPTLFYFEPKNVWILAHQWGPTAFSYRTSNDSTNPNSWSQPQPLFTGTISGSSTGPIDQTLIGDDQNMYLFFCGDNGKIYRASMPIGNFPGNFGSESTVVMSDSTNNLFEAVQVYKVNGRQQYLMLVEAIGAQGRYFRSFTATRLDGEWTPNAVSEASPFAGKANSGASWTNDISHGELVRLSADQTFPIDPCNLQLLYQGRDPSSGGDYNRLPYRPGVLTL

SEQ ID NO: 49189 - protein, 298 aa, Aureobasidium pullulans
CDLPAKPQWSSTTALAQPKSGWVAIKDFTTTFFNGKHLVYASYHDNSNYGAMNFGLFSDWSQMASAPQNAMSSSAVAPTLFHFAPKNVWILAHQWGPTTFSYRTSQDPSNANGWSAPQPLFSGKITGSSTGAIDQTVIGDSKNMYLFFAGDNGKIYRSQMAIGSFPGNFGTASTVVMSDTTNNLFEAVQVYTLKGQNKYLMIVEAQGSGGRYFRSFTSTNLGGSWTPHATSESAPFAGKANSGATWTNDISHGDLVRTNADQTFTIDPCNLQFLYQGRDAKSTATYDKLPYRPGLLTL

SEQ ID NO: 49190 - protein, 320 aa, Chaetomium olivicolor
MGSLSAAIALLASVLPVAQGACSLPSTYKWTSSGPLAQPRSGWASLKDFTHVPYNGKHLVYGSYYGGSYGSMNFGLFSDWSEMGSASQNAMSSAAVAPTLFLFAPKNIWILAYQWGPTAFSYRTSTDPTNPNGWSAAQPLFSGTIAGSDTGPIDQTLIGDSTHMYLFFAGDNGKIYKARMPIENFPGNFGTSSEIILNGAKNDFFEAVQVYTVGGQSQPQYLMIIESIGANGQRYFRSYTATDLNGAWTPQATSESNPFAGKANSGATWTDDISHGDLIRSNPDQTMTIDPCNLQLLYQGRSGSSSDYNSLPYRPGLLTL

SEQ ID NO: 49191 - protein, 298 aa, Myceliophthora thermophila
CSLPSSYRWTSTGALAQPKSGWANLKDFTHVPYNGKHLVYGSYYSNAYGSMNFGLFSDWSEMGSASQNQMSQAAVAPTLFYFSPKNIWVLAYQWGATPFSYRTSTDPTNPNGWSAPQPLFSGSISDSDTGPIDQTLIGDDKNMYLFFAGDNGKIYRASMPLGNFPGNFGSAATVVLSGARYDLFEAVQVYTVVGQSSPTYLMIVESIGARGRYFRSYTASRLDGAWTAQAASESQPFAGAANSGASWTSDISHGDLIRIDANHTMPVDPCRLQLLYQGRSGDSADYNSLPYRPGLLTL

SEQ ID NO: 49192 - protein, 300 aa, Microdochium nivale
CQLPSSYQWSDSGALAQPKSGWKSLKDFTHVNYNGQNLVYATYHDGSKWGSMAFSPFGSWSSMASAAQNTQSAAAVAPTLFFFAPKNIWVLAYQWGGSGTFTYKTSTNPTNPNGWGPAQTLFSGTISGSGTGPIDQTVIGDSQNMYLFFAGDNGKIYRASMPIGNFPGSFGSSSTVVMSASTNDLFEAVQVYTLKGQNKYLMLVEAIGANGRYFRSFTATSLSGSWTAQAATESRPFAGKANSGATWTNDISHGDLIRSNPDQTFTVDPCNLQLLYQGRNPNSGNVDYPLLPYRPGLLTL

SEQ ID NO: 49193 - protein, 298 aa, Gliomastix murorum
CDLPSSYRWSSSGVLTDPKNGWASLKDFTIAPYNGQHLVYATKVENGNWGSMAFGLFSDFSSMSSVAQNGMSSSTVAPTLFYFAPKSVWILAYQWGAWPFIYRTSTNPTNQNGWSAPQALFTGSITGSSTGPIDQTLIGDGTNMYLFFTGDNGKIYRASMPIGNFPGSFGSNYVTVLSDTTNNLFEAVQVYKLKGLQKYLMIVEAIGANGRYFRSFTATSLGGSWTLQAGSESSPFAGKANSGATWTNDISHGELVRSSSDQTFEVDACNLRLLYQGRNPSSGGDYTLLPYRPGLLTL

SEQ ID NO: 49194 - protein, 317 aa, Thielavia
MLAGITLLASAAAVAAQSCALPSTYRWTSTGPLAQPRSGWVSLKDFTTVPYNGQNLVYATTHDTGSSWGSMNFGLFRNWTDMASASQNAMSFSAVAPTLFYFAPKNIWVLAYQWGPTTFSYRTSSNPTNANGWSSPQPLFTGTISGSDTGPIDQTLIADNQNMYLFFAGDNGKIYRASMPLNNFPGSFGSASTVIMSDTKNNLFEAVQVYKVQGQNQYLMLVESIGANGRYFRSYTATSLAGSWTPQATSESRPFAGKANSGATWTNDISHGDLIRVNPDQTMTVDPCRLQLLYQGRAPNSGGDYGKLPYRPGVLTL

SEQ ID NO: 49195 - protein, 315 aa, Unidentified
LALLALAAPAVRAGCSLPSSYKWTSTGPLATPKSGWVSLKDFTHVPYQGKHLVYATDHDTGSSYGSMNFGLFSNWSDMASASQNAMSQAAVAPTLFYFEPKSIWVLAYQWGPTAFSYRTSTDPTNANGWSAAQPLFTGTAEGAPYGPIDQTLIGDSTNMYLFFAGDDGKIYRSSMPIDNFPGNFGTESTVVLSGATNDIFEAVQVYTVTGQSSPQYLMIVESIGSSGDRYFRSYTASSLSGSWSPQATSESAPFAGKANSGATWTPDISHGDLIRSSADQTMPIDPCNLQLLYQGRNGSGSTYDLQPYRPGLLTL

SEQ ID NO: 49196 - protein, 309 aa, Aspergillus niger
PFVNAKCALPSTYSWTSTDALATPKSGWTALKDFTDVVSNGKHIVYASTTDTQGNYGSMGFGAFSDWSDMASASQTATSFSAVAPTLFYFQPKSIWVLAYQWGSSTFTYRTSQDPTNVNGWSSEQALFTGKISGSSTGAIDQTVIGDDTNMYLFFAGDNGKIYRSSMSINDFPGSFGSQYEEILSGATNDLFEAVQVYTVDGGEGDSKYLMIVEAIGSTGHRYFRSFTASSLGGEWTAQAASEDQPFAGKANSGATWTDDISHGDLVRNNPDQTMTVDPCNLQLLYQGHDPNSNSDYNLLPWKPGVLTL

SEQ ID NO: 49197 - protein, 299 aa, Penicillium capsulatum
CALPSTYSWTSTSALANPKPGWTAIKDFTNVVFNNRHVVYASTTDTSGNYGAMSFGVFSDWPGMASASQNALSFAAVAPTLFYFQPKSIWVLAYQWGSSTFTYRTSSDPTNAYGWSSEQALFSGKVTGSSTGAIDQTLIGDATHMYLFFAGDNGKIYRSSMPISNFPGNFGTVSEVVLSDTQNNLFEAVQVYTVKGQNQYLMIVEAIGSEGRYFRSFTASSLGGLWTAQAASETKPFAGKANSGATWTNDISHGDLVRSNPDQTMTIDPCNLQFLYQGRNPGASGNYNTLPWRPGVLTL

SEQ ID NO: 49198 - protein, 302 aa, Unidentified
AACALPSTYEWTSSGPLATPSSSWVSLKDFTHVPYKGQHLVYGSTVDSSGQIYNSMAFGLFTSWSDMDSVSQTGMPNDPAIAPVLIYFEPKDIWVIAYQWGGSTFAYRTASDPTVATGWSAESPLFTGTIPDGGPLDATIIGDDTNMYLFYAGDNGMIYRASMPIGNFPGSFGSTSTVVLSGERNDLFEAVQVYTVAGQNQYLMIVEAIGANGRYFRSFTATSLGGSWTAQAVSESAPFAGKANSGATWTNDISSGDLIRSINDQTQTIDACNLQLLYQGRDPSSDGEDYNSLPWVPGLLTL

SEQ ID NO: 49199 - protein, 300 aa, Acremonium thermophilum
CALPSTYKWSSTGPLATPKAGWVSLKDFSTVPYNGQHLVYATTHDPGSTWGSMNFGLFANWSDMAAASQNKMNAAAVAPTLFHFAPKDVWVLAYQWGPTSFSYRTASDPTDANGWSAAQTLFSGTISGSSTGCIDQTLIADNSTMYLFFAGDNGKIYTSSMPLDRFPGSFGTSSTVVLSDTTNNLFEAVQVYTVQGQSQYLMIVEAIGKNGRYFRSFTAASLAGPWKEQAGTEASPFAGKANSGATWTDDISHGDLIRVSADQTMTVDPCHLQLLYQGRSPGSDTSQYGQLPYRPGLLTL

SEQ ID NO: 49200 - protein, 309 aa, Trichoderma hamatum
ALLALPVIASASCALPSTYKWTSTGPLANPKSGWVSLKDFSHVPYNGQHLVYSSTVNSAGSYGSMNFGLVSNWTNLSTASQNTMNLGTVAPTLFYFSPKKIWVLAYEWAATPFAYVTSTDPTNANGWSASQPLFSGSISPSSPIDPALISDGTNMYLFFAGDNGKIYRSSMPIGQFPSSFGTSYTTIMSAATNDLFEAIQVYTVSGQNQYLMIVECIGSVGRYFRSFTATSLSGTWTPQAATESNPFAGHANSGATWTNDISSGDLIRSTNDETMTIDPCNLQLLYQGMAVGSTGDYNSLPWRPAVLTL

SEQ ID NO: 49201 - protein, 299 aa, Bacteria
CVLPSTYKWSSTGALAQPKAGWASLKDFTHVVLGGKHLVYGSNFNGSTYGSMTFSPFTTWSDMASAGQKAMKQPAVAPTLFYFAPKKIWVLAYQWGRTAFSYRTSTDPTNPNGWSAEQELFSGSITGSGTGPIDQTLIGDGTNMYLFFAGDNGKIYRASMPIGNFPGSFGSSYTTVMSDTAKNLFEAPQVYKVKDQNQYLMIVEARGAGERRYFRSFTASSLSGAWTPQAATESNPFAGKANSGATWTDDISHGDLIRTNPDQTMTIDPCNLQLLYQGKSPQAGGPYDQLPYRPGVLTL

SEQ ID NO: 49202 - protein, 308 aa, Streptomyces coelicolor
LTGTPPTDGTCALPSTYRWSSTGVLAQPKSGWVALKDFTTVTHNGRHLVYGSTSSGSSYGSMVFSPFTNWSDMASAGQNAMNQAAVAPTLFYFAPKNIWVLAYQWGSWPFIYRTSSDPTDPNGWSAPQPLFTGSISGSDTGPIDQTLIADGQNMYLFFAGDNGKIYRASMPIGNFPGNFGSSYTTIMSDTKANLFEGVQVYKVQGQNQYLMIVEAMGANGRYFRSFTASSLSGSWTPQAASEGNPFAGKANSGATWTNDISHGDLVRDNPDQTMTVDPCNLQFLYQGKSPNAGGDYNSLPWRPGVLTL

SEQ ID NO: 49203 - protein, 298 aa, Streptomyces thermoalcalitolerans
CSLPSTYRWTSTGALAQPANGWVSLKDFTAVKHNGKYLVYGSNFSGSSYGSMMFSPFTNWSDMASARQLGMNQAAVAPTLFYFAPKNIWVLAYQWGAWPFVYRTSSDPTDPNGWSAPQPLFTGSIPDSDTGPIDQTLIADDRNIHLFFAGDNGRIYRASMPIGNFPGNFGSSYTTIMSDTKANLFEGVQVYKVKGQNQYLMIVEAMGANGRYFRSFTASSLSGSWTPQAATESNPFAGKANSGATWTNDISHGDLVRDNPDQTMTVDPCNLQFLYQGKSPTAGGDYNRLPWRPGVLTL

SEQ ID NO: 49204 - protein, 308 aa, Streptomyces beijiangensis
LTGTPPTDGSCSLPSTYRWSSTGVLAQPANGWAAVKDFTTVTYNGKHLVYASNVSGSSYGSMMFSPFTNWSDMASAGQSGMSQAAVAPTLFYFAPKNIWVLAYQWGASPFVYRTSSDPTNPNGWSSPQPLFTGSISGSDTGPIDQTLIADGQNMYLFFAGDNGKIYRASMPIGNFPGNFGSSYTTVMSDTKANLFEGVQVYKVQGQNQYLMIVEAMGANGRYFRSFTASSLNGSWAPQAATESNPFAGKANSGATWTNDISHGDLVRGNPDQTMTIDPCNLQLLYQGKSPTAGGPYDQLPWRPGVLSL

SEQ ID NO: 49205 - protein, 300 aa, Hypocrea atroviridis
ASCALPSTYKWTSTGPLANPKSGWVSLKDFSQVPYNGQHLVYSSTVNAAGSYGSMNFGLVSNWTSLSTASQNTMNLGTVAPTLFYFSPKKIWVLAYEWAATPFAYVTSSDPTNANGWSSSQPLFSGSISPSSPIDPALISDGTNMYLFFAGDNGSIYRSSMPIDQFPSSFGTSYTTVMSAATNDLFEAIQVYTVSGQNQYLMIVECIGSVGRYFRSFTATSLSGTWTPQAATESNPFAGHANSGTTWTNDISSGDLIRSTNDETMTIDPCNLQLLYQGMAVGSSGDYNSLPWRPAVLTLA

SEQ ID NO: 49206 - protein, 300 aa, Streptomyces griseorubiginosus
CDLPSSYRWTSTGALAQPRSGWVSLKDFTVAPYQGKQLVYATTHDNGSSWGSMNFNLFTNWSDMASAGQNAMSNAAVAPSLFYFAPKNIWVLTYQWGGTAFSYRTSTNPTNANGWSAPQALFTGSISGSGTGPIDQTLIGDSQNMYLFFAGDNGKIYRASMPIGNFPGNFGSSYTTVMSDTEKNLFEAPQVYKLQGQNRYLMIVEARGASEQRFFRSFTATSLNGSWTPQAATESNPFAGKANSGATWTNDISHGELLRTSADQTMTVDPCNLQLLYQGRSPNSGGDYGLLPYRPGLLTL

SEQ ID NO: 49207 - protein, 301 aa, Talaromyces stipitatus
CPLPAQYKWTSTGPLANPASGLLSLKDFSHVPYNGQHLVYSSDVNSGGNYGSLNFALFSNWSQMASASQSQMSQGAVAPDLFYFAPKKIWVMGYEWCASAFCYLTSSDPTNANGWSSAKPLYEGSLSGGNGPIDPAIIGDDENMYLFFAGDNGNIYRTSMPIGNFPASFGSSAQTILTDSTYNLFEAVQVYSVQGQNLYLMIVECIGASGSRYFRSFTATSLGGSWTPQASTESNPFAGAANSGATWSQDISSGDLIRSSADQTKPVDPCNLQLLYQGRDPSSNGGSYNNLPYRPGLLTLA

SEQ ID NO: 49208 - protein, 305 aa, Streptomyces nigra
PGDPDSCDLPSSYRWNSTGALAQPRQGWVSLKDFTVAPYNGKQLVYATTHDTGTRWGSMNFGLFGAWSEMGSASQNAMNSSTVAPSLFYFAPKNIWVLAYQWGGTAFSYRTSTDPTNPNGWSSEQVLFSGSISGSGTGPIDQTLIGDGTNMYLFFAGDNGKIYRASMPIGNFPGSFGSTSTVVMSDTTNNLFEAPQVYKLQGQNRYLMIVEAIGSQGRYFRSFTATSLSGSWTPQAASESNPFAGKANSGATWTNDISHGELLRTSADQTMTVDPCHLQLLYQGRSPNSGGDYGLLPYRPGLLTL

SEQ ID NO: 49209 - protein, 317 aa, Actinoplanes utahensis
LVPVGGGSTPTTSPASGSCALPSSYRWTSTGALATPKSGRVALKDFTTVPYNGRHLVYATTHDTGSSWGSMSFSPFTDWTDMASATQNSMNFAAVAPTLFYFAPKSIWVLAYQWGGSAFSYRTSSDPSNPNGWSAAKTLFSGSITGSGTGPIDQTLIGDGTNMYLFFAGDNGKIYRASMPIGTFPGSFGTSSAVVMSDSTSNLFEAVQVYKVQGQSRYLMIVEAVGSGGRYFRSFTATSLGGSWTPQAATEANPFAGKANSGATWTNDISHGELVRATADQTMTVDPCHLQLLYQGRSPSSGGDYGLLPYRPGVLTL

SEQ ID NO: 49210 - protein, 625 aa, unidentified; identical to SEQ ID NO: 63

SEQ ID NO: 49211 - protein, 610 aa, Trichoderma harzianum
APANVAIRSLEERASSADRLVFCHFMIGIVGDRGSSADYDDDMQRAKAAGIDAFALNIGVDGYTDQQLGYAYDSADRNGMKVFISFDFNWWSPGNAVGVGQKIAQYASRPAQLYVDNRPFASSFAGDGLDVNALRSAAGSNVYFVPNFHPGQSSPSNIDGALNWMAWDNDGNNKAPKPGQTVTVADGDNAYKNWLGGKPYLAPVSPWFFTHFGPEVSYSKNWVFPGGPLIYNRWQQVLQQGFPMVEIVTWNDYGESHYVGPLKSKHFDDGNSKWVNDMPHDGFLDLSKPFIAAYKNRDTDISKYVQNEQLVYWYRRNLKALDCDATDTTSNRPANNGSGNYFMGRPDGWQTMDDTVYVAALLKTAGSVTVTSGGTTQTFQANAGANLFQIPASIGQQKFALTRNGQTVFSGTSLMDITNVCSCGIYNFNPYVGTIPAGFDDPLQADGLFSLTIGLHVTTCQAKPSLGTNPPVTSGPVSSLPASSTTRASSPPVSSTRVSSPPVSSPPVSRTSSPPPPPASSTPPSGQVCVAGTVADGESGNYIGLCQFSCNYGYCPPGPCKCTAFGAPISPPASNGRNGCPLPGEGDGYLGLCSFSCNHNYCPPTACQYC

SEQ ID NO: 49212 - protein, 634 aa, Hypocrea lixii; identical to SEQ ID NO: 64

SEQ ID NO: 49213 - protein, 635 aa, Trichoderma harzianum
MLGVFRRLGLGALAAAALSSLGSAAPANVAIRSLEERASSADRLVFCHFMIGIVGDRGSSADYDDDMQRAKAAGIDAFALNIGVDGYTDQQLGYAYDSADRNGMKVFISFDFNWWSPGNAVGVGQKIAQYANRPAQLYVDNRPFASSFAGDGLDVNALRSAAGSNVYFVPNFHPGQSSPSNIDGALNWMAWDNDGNNKAPKPGQTVTVADGDNAYKNWLGGKPYLAPVSPWFFTHFGPEVSYSKNWVFPGGPLIYNRWQQVLQQGFPMVEIVTWNDYGESHYVGPLKSKHFDDGNSKWVNDMPHDGFLDLSKPFIAAYKNRDTDISKYVQNEQLVYWYRRNLKALDCDATDTTSNRPANNGSGNYFMGRPDGWQTMDDTVYVAALLKTAGSVTVTSGGTTQTFQANAGANLFQIPASIGQQKFALTRNGQTVFSGTSLMDITNVCSCGIYNFNPYVGTIPAGFDDPLQADGLFSLTIGLHVTTCQAKPSLGTNPPVTSGPVSSLPASSTTRASSPPPVSSTRVSSPPVSSPPVSRTSSAPPPPASSTPPSGQVCVAGTVADGESGNYIGLCQFSCNYGYCPPGPCKCTAFGAPISPPASNGRNGCPLPGEGDGYLGLCSFSCNHNYCPPTACQYC

SEQ ID NO: 49214 - protein, 597 aa, Trichoderma harzianum
ASSADRLVFCHFMIGIVGDRGSSADYDDDMQRAKAAGIDAFALNIGVDGYTDQQLGYAYDSADRNGMKVFISFDFNWWSPGNAVGVGQKIAQYANRPAQLYVDNRPFASSFAGDGLDVNALRSAAGSNVYFVPNFHPGQSSPSNIDGALNWMAWDNDGNNKAPKPGQTVTVADGDNAYKNWLGGKPYLAPVSPWFFTHFGPEVSYSKNWVFPGGPLIYNRWQQVLQQGFPMVEIVTWNDYGESHYVGPLKSKHFDDGNSKWVNDMPHDGFLDLSKPFIAAYKNRDTDISKYVQNEQLVYWYRRNLKALDCDATDTTSNRPANNGSGNYFMGRPDGWQTMDDTVYVAALLKTAGSVTVTSGGTTQTFQANAGANLFQIPASIGQQKFALTRNGQTVFSGTSLMDITNVCSCGIYNFNPYVGTIPAGFDDPLQADGLFSLTIGLHVTTCQAKPSLGTNPPVTSGPVSSLPASSTTRASSPPPVSSTRVSSPPVSSPPVSRTSSTPPPASSTPPSGQVCVAGTVADGESGNYIGLCQFSCNYGYCPPGPCKCTAFGAPINPPASNGRNGCPLPGEGDGYLGLCSFSCNHNYCPPTACQYC

SEQ ID NO: 49215 - protein, 598 aa, Hypocrea tawa
ASSADRLVFCHFMIGIVGDRGSSADYDDDMQRAKAAGIDAFALNIGVDGYTDQQLGYAYDSADRNGMKVFISFDFNWWSPGNAVGVGQKIAQYANRPAQLYVDNRPFASSFAGDGLDVNALRNAAGSNVYFVPNFHPGQSSPSNIDGALNWMAWDNDGNNKAPKQGQTVTVADGDNAYKNWLGGKPYLAPVSPWFFTHFGPEVSYSKNWVFPGGALIYNRWQQVLQQGFPMVEIVTWNDYGESHYVGPLKSKHFDDGNSKWVNDMPHDGFLDLSKPFIAAYKNRDTDISKYVQNEQLVYWYRRNLKALDCDATDTTSNRPANNGSGNYFMGRPDGWQTMDDTVYVAALLKTAGSVTVTSGGTTQTFQGNAGANLFQIPASIGQQKFALTRNGQTVFSGTSLMDITNVCSCGIYNFNPYVGTIPAGFDDPLQADGLFSLTIGLHVTTCQAKPSLGTNPPVTSGPVSSLPASSTTRASSPPVSSTRVSSPPVSSPPVTSRTSSSPPPPASSTPSSGQVCVAGTVADGESGNYIGLCQFSCNYGYCPPGPCKCTAFGAPISPPASNGRNGCPLPGEGDGYLGLCSFSCNHNYCPPTACQYC

SEQ ID NO: 49216 - protein, 635 aa, Hypocrea tawa
MLGVFRRLGLGSLAAAALSSLGTAAPANVAIRSLEERASSADRLVFCHFMIGIVGDRGSSADYDDDMQRAKAAGIDAFALNIGVDGYTDQQLGYAYDSADRNGMKVFISFDFNWWSPGNAVGVGQKIAQYANRPAQLYVDNRPFASSFAGDGLDVNALRNAAGSNVYFVPNFHPGQSSPSNIDGALNWMAWDNDGNNKAPKQGQTVTVADGDNAYKNWLGGKPYLAPVSPWFFTHFGPEVSYSKNWVFPGGALIYNRWQQVLQQGFPMVEIVTWNDYGESHYVGPLKSKHFDDGNSKWVNDMPHDGFLDLSKPFIAAYKNRDTDISKYVQNEQLVYWYRRNLKALDCDATDTTSNRPANNGSGNYFMGRPDGWQTMDDTVYVAALLKTAGSVTVTSGGTTQTFQGNAGANLFQIPASIGQQKFALTRNGQTVFSGTSLMDITNVCSCGIYNFNPYVGTIPAGFDDPLQADGLFSLTIGLHVTTCQAKPSLGTNPPVTSGPVSSLPASSTTRASSPPVSSTRVSSPPVSSPPVTSRTSSSPPPPASSTPSSGQVCVAGTVADGESGNYIGLCQFSCNYGYCPPGPCKCTAFGAPISPPASNGRNGCPLPGEGDGYLGLCSFSCNHNYCPPTACQYC

SEQ ID NO: 49217 - protein, 635 aa, Hypocrea lixii
MLGVFRRLRLGALAAAALSSLGSAAPANVAIRSLEERASSADRLVFCHFMIGIVGDRGSSADYDDDMQRAKAAGIDAFALNIGVDGYTDQQLGYAYDSADRNGMKVFISFDFNWWSPGNAVGVGQKIAQYANRPAQLYVDNRPFASSFAGDGLDVNALRSAAGSNVYFVPNFHPGQSSPSNIDGALNWMAWDNDGNNKAPKPGQTVTVADGDNAYKNWLGGKPYLAPVSPWFFTHFGPEVSYSKNWVFPAGPLIYNRWQQVLQQGFPMVEIVTWNDYGESHYVGPLKSKHFDDGNSKWVNDMPHDGFLDLWKPFIAAYKNRDTDISKYVQNEQLVYWYRRNLKALDCDATDTTSNRPANNGSGNYFEGRPDGWQTMDDAVYVAALLKTAGSVTITSGGTTQTFQANAGANLFQIPASIGQQKFALTRNAQTIFSGTSLMDITNVCSCGIYNFNPYVGTIPAGFDDPLQADGLFSLTIGLHVTTCQAKPSLGTNPPVTSGPVSSLPASSTTRASSPPPVSSTRVSSPPVSSPPVSRTSSPPPPPASSTPPSGQVCVAGTVADGESGNYIGLCQFSCNYGYCPPGPCKCTAFGAPISPPASNGRNGCPLPGEGDGYLGLCSFSCNHNYCPPTACQYC

SEQ ID NO: 49218 - protein, 635 aa, Hypocrea lixii
MLGVFRRLRLGALAAAALSSLGSAAPANVAIRSLEERASSADRLVFCHFMIGIVGDRGSSADYDDDMQRAKAAGIDAFALNIGVDGYTDQQLGYAYDSADRNGMKVFISFDFNWWSPGNAVGVGQKIAQYANRPAQLYVDNRPFASSFAGDGLDVNALRSAAGSNVYFVPNFHPGQSSPSNIDGALNWMAWDNDGNNKAPKPGQTVTVADGDNAYKNWLGGKPYLAPVSTWVFNHFGPEVSYSKNWVFPSGPLIYNRWQQVLQQGFPRVEIVTWNDYGESHYVGPLKSKQFHDGNSKWVNDMPHDGFLDLSKPFIAAYKNRDTDISKYVQNEQLVYWYRRNLKALDCDATDTTSNRPANNGSGNYFEGRPDGWQTMDDTVYVAALLKTAGSVTVTSGGTTQTFQANAGANLFQIPASIGQQKFALTRNGQTVFSGTSLMDITNVCSCGIYNFNPYVGTIPAGFDDPLQADGLFSLTIGLHVTTCQAKPSLGTNPPVTSGPVSSLPASSTTRASSPPPVSSTRVSSPPVSSPPVSRTSSAPPPPGNSTPPSGQVCVAGTVADGESGNYIGLCQFSCNYGYCPPGPCKCTAFGAPISPPASNGRNGCPLPGEGDGYLGLCSFSCNHNYCPPTACQYC

SEQ ID NO: 49219 - protein, 633 aa, Hypocrea tawa
MLGVVRRLGLGALAAAALSSLGXAAPANVAIRSLEERASSADRLVFCHFMIGIXGDRGSSXDYDDDMQRAKAAGIDAFALNIGVDGYTDQQLXXAYDXADRXGMKVFISFDFNWWSPGNAVGVGQKIAQYASRPAQLYVDNRPFASSFAGDGLDVNALRNAAGSNVYFVPNFHPGQSSPSXIDGALNWMAWDNDGNNKAPKPGQXVTVADGDNXYXXWLGGKPYLAPVSPWFFTHFGPEVSYSKNWVFPGGSLIYXRWQXVLXQGFXMVEIVTWNDYGESHYXGPLKSXHXDDGNSKWXNDMPHDGFLDLSKPFIAAYKNRDTDXXKYVQNEQLVYWYRRNLKXLDCDATDTTSNRPANNGSGNYFMGRPDGWQTMDDTVYVXALLKTAGXVTVTSGGXTQTFQGXAGANLFXXPAXXGQQKFALXRNGQTVFSXTSLMDITNVCXCGIYNFNPYVGTXPAGFDDPLQADGLXSLTIGLHVTTCQAKPSLGTNPPXTSGPXSSXPASXTXRASSPPXSXTRXSSXPVSSXXXRXSSSXPPXXXSTPPXGQVCVAGTVADGXSGNYIGLCXFSCNXGYCPPGPCKCTAFGAPIXPPAXNGRNGCPLPGEXDXYLGLCSFSCNHNYCPPTACQYC

SEQ ID NO: 49220 - protein, 585 aa, Hypocrea jecorina
ASSADRLVFCHFMIGICGDRTSSTDYDDDMQRAKAAGIDAFALNIGVDGYTDQQLNFAYDAADRAGMKVFISFDFNWWSPGNAAGVGQKIAQYASRPAQLYVDNRPFASSFAGDGLDVNTLRNAAGSNVYFVPNFHPGQSSPSTIDGALNWMAWDNDGNNKAPKPGQNVTVADGDNSYRSWLAGKPYLAPVSPWFFTHFGPEVSYSKNWVFPGGSLWYDRWQDVLRQGFEMVEIVTWNDYGESHYTGPLESRHYDDGNSKWTNDMPHDGFLDLAKPFIAAYKNRDTDVAPYIQNEQLIYWYRRNLKGLDCDATDTTSNRPANNGSGNYFMGRPDGWQTMDDTVYVVALLKSAGTVTVTSGGATQTFQGTAGANLFEVPANLGQQKFALSRNGQTVFSSTSLMDITNVCPCGIYNFNPYVGTVPAGFDDPLGPDGLASLTIGLHVTTCQAKPSLGTNPPITSGPGSSVPVSTPPGSTTRFSSTPVSSRSSSSTPPVSTPPPGQVCVAGTVADGQSGNYIGLCNFSCNFGYCPPGPCKCTAYGAPINPPATNGRNGCPLPGEDDSYLGLCSFSCNHNYCPPTACQYC

SEQ ID NO: 49221 - protein, 622 aa, Trichoderma reesei
MFGLVRRLGVGALVAAALSSLAAAAPANVAIRSLEERASSADRLVFCHFMIGICGDRTSSTDYDDDMQRAKAAGIDAFALNIGVDGYTDQQLNFAYDAADRAGMKVFISFDFNWWSPGNAAGVGQKIAQYASRPAQLYVDNRPFASSFAGDGLDVNTLRNAAGSNVYFVPNFHPGQSSPSTIDGALNWMAWDNDGNNKAPKPGQNVTVADGDNSYRSWLAGKPYLAPVSPWFFTHFGPEVSYSKNWVFPGGSLWYDRWQDVLRQGFEMVEIVTWNDYGESHYTGPLESRHYDDGNSKWTNDMPHDGFLDLAKPFIAAYKNRDTDVAPYIQNEQLIYWYRRNLKGLDCDATDTTSNRPANNGSGNYFMGRPDGWQTMDDTVYVVALLKSAGTVTVTSGGATQTFQGTAGANLFEVPANLGQQKFALSRNGQTVFSSTSLMDITNVCPCGIYNFNPYVGTVPAGFDDPLGPDGLASLTIGLHVTTCQAKPSLGTNPPITSGPGSSVPVSTPPGSTTRFSSTPVSSRSSSSTPPVSTPPPGQVCVAGTVADGQSGNYIGLCNFSCNFGYCPPGPCKCTAYGAPINPPATNGRNGCPLPGEDDSYLGLCSFSCNHNYCPPTACQYC

SEQ ID NO: 49222 - protein, 590 aa, Trichoderma konilangbra
ASSADRLVFCHFMIGICGDRGSSTDYDDDMQRAKAAGIDAFALNIGVDGYTDQQLNFAYDAADRAGMKVFISFDFNWWSPGNAVGVGQKIAQYASRPAQLYVDNRPFASSFAGDGLDVNALRNAAGSNVYFVPNFHPGQSSPSTIDGALNWMAWDNDGNNKAPKPGRNVTVADGDNSYRSWLGGKPYLAPVSPWFFTHFGPEVSFSKNWVFPGGSLLYDRWQDVLRQGPEMVEIITWNDYGESHYTGPLKSRHYDDGNSKWTNDMPHDGFLDLSKPFIAAYKNRDTNVARYVQSDQLVYWYRRTLKGLDCDATDTTSNRPANNASGNYFMGRPDGWQTMDDTVYVVALLTAAGTVTVTSGGATQTFQGTAGANLFEVPANLGQQKFALSRNGQTVFSSTSLMDIANVCPCGLYNFNPYVGTVPPGFDDPLQADGLASLTIGLHVTTCQARPSLGTNPPITSGPGSSVPASTTRSTSPPGSTSRFSSTPVSSRSISSTPPVSTPPPGQVCVAGTVADGQSGNYIGLCNFSCNFGYCPPGPCKCTAFGAPINPPATNGRNGCPLPGEDDSYLGLCSFSCNHNYCPPTACQYC

SEQ ID NO: 49223 - protein, 627 aa, Trichoderma konilangbra
MLGILRRLALGALAAAALSPLVVAAPANVAIRSLEERASSADRLVFCHFMIGICGDRGSSTDYDDDMQRAKAAGIDAFALNIGVDGYTDQQLNFAYDAADRAGMKVFISFDFNWWSPGNAVGVGQKIAQYASRPAQLYVDNRPFASSFAGDGLDVNALRNAAGSNVYFVPNFHPGQSSPSTIDGALNWMAWDNDGNNKAPKPGRNVTVADGDNSYRSWLGGKPYLAPVSPWFFTHFGPEVSFSKNWVFPGGSLLYDRWQDVLRQGPEMVEIITWNDYGESHYTGPLKSRHYDDGNSKWTNDMPHDGFLDLSKPFIAAYKNRDTNVARYVQSDQLVYWYRRTLKGLDCDATDTTSNRPANNASGNYFMGRPDGWQTMDDTVYVVALLTAAGTVTVTSGGATQTFQGTAGANLFEVPANLGQQKFALSRNGQTVFSSTSLMDIANVCPCGLYNFNPYVGTVPPGFDDPLQADGLASLTIGLHVTTCQARPSLGTNPPITSGPGSSVPASTTRSTSPPGSTSRFSSTPVSSRSISSTPPVSTPPPGQVCVAGTVADGQSGNYIGLCNFSCNFGYCPPGPCKCTAFGAPINPPATNGRNGCPLPGEDDSYLGLCSFSCNHNYCPPTACQYC

SEQ ID NO: 49224 - protein, 627 aa, Trichoderma konilangbra
MLGILRRLALGALAAAALSPLVVAAPANVAIRSLEERASSADRLVFCHFMIGICGDRGSSTDYDDDMQRAKAAGIDAFALNIGVDGYTDQQLNFAYDAADRAGMKVFISFDFNWWSPGNAVGVGQKIAQYASRPAQLYVDNRPFASSFAGDGLDVNALRNAAGSNVYFVPNFHPGQSSPSTIDGALNWMAWDNDGNNKAPKPGRNVTVADGDNSYRSWLGGKPYLAPVSPWFFTHFGPEVSFSKNWVFPGGSLLYDRWQDVLXQGPEMVEIITWNDYGESHYTGPLKSRHYDDGNSKWTNDMPHDGFLDLSKPFIAAYKNRDTNVARYVQSDQLVYWYRRTLKGLDCDATDTTSNRPANNASGNYFMGRPDGWQTMDDTVYVVALLTAAGTVTVTSGGATQTFQGTXGANLFEVPANLGQQKFALSRNGQTVFSSTSLMDIANVCPCGLYNFNPYVGTVPPGFDDPLQADGLASLTIGLHVTTCQARPSLGTNPPITSGPGSSVPASTTRSTSPPGSTSRFSSTPVSSRSISSTPPVSTPPPGQVCVAGTVADGQSGNYIGLCNFSCNFGYCPPGPCKCTAFGAPINPPATNGRNGCPLPGEDDSYLGLCSFSCNHNYCPPTACQYC

SEQ ID NO: 49225 - protein, 395 aa, Myceliophthora thermophila
KNWVFPGGSLIFDRWNEVLQKGFPMVELITWNDYGESHYIGPLSSPHYDDGNSKWTNDIHDRGRPHNGWLDLSKPFIAAYKNKDTSVDKYITDDQIIYWYRRTLGSLDCDATDTTAGRPANNDSGNYFQGRPDGWQTLEDAVYVVTLLTEPGTLTIASGDQVVEQEVPAGANLVKVPAAVGKQRFSLSRGGTVVLQDTSLMDISNVCPCGLYNFNAYVGTVPAGFNDPLGEHGLASLTIGLHVTTCSATPSLGTNPPTTATTTATASTTTAGPITTSTTSTTSTSSGTTSAPSPSKTTSEPTQPTSTSEPDLPCNGGTNADGETGNYAGLCSFACSYGYCPPGPCKCTSRGTPGTPPPPSGRDGCPLPGEGDGYKGLCSFACSHGYCPETACQYC

SEQ ID NO: 49226 - protein, 603 aa, Myceliophthora thermophila
SSLEARAAAGDRLVFCHFMIGIVGDRTSAADYDDDMRRAKEAGIDAFALNIGVDGYTDQQLNYAYESAARNDMKVFISFDFNWYSPGNAAAVGSKIAQYASKPAQLLVNDRVFASSFAGDGLDVDAVRAAAGTDVFFVPNFHPGQGSLAAVDGAFNWMAWPNDGNNKAPKPGKSLSVADGDNAYLDWLGDKTYMARTSNLPEIIYGNHEVSFSKNWVFPGGSLIFDRWNEVLQKGFPMVELITWNDYGESHYIGPLSSPHYDDGNSKWTNDMPHNGWLDLSKPFIAAYKNKDTSVDKYITDDQIIYWYRRTLGSLDCDATDTTAGRPANNDSGNYFQGRPDGWQTLEDAVYVVTLLTEPGTLTIASGDQVVEQEVPAGANLVKVPAAVGKQRFSLSRGGTVVLQDTSLMDISNVCPCGLYNFNAYVGTVPAGFNDPLGEHGLASLTIGLHVTTCSATPSLGTNPPTTATTTATASTTTAGPITTSTTSTTSTSSGTTSAPSPSKTTSEPTQPTSTSEPDLPCNGGTNADGETGNYAGLCSFACSYGYCPPGPCKCTSRGTPGTPPPPSGRDGCPLPGEGDGYKGLCSFACSHGYCPETACQYC

SEQ ID NO: 49227 - protein, 629 aa, Myceliophthora thermophila
MLFSSVLLSFVSTVGLAAVVTPRGPAPSSLEARAAAGDRLVFCHFMIGIVGDRTSAADYDDDMRRAKEAGIDAFALNIGVDGYTDQQLNYAYESAARNDMKVFISFDFNWYSPGNAAAVGSKIAQYASKPAQLLVNDRVFASSFAGDGLDVDAVRAAAGTDVFFVPNFHPGQGSLAAVDGAFNWMAWPNDGNNKAPKPGKSLSVADGDNAYLDWLGDKTYMAPISPWFFTHFGPEVSFSKNWVFPGGSLIFDRWNEVLQKGFPMVELITWNDYGESHYIGPLSSPHYDDGNSKWTNDMPHNGWLDLSKPFIAAYKNKDTSVDKYITDDQIIYWYRRTLGSLDCDATDTTAGRPANNDSGNYFQGRPDGWQTLEDAVYVVTLLTEPGTLTIASGDQVVEQEVPAGANLVKVPAAVGKQRFSLSRGGTVVLQDTSLMDISNVCPCGLYNFNAYVGTVPAGFNDPLGEHGLASLTIGLHVTTCSATPSLGTNPPTTATTTATASTTTAGPITTSTTSTTSTSSGTTSAPSPSKTTSEPTQPTSTSEPDLPCNGGTNADGETGNYAGLCSFACSYGYCPPGPCKCTSRGTPGTPPPPSGRDGCPLPGEGDGYKGLCSFACSHGYCPETACQYC

SEQ ID NO: 49228 - protein, 630 aa, Myceliophthora thermophila
MLFSSVLLSFVSTVGLAAVVTPRGPAPSSLEARAAAGDRLVFCHFMIGIVGDRTSAADYDDDMRRAKEAGIDAFALNIGVDGYTDQQLNYAYESAARNDMKVFISFDFNWYSPGNAAAVGSKIAQYASKPAQLLVNDRVFASSFAGDGLDVDAVRAAAGTDVFFVPNFHPGQGSLAAVDGAFNWMAWPNDGNNKAPKPGKSLSVADGDNAYLDWLGDKTYMARTSNLPEIIYGNHEVSFSKNWVFPGGSLIFDRWNEVLQKGFPMVELITWNDYGESHYIGPLSSPHYDDGNSKWTNDMPHNGWLDLSKPFIAAYKNKDTSVDKYITDDQIIYWYRRTLGSLDCDATDTTAGRPANNDSGNYFQGRPDGWQTLEDAVYVVTLLTEPGTLTIASGDQVVEQEVPAGANLVKVPAAVGKQRFSLSRGGTVVLQDTSLMDISNVCPCGLYNFNAYVGTVPAGFNDPLGEHGLASLTIGLHVTTCSATPSLGTNPPTTATTTATASTTTAGPITTSTTSTTSTSSGTTSAPSPSKTTSEPTQPTSTSEPDLPCNGGTNADGETGNYAGLCSFACSYGYCPPGPCKCTSRGTPGTPPPPSGRDGCPLPGEGDGYKGLCSFACSHGYCPETACQYC

SEQ ID NO: 49229 - protein, 203 aa, Bacillus amyloliquefaciens; identical to SEQ ID NO: 46

SEQ ID NO: 49230 - protein, 197 aa, unidentified
FNSYNSGLWQKADGYSNGDMFNCTWRANNVSMTSSGEMRLALTSPSYNKFDCGENRSVQTYGYGLYEVRMKPAKNTGIVSSFFTYTGPTEGTPWDEIDIEFLGKDTTKVQFNYYTNGAGNHEKLADLGFDAANAYHTYAFDWQPNSIKWYVDGQLKHTATTQIPAAPGKIMMNLWNGTGVDDWLGSYNGVNPLYAHY

SEQ ID NO: 49231 - protein, 196 aa, unidentified
FNSYNSGLWQKADGYSNGDMFNCTWRANNVSMTSSGEMRLALTSPSYNKFDCGENRSVQTYGYGLYEVRMKPAKNTGIVSSFFTYTGPTEGTPWDEIDIEFLGKDTTKVQFNYYTNGAGNHEKLADLGFDAANAYHTYAFDWQPNSIKWYVDGQLKHTATTQIPAAPGKIMMNLWNGTGVDDWLGSYNGVNPLYAH

SEQ ID NO: 49232 - protein, 203 aa, Unidentified
FNSYNSGLWQKADGYSNGDMFNCTWRANNVSMTSSGEMRLALTSPSYNKFDCGENRSVQTYGYGPYEVRMKPAKNTGIVSSFFTYTGPTEGTPWDEIDIEFLGKDTTKVQFNYYTNGAGNHEKLADLGFDAANAYHTYAFDWQPNSIKWYVDGQLKHTATTQIPAAPGKIMMNLWNGTGVDDWLGSYNGVNPLYAHYDWVRYT

SEQ ID NO: 49233 - protein, 203 aa, Synthetic construct
FNSYNSGLWQKADGYSNGDMFNCTWRANNVSMTSSGEMRLALTSPSYNKFDCGENRSVQTYGYGLYEVRMKPAKNTGIVSSFFTYTGPTEGTPWDEIDIEFLGKDTTKVQFNYYTNGAGNHEKLPDLGFDAANAYHTYAFDWQPNSIKWYVDGQLKHTATTQIPAAPGKIMMNLWNGTGVDDWLGSYNGVNPLYAHYDWVRYT

SEQ ID NO: 49234 - protein, 203 aa, Bacillus sp.
FNSYNSGLWQKADGYSNGDMFNCTWRANNVSMTSSGEMRLALTSPSYNKFDCGENRSVQTYGYGLYEVRMRPAKNTGIVSSFFTYTGPTEGTPWDEIDIEFLGKDTTKVQFNYYTNGAGNHVKLADLGFDAANAYHTYAFDWQPNSIKWYVDGQLKHTATTQIPAAPGKIMMNLWNGTGVDDWLGSYNGVNPLYAHYDWVRYT

SEQ ID NO: 49235 - protein, 203 aa, Bacillus sp.
FSSYNSGLWQKADGYSNGDMFNCTWRANNVSMTSSGEMRLALTSPSYNKFDCGENRSVQTYGYGLYEVRMKPAKNTGIVSSFFTYTGPTEGTPWDEIDIEFLGKDTTKVQFNYYTNGAGNHEKLADLGFDAANAYHTYAFDWQPNSIKWYVDGQLKHTATTQIPAAPGKIMMNLWNGTRVDDWLGSYNGVNPLYAHYDWVRYT

SEQ ID NO: 49236 - protein, 203 aa, Bacillus sp.
FNSYNSGLWQKADGYSNGDMFNCTWRANNVSMTSSGEMRLALTSPSYNKFDRGENRSVQTYGYGLYEVRMKPAKNTGIVSIFFTYTGPTEGTPWDEIDIEFLGKDTTKVQFNYYTGGAGNHEKLADLGFDAANAYHTYAFDWQPNSIKWYVDGQLKHTATTQIPAAPGKIMMNLWNGTGVDDWLGSYNGVNPLYAHYDWVRYT

SEQ ID NO: 49237 - protein, 203 aa, Unidentified
FNSYNSGLWQKADGYSNGDMFNCTWRANNVSMTSSGEMRLALTSPSYNKFDCGENRSVQTYGYGLYEVRMKPAKNTGIVSSFFTYTGPTEGTPWDEIDIESLGKDTTKVQFNYYTNGAGNHEKLADLGFDAANAYHMYAFDWQPNSIKWYVDGQLKHTATTQVPAAPGKIMMNLWNGTGVDDWLGSYNGVNPLYAHYDWVRYT

SEQ ID NO: 49238 - protein, 196 aa, Unidentified
FNSYNSGLWQKADGYSNGDMFNCTWRANNVSMTSSGEMRLALTSPSYNKFDCGENRSVQTYGYGLYEVRMKPAKNTGIVSSFFTYTGPTEGTPWDEIDIESLGKDTTKVQFNYYTNGAGNHEKLADLGFDAANAYHMYAFDWQPNSIKWYVDGQLKHTATTQVPAAPGKIMMNLWNGTGVDDWLGSYNGVNPLYAH

SEQ ID NO: 49239 - protein, 202 aa, Bacillus amyloliquefaciens
FNSYNSGLWQKADGYSNGDMFNCTWRANNVSMTSLGEMRLALTSPSYNKFDCGENRSVQTYGYGLYEVRMKPAKNTGIVSSFFTYTGPTEGTPWDEIDIEFLGKDTTKVQFNYYTNGAGNHEKFADLGFDAANAYHTYAFDWQPNSIKWYVDGQLKHTATTQIPAAPGKIMMNLWNGTGVDDWLGSYNGVNPIYAHYDWMRY

SEQ ID NO: 49240 - protein, 203 aa, Bacillus subtilis
FNSYNSGLWQKADGYSNGDMFNSTWRADNVSMTSSGEMRLALTSPSYNKFDCGENRSVQTYGYGLYEVRMKPAKNTGIVSSFFTYTGPTEGTPWDEIDIEFLGKDTTKVQFNYYTNGAENHEKLADLGFDAANAYHTYAFDWQPNSIKWYVDWQLKHTATTQIPTAPGKIMMNLWNGTGVSDWLGSYNGVNPLYAHYDWVRYT

SEQ ID NO: 49241 - protein, 203 aa, Bacillus subtilis
FNSYNSGLWQKANGYSNGDMFNCTWRANNVSMTSSGEMRLALTSPSYNKFDCGENRSVQTYGYGLYEVRMKPAKNTGIVSSFFTYTGPTDGTPWDEIDIEFLGKDTTKVQFNYYTNGAGNHEKVADLGFDAANAYHTYAFDWQPNSIKWYVDGQLKHTATSQIPTNPGKIMMNLWNGVGVDDWLGSYNGVNPLYAHYDWVRYT

SEQ ID NO: 49242 - protein, 203 aa, Bispora sp. MEY-1
FNSYNSGLWQKANGYSNGDMFNCTWRANNVSMTSSGEMRLALTSPSYNKFDCGENRSVQTYGYGLYEVRMKPAKNTGIVSSFFTYTGPTDGTPWDEIDIEFLGKDTTKVQFNYYTNGAGNHEKVADLGFDAANAYHTYAFDWQPNSIKWYVDGQLKHTATSQIPTTPGKIMMNLWNGIGVDDWLGSYNGVNPLYAHYDWVRYT

SEQ ID NO: 49243 - protein, 203 aa, Bacillus amyloliquefaciens
FNSYNSGLWQKANGYSNGDMFNCTWRANNVSMTSSGEMRLALTSPSYNKFDCGENRSVQTYGYGLYEVRMKPAKNTGIVSSFFTYTGPTDGTPWDEIDIEFLGKDTTKVQFNYYTNGAGNHEKVADLGFDATNAYHTYAFDWQPNSIKWYVDGQLKHTATSQIPTNPGKIMMNLWNGIGVDDWLGSYNGVNPLYAHYDWVRYT

SEQ ID NO: 49244 - protein, 203 aa, Bacillus licheniformis
FNSYNSGLWQKANGYSNGDMFNCTWRANNVSMTSSGEMLLALTSPSYNKFDCGENRSVQTYGYGLYEVRMKPAKNTGIVSSFFTYTGPTDGTPWDEIDIEFLGKDTTKVQFNYYTNGAGNHEKVADLGFDAANAYHTYAFDWQPNSIKWYVDGQLKHTATSQIPTTPGKIMMNLWNGIGVDDWLGSYNGVNPLYAHYDWVRYT

SEQ ID NO: 49245 - protein, 202 aa, Bacillus licheniformis
FNSYNSGLWQKANGYSNGDMFNCTWRANNVSMTSSGEMRLALTSPSYNKFDCGENRSVQTYGYGLYEVRMKPAKNTGIVSSFFTYTGPTDGTPWDEIDIEFLGKDTTKVQFNYYTNGAGNHEKVADLGFDAANAYHTYAFDWQPNSIKWYVDGQLKHTATSQIPTTPGKIMMNLWNGIGVDDWLGSYNGVNPLYAHYDWVRF

SEQ ID NO: 49246 - protein, 203 aa, Bacillus amyloliquefaciens
FNSYNSGLWQKANGYSNGDMFNCTWRANNVSMTSSGEMRLALTSPSYNKFDCGENRSVQTYGYGLYEVRMKPAKNTGIVSSFFTYTGPTDGTPWDEIDIEFLGKDTTKVQFNYYTNGAGNHEKVADLGFDATNAYHTYAFDWQPNSIKWYVDGQLKHTATSQIPTNPGKIHMNLWNGIGVDDWLGSYNGVNPLYAHYDWVRYT

SEQ ID NO: 49247 - protein, 203 aa, Bacillus amyloliquefaciens
FNSYNSGLWQKANGYSNGDNFNCTWRANNVSMTSSGEMRLALTSPSYNKFDCGENRSVQTYGYGLYEVRMKPAKNTGIVSSFFTYTGPTDGTPWDEIDIEFLGKDTTKVQFNYYTNGAGNHEKVADLGFDATNAYHTYAFDWQPNSIKWYVDGQLKHTATSQIPTNPGKIMMNLWNGIGVDDWLGSYNGVNPLYAHYDWVRYT

SEQ ID NO: 49248 - protein, 203 aa, Bacillus amyloliquefaciens
FNSYNSGLWQKANGYSNGDYFNCTWRANNVSMTSSGEMRLALTSPSYNKFDCGENRSVQTYGYGLYEVRMKPAKNTGIVSSFFTYTGPTDGTPWDEIDIEFLGKDTTKVQFNYYTNGAGNHEKVADLGFDATNAYHTYAFDWQPNSIKWYVDGQLKHTATSQIPTNPGKIMMNLWNGIGVDDWLGSYNGVNPLYAHYDWVRYT

SEQ ID NO: 49249 - protein, 203 aa, Bacillus amyloliquefaciens
FNSYNSGLWQKANGYSNGDGFNCTWRANNVSMTSSGEMRLALTSPSYNKFDCGENRSVQTYGYGLYEVRMKPAKNTGIVSSFFTYTGPTDGTPWDEIDIEFLGKDTTKVQFNYYTNGAGNHEKVADLGFDATNAYHTYAFDWQPNSIKWYVDGQLKHTATSQIPTNPGKIHMNLWNGIGVDDWLGSYNGVNPLYAHYDWVRYT

SEQ ID NO: 49250 - protein, 203 aa, Bacillus amyloliquefaciens
FNSYNSGLWQKANGYSNGDCFNCTWRANNVSMTSSGEMRLALTSPSYNKFDCGENRSVQTYGYGLYEVRMKPAKNTGIVSSFFTYTGPTDGTPWDEIDIEFLGKDTTKVQFNYYTNGAGNHEKVADLGFDATNAYHTYAFDWQPNSIKWYVDGQLKHTATSQIPTNPGKILMNLWNGIGVDDWLGSYNGVNPLYAHYDWVRYT

SEQ ID NO: 49251 - protein, 203 aa, Bacillus amyloliquefaciens
FNSYNSGLWQKANGYSNGDAFNCTWRANNVSMTSSGEMRLALTSPSYNKFDCGENRSVQTYGYGLYEVRMKPAKNTGIVSSFFTYTGPTDGTPWDEIDIEFLGKDTTKVQFNYYTNGAGNHEKVADLGFDATNAYHTYAFDWQPNSIKWYVDGQLKHTATSQIPTNPGKIFMNLWNGIGVDDWLGSYNGVNPLYAHYDWVRYT

SEQ ID NO: 49252 - protein, 203 aa, Bacillus amyloliquefaciens
FNSYNSGLWQKANGYSNGDVFNCTWRANNVSMTSSGEMRLALTSPSYNKFDCGENRSVQTYGYGLYEVRMKPAKNTGIVSSFFTYTGPTDGTPWDEIDIEFLGKDTTKVQFNYYTNGAGNHEKVADLGFDATNAYHTYAFDWQPNSIKWYVDGQLKHTATSQIPTNPGKILMNLWNGIGVDDWLGSYNGVNPLYAHYDWVRYT

SEQ ID NO: 49253 - protein, 203 aa, Bacillus amyloliquefaciens
FNSYNSGLWQKANGYSNGDLFNCTWRANNVSMTSSGEMRLALTSPSYNKFDCGENRSVQTYGYGLYEVRMKPAKNTGIVSSFFTYTGPTDGTPWDEIDIEFLGKDTTKVQFNYYTNGAGNHEKVADLGFDATNAYHTYAFDWQPNSIKWYVDGQLKHTATSQIPTNPGKIAMNLWNGIGVDDWLGSYNGVNPLYAHYDWVRYT

SEQ ID NO: 49254 - protein, 203 aa, Bacillus amyloliquefaciens
FNSYNSGLWQKANGYSNGDNFNCTWRANNVSMTSSGEMRLALTSPSYNKFDCGENRSVQTYGYGLYEVRMKPAKNTGIVSSFFTYTGPTDGTPWDEIDIEFLGKDTTKVQFNYYTNGAGNHEKVADLGFDATNAYHTYAFDWQPNSIKWYVDGQLKHTATSQIPTNPGKIFMNLWNGIGVDDWLGSYNGVNPLYAHYDWVRYT

SEQ ID NO: 49255 - protein, 203 aa, Bacillus amyloliquefaciens
FNSYNSGLWQKANGYSNGDSFNCTWRANNVSMTSSGEMRLALTSPSYNKFDCGENRSVQTYGYGLYEVRMKPAKNTGIVSSFFTYTGPTDGTPWDEIDIEFLGKDTTKVQFNYYTNGAGNHEKVADLGFDATNAYHTYAFDWQPNSIKWYVDGQLKHTATSQIPTNPGKILMNLWNGIGVDDWLGSYNGVNPLYAHYDWVRYT

SEQ ID NO: 49256 - protein, 203 aa, Bacillus amyloliquefaciens
FNSYNSGLWQKANGYSNGDQFNCTWRANNVSMTSSGEMRLALTSPSYNKFDCGENRSVQTYGYGLYEVRMKPAKNTGIVSSFFTYTGPTDGTPWDEIDIEFLGKDTTKVQFNYYTNGAGNHEKVADLGFDATNAYHTYAFDWQPNSIKWYVDGQLKHTATSQIPTNPGKIRMNLWNGIGVDDWLGSYNGVNPLYAHYDWVRYT

SEQ ID NO: 49257 - protein, 203 aa, Bacillus amyloliquefaciens
FNSYNSGLWQKANGYSNGDSFNCTWRANNVSMTSSGEMRLALTSPSYNKFDCGENRSVQTYGYGLYEVRMKPAKNTGIVSSFFTYTGPTDGTPWDEIDIEFLGKDTTKVQFNYYTNGAGNHEKVADLGFDATNAYHTYAFDWQPNSIKWYVDGQLKHTATSQIPTNPGKIAMNLWNGIGVDDWLGSYNGVNPLYAHYDWVRYT

SEQ ID NO: 49258 - protein, 203 aa, Bacillus sp. SJ-10
FNSYNSGLWKKANGYSNGDMFNCTWRANNVSMTSSGEMRLALTSPSYNKFDCGENRSVQTYGYGLYEVRMKPAKNTGIVSSFFTYTGPTDGTPWDEIDIEFLGKDTTKVQFNYYTNGAGNHEKIVDLGFDAANAYHTYAFDWQANSIKWYVDGQLKHTATNQIPTTPGKIMMNLWNGIGVDDWLGSYNGVNPLYAHYDWVRYT

SEQ ID NO: 49259 - protein, 203 aa, Bacillus subtilis
FNSYNSGFWQKANGYSNGDMFNCTWRANNVSVTSSGEMRLALTSPSYNKFDCGENRSAQTYGYGLYEVRMKPAKNTGIVSSFFTYTGPTDGTPWDEIDIEFLGKDTTKVQFNYYTNGAGNHEKVADLGFDAANAYHTYAFDWQPNSIKWYVDGQLKHTATSQIPTTPGKIMMNLWNGIGVDDWLGSYNGVNPLYAHYDWVRYT

SEQ ID NO: 49260 - protein, 203 aa, Bacillus amyloliquefaciens
FNSYNSGLWQKANGYSNGDSFNCTWRANNVSMTSSGEMRLALTSPSYNKFDCGENRSVQTYGYGLYEVRMKPAKNTGIVSSFFTYTGPTDGTPWDEIDIEFLGKDTTKVQFNYYTNGAGNHEKVADLGFDATNAYHTYAFDWQPNSIKWYVDGQLKHTATSQIPTNPGKIYMNLWNGIGVDDWLGSYNGVNPLYAHYDWVRYT

SEQ ID NO: 49261 - protein, 203 aa, Bacillus amyloliquefaciens
FNSYNSGLWQKANGYSNGDGFNCTWRANNVSMTSSGEMRLALTSPSYNKFDCGENRSVQTYGYGLYEVRMKPAKNTGIVSSFFTYTGPTDGTPWDEIDIEFLGKDTTKVQFNYYTNGAGNHEKVADLGFDATNAYHTYAFDWQPNSIKWYVDGQLKHTATSQIPTNPGKILMNLWNGIGVDDWLGSYNGVNPLYAHYDWVRYT

SEQ ID NO: 49262 - protein, 203 aa, Bacillus amyloliquefaciens
FNSYNSGLWQKANGYSNGDLFNCTWRANNVSMTSSGEMRLALTSPSYNKFDCGENRSVQTYGYGLYEVRMKPAKNTGIVSSFFTYTGPTDGTPWDEIDIEFLGKDTTKVQFNYYTNGAGNHEKVADLGFDATNAYHTYAFDWQPNSIKWYVDGQLKHTATSQIPTNPGKIPMNLWNGIGVDDWLGSYNGVNPLYAHYDWVRYT

SEQ ID NO: 49263 - protein, 203 aa, Bacillus amyloliquefaciens
FNSYNSGLWQKANGYSNGDVFNCTWRANNVSMTSSGEMRLALTSPSYNKFDCGENRSVQTYGYGLYEVRMKPAKNTGIVSSFFTYTGPTDGTPWDEIDIEFLGKDTTKVQFNYYTNGAGNHEKVADLGFDATNAYHTYAFDWQPNSIKWYVDGQLKHTATSQIPTNPGKIHMNLWNGIGVDDWLGSYNGVNPLYAHYDWVRYT

SEQ ID NO: 49264 - protein, 203 aa, Bacillus amyloliquefaciens
FNSYNSGLWQKANGYSNGDGFNCTWRANNVSMTSSGEMRLALTSPSYNKFDCGENRSVQTYGYGLYEVRMKPAKNTGIVSSFFTYTGPTDGTPWDEIDIEFLGKDTTKVQFNYYTNGAGNHEKVADLGFDATNAYHTYAFDWQPNSIKWYVDGQLKHTATSQIPTNPGKICMNLWNGIGVDDWLGSYNGVNPLYAHYDWVRYT

SEQ ID NO: 49265 - protein, 203 aa, Bacillus amyloliquefaciens
FNSYNSGLWQKANGYSNGDCFNCTWRANNVSMTSSGEMRLALTSPSYNKFDCGENRSVQTYGYGLYEVRMKPAKNTGIVSSFFTYTGPTDGTPWDEIDIEFLGKDTTKVQFNYYTNGAGNHEKVADLGFDATNAYHTYAFDWQPNSIKWYVDGQLKHTATSQIPTNPGKIEMNLWNGIGVDDWLGSYNGVNPLYAHYDWVRYT

SEQ ID NO: 49266 - protein, 203 aa, Bacillus amyloliquefaciens
FNSYNSGLWQKANGYSNGDGFNCTWRANNVSMTSSGEMRLALTSPSYNKFDCGENRSVQTYGYGLYEVRMKPAKNTGIVSSFFTYTGPTDGTPWDEIDIEFLGKDTTKVQFNYYTNGAGNHEKVADLGFDATNAYHTYAFDWQPNSIKWYVDGQLKHTATSQIPTNPGKIRMNLWNGIGVDDWLGSYNGVNPLYAHYDWVRYT

SEQ ID NO: 49267 - protein, 203 aa, Bacillus amyloliquefaciens
FNSYNSGLWQKANGYSNGDEFNCTWRANNVSMTSSGEMRLALTSPSYNKFDCGENRSVQTYGYGLYEVRMKPAKNTGIVSSFFTYTGPTDGTPWDEIDIEFLGKDTTKVQFNYYTNGAGNHEKVADLGFDATNAYHTYAFDWQPNSIKWYVDGQLKHTATSQIPTNPGKILMNLWNGIGVDDWLGSYNGVNPLYAHYDWVRYT

SEQ ID NO: 49268 - protein, 203 aa, Bacillus amyloliquefaciens
FNSYNSGLWQKANGYSNGDVFNCTWRANNVSMTSSGEMRLALTSPSYNKFDCGENRSVQTYGYGLYEVRMKPAKNTGIVSSFFTYTGPTDGTPWDEIDIEFLGKDTTKVQFNYYTNGAGNHEKVADLGFDATNAYHTYAFDWQPNSIKWYVDGQLKHTATSQIPTNPGKITMNLWNGIGVDDWLGSYNGVNPLYAHYDWVRYT

SEQ ID NO: 49269 - protein, 203 aa, Bacillus amyloliquefaciens
FNSYNSGLWQKANGYSNGDNFNCTWRANNVSMTSSGEMRLALTSPSYNKFDCGENRSVQTYGYGLYEVRMKPAKNTGIVSSFFTYTGPTDGTPWDEIDIEFLGKDTTKVQFNYYTNGAGNHEKVADLGFDATNAYHTYAFDWQPNSIKWYVDGQLKHTATSQIPTNPGKIQMNLWNGIGVDDWLGSYNGVNPLYAHYDWVRYT

SEQ ID NO: 49270 - protein, 203 aa, Bacillus amyloliquefaciens
FNSYNSGLWQKANGYSNGDLFNCTWRANNVSMTSSGEMRLALTSPSYNKFDCGENRSVQTYGYGLYEVRMKPAKNTGIVSSFFTYTGPTDGTPWDEIDIEFLGKDTTKVQFNYYTNGAGNHEKVADLGFDATNAYHTYAFDWQPNSIKWYVDGQLKHTATSQIPTNPGKITMNLWNGIGVDDWLGSYNGVNPLYAHYDWVRYT

SEQ ID NO: 49271 - protein, 203 aa, Bacillus amyloliquefaciens
FNSYNSGLWQKANGYSNGDWFNCTWRANNVSMTSSGEMRLALTSPSYNKFDCGENRSVQTYGYGLYEVRMKPAKNTGIVSSFFTYTGPTDGTPWDEIDIEFLGKDTTKVQFNYYTNGAGNHEKVADLGFDATNAYHTYAFDWQPNSIKWYVDGQLKHTATSQIPTNPGKISMNLWNGIGVDDWLGSYNGVNPLYAHYDWVRYT

SEQ ID NO: 49272 - protein, 203 aa, Bacillus tequilensis
FNGYNSGFWQKADGYSNGNMFNCTWRANNVSMTSLGEMRLALTSPSYNKFDCGENRSVQTYGYGLYEVRMKPAKNTGIVSSFFTYTGPTDGTPWDEIDIEFLGKDTTKVQFNYYTNGAGNHEKLVDLGFDAANAYHTYAFDWQPNSIKWYVDGQLSHTATNQIPTTPGKIMMNLWNGTGVDEWLGSYNGVNPLYAHYDWVRYT

SEQ ID NO: 49273 - protein, 203 aa, Bacillus tequilensis
FNGYNSGFWQKADGYSNGNMFNCTWRANNVSMTSLGEMRLALTSPSYNKFDCGENRSVQTYGYGLYEVRMKPAKNTGIVSSFFTYTGPTDGTPWDEIDIEFLGKDTTKVQFNYYTNGAGNHEKIADLGFDAANAYHTYAFDWQPNSIKWYVDGQLSHTATNQIPTTPGKIMMNLWNGTGVDEWLGSYNGVNPLYAHYDWVRYT

SEQ ID NO: 49274 - protein, 203 aa, Bacillus subtilis
FNGYNSGFWQKADGYSNGNMFNCTWRANNVSMTSLGEMRLALTSPSYNKFDCGENRSVQTYGYGLYEVRMKPAKNTGIVSSFFTYTGPTDGTPWDEIDIEFLGKDTTKVQFNYYTNGAGNHEKIVDLGFDAANAYHTYAFDWQPNSIKWYVDGQLKHTATNQIPTTPGKIMMNLWNGTGVDEWLGSYNGVNPLYAHYDWVRYT

SEQ ID NO: 49275 - protein, 203 aa, Bacillus tequilensis
FNGYNSGFWQKADGYSNGNMFNCTWRANNVSMTSLGPMRLALTSPSYNKFDCGENRSVQTYGYGLYEVRMKPAKNTGIVSSFFTYTGPTDGTPWDEIDIEFLGKDTTKVQFNYYTNGAGNHEKIVDLGFDAANAYHTYAFDWQPNSIKWYVDGQLKHTATNQIPTTPGKIMMNLWNGTGVDEWLGSYNGVNPLYAHYDWVRYT

SEQ ID NO: 49276 - protein, 203 aa, Bacillus tequilensis
FNGYNSGFWQKADGYSNGNMFNCTWRANNVSMTSLGEMRLALTSPSYNKFDCGENRSVQTYGYGLYEVRMKPAKNTGIVSSFFTYTGPTDGTPWDEIDIEFLGKDTTSVQFNYYTNGAGNHEKIVDLGFDAANAYHTYAFDWQPNSIKWYVDGQLKHTATNQIPTTPGKIMMNLWNGTGVDEWLGSYNGVNPLYAHYDWVRYT

SEQ ID NO: 49277 - protein, 203 aa, Bacillus tequilensis
FNGYNSGFWQKADGYSNGNMFNCTWRANNVSMTSLGEMRLALTSPSYNKFDCGENRSVQTYGYGLYEVRMKPAKNTGIVSSFFTYTGPTDGTPWDEIDIEFLGKDTTKVQFNYYTNGAGNHEKIVDLGFDAANAYHTYAFDWQPNSIKWYVDGQLSHTATNQIPTTPGKIMMNLWNGTGVDEWLGSYNGVNPLYAHYDWVRYT

SEQ ID NO: 49278 - protein, 203 aa, Bacillus tequilensis
FNGYNSGFWQKADGYSNGNMFNCTWRANNVSMTELGEMRLALTSPSYNKFDCGENRSVQTYGYGLYEVRMKPAKNTGIVSSFFTYTGPTDGTPWDEIDIEFLGKDTTKVQFNYYTNGAGNHEKIVDLGFDAANAYHTYAFDWQPNSIKWYVDGQLKHTATNQIPTTPGKIMMNLWNGTGVDEWLGSYNGVNPLYAHYDWVRYT

SEQ ID NO: 49279 - protein, 203 aa, Bacillus tequilensis
FNGYNSGFWQKADGYSNGNMFNCTWRANNVEMTSLGEMRLALTSPSYNKFDCGENRSVQTYGYGLYEVRMKPAKNTGIVSSFFTYTGPTDGTPWDEIDIEFLGKDTTKVQFNYYTNGAGNHEKIVDLGFDAANAYHTYAFDWQPNSIKWYVDGQLKHTATNQIPTTPGKIMMNLWNGTGVDEWLGSYNGVNPLYAHYDWVRYT

SEQ ID NO: 49280 - protein, 203 aa, Bacillus tequilensis
FNGYNSGFWQKADGYSNGNMFNCTWRANNVSMTSLGEMRLALTSPSYNKFDCGENRSVQTYGYGLYEVRMKPAKNTGIVSSFFTYTGPTDGTPWDEIDIEFLGKDTTKVQFNYYTNGAGNHEKIVDLGFDAANAYHTYAFDWQPNSIKWYVDGQLKHTATNQIPTTPGKIMMNLWNGTGVDEWLGSYNGVNPLYAPYDWVRYT

SEQ ID NO: 49281 - protein, 203 aa, Bacillus tequilensis
FNGYNSGFWQSADGYSNGNMFNCTWRANNVSMTSLGEMRLALTSPSYNKFDCGENRSVQTYGYGLYEVRMKPAKNTGIVSSFFTYTGPTDGTPWDEIDIEFLGKDTTKVQFNYYTNGAGNHEKIVDLGFDAANAYHTYAFDWQPNSIKWYVDGQLKHTATNQIPTTPGKIMMNLWNGTGVDEWLGSYNGVNPLYAHYDWVRYT

SEQ ID NO: 49282 - protein, 203 aa, Bacillus subtilis
FNGYNSGFWQKADGYSNGNMFNCTWRANNVSMTSLGEMRLALTSPAYNKFDCGENRSVQTYGYGLYEVRMKPAKNTGIVSSFFTYTGPTDGTPWDEIDIEFLGKDTTKVQFNYYTNGAGNHEKIVDLGFDAANAYHTYAFDWQPNSIKWYVDGQLKHTATNQIPTTPGKIMMNLWNGTGVDEWLGSYNGVNPLYAHYDWVRYT

SEQ ID NO: 49283 - protein, 203 aa, Bacillus subtilis
FNSYNSGLWQKANGYSNGNMFNCTWRANNVSMTSLGEMRLALTSPSYNKFDCGENRSVQTYGYGLYEVRMKPAKNTGIVSSFFTYTGPTDGTPWDEIDIEFLGKDTTKVQFNYYTNGVGNHEKVVDLGFDAANAYHTYAFDWQPNSIKWYVDGQLKHTATSQIPTTPGKIMMNLWNGTGVDEWLGSYNGVTPLYAHYDWVRYT

SEQ ID NO: 49284 - protein, 203 aa, Bacillus subtilis
FNGYNSGFWQKADGYSNGNNFNCTWRANNVSMTSLGEMRLALTSPAYNKFDCGENRSVQTYGYGLYEVRMKPAKNTGIVSSFFTYTGPTDGTPWDEIDIEFLGKDTTKVQFNYYTNGAGNHEKIVDLGFDAANAYHTYAFDWQPNSIKWYVDGQLKHTATNQIPTTPGKIMMNLWNGTGVDEWLGSYNGVNPLYAHYDWVRYT

SEQ ID NO: 49285 - protein, 203 aa, Bacillus licheniformis
FNGYNSGFWQKADGYSNGNMFNCTWRANNVSVTSLGEMRLALTSPSYNKFDCGENRSVQTYGYGXYEVRMKPAKNTGIVSSFFTYTGPTDGTPWDEIDIEFLGKDTTKVQFNYYTNGAGNHEKIVDLGFDAANAYHTYAFDWQPNSIKWYVDGQLKHTATNQIPTTPGKIMMNLWNGTGVDEWLGSYNGVNPLYAHYDWVRYT

SEQ ID NO: 49286 - protein, 203 aa, Bacillus tequilensis
FNGYNSGFWQKADGYSNGNMFNCTWRANNVSMTELGPMRLALTSPSYNKFDCGENRSVQTYGYGLYEVRMKPAKNTGIVSSFFTYTGPTDGTPWDEIDIEFLGKDTTKVQFNYYTNGAGNHEKIVDLGFDAANAYHTYAFDWQPNSIKWYVDGQLKHTATNQIPTTPGKIMMNLWNGTGVDEWLGSYNGVNPLYAHYDWVRYT

SEQ ID NO: 49287 - protein, 203 aa, unidentified
FNGYNSGFWQKAYGYSNGNMFNCTWRANNVSMTSLGEMRLALTSPSYNKFDCGENRSVQTYGYGLYEVRMKPAKNTGIVSSFFTYTGPTDGTPWDEIDIEFLGKDTTKVQFNYYTNGAGNHEKIVDLGFDAANAYHTYAFDWQPNSIKWYVDGQLKHTATNQIPTTPGKIMMNLWNGTGVDEWLGSYNGVNPLYAHYDWMRYT

SEQ ID NO: 49288 - protein, 203 aa, Bacillus subtilis
FNGYNSGFWQKADGYSNGNYFNCTWRANNVSMTSLGEMRLALTSPAYNKFDCGENRSVQTYGYGLYEVRMKPAKNTGIVSSFFTYTGPTDGTPWDEIDIEFLGKDTTKVQFNYYTNGAGNHEKIVDLGFDAANAYHTYAFDWQPNSIKWYVDGQLKHTATNQIPTTPGKIMMNLWNGTGVDEWLGSYNGVNPLYAHYDWVRYT

SEQ ID NO: 49289 - protein, 203 aa, Bacillus subtilis
FNGYNSGFWQKADGYSNGNMFNCTWRANNVSVTSLGEMRLALTSPSYNKFDCGENRSVQTYGYGLYEVRMKPAKNTGIVSSFFTYTGPTDGTPWDEIDIEFLGKDTTKVQFNYYTNGAGNHEKIVDLGFDAANAYHTYAFDWQPNSIKWYVDGQLKHTATNQIPTTPGKIMMNLWNGTGVDERLGSYNGVNPLYAHYDWVRYT

SEQ ID NO: 49290 - protein, 203 aa, Bacillus subtilis
FNGYNSGFWQKADGYSNGNMFNCTWRANNVSMTSLGEMRLALTSPAYNKFDCGENRSVQTYGYGLYEVRMKPAKNTGIVSSFFTYTGPTDGTPWDEIDIEFLGKDTTKVQFNYYTNGAGNHEKIVDLGFDAANAYHTYAFDWQPNSIKWYVDGQLKHTATNQIPTTLGKIMMNLWNGTGVDEWLGSYNGVNPLYAHYDWVRYT

SEQ ID NO: 49291 - protein, 203 aa, Bacillus subtilis
FNGYNSGFWQKADGYSNGNMFNCTWRANNVSMTSLGEMRLALTSPAYNKFDCGENRSVQTYGYGLYEVRMKPAKNTGIVSSFFTYTGPTDGTPWDEIDIEFLGKDTTKVQFNYYTNGAGNHEKIVDLGFDAANAYHTYAFDWQPNSIKWYVDGQLKHTATNQIPTTPGKIHMNLWNGTGVDEWLGSYNGVNPLYAHYDWVRYT

SEQ ID NO: 49292 - protein, 203 aa, Bacillus subtilis
FNGYNSGFWQKADGYSNGNSFNCTWRANNVSMTSLGEMRLALTSPAYNKFDCGENRSVQTYGYGLYEVRMKPAKNTGIVSSFFTYTGPTDGTPWDEIDIEFLGKDTTKVQFNYYTNGAGNHEKIVDLGFDAANAYHTYAFDWQPNSIKWYVDGQLKHTATNQIPTTPGKIYMNLWNGTGVDEWLGSYNGVNPLYAHYDWVRYT

SEQ ID NO: 49293 - protein, 203 aa, Bacillus subtilis
FNGYNSGFWQKADGYSNGNVFNCTWRANNVSMTSLGEMRLALTSPAYNKFDCGENRSVQTYGYGLYEVRMKPAKNTGIVSSFFTYTGPTDGTPWDEIDIEFLGKDTTKVQFNYYTNGAGNHEKIVDLGFDAANAYHTYAFDWQPNSIKWYVDGQLKHTATNQIPTTPGKIHMNLWNGTGVDEWLGSYNGVNPLYAHYDWVRYT

SEQ ID NO: 49294 - protein, 203 aa, Bacillus subtilis
FNGYNSGFWQKADGYSNGNNFNCTWRANNVSMTSLGEMRLALTSPAYNKFDCGENRSVQTYGYGLYEVRMKPAKNTGIVSSFFTYTGPTDGTPWDEIDIEFLGKDTTKVQFNYYTNGAGNHEKIVDLGFDAANAYHTYAFDWQPNSIKWYVDGQLKHTATNQIPTTPGKIQMNLWNGTGVDEWLGSYNGVNPLYAHYDWVRYT

SEQ ID NO: 49295 - protein, 203 aa, Bacillus subtilis
FNGYNSGFWQKADGYSNGNEFNCTWRANNVSMTSLGEMRLALTSPAYNKFDCGENRSVQTYGYGLYEVRMKPAKNTGIVSSFFTYTGPTDGTPWDEIDIEFLGKDTTKVQFNYYTNGAGNHEKIVDLGFDAANAYHTYAFDWQPNSIKWYVDGQLKHTATNQIPTTPGKILMNLWNGTGVDEWLGSYNGVNPLYAHYDWVRYT

SEQ ID NO: 49296 - protein, 203 aa, Bacillus subtilis
FNGYNSGFWQKADGYSNGNCFNCTWRANNVSMTSLGEMRLALTSPAYNKFDCGENRSVQTYGYGLYEVRMKPAKNTGIVSSFFTYTGPTDGTPWDEIDIEFLGKDTTKVQFNYYTNGAGNHEKIVDLGFDAANAYHTYAFDWQPNSIKWYVDGQLKHTATNQIPTTPGKIEMNLWNGTGVDEWLGSYNGVNPLYAHYDWVRYT

SEQ ID NO: 49297 - protein, 203 aa, Bacillus subtilis
FNGYNSGFWQKADGYSNGNGFNCTWRANNVSMTSLGEMRLALTSPAYNKFDCGENRSVQTYGYGLYEVRMKPAKNTGIVSSFFTYTGPTDGTPWDEIDIEFLGKDTTKVQFNYYTNGAGNHEKIVDLGFDAANAYHTYAFDWQPNSIKWYVDGQLKHTATNQIPTTPGKIRMNLWNGTGVDEWLGSYNGVNPLYAHYDWVRYT

SEQ ID NO: 49298 - protein, 203 aa, Bacillus subtilis
FNGYNSGFWQKADGYSNGNQFNCTWRANNVSMTSLGEMRLALTSPAYNKFDCGENRSVQTYGYGLYEVRMKPAKNTGIVSSFFTYTGPTDGTPWDEIDIEFLGKDTTKVQFNYYTNGAGNHEKIVDLGFDAANAYHTYAFDWQPNSIKWYVDGQLKHTATNQIPTTPGKIRMNLWNGTGVDEWLGSYNGVNPLYAHYDWVRYT

SEQ ID NO: 49299 - protein, 203 aa, Bacillus subtilis
FNGYNSGFWQKADGYSNGNLFNCTWRANNVSMTSLGEMRLALTSPAYNKFDCGENRSVQTYGYGLYEVRMKPAKNTGIVSSFFTYTGPTDGTPWDEIDIEFLGKDTTKVQFNYYTNGAGNHEKIVDLGFDAANAYHTYAFDWQPNSIKWYVDGQLKHTATNQIPTTPGKIAMNLWNGTGVDEWLGSYNGVNPLYAHYDWVRYT

SEQ ID NO: 49300 - protein, 203 aa, Bacillus subtilis
FNGYNSGFWQKADGYSNGNCFNCTWRANNVSMTSLGEMRLALTSPAYNKFDCGENRSVQTYGYGLYEVRMKPAKNTGIVSSFFTYTGPTDGTPWDEIDIEFLGKDTTKVQFNYYTNGAGNHEKIVDLGFDAANAYHTYAFDWQPNSIKWYVDGQLKHTATNQIPTTPGKILMNLWNGTGVDEWLGSYNGVNPLYAHYDWVRYT

SEQ ID NO: 49301 - protein, 203 aa, Bacillus subtilis
FNGYNSGFWQKADGYSNGNGFNCTWRANNVSMTSLGEMRLALTSPAYNKFDCGENRSVQTYGYGLYEVRMKPAKNTGIVSSFFTYTGPTDGTPWDEIDIEFLGKDTTKVQFNYYTNGAGNHEKIVDLGFDAANAYHTYAFDWQPNSIKWYVDGQLKHTATNQIPTTPGKILMNLWNGTGVDEWLGSYNGVNPLYAHYDWVRYT

SEQ ID NO: 49302 - protein, 203 aa, Bacillus subtilis
FNGYNSGFWQKADGYSNGNGFNCTWRANNVSMTSLGEMRLALTSPAYNKFDCGENRSVQTYGYGLYEVRMKPAKNTGIVSSFFTYTGPTDGTPWDEIDIEFLGKDTTKVQFNYYTNGAGNHEKIVDLGFDAANAYHTYAFDWQPNSIKWYVDGQLKHTATNQIPTTPGKICMNLWNGTGVDEWLGSYNGVNPLYAHYDWVRYT

SEQ ID NO: 49303 - protein, 203 aa, Bacillus subtilis
FNGYNSGFWQKADGYSNGNLFNCTWRANNVSMTSLGEMRLALTSPAYNKFDCGENRSVQTYGYGLYEVRMKPAKNTGIVSSFFTYTGPTDGTPWDEIDIEFLGKDTTKVQFNYYTNGAGNHEKIVDLGFDAANAYHTYAFDWQPNSIKWYVDGQLKHTATNQIPTTPGKIPMNLWNGTGVDEWLGSYNGVNPLYAHYDWVRYT

SEQ ID NO: 49304 - protein, 203 aa, Bacillus subtilis
FNGYNSGFWQKADGYSNGNVFNCTWRANNVSMTSLGEMRLALTSPAYNKFDCGENRSVQTYGYGLYEVRMKPAKNTGIVSSFFTYTGPTDGTPWDEIDIEFLGKDTTKVQFNYYTNGAGNHEKIVDLGFDAANAYHTYAFDWQPNSIKWYVDGQLKHTATNQIPTTPGKITMNLWNGTGVDEWLGSYNGVNPLYAHYDWVRYT

SEQ ID NO: 49305 - protein, 203 aa, Bacillus subtilis
FNGYNSGFWQKADGYSNGNSFNCTWRANNVSMTSLGEMRLALTSPAYNKFDCGENRSVQTYGYGLYEVRMKPAKNTGIVSSFFTYTGPTDGTPWDEIDIEFLGKDTTKVQFNYYTNGAGNHEKIVDLGFDAANAYHTYAFDWQPNSIKWYVDGQLKHTATNQIPTTPGKILMNLWNGTGVDEWLGSYNGVNPLYAHYDWVRYT

SEQ ID NO: 49306 - protein, 203 aa, Bacillus subtilis
FNGYNSGFWQKADGYSNGNAFNCTWRANNVSMTSLGEMRLALTSPAYNKFDCGENRSVQTYGYGLYEVRMKPAKNTGIVSSFFTYTGPTDGTPWDEIDIEFLGKDTTKVQFNYYTNGAGNHEKIVDLGFDAANAYHTYAFDWQPNSIKWYVDGQLKHTATNQIPTTPGKIFMNLWNGTGVDEWLGSYNGVNPLYAHYDWVRYT

SEQ ID NO: 49307 - protein, 203 aa, Bacillus subtilis
FNGYNSGFWQKADGYSNGNSFNCTWRANNVSMTSLGEMRLALTSPAYNKFDCGENRSVQTYGYGLYEVRMKPAKNTGIVSSFFTYTGPTDGTPWDEIDIEFLGKDTTKVQFNYYTNGAGNHEKIVDLGFDAANAYHTYAFDWQPNSIKWYVDGQLKHTATNQIPTTPGKIAMNLWNGTGVDEWLGSYNGVNPLYAHYDWVRYT

SEQ ID NO: 49308 - protein, 203 aa, Bacillus subtilis
FNGYNSGFWQKADGYSNGNLFNCTWRANNVSMTSLGEMRLALTSPAYNKFDCGENRSVQTYGYGLYEVRMKPAKNTGIVSSFFTYTGPTDGTPWDEIDIEFLGKDTTKVQFNYYTNGAGNHEKIVDLGFDAANAYHTYAFDWQPNSIKWYVDGQLKHTATNQIPTTPGKITMNLWNGTGVDEWLGSYNGVNPLYAHYDWVRYT

SEQ ID NO: 49309 - protein, 203 aa, Bacillus subtilis
FNGYNSGFWQKADGYSNGNVFNCTWRANNVSMTSLGEMRLALTSPAYNKFDCGENRSVQTYGYGLYEVRMKPAKNTGIVSSFFTYTGPTDGTPWDEIDIEFLGKDTTKVQFNYYTNGAGNHEKIVDLGFDAANAYHTYAFDWQPNSIKWYVDGQLKHTATNQIPTTPGKILMNLWNGTGVDEWLGSYNGVNPLYAHYDWVRYT

SEQ ID NO: 49310 - protein, 203 aa, Bacillus tequilensis
FNGYNSGFWQKADGYSNGNMFNCTWRANNVSMTELGPMRLALTSPSYNKFDCGENRSVQTYGYGLYEVRMKPAKNTGIVSSFFTYTGPTDGTPWDEIDIEFLGKDTTKVQFNYYTNGAGNHEKIVDLGFDAANAYHTYAFDWQPNSIKWYVDGQLKHTATNQIPTTPGKIMMNLWNGTGVDEWLGSYNGVNPLYAPYDWVRYT

SEQ ID NO: 49311 - protein, 203 aa, Bacillus subtilis
FNGYNSGFWQKADGYSNGNNFNCTWRANNVSMTSLGEMRLALTSPAYNKFDCGENRSVQTYGYGLYEVRMKPAKNTGIVSSFFTYTGPTDGTPWDEIDIEFLGKDTTKVQFNYYTNGAGNHEKIVDLGFDAANAYHTYAFDWQPNSIKWYVDGQLKHTATNQIPTTPGKIFMNLWNGTGVDEWLGSYNGVNPLYAHYDWVRYT

SEQ ID NO: 49312 - protein, 203 aa, Bacillus tequilensis
FNGYNSGFWQSADGYSNGNMFNCTWRANNVSMTSLGEMRLALTSPSYNKFDCGENRSVQTYGYGLYEVRMKPAKNTGIVSSFFTYTGPTDGTPWDEIDIEFLGKDTTSVQFNYYTNGAGNHEKIVDLGFDAANAYHTYAFDWQPNSIKWYVDGQLSHTATNQIPTTPGKIMMNLWNGTGVDEWLGSYNGVNPLYAHYDWVRYT

SEQ ID NO: 49313 - protein, 203 aa, Bacillus subtilis
FNGYNSGFWQKADGYSNGNGFNCTWRANNVSMTSLGEMRLALTSPAYNKFDCGENRSVQTYGYGLYEVRMKPAKNTGIVSSFFTYTGPTDGTPWDEIDIEFLGKDTTKVQFNYYTNGAGNHEKIVDLGFDAANAYHTYAFDWQPNSIKWYVDGQLKHTATNQIPTTPGKIHMNLWNGTGVDEWLGSYNGVNPLYAHYDWVRYT

SEQ ID NO: 49314 - protein, 203 aa, Bacillus subtilis
FNGYNSGFWQKADGYSNGNWFNCTWRANNVSMTSLGEMRLALTSPAYNKFDCGENRSVQTYGYGLYEVRMKPAKNTGIVSSFFTYTGPTDGTPWDEIDIEFLGKDTTKVQFNYYTNGAGNHEKIVDLGFDAANAYHTYAFDWQPNSIKWYVDGQLKHTATNQIPTTPGKISMNLWNGTGVDEWLGSYNGVNPLYAHYDWVRYT

SEQ ID NO: 49315 - protein, 203 aa, Bacillus mojavensis
FNGYNSGFWQKANGYSNGNMFNCTWRANNVSMTSLGEMRLALTSPSYNKFDCGENRSVQTYGYGLYEVRMKPAKNVGIVSSFFTYTGPTDGTPWDEIDIEFLGKDTTKVQFNYYTNGVGNHEKLVDLGFDAANAYHTYAFDWQPNSIKWYVDGQLKHTATSQIPTTPGKIMMNLWNGTGVDEWLGSYNGVTPLYAHYDWVRYT

SEQ ID NO: 49316 - protein, 203 aa, Bacillus tequilensis
FNGYNSGFWQKADGYSNGNMFNCTWRANNVEMTELGPMRLALTSPSYNKFDCGENRSVQTYGYGLYEVRMKPAKNTGIVSSFFTYTGPTDGTPWDEIDIEFLGKDTTKVQFNYYTNGAGNHEKIVDLGFDAANAYHTYAFDWQPNSIKWYVDGQLKHTATNQIPTTPGKIMMNLWNGTGVDEWLGSYNGVNPLYAPYDWVRYT

SEQ ID NO: 49317 - protein, 203 aa, Bacillus tequilensis
FNGYNSGFWQSADGYSNGNMFCCTWRANNVSMTSLGEMRLALTSPSYNKFDCGENRSVQTYGYGLYEVRMKPAKNTGIVSSFFTYTGPTDGTPWDEIDIEFLGKDTTSVQFNYYTNGAGNHEKIVDLGFDAANAYHTYAFDWQPNSIKWYVDGQLSHTATNQIPTTPGKIMMNLWNGCGVDEWLGSYNGVNPLYAHYDWVRYT

SEQ ID NO: 49318 - protein, 203 aa, Bacillus tequilensis
FNGYNSGFWQSADGYSNGNMFNCTWRANNVSMTSLGEMRLALTSPSYNKFDCGENRSVQTYGYGLYEVRMKPAKNTGIVSSFFTYTGPTDGTCWDEIDIEFLGKDTTSVQFNYYTCGAGNHEKIVDLGFDAANAYHTYAFDWQPNSIKWYVDGQLSHTATNQIPTTPGKIMMNLWNGTGVDEWLGSYNGVNPLYAHYDWVRYT

SEQ ID NO: 49319 - protein, 203 aa, Bacillus cereus
FNSYNSGSWQKANGYSNGNMFNCTWRANNVSMTSLGEMRLALTSPSYNKFDCGENRSVQTYGYGLYEVRMKPAKNVGIVSSFFTYTGPTDGTPWDEIDIEFLGKDTTRVQFNYYTNGVGNREKIVDLGFDAANANHTYAFDWQPNSIKWYVDGQLKHTATSQIPTTPGKIMMNLWNGTGVDEWLGSYNGVTPLYAHYDWVRYT

SEQ ID NO: 49320 - protein, 203 aa, Bacillus licheniformis
FNSYNSGVWQKANGYSNGGVFNCTWRANNVSMTSLGEMRLGLTSPSYNKFDCGENRSVQTYGYGLYEVRMKPAKNVGIVSSFFTYTGPTDGTPWDEIDIEFLGKDTTKVQFNYYTNGVGNHEKLVDLGFDASNSYHTYAFDWQPNSIKWYVDGQLKHTATSQIPTTPGKIMMNLWNGIGVDDWLGSYNGVTPLYAHYDWVRYT

SEQ ID NO: 49321 - protein, 203 aa, Bacillus tequilensis
FNGYNSGFWQSADGYSNGNMFCCTWRANNVSMTSLGEMRLALTSPSYNKFDCGENRSVQTYGYGLYEVRMKPAKNTGIVSSFFTYTGPTDGTCWDEIDIEFLGKDTTSVQFNYYTCGAGNHEKIVDLGFDAANAYHTYAFDWQPNSIKWYVDGQLSHTATNQIPTTPGKIMMNLWNGCGVDEWLGSYNGVNPLYAHYDWVRYT

SEQ ID NO: 49322 - protein, 203 aa, Bacillus licheniformis
FNSYNSGVWQKANGYSNGGVFNCTWRANNVSMTSLGEMRLGLTSPSYNKFDCGENRSVQTYGYGLYEVGMKPAKNVGIVSSFFTYTGPTDGTPWDEIDIEFLGKDTTKVQFNYYTNGVGNHEKLVNLGFDASNSYHTYAFDWQPNSIKWYVDGQLKHTATSQIPTTPGKIMMNLWNGIGVDDWLGSYNGVTPLYAHYDWVRYT

SEQ ID NO: 49323 - protein, 203 aa, Bacillus licheniformis
FNNYNTGLWQKADGYSNGNMFNCTWRANNVSMTSLGEMRLSLTSPSYNKFDCGENRSVQTYGYGLYEVNMKPAKNVGIVSSFFTYTGPTDGTPWDEIDIEFLGKDTTKVQFNYYTNGVGNHEKIVNLGFDAANSYHTYAFDWQPNSIKWYVDGQLKHTATTQIPQTPGKIMMNLWNGAGVDEWLGSYNGVTPLYAHYNWVRYT

SEQ ID NO: 49324 - protein, 185 aa, Bacillus pumilus
FNNYNTGLWQKADGYSNGNMFNCTWRANNVSMTSLGEMRLSLTSPSYNKFDCGENRSVQTYGYGLYEVSMKPAKNIGIVSSFFTYTGPTDGTPWDEIDIEFLGKDTTKVQFNYYTNGVGNHEKIVNLGFDAANSYHTYASDWQPNSIKWYVDGQLKHTATTQIPQTPGKIMMNLWNGAGVDEWLG

SEQ ID NO: 49325 - protein, 203 aa, Bacillus sp.
FNNYNTGLWQKADGYSNGNMFNCTWRANNVSMTSSGEMRLSLTSPAYNKFDCGENRSVQTYGYGLYEVNMKPAKNVGIVSSFFTYTGPTDGTPWDEIDIEFLGKDTTKVQFNYYTNGVGNHEKIVNLGFDAANSYHTYAFDWQPNSIKWYVDGQLKHTATTQIPQTPGKIMMNLWNGAGVDEWLGSYNGVTPLHAHYNWVRYT

SEQ ID NO: 49326 - protein, 203 aa, Hordeum vulgare
FNSYNSGLWQKADGYSNGDMFNCTWRANNVSMTSLGEMRLALTSPSYNKFDCGENRSVQTYGYGLYEVRMKPAKNTGIVSSFFTYTGPTEGTPWDEIDIEFLGKDTTKVQFNYYTNGVGGHEKVISLGFDASKGFHTYAFDWQPGYIKWYVDGVLKHTATANIPSTPGKIMMNLWNGTGVDDWLGSYNGANPLYAEYDWVKYT

SEQ ID NO: 49327 - protein, 203 aa, Bacillus licheniformis
FNNYNTGLWQKADGYSNGNMFNCTWRANNVSMTSLGEMRLSLTSPSYNKFDCGENRSVQTYGYGLYEVNMKPAKNVGIVSSFFTYTGPTDGTPWDEIDIEFLGKDTTKVQFNYYTNGVGNHEKIVNLGFDAANSYHTYAFDWQPNSIKWYVDGQLKHTATTQIPQTPGKIMMNLWNGAGVDEWLGSYNGVTPLSRSLHWVRYT

SEQ ID NO: 49328 - protein, 203 aa, Unidentified
FNNYNTGLWQKADGYSNGNMFNCTWRANNVSMTSLGEMRLSLTSPSYNKFDCGENRSVQTYGYGLYEVSMKPAKNIGIVSSFFTYTGPTDGTPWDEIDIEFLGKDTTKVQFNYYTNGVGNHEKIVNLGFDAANSYHTYAFDWQPNSIKWYVDGQLKHTATTQIPQTPGKIMMNLWNGAGVDEWLGSYSGVTPLSRSLHWVRYT

SEQ ID NO: 49329 - protein, 199 aa, Bacillus amyloliquefaciens
FNPSTWEKADGYSNGGVFNCTWRANNVNFTNDGKLKLGLTSSAYNKFDCAEYRSTNIYGYGLYEVSMKPAKNTGIVSSFFTYTGPAHGTQWDEIDIEFLGKDTTKVQFNYYTNGAGNHEKFADLGFDAANAYHTYAFDWQPNSIKWYVDGQLKHTATTQIPAAPGKIMMNLWNGTGVDDWLGSYNGVNPIYAHYHWMRY

SEQ ID NO: 49330 - protein, 129 aa, Paenibacillus macerans
NTGIVSSFFTYTGPAHGTQWDEIDIEFLGKDTTKVQFNYYTNGVGGHEKVISLGFDASKGFHTYAFDWQPGYIKWYVDGVLKHTATANIPSTPGKIMMNLWNGTGVDDWLGSYNGANPLYAEYDWVKYT

SEQ ID NO: 49331 - protein, 154 aa, Paenibacillus macerans
FDCAEYRSTNIYGYGLYEVSMKPAKNTGIVSSFFTYTGPAHGTQWDEIDIEFLGKDTTKVQFNYYTNGVGGHEKVISLGFDASKGFHTYAFDWQPGYIKWYVDGVLKHTATANIPSTPGKIMMNLWNGTGVDDWLGSYNGANPLYAEYDWVKYT

SEQ ID NO: 49332 - protein, 200 aa, unidentified
FNSSTWQKADGYSNGSMFNCTWRANNVNFTSDGKLRLGLTSSAYNKFDCGEYRTTNSYGYGLYEVSMKPAKNTGIVSSFFTYTGPSDGTQWDEIDIEFLGKDTTKVQFNYYTNGVGNHEKIVNLGFDASQGFHTYAFDWQPGHIKWYVDGVLKHTATTNIPKTPGKIMMNLWNGTGVDSWLGAYNGANPLYAEYDWVKYT

SEQ ID NO: 49333 - protein, 200 aa, Paenibacillus polymyxa
YNPSTWQKADGYSNGDMFNCTWRANNVNFTNDGKMKLSLTSSAYNKFDGGEYRSKNTYRYGLYEVNMKPAKNTGIVSSFFTYTGPANGTQWDEIDIEFLGKDTTKVQFNYYTNGIGGHEKVVDLGFDASSGFHTYAFDWQPGYIKWYVDGVLKHTATTNIPKTPGQIMMNLWNGTGVDSWLGPYNGVNPLYAEYDWVKYT

SEQ ID NO: 49334 - protein, 184 aa, Paenibacillus polymyxa
MFNCTWRANNVNFTNDGKLKLSLTSPANNKFDCGEYRSTNNYGYGLYEVSMKPAKNTGIVSSFFTYTGPSHGTQWDEIDIEFLGKDTTKVQFNYYTNGVGGHEKIINLGFDASTSFHTYAFDWQPGYIKWYVDGVLKHTATTNIPSTPGKIMMNLWNGTGVDSWLGSYNGANPLYAEYDWVKYT

SEQ ID NO: 49335 - protein, 200 aa, Paenibacillus polymyxa
FNSSTWQKADGYSNGQMFNCTWRANNVNFTNDGKLKLSLTSPANNKFDCGEYRSTNNYGYGLYEVSMKPAKNTGIVSSFFTYTGPSHGTQWDEIDIEFLGKDTTKVQFNYYTNGVGGHEKIINLGFDASTSFHTYAFDWQPGYIKWYVDGVLKHTATTNIPSTPGKIMMNLWNGTGVDSWLGSYNGANPLYAEYDWVKYT

SEQ ID NO: 49336 - protein, 200 aa, Paenibacillus polymyxa
FNSSTWQKADGYPNGQMFNCTWRANNVNFTNDGKLKLSLTSPANNKFDCGEYRSTNNYGYGLYEVSMKPAKNTGIVSSFFTYTGPSHGTQWDEIDIEFLGKDTTKVQFNYYTNGVGGHEKIINLGFDASTSFHTYAFDWQPGYIKWYVDGVLKHTATTNIPSTPGKIMMNLWNGTGVDSWLGSYNGANPLYAEYDWVKYT

SEQ ID NO: 49337 - protein, 200 aa, unidentified
FNPATWQKADGYSNGSMFNCTWRANNISFTSGGQLRLALTSPSNNKFDGAEYRSVYKYGYGKYEVSMKPAKNTGIVSSFFTYTGPSDGTPWDEIDIEFLGKDTTKVQFNYYTNGVGGHEQIVNLGFDASQSYHTYAFDWQPGYIKWYVDGVLKHTATSNIPSRPGKIMMNLWNGTGVDSWLGSYNGANPLYAYYDWLKFT

SEQ ID NO: 49338 - protein, 200 aa, Paenibacillus sp. f-40
FNASTWQKADGYSNGNMFNCTWRANNVNFTSDGKLKLGLTSSAQNKFDCGEYRSTNTYGYGLYEVSMKPAKNTGVVSSFFTYTGPAHGTQWDEIDIEFLGKDTTKVQFNYYTNGIGNHEKIINLGFDASQGFHTYAFDWQPGHIKWYVDGVLKHTATSNIPKTPGKIMMNLWNGTGVDSWLGPYNGANPLYAEYDWVKYT

SEQ ID NO: 49339 - protein, 200 aa, Paenibacillus macerans
FNRSTWEKADGYSNGGVFNCTWRANNVNFTNDGKLKLGLTSSAYNKFDCAEYRSTNIYGYGLYEVSMKPAKNTGIVSSFFTYTGPAHGTQWDEIDIEFLGKDTTKVQFNYYTNGVGGHEKVISLGFDASKGFHTYAFDWQPGYIKWYVDGVLKHTATANIPSTPGKIMMNLWNGTGVDDWLGSYNGANPLYAEYDWVKYT

SEQ ID NO: 49340 - protein, 200 aa, Paenibacillus macerans
FNPSTWEKADGYSNGGVFNCTWRANNVNFTNDGKLKLGLTSSAYNKFDCAEYRSTNIYGYGLYEVSMKPAKNTGIVSSFFTYTGPAHGTQWDEIDIEFLGKDTTKVQFNYYTNGVGGHEKVISLGFDASKGFHTYAFDWQPGYIKWYVDGVLKHTATANIPSTPGKIMMNLWNGTGVDDWLGSYNGANPLYAEYDWVKYT

SEQ ID NO: 49341 - protein, 200 aa, Paenibacillus macerans
FNPSTWEKADGYSNGGVFNCTWRANNVNFTNDGKLKLGLTSSAYNKFDCAEYRSTNIYGYGLYEVSMKPAKNTGIVGSFFTYTGPAHGTQWDEIDIEFLGKDTTKVQFNYYTNGVGGHEKVISLGFDASKGFHTYAFDWQPGYIKWYVDGVLKHTATANIPSTPGKIMMNLWNGTGVDDWLGSYNGANPLYAEYDWVKYT

SEQ ID NO: 49342 - protein, 200 aa, Paenibacillus
HNSSTWQKADGYSNGGMFNCTWRANNATFTNDGKLRLALTSSSYNKFDGAEYRTTFKTGYGKCEVSMKPAKNPGIVSSFFIYTGPSDGTPWDEIDIGFLGKDTTKVQFNYFTNGVGGHEKVIDLGFDASQGYHTYAFDWQPGSITWYVDGVQKHKATTNIPTHPGKIMMNLWNGIGVDSWLGAYNGANPLYAYYDWVKYT

SEQ ID NO: 49343 - protein, 200 aa, Paenibacillus
HNSSTWQKADGYSNGGMFNCTWRANNATFTNDGKLRLALTSSSYNKFDGAEYRTTFKTGYGKCEVCMKPAKNPGIVSSFFIYTGPSDGTPWDEIDIGFLGKDTTKVQFNYFTNGVGGHEKVIDLGFDASQGYHTYAFDWQPGSITWYVDGVQKHKATTNIPTHPGKIMMNLWNGIGVDSWLGAYNGANPLYAYYCWVKYT

SEQ ID NO: 49344 - protein, 200 aa, Paenibacillus
HNSSTWQKADGYSNGGMFNCTWRANNATFTNDCKLRLALTSSSYNKFDGAEYRTTFKTGYGKCEVSMKPAKNPGIVSSFFIYTGPSDGTPWDEIDIGFLGKDTTKVQFNYFTNGVGGHEKVIDLGFDASQGYHTYAFDWQPGSITWYVDGVQKHKATTNIPTHPGKIMMNLWNGIGVDSWLGAYNGANPLYAYYDWVKYT

SEQ ID NO: 49345 - protein, 199 aa, Paenibacillus macerans
SYFNPSTEKAVVSNGGCSIAHAANNVNFTNDGKLKLGLTSSAYNKFDCAEYRSTNIYGYGLYEVSMKPAKNTGIVSSFFTYTGPAHGTQWDEIDIEFLGKDTTKVQFNYYTNGVGGHEKVISLGFDASKGFHTYAFDWQPGYIKWYVDGVLKHTATANIPSTPGKIMMNLWNGTGVDDWLGSYNGANPLYAEYDWVKYT

SEQ ID NO: 49346 - protein, 190 aa, Bacillus sp.
FTFYNSGFWQKANNYSIGDKNCFWRANNVSVFSSGEFRLALTSPAYDKYDCENRAQGYGCGVYDARIKPIKNTGVVSFLGFTFTGYTEGTPWDEIDIEFLGKDVKIQFNFYGNGIGNHEKIVDAGFDALNAYHTYAFDWQKGSLKWYVDGEAVTSQIPTTPKKWESIGVDDWIGSYEGNEPLYHYDWLRY

SEQ ID NO: 49347 - protein, 516 aa, Aspergillus ficuum; identical to SEQ ID NO: 47

SEQ ID NO: 49348 - protein, 500 aa, Aspergillus ficuum
LTLPSQAQSNDYRPSYHFTPDQYWMNEPNGLIKIGSTWHLFFQHNPTANVWGNICWGHATSTDLMHWAHKPTAIADENGVEAFTGTAYYDPNNTSGLGDSANPPYLAWFTGYTTSSQTQDQRLAFSVDNGATWTKFQGNPIISTSQEAPHDITGGLESRDPKVFFHRQSGNWIMVLAHGGQDKLSFWTSADTINWTWQSDLKSTSINGLSSDITGWEVPDMFELPVEGTEETTWVVMMTPAEGSPAGGNGVLAITGSFDGKSFTADPVDASTMWLDNGRDFDGALSWVNVPASDGRRIIAAVMNSYGSNPPTTTWKGMLSFPRTLSLKKVGTQQHFVQQPITELDTISTSLQILANQTITPGQTLLSSIRGTALDVRVAFYPDAGSVLSLAVRKGASEQTVIKYTQSDATLSVDRTESGDISYDPAAGGVHTAKLEEDGTGLVSIRVLVDTCSVEVFGGQGEAVISDLIFPSDSSDGLALEVTGGNAVLQSVDVRSVSLE

SEQ ID NO: 49349 - protein, 493 aa, Aspergillus niger
QSNDYRPSYHFTPDQYWMNEPNGLIKIGSTWHLFFQHNPTANVWGNICWGHATSTDLMHWAHKPTAIADENGVEAFTGTAYYDPNNTSGLGDSANPPYLAWFTGYTTSSQTQDQRLAFSVDNGATWTKFQGNPIISTSQEAPHDITGGLESRDPKVFFHRQSGNWIMVLAHGGQDKLSFWTSADTINWTWQSDLKSTSINGLSSDITGWEVPDMFELPVEGTEETTWVVMMTPAEGSPAGGNGVLAITGSFDGKSFTADPVDASTMWLDNGRDFDGALSWVNVPASDGRRIIAAVMNSYGSNPPTTTWKGMLSFPRTLSLKKVGTQQHFVQQPITELDTISTSLQILANQTITPGQTLLSSIRGTALDVRVAFYPDAGSVLSLAVRKGASEQTVIKYTQSDATLSVDRTESGDISYDPAAGGVHTAKLEEDGTGLVSIRVLVDTCSVEVFGGQGEAVISDLIFPSDSSDGLALEVTGGNAVLQSVDVRSVSLE

SEQ ID NO: 49350 - protein, 491 aa, Aspergillus niger
NDYRPSYHFTPDQYWMNEPNGLIKIGSTWHLFFQHNPTANVWGNICWGHATSTDLMHWAHKPTAIADENGVEAFTGTAYYDPNNTSGLGDSANPPYLAWFTGYTTSSQTQDQRLAFSVDNGATWTKFQGNPIISTSQEAPHDITGGLESRDPKVFFHRQSGNWIMVLAHGGQDKLSFWTSADTINWTWQSDLKSTSINGLSSDITGWEVPDMFELPVEGTEETTWVVMMTPAEGSPAGGNGVLAITGSFDGKSFTADPVDASTMWLDNGRDFDGALSWVNVPASDGRRIIAAVMNSYGSNPPTTTWKGMLSFPRTLSLKKVGTQQHFVQQPITELDTISTSLQILANQTITPGQTLLSSIRGTALDVRVAFYPDAGSVLSLAVRKGASEQTVIKYTQSDATLSVDRTESGDISYDPAAGGVHTAKLEEDGTGLVSIRVLVDTCSVEVFGGQGEAVISDLIFPSDSSDGLALEVTGGNAVLQSVDVRSVSLE

SEQ ID NO: 49351 - protein, 516 aa, Aspergillus niger
MLNPKVAYMVWMTCLGLMLPSQAQSNDYRPSYHFTPDQYWMNEPNGLIKIGSTWHLFFQHNPTANVWGNICWGHATSTDLMHWAHKPTAIADENGVEAFTGTAYYDPNNTSGLGDSANPPYLAWFTGYTTSSQTQDQRLAFSVDNGATWTKFQGNPIISTSQEAPHDITGGLESRDPKVFFHRQSGNWIMVLAHGGQDKLSFWTSADTINWTWQSDLKSTSINGLSSDITGWEVPDMFELPVEGTEETTWVVMMTPAEGSPAGGNGVLAITGSFDGKSFTADPVDASTMWLDNGRDFDGALSWVNVPASDGRRIIAAVMNSYGSNPPTTTWKGMLSFPRTLSLKKVGTQQHFVQQPITELDTISTSLQTLANQTITPGQTLLSSIRGTALDVRVAFYPDAGSVLSLAVRKGASEQTVINYTQSDATLSVDRTESGDISYDPAAGGVHTAKLEEDGTGLVSIRVLVDTCSVEVFGGQGEAVISDLIFPSDSSDGLALEVTGGNAVLQSVDVRSVSLE

SEQ ID NO: 49352 - protein, 516 aa, Aspergillus niger
MLNPKVAYMVWMTCLGLMLPSQAQSNDYRPSYHFTPDQYWMNEPNGLIKIGSTWHLFFQHNPTANVWGNICWGHATSTDLMHWAHKPTAIADENGVEAFTGTAYYDPNNTSGLGDSANPPYLAWFTGYTTSSQTQDQRLAFSVDNGATWTKFQGNPIISTSQEAPHDITGGLESRDPKVFFHRQSGNWIMVLAHGGQDKLSFWTSADTINWTWQSDLKSTSINGLSSDITGWEVPDMFELPVEGTEETTWVVMMTPAEGSPAGGNGVLAITGSFDGKSFTADPVDASTMWLDNGRDFDGALSWVNVPASDGRRIIAAVMNSYGSNPPTTTWKGMLSFPRTLSLKKVGTQQHFVQQPITELDTISTSLQTLANQTITPGQTLLSSIRGTALDVRVAFYPDAGSVLSLAVRKGASEQTVINYTQSNATLSVDRTESGDISYDPAAGGVHTAKLEEDGTGLVSIRVLVDTCSVEVFGGQGEAVISDLIFPSDSSDGLALEVTGGNAVLQSVDVRSVSLE

SEQ ID NO: 49353 - protein, 516 aa, Aspergillus niger
MLNPKVAYMVWMTCLGLMLPSQAQSNDYRPSYHFTPDQYWMNEPNGLIKIGSTWHLFFQHNPTANVWGNICWGHATSTDLMHWAHKPTAIADENGVEAFTGTAYYDPNNTSGLGDSANPPYLAWFTGFTTSSQTQDQRLAFSVDNGATWTKFQGNPIISTSQEAPHDITGGLESRDPKVFFHRQSGNWIMVLAHGGQDKLSFWTSADTINWTWQSDLKSTSINGLSSDITGWEVPDMFELPVEGTEETTWVVMMTPAEGSPAGGNGVLAITGSFDGKSFTADPVDASTMWLDNGRDFYGALSWVNVPASDGRRIIAAVMNSYGSNPPTTTWKGMLSFPRTLSLKKVGTQQHFVQQPITELDTISTSLQTLANQTITPGQTLLSSIRGTALDVRVAFYPDAGSVLSLAVRKGASEQTVINYTQSDATLSVDRTESGDISYDPAAGGVHTAKLEEDGTGLVSIRVLVDTCSVEVFGGQGEAVISDLIFPSDSSDGLALEVTGGNAVLQSVDVRSVSLE

SEQ ID NO: 49354 - protein, 516 aa, Aspergillus niger
MLNPKVAYMVWMTCLGLTLPSQAQSNDYRPSYHFTPDQYWMNEPNGLIKIGSTWHLFFQHNPTANVWGNICWGHATSTDLMHWAHKPTAIADENGVEAFTGTAYYDPNNASGLGDSANPPYLAWFTGYTVSSQTQDQRLAFSVDNGATWTKFQGNPIISTSQEAPHDITGGLESRDPKVFFHRQSGNWIMVLAHGGQDKLSFWTSADTINWTWQSDLKSTSINGLSSDITGWEVPDMFELPVEGTEETTWVVMMTPAEGSPAGGNGVLAITGSFDGKSFTADPVDASTMWLNNGRDFDGALSWVNVPASDGRRIIAAVMNSYGSNPPTTTWKGMLSFPRTLSLKKVGTQQHFVQQPITELDTISTSLQTLENQTITPGQTLLSSIRGTALDVRVAFYPDAGSVLSLAVRKGASEQTVIKYTQSDATLSVDRTESGDTSYDPAAGGVHTAKLEEDDTGLVSIRVLVDTCSVEVFGGQGEAVISDLIFPSDSSDGLALEVTGGNAVLQSVDVRSVSLE

SEQ ID NO: 49355 - protein, 516 aa, Aspergillus niger
MLNPKVAYMVWMTCLGLTLPSQAQSNDYRPSYHFTPDQYWMNEPNGLIKIGSTWHLFFQHNPTANVWGNICWGHATSTDLMHWAHKPTAIADENGVEAFTGTAYYDPNNASGLGDSANPPYLAWFTGYTVSSQTQDQRLAFSVDNGATWTKFQGNPIISTSQEAPHDITGGLESRDPKVFFHRQSGNWIMVLAHGGQDKLSFWTSADTINWTWQSDLKSTSINGLSSDITGWEVPDMFELPVEGTEETTWVVMMTPAEGSPAGGNGVLAITGSFDGKSFTADPVDASTMWLNNGRDFDGALSWVNVPASDGRRIIAAVMNSYGSNPPTTTWKGMLSFPRTLSLKKVGTQQHFVQQPITELDTISTSLQTLENQTITPGQTLLSSIRGTALDVRVAFYPDAGSVLSLAVRKGASEQTVIKYTQSDATLSVDRTESGDTSYDPAAGGVHTAKLEEDDTGLVSIRVLVDTCSVEVFGGQGEAVISDLIIPSDSSDGLALEVTGGNAVLQSVDVRSVSLE

SEQ ID NO: 49356 - protein, 516 aa, Aspergillus niger NRRL3
MLNPKVAYMVWMTCLGLTLPSQAQSNDYRPSYHFTPDQYWMNEPNGLIKIGSTWHLFFQHNPTANVWGNICWGHATSTDLMHWAHKPTAIADENGVEAFTGTAYYDPNNASGLGDSANPPYLAWFTGYTVSSQTQDQRLAFSVDNGATWTKFQGNPIISTSQEAPHDITGGLESRDPKVFFHRQSGNWIMVLAHGGQDKLSFWTSADTINWTWQSDLKSTSINGLSSDITGWEVPDMFELPVEGTEETTWVVMMTPAEGSPAGGNGVLAITGSFDGKSFTADPVDASTMWLNNGRDFDGALSWVNVPASDGRRIIAAVMNSYGSNPPTTTWKGMLSFPRTLSLKKVGTQQHFVQQPITELDTISTSLQTLENQTITPGQTLLSSIRGTALDVRVAFYPDAGSVLSLAVRKGASEQTVIKYTQSDATLSVDRTESGDTSYDPAASGVHTAKLEEDDTGLVSIRVLVDTCSVEVFGGQGEAVISDLIFPSDSSDGLALEVTGGNAVLQSVDVRSVSLE

SEQ ID NO: 49357 - protein, 500 aa, Aspergillus niger
LTLPSQAQSNDYRPSYHFTPDQYWMNEPNGLIKIGSTWHLFFQHNPTANVWGNICWGHATSTDLMHWAHKPTAIADENGVEAFTGTAYYDPNNASGLGDSANPPYLAWFTGYTVSSQTQDQRLAFSVDNGATWTKFQGNPIISTSQEAPHDITGGLESRDPKVFFHRQSGNWIMVLAHGGQDKLSFWTSADTINWTWQSDLKSTSINGLSSDITGWEVPDMFELPVEGTEETTWVVMMTPAEGSPAGGNGVLAITGSFDGKSFTADPVDASTMWLNNGRDFDGALSWVNVPASDGRRIIAAVMNSYGSNPPTTTWKGMLSFPRTLSLKKVGTQQHFVQQPITELDTISTSLQTLENQTITPGQTLLSSIRGTALDVRVAFYPDAGSVLSLAVRKGASEQTVIKYTQSDATLSVDRTESGDTSYDPAASGVHTAKLEEDDTGLVSIRVLVDTCSVEVFGGQGEAVISDLIFPSDSSDGLALEVTGGNAVLQSVDVRSVSLE

SEQ ID NO: 49358 - protein, 516 aa, Aspergillus niger
MLNPKVAYMVWMTCLGLTLPSQAQSNDYRPSYHFTPDQYWMNEPNGLIKIGSTWHLFFQHNPTANVWGNICWGHATSTDLMHWAHKPTAIADENGVEAFTGTAYYDPNNASGLGDSANPPYLAWFTGYTVSSQTQDQRLAFSVDNGATWTKFQGNPIISTSQEAPHDITGGLESRDPKVFFHRQSGNWIMVLAHGGQDKLSFWTSADTINWTWQSDLKSTSINGLSSDITGWEVPDMFELPVEGTEETTWVVMMTPAEGSPAGGNGVLAITGSFDGKSFTADPVDASTMWLNNGRDFDGALSWVNVPASDGRRIIAAVMNSYGSNPPTTTWKGMLSFARTLSLKKVGTQQHFVQQPITELDTISTSLQTLENQTITPGQTLLSSIRGTALDVRVAFYPDAGSVLSLAVRKGASEQTVIKYTQSDATLSVDRTESGDTSYDPAASGVHTAKLEEDDTGLVSIRVLVDTCSVEVFGGQGEAVISDLIFPSDSSDGLALEVTGGNAVLQSVDVRSVSLE

SEQ ID NO: 49359 - protein, 516 aa, Aspergillus niger
MLNPKVAYMVWMTCLGLTLPSQAQSNDYRPSYHFTPDQYWMGEPNGLIKIGSTWHLFFQHNPTANVWGNICWGHATSTDLMHWAHKPTAIADENGVEAFTGTAYYDPNNASGLGDSANPPYLAWFTGYTVSSQTQDQRLAFSVDNGATWTKFQGNPIISTSQEAPHDITGGLESRDPKVFFHRQSGNWIMVLAHGGQDKLSFWTSADTINWTWQSDLKSTSINGLSSDITGWEVPDMFELPVEGTEETTWVVMMTPAEGSPAGGNGVLAITGSFDGKSFTADPVDASTMWLNNGRDFDGALSWVNVPASDGRRIIAAVMNSYGSNPPTTTWKGMLSFPRTLSLKKVGTQQHFVQQPITELDTISTSLQTLENQTITPGQTLLSSIRGTALDVRVAFYPDAGSVLSLAVRKGASEQTVIKYTQSDATLSVDRTESGDTSYDPAASGVHTAKLEEDDTGLVSIRVLVDTCSVEVFGGQGEAVISDLIFPSDSSDGLALEVTGGNAVLQSVDVRSVSLE

SEQ ID NO: 49360 - protein, 516 aa, Aspergillus niger
MLNPKVAYMVWMTCLGLTLPSQAQSNDYRPSYHFTPDQYWMNEPNGLIKIGSTWHLFFQHNPTANVWGNICWGHATSTDLMHWAYKPTAIADENGVEAFTGTAYYDPNNTSGLGDSANPPYLAWFTGYTTSSQTQDQRLAFSVDNGATWTKFQGNPIISTSQEAPHDITGGLESRDPKVFFHRQSGNWIMVLAHGGQDKLSFWTSADTIHWTWQSDLKSTSINGLSSDITGWEVPDMFELPVEGTGETTWVVMMTPAEGSPAGGNGVLAITGSFDGKTFTADPVDASTMWLDNGRDFDGALSWVNVPASDGRRIIAAVMNSYGSNPPTTTWKGMLSFPRTLSLKKVGTQQHFVQQPITELDTISTSMQTLANQTITPGQTLLSSIRGTALDVRVAFYPDAGSVLSLTVRKGASEQTVINYTQSNATLSVDRTESGDISYDPAAGGVHTAKLEEDGTGLVSIRVLVDTCSVEVFGGQGEAVISDLIFPSDSSDGLALEVTGGNAVLQSVDVRSVSLE

SEQ ID NO: 49361 - protein, 516 aa, Aspergillus niger
MLNPKVAYMVWMTCLGLTLPSQAQSNDYRPSYHFTPDQYWMNEPNGLIKIGSTWHLFFQHNPTANVWGNICWGHATSTDLMHWAHKPTAIADENGVEAFTGTAYYDPNNASGLGDSANPPYLAWFTGYTVSSQTQDQRLAFSVDNGATWTKFQGNPIISTSQEAPHDITGGLESRDPKVFFHRQSGNWIMVLAHGGQDKLSFWSSADTINWTWQSDLKSTSINGLSSDITGWEVPDMFELPVEGTEETTWVVMMTPAEGSPAGGNGVLAITGSFDGKSFTADPVDASTMWLNNGRDFDGALSWVNVPASDGRRIIAAVMNSYGSNPPTTTWKGMLSFPRTLSLKKVGTQQHFVQQPITELDTISTSLQTLENQTITPGQTLLSSIRGTALDVRVAFYPDAGSVLSLAVRKGASEQTVIKYTQSDATLSVDRTESGDTSYDPAASGVHTAKLEEDDTGLVSIRVLVDTCSVEVFGGQGEAVISDLIFPSDSSDGLALEVTGGNAVLQSVDVRSVSLE

SEQ ID NO: 49362 - protein, 516 aa, Aspergillus niger
MLNPKVAYMVWMTCLGLTLPSQAQSNDYRPSYHFTPDQYWMNEPNGLIKIGSTWHLFFQHNPTANVWGNICWGHATSTDLMHWAHKPTAIADENGVEAFTGTAYYDPNNASGLGDSANPPYLAWFTGYTVSSQTQDQRLAFSVDNGATWTKFQGNPIISTSQEAPHDITGGLESRDPKVFFHRQSGNWIMVLAHGGQDKLSFWTSADTINWTWQSDLKSTSINGLSSDITGWEVPDMFELPVEGTEETTWVVMMTPAEGSPAGGNGVLAITGSFDGKSFTADPVDASTMWLNNGRDFDGALSWVNVPASDGRRIIAAVMNSYGSNPPTTTWKGMLSFPRTLSLKKVGTQQHFVQQPITELDTISTSLQTLENQTITPGQTLLSSIRGTALDVRVAFYPDAGSVLSLAVRKGASEQTVIKYTQSDATLSVDRTESGDTSYDPAASGVHTAKLEEDDTGLVSIRVLVDTCLVEVFGGQGEAVISDLIFPSDSSDGLALEVTGGNAVLQSVDVRSVSLE

SEQ ID NO: 49363 - protein, 516 aa, Aspergillus niger
MLNPKVAYMVWMTCLGLTLPSQAQSNDYRPSYHFTPDQYWMNEPNGLIKIGSTWHLFFQHNPTANVWGNICWGHATSTDLMHWAHKPTAIADENGVEAFTGSAYYDPNNASGLGDSANPPYLAWFTGYTVSSQTQDQRLAFSVDNGATWTKFQGNPIISTSQEAPHDITGGLESRDPKVFFHRQSGNWIMVLAHGGQDKLSFWTSADTINWTWQSDLKSTSINGLSSDITGWEVPDMFELPVEGTEETTWVVMMTPAEGSPAGGNGVLAITGSFDGKSFTADPVDASTMWLNNGRDFDGALSWVNVPASDGRRIIAAVMNSYGSNPPTTTWKGMLSFPRTLSLKKVGTQQHFVQQPITELDTISTSLQTLENQTITPGQTLLSSIRGTALDVRVAFYPDAGSVLSLAVRKGASEQTVIKYTQSDATLSVDRTESGDTSYDPAASGVHTAKLEEDDTGLVSIRVLVDTCSVEVFGGQGEAVISDLIFPSDSSDGLALEVTGGNAVLQSVDVRSVSLE

SEQ ID NO: 49364 - protein, 516 aa, Aspergillus niger
MLNPKVAYMVWMTCLGLTLPSQAQSNDYRPSYHFTPDQYWMNEPNGLIKIGSTWHLFFQHNPTANVWGNICWGHATSTDLMHWAHKPTAIADENGVEAFTGTAYYDPNNASGLGDSANPPYLAWFTGYTVSSQTQDQRLAFSVDNGATWTKFQGNPIISTSQEAPHDITGGLESRDPKVFFHRQSGNWIMVLAHGGQDKLSFWSSADTINWTWQSDLKSTSINGLSSDITGWEVPDMFELPVEGTEETTWVVMMTPAEGSPAGGNGVLAITGSFDGKSFTADPVDASTMWLNNGRDFDGALSWVNVPASDGRRIIAAVMNSYGSNPPTTTWKGMLSFARTLSLKKVGTQQHFVQQPITELDTISTSLQTLENQTITPGQTLLSSIRGTALDVRVAFYPDAGSVLSLAVRKGASEQTVIKYTQSDATLSVDRTESGDTSYDPAASGVHTAKLEEDDTGLVSIRVLVDTCSVEVFGGQGEAVISDLIFPSDSSDGLALEVTGGNAVLQSVDVRSVSLE

SEQ ID NO: 49365 - protein, 516 aa, Aspergillus niger
MLNPKVAYMVWMTCLGLTLPSQAQSNDYRPSYHFTPDQYWMGEPNGLIKIGSTWHLFFQHNPTANVWGNICWGHATSTDLMHWAHKPTAIADENGVEAFTGTAYYDPNNASGLGDSANPPYLAWFTGYTVSSQTQDQRLAFSVDNGATWTKFQGNPIISTSQEAPHDITGGLESRDPKVFFHRQSGNWIMVLAHGGQDKLSFWTSADTINWTWQSDLKSTSINGLSSDITGWEVPDMFELPVEGTEETTWVVMMTPAEGSPAGGNGVLAITGSFDGKSFTADPVDASTMWLNNGRDFDGALSWVNVPASDGRRIIAAVMNSYGSNPPTTTWKGMLSFPRTLSLKKVGTQQHFVQQPITELDTISTSLQTLENQTITPGQTLLSSIRGTALDVRVAFYPDAGSVLSLAVRKGASEQTVIKYTQSDATLSVDRTESGDTSYDPAASGVHTAKLEEDDTGLVSIRVLVDTCLVEVFGGQGEAVISDLIFPSDSSDGLALEVTGGNAVLQSVDVRSVSLE

SEQ ID NO: 49366 - protein, 516 aa, Aspergillus niger
MLNPKVAYMVWMTCLGLTLPSQAQSNDYRPSYHFTPDQYWMNEPNGLIKIGSTWHLFFQHNPTANVWGNICWGHATSTDLMHWAHKPTAIADENGVEAFTGTAYYDPNNASGLGDSANPPYLAWFTGYTVSSQTQDQRLAFSVDNGATWTKFQGNPIISTSQEAPHDITGGLESRDPKVFFHRQSGNWIMVLAHGGQDKLSFWTSADTINWTWQSDLKSTSINGLSSDITGWEVPDMFELPVEGTEETTWVVMMTPAEGSPAGGNGVLAITGSFDGKSFTADPVDASTMWLNNGRDFDGALSWVNVPASDGRRIIAAVMNSYGSNPPTTTWKGMLSFARTLSLKKVGTQQHFVQQPITELDTISTSLQTLENQTITPGQTLLSSIRGTALDVRVAFYPDAGSVLSLAVRKGASEQTVIKYTQSDATLSVDRTESGDTSYDPAASGVHTAKLEEDDTGLVSIRVLVDTCLVEVFGGQGEAVISDLIFPSDSSDGLALEVTGGNAVLQSVDVRSVSLE

SEQ ID NO: 49367 - protein, 516 aa, Aspergillus niger
MLNPKVAYMVWMTCLGLTLPSQAQSNDYRPSYHFTPDQYWMNEPNGLIKIGSTWHLFFQHNPTANVWGNICWGHATSTDLMHWAHKPTAIADENGVEAFTGSAYYDPNNASGLGDSANPPYLAWFTGYTVSSQTQDQRLAFSVDNGATWTKFQGNPIISTSQEAPHDITGGLESRDPKVFFHRQSGNWIMVLAHGGQDKLSFWTSADTINWTWQSDLKSTSINGLSSDITGWEVPDMFELPVEGTEETTWVVMMTPAEGSPAGGNGVLAITGSFDGKSFTADPVDASTMWLNNGRDFDGALSWVNVPASDGRRIIAAVMNSYGSNPPTTTWKGMLSFPRTLSLKKVGTQQHFVQQPITELDTISTSLQTLENQTITPGQTLLSSIRGTALDVRVAFYPDAGSVLSLAVRKGASEQTVIKYTQSDATLSVDRTESGDTSYDPAASGVHTAKLEEDDTGLVSIRVLVDTCLVEVFGGQGEAVISDLIFPSDSSDGLALEVTGGNAVLQSVDVRSVSLE

SEQ ID NO: 49368 - protein, 516 aa, Aspergillus niger
MLNPKVAYMVWMTCLGLTLPSQAQSNDYRPSYHFTPDQYWMNEPNGLIKIGSTWHLFFQHNPTANVWGNICWGHATSTDLMHWAHKPTAIADENGVEAFTGTAYYDPNNASGLGDSANPPYLAWFTGYTVSSQTQDQRLAFSVDNGATWTKFQGNPIISTSQEAPHDITGGLESRDPKVFFHRQSGNWIMVLAHGGQDKLSFWTSADTINWTWQSDLKSTSINGLSSDITGWEVPDMFELPVEGTEETTWVVMMTPAEGSPAGGNGVLAITGSFDGKSFTADPVDASTMWLNNGRDFDGALSWVNVPASDGRRIIAAVMNSYGSNPPTTTWKGMLSFPRTLSLKKVGTQQHFVQQPITELDTISTSLQTLENQTITPGQTLLSSIRGTALDVRVAFYADAGSVLSLAVRKGASEQTVIKYTQSDATLSVDRTESGDTSYDPAASGVHTAKLEEDDTGLVSIRVLVDTCLVEVFGGQGEAVISDLIFPSDSSDGLALEVTGGNAVLQSVDVRSVSLE

SEQ ID NO: 49369 - protein, 516 aa, Aspergillus niger
MLNPKVAYMVWMTCLGLTLPSQAQSNDYRPSYHFTPDQYWMNEPNGLIKIGSTWHLFFQHNPTANVWGNICWGHATSTDLMHWAHKPTAIADENGVEAFTGTAYYDPNNASGLGDSANPPYLAWFTGYTVSSQTQDQRLAFSVDNGATWTKFQGNPIISTSQEAPHDITGGLESRDPKVFFHRQSGNWIMVLAHGGQDKLSFWSSADTINWTWQSDLKSTSINGLSSDITGWEVPDMFELPVEGTEETTWVVMMTPAEGSPAGGNGVLAITGSFDGKSFTADPVDASTMWLNNGRDFDGALSWVNVPASDGRRIIAAVMNSYGSNPPTTTWKGMLSFPRTLSLKKVGTQQHFVQQPITELDTISTSLQTLENQTITPGQTLLSSIRGTALDVRVAFYPDAGSVLSLAVRKGASEQTVIKYTQSDATLSVDRTESGDTSYDPAASGVHTAKLEEDDTGLVSIRVLVDTCLVEVFGGQGEAVISDLIFPSDSSDGLALEVTGGNAVLQSVDVRSVSLE

SEQ ID NO: 49370 - protein, 516 aa, Aspergillus niger
MLNPKVAYMVWMTCLGLTLPSQAQSNDYRPSYHFTPDQYWMNEPNGLIKIGSTWHLFFQHNPTANVWGNICWGHATSTDLMHWAHKPTAIADENGVEAFTGSAYYDPNNASGLGDSANPPYLAWFTGYTVSSQTQDQRLAFSVDNGATWTKFQGNPIISTSQEAPHDITGGLESRDPKVFFHRQSGNWIMVLAHGGQDKLSFWTSADTINWTWQSDLKSTSINGLSSDITGWEVPDMFELPVEGTEETTWVVMMTPAEGSPAGGNGVLAITGSFDGKSFTADPVDASTMWLNNGRDFDGALSWVNVPASDGRRIIAAVMNSYGSNPPTTTWKGMLSFARTLSLKKVGTQQHFVQQPITELDTISTSLQTLENQTITPGQTLLSSIRGTALDVRVAFYPDAGSVLSLAVRKGASEQTVIKYTQSDATLSVDRTESGDTSYDPAASGVHTAKLEEDDTGLVSIRVLVDTCSVEVFGGQGEAVISDLIFPSDSSDGLALEVTGGNAVLQSVDVRSVSLE

SEQ ID NO: 49371 - protein, 516 aa, Aspergillus niger
MLNPKVAYMVWMTCLGLTLPSQAQSNDYRPSYHFTPDQYWMNEPNGLIKIGSTWHLFFQHNPTANVWGNICWGHATSTDLMHWAHKPTAIADENGVEAFTGSAYYDPNNASGLGDSANPPYLAWFTGYTVSSQTQDQRLAFSVDNGATWTKFQGNPIISTSQEAPHDITGGLESRDPKVFFHRQSGNWIMVLAHGGQDKLSFWTSADTINWTWQSDLKSTSINGLSSDITGWEVPDMFELPVEGTEETTWVVMMTPAEGSPAGGNGVLAITGSFDGKSFTADPVDASTMWLNNGRDFDGALSWVNVPASDGRRIIAAVMNSYGSNPPTTTWKGMLSFPRTLSLKKVGTQQHFVQQPITELDTISTSLQTLENQTITPGQTLLSSIRGTALDVRVAFYADAGSVLSLAVRKGASEQTVIKYTQSDATLSVDRTESGDTSYDPAASGVHTAKLEEDDTGLVSIRVLVDTCSVEVFGGQGEAVISDLIFPSDSSDGLALEVTGGNAVLQSVDVRSVSLE

SEQ ID NO: 49372 - protein, 516 aa, Aspergillus niger
MLNPKVAYMVWMTCLGLTLPSQAQSNDYRPSYHFTPDQYWMNEPNGLIKIGSTWHLFFQHNPTANVWGNICWGHATSTDLMHWAHKPTAIADENGVEAFTGSAYYDPNNASGLGDSANPPYLAWFTGYTVSSQTQDQRLAFSVDNGATWTKFQGNPIISTSQEAPHDITGGLESRDPKVFFHRQSGNWIMVLAHGGQDKLSFWSSADTINWTWQSDLKSTSINGLSSDITGWEVPDMFELPVEGTEETTWVVMMTPAEGSPAGGNGVLAITGSFDGKSFTADPVDASTMWLNNGRDFDGALSWVNVPASDGRRIIAAVMNSYGSNPPTTTWKGMLSFPRTLSLKKVGTQQHFVQQPITELDTISTSLQTLENQTITPGQTLLSSIRGTALDVRVAFYPDAGSVLSLAVRKGASEQTVIKYTQSDATLSVDRTESGDTSYDPAASGVHTAKLEEDDTGLVSIRVLVDTCSVEVFGGQGEAVISDLIFPSDSSDGLALEVTGGNAVLQSVDVRSVSLE

SEQ ID NO: 49373 - protein, 516 aa, Aspergillus niger
MLNPKVAYMVWMTCLGLTLPSQAQSNDYRPSYHFTPDQYWMNEPNGLIKIGSTWHLFFQHNPTANVWGNICWGHATSTDLMHWAHKPTAIADENGVEAFTGSAYYDPNNASGLGDSANPPYLAWFTGYTVSSQTQDQRLAFSVDNGATWTKFQGNPIISTSQEAPHDITGGLESRDPKVFFHRQSGNWIMVLAHGGQDKLSFWSSADTINWTWQSDLKSTSINGLSSDITGWEVPDMFELPVEGTEETTWVVMMTPAEGSPAGGNGVLAITGSFDGKSFTADPVDASTMWLNNGRDFDGALSWVNVPASDGRRIIAAVMNSYGSNPPTTTWKGMLSFARTLSLKKVGTQQHFVQQPITELDTISTSLQTLENQTITPGQTLLSSIRGTALDVRVAFYPDAGSVLSLAVRKGASEQTVIKYTQSDATLSVDRTESGDTSYDPAASGVHTAKLEEDDTGLVSIRVLVDTCSVEVFGGQGEAVISDLIFPSDSSDGLALEVTGGNAVLQSVDVRSVSLE

SEQ ID NO: 49374 - protein, 516 aa, Aspergillus niger
MLNPKVAYMVWMTCLGLTLPSQAQSNDYRPSYHFTPDQYWMNEPNGLIKIGSTWHLFFQHNPTANVWGNICWGHATSTDLMHWAHKPTAIADENGVEAFTGTAYYDPNNASGLGDSANPPYLAWFTGYTVSSQTQDQRLAFSVDNGATWTKFQGNPIISTSQEAPHDITGGLESRDPKVFFHRQSGNWIMVLAHGGQDKLSFWSSADTINWTWQSDLKSTSINGLSSDITGWEVPDMFELPVEGTEETTWVVMMTPAEGSPAGGNGVLAITGSFDGKSFTADPVDASTMWLNNGRDFDGALSWVNVPASDGRRIIAAVMNSYGSNPPTTTWKGMLSFARTLSLKKVGTQQHFVQQPITELDTISTSLQTLENQTITPGQTLLSSIRGTALDVRVAFYPDAGSVLSLAVRKGASEQTVIKYTQSDATLSVDRTESGDTSYDPAASGVHTAKLEEDDTGLVSIRVLVDTCLVEVFGGQGEAVISDLIFPSDSSDGLALEVTGGNAVLQSVDVRSVSLE

SEQ ID NO: 49375 - protein, 516 aa, Aspergillus niger
MLNPKVAYMVWMTCLGLTLPSQAQSNDYRPSYHFTPDQYWMNEPNGLIKIGSTWHLFFQHNPTANVWGNICWGHATSTDLMHWAHKPTAIADENGVEAFTGSAYYDPNNASGLGDSANPPYLAWFTGYTVSSQTQDQRLAFSVDNGATWTKFQGNPIISTSQEAPHDITGGLESRDPKVFFHRQSGNWIMVLAHGGQDKLSFWTSADTINWTWQSDLKSTSINGLSSDITGWEVPDMFELPVEGTEETTWVVMMTPAEGSPAGGNGVLAITGSFDGKSFTADPVDASTMWLNNGRDFDGALSWVNVPASDGRRIIAAVMNSYGSNPPTTTWKGMLSFARTLSLKKVGTQQHFVQQPITELDTISTSLQTLENQTITPGQTLLSSIRGTALDVRVAFYPDAGSVLSLAVRKGASEQTVIKYTQSDATLSVDRTESGDTSYDPAASGVHTAKLEEDDTGLVSIRVLVDTCAVEVFGGQGEAVISDLIFPSDSSDGLALEVTGGNAVLQSVDVRSVSLE

SEQ ID NO: 49376 - protein, 516 aa, Aspergillus niger
MLNPKVAYMVWMTCLGLTLPSQAQSNDYRPSYHFTPDQYWMNEPNGLIKIGSTWHLFFQHNPTANVWGNICWGHATSTDLMHWAHKPTAIADENGVEAFTGSAYYDPNNASGLGDSANPPYLAWFTGYTVSSQTQDQRLAFSVDNGATWTKFQGNPIISTSQEAPHDITGGLESRDPKVFFHRQSGNWIMVLAHGGQDKLSFWTSADTINWTWQSDLKSTSINGLSSDITGWEVPDMFELPVEGTEETTWVVMMTPAEGSPAGGNGVLAITGSFDGKSFTADPVDASTMWLNNGRDFDGALSWVNVPASDGRRIIAAVMNSYGSNPPTTTWKGMLSFARTLSLKKVGTQQHFVQQPITELDTISTSLQTLENQTITPGQTLLSSIRGTALDVRVAFYPDAGSVLSLAVRKGASEQTVIKYTQSDATLSVDRTESGDTSYDPAASGVHTAKLEEDDTGLVSIRVLVDTCLVEVFGGQGEAVISDLIFPSDSSDGLALEVTGGNAVLQSVDVRSVSLE

SEQ ID NO: 49377 - protein, 516 aa, Aspergillus niger
MLNPKVAYMVWMTCLGLTLPSQAQSNDYRPSYHFTPDQYWMNEPNGLIKIGSTWHLFFQHNPTANVWGNICWGHATSTDLMHWAHKPTAIADENGVEAFTGSAYYDPNNASGLGDSANPPYLAWFTGYTVSSQTQDQRLAFSVDNGATWTKFQGNPIISTSQEAPHDITGGLESRDPKVFFHRQSGNWIMVLAHGGQDKLSFWSSADTINWTWQSDLKSTSINGLSSDITGWEVPDMFELPVEGTEETTWVVMMTPAEGSPAGGNGVLAITGSFDGKSFTADPVDASTMWLNNGRDFDGALSWVNVPASDGRRIIAAVMNSYGSNPPTTTWKGMLSFPRTLSLKKVGTQQHFVQQPITELDTISTSLQTLENQTITPGQTLLSSIRGTALDVRVAFYPDAGSVLSLAVRKGASEQTVIKYTQSDATLSVDRTESGDTSYDPAASGVHTAKLEEDDTGLVSIRVLVDTCLVEVFGGQGEAVISDLIFPSDSSDGLALEVTGGNAVLQSVDVRSVSLE

SEQ ID NO: 49378 - protein, 516 aa, Aspergillus niger
MLNPKVAYMVWMTCLGLTLPSQAQSNDYRPSYHFTPDQYWMNEPNGLIKIGSTWHLFFQHNPTANVWGNICWGHATSTDLMHWAHKPTAIADENGVEAFTGSAYYDPNNASGLGDSANPPYLAWFTGYTVSSQTQDQRLAFSVDNGATWTKFQGNPIISTSQEAPHDITGGLESRDPKVFFHRQSGNWIMVLAHGGQDKLSFWSSADTINWTWQSDLKSTSINGLSSDITGWEVPDMFELPVEGTEETTWVVMMTPAEGSPAGGNGVLAITGSFDGKSFTADPVDASTMWLNNGRDFDGALSWVNVPASDGRRIIAAVMNSYGSNPPTTTWKGMLSFARTLSLKKVGTQQHFVQQPITELDTISTSLQTLENQTITPGQTLLSSIRGTALDVRVAFYPDAGSVLSLAVRKGASEQTVIKYTQSDATLSVDRTESGDTSYDPAASGVHTAKLEEDDTGLVSIRVLVDTCLVEVFGGQGEAVISDLIFPSDSSDGLALEVTGGNAVLQSVDVRSVSLE

SEQ ID NO: 49379 - protein, 493 aa, Aspergillus niger
QSNDYRPSYHFTPDQYWMNEPNGLIKIGSTWHLFFQHNPTANVWGNICWGHATSTDLMHWAHKPTAIADENGVEAFTGTAYYDPNNASGLGDSANPPYLAWFTGYTVSSQTQDQRLAFSVDNGATWTKFQGNPIISTSQEAPHDITGGLESRDPKVFFHRQSGNWIMVLAHGGQDKLSFWTSADTINWTWQSDLKSTSINGLSSDITGWEVPDMFELPVEGTEETTWVVMMTPAEGSPAGGNGVLAITGSFDGKSFTADPVDASTMWLDNGRDFDGALSWVNVPASDGRRIIAAVMNSYGSNPPTTTWKGMLSFPRTLSLKKVGTQQHFVQQPITELDTISTSLQTLENQTITPGQTLLSSIRGTVLDVRVAFYPDAGSVLSLAVRKGRSEQTVIKDTQSDATLSVDRTESGDTSYDPAAGGVHTAKLEEDDTGLVSIRVLVDTCSVDLFGGQGEAVISDLIFPSDSSDGLALEVTGGNAVLQSVDVRSLSLE

SEQ ID NO: 49380 - protein, 493 aa, Aspergillus niger
QSNDYRPSYHFTPDQYWMNEPNGLIKIGSTWHLFFQHNPTANVWGNICWGHATSTDLMHWAHKPTAIADENGVEAFTGTAYYDPNNASGLGDSANPPYLAWFTGYTVSSQTQDQRLAFSVDNGATWTKFQGNPIISTSQEAPHDITGGLESRDPKVFFHRQSGNWIMVLAHGGQDKLSFWTSADTINWTWQSDLKSTSINGLSSDITGWEVPDMFELPVEGTEETTWVVMMTPAEGSPAGGNGVLAITGSFDGKSFTADPVDASTMWLSWVNVPASDGRRIIAAVMNSYGSNPPTTTWKGMLSFPRTLSLKKVGTQQHFVQQPITELDTISTSLQTLENQTITPGQTLLSSIRGTVLDVRVAFYPDAGSVLSLAVRKGRSEQTVIKDTQSDATLSVDTQSDATLSVDRTESGDTSYDPAAGGVHTAKLEEDDTGLVSIRVLVDTCSVDLFGGQGEAVISDLIFPSDSSDGLALEVTGGNAVLQSVDVRSLSLE

SEQ ID NO: 49381 - protein, 493 aa, Aspergillus niger
QSNDYRPSYHFTPDQYWMNEPNGLIKIGSTWHLFFQHNPTANVWGNICWGHATSTDLMHWAHKPTAIADENGVEAFTGTAYYDPNNASGLGDSANPPYLAWFTGYTVSSQTQDQRLAFSVDNGATWTKFQGNPIISTSQEAPHDITGGLESRDPKVFFHRQSGNWIMVLAHGGQDKLSFWTSADTINWTWQSDLKSTSINGLSSDITGWEVPDMFELPVEGTEETTWVVMMTPAEGSPAGGNGVLAITGSFDGKSFTADPVDASTMWLNNGRDFDGALSWVNVPASDGRRIIAAVMNSYGSNPPTTTWKGMLSFPRTLSLKKVGTQQHFVQQPITELDTISTSLQTLENQTITPGQTLLSSIRGTVLDVRVAFYPDAGSVLSLAVRKGRSEQTVIKDTQSDATLSVDRTESGDTSYDPAAGGVHTAKLEEDDTGLVSIRVLVDTCSVDLFGGQGEAVISDLIFPSDSSDGLALEVTGGNAVLQSVDVRSLSLE

SEQ ID NO: 49382 - protein, 516 aa, Aspergillus niger
MLNPKVAYMAWMTCLGLTLPSQAQSNDYRPSYHFTPDQYWMNEPNGLIKIGSTWHLFFQHNPTANVWGNICWGHATSTDLMHWAYKPTAIADENGVEAFTGTAYYDPNNTSGLGDSANPPYLAWFTGYTTSSQTQDQRLAFSVDNGATWTKFQGNPIISTSQEAPHDITGGLESRDPKVFFHRQSGNWIMVLAGHGQDKLSFWTSADTIHWTWQSDLKSTSINGLSSDITGWEVPDMFELPVEGTGETTWVVMMTPAEGSPAGGNGVLAITGSFDGKTFTADPVDASTMWLDNGRDFDGALSWVNVPASDGRRIIAAVMNSYGSNPPTTTWKGMLSFPRTLSLKKVGTQQHFVQQPITELDTISTSMQTLANQTITPGQTLLSSIRGTALDVRVAFYPDADSVLSLTVRKGASEQTVINYTQSNATLSVDRTESGDISYDPAAGGVHTAKLEEDGTGLVSIRVLVDTCSVEVFGGQGEAVISTLIFPSDSSDGLALEVTGGNAVLQSVDVRSVSLE

SEQ ID NO: 49383 - protein, 516 aa, Aspergillus ficuum
MLNPKVAYMVWMTCLGLTLPSQAQSNDYAPSYHFTPDQYWMNEPNGLIKIGSTWHLFFQHNPTANVWGNICWGHATSTDLMHWAHKPTAIADENGVEAFTGTAYYDPNNTSGLGDSANPPYLAWFTGYTTSSQTQDQALAFSVDNGATWTKFQGNPIISTSQEAPHDITGGLESADPKVFFHAQSGNWIMVLAHGGQDKLSFWTSADTINWTWQSDLKSTSINGLSSDITGWEVPDMFELPVEGTEETTWVVMMTPAEGSPAGGNGVLAITGSFDGKSFTADPVDASTMWLDNGADFDGALSWVNVPASDGAAIIAAVMNSYGSNPPTTTWKGMLSFPATLSLKKVGTQQHFVQQPITELDTISTSLQILANQTITPGQTLLSSIAGTALDVAVAFYPDAGSVLSLAVAKGASEQTVIKYTQSDATLSVDATESGDISYDPAAGGVHTAKLEEDGTGLVSIAVLVDTCSVEVFGGQGEAVISDLIFPSDSSDGLALEVTGGNAVLQSVDVASVSLE

SEQ ID NO: 49384 - protein, 516 aa, Aspergillus niger
MLNPKVAYMVWMTCLGLTLPSQAQSNDYRPSYHFTPDAYWMNEPNGLIKIGGTWHLFFQHNPTANVWGNMCWGHATSTDLMHWDHKPTAIPDENGVEAFSGTAYYDPNNTSGLGDSANPPYLAWFTGYTTSSQTQDQRLAFSVDNGATWTKFQGNPIISTSQEAPHDITGGLESRDPKVFFHEQSGNWIMVLAHGGQHKLSFWTSADTINWTWQSDLKSTSINGLSSDITGWEVPDMFELPVEGTEETTWVVMMTPAEGSPAGGNGVLAITGSFDGKSFTADPVDASTMWLDYGRDFDGALSWVNVPASDGRRIIAAVMNSYGSNPPTTTWKGMLSFPRTLSLKKVGTQRRFVQQPITELDTISTSLQILANQTITPGQTLLSSIRGTALDVRVAFYPDPGSVLSLAVRKGASEQTVIKYTQSDATLSVDRTESGDISYDPAAGGVHTAKLEEDGTGLVHIRVLVDTCSVEVFGGQGEAVISDLIFPSPSSDGLALEVTGGSAVLQSVDVRSVSLE

SEQ ID NO: 49385 - protein, 516 aa, Aspergillus niger
MLNPKVAYMVWMTCLGLTLPSQAQSNDYRPSYHFTPDAYWMNEPNGLIKIGGTWHLFFQHNPTANVWGNMCWGHATSTDLMHWDHKPTAIPDENGVEAFSGTAYYDPNNTSGLGDSANPPYLAWFTGYTTSSQTQDQRLAFSVDNGATWTKFQGNPIISTSQEAPHDITGGLESRDPKVFFHEQSGNWIMVLAHGGQHKLSFWTSADTINWTWQSDLKSTSINGLSSDITGWEVPDMFELPVEGTEETTWVVMMTPAEGSPAGGNGVLAITGSFDGKSFTPDPVDASTMWLDYGRDFDGALSWVNVPASDGRRIIAAVMNSYGSNPPTTTWKGMLSFPRTLSLKKIGTQRRFVQQPITELDTISTSLQILANQTITPGQTLLSSIRGTALDVRVAFYPDPGSVLSLAVRKGASEQTVIKYTQSDATLSVDRTESGDISYDPAAGGVHTAKLEEDGTGLVHIRVLVDTCSVEVFGGQGEAVISDLIFPSDSSDGLALEVTGGSAVLQSVDVRSVSLE

SEQ ID NO: 49386 - protein, 516 aa, Aspergillus niger
MLNPKVAYMVWMTCLGLMLPSQAQSNDYAPSYHFTPDQYWMNEPNGLIKIGSTWHLFFQHNPTANVWGNICWGHATSTDLMHWAHKPTAIADENGVEAFTGTAYYDPNNTSGLGDSANPPYLAWFTGYTTSSQTQDQALAFSVDNGATWTKFQGNPIISTSQEAPHDITGGLESADPKVFFHAQSGNWIMVLAHGGQDKLSFWTSADTINWTWQSDLKSTSINGLSSDITGWEVPDMFELPVEGTEETTWVVMMTPAEGSPAGGNGVLAITGSFDGKSFTADPVDASTMWLDNGADFDGALSWVNVPASDGAAIIAAVMNSYGSNPPTTTWKGMLSFPATLSLKKVGTQQHFVQQPITELDTISTSLQTLANQTITPGQTLLSSIAGTALDVAVAFYPDAGSVLSLAVAKGASEQTVINYTQSDATLSVDATESGDISYDPAAGGVHTAKLEEDGTGLVSIAVLVDTCSVEVFGGQGEAVISDLIFPSDSSDGLALEVTGGNAVLQSVDVASVSLE

SEQ ID NO: 49387 - protein, 516 aa, Aspergillus niger
MLNPKVAYMVWMTCLGLMLPSQAQSNDYAPSYHFTPDQYWMNEPNGLIKIGSTWHLFFQHNPTANVWGNICWGHATSTDLMHWAHKPTAIADENGVEAFTGTAYYDPNNTSGLGDSANPPYLAWFTGYTTSSQTQDQALAFSVDNGATWTKFQGNPIISTSQEAPHDITGGLESADPKVFFHAQSGNWIMVLAHGGQDKLSFWTSADTINWTWQSDLKSTSINGLSSDITGWEVPDMFELPVEGTEETTWVVMMTPAEGSPAGGNGVLAITGSFDGKSFTADPVDASTMWLDNGADFDGALSWVNVPASDGAAIIAAVMNSYGSNPPTTTWKGMLSFPATLSLKKVGTQQHFVQQPITELDTISTSLQTLANQTITPGQTLLSSIAGTALDVAVAFYPDAGSVLSLAVAKGASEQTVINYTQSNATLSVDATESGDISYDPAAGGVHTAKLEEDGTGLVSIAVLVDTCSVEVFGGQGEAVISDLIFPSDSSDGLALEVTGGNAVLQSVDVASVSLE

SEQ ID NO: 49388 - protein, 516 aa, Aspergillus niger
MLNPKVAYMVWMTCLGLTLPSQAQSNDYAPSYHFTPDQYWMNEPNGLIKIGSTWHLFFQHNPTANVWGNICWGHATSTDLMHWAHKPTAIADENGVEAFTGTAYYDPNNASGLGDSANPPYLAWFTGYTVSSQTQDQALAFSVDNGATWTKFQGNPIISTSQEAPHDITGGLESADPKVFFHAQSGNWIMVLAHGGQDKLSFWTSADTINWTWQSDLKSTSINGLSSDITGWEVPDMFELPVEGTEETTWVVMMTPAEGSPAGGNGVLAITGSFDGKSFTADPVDASTMWLNNGADFDGALSWVNVPASDGAAIIAAVMNSYGSNPPTTTWKGMLSFPATLSLKKVGTQQHFVQQPITELDTISTSLQTLENQTITPGQTLLSSIAGTALDVAVAFYPDAGSVLSLAVAKGASEQTVIKYTQSDATLSVDATESGDTSYDPAAGGVHTAKLEEDDTGLVSIAVLVDTCSVEVFGGQGEAVISDLIFPSDSSDGLALEVTGGNAVLQSVDVASVSLE

SEQ ID NO: 49389 - protein, 516 aa, Aspergillus niger
MLNPKVAYMVWMTCLGLTLPSQAQSNDYAPSYHFTPDQYWMNEPNGLIKIGSTWHLFFQHNPTANVWGNICWGHATSTDLMHWAHKPTAIADENGVEAFTGTAYYDPNNASGLGDSANPPYLAWFTGYTVSSQTQDQALAFSVDNGATWTKFQGNPIISTSQEAPHDITGGLESADPKVFFHAQSGNWIMVLAHGGQDKLSFWTSADTINWTWQSDLKSTSINGLSSDITGWEVPDMFELPVEGTEETTWVVMMTPAEGSPAGGNGVLAITGSFDGKSFTADPVDASTMWLNNGADFDGALSWVNVPASDGAAIIAAVMNSYGSNPPTTTWKGMLSFPATLSLKKVGTQQHFVQQPITELDTISTSLQTLENQTITPGQTLLSSIAGTALDVAVAFYPDAGSVLSLAVAKGASEQTVIKYTQSDATLSVDATESGDTSYDPAAGGVHTAKLEEDDTGLVSIAVLVDTCSVEVFGGQGEAVISDLIIPSDSSDGLALEVTGGNAVLQSVDVASVSLE

SEQ ID NO: 49390 - protein, 516 aa, Aspergillus niger
MLNPKVAYMVWMTCLGLTLPSQAQRNDYRPSYHFTPDAYWMNEPNGLIKIGGTWHLFFQHNPTANVWGNMCWGHATSTDLMHWDHKPTAIPDENGVEAFSGTAYYDPNNTSGLGDSANPPYLAWFTGYTTSQGTQDQRLAFSVDNGATWTKFQGNPIISTSQEAPHDITGGLESRDPKVFFHEQSGRWIMVLAHGGQHKLSFWTSTDTINWTWQSDLKSTSINGLSSDITGWEVPDMFELPVEGTEETTWVVMMTPAEGSPAGGNGVLAITGSFDGKSFTADPVDASTMWLDYGRDFDGALSWENVPASDGRRIIAAVMNSYGSNPPTTTWKGMLSFPRTLSLKKIGTQRRFVQQPITELDTISTSLQILANQTITPGQTLLSSIRGTALDVRVAFYPDPGSVLSLAVRKGASEQTVIKYTQSDATLSVDRTESGDISYDPAAGGVHTAKLEPDGTGLVHIRVLVDTCSVEVFGGQGEAVISDLIFPSPSSDGLALEVTGGSAVLQSVDVRSVSLE

SEQ ID NO: 49391 - protein, 516 aa, Aspergillus niger
MLNPKVAYMVWMTCLGLTLPSQAQSNDYAPSYHFTPDQYWMNEPNGLIKIGSTWHLFFQHNPTANVWGNICWGHATSTDLMHWAYKPTAIADENGVEAFTGTAYYDPNNTSGLGDSANPPYLAWFTGYTTSSQTQDQALAFSVDNGATWTKFQGNPIISTSQEAPHDITGGLESADPKVFFHAQSGNWIMVLAHGGQDKLSFWTSADTIHWTWQSDLKSTSINGLSSDITGWEVPDMFELPVEGTGETTWVVMMTPAEGSPAGGNGVLAITGSFDGKTFTADPVDASTMWLDNGADFDGALSWVNVPASDGAAIIAAVMNSYGSNPPTTTWKGMLSFPATLSLKKVGTQQHFVQQPITELDTISTSMQTLANQTITPGQTLLSSIAGTALDVAVAFYPDAGSVLSLTVAKGASEQTVINYTQSNATLSVDATESGDISYDPAAGGVHTAKLEEDGTGLVSIAVLVDTCSVEVFGGQGEAVISDLIFPSDSSDGLALEVTGGNAVLQSVDVASVSLE

SEQ ID NO: 49392 - protein, 516 aa, Aspergillus niger
MLNPKVAYMVWMTCLGLTLPSQAQRNDYRPSYHFTPDAYWMNEPNGLIKIGGTWHLFFQHNPTANVWGNMCWGHATSTDLMHWDHKPTAIPDENGVEAFSGTAYYDPNNTSGLGDSANPPYLAWFTGYTTSQGTQDQRLAFSVDNGATWTKFQGNPIISTSQEAPHDITGGLESRDPKVFFHEQSGRWIMVLAHGGQHKLSFWTSTDTINWTWQSDLKSTSINGLSSDITGWEVPDMFELPVEGTEETTWVVMMTPAEGSPAGGNGVLAITGSFDGKSFTPDPVDASTMWLDYGRDFDGALSWENVPASDGRRIIAAVMNSYGSNPPTTTWKGMLSFPRTLSLKKIGTQRRFVQQPITELDTISTSLQILANQTITPGQTLLSSIRGTALDVRVAFYPDPGSVLSLAVRKGASEQTVIKYTQSDATLSVDRTESGDISYDPAAGGVHTAKLEPDGTGLVHIRVLVDTCSVEVFGGQGEAVISDLIFPSPSSDGLALEVTGGSAVLQSVDVRSVSLE

SEQ ID NO: 49393 - protein, 493 aa, Aspergillus niger
QSNDYAPSYHFTPDQYWMNEPNGLIKIGSTWHLFFQHNPTANVWGNICWGHATSTDLMHWAHKPTAIADENGVEAFTGTAYYDPNNASGLGDSANPPYLAWFTGYTVSSQTQDQALAFSVDNGATWTKFQGNPIISTSQEAPHDITGGLESADPKVFFHAQSGNWIMVLAHGGQDKLSFWTSADTINWTWQSDLKSTSINGLSSDITGWEVPDMFELPVEGTEETTWVVMMTPAEGSPAGGNGVLAITGSFDGKSFTADPVDASTMWLSWVNVPASDGAAIIAAVMNSYGSNPPTTTWKGMLSFPATLSLKKVGTQQHFVQQPITELDTISTSLQTLENQTITPGQTLLSSIAGTVLDVAVAFYPDAGSVLSLAVAKGASEQTVIKDTQSDATLSVDTQSDATLSVDATESGDTSYDPAAGGVHTAKLEEDDTGLVSIAVLVDTCSVDLFGGQGEAVISDLIFPSDSSDGLALEVTGGNAVLQSVDVASLSLE

SEQ ID NO: 49394 - protein, 493 aa, Aspergillus niger
QSNDYAPSYHFTPDQYWMNEPNGLIKIGSTWHLFFQHNPTANVWGNICWGHATSTDLMHWAHKPTAIADENGVEAFTGTAYYDPNNASGLGDSANPPYLAWFTGYTVSSQTQDQALAFSVDNGATWTKFQGNPIISTSQEAPHDITGGLESADPKVFFHAQSGNWIMVLAHGGQDKLSFWTSADTINWTWQSDLKSTSINGLSSDITGWEVPDMFELPVEGTEETTWVVMMTPAEGSPAGGNGVLAITGSFDGKSFTADPVDASTMWLNNGADFDGALSWVNVPASDGAAIIAAVMNSYGSNPPTTTWKGMLSFPATLSLKKVGTQQHFVQQPITELDTISTSLQTLENQTITPGQTLLSSIAGTVLDVAVAFYPDAGSVLSLAVAKGASEQTVIKDTQSDATLSVDATESGDTSYDPAAGGVHTAKLEEDDTGLVSIAVLVDTCSVDLFGGQGEAVISDLIFPSDSSDGLALEVTGGNAVLQSVDVASLSLE

SEQ ID NO: 49395 - protein, 516 aa, Aspergillus niger
MLNPKVAYMVWMTCLGLTLPSQAQRNDYRPSYHFTPKAYWMNEPNGLIKIGGTWHLFFQHNPTANVWGPMCWGHATSTDLMHWDHKPTAIPDENGVEAFSGTAYYDPNNTSGLGTSTNPPYLAWFTGYTTSQGTQDQRLAFSVDNGATWTKFQGNPIISTSQEAPHDITGGLESRDPKVFFHEQSGQWIMVLAHGGQHKLSFWTSTDTINWTWQSDLKSTQINGLSSDITGWEVPDMFELPVEGTEETTWVVMMTPAEGSPAGGNGVLAITGSFDGKSFTADPVDPSTMWLDYGRDFDGALSWENVPASDGRRIIAAVMNSYGSNPPTTTWKGMLSFPRTLSLKKVGTQRRFVQQPITELDTISTSLQILANQTITPGQTLLSSIRGTALDVRVAFYPDPGSVLSLAVRKGASEQTVIKYTQSDATLSVDRTESGDISYDPAAGGVHTAKLEPDGTGLVHIRVLVDTCSVEVFGGQGEAVISDLIFPSESSDGLALEVTGGSAVLQSVDVRYVSLE

SEQ ID NO: 49396 - protein, 516 aa, Aspergillus niger
MLNPKVAYMVWMTCLGLTLPSQAQRNDYRPSYHFTPKAYWMNEPNGLIKIGGTWHLFFQHNPTANVWGPMCWGHATSTDLMHWDHKPTAIPDENGVEAFSGTAYYDPNNTSGLGTSTNPPYLAWFTGYTTSQGTQDQRLAFSVDNGATWTKFQGNPIISTSQEAPHDITGGLESRDPKVFFHEQSGQWIMVLAHGGQHKLSFWTSTDTINWTWQSDLKSTQINGLSSDITGWEVPDMFELPVEGTEETTWVVMMTPAEGSPAGGNGVLAITGSFDGKSFTADPVDPSTMWLDYGRDFDGALSWENVPASDGRRIIAAVMNSYGSNPPTTTWKGMLSFPRTLSLKKIGTQRRFVQQPITELDTISTSLQILANQTITPGQTLLSSIRGTALDVRVAFYPDPGSVLSLAVRKGASEQTVIKYTQSDATLSVDRTESGDISYDPAAGGVHTAKLEPDGTGLVHIRVLVDTCSVEVFGGQGEAVISDLIFPSESSDGLALEVTGGSAVLQSVDVRYVSLE

SEQ ID NO: 49397 - protein, 516 aa, Aspergillus niger
MLNPKVAYMVWMTCLGLTLPSQAQRNDYRPSYHFTPKAYWMNEPNGLIKIGGTWHLFFQHNPYANVWGNMCWGHATSTDLMHWDHKPTAIPSENGVEAFSGTAYYDPNNTSGLGTSTNPPYLAWFTGYTTSQGTQDQRLAFSVDNGATWTKFQGNPIISTSQEAPHDITGGLESRDPKVFFHEQSGKWIMVLAHGGQHKLSFWTSDDTINWTWQSDLKSTQINGLSSDITGWEVPDMFELPVEGTNETTWVVMMTPAEGSPAGGNGVLAITGSFDGKSFTADPVDPSTMWLDYGRDFDGALSWENVPASDGRRIIAAVMNSYGSNPPTTTWKGMLSFPRTLSLKKIGTQRRFVQQPITELDTISTSLQILQNQTITPGQTLLSSIRGTALDVRVKFYPDPGSVLSLAVRKGASEQTVIKYTQSDATLSVDRTESGDISYDPAAGGVHTAKLEPDGTGLVHIRVLVDTCSVEVFGGQGEAVISDLIFPSESSDGLALEVTGGSAVLQCVDVRYVSLE

SEQ ID NO: 49398 - protein, 516 aa, Aspergillus niger
MLNPKVAYMVWMTCLGLTLPSQAQRNDYRPSYHFTPKAYWMNEPNGLIKIGGTWHLFFQHNPYANVWGNMCWGHATSTDLMHWDHKPTAIPSENGVEAFSGTAYYDPNNTSGLGTSTNPPYLAWFTGYTTSQGTQDQRLAFSVDNGATWTKFQGNPIISTSQEAPHDITGGLESRDPKVFFHEQSGKWIMVLAHGGQHKLSFWTSTDTINWTWQSDLKSTQINGLSSDITGWEVPDMFELPVEGTNETTWVVMMTPAEGSPAGGNGVLAITGSFDGKSFTADPVDPSTMWLDYGRDFDGALSWENVPASDGRRIIAAVMNSYGSNPPTTTWKGMLSFPRTLSLKKIGTQRRFVQQPITELDTISTSLQILQNQTITPGQTLLSSIRGTALDVRVKFYPDPGSVLSLAVRKGASEQTVIKYTQSDATLSVDRTESGDISYDPAAGGVHTAKLEPDGTGLVHIRVLVDTCSVEVFGGQGEAVISDLIFPSESSDGLALEVTGGSAVLQCVDVRYVSLE

SEQ ID NO: 49399 - protein, 516 aa, Aspergillus niger
MLNPKVAYMVWMTCLGLTLPSQAQRNDYRPSYHFTPKAYWMNEPNGLIKIGGTWHLFFQHNPTANVWGPMCWGHATSTDLMHWEHKPTAIPSENGVEAFSGTAYYDPNNTSGLGTSTNPPYLAWFTGYTTSQGTQDQRLAFSTDNGATWTKFQGNPIISTSQEAPHDITGGLESRDPKVFFHEQSGKWIMVLAHGGQNKLSFWTSDDTINWTWQSDLKSTQINGLSSDITGWEVPDMFELPVEGTNETTWVVMMTPAEGSPAGGNGVLAITGSFDGKSFTADPVDPSTMWLDYGRDFDGALSWENVPASDGRRIIAAVMNSYGSNPPTTTWKGMLSFPRTLSLKKIGTQRRFVQQPISELDTISTSLQILQNQTITPGQTLLSSIRGTALDVRVKFYPDPGSVLSLAVRKGASEQTVIKYTQSDATLSVDRTESGDISYDPAAGGVHTAQLEPDSTGLVHIRVLVDTCSVEVFGGDGEAVISDLIFPSESSDGLALEVTGGSAVLQCVDVRYVSLE

SEQ ID NO: 49400 - protein, 516 aa, Aspergillus niger
MLNPKVAYMVWMTCLGLTLPSQAQRNDYRPSYHFTPKAYWMNEPNGLIKIGGTWHLFFQHNPYANVWGNMCWGHATSTDLMHWEHKPTAIPSENGVEAFSGTAYYDPNNTSGLGTSTNPPYLAWFTGYTTSQGTQDQRLAFSTDNGATWTKFQGNPIISTSQEAPHDITGGLESRDPKVFFHEQSGKWIMVLAHGGQNKLSFWTSTDTINWTWQSDLKSTQINGLSSDITGWEVPDMFELPVEGTNETTWVVMMTPAEGSPAGGNGVLAITGSFDGKSFTADPVDPSTMWLDYGRDFDGALSWENVPASDGRRIIAAVMNSYGSNPPTTTWKGMLSFPRTLSLKKIGTQRRFVQQPISELDTISTSLQILQNQTITPGQTLLSSIRGTALDVRVKFYPDPGSVLSLAVRKGASEQTVIKYTQSDATLSVDRTESGDISYDPAAGGVHTAQLEPDSTGLVHIRVLVDTCSVEVFGGDGEAVISDLIFPSESSDGLALEVTGGGAVLQCVDVRYVSLE

SEQ ID NO: 49401 - protein, 516 aa, Aspergillus niger
MLNPKVAYMVWMTCLGLTLPSQAQTNDYRPSYHFTPKAYWMNEPNGLIKIGGTYHLFFQHNPYANVWGNMCWGHATSTDLMHWEHKPTAIPSENGVEAFSGTAYYDPNNTSGLGTSKNPPYLAWFTGYNTSQGTQDQRLAFSTDNGATWTKFQGNPIISTSQEAPHDITGGLESRDPKVFFHEESGKWIMVLAHGGQNKLSFWTSTDTINWTWQSDLKSTQINGLSSDITGWEVPDMFELPVEGTNETTWVVMMTPAEGSPAGGNGVLAITGSFDGKSFTADPVDPSTMWLDYGRDFDGALSWENVPASDGRRIIAAVMNSYGSNPPTNTWKGMLSFPRTLSLKKVGTQRRFVQQPISELDTIGTSLQILTNQTITPGQTLLSSIRGTALDVRVKFYPDPGSVLSLAVRKGGSEQTVIKYTQSDNTLSVDRTESGDISYDPAAGGVHTATLEPDSTGLVHIRVLVDTCSVEVFGGDGEAVISDLIFPSESSDGLALEVTGGSAVLQCVDVRYISLE

SEQ ID NO: 49402 - protein, 516 aa, Aspergillus niger
MLNPKVAYMVWMTCLGLTLPSQAQRNDYRPSYHFTPKAYWMNEPNGLIKIGGTYHLFFQHNPYANVWGNMCWGHATSTDLLHWDHKPTAIPSENGVEAFSGTAYYDPNNTSGLGTSDNPPYLAWFTGYNTSQGTQDQRLAFSTDNGATWTKFQGNPIISTSQEAPHDITGGLESRDPKVFFHEESGKWIMVLAHGGQNKLSFWTSTDTINWTWQSDLKSTQINGLSSDITGWEVPDMFELPVEGTNETTWVVMMTPAEGSPAGGNGVLAITGSFDGKSFTADPVDPSTMWLDYGRDFDGALSWENVPASDGRRIIAAVMNSYGSNPPTNTWKGMLSFPRTLSLKKIGTQRRFVQQPISELDTISTSLQILTNQTITPGQTLLSSIRGTALDVRVEFYPDPGSVLSLAVRKGGSEQTVIKYTQSDNTLSVDRTESGDISYDPAAGGVHTATLEPDSTGLVHIRVLVDTCSVEVFGGDGEAVISDLIFPSESSDGLALEVTGGSAVLQCVDVRYVSLE

SEQ ID NO: 49403 - protein, 516 aa, Aspergillus niger
MLNPKVAYMVWMTCLGLTLPSQAQRNDYRPSYHFTPKAYWMNEPNGLIKIGGVYHLFYQHNPYANVWGNMCWGHATSTDLMHWEHKPVAIPSENGVEAFSGSAYYDPNNTSGLGTSKNPPYLAWFTGYNKSQGTQDQRLAYSTDNGATWVKFQGNPIISTSQEAPHDITGGLESRDPKVFFHEESGKWIMVLAHGSQNKLSFWTSDDTINWTWQSDLKSSQINGLSSDITGWEVPDMFELPVEGTNETTWVVMMTPAEGSPAGGNGVLAITGSFDGKSFTADPVDPSTMWLDYGRDFDGALSWENVPASDGRRIIAAVMNSYGSNPPTNTWKGMLSFPRTLQLKKIGTQRRFVQQPISELDTISTSLQILTNQTITPGQTLLSSIRGTALDVRVKFYPDPGSVLSLAVRKGGSEQTVIKYRQSDNTLSVDRTESGDISYDPAAGGVHTATLSPDSTGLVHIRVLVDTCSVEVFGGDGEAVISDLIFPSESSDGLALEVTGGSAVLQCVDVRYVSLE

SEQ ID NO: 49404 - protein, 516 aa, Aspergillus niger
MLNPKVAYMVWMTCLGLTLPSQAQRNDYRPSYHFTPKAYWMNEPNGLIKIGGVYHLFYQHNPYANVWGNMCWGHATSTDLLHWDHKPVAIPSENGVEAFSGSAYYDPNNTSGLGTSKNPPYLAWFTGYNKSQGTQDQRLAYSTDNGATWVKFQGNPIISTSQEAPHDITGGLESRDPKVFFHEESGKWIMVLAHGSQNKLSFWTSTDTINWTWQSDLKSSQINGLSSDITGWEVPDMFELPVEGTNETTWVVMMTPAEGSPAGGNGVLAITGSFDGKSFTADPVDPSTMWLDYGRDFDGALSWENVPASDGRRIIAAVMNSYGSNPPTNTWKGMLSFPRTLQLKKIGTQRRFVQQPISELDTISTSLQILTNQTITPGQTLLSSIRGTALDVRVKFYPDPGSVLSLAVRKGGSEQTVIKYRQSDNTLSVDRTESGDISYDPAAGGVHTATLSPDSTGLVHIRVLVDTCSVEVFGGDGEAVISDLIFPSESSDGLALEVTGGGAVLQCVDVRYVSLE

SEQ ID NO: 49405 - protein, 509 aa, Aspergillus arachidicola
ASMIGLLCLTSALVCQAQSNDYRPVYHFTPDENWMNEPNGLIKIGSTWHLFYQHNPTANVWGNLNWGHATSTDLLHWTHQALAITSENGVEAFTGTAYYDIDNTSGLGTSANPPYLAWFTGYTVANQSQDQRLAFSVDNGATWTKFQGNPIISTTQEAPHDITGGLESRDPKVFFHSPSGKWVMVLAHGGQDKMTFWTSTDTKQWTWQSDLESSSISGMSSAITGWEVPDMFQLPIAGTGESTWVLIITPAQGSPAGGNGVLALTGSFDGATFTADPVRNETMWLDYGRDFDGALSWVNVPSSDGRRIIAAVMNSYGSNPPTTTWKGMLSFPRTLSLKTIGNEQYFVQQPIAELDSVGSTVLQIQNQTIAPGQTLLSSVYGTALDIRIAFRPAVSSILSLAVRKGASEQTVIKYTQSTSTLSVDRTASGDISYDPAAGGVHDAKLQVEDTGIVHIRALIDTCSVEVFGGQGEAVISDLIFPSDSSDGLALDVTGGNVAIESVEVRKISL

SEQ ID NO: 49406 - protein, 490 aa, Penicillium purpurogenum
DDYRPTFHFCPAENWMNEPNGLIKIDSTWHLFYQADPTANVWGNECWGHATSSDLLHWDHLPVAIPVENGIESFTGTSYYDANNTSSLGTSTNPPYLAFFTGYTSSNGTQDQRLAYSTDLGTTWLKFSGNPIISAALEAPHDVTGGLESRDPKVFFHEPSGKWVMVLAHGGQDKLTFWTSLDAKSWTWMSDLLASQIEGFPSSVTGWEVPDMFQLPIQGTNETTWVIIFTPAQGSPAGGNGVVALTGSFDGETFLANPVDSSTLWLDYGRDFDGAMSWENVPASDGRLIIAAVMNSYGSNPPTNTWKGMLSFPRTLTLEKIGSKQYFLQQPIAELSTVDNALASIQNQTIAPKQTLLSSIHGSSLDVRIAFSVDSGATLSLAVRKGGSEQTVIRYSQSNSTLSVDRTASGDISYDPAAGGIHSAQLARDNTELVYLRVLVDTCSVEVFGGQGEAVISDLIFPSNSSDGLSLEVIGGTATLQSVEVFSVSL

SEQ ID NO: 49407 - protein, 490 aa, Talaromyces purpureogenus
DDYRPTFHFCPAENWMNEPNGLIKIDSTWHLFYQADPTANVWGNECWGHATSSDLLHWDHLPVAIPVENGIESFTGTSYYDANNTSSLGTSTNPPYLAFFTGHTSSNGTQDQRLAYSTDLGTTWLKFSGNPIISAALEAPHDVTGGLESRDPKVFFHEPSGKWVMVLAHGGQDKLTFWTSLDAKSWTWMSDLLASQIEGFPSSVTGWEVPDMFQLPIQGTNETTWVIIFTPAQGSPAGGNGVVALTGSFDGETFLANPVDSSTLWLDYGRDFDGAMSWENVPASDGRLIIAAVMNSYGSNPPTNTWKGMLSFPRTLTLKKIGSKQYFLQQPIAELSTVDNALASIQNQTIAPKQTLLSSIHGSSLDVRIAFSVDSGATLSLAVRKGGSEQTVIRYSQSNSTLSVDRTASGDISYDPAAGGIHSAQLARDNTELVYLRVLVDTCSVEVFGGQGEAVISDLIFPSNSSDGLSLEVIGGTAMLQSVEVFSVSL

SEQ ID NO: 49408 - protein, 497 aa, Penicillium sp. TN-88
LVARAVADDYRPAFHFCPAENWMNEPNGLIQINSTWHLFYQADPAANVWGNECWGHATSSDLLHWDHLPVAIPVENGIESFTGTSYYDSNNTSGLGTSTNPPYLAFFTGYTESNKTQDQRLAYSTDLGQTWVKFAGNPIIGAAQEAPQDISGGLESRDPKVFFHAPSGKWVMVLAHGGQDKLTFWTSLDAKNWTWVSDLSSSQIEGFPSSITGWEVPDMFQLPIQGIKKTTWVLIFTPAQGSPPGGNGVVALTGSFDGETFVADPVDPSTLWLDYGRDFDGALSWENVPASDGRRIIAAVMNSYGSNPPTTTWKGMLSFPRTLALKQIGSKQYFLQQPVAELSTIDGSLTSIQNQTITPNQTLLSSIHGTSLDIRMAFVIDSGATLSLAVRKGGSEQTVIRYFQSNSTLSVDRTASGDISYDPAAGGVHTAQLAQDNTELVHIWALIDTCSVEVFGGEGEAVISDLIFPSNSSDGLSLEVSGGTAMLRSVNVSSVSL

SEQ ID NO: 49409 - protein, 492 aa, Pseudomonas mucidolens
AVADDYPTFHFCPAENWMNEPNGLIKIDSTWHLFYQADPTANVWGNECWGHATSSDLLHWDHLPVAIPVENGIESFTGTSYYDANNTSSLGTSTNPPYLAFFTGYTSSNGTQDQRLAYSTDLGTTWLKFSGNPIISAALEAPHDVTGGLESRDPKVFFHEPSGKWVMVLAHGGQDKLTFWTSLDAKSWTWMSDLLASQIEGFPSSVTGWEVPDMFQLPIQGTNETTWVIIFTPAQGSPAGGNGVVALTGSFDGETFLANPVDSSTLWLDYGRDFDGAMSWENVPASDGRLIIAAVMNSYGSNPPTNTWKGMLSFPRTLTLEKIGSKQYFLQQPIAELSTVDNALASIQNQTIAPKQTLLSSIHGSSLDVRIAFSVDSGATLSLAVRKGGSEQTVIRYSQSNSTLSVDRTASGDISYDPAAGGIHSAQLARDNTELVYLRVLVDTCSVEVFGGQGEAVISDLIFPSNSSDGLSLEVIGGTATLQSVEVFSVSL

SEQ ID NO: 49410 - protein, 491 aa, Aspergillus rugulosus?
LAGQALADDYRPVFHFVPEKNWMNEPNGLIKIGSTWHLFYQHNPTANVWGNLNWGHATSSDLVHWTHEPLAITSENGIEAFTGTSYYDAENTSGLGTSDNPPYLAWYTGYFPSNGTQDQRLAFSIDAGETWTKFEGNPVISAAQEAPHDATGGLETRDPKVFFHADSGKWIMVLAHGGQNKMSFWTSVDAKRWSWASDLTSTQVPGLPSAVKGWEVPDMFEVPVHGTDKTTWVLIFTPAEGSPAGGNGVLALTGSFDGTVFHPNPVNVSTLWLDYGRDFDGALSWENLPDSDGHRILAAISNSYGANPPTNTWKGMLSFPRTLSLHQSQTGQYFLQQPVSNLDTVSTPLVSVKNQTIAPGQVLLSSVRGTALDIRIAFSANAGTVLSLAVRKAGSQETVIQYRQSDATLSVDRTTSGLTSYDPAAGGVHTAPLRPDASGVVQIRALVDTCSVEVFGGQGEVVISDLIFPDETSDGLALQVIGGTAVLRSLE

SEQ ID NO: 49411 - protein, 498 aa, Aspergillus alliaceus
LVSQVVADDFRPAFHFAPDKNWMNEPNGLIKIGSTWHLFYQHNPTANVWGNINWGHATSSDLLHWAYLPVAIENENGIEAFTGTSYYDANNTSGLGTSDNPPYLAWFTGYFPSNGTQDQRLAFSLDLGTTYVKLPGNPVIASVQEAPHDVTGGLESRDPKVFFHSPSGKWVMVLAHGGQNKMTFWSSTDSKSWIWESDLLSTQIKGFPSSITGWEVPDMFELPIHGTNETTWVLMFTPAQGSPAGGNGVVALTGSFDGKTFVADPVDSSTLWLDYGRDFDGALSWENIPVSDGRRIIAAVMNSYGSNPPTNTWKGMLSFPRSLTLKQMGSKRYFLQHPISELRTIGNSLISIQNRTIEPGQTLLSSTHGISLDIRVAFLLDPGATLSLAVRKAGSEQTIIRYSQANSTLSVDRRASGDNTYDPAAGGIHNAQLVLDDTELVNIRVLVDTCSVEVFGGQGEGVISDLIFPSSTSNGLLLEAIGGKATLQSVEIYSVSLD

SEQ ID NO: 49412 - protein, 492 aa, Penicillium murcianum
DDFRPVYHFVPKENWMNEPNGLIKIKSTWHLFYQHNPTANVWGNLNWGHATSSDLVHWTHEPLAIISENGVEAFTGTSYYDADNTSALGSSTSPPYLAYYTGYFPSNGTQDQRLAFSVDDGVTWTKYQGNPIISAAQESPHDKTAGLETRDPKVFFHQASGKWVMVLAHGGQDKLTFWTSSNAKSWTWKSDLSASQIEGLPSGITGWEVPDMFELPVQDTNATTWVLIITPANGSPAGGNGVLALTGSFDGSTFKPDPVDPSALWLDYGRDFDGALSWENVPAADSRRRILASVMNSYGASPPTNTWKGMLSFPRTITLKETASKRYFLQQPVTELSLVGSSLVTIQNQTITTGQTLLSSIHGTALDIKIAFTINAGAKLSLAVRKAASEQTIIQYDQSNSSISVDRTTSGDISYDPAAGGVHSASLKPDGSGVIHLRVLVDTCSVEVFGGEGEVVISDLIFPSETSDGLSLEVTGGSANLHSVEVRSISLE

SEQ ID NO: 49413 - protein, 495 aa, Aspergillus deflectus
DDFRPVFHFVPEKNWMNEPNGLIQIDSVWHLFYQHNPTANVWGNLNWGHATSSDLVHWTHEPLAITSENGVEAFTGTAFYDAENTSGLGSAASPPYLAWYTGYLPSNGTQDQRLAFSIDDGVTWTKFQGNPIISAAQETPHDETAGLESRDPKVFFHEPSGKWVMVLAHGGQDKLTFWTSTDAISWTWKSDLSADQVDGLPSDITGWEVPDMFELPIEGTDETTWVLIMTPAEGSPAGGNGVLALTGSFDGSVFTPDPVDPASSGLWLDYGRDFDGAMSWENVPAADGRRILASVMNSYGASPPTNTWKGMLSFPRTIALRETDTKKRYFLQQPVTELSSVSSSPLATIKNQTVTPGQTLLSSVHGTALDIKLAFSMNEGATLALAVRKAASEQTVISYSQSNGTLSVDRTASGNTSYDPAAGGVHSTSLQPDDSGVVHIRVLVDTCSVEVFGGDGEVVISDLVFPSETSDGLSLQVSGGVANLHLVEVRGISLQ

SEQ ID NO: 49414 - protein, 497 aa, Penicillium sp.
LVAAAVADDYAPAFHFCPAENWMNEPNGLIQINSTWHLFYQADPAANVWGNECWGHATSSDLLHWDHLPVAIPVENGIESFTGTSYYDSNNTSGLGTSTNPPYLAFFTGYTESNKTQDQALAYSTDLGQTWVKFAGNPIIGAAQEAPQDISGGLESADPKVFFHAPSGKWVMVLAHGGQDKLTFWTSLDAKNWTWVSDLSSSQIEGFPSSITGWEVPDMFQLPIQGIKKTTWVLIFTPAQGSPPGGNGVVALTGSFDGETFVADPVDPSTLWLDYGADFDGALSWENVPASDGAAIIAAVMNSYGSNPPTTTWKGMLSFPATLALKQIGSKQYFLQQPVAELSTIDGSLTSIQNQTITPNQTLLSSIHGTSLDIAMAFVIDSGATLSLAVAKGGSEQTVIAYFQSNSTLSVDATASGDISYDPAAGGVHTAQLAQDNTELVHIWALIDTCSVEVFGGEGEAVISDLIFPSNSSDGLSLEVSGGTAMLASVNVSSVSL

SEQ ID NO: 49415 - protein, 493 aa, Penicillium purpurogenum
AVADDYAPTFHFCPAENWMNEPNGLIKIDSTWHLFYQADPTANVWGNECWGHATSSDLLHWDHLPVAIPVENGIESFTGTSYYDANNTSSLGTSTNPPYLAFFTGYTSSNGTQDQALAYSTDLGTTWLKFSGNPIISAALEAPHDVTGGLESADPKVFFHEPSGKWVMVLAHGGQDKLTFWTSLDAKSWTWMSDLLASQIEGFPSSVTGWEVPDMFQLPIQGTNETTWVIIFTPAQGSPAGGNGVVALTGSFDGETFLANPVDSSTLWLDYGADFDGAMSWENVPASDGALIIAAVMNSYGSNPPTNTWKGMLSFPATLTLEKIGSKQYFLQQPIAELSTVDNALASIQNQTIAPKQTLLSSIHGSSLDVAIAFSVDSGATLSLAVAKGGSEQTVIAYSQSNSTLSVDATASGDISYDPAAGGIHSAQLAADNTELVYLAVLVDTCSVEVFGGQGEAVISDLIFPSNSSDGLSLEVIGGTATLQSVEVFSVSL

SEQ ID NO: 49416 - protein, 515 aa, Penicillium purpurogenum
MISLRIALAINALSYICALVELAVADDYRPTFHFCPAENWMNEPNGLIKIDSTWHLFYQADPTANVWGNECWGHATSSDLLHWDHLPVAIPVENGIESFTGTSYYDANNTSSLGTSTNPPYLAFFTGYTSSNGTQDQRLAYSTDLGTTWLKFSGNPIISAALEAPHDVTGGLESRDPKVFFHEPSGKWVMVLAHGGQDKLTFWTSLDAKSWTWMSDLLASQIEGFPSSVTGWEVPDMFQLPIQGTNETTWVIIFTPAQGSPAGGNGVVALTGSFDGETFLANPVDSSTLWLDYGRDFDGAMSWENVPASDGRLIIAAVMNSYGSNPPTNTWKGMLSFPRTLTLEKIGSKQYFLQQPIAELSTVDNALASIQNQTIAPKQTLLSSIHGSSLDVRIAFSVDSGATLSLAVRKGGSEQTVIRYSQSNSTLSVDRTASGDISYDPAAGGIHSAQLARDNTELVYLRVLVDTCSVEVFGGQGEAVISDLIFPSNSSDGLSLEVIGGTATLQSVEVFSVSL

SEQ ID NO: 49417 - protein, 500 aa, Penicillium flavigenum
LLLVTQALASDYRPLFHFVPEKNWMNEPNGLIKIESVWHLFFQHNPTANVWGNLNWGHATSTDLLHWTHEPIAITSENGVEAFTGTSYYDSENTSGLGTSQSPPYLAWYTGYFPSNGTQDQRLAYSVDDGVTWTKFAGNPIISATQEAPHDITGGLETRDPKVFFHEASGKWVMILAHGGQDKITFWTSTDAKQWTWVSDLGTAQVSGLSSAITGWEVPDMFQLPIEGTDETTWVLILTPAKGSPAGGNGVFALTGSFDGKTFQPDPVDTANLWLDYGRDFDGAMSWENVPKSDGRRILAAISNSYGASPPTNTWKGMLSFPRTLGLQQTGSGRSFVQWPVSELLTAGSTLATIQNQTITPGQVLLSSVVGTALDIELAFTAPADTVLSLAVRKAGSQQTVIQYKQSTATLSVDRTASGDTSYDAAAGGVHSAPLQPDASGVVRIRVLVDTCSVEVFGGKGEVVISDLIFPDEAADGLALQVDGGSVMLQSVVVRKISLE

SEQ ID NO: 49418 - protein, 504 aa, Aspergillus deflectus
IALATQAVADDFRPVFHFVPEKNWMNEPNGLIQIDSVWHLFYQHNPTANVWGNLNWGHATSSDLVHWTHEPLAITSENGVEAFTGTAFYDAENTSGLGSAASPPYLAWYTGYLPSNGTQDQRLAFSIDDGVTWTKFQGNPIISAAQETPHDETAGLESRDPKVFFHEPSGKWVMVLAHGGQDKLTFWTSTDAISWTWKSDLSADQVDGLPSDITGWEVPDMFELPIEGTDETTWVLIMTPAEGSPAGGNGVLALTGSFDGSVFTPDPVDPASSGLWLDYGRDFDGAMSWENVPAADGRRILASVMNSYGASPPTNTWKGMLSFPRTIALRETDTKKRYFLQQPVTELSSVSSSPLATIKNQTVTPGQTLLSSVHGTALDIKLAFSMNEGATLALAVRKAASEQTVISYSQSNGTLSVDRTASGNTSYDPAAGGVHSTSLQPDDSGVVHIRVLVDTCSVEVFGGDGEVVISDLVFPSETSDGLSLQVSGGVANLHLVEVRGISLQ

SEQ ID NO: 49419 - protein, 503 aa, Penicillium murcianum
LAFALAIRVMADDFRPVYHFVPKENWMNEPNGLIKIKSTWHLFYQHNPTANVWGNLNWGHATSSDLVHWTHEPLAIISENGVEAFTGTSYYDADNTSALGSSTSPPYLAYYTGYFPSNGTQDQRLAFSVDDGVTWTKYQGNPIISAAQESPHDKTAGLETRDPKVFFHQASGKWVMVLAHGGQDKLTFWTSSNAKSWTWKSDLSASQIEGLPSGITGWEVPDMFELPVQDTNATTWVLIITPANGSPAGGNGVLALTGSFDGSTFKPDPVDPSALWLDYGRDFDGALSWENVPAADSRRRILASVMNSYGASPPTNTWKGMLSFPRTITLKETASKRYFLQQPVTELSLVGSSLVTIQNQTITTGQTLLSSIHGTALDIKIAFTINAGAKLSLAVRKAASEQTIIQYDQSNSSISVDRTTSGDISYDPAAGGVHSASLKPDGSGVIHLRVLVDTCSVEVFGGEGEVVISDLIFPSETSDGLSLEVTGGSANLHSVEVRSISLE

SEQ ID NO: 49420 - protein, 248 aa, unidentified; identical to SEQ ID NO: 65

SEQ ID NO: 49421 - protein, 222 aa, Salipaludibacillus agaradhaerens
HNPVTDEEVYHSFNSHDWQNWNMSDGWKNDDYFFGCHWSQNRVNFYGGQMELSLRTNYSYAPPYNYECAEYTTNNFYGYGLYEVSMKPAKVSGVISSFFTYTGPSYNGAPWDEIDIEFLGNDTTKVQFNYYTDGVGGNEILYDLGFDAADSYNTYAFDWQENYINWYVNGQLVATATENIPSNPSKIMMNIWNTYGIDEWAGRYYGEDANASYNWVRYTPNR

SEQ ID NO: 49422 - protein, 237 aa, Bacillus agaradhaerens
MLTLLMMSFAGAAYAHNPVTDEEVYHSFNSHDWQNWNMSDGWKNDDYFFGCHWSQNRVNFYGGQMELSLRTNYSYAPPYNYECAEYTTNNFYGYGLYEVSMKPAKVSGVISSFFTYTGPSYNGAPWDEIDIEFLGNDTTKVQFNYYTDGVGGNEILYDLGFDAADSYNTYAFDWQENYINWYVNGQLVATATENIPSNPSKIMMNIWNTYGIDEWAGRYYGEDANASYNWVRYTPNR

SEQ ID NO: 49423 - protein, 222 aa, Bacillus agaradhaerens
HNPVTDEEVYHSFNSHDWQNWNMSDGWKNDDYNFGCHWSQNRVNFYGGQMELSLRTNYSYAPPYNYECAEYTTNNFYGYGLYEVSMKPAKVSGVISSFFTYTGPSYNGAPWDEIDIEFLGNDTTKVQFNYYTDGVGGNEILYDLGFDAADSYNTYAFDWQENYINWYVNGQLVATATENIPSNPSKIMMNIWNTYGIDEWAGRYYGEDANASYNWVRYTPNR

SEQ ID NO: 49424 - protein, 222 aa, Bacillus agaradhaerens
HNPVTDEEVYHSFNSHDWQNWNMSDGWKNDDYYFGCHWSQNRVNFYGGQMELSLRTNYSYAPPYNYECAEYTTNNFYGYGLYEVSMKPAKVSGVISSFFTYTGPSYNGAPWDEIDIEFLGNDTTKVQFNYYTDGVGGNEILYDLGFDAADSYNTYAFDWQENYINWYVNGQLVATATENIPSNPSKIMMNIWNTYGIDEWAGRYYGEDANASYNWVRYTPNR

SEQ ID NO: 49425 - protein, 222 aa, Bacillus agaradhaerens
HNPVTDEEVYHSFNSHDWQNWNMSDGWKNDDYFFGCHWSQNRVNFYGGQMELSLRTNYSYAPPYNYECAEYTTNNFYGYGLYEVSMKPAKVSGVISSFFTYTGPSYNGAPWDEIDIEFLGNDTTKVQFNYYTDGVGGNEILYDLGFDAADSYNTYAFDWQENYINWYVNGQLVATATENIPSNPSKIHMNIWNTYGIDEWAGRYYGEDANASYNWVRYTPNR

SEQ ID NO: 49426 - protein, 222 aa, Bacillus agaradhaerens
HNPVTDEEVYHSFNSHDWQNWNMSDGWKNDDYNFGCHWSQNRVNFYGGQMELSLRTNYSYAPPYNYECAEYTTNNFYGYGLYEVSMKPAKVSGVISSFFTYTGPSYNGAPWDEIDIEFLGNDTTKVQFNYYTDGVGGNEILYDLGFDAADSYNTYAFDWQENYINWYVNGQLVATATENIPSNPSKIQMNIWNTYGIDEWAGRYYGEDANASYNWVRYTPNR

SEQ ID NO: 49427 - protein, 222 aa, Bacillus agaradhaerens
HNPVTDEEVYHSFNSHDWQNWNMSDGWKNDDYGFGCHWSQNRVNFYGGQMELSLRTNYSYAPPYNYECAEYTTNNFYGYGLYEVSMKPAKVSGVISSFFTYTGPSYNGAPWDEIDIEFLGNDTTKVQFNYYTDGVGGNEILYDLGFDAADSYNTYAFDWQENYINWYVNGQLVATATENIPSNPSKILMNIWNTYGIDEWAGRYYGEDANASYNWVRYTPNR

SEQ ID NO: 49428 - protein, 222 aa, Bacillus agaradhaerens
HNPVTDEEVYHSFNSHDWQNWNMSDGWKNDDYGFGCHWSQNRVNFYGGQMELSLRTNYSYAPPYNYECAEYTTNNFYGYGLYEVSMKPAKVSGVISSFFTYTGPSYNGAPWDEIDIEFLGNDTTKVQFNYYTDGVGGNEILYDLGFDAADSYNTYAFDWQENYINWYVNGQLVATATENIPSNPSKICMNIWNTYGIDEWAGRYYGEDANASYNWVRYTPNR

SEQ ID NO: 49429 - protein, 222 aa, Bacillus agaradhaerens
HNPVTDEEVYHSFNSHDWQNWNMSDGWKNDDYVFGCHWSQNRVNFYGGQMELSLRTNYSYAPPYNYECAEYTTNNFYGYGLYEVSMKPAKVSGVISSFFTYTGPSYNGAPWDEIDIEFLGNDTTKVQFNYYTDGVGGNEILYDLGFDAADSYNTYAFDWQENYINWYVNGQLVATATENIPSNPSKIHMNIWNTYGIDEWAGRYYGEDANASYNWVRYTPNR

SEQ ID NO: 49430 - protein, 222 aa, Bacillus agaradhaerens
HNPVTDEEVYHSFNSHDWQNWNMSDGWKNDDYEFGCHWSQNRVNFYGGQMELSLRTNYSYAPPYNYECAEYTTNNFYGYGLYEVSMKPAKVSGVISSFFTYTGPSYNGAPWDEIDIEFLGNDTTKVQFNYYTDGVGGNEILYDLGFDAADSYNTYAFDWQENYINWYVNGQLVATATENIPSNPSKILMNIWNTYGIDEWAGRYYGEDANASYNWVRYTPNR

SEQ ID NO: 49431 - protein, 222 aa, Bacillus agaradhaerens
HNPVTDEEVYHSFNSHDWQNWNMSDGWKNDDYSFGCHWSQNRVNFYGGQMELSLRTNYSYAPPYNYECAEYTTNNFYGYGLYEVSMKPAKVSGVISSFFTYTGPSYNGAPWDEIDIEFLGNDTTKVQFNYYTDGVGGNEILYDLGFDAADSYNTYAFDWQENYINWYVNGQLVATATENIPSNPSKIAMNIWNTYGIDEWAGRYYGEDANASYNWVRYTPNR

SEQ ID NO: 49432 - protein, 222 aa, Bacillus agaradhaerens
HNPVTDEEVYHSFNSHDWQNWNMSDGWKNDDYLFGCHWSQNRVNFYGGQMELSLRTNYSYAPPYNYECAEYTTNNFYGYGLYEVSMKPAKVSGVISSFFTYTGPSYNGAPWDEIDIEFLGNDTTKVQFNYYTDGVGGNEILYDLGFDAADSYNTYAFDWQENYINWYVNGQLVATATENIPSNPSKITMNIWNTYGIDEWAGRYYGEDANASYNWVRYTPNR

SEQ ID NO: 49433 - protein, 222 aa, Bacillus agaradhaerens
HNPVTDEEVYHSFNSHDWQNWNMSDGWKNDDYCFGCHWSQNRVNFYGGQMELSLRTNYSYAPPYNYECAEYTTNNFYGYGLYEVSMKPAKVSGVISSFFTYTGPSYNGAPWDEIDIEFLGNDTTKVQFNYYTDGVGGNEILYDLGFDAADSYNTYAFDWQENYINWYVNGQLVATATENIPSNPSKILMNIWNTYGIDEWAGRYYGEDANASYNWVRYTPNR

SEQ ID NO: 49434 - protein, 222 aa, Bacillus agaradhaerens
HNPVTDEEVYHSFNSHDWQNWNMSDGWKNDDYVFGCHWSQNRVNFYGGQMELSLRTNYSYAPPYNYECAEYTTNNFYGYGLYEVSMKPAKVSGVISSFFTYTGPSYNGAPWDEIDIEFLGNDTTKVQFNYYTDGVGGNEILYDLGFDAADSYNTYAFDWQENYINWYVNGQLVATATENIPSNPSKITMNIWNTYGIDEWAGRYYGEDANASYNWVRYTPNR

SEQ ID NO: 49435 - protein, 222 aa, Bacillus agaradhaerens
HNPVTDEEVYHSFNSHDWQNWNMSDGWKNDDYVFGCHWSQNRVNFYGGQMELSLRTNYSYAPPYNYECAEYTTNNFYGYGLYEVSMKPAKVSGVISSFFTYTGPSYNGAPWDEIDIEFLGNDTTKVQFNYYTDGVGGNEILYDLGFDAADSYNTYAFDWQENYINWYVNGQLVATATENIPSNPSKILMNIWNTYGIDEWAGRYYGEDANASYNWVRYTPNR

SEQ ID NO: 49436 - protein, 222 aa, Bacillus agaradhaerens
HNPVTDEEVYHSFNSHDWQNWNMSDGWKNDDYNFGCHWSQNRVNFYGGQMELSLRTNYSYAPPYNYECAEYTTNNFYGYGLYEVSMKPAKVSGVISSFFTYTGPSYNGAPWDEIDIEFLGNDTTKVQFNYYTDGVGGNEILYDLGFDAADSYNTYAFDWQENYINWYVNGQLVATATENIPSNPSKIFMNIWNTYGIDEWAGRYYGEDANASYNWVRYTPNR

SEQ ID NO: 49437 - protein, 222 aa, Bacillus agaradhaerens
HNPVTDEEVYHSFNSHDWQNWNMSDGWKNDDYQFGCHWSQNRVNFYGGQMELSLRTNYSYAPPYNYECAEYTTNNFYGYGLYEVSMKPAKVSGVISSFFTYTGPSYNGAPWDEIDIEFLGNDTTKVQFNYYTDGVGGNEILYDLGFDAADSYNTYAFDWQENYINWYVNGQLVATATENIPSNPSKIRMNIWNTYGIDEWAGRYYGEDANASYNWVRYTPNR

SEQ ID NO: 49438 - protein, 222 aa, Bacillus agaradhaerens
HNPVTDEEVYHSFNSHDWQNWNMSDGWKNDDYAFGCHWSQNRVNFYGGQMELSLRTNYSYAPPYNYECAEYTTNNFYGYGLYEVSMKPAKVSGVISSFFTYTGPSYNGAPWDEIDIEFLGNDTTKVQFNYYTDGVGGNEILYDLGFDAADSYNTYAFDWQENYINWYVNGQLVATATENIPSNPSKIFMNIWNTYGIDEWAGRYYGEDANASYNWVRYTPNR

SEQ ID NO: 49439 - protein, 222 aa, Bacillus agaradhaerens
HNPVTDEEVYHSFNSHDWQNWNMSDGWKNDDYLFGCHWSQNRVNFYGGQMELSLRTNYSYAPPYNYECAEYTTNNFYGYGLYEVSMKPAKVSGVISSFFTYTGPSYNGAPWDEIDIEFLGNDTTKVQFNYYTDGVGGNEILYDLGFDAADSYNTYAFDWQENYINWYVNGQLVATATENIPSNPSKIAMNIWNTYGIDEWAGRYYGEDANASYNWVRYTPNR

SEQ ID NO: 49440 - protein, 222 aa, Bacillus agaradhaerens
HNPVTDEEVYHSFNSHDWQNWNMSDGWKNDDYGFGCHWSQNRVNFYGGQMELSLRTNYSYAPPYNYECAEYTTNNFYGYGLYEVSMKPAKVSGVISSFFTYTGPSYNGAPWDEIDIEFLGNDTTKVQFNYYTDGVGGNEILYDLGFDAADSYNTYAFDWQENYINWYVNGQLVATATENIPSNPSKIRMNIWNTYGIDEWAGRYYGEDANASYNWVRYTPNR

SEQ ID NO: 49441 - protein, 222 aa, Bacillus agaradhaerens
HNPVTDEEVYHSFNSHDWQNWNMSDGWKNDDYGFGCHWSQNRVNFYGGQMELSLRTNYSYAPPYNYECAEYTTNNFYGYGLYEVSMKPAKVSGVISSFFTYTGPSYNGAPWDEIDIEFLGNDTTKVQFNYYTDGVGGNEILYDLGFDAADSYNTYAFDWQENYINWYVNGQLVATATENIPSNPSKIHMNIWNTYGIDEWAGRYYGEDANASYNWVRYTPNR

SEQ ID NO: 49442 - protein, 222 aa, Bacillus agaradhaerens
HNPVTDEEVYHSFNSHDWQNWNMSDGWKNDDYWFGCHWSQNRVNFYGGQMELSLRTNYSYAPPYNYECAEYTTNNFYGYGLYEVSMKPAKVSGVISSFFTYTGPSYNGAPWDEIDIEFLGNDTTKVQFNYYTDGVGGNEILYDLGFDAADSYNTYAFDWQENYINWYVNGQLVATATENIPSNPSKISMNIWNTYGIDEWAGRYYGEDANASYNWVRYTPNR

SEQ ID NO: 49443 - protein, 222 aa, Bacillus agaradhaerens
HNPVTDEEVYHSFNSHDWQNWNMSDGWKNDDYSFGCHWSQNRVNFYGGQMELSLRTNYSYAPPYNYECAEYTTNNFYGYGLYEVSMKPAKVSGVISSFFTYTGPSYNGAPWDEIDIEFLGNDTTKVQFNYYTDGVGGNEILYDLGFDAADSYNTYAFDWQENYINWYVNGQLVATATENIPSNPSKIYMNIWNTYGIDEWAGRYYGEDANASYNWVRYTPNR

SEQ ID NO: 49444 - protein, 172 aa, Unidentified
MELSIRPNHSYAAPYNYECAEYSTNHFYGYGLYEVSMKPSNVSGVISSFFTYTGPSYNGAPWDEIDIEFLGNDTTKVQFNYYTNGRGGNEILYDLGFDAANSFNTYAFDWQEHYINWYVNGELVATATENIPSNPSKMMMNIWNTYGIDEWAGAYWGQNANASYEWVRYTPN

SEQ ID NO: 49445 - protein, 221 aa, Bacillus sp. (in: firmicutes)
YNPVTEDELYHSFDSHDARNWQISDGWRNGDDFFGCHWSQNRVNFNRGEMELSLRTNYSYSAPYNYECAEYATSNFYGYGLYEVSMKPANVSGVISSFFTYTGPSYNGAPWDEIDIEFLGNDTTKVQFNYYTNGVGGNEIIYDLGFDAANSFNTYAFDWQENYISWYVNGNLVATATENIPSNPSKIMMNVWNTYGIDEWAGAYGGEAANATYEWVRYTPN

SEQ ID NO: 49446 - protein, 246 aa, Bacillus sp.
IKINNSIRIVMLTLIMMSVSVVAYAYNPVTEDELYHSFDSHDARNWQISDGWRNGDDFFGCHWSQNRVNFNRGEMELSLRTNYSYSAPYNYECAEYATSNFYGYGLYEVSMKPANVSGVISSFFTYTGPSYNGAPWDEIDIEFLGNDTTKVQFNYYTNGVGGNEIIYDLGFDAANSFNTYAFDWQENYISWYVNGNLVATATENIPSNPSKIMMNVWNTYGIDEWAGAYGGEAANATYEWVRYTPN

SEQ ID NO: 49447 - protein, 392 aa, Trichoderma atroviride
WTPQSNAKVFSRDTEGVMRWLPGNDKFRGVNLGSQFIIEPWMASDEFSGMGCGGLNDEWSCVQSLGQDAADAAFQKHWDSWITQDDITQIKNLGLNTVRIPVGFWIREDLVQQGEFFPRGGIQYLDRLVGWCNDAGIYVIMDLHGGPGAQFPNQQYTGHGVSQPGFYTEANYERAANFLEWMTERIHTNATYASVGMLEVINEPVHSGDFPSQAADMVNTYYPLAWNRIRDTESKLGVSDDKRLHIQFMASAWGSGDPTSALPSTDFAAFDDHRYLKWDTSVTATKDGYLNAACSDKRDDNVIVGEWSISVADNVQDNDELGIKNRSDQADWYQKFWAAQVLAFEKSAGWVFWTWKCNWITGYDDWRWCYQSAVAAGAIPKDAGSAASINPC

SEQ ID NO: 49448 - protein, 408 aa, Trichoderma atroviride; identical to SEQ ID NO: 66

SEQ ID NO: 49449 - protein, 727 aa, Trichoderma harzianum; identical to SEQ ID NO: 67

SEQ ID NO: 49450 - protein, 729 aa, Trichoderma harzianum
ATSFYYPNMDHVNAPRGFAPDLDGDFNYPIYQTVNAGDGNALQNAITTDGKGGSRHPQWFASQPRVVYIPPGTYTISKTLRFNTDTILMGDPTNPPIIKAAAGFSGDQTLISAQDPSTNEKGELSFAVAIKNVVLDTTAIPGGNSFTALWWGVAQAAHLQNVRITMSSSSGGNGHTGIRMGRGSTLGLADVRVERGQNGIWIDGHQQASFHNIYFFQNTIGMLISSGNTFSIFSSTFDTCGTAFPTLAGSPWIALIDAKSINSGVTFTTNQFPSFMIENLTKDNGTPVVVVRGSTLVGASSHVNTYSYGNTVGRNPTYGDVTSSNTRPSALAPGGRYPYVAPPTYGDLPISSFLNVKDPAQNGNRQVKGDNTINEADTLNAILELAASQNKVAYFPFGKYRVDSTLFIPKGSRIVGEAWATITGNGNFFKNENSPQPVVSVGRAGDVGIAQLQDLRVTTNDVLPGAILVQFNMAGNNPGDVALWNSLVTVGGTRGAQALANACTNNSNECKGAFIGIHVAKGSSPYIQNVWELGLRDHIAENFSGGTSHRRERWNFGPIRRNATCLYPIGSGHWWLYQLNLHNAANVVVSLLQAETNYHQGANTQQIPPAPWVANVGTWGDPDFSWCNGGDKRCRMGPANFINGGSNIYTYASAAWAFFSGPGQGCAQFECQQTIHWIASTPSNLQAFGLCSKDSVNTLRLGDGTFINTQNGYTGGWTPGGGDVARYTT

SEQ ID NO: 49451 - protein, 727 aa, Unidentified
ATSFWYSNMDHTGNARGYAPNLDGDFSYPVYMAVAAGDGAGIQAAINAADNGGTRHPQWLSAQPRVVYIPPGTYEISKTILMNTDTILMGDATNPPTIKAAAGFSGSQILINGQDPGTGVSGELSFAVGLKNLILDTTSIAGGNAFTALYWGVAQAAQLQNVKINMAYSVNNQGHTGIRLGRGSTLGLSDVRIQAGQNGIWHDGHQQALYKSIYFYQNTVGILISGGATISIISPTFDTCGTAVMNTGGDPWIALIDAVSKNSGVTFVTTGYPSFIIENLTKDNTGDIARVPEGTVLGSASHVNTFTYGNTVNRNPIYGATTSTNTRPAALAPGGKYPVLPAPNYASNPVSDFINVKDPNQNGGRTVLGDNTKDESAVLNAILQLAASQGKIAYFPFGLYRVDSTLLIPKGSRIVGEAWATITGNGNFFADSSNPKPVVSVGNAGDVGVAQIQDMRFTVSGVLPGAIIVQFNMAGNSPGDVALWNSLVTVGGTRGASALANACTNPSSECKAAFIGIHLASTSSAYIENVWNWVADHFTEGSGGTSIAAKGGVLVQATKGTWLHALGSEHWWLYQLNFHKASNVLVSMLQSETNYDQGDHVQQTPPAPWTANLNTWGDPDFSWCDGGDTRCRMGFANYFQGGSNIYTYASASWAFFSGPGYQSCAGDFQCQDCMHWISQTPSNFNAFGLCSKDTYATLHLANGTNIVTQNGFTGSWGGTGGDVGRYT

SEQ ID NO: 49452 - protein, 361 aa, unidentified; identical to SEQ ID NO: 68

SEQ ID NO: 49453 - protein, 344 aa, Aspergillus aculeatus
MVGLLSITAALAATVLPNIVSAVGLDQAAVAKGLQYFGTATDNPELTDIPYVTQLNNTADFGQITPGNSMKWDATEPSQGTFTFTKGDVIADLAEGNGQYLRCHTLVWYNQLPSWVTSGTWTNATLTAALKNHITNVVSHYKGKCLHWDVVNEALNDDGTYRTNIFYTTIGEAYIPIAFAAAAAADPDAKLFYNDYNLEYGGAKAASARAIVQLVKNAGAKIDGVGLQAHFSVGTVPSTSSLVSVLQSFTALGVEVAYTEADVRILLPTTATTLAQQSSDFQALVQSCVQTTGCVGFTIWDWTDKYSWVPSTFSGYGAALPWDENLVKKPAYNGLLAGMGVTVT

SEQ ID NO: 49454 - protein, 400 aa, Aspergillus aculeatus
MVGLLSITAALAATVLPNIVSAVGLDQAAVAKGLQYFGTATDNPELTDIPYVTQLNNTADFGQITPGNSMKWDATEPSQGTFTFTKGDVIADLAEGNGQYLRCHTLVWYNQLPSWVTSGTWTNATLTAALKNHITNVVSHYKGKCLHWDVVNEALNDDGTYRTNIFYTTIGEAYIPIAFAAAAAADPDAKLFYNDYNLEYGGAKAASARAIVQLVKNAGAKIDGVGLQAHFSVGTVPSTSSLVSVLQSFTALGVEVAYTEADVRILLPTTATTLAQQSSDFQALVQSCVQTTGCVGFTIWDWTDKYSWVPSTFSGYGAALPWDENLVKKPAYNGLLAGMGVTVTTTTTTTTATATGKTTTTTTGATSTGTTAAHWGQCGGLNWSGPTACATGYTCTYVND

SEQ ID NO: 49455 - protein, 384 aa, Clostridium acetobutylicum
VGLDQAAVAKGLQYFGTATDNPELTDIPYVTQLNNTADFGQITPGNSMKWDATEPSQGTFTFTKGDVIADLAEGNGQYLRCHTLVWYNQLPSWVTSGTWTNATLTAALKNHITNVVSHYKGKCLHWDVVNEALNDDGTYRTNIFYTTIGEAYIPIAFAAAAAADPDAKLFYNDYNLEYGGAKAASARAIVQLVKNAGAKIDGVGLQAHFSVGTVPSTSSLVSVLQSFTALGVEVAYTEADVRILLPTTATTLAQQSSDFQALVQSCVQTTGCVGFTIWDWTDKYSWVPSTFSGYGAALPWDENLVKKPAYNGLLAGMGVTVTTTTTTTTATATGKTTTTTTGATSTGTTAAHWGQCGGLNWSGPTACATGYTCTYVNDYYSQCL

SEQ ID NO: 49456 - protein, 406 aa, Aspergillus aculeatus; identical to SEQ ID NO: 48

SEQ ID NO: 49457 - protein, 201 aa, unidentified
MQTSITLTSNASGTFDGYYYELWKDTGNTTMTVYTQGRFSCQWSNINNALFRTGKKYNQNWQSLGTIRITYSATYNPNGNSYLCIYGWSTNPLVEFYIVESWGNWRPPGATSLGQVTIDGGTYDIYRTTRVNQPSIVGTATFDQYWSVRTSKRTSGTVTVTDHFRAWANRGLNLGTIDQITLCVEGYQSSGSANITQNTFS

SEQ ID NO: 49458 - protein, 204 aa, Dictyoglomus thermophilum; identical to SEQ ID NO: 49

SEQ ID NO: 49459 - protein, 194 aa, Thermomyces lanuginosus
QTTPNSEGWHDGYYYSWWSDGGAQATYTNLEGGTYEISWGDGGNLVGGKGWNPGLNARAIHFEGVYQPNGNSYLAVYGWTRNPLVEYYIVENFGTYDPSSGATDLGTVECDGSIYRLGKTTRVNAPSIDGTQTFDQYWSVRQDKRTSGTVQTGCHFDAWARAGLNVNGDHYYQIVATEGYFSSGYARITVADVG

SEQ ID NO: 49460 - protein, 225 aa, Thermomyces lanuginosus; identical to SEQ ID NO: 50

SEQ ID NO: 49461 - protein, 195 aa, Thermomyces lanuginosus
RQTTPNSEGWHDGYYYSWWSDGGAQATYTNLEGGTYEISWGDGGNLVGGKGWNPGLNARAIHFEGVYQPNGNSYLAVYGWTRNPLVEYYIVENFGTYDPSSGATDLGTVECDGSIYRLGKTTRVNAPSIDGTQTFDQYWSVRQDKRTSGTVQTGCHFDAWARAGLNVNGDHYYQIVATEGYFSSGYARITVADVG

SEQ ID NO: 49462 - protein, 206 aa, unidentified; identical to SEQ ID NO: 51

SEQ ID NO: 49463 - protein, 325 aa, Aspergillus fumigatus Z5
AGLNTAAKAKGLKYFGSATDNPELTDSAYVAQLSNTDDFGQITPGNSMKWDATEPSQNSFSFANGDAVVNLANKNGQLMRCHTLVWHSQLPNWVSSGSWTNATLLAAMKNHITNVVTHYKGKCYAWDVVNEALNEDGTFRNSVFYQIIGPAYIPIAFATAAAADPDVKLYYNDYNIEYSGAKATAAQNIVKMIKAYGAKIDGVGLQAHFIVGSTPSQSDLTTVLKGYTALGVEVAYTELDIRMQLPSTAAKLAQQSTDFQGVAAACVSTTGCVGVTIWDWTDKYSWVPSVFQGYGAPLPWDENYVKKPAYDGLMAGLGASGSGTT

SEQ ID NO: 49464 - protein, 381 aa, Aspergillus fumigatus
VYGAGLNTAAKAKGLKYFGSATDNPELTDSAYVAQLSNTDDFGQITPGNSMKWDATEPSQNSFSFANGDAVVNLANKNGQLMRCHTLVWHSQLPNWVSSGSWTNATLLAAMKNHITNVVTHYKGKCYAWDVVNEALNEDGTFRNSVFYQIIGPAYIPIAFATAAAADPDVKLYYNDYNIEYSGAKATAAQNIVKMIKAYGAKIDGVGLQAHFIVGSTPSQSDLTTVLKGYTALGVEVAYTELDIRMQLPSTAAKLAQQSTDFQGVAAACVSTTGCVGVTIWDWTDKYSWVPSVFQGYGAPLPWDENYVKKPAYDGLMAGLGASGSGTTTTTTTTSTTTGGTDPTGVAQKWGQCGGIGWTGPTTCVSGTTCQKLNDWYSQCL

SEQ ID NO: 49465 - protein, 397 aa, Aspergillus fumigatus; identical to SEQ ID NO: 52

SEQ ID NO: 49466 - protein, 378 aa, Aspergillus fumigatus
AGLNTAAKAKGLKYFGSATDNPELTDSAYVAQLSNTDDFGQITPGNSMKWDATEPSQNSFSFANGDAVVNLANKNGQLMRCHTLVWHSQLPNWVSSGSWTNATLLAAMKNHITNVVTHYKGKCYAWDVVNEALNEDGTFRNSVFYQIIGPAYIPIAFATAAAADPDVKLYYNDYNIEYSGAKATAAQNIVKMIKAYGAKIDGVGLQAHFIVGSTPSQSDLTTVLKGYTALGVEVAYTELDIRMQLPSTAAKLAQQSTDFQGVAAACVSTTGCVGVTIWDWTDKYSWVPSVFQGYGAPLPWDENYVKKPAYDGLMAGLGASGSGTTTTTTTTSTTTGGTDPTGVAQKWGQCGGIGWTGPTTCVSGTTCQKLNDWYSQCL

SEQ ID NO: 49467 - protein, 206 aa, Viridiplantae
FPAGNATELEKRQTTPNSEGWHDGYYYSWWSDGGAQATYTNLEGGTYEISWGDGGNLVGGKGWNPGLNARAIHFEGVYQPNGNSYLAVYGWTRNPLVEYYIVENFGTYDPSSGATDLGTVECDGSIYRLGKTTRVNAPSIDGTQTFDQYWSVRQDKRTSGTVQTGCHFDAWARAGLNVNGDHYYQIVATEGYFSSGYARITVADVG

SEQ ID NO: 49468 - protein, 203 aa, Viridiplantae
QTSITLTSNASGTFDGYYYELWKDTGNTTMTVYTQGRFSCQWSNINNALFRTGKKYNQNWQSLGTIRITYSATYNPNGNSYLCIYGWSTNPLVEFYIVESWGNWRPPGATSLGQVTIDGGTYDIYRTTRVNQPSIVGTATFDQYWSVRTSKRTSGTVTVTDHFRAWANRGLNLGTIDQITLCVEGYQSSGSANITQNTFSQGS

SEQ ID NO: 49469 - protein, 193 aa, Thermomyces lanuginosus
TTPNSEGWHDGYYYSWWSDGGAQATYTNLEGGTYEISWGDGGNLVGGKGWNPGLNARAIHFEGVYQPNGNSYLAVYGWTRNPLVEYYIVENFGTYDPSSGATDLGTVECDGSIYRLGKTTRVNAPSIDGTQTFDQYWSVRQDKRTSGTVQTGCHFDAWARAGLNVNGDHYYQIVATEGYFSSGYARITVADVG

SEQ ID NO: 49470 - protein, 192 aa, Dictyoglomus thermophilum
QTSITLTSNASGTFDGYYYELWKDTGNTTMTVYTQGRFSCQWSNINNALFRTGKKYNQNWQSLGTIRITYSATYNPNGNSYLCIYGWSTNPLVEFYIVESWGNWRPPGATSLGQVTIDGGTYSIVGTATFDQYWSVRTSKRTSGTVTVTDHFRAWANRGLNLGTIDQITLCVEGYQSSGSANITQNTFSQGS

SEQ ID NO: 49471 - protein, 207 aa, Thermomyces lanuginosus
AFPAGNATELEKRQTTPNSEGWHDGYYYSWWSDGGAQATYTNLEGGTYEISWGDGGNLVGGKGWNPGLNARAIHFEGVYQPNGNSYLAVYGWTRNPLVEYYIVENFGTYDPSSGATDLGTVECDGSIYRLGKTTRVNAPSIDGTQTFDQYWSVRQDKRTSGTVQTGCHFDAWARAGLNVNGDHYYQIVATEGYFSSGYARITVADVG

SEQ ID NO: 49472 - protein, 154 aa, Dictyoglomus thermophilum
QTSITLTSNASGTFDGYYYELWKDTGNTTMTVYTQGRFSCQWSNINNALFRTGKKYNQNWQSLGTIRITYSATYNPNGNSYLCIYGWSTNPLVEFYIVESWGNWRPPGATSLGQVTIDGGTYDIYRTTRVNQPSIVGTATFDQYWSVRTSKRTS

SEQ ID NO: 49473 - protein, 136 aa, Dictyoglomus thermophilum
MQTSITLTSNASGTFDGYYYELWKDTGNTTMTVYTQGRFSCQWSNINNALFRTGKKYNQNWQSLGTIRITYSATYNPNGNSYLCIYGWSTNPLVEFYIVESWGNWRPPGATSLGQVTIDGGTYDIYRTTRVNQPSI

SEQ ID NO: 49474 - protein, 135 aa, Dictyoglomus thermophilum
MQTSITLTSNASGTFDGYYYELWKDTGNTTMTVYTQGRFSCQWSNINNALFRTGKKYNQNWQSLGTIRITYSATYNPNGNSYLCIYGWSTNPLVEFYIVESWGNWRPPGATSLGQVTIDGGTYDIYRTTRVNQPS

SEQ ID NO: 49475 - protein, 134 aa, Dictyoglomus thermophilum
MQTSITLTSNASGTFDGYYYELWKDTGNTTMTVYTQGRFSCQWSNINNALFRTGKKYNQNWQSLGTIRITYSATYNPNGNSYLCIYGWSTNPLVEFYIVESWGNWRPPGATSLGQVTIDGGTYDIYRTTRVNQP

SEQ ID NO: 49476 - protein, 133 aa, Synthetic construct
MQTSITLTSNASGTFDGYYYELWKDTGNTTMTVYTQGRFSCQWSNINNALFRTGKKYNQNWQSLGTIRITYSATYNPNGNSYLCIYGWSTNPLVEFYIVESWGNWRPPGATSLGQVTIDGGTYDIYRTTRVNQ

SEQ ID NO: 49477 - protein, 133 aa, Pyrococcus sp. GB-D
SATYNPNGNSYLCIYGWSTNPLVEFYIVESWGNWRPPGATSLGQVTIDGGTYDIYRTTRVNQPSIVGTATFDQYWSVRTSKRTSGTVTVTDHFRAWANRGLNLGTIDQITLCVEGYQSSGSANITQNTFSQGS

SEQ ID NO: 49478 - protein, 116 aa, Dictyoglomus thermophilum
STNPLVEFYIVESWGNWRPPGATSLGQVTIDGGTYDIYRTTRVNQPSIVGTATFDQYWSVRTSKRTSGTVTVTDHFRAWANRGLNLGTIDQITLCVEGYQSSGSANITQNTFSQGS

SEQ ID NO: 49479 - protein, 110 aa, Dictyoglomus thermophilum
MQTSITLTSNASGTFDGYYYELWKDTGNTTMTVYTQGRFSCQWSNINNALFRTGKKYNQNWQSLGTIRITYSATYNPNGNSYLCIYGWSTNPLVEFYIVESWGNWRPPGA

SEQ ID NO: 49480 - protein, 397 aa, Aspergillus fumigatus Z5
MVHLSSLAAALAALPLVCGAGLNTAAKAKGLKYFGSATDNPELTDSAYVAQLSNTDDFGQITPGNSMKWDATEPSQNSFSFANGDAVVNLANKNGQLMRCHTLVWHSQLPNWVSSGSWTNATLLAAMKNHITNVVTHYKGKCYAWDVVNEALNEDGTFRNSVFYQIIGPAYIPIAFATAAAADPDVKLYYNDYNIEYSGAKATAAQNIVKMIKAYGAKIDGVGLQAHFIVGSTPSQSDLTTVLKGYTALGVEVAYTELDIRMQLPSTAAKLAQQSTDFQGVAAACVSTTGCVGVTIWDWTDKYSWVPSVFQGYGAPLPWDENYVKKPAYDGLMAGLGASGSGTTTTTTTTSTTTGGTDPTGVAQKWGQCGGIGWTGPTTCVSGTTCQKLNDWYSQCL

SEQ ID NO: 49481 - protein, 397 aa, Aspergillus fumigatus
MVHLSSLAAALAALPLVYGAGLNTAAKAKGLKYFGSATDNPELTDSAYVAQLSNTDDFGQITPGNSMKWDATEPSQNSFSFANGDAVVNLANKNGQLMRCHTLVWHSQLPNWVSSGSWTNATLLAAMKNHITNVVTHYKGKCYAWDVVNEALNEDGTFRNSVFYQIIGPAYIPIAFATAAAADPDVKLYYNDYNIEYSGAKATAAQNIVKMIKAYGAKIDGVGLQAHFIVGSTPSQSDLTTVLKGYTALGVEVAYTELDIRMQLPSTAAKLAQQSTDFQGVAAACVSTTGCVGITIWDWTDKYSWVPSVFQGYGAPLPWDENYVKKPAYDGLMAGLGASGSGTTTTTTTTSTTTGGTDPTGVAQKWGQCGGIGWTGPTTCVSGTTCQKLNDWYSQCL

SEQ ID NO: 49482 - protein, 397 aa, Aspergillus fumigatus
MVHLSSLAAALAALPLVYGAGLNTAAKAKGLKYFGSATDNPELTDSAYVAQLSNTDDFGQITPGNSMKWDATEPSQNSFSFANGDAVVNLANKNGQLMRCHTLVWHSQLPNWVSSGSWTNATLLAAMKNHITNVVTHYKGKCYAWDVVNEALNEDGTFRNSVFYQIIGPAYIPIAFATAAAADPDVKLYYNDYNIEYSGAKATAAQNIVKMIKAYGAKIDGVGLQAHFIVGSTPSQSDLTTVLKGYTALGVEVAYTELDIRMQLPSTAAKLAQQSTDFQGVAAACVSTTGCVGVTIWDWTDKYSWVPSVFQGYGAPLPWDENYVKKPAYDGIMAGLGASGSGTTTTTTTTSTTTGGTDPTGVAQKWGQCGGIGWTGPTTCVSGTTCQKLNDWYSQCL

SEQ ID NO: 49483 - protein, 397 aa, Aspergillus fumigatus
MVHLSSLAAALAALPLVYGAGLNTAAKAKGLKYFGSATDNPELTDSAYVAQLSNTDDFGQITPGNSMKWDATEPSQNSFSFANGDAVVNLANKNGQLMRCHTLVWHSQLPNWVSSGSWTNATLLAAMKNHITNVVTHYKGKCYAWDVVNEALNEDGTFRNSVFYQIIGPAYIPIAFATAAAADPDVKLYYNDYNIEYSGAKATAAQNIVKMIKAYGAKIDGVGLQAHFIVGSTPSQSDLTTVLKGYTALGVEVAYTELDIRMQLPSTAAKLAQQSTDYQGVAAACVSTTGCVGVTIWDWTDKYSWVPSVFQGYGAPLPWDENYVKKPAYDGLMAGLGASGSGTTTTTTTTSTTTGGTDPTGVAQKWGQCGGIGWTGPTTCVSGTTCQKLNDWYSQCL

SEQ ID NO: 49484 - protein, 397 aa, Aspergillus fumigatus
MVHLSSLAAALAALPLVYGAGLNTAAKAKGLKYFGSATDNPELTDSAYVAQLSNTDDFGQITPGNSMKWDATEPSQNSFSFANGDAVVNLANKNGQLMRCHTLVWHSQLPNWVSSGSWTNATLLAAMKNHITNVVTHYKGKCYAWDVVNEALNEDGTFRNSVFYQIIGPAYIPIAFATAAAADPDVKLYYNDYNIEYSGAKATAAQNIVKMIQAYGAKIDGVGLQAHFIVGSTPSQSDLTTVLKGYTALGVEVAYTELDIRMQLPSTAAKLAQQSTDFQGVAAACVSTTGCVGVTIWDWTDKYSWVPSVFQGYGAPLPWDENYVKKPAYDGLMAGLGASGSGTTTTTTTTSTTTGGTDPTGVAQKWGQCGGIGWTGPTTCVSGTTCQKLNDWYSQCL

SEQ ID NO: 49485 - protein, 397 aa, Aspergillus fumigatus
MVHLSSLAAALAALPLVYGAGLNTAAKAKGLKYFGSATDNPELTDSAYVAQLSNTDDFGQITPGNSMKWDATEPSQNSFSFANGDAVVNLANKNGQLMRCHTLVWHSQLPNWVSSGSWTNATLLAAMKNHITNVVTHYKGKCYAWDVVNEALNEDGTFRNSVFYQIIGPAYIPIAFATAAAADPDVKLYYNDYNIEYSGAKATAAQNIVKMIKAYGAKIDGVGLQAHFIVGSTPSQSNLTTVLKGYTALGVEVAYTELDIRMQLPSTAAKLAQQSTDFQGVAAACVSTTGCVGVTIWDWTDKYSWVPSVFQGYGAPLPWDENYVKKPAYDGLMAGLGASGSGTTTTTTTTSTTTGGTDPTGVAQKWGQCGGIGWTGPTTCVSGTTCQKLNDWYSQCL

SEQ ID NO: 49486 - protein, 397 aa, Aspergillus fumigatus
MVHLSSLAAALAALPLVYGAGLNTAAKAKGLKYFGSATDNPELTDSAYVAQLSNTDDFGQITPGNSMKWDATEPSQNSFSFANGDAVVNLANKNGQLMRCHTLVWHSQLPNWVSSGSWTNATLLAAMKNHITNVVTHYKGKCYAWDVVNEALNEDGTFRNSVFYQIIGPAYIPIAFATAAAADPDVKLYYNDYNIEYSGAKATAAQNIVKMIKAYGARIDGVGLQAHFIVGSTPSQSDLTTVLKGYTALGVEVAYTELDIRMQLPSTAAKLAQQSTDFQGVAAACVSTTGCVGVTIWDWTDKYSWVPSVFQGYGAPLPWDENYVKKPAYDGLMAGLGASGSGTTTTTTTTSTTTGGTDPTGVAQKWGQCGGIGWTGPTTCVSGTTCQKLNDWYSQCL

SEQ ID NO: 49487 - protein, 378 aa, Aspergillus fumigatus
AGLNTAAKAKGLKYFGSATDNPELTDSAYVAQLSNTDDFGQITPGNSMKWDATEPSQNSFSFANGDAVVNLANKNGQLMRCHTLVWYSQLPNWVSSGSWTNATLLAAMKNHITNVVTHYKGKCYAWDVVNEALNEDGTFRNSVFYQIIGPAYIPIAFATAAAADPDVKLYYNDYNIEYSGAKATAAQNIVKMIKAYGAKIDGVGLQAHFIVGSTPSQSDLTTVLKGYTALGVEVAYTELDIRMQLPSTAAKLAQQSTDFQGVAAACVSTTGCVGVTIWDWTDKYSWVPSVFQGYGAPLPWDENYVKKPAYDGLMAGLGASGSGTTTTTTTTSTTTGGTDPTGVAQKWGQCGGIGWTGPTTCVSGTTCQKLNDWYSQCL

SEQ ID NO: 49488 - protein, 225 aa, unidentified
MVGFTPVALAALAATGALAFPAGNATELEKRQTTPNSEGWHDGYYYSWWSDGGAQATYTNLEGGTYEISWGDGGNLVGGKGWNPGLNARAIHFEGVYQPNGNSYLAVYGWTRNPLVEYYIVENFGTYDPSSGATDLGTVECDGSIYRLGKTTRVNAPSIDGTQTFDQYWSVRQDKRTSGTVHTGCHFDAWARAGLNVNGDHYYQIVATEGYFSSGYARITVADVG

SEQ ID NO: 49489 - protein, 207 aa, Thermomyces lanuginosus
SFPAGNATELEKRQTTPNSEGWHDGYYYSWWSDGGAQATYTNLEGGTYEISWGDGGNLVGGKGWNPGLNARAIHFEGVYQPNGNSYLAVYGWTRNPLVEYYIVENFGTYDPSSGATDLGTVECDGSIYRLGKTTRVNAPSIDGTQTFDQYWSVRQDKRTSGTVQTGCHFDAWARAGLNVNGDHYYQIVATEGYFSSGYARITVADVG

SEQ ID NO: 49490 - protein, 204 aa, Viridiplantae
VQTSITLTSNASGTFDGYYYELWKDTGNTTMTVYTQGRFSCQWSNINNALFRTGKKYNQNWQSLGTIRITYSATYNPNGNSYLCIYGWSTNPLVEFYIVESWGNWRPPGATSLGQVTIDGGTYDIYRTTRVNQPSIVGTATFDQYWSVRTSKRTSGTVTVTDHFRAWANRGLNLGTIDQITLCVEGYQSSGSANITQNTFSQGS

SEQ ID NO: 49491 - protein, 202 aa, Saccharomyces cerevisiae
QTSITLTSNASGTFDGYYYELWKDTGNTTMTVYTQGRFSCQWSNINNALFRTGKKYNQNWQSLGTIRITYSATYNPNGNSYLCIYGWSTNPLVEFYIVESWGNWRPPGATSLGQVTIDGGTYDIYRTTRVNQPSIVGTATFDQYWSVRTSKRTSGTVTVTDHFRAWANRGLNLGTIDQITLCVEGYQSSGSANITQNTFSRG

SEQ ID NO: 49492 - protein, 194 aa, Thermomyces lanuginosus
ETTPNSEGWHDGYYYSWWSDGGAQATYTNLEGGTYEISWGDGGNLVGGKGWNPGLNARAIHFEGVYQPNGNSYLAVYGWTRNPLVEYYIVENFGTYDPSSGATDLGTVECDGSIYRLGKTTRVNAPSIDGTQTFDQYWSVRQDKRTSGTVQTGCHFDAWARAGLNVNGDHYYQIVATEGYFSSGYARITVADVG

SEQ ID NO: 49493 - protein, 194 aa, Thermomyces lanuginosus
QTTPNSEGWHDGYYYSWWSDGGAQATYTNLEGGTYEISWGDGGNLVGGKGWNPGLNARAIHFEGVYQPNGNSYLAVYGWTRNPLVEYYIVENFGTYDPSSGATDLGTVECDGSIYRLGKATRVNAPSIDGTQTFDQYWSVRQDKRTSGTVQTGCHFDAWARAGLNVNGDHYYQIVATEGYFSSGYARITVADVG

SEQ ID NO: 49494 - protein, 192 aa, Thermomyces lanuginosus
TPNSEGWHDGYYYSWWSDGGACATYTNLEGGTYEISWGDGGNLVGGKGWNPGLNARAIHFEGVYQPNGNSYLAVYGWTRNPLVEYYIVENFGTYDPSSGATDLGTVECDGSIYRLGKTTRVNAPSIDGTQTFDQYWSVRQDKRTSGTVQTGCHFDAWARAGLNVNGDHYYQIVATEGYFSSGYARITVADVG

SEQ ID NO: 49495 - protein, 325 aa, Aspergillus fumigatus Z5
AGLNTCAKAKGLKYFGSATDNPELTDSAYVAQLSNTDDFGQITPGNSMKWDATEPSQNSFSFANGDAVVNLANKNGQLMRCHTLVWHSQLPNWVSSGSWTNATLLAAMKNHITNVVTHYKGKCYAWDVVNEALNEDGTFRNSVFYQIIGPAYIPIAFATAAAADPDVKLYYNDYNIEYSGAKATAAQNIVKMIKAYGAKIDGVGLQAHFIVGSTPSQSDLTTVLKGYTALGVEVAYTELDIRMQLPSTAAKLAQQSTDFQGVAAACVSTTGCVGVTIWDWTDKYSWVPSVFQGYGAPLPWDENYVKKPAYDGLMAGLGCSGSGTT

SEQ ID NO: 49496 - protein, 138 aa, Dictyoglomus thermophilum
MQTSITLTSNASGTFDGYYYELWKDTGNTTMTVYTQGRFSCQWSNINNALFRTGKKYNQNWQSLGTIRITYSATYNPNGNSYLCIYGWSTNPLVEFYIVESWGNWRPPGATSLGQVTIDGGTYDIYRTTRVNQPSIPG

SEQ ID NO: 49497 - protein, 137 aa, Dictyoglomus thermophilum
MQTSITLTSNASGTFDGYYYELWKDTGNTTMTVYTQGRFSCQWSNINNALFRTGKKYNQNWQSLGTIRITYSATYNPNGNSYLCIYGWSTNPLVEFYIVESWGNWRPPGATSLGQVTIDGGTYDIYRTTRVNQPSIL

SEQ ID NO: 49498 - protein, 136 aa, Dictyoglomus thermophilum
MQTSITLTSNASGTFDGYYYELWKDTGNTTMTVYTQGRFSCQWSNINNALFRTGKKYNQNWQSLGTIRITYSATYNPNGNSYLCIYGWSTNPLVEFYIVESWGNWRPPGATSLGQVTIDGGTYDIYRTTRVNQPCI

SEQ ID NO: 49499 - protein, 136 aa, Dictyoglomus thermophilum
MQTSITLTSNASGTFDGYYYELWKDTGNTTMTVYTQGRFSCQWSNINNALFRTGKKYNQNWQSLGTIRITYSATYNPNGNSYLCIYGWSTNPLVEFYIVESWGNWRPPGATSLGQVTIDGGTYDIYRTTRVNQPSV

SEQ ID NO: 49500 - protein, 136 aa, Dictyoglomus thermophilum
MQTSITLTSNASGTFDGYYYELWKDTGNTTMTVYTQGRFSCQWSNINNALFRTGKKYNQNWQSLGTIRITYSATYNPNGNSYLCIYGWSTNPLVEFYIVESWGNWRPPGATSLGQVTIDGGTYDIYRTTRVNQPSL

SEQ ID NO: 49501 - protein, 135 aa, Dictyoglomus thermophilum
MQTSITLTSNASGTFDGYYYELWKDTGNTTMTVYTQGRFSCQWSNINNALFRTGKKYNQNWQSLGTIRITYSATYNPNGNSYLCIYGWSTNPLVEFYIVESWGNWRPPGATSLGQVTIDGGTYDIYRTTRVNQPA

SEQ ID NO: 49502 - protein, 134 aa, Synthetic construct
MQTSITLTSNASGTFDGYYYELWKDTGNTIMTVYTQGRFSCQWSNINNALFRTGKKYNQNWQSLGTIRITYSATYNPNGNSYLCIYGWSTNPLVEFYIVESWGNWRPPGATSLGQVTIDGGTYDIYRTTRVNQP

SEQ ID NO: 49503 - protein, 122 aa, Chimeric
MQTSITLTSNASGTFDGYYYELWKDTGNTTMTVYTQGRFSCQWSNINNALFRTGKKYNQNWQSLGTIRITYSATYNPNGNSYLCIYGWSTNPLVEFYIVESWGNWRPPGATSLGQVTIDGGS

SEQ ID NO: 49504 - protein, 121 aa, Hordeum vulgare
QTSITLTSNASGTFDGYYYELWKDTGNTTMTVYTQGRFSCQWSNINNALFRTGKKYNQNWQSLGTIRITYSATYNPNGNSYLCIYGWSTNPLVEFYIVESWGNWRPPGATSLGQVTIDGGS

SEQ ID NO: 49505 - protein, 114 aa, Dictyoglomus thermophilum
MQTSITLTSNASGTFDGYYYELWKDTGNTTMTVYTQGRFSCQWSNINNALFRTGKKYNQNWQSLGTIRITYSATYNPNGNSYLCIYGWSTNPLVEFYIVESWGNWRPPGASLGR

SEQ ID NO: 49506 - protein, 112 aa, Dictyoglomus thermophilum
MQTSITLTSNASGTFDGYYYELWKDTGNTTMTVYTQGRFSCQWSNINNALFRTGKKYNQNWQSLGTIRITYSATYNPNGNSYLCIYGWSTNPLVEFYIVESWGNWRPPGACS

SEQ ID NO: 49507 - protein, 111 aa, Dictyoglomus thermophilum
MQTSITLTSNASGTFDGYYYELWKDTGNTTMTVYTQGRFSCQWSNINNALFRTGKKYNQNWQSLGTIRITYSATYNPNGNSYLCIYGWSTNPLVEFYIVESWGNWRPPGAS

SEQ ID NO: 49508 - protein, 209 aa, Hordeum vulgare
ASTFPAGNATELEKRQTTPNSEGWHDGYYYSWWSDGGAQATYTNLEGGTYEISWGDGGNLVGGKGWNPGLNARAIHFEGVYQPNGNSYLAVYGWTRNPLVEYYIVENFGTYDPSSGATDLGTVECDGSIYRLGKTTRVNAPSIDGTQTFDQYWSVRQDKRTSGTVQTGCHFDAWARAGLNVNGDHYYQIVATEGYFSSGYARITVADVG

SEQ ID NO: 49509 - protein, 202 aa, Synthetic construct
VQTSITLTSNASGTFDGYYYELWKDTGNTTMTVYTQGRFSCQWSNINNALFRTGKKYNQNWQSLGTIRITYSATYNPNGNSYLCIYGWSTNPLVEFYIVESWGNWRPPGATSLGQVTIDGGTYDIYRTTRVNQPSIVGTATFDQYWSVRTSKRTSGTVTVTDHFRAWANRGLNLGTIDQITLCVEGYQSSGSANITQNTFSR

SEQ ID NO: 49510 - protein, 196 aa, Saccharomyces cerevisiae
ERQTTPNSEGWHDGYYYSWWSDGGAQATYTNLEGGTYEISWGDGGNLVGGKGWNPGLNARAIHFEGVYQPNGNSYLAVYGWTRNPLVEYYIVENFGTYDPSSGATDLGTVECDGSIYRLGKTTRVNAPSIDGTQTFDQYWSVRQDKRTSGTVHTGCHFDAWARAGLNVNGDHYYQIVATEGYFSSGYARITVADVG

SEQ ID NO: 49511 - protein, 194 aa, Thermomyces lanuginosus
QTTPNSEGWHDGYYYSWWSDGGAQATYTNLEGGTYEISWGDGGNLVGGKGWNPGLNARAIHFEGVYQPNGNSYLAVYGWTRNPLVEYYIVENFGTYDPSSGATDLGTVECDGSIYQLGKTTRVNAPSIDGTQTFDQYWSVRQDKRTSGTVQTGCHFDAWAQAGLNVNGDHYYQIVATEGYFSSGYARITVADVG

SEQ ID NO: 49512 - protein, 194 aa, Saccharomyces cerevisiae
ETTPNSEGWHDGYYYSWWSDGGAQATYTNLEGGTYEISWGDGGNLVGGKGWNPGLNARAIHFEGVYQPNGNSYLAVYGWTRNPLVEYYIVENFGTYDPSSGATDLGTVECDGSIYRLGKTTRVNAPSIDGTQTFDQYWSVRQDKRTSGTVHTGCHFDAWARAGLNVNGDHYYQIVATEGYFSSGYARITVADVG

SEQ ID NO: 49513 - protein, 194 aa, Saccharomyces cerevisiae
RTTPNSEGWHDGYYYSWWSDGGAQATYTNLEGGTYEISWGDGGNLVGGKGWNPGLNARAIHFEGVYQPNGNSYLAVYGWTRNPLVEYYIVENFGTYDPSSGATDLGTVECDGSIYRLGKTTRVNAPSIDGTQTFDQYWSVRQDKRTSGTVHTGCHFDAWARAGLNVNGDHYYQIVATEGYFSSGYARITVADVG

SEQ ID NO: 49514 - protein, 192 aa, Saccharomyces cerevisiae
ETTPNSEGWHDGYYYSWWSDGGAQATYTNLEGGTYEISWGDGGNLVGGKGWNPGLNARAIHFEGVYQPNGNSYLAVYGWTRNPLVEYYIVENFGTYDPSSGATDLGTVECDGSIYRLGKTTRVNAPSIDGTQTFDQYWSVRQDKRTSGTVHTGCHFDAWARAGLNVNGDHYYQIVATEGYFSSGYARITVAD

SEQ ID NO: 49515 - protein, 191 aa, Saccharomyces cerevisiae
ETTPNSEGWHDGYYYSWWSDGGAQATYTNLEGGTYEISWGDGGNLVGGKGWNPGLNARAIHFEGVYQPNGNSYLAVYGWTRNPLVEYYIVENFGTYDPSSGATDLGTVECDGSIYRLGKTTRVNAPSIDGTQTFDQYWSVRQDKRTSGTVHTGCHFDAWARAGLNVNGDHYYQIVATEGYFSSGYARITVA

SEQ ID NO: 49516 - protein, 225 aa, Thermomyces lanuginosus
MVGFTPVALAALAATGALAFPAGNATELEKRQTTPNSEGWHDGYYYSWWSDGGAQATYTNLEGGTYEISWGDGGNLVGGKGWNPGLNARAIHFEGVYQPNGNSYLAVYGWTRNPLVEYYIVENFGTYDPSSGATDLGTVECDGSIYDLGKTTRVNQPSIDGTQTFDQYWSVRQDKRTSGTVTTGCHFDAWARAGLNVNGDHYYQIVATEGYFSSGYARITVADVG

SEQ ID NO: 49517 - protein, 140 aa, Dictyoglomus thermophilum
MQTSITLTSNASGTFDGYYYELWKDTGNTTMTVYTQGRFSCQWSNINNALFRTGKKYNQNWQSLGTIRITYSATYNPNGNSYLCIYGWSTNPLVEFYIVESWGNWRPPGATSLGQVTIDGGTYDIYRTTRVNQPCFVAGT

SEQ ID NO: 49518 - protein, 138 aa, Dictyoglomus thermophilum
MQTSITLTSNASGTFDGYYYELWKDTGNTTMTVYTQGRFSCQWSNINNALFRTGKKYNQNWQSLGTIRITYSATYNPNGNSYLCIYGWSTNPLVEFYIVESWGNWRPPGATSLGQVTIDGGTYDIYRTTRVNQPSVTG

SEQ ID NO: 49519 - protein, 138 aa, Dictyoglomus thermophilum
MQTSITLTSNASGTFDGYYYELWKDTGNTTMTVYTQGRFSCQWSNINNALFRTGKKYNQNWQSLGTIRITYSATYNPNGNSYLCIYGWSTNPLVEFYIVESWGNWRPPGATSLGQVTIDGGTYDIYRTTRVNQPCVVG

SEQ ID NO: 49520 - protein, 138 aa, Dictyoglomus thermophilum
MQTSITLTSNASGTFDGYYYELWKDTGNTTMTVYTQGRFSCQWSNINNALFRTGKKYNQNWQSLGTIRITYSATYNPNGNSYLCIYGWSTNPLVEFYIVESWGNWRPPGATSLGQVTIDGGTYDIYRTTRVNQPSLTG

SEQ ID NO: 49521 - protein, 137 aa, Dictyoglomus thermophilum
MQTSITLTSNASGTFDGYYYELWKDTGNTTMTVYTQGRFSCQWSNINNALFRTGKKYNQNWQSLGTIRITYSATYNPNGNSYLCIYGWSTNPLVEFYIVESWGNWRPPGATSLGQVTIDGGTYDIYRTTRVNQPSLL

SEQ ID NO: 49522 - protein, 136 aa, Dictyoglomus thermophilum
MQTSITLTSNASGTFDGYYYELWKDTGNTTMTVYTQGRFSCQWSNINNALFRTGKKYNQNWQSLGTIRITYSATYNPNGNSYLCIYGWSTNPLVEFYIVESWGNWRPPGATSLGQVTIDGGTYDIYRTTRVNQPCV

SEQ ID NO: 49523 - protein, 136 aa, Dictyoglomus thermophilum
MQTSITLTSNASGTFDGYYYELWKDTGNTTMTVYTQGRFSCQWSNINNALFRTGKKYNQNWQSLGTIRITYSATYNPNGNSYLCIYGWSTNPLVEFYIVESWGNWRPPGATSLGQVTIDGGTYDIYRTTRVNQPCL

SEQ ID NO: 49524 - protein, 136 aa, Dictyoglomus thermophilum
MQTSITLTSNASGTFDGYYYELWKDTGNTTMTVYTQGRFSCQWSNINNALFRTGKKYNQNWQSLGTIRITYSATYNPNGNSYLCIYGWSTNPLVEFYIVESWGNWRPPGATSLGQVTIDGGTYDIYRTTRVNQPAL

SEQ ID NO: 49525 - protein, 136 aa, Dictyoglomus thermophilum
MQTSITLTSNASGTFDGYYYELWKDTGNTTMTVYTQGRFSCQWSNINNALFRTGKKYNQNWQSLGTIRITYSATYNPNGNSYLCIYGWSTNPLVEFYIVESWGNWRPPGATSLGQVTIDGGTYDIYRTTRVNQPQL

SEQ ID NO: 49526 - protein, 194 aa, Thermomyces lanuginosus
QTTPNSEGWHDGYYYSWWSDGGAQATYTNLEGGTYEISWGDGGNLVGGKGWNPGLNARAIHFEGVYQPNGNSYLAVYGWTRNPLVEYYIVENFGTYDPSSGATDLGTVECDGSIYQLGKTTRVNAPSIDGTQTFDQYWSVRQDKRTSGTVQTGCHFDAWAQAGLNVNGDHYYQIVATEGYFSSGYASITVADVG

SEQ ID NO: 49527 - protein, 384 aa, Aspergillus aculeatus
VGLDQAAVAKGLQYFGTATDNPELTDIPYVTQLNNTADFGQITPGNSMKWDATEPSQGTFTFTNGDVIADLAEGNGQYLRCHTLVWYNQLPSWVTSGTWTNATLTAALKNHITNVVSHYKGKCLHWDVVNEALNDDGTYRTNIFYTTIGEAYIPIAFAAAAAADPDAKLFYNDYNLEYGGAKAASARAIVQLVKNAGAKIDGVGLQAHFSVGTVPSTSSLISVLQSFTALGVEVAYTEADVRILLPTTATTLAQQSSDFQALVQSCVQTTGCVGFTIWDWTDKYSWVPSTFSGYGAALPWDENLVKKPAYNGLLAGMGVTVTTTTTTTTATATGKTTTTTAGAASTGTTAAHWGQCGGLNWSGPTVCASGYTCTYVNDYYSQCL

SEQ ID NO: 49528 - protein, 250 aa, Aspergillus fumigatus
VNLALNEDGTFRNSVFYQIIGPAYIPIAFATAAAADPDVKLYYNDYNIEYSGAKATAAQNIVKMIKAYGAKIDGVGLQAHFIVGSTPSQSDLTTVLKGYTALGVEVAYTELDIRMQLPLTAAKLAQQSTDFQGVAAACVSTTGCVGVTIWDWTDKYSWVPSVFQGYGAPLPWDENYVKKPVYDGLMAGLGASGSGTTTTTTTTSSTTGGTDPTGVAQKWGQCGGIGWTGPTTCVSGTTCQKLNDWYSQCL

SEQ ID NO: 49529 - protein, 113 aa, Dictyoglomus thermophilum
MQTSITLTSNASGTFDGYYYELWKDTGNTTMTVYTQGRFSCQWSNINNALFRTGKKYNQNWQSLGTIRITYSATYNPNGNSYLCIYGWSTNPLVEFYIVESWGNWRPPGASIL

SEQ ID NO: 49530 - protein, 113 aa, Dictyoglomus thermophilum
MQTSITLTSNASGTFDGYYYELWKDTGNTTMTVYTQGRFSCQWSNINNALFRTGKKYNQNWQSLGTIRITYSATYNPNGNSYLCIYGWSTNPLVEFYIVESWGNWRPPGACLL

SEQ ID NO: 49531 - protein, 113 aa, Dictyoglomus thermophilum
MQTSITLTSNASGTFDGYYYELWKDTGNTTMTVYTQGRFSCQWSNINNALFRTGKKYNQNWQSLGTIRITYSATYNPNGNSYLCIYGWSTNPLVEFYIVESWGNWRPPGASLL

SEQ ID NO: 49532 - protein, 225 aa, Thermomyces lanuginosus
MVGFTPVALAALAATGALAFPAGNATELEKRQTTPNSEGWHDGYYYSWWSDGGAQATYTNLEGGTYEISWGDGGNLVGGKGWNPGLNARAIHFEGVYQPNGNSYLAVYGWTRNPLVEYYIVENFGTYDPSSGATDLGTVECDGSIYDLGKTTRVNQPSIDGTQTFDQYWSVRQDKRTSGTVTTGCHFDAWARAGLNVGGDHYYQIVATEGYFSSGYARITVADVG

SEQ ID NO: 49533 - protein, 225 aa, Thermomyces lanuginosus
MVGFTPVALAALAATGALAFPAGNATELEKRQTTPNSEGWHDGYYYSWWSDGGAQATYTNLEGGTYEISWGDGGNLVGGKGWNPGLNARAIHFEGVYQPNGNSYLAVYGWTRNPLVEYYIVENFGTYDPSSGATDLGTVECDGSIYDLGKTTRVNQPSIDGTQTFDQYWSVRQDKRTSGTVNTGCHFDAWARAGLNVGGDHYYQIVATEGYFSSGYARITVADVG

SEQ ID NO: 49534 - protein, 206 aa, Bacillus sp
QIVTDNSIATRGGYDYEFWKDSGGSGTMILNHGGTFSAQWNNVNNILFRKGKKFNETQTHQQVGNMSINYGANFQPNGNAYLCVYGWTVDPLVEYYIVDSWGNWRPPGATPKGTITVDGGTYDIYETLRVNQPSIKGIATFKQYWSVRRSKRTSGTISVSNHFRAWENLGMNMGKMYEVALTVEGYQSSGSANVYSNTLRINGNPL

SEQ ID NO: 49535 - protein, 194 aa, Thermomyces lanuginosus
QTTPNSEGWHDGYYYSWWSDGGAQATYTNLEGGTYEISWGDGGNLVGGKGWNPGLNARAIHFEGVYQPNGNSYLAVYGWTRNPLVEYYIVENFGTYDPSSGATDLGTVECDGSIYQLGTTTRVNAPSIDGTQTFDQYWSVRQDKRTSGTVQTGCHFDAWAQAGLNVNGDHYYQIVATEGYFSSGYASITVADVG

SEQ ID NO: 49536 - protein, 140 aa, Dictyoglomus thermophilum
MQTSITLTSNASGTFDGYYYELWKDTGNTTMTVYTQGRFSCQWSNINNALFRTGKKYNQNWQSLGTIRITYSATYNPNGNSYLCIYGWSTNPLVEFYIVESWGNWRPPGATSLGQVTIDGGTYDIYRTTRVNQPCIEGDA

SEQ ID NO: 49537 - protein, 140 aa, Dictyoglomus thermophilum
MQTSITLTSNASGTFDGYYYELWKDTGNTTMTVYTQGRFSCQWSNINNALFRTGKKYNQNWQSLGTIRITYSATYNPNGNSYLCIYGWSTNPLVEFYIVESWGNWRPPGATSLGQVTIDGGTYDIYRTTRVNQPCIDGNA

SEQ ID NO: 49538 - protein, 140 aa, Dictyoglomus thermophilum
MQTSITLTSNASGTFDGYYYELWKDTGNTTMTVYTQGRFSCQWSNINNALFRTGKKYNQNWQSLGTIRITYSATYNPNGNSYLCIYGWSTNPLVEFYIVESWGNWRPPGATSLGQVTIDGGTYDIYRTTRVNQPCFIEGT

SEQ ID NO: 49539 - protein, 140 aa, Dictyoglomus thermophilum
MQTSITLTSNASGTFDGYYYELWKDTGNTTMTVYTQGRFSCQWSNINNALFRTGKKYNQNWQSLGTIRITYSATYNPNGNSYLCIYGWSTNPLVEFYIVESWGNWRPPGATSLGQVTIDGGTYDIYRTTRVNQPCLANGT

SEQ ID NO: 49540 - protein, 140 aa, Dictyoglomus thermophilum
MQTSITLTSNASGTFDGYYYELWKDTGNTTMTVYTQGRFSCQWSNINNALFRTGKKYNQNWQSLGTIRITYSATYNPNGNSYLCIYGWSTNPLVEFYIVESWGNWRPPGATSLGQVTIDGGTYDIYRTTRVNQPCFAPGT

SEQ ID NO: 49541 - protein, 140 aa, Dictyoglomus thermophilum
MQTSITLTSNASGTFDGYYYELWKDTGNTTMTVYTQGRFSCQWSNINNALFRTGKKYNQNWQSLGTIRITYSATYNPNGNSYLCIYGWSTNPLVEFYIVESWGNWRPPGATSLGQVTIDGGTYDIYRTTRVNQPCFPAGT

SEQ ID NO: 49542 - protein, 140 aa, Dictyoglomus thermophilum
MQTSITLTSNASGTFDGYYYELWKDTGNTTMTVYTQGRFSCQWSNINNALFRTGKKYNQNWQSLGTIRITYSATYNPNGNSYLCIYGWSTNPLVEFYIVESWGNWRPPGATSLGQVTIDGGTYDIYRTTRVNQPCFAAGT

SEQ ID NO: 49543 - protein, 140 aa, Dictyoglomus thermophilum
MQTSITLTSNASGTFDGYYYELWKDTGNTTMTVYTQGRFSCQWSNINNALFRTGKKYNQNWQSLGTIRITYSATYNPNGNSYLCIYGWSTNPLVEFYIVESWGNWRPPGATSLGQVTIDGGTYDIYRTTRVNQPCLTAGT

SEQ ID NO: 49544 - protein, 140 aa, Dictyoglomus thermophilum
MQTSITLTSNASGTFDGYYYELWKDTGNTTMTVYTQGRFSCQWSNINNALFRTGKKYNQNWQSLGTIRITYSATYNPNGNSYLCIYGWSTNPLVEFYIVESWGNWRPPGATSLGQVTIDGGTYDIYRTTRVNQPCFAKGT

SEQ ID NO: 49545 - protein, 140 aa, Dictyoglomus thermophilum
MQTSITLTSNASGTFDGYYYELWKDTGNTTMTVYTQGRFSCQWSNINNALFRTGKKYNQNWQSLGTIRITYSATYNPNGNSYLCIYGWSTNPLVEFYIVESWGNWRPPGATSLGQVTIDGGTYDIYRTTRVNQPCLAKGT

SEQ ID NO: 49546 - protein, 138 aa, Dictyoglomus thermophilum
MQTSITLTSNASGTFDGYYYELWKDTGNTTMTVYTQGRFSCQWSNINNALFRTGKKYNQNWQSLGTIRITYSATYNPNGNSYLCIYGWSTNPLVEFYIVESWGNWRPPGATSLGQVTIDGGTYDIYRTTRVNQPCLSG

SEQ ID NO: 49547 - protein, 138 aa, Dictyoglomus thermophilum
MQTSITLTSNASGTFDGYYYELWKDTGNTTMTVYTQGRFSCQWSNINNALFRTGKKYNQNWQSLGTIRITYSATYNPNGNSYLCIYGWSTNPLVEFYIVESWGNWRPPGATSLGQVTIDGGTYDIYRTTRVNQPCLTG

SEQ ID NO: 49548 - protein, 138 aa, Dictyoglomus thermophilum
MQTSITLTSNASGTFDGYYYELWKDTGNTTMTVYTQGRFSCQWSNINNALFRTGKKYNQNWQSLGTIRITYSATYNPNGNSYLCIYGWSTNPLVEFYIVESWGNWRPPGATSLGQVTIDGGTYDIYRTTRVNQPCVHG

SEQ ID NO: 49549 - protein, 138 aa, Dictyoglomus thermophilum
MQTSITLTSNASGTFDGYYYELWKDTGNTTMTVYTQGRFSCQWSNINNALFRTGKKYNQNWQSLGTIRITYSATYNPNGNSYLCIYGWSTNPLVEFYIVESWGNWRPPGATSLGQVTIDGGTYDIYRTTRVNQPCFPG

SEQ ID NO: 49550 - protein, 138 aa, Dictyoglomus thermophilum
MQTSITLTSNASGTFDGYYYELWKDTGNTTMTVYTQGRFSCQWSNINNALFRTGKKYNQNWQSLGTIRITYSATYNPNGNSYLCIYGWSTNPLVEFYIVESWGNWRPPGATSLGQVTIDGGTYDIYRTTRVNQPCVDG

SEQ ID NO: 49551 - protein, 138 aa, Dictyoglomus thermophilum
MQTSITLTSNASGTFDGYYYELWKDTGNTTMTVYTQGRFSCQWSNINNALFRTGKKYNQNWQSLGTIRITYSATYNPNGNSYLCIYGWSTNPLVEFYIVESWGNWRPPGATSLGQVTIDGGTYDIYRTTRVNQPCVSG

SEQ ID NO: 49552 - protein, 138 aa, Dictyoglomus thermophilum
MQTSITLTSNASGTFDGYYYELWKDTGNTTMTVYTQGRFSCQWSNINNALFRTGKKYNQNWQSLGTIRITYSATYNPNGNSYLCIYGWSTNPLVEFYIVESWGNWRPPGATSLGQVTIDGGTYDIYRTTRVNQPCFTG

SEQ ID NO: 49553 - protein, 138 aa, Dictyoglomus thermophilum
MQTSITLTSNASGTFDGYYYELWKDTGNTTMTVYTQGRFSCQWSNINNALFRTGKKYNQNWQSLGTIRITYSATYNPNGNSYLCIYGWSTNPLVEFYIVESWGNWRPPGATSLGQVTIDGGTYDIYRTTRVNQPCVAG

SEQ ID NO: 49554 - protein, 138 aa, Dictyoglomus thermophilum
MQTSITLTSNASGTFDGYYYELWKDTGNTTMTVYTQGRFSCQWSNINNALFRTGKKYNQNWQSLGTIRITYSATYNPNGNSYLCIYGWSTNPLVEFYIVESWGNWRPPGATSLGQVTIDGGTYDIYRTTRVNQPCFSG

SEQ ID NO: 49555 - protein, 138 aa, Dictyoglomus thermophilum
MQTSITLTSNASGTFDGYYYELWKDTGNTTMTVYTQGRFSCQWSNINNALFRTGKKYNQNWQSLGTIRITYSATYNPNGNSYLCIYGWSTNPLVEFYIVESWGNWRPPGATSLGQVTIDGGTYDIYRTTRVNQPCFAG

SEQ ID NO: 49556 - protein, 138 aa, Dictyoglomus thermophilum
MQTSITLTSNASGTFDGYYYELWKDTGNTTMTVYTQGRFSCQWSNINNALFRTGKKYNQNWQSLGTIRITYSATYNPNGNSYLCIYGWSTNPLVEFYIVESWGNWRPPGATSLGQVTIDGGTYDIYRTTRVNQPCFIG

SEQ ID NO: 49557 - protein, 138 aa, Dictyoglomus thermophilum
MQTSITLTSNASGTFDGYYYELWKDTGNTTMTVYTQGRFSCQWSNINNALFRTGKKYNQNWQSLGTIRITYSATYNPNGNSYLCIYGWSTNPLVEFYIVESWGNWRPPGATSLGQVTIDGGTYDIYRTTRVNQPCFDG

SEQ ID NO: 49558 - protein, 138 aa, Dictyoglomus thermophilum
MQTSITLTSNASGTFDGYYYELWKDTGNTTMTVYTQGRFSCQWSNINNALFRTGKKYNQNWQSLGTIRITYSATYNPNGNSYLCIYGWSTNPLVEFYIVESWGNWRPPGATSLGQVTIDGGTYDIYRTTRVNQPCLHG

SEQ ID NO: 49559 - protein, 138 aa, Dictyoglomus thermophilum
MQTSITLTSNASGTFDGYYYELWKDTGNTTMTVYTQGRFSCQWSNINNALFRTGKKYNQNWQSLGTIRITYSATYNPNGNSYLCIYGWSTNPLVEFYIVESWGNWRPPGATSLGQVTIDGGTYDIYRTTRVNQPCVTG

SEQ ID NO: 49560 - protein, 137 aa, Dictyoglomus thermophilum
MQTSITLTSNASGTFDGYYYELWKDTGNTTMTVYTQGRFSCQWSNINNALFRTGKKYNQNWQSLGTIRITYSATYNPNGNSYLCIYGWSTNPLVEFYIVESWGNWRPPGATSLGQVTIDGGTYDIYRTTRVNQPCLM

SEQ ID NO: 49561 - protein, 137 aa, Dictyoglomus thermophilum
MQTSITLTSNASGTFDGYYYELWKDTGNTTMTVYTQGRFSCQWSNINNALFRTGKKYNQNWQSLGTIRITYSATYNPNGNSYLCIYGWSTNPLVEFYIVESWGNWRPPGATSLGQVTIDGGTYDIYRTTRVNQPCVL

SEQ ID NO: 49562 - protein, 137 aa, Dictyoglomus thermophilum
MQTSITLTSNASGTFDGYYYELWKDTGNTTMTVYTQGRFSCQWSNINNALFRTGKKYNQNWQSLGTIRITYSATYNPNGNSYLCIYGWSTNPLVEFYIVESWGNWRPPGATSLGQVTIDGGTYDIYRTTRVNQPCLL

SEQ ID NO: 49563 - protein, 225 aa, Thermomyces lanuginosus
MVGFTPVALAALAATGALAFPAGNATELEKRQTTPNSEGWHDGYYYSWWSDGGAQATYTNLEGGTYEISWGDGGNLVGGKGWNPGLNARAIHFEGVYQPNGNSYLAVYGWTRNPLVEYYIVENFGTYDPSSGATDLGTVECDGSTYDLGKTTRVNQPSIDGTQTFDQYWSVRQDKRTSGTVTTGCHFDAWARAGLNVGGDHYYQIVATEGYFSSGYARITVADVG

SEQ ID NO: 49564 - protein, 225 aa, Thermomyces lanuginosus
MVGFTPVALAALAATGALAFPAGNATELEKRQTTPNSEGWHDGYYYSWWSDGGAQATYTNLEGGTYEISWGDGGNLVGGKGWNPGLNARAIHFEGVYQPNGNSYLAVYGWTRNPLVEYYIVENFGTYDPSSGATDLGTVECDGSTYDLGKTTRVNQPSIDGTQTFDQYWSVRQDKRTSGTVNTGCHFDAWARAGLNVGGDHYYQIVATEGYFSSGYARITVADVG

SEQ ID NO: 49565 - protein, 214 aa, Chimeric
LLCHGSMAFPAGNATELEKRQTTPNSEGWHDGYYYSWWSDGGAQATYTNLEGGTYEISWGDGGNLVGGKGWNPGLNARAIHFEGVYQPNGNSYLAVYGWTRNPLVEYYIVENFGTYDPSSGATDLGTVECDGSIYRLGKTTRVNAPSIDGTQTFDQYWSVRQDKRTSGTVQTGCHFDAWARAGLNVNGDHYYQIVATEGYFSSGYARITVADVG

SEQ ID NO: 49566 - protein, 116 aa, Dictyoglomus thermophilum
MQTSITLTSNASGTFDGYYYELWKDTGNTTMTVYTQGRFSCQWSNINNALFRTGKKYNQNWQSLGTIRITYSATYNPNGNSYLCIYGWSTNPLVEFYIVESWGNWRPPGACLGKGT

SEQ ID NO: 49567 - protein, 114 aa, Dictyoglomus thermophilum
MQTSITLTSNASGTFDGYYYELWKDTGNTTMTVYTQGRFSCQWSNINNALFRTGKKYNQNWQSLGTIRITYSATYNPNGNSYLCIYGWSTNPLVEFYIVESWGNWRPPGASLTG

SEQ ID NO: 49568 - protein, 225 aa, Thermomyces lanuginosus
MVGFTPVALAALAATGALAFPAGNATELEKRQTTPNSEGWHDGYYYSWWSDGGAQATYTNLEGGTYEISWGDGGNLVGGKGWNPGLNARAIHFEGVYQPNGNSYLAVYGWTRNPLVEYYIVENFGTYDPSSGATDLGTVECDGSTYDLGKTTRVNQPSIDGTQTFDQYWSVRQDKRTSGTVTTGCHFDAWRRAGLNVGGDHYYQIVATEGYFSSGYARITVADVG

SEQ ID NO: 49569 - protein, 108 aa, Pyrococcus sp. GB-D
YAHNSWGNWRPPGATSLGQVTIDGGTYDIYRTTRVNQPSIVGTATFDQYWSVRTSKRTSGTVTVTDHFRAWANRGLNLGTIDQITLCVEGYQSSGSANITQNTFSQGS

SEQ ID NO: 49570 - protein, 141 aa, Dictyoglomus thermophilum
MQTSITLTSNASGTFDGYYYELWKDTGNTTMTVYTQGRFSCQWSNINNALFRTGKKYNQNWQSLGTIRITYSATYNPNGNSYLCIYGWSTNPLVEFYIVESWGNWRPPGATSLGQVTIDGGTYDIYRTTRVNQPCLTADSD

SEQ ID NO: 49571 - protein, 140 aa, Dictyoglomus thermophilum
MQTSITLTSNASGTFDGYYYELWKDTGNTTMTVYTQGRFSCQWSNINNALFRTGKKYNQNWQSLGTIRITYSATYNPNGNSYLCIYGWSTNPLVEFYIVESWGNWRPPGATSLGQVTIDGGTYDIYRTTRVNQPCLTGDA

SEQ ID NO: 49572 - protein, 140 aa, Dictyoglomus thermophilum
MQTSITLTSNASGTFDGYYYELWKDTGNTTMTVYTQGRFSCQWSNINNALFRTGKKYNQNWQSLGTIRITYSATYNPNGNSYLCIYGWSTNPLVEFYIVESWGNWRPPGATSLGQVTIDGGTYDIYRTTRVNQPCLDKTA

SEQ ID NO: 49573 - protein, 140 aa, Thermomyces lanuginosus
LTCTQIHFEGVYQPNGNSYLAVYGWTRNPLVEYYIVENFGTYDPSSGATDLGTVECDGSIYRLGKTTRVNAPSIDGTQTFDQYWSVRQDKRTSGTVQTGCHFDAWARAGLNVNGDHYYQIVATEGYFSSGYARITVADVG

SEQ ID NO: 49574 - protein, 139 aa, Dictyoglomus thermophilum
MQTSITLTSNASGTFDGYYYELWKDTGNTTMTVYTQGRFSCQWSNINNALFRTGKKYNQNWQSLGTIRITYSATYNPNGNSYLCIYGWSTNPLVEFYIVESWGNWRPPGATSLGQVTIDGGTYDIYRTTRVNQPCLSGS

SEQ ID NO: 49575 - protein, 199 aa, Dictyoglomus turgidum DSM 6724
TSITLTSNASGTFDGYYYELWKDSGNTTMTVYTQGRFSCQWSNINNALFRTGKKYNQSWQSLGTVKITYSATYNPNGNSYLCIYGWSTNPLVEFYIVESWGTWRPPGATSLGQVTIDGGTYDIYRTTRVNQPSIVGTATFDQYWSVRTSKRTSGTVTVTDHFRAWANKGLNLGTIDQITLCVEGYQSSGSANITQNTFS

SEQ ID NO: 49576 - protein, 199 aa, Saccharomyces cerevisiae
KLVGERTTPNSEGWHDGYYYSWWSDGGAQATYTNLEGGTYEISWGDGGNLVGGKGWNPGLNARAIHFEGVYQPNGNSYLAVYGWTRNPLVEYYIVENFGTYDPSSGATDLGTVECDGSIYRLGKTTRVNAPSIDGTQTFDQYWSVRQDKRTSGTVHTGCHFDAWARAGLNVNGDHYYQIVATEGYFSSGYARITVADVG

SEQ ID NO: 49577 - protein, 197 aa, Saccharomyces cerevisiae
KLVGERTTPNSEGWHDGYYYSWWSDGGAQATYTNLEGGTYEISWGDGGNLVGGKGWNPGLNARAIHFEGVYQPNGNSYLAVYGWTRNPLVEYYIVENFGTYDPSSGATDLGTVECDGSIYRLGKTTRVNAPSIDGTQTFDQYWSVRQDKRTSGTVHTGCHFDAWARAGLNVNGDHYYQIVATEGYFSSGYARITVAD

SEQ ID NO: 49578 - protein, 120 aa, Dictyoglomus thermophilum
MQTSITLTSNASGTFDGYYYELWKDTGNTTMTVYTQGRFSCQWSNINNALFRTGKKYNQNWQSLGTIRITYSATYNPNGNSYLCIYGWSTNPLVEFYIVESWGNWRPPGASVTGDTEVTI

SEQ ID NO: 49579 - protein, 144 aa, Dictyoglomus thermophilum
MQTSITLTSNASGTFDGYYYELWKDTGNTTMTVYTQGRFSCQWSNINNALFRTGKKYNQNWQSLGTIRITYSATYNPNGNSYLCIYGWSTNPLVEFYIVESWGNWRPPGATSLGQVTIDGGTYDIYRTTRVNQPCVVAGTEVTD

SEQ ID NO: 49580 - protein, 198 aa, Synthetic construct
LTSNASGTFDGYYYALWKDTGNTTMTVYTQGRFSCQWSNINFAAFRTGKKYNQNWQSLGTIRITYSATYNPNGNSYLCIFGWSTNPLVTFYIVESWGNWRPPGATSLGQVTIDGGTYDIYRTTRVNQPSIVGTATFDQYWSVRTSKRTSGTVTVTDHFRAWANRGLNLGTIDQITLCVKGYQSSGSANITQNTFSQSS

SEQ ID NO: 49581 - protein, 141 aa, Dictyoglomus thermophilum
MQTSITLTSNASGTFDGYYYELWKDTGNTTMTVYTQGRFSCQWSNINNALFRTGKKYNQNWQSLGTIRITYSATYNPNGNSYLCIYGWSTNPLVEFYIVESWGNWRPPGATSLGQVTIDGGTYDIYRTTRVNQPCVDGDTT

SEQ ID NO: 49582 - protein, 141 aa, Dictyoglomus thermophilum
MQTSITLTSNASGTFDGYYYELWKDTGNTTMTVYTQGRFSCQWSNINNALFRTGKKYNQNWQSLGTIRITYSATYNPNGNSYLCIYGWSTNPLVEFYIVESWGNWRPPGATSLGQVTIDGGTYDIYRTTRVNQPCFSGEET

SEQ ID NO: 49583 - protein, 141 aa, Dictyoglomus thermophilum
MQTSITLTSNASGTFDGYYYELWKDTGNTTMTVYTQGRFSCQWSNINNALFRTGKKYNQNWQSLGTIRITYSATYNPNGNSYLCIYGWSTNPLVEFYIVESWGNWRPPGATSLGQVTIDGGTYDIYRTTRVNQPCVRGDTT

SEQ ID NO: 49584 - protein, 140 aa, Dictyoglomus thermophilum
MQTSITLTSNASGTFDGYYYELWKDTGNTTMTVYTQGRFSCQWSNINNALFRTGKKYNQNWQSLGTIRITYSATYNPNGNSYLCIYGWSTNPLVEFYIVESWGNWRPPGATSLGQVTIDGGTYDIYRTTRVNQPCLPARA

SEQ ID NO: 49585 - protein, 194 aa, Paecilomyces sp
QTTPNSEGWHDGYYYSWWSDGGAQATYTNLEGGTYEISWGDGGNLVGGKGWNPGLNARAIHFEGVYQPNGNSYLAVYGWTRNPLVEYYIVENFGTYDPSSDATDLGTVECDGSTYRLGKSTRYNAPSIDGIQTFDQYWSVRQNKRSSGTVQTGCHFDAWARAGLNVNGDHYYQIVATEGYFSSGYARITVADVG

SEQ ID NO: 49586 - protein, 194 aa, Paecilomyces sp.
QTTPNSEGWHDGYYYSWWSDGGAQATYTNLEGGTYEISWGDGGNLVGGKGWNPGLNARAIHFDGVYQPNGNSYLAVYGWTRNPLVEYYIVENFGTYDPSSDATDLGTVECDGSTYRLGKSTRYNAPSIDGIQTFDQYWSVRQDKRSSGTVQTGCHFDAWARAGLNVNGDHYYQIVATEGYFSSGYARITVADVG

SEQ ID NO: 49587 - protein, 218 aa, Thermomyces lanuginosus
LGLSASLASGQVFPAGNATELEKRQTTPNSEGWHDGYYYSWWSDGGAQATYTNLEGGTYEISWGDGGNLVGGKGWNPGLNARAIHFEGVYQPNGNSYLAVYGWTRNPLVEYYIVENFGTYDPSSGATDLGTVECDGSIYRLGKTTRVNAPSIDGTQTFDQYWSVRQDKRTSGTVQTGCHFDAWARAGLNVNGDHYYQIVATEGYFSSGYARITVADVG

SEQ ID NO: 49588 - protein, 203 aa, Dictyoglomus turgidum DSM 6724
QTSITLTSNASGTFDGYYYELWKDSGNTTMTVYTQGRFSCQWSNINNALFRTGKKYNQSWQSLGTVKITYSATYNPNGNSYLCIYGWSTNPLVEFYIVESWGTWRPPGATSLGQVTIDGGTYDIYRTTRVNQPSIVGTATFDQYWSVRTSKRTSGTVTVTDHFRAWANKGLNLGTIDQITLCVEGYQSSGSANITQNTFSTSS

SEQ ID NO: 49589 - protein, 202 aa, Dictyoglomus turgidum DSM 6724
TSITLTSNASGTFDGYYYELWKDSGNTTMTVYTQGRFSCQWSNINNALFRTGKKYNQSWQSLGTVKITYSATYNPNGNSYLCIYGWSTNPLVEFYIVESWGTWRPPGATSLGQVTIDGGTYDIYRTTRVNQPSIVGTATFDQYWSVRTSKRTSGTVTVTDHFRAWANKGLNLGTIDQITLCVEGYQSSGSANITQNTFSTSS

SEQ ID NO: 49590 - protein, 225 aa, Thermomyces lanuginosus
MVGFTPVALAALAATGALAFPAGNATELEKRQTTPNSEGWHDGYYYSWWSDGGAQATYTNLEGGTYEITWGDGGNLVGGKGWNPGLNNRAIHFEGVYQPNGNSYLAVYGWTRNPLVEYYIVENFGTYNPSSGATDLGTVECDGSTYDLGKTTRVNQPSIDGTQTFDQYWSVRQDKRTSGTVTTGCHFDAWRRAGLNVGGDHYYQIVATEGYFSSGYARITVADVG

SEQ ID NO: 49591 - protein, 225 aa, Thermomyces lanuginosus
MVGFTPVALAALAATGALAFPAGNATELEKRQTTPNSEGWHDGYYYSWWSDGGAQATYTNLEGGTYEITWGDGGNLVGGKGWNPGLNNRAIHFEGVYQPNGNSYLAVYGWTRNPLVEYYIVENFGTYNPSSGATDLGTVECDGSTYDLGKTTRVNQPSIDGTQTFDQYWSVRQDKRTSGTVNTGCHFDAWRRAGLNVGGDHYYQIVATEGYFSSGYARITVADVG

SEQ ID NO: 49592 - protein, 199 aa, Dictyoglomus turgidum DSM 6724
TSITLTSNASGTFDGYYYELWKDSGNTTMTVYTQCRFSCQWSNINNALFRTGKKYNQSWQSLGTVKITYSATYNPNGNSYLCIYGWSTNPLVEFYIVESWGTWRPPGATSLGQVTIDGGTYDIYRTTRVNQPSIVGTATFDQYWSVRTSKRTSGTVTVTDHFRAWANKGLNLGTIDQITLCVEGYQSSGSANITQCTFS

SEQ ID NO: 49593 - protein, 199 aa, Dictyoglomus turgidum DSM 6724
TSITLTSNASGTFDGYYYELWKDSGNTTMTVYTQGRFSCQWSNINNALFRTGKKYNQSWQSLGTVKITYCATYNPNGNSYLCIYGWSTNPLVEFYIVESWGTWRPPGATSLGQVTIDGGTYDIYRTTRVNQPSIVGTATFDQYWSVRTSKRTSGTVTVTDHFRAWANKGLNLGTIDQITLCVEGYQSSGSANITCNTFS

SEQ ID NO: 49594 - protein, 194 aa, Paecilomyces sp.
QTTPNSEGWHDGYYYSWWSDGGAQATYTNLEGGTYEISWGDGGNLVGGKGWNPGLNARAIHFDGVYQPNGNSYLAVYGWTRNPLVEYYIVENFGTYDPSSDATDLGTVECDGSTYRLGKSTRTNAPSIDGIQTFDQYWSVRQNKRSSGTVQTGCHFDAWARAGLNVNGDHYYQIVATEGYFSSGYARITVADVG

SEQ ID NO: 49595 - protein, 194 aa, Paecilomyces sp
QTTPNSEGWHDGYYYSWWSDGGAQATYTNLEGGTYEISWGDGGNLVGGKGWNPGLNARAIHFYGVYQPNGNSYLAVYGWTRNPLVEYYIVENFGTYDPSSDATDLGTVECDGSTYRLGKSTRYNAPSIDGIQTFDQYWSVRQNKRSSGTVQTGCHFDAWARAGLNVNGDHYYQIVATEGYFSSGYARITVADVG

SEQ ID NO: 49596 - protein, 194 aa, Paecilomyces sp
QTTPNSEGWHDGYYYSWWSDGGAQATYTNLEGGTYEISWGDGGNLVGGKGWNPGLNARAIHFDGVYQPNGNSYLAVYGWTRNPLVEYYIVENFGTYDPSSDATDLGTVECDGSYYRLGKSTRYNAPSIDGIQTFDQYWSVRQNKRSSGTVQTGCHFDAWARAGLNVNGDHYYQIVATEGYFSSGYARITVADVG

SEQ ID NO: 49597 - protein, 194 aa, Paecilomyces sp
QTTPNSEGWHDGYYYSWWSDGGAQATYTNLEGGTYEISWGDGGNLVGGKGWNPGLNARAIHFFGVYQPNGNSYLAVYGWTRNPLVEYYIVENFGTYDPSSDATDLGTVECDGSTYRLGKSTRYNAPSIDGIQTFDQYWSVRQNKRSSGTVQTGCHFDAWARAGLNVNGDHYYQIVATEGYFSSGYARITVADVG

SEQ ID NO: 49598 - protein, 194 aa, Paecilomyces sp
QTTPNSEGWHDGYYYSWWSDGGAQATYTNLEGGTYEISWGDGGNLVGGKGWNPGLNARAIHFDGVYQPNGNSYLAVYGWTRNPLVEYYIVENFGTYDPSSDATDLGTVECDGSTYRLGKSTRYNAPSIDGIQTFDQYWSVRQNKRSSGTVQTGCHFDAWARAGLNVNGDHYYQIVATEGYFSSGYARITVADVG

SEQ ID NO: 49599 - protein, 123 aa, Dictyoglomus thermophilum
MQTSITLTSNASGTFDGYYYELWKDTGNTTMTVYTQGRFSCQWSNINNALFRTGKKYNQNWQSLGTIRITYSATYNPNGNSYLCIYGWSTNPLVEFYIVESWGNWRPPGACFPAGTPVDTIDG

SEQ ID NO: 49600 - protein, 124 aa, Dictyoglomus thermophilum
MQTSITLTSNASGTFDGYYYELWKDTGNTTMTVYTQGRFSCQWSNINNALFRTGKKYNQNWQSLGTIRITYSATYNPNGNSYLCIYGWSTNPLVEFYIVESWGNWRPPGACFPGDTRILVQIDG

SEQ ID NO: 49601 - protein, 141 aa, Dictyoglomus thermophilum
MQTSITLTSNASGTFDGYYYELWKDTGNTTMTVYTQGRFSCQWSNINNALFRTGKKYNQNWQSLGTIRITYSATYNPNGNSYLCIYGWSTNPLVEFYIVESWGNWRPPGATSLGQVTIDGGTYDIYRTTRVNQPCLTSDHT

SEQ ID NO: 49602 - protein, 141 aa, Dictyoglomus thermophilum
MQTSITLTSNASGTFDGYYYELWKDTGNTTMTVYTQGRFSCQWSNINNALFRTGKKYNQNWQSLGTIRITYSATYNPNGNSYLCIYGWSTNPLVEFYIVESWGNWRPPGATSLGQVTIDGGTYDIYRTTRVNQPCLTADST

SEQ ID NO: 49603 - protein, 194 aa, Paecilomyces sp
QTTPNSEGWHDGYYYSWWSDGGAQATYTNLEGGTYEISWGDGGNLVGGKGWNPGLNARAIHFDGVYQPNGNSYLAVYGWTRNPLVEYYIVENFGTYDPSSDATDLGTVECDGSTYRLGKSTRYNAPSIDGIQTFDQYWSVRQNKRSSGTVQTGCHFDAWERAGLNVNGDHYYQIVATEGYFSSGYARITVADVG

SEQ ID NO: 49604 - protein, 194 aa, Paecilomyces sp
QTTPNSEGWHDGYYYSWWSDGGAQATYTNLEGGTYEISWGDGGNLVGGKGWNPGLNARAIHFDGVYQPNGNSYLAVYGWTRNPLVEYYIVENFGTYDPSSDATDLGTVECDGSTYRLGKSTRYNAPSIDGIQTFDQYWSVRQNKRSSGTVQTGCHFDAWARAGLNVNGDHYYQIVAVEGYFSSGYARITVADVG

SEQ ID NO: 49605 - protein, 194 aa, Paecilomyces sp.
QTTPNSEGWHDGYYYSWWSDGGAQATYTNLEGGTYEISWGDGGNLVGGKGWNPGLNARAIHFDGDYQPNGNSYLAVYGWTRNPLVEYYIVENFGTYDPSSDATDLGTVECDGSTYRLGKSTRYNAPSIDGIQTFDQYWSVRQNKRSSGTVQTGCHFDAWARAGLNVNGDHYYQIVATEGYFSSGYARITVADVG

SEQ ID NO: 49606 - protein, 194 aa, Paecilomyces sp.
QTTPNSEGWHDGYYYSWWSDGGAQATYTNLEGGTYEISWGDGGNLVGGKGWNPGLNARAIHFDGVYQPNGNSYLAVYGWTRNPLVEYYIVENFGTYDPSSDATDLGTVECDGSTYRLGKSTRYNAPSIDGIQTFDQYWSVRQNKRSSGTVQTGCHFDAWARAGLNVSGDHYYQIVATEGYFSSGYARITVADVG

SEQ ID NO: 49607 - protein, 194 aa, Paecilomyces sp.
QTTPNSEGWHDGYYYSWWSDGGAQATYTNLEGGTYEISWGDGGNLVGGKGWNPGLNARAIHFDGVYQPNGNSYLAVYGWTRNPLVEYYIVENFGTYDPSSDATDLGTVECDGSTYRLGKSTRYNAPSIDGIQTFDQYWSVRQNKRSSGTVDTGCHFDAWARAGLNVNGDHYYQIVATEGYFSSGYARITVADVG

SEQ ID NO: 49608 - protein, 194 aa, Paecilomyces sp
QTTPNSEGWHDGYYYSWWSDGGAQATYTNLEGGTYEISWGDGGNLVGGKGWNPGLNARAIHFDGVYQPNGNSYLAVYGWTRNPLVEYYIVENFGTYDPSSDATDLGTVECDGSTYRLGKSTRYNAPSIDGIQTFDQYWSVRQNKRSSGTVQTGCHFDAWARAGLDVNGDHYYQIVATEGYFSSGYARITVADVG

SEQ ID NO: 49609 - protein, 194 aa, Paecilomyces sp
QTTPNSEGWHDGYYYSWWSDGGAPATYTNLEGGTYEISWGDGGNLVGGKGWNPGLNARAIHFDGVYQPNGNSYLAVYGWTRNPLVEYYIVENFGTYDPSSDATDLGTVECDGSTYRLGKSTRYNAPSIDGIQTFDQYWSVRQNKRSSGTVQTGCHFDAWARAGLNVNGDHYYQIVATEGYFSSGYARITVADVG

SEQ ID NO: 49610 - protein, 194 aa, Paecilomyces sp.
QTTPNSEGWHDGYYYSWWSDGGAQATYTNLEGGTYEISWGDGGNLVGGKGWNPGLNARAIHFDGVYQPNGNSYLAVYGWTRNPLVEYYIVENFGTYDPSSDATDLGTVECDGSTYRLGKSTRYNAPSIDGIQTFDQYWSVRQNKRSSGTVQTGCHFDAWARAGLNVDGDHYYQIVATEGYFSSGYARITVADVG

SEQ ID NO: 49611 - protein, 194 aa, Paecilomyces sp
QTTPNSEGWHDGYYYSWWSDGGAQATYTNLEGGTYEISWHDGGNLVGGKGWNPGLNARAIHFDGVYQPNGNSYLAVYGWTRNPLVEYYIVENFGTYDPSSDATDLGTVECDGSTYRLGKSTRYNAPSIDGIQTFDQYWSVRQNKRSSGTVQTGCHFDAWARAGLNVNGDHYYQIVATEGYFSSGYARITVADVG

SEQ ID NO: 49612 - protein, 194 aa, Paecilomyces sp
QTTPNSEGWHDGYYYSWWSDGGAQATYTNLEGGTYEISWGDGGNLVGGKGWNPGLNARAIHFDGVYQPNGNSYLAVYGWTRNPLVEYYIVENFGTYDPSSDATDLGTVECDGSTYRLGKSTRYNAPSIDGIQTFDQYWSVRQNKRSSGTVYTGCHFDAWARAGLNVNGDHYYQIVATEGYFSSGYARITVADVG

SEQ ID NO: 49613 - protein, 194 aa, Paecilomyces sp
QTTPNSEGWHDGYYYSWWSDGGAQATYTNLEGGTYEISWRDGGNLVGGKGWNPGLNARAIHFDGVYQPNGNSYLAVYGWTRNPLVEYYIVENFGTYDPSSDATDLGTVECDGSTYRLGKSTRYNAPSIDGIQTFDQYWSVRQNKRSSGTVQTGCHFDAWARAGLNVNGDHYYQIVATEGYFSSGYARITVADVG

SEQ ID NO: 49614 - protein, 194 aa, Paecilomyces sp.
QTTPNSEGWHDGYYYSWWSDGGAQATYTNLEGGTYEISWGDGGNLVGGKGWNPGLNARAIHFDGVYQPNGNSYLAVYGWTRNPLVEYYIVENFGTYDPSSDATDLGTVECDGSTYRLGKSTRYNAPSIDGIQTFDQYWSVRQNKRSSGTVQTGCHFDAWARAGLNVNGDHYYQVVATEGYFSSGYARITVADVG

SEQ ID NO: 49615 - protein, 194 aa, Paecilomyces sp.
QTTPNSEGWHDGYYYSWWSDGGAQATYTNLEGGTYEISWGDGGNLVGGKGWNPGLNARAIHFDGVYQPNGNSYLAVYGWTRNPLVEYYIVENFGTYDPSSDATDLGTVECDGSTYRLGKSTRYNAPSIDGIQTFDQYWSVRQNKRSSGTVQTGCHFDAWARAGLNVNGDHYYQIVATEGYRSSGYARITVADVG

SEQ ID NO: 49616 - protein, 194 aa, Paecilomyces sp
QTTPNSEGWHDGYYYSWWSDGGAQATYTNLEGGTYEISWGDGGNLVGGKGWNPGLNYRAIHFDGVYQPNGNSYLAVYGWTRNPLVEYYIVENFGTYDPSSDATDLGTVECDGSTYRLGKSTRYNAPSIDGIQTFDQYWSVRQNKRSSGTVQTGCHFDAWARAGLNVNGDHYYQIVATEGYFSSGYARITVADVG

SEQ ID NO: 49617 - protein, 194 aa, Paecilomyces sp
QTTPNSEGWHDGYYYSWWSDGGAQATYTNLEGGTYEISWGDGGNLVGGKGWNPGLKARAIHFDGVYQPNGNSYLAVYGWTRNPLVEYYIVENFGTYDPSSDATDLGTVECDGSTYRLGKSTRYNAPSIDGIQTFDQYWSVRQNKRSSGTVQTGCHFDAWARAGLNVNGDHYYQIVATEGYFSSGYARITVADVG

SEQ ID NO: 49618 - protein, 194 aa, Paecilomyces sp.
QTTPNSEGWHDGYYYSWWSDGGAQATYTNLEGGTYEISWGDGGNLVGGKGWNPGLNARAIHFDGVYQPNGNSYLAVYGWTRNPLVEYYIVENFGTYDPSSDATDLGTVECDGSTYRLGKSTRYNAPSIDGIQTFDQYWSVRQNKRSSGTVQTGCHFDAWRRAGLNVNGDHYYQIVATEGYFSSGYARITVADVG

SEQ ID NO: 49619 - protein, 194 aa, Paecilomyces sp
QTTPNSEGWHDGYYYSWWSDGGAQATYTNLEGGTYEISWGDGGNLVGGKGWNPGLNARAIHFDGVYQPNGNSYLAVYGWTRNPLVEYYIVENFGTYDPSSDATDLGTVECDGSTYRLGKSTRYNAPSIDGIMTFDQYWSVRQNKRSSGTVQTGCHFDAWARAGLNVNGDHYYQIVATEGYFSSGYARITVADVG

SEQ ID NO: 49620 - protein, 194 aa, Paecilomyces sp.
QTTPNSEGWHDGYYYSWWSDGGAQATYTNLEGGTYEISWGDGGNLVGGKGWNPGLNARAIHFDGVYQPNGNSYLAVYGWTRNPLVEYYIVENFGDYDPSSDATDLGTVECDGSTYRLGKSTRYNAPSIDGIQTFDQYWSVRQNKRSSGTVQTGCHFDAWARAGLNVNGDHYYQIVATEGYFSSGYARITVADVG

SEQ ID NO: 49621 - protein, 194 aa, Paecilomyces sp
QTTPNSEGWHDGYYYSWWSDGGAQATYTNLEGGTYEISWGDGGNLVGGKGWNPGLNARAIHFDGVYQPNGNSYLAVYGWTRNPLVEYYIVENFGTYDPSSDATDLGKVECDGSTYRLGKSTRYNAPSIDGIQTFDQYWSVRQNKRSSGTVQTGCHFDAWARAGLNVNGDHYYQIVATEGYFSSGYARITVADVG

SEQ ID NO: 49622 - protein, 194 aa, Paecilomyces sp
QTTPNSEGWHDGYYYSWWSDGGAQATYTNLEGGTYEISWGPGGNLVGGKGWNPGLNARAIHFDGVYQPNGNSYLAVYGWTRNPLVEYYIVENFGTYDPSSDATDLGTVECDGSTYRLGKSTRYNAPSIDGIQTFDQYWSVRQNKRSSGTVQTGCHFDAWARAGLNVNGDHYYQIVATEGYFSSGYARITVADVG

SEQ ID NO: 49623 - protein, 194 aa, Paecilomyces sp
QTTPNSEGWHDGYYYSWWSDGGAQATYTNLEGGTYEISWGDGGNLVGGKGWNPGLNARAIHFDGVYQPNGNSYLAVYGWTRNPLVEYYIVENFGTYDPSSDATYLGTVECDGSTYRLGKSTRYNAPSIDGIQTFDQYWSVRQNKRSSGTVQTGCHFDAWARAGLNVNGDHYYQIVATEGYFSSGYARITVADVG

SEQ ID NO: 49624 - protein, 194 aa, Paecilomyces sp
QTTPNSEGWHDGYYYSWWSDGGAQATYTNLEGGTYEISWGDGGNLVGGKGWNPGLNARAIHFDGVYQPNGNSYLAVYGWTRNPLVEYYIVENFGTYDPSSDATDLGTVECDGSTYRLGKSTRYNAPSIDGIQTFDQYWSVRQNKRSSGTVQTGNHFDAWARAGLNVNGDHYYQIVATEGYFSSGYARITVADVG

SEQ ID NO: 49625 - protein, 194 aa, Paecilomyces sp
QTTPNSEGWHDGYYYSWWSDGGAQATYTNLEGGTYEISWGDGGNLVGGKGWNPGLNARRIHFDGVYQPNGNSYLAVYGWTRNPLVEYYIVENFGTYDPSSDATDLGTVECDGSTYRLGKSTRYNAPSIDGIQTFDQYWSVRQNKRSSGTVQTGCHFDAWARAGLNVNGDHYYQIVATEGYFSSGYARITVADVG

SEQ ID NO: 49626 - protein, 194 aa, Paecilomyces sp
QTTPNSEGWHDGYYYSWWSDGGAQATYTNLEGGTYEISWGDGGNLVGGKGWNPGLNARMIHFDGVYQPNGNSYLAVYGWTRNPLVEYYIVENFGTYDPSSDATDLGTVECDGSTYRLGKSTRYNAPSIDGIQTFDQYWSVRQNKRSSGTVQTGCHFDAWARAGLNVNGDHYYQIVATEGYFSSGYARITVADVG

SEQ ID NO: 49627 - protein, 194 aa, Paecilomyces sp
QTTPNSEGWHDGYYYSWWSDGGAQATYTNLEGGTYEISWGDGGNLVGGKGWNPGLNDRAIHFDGVYQPNGNSYLAVYGWTRNPLVEYYIVENFGTYDPSSDATDLGTVECDGSTYRLGKSTRYNAPSIDGIQTFDQYWSVRQNKRSSGTVQTGCHFDAWARAGLNVNGDHYYQIVATEGYFSSGYARITVADVG

SEQ ID NO: 49628 - protein, 194 aa, Paecilomyces sp.
QTTPNSEGWHDGYYYSWWSDGGAQATYTNLEGGTYEISWGDGGNLVGGKGWNPGLNARAIHFDGVYQPNGNSYLAVYGWTRNPLVEYYIVENYGTYDPSSDATDLGTVECDGSTYRLGKSTRYNAPSIDGIQTFDQYWSVRQNKRSSGTVQTGCHFDAWARAGLNVNGDHYYQIVATEGYFSSGYARITVADVG

SEQ ID NO: 49629 - protein, 194 aa, Paecilomyces sp
QTTPNSEGWHDGYYYSWWSDGGAQATYTNLEGGTYEIHWGDGGNLVGGKGWNPGLNARAIHFDGVYQPNGNSYLAVYGWTRNPLVEYYIVENFGTYDPSSDATDLGTVECDGSTYRLGKSTRYNAPSIDGIQTFDQYWSVRQNKRSSGTVQTGCHFDAWARAGLNVNGDHYYQIVATEGYFSSGYARITVADVG

SEQ ID NO: 49630 - protein, 194 aa, Paecilomyces sp
QTTPNSEGWHDGYYYSWWSDGGAQATYTNLEGGTYEISWGDGGNLVGGKGWNPGLNARSIHFDGVYQPNGNSYLAVYGWTRNPLVEYYIVENFGTYDPSSDATDLGTVECDGSTYRLGKSTRYNAPSIDGIQTFDQYWSVRQNKRSSGTVQTGCHFDAWARAGLNVNGDHYYQIVATEGYFSSGYARITVADVG

SEQ ID NO: 49631 - protein, 194 aa, Paecilomyces sp.
QTTPNSEGWHDGYYYSWWSDGGAQATYTNLEGGTYEISWGDGGNLVGGKGWNPGLNARAIHFDGVYQPNGNSYLAVYGWTRNPLVEYYIVENFGTYDPSSDATDLGTVECDGSTYRLGKSTRYNAPSIDGIQTFDQYWSVRQNKRSSGTVQTGCHFDAWARAGLNVNGDHYYQIVATEGYNSSGYARITVADVG

SEQ ID NO: 49632 - protein, 194 aa, Paecilomyces sp.
QTTPNSEGWHDGYYYSWWSDGGAQATYTNLEGGTYEISWGDGGNLVGGKGWNPGLNGRAIHFDGVYQPNGNSYLAVYGWTRNPLVEYYIVENFGTYDPSSDATDLGTVECDGSTYRLGKSTRYNAPSIDGIQTFDQYWSVRQNKRSSGTVQTGCHFDAWARAGLNVNGDHYYQIVATEGYFSSGYARITVADVG

SEQ ID NO: 49633 - protein, 194 aa, Paecilomyces sp
QTTPNSEGWHDGYYYSWWSDGGAQATYTNLEGGTYEISWMDGGNLVGGKGWNPGLNARAIHFDGVYQPNGNSYLAVYGWTRNPLVEYYIVENFGTYDPSSDATDLGTVECDGSTYRLGKSTRYNAPSIDGIQTFDQYWSVRQNKRSSGTVQTGCHFDAWARAGLNVNGDHYYQIVATEGYFSSGYARITVADVG

SEQ ID NO: 49634 - protein, 194 aa, Paecilomyces sp
QTTPNSEGWHDGYYYSWWSDGGAQATYTNLEGGTYEISWGDGGNLVGGKGWNPGLNARAIHFDGVYQPNGNSYLAVYGWTRNPLVEYYIVENFGTYDPSSDATDLGTVECDGSTYRLGKSTRYNAPSIDGIQTFDQYWSVRQNKRSSGLVQTGCHFDAWARAGLNVNGDHYYQIVATEGYFSSGYARITVADVG

SEQ ID NO: 49635 - protein, 194 aa, Paecilomyces sp
QTTPNSEGWHDGYYYSWWSDGGAQATYTNLEGGTYEISWGDGGNLVGGKGWNPGLNARAIHFDGVYQPNGNSYLAVYGWTRNPLVEYYIVENFGTYDPSSDFTDLGTVECDGSTYRLGKSTRYNAPSIDGIQTFDQYWSVRQNKRSSGTVQTGCHFDAWARAGLNVNGDHYYQIVATEGYFSSGYARITVADVG

SEQ ID NO: 49636 - protein, 194 aa, Paecilomyces sp
QTTPNSEGWHDGYYYSWWSDGGAQATYTNLEGGTYEVSWGDGGNLVGGKGWNPGLNARAIHFDGVYQPNGNSYLAVYGWTRNPLVEYYIVENFGTYDPSSDATDLGTVECDGSTYRLGKSTRYNAPSIDGIQTFDQYWSVRQNKRSSGTVQTGCHFDAWARAGLNVNGDHYYQIVATEGYFSSGYARITVADVG

SEQ ID NO: 49637 - protein, 194 aa, Paecilomyces sp
QTTPNSEGWHDGYYYSWWSDGGAQATYTNLEGGTYEISWGDGGNLVGGKGWNPGLNARAIFFDGVYQPNGNSYLAVYGWTRNPLVEYYIVENFGTYDPSSDATDLGTVECDGSTYRLGKSTRYNAPSIDGIQTFDQYWSVRQNKRSSGTVQTGCHFDAWARAGLNVNGDHYYQIVATEGYFSSGYARITVADVG

SEQ ID NO: 49638 - protein, 194 aa, Paecilomyces sp.
QTTPNSEGWHDGYYYSWWSDGGAQATYTNLEGGTYEISWGDGGNLVGGKGWNPGLNARAIHFDGVYQPNGNSYLAVYGWTRNPLVEYYIVENFGTYDPSSDATDLGTVECDGSTYRLGKSTRYNAPSIDGIATFDQYWSVRQNKRSSGTVQTGCHFDAWARAGLNVNGDHYYQIVATEGYFSSGYARITVADVG

SEQ ID NO: 49639 - protein, 194 aa, Paecilomyces sp
QTTPNSEGWHDGYYYSWWSDGGAQATYTNLEGGTYEIIWGDGGNLVGGKGWNPGLNARAIHFDGVYQPNGNSYLAVYGWTRNPLVEYYIVENFGTYDPSSDATDLGTVECDGSTYRLGKSTRYNAPSIDGIQTFDQYWSVRQNKRSSGTVQTGCHFDAWARAGLNVNGDHYYQIVATEGYFSSGYARITVADVG

SEQ ID NO: 49640 - protein, 194 aa, Paecilomyces sp
QTTPNSEGWHDGYYYSWWSDGGAQATYTNLEGGTYEISWGDGGNLVGGKGWNPGLNARAIHFDGVYQPNGNSYLAVYGWTRNPLVEYYIVENFGTYDPSSDATDLGEVECDGSTYRLGKSTRYNAPSIDGIQTFDQYWSVRQNKRSSGTVQTGCHFDAWARAGLNVNGDHYYQIVATEGYFSSGYARITVADVG

SEQ ID NO: 49641 - protein, 194 aa, Paecilomyces sp
QTTPNSEGWHDGYYYSWWSDGGAQATYTNLEGGTYEISWGDGGNLVGGKGWNPGLNARIIHFDGVYQPNGNSYLAVYGWTRNPLVEYYIVENFGTYDPSSDATDLGTVECDGSTYRLGKSTRYNAPSIDGIQTFDQYWSVRQNKRSSGTVQTGCHFDAWARAGLNVNGDHYYQIVATEGYFSSGYARITVADVG

SEQ ID NO: 49642 - protein, 194 aa, Paecilomyces sp
QTTPNSEGWHDGYYYSWWSDGGAQATYTNLEGGTYEISWGDGGNLVGGKGWNPGLNARAIHFDGVYQPNGNSYLAVYGWTRNPLVEYYIVENFGTYDPSSDATDLGTVECDGSTYRLGKSTRYNAPSIDGIQTFDQYWSVRQNRRSSGTVQTGCHFDAWARAGLNVNGDHYYQIVATEGYFSSGYARITVADVG

SEQ ID NO: 49643 - protein, 194 aa, Paecilomyces sp
QTTPNSEGWHDGYYYSWWSDGGAQATYTNLEGGTYEIKWGDGGNLVGGKGWNPGLNARAIHFDGVYQPNGNSYLAVYGWTRNPLVEYYIVENFGTYDPSSDATDLGTVECDGSTYRLGKSTRYNAPSIDGIQTFDQYWSVRQNKRSSGTVQTGCHFDAWARAGLNVNGDHYYQIVATEGYFSSGYARITVADVG

SEQ ID NO: 49644 - protein, 194 aa, Paecilomyces sp
QTTPNSEGWHDGYYYSWWSDGGAQATYTNLEGGTYEISWGDGGNLVGGKGWNPGLNARAIHFDGVYQPNGNSYLAVYGWTRNPLVEYYIVENFGTYDPSSDATDLGTVECDGSTYRLGKSTRYNAPSIDGIRTFDQYWSVRQNKRSSGTVQTGCHFDAWARAGLNVNGDHYYQIVATEGYFSSGYARITVADVG

SEQ ID NO: 49645 - protein, 194 aa, Paecilomyces sp
QTTPNSEGWHDGYYYSWWSDGGAQATYTNLEGGTYEISWGDGGNLVGGKGWNPGLNARAIHFDGVYQPNGNSYLAVYGWTRNPLVEYYIVENFGTYDPSSDAIDLGTVECDGSTYRLGKSTRYNAPSIDGIQTFDQYWSVRQNKRSSGTVQTGCHFDAWARAGLNVNGDHYYQIVATEGYFSSGYARITVADVG

SEQ ID NO: 49646 - protein, 194 aa, Paecilomyces sp
QTTPNSEGWHDGYYYSWWSDGGAQATYTNLEGGTYEISWGDGGNLVGGKGWNPGLLARAIHFDGVYQPNGNSYLAVYGWTRNPLVEYYIVENFGTYDPSSDATDLGTVECDGSTYRLGKSTRYNAPSIDGIQTFDQYWSVRQNKRSSGTVQTGCHFDAWARAGLNVNGDHYYQIVATEGYFSSGYARITVADVG

SEQ ID NO: 49647 - protein, 194 aa, Paecilomyces sp.
QTTPNSEGWHDGYYYSWWSDGGAQATYTNLEGGTYEISWGDGGNLVGGKGWNPGLNARAIHFDGTYQPNGNSYLAVYGWTRNPLVEYYIVENFGTYDPSSDATDLGTVECDGSTYRLGKSTRYNAPSIDGIQTFDQYWSVRQNKRSSGTVQTGCHFDAWARAGLNVNGDHYYQIVATEGYFSSGYARITVADVG

SEQ ID NO: 49648 - protein, 194 aa, Paecilomyces sp.
QTTPNSEGWHDGYYYSWWSDGGAQATYTNLEGGTYEISWGDGGNLVGGKGWNPGLNARAIHFDGVYQPNGNSYLAVYGWTRNPLVEYYIVENFGTYDPSSDATDLGTVECDGSTYRLGKSTRYNAPSIDGIQTFDQYWSVRQNKRSSGTVNTGCHFDAWARAGLNVNGDHYYQIVATEGYFSSGYARITVADVG

SEQ ID NO: 49649 - protein, 194 aa, Paecilomyces sp.
QTTPNSEGWHDGYYYSWWSDGGAQATYTNLEGGTYEISWGDGGNLVGGKGWNPGLNARAIHFDGSYQPNGNSYLAVYGWTRNPLVEYYIVENFGTYDPSSDATDLGTVECDGSTYRLGKSTRYNAPSIDGIQTFDQYWSVRQNKRSSGTVQTGCHFDAWARAGLNVNGDHYYQIVATEGYFSSGYARITVADVG

SEQ ID NO: 49650 - protein, 194 aa, Paecilomyces sp
QTTPNSEGWHDGYYYSWWSDGGAQATYTNLEGGTYEISWGDGGNLVGGKGWNPGLNARAIHFDGVYQPNGNSYLAVYGWTRNPLVEYYIVENFGTYDPSSDATDLGTVECDGSTYRLGKSTRYNAPSIDGIQTFMQYWSVRQNKRSSGTVQTGCHFDAWARAGLNVNGDHYYQIVATEGYFSSGYARITVADVG

SEQ ID NO: 49651 - protein, 194 aa, Paecilomyces sp
QTTPNSEGWHDGYYYSWWSDGGAQATYTNLEGGTYEISWGDGGNLVGGKGWNPGLNARAIHFYGVYQPNGNSYLAVYGWTRNPLVEYYIVENFGTYDPSSDFTDLGTVECDGSTYRLGKSTRYNAPSIDGIQTFDQYWSVRQNKRSSGTVQTGCHFDAWARAGLNVNGDHYYQIVATEGYFSSGYARITVADVG

SEQ ID NO: 49652 - protein, 194 aa, Paecilomyces sp
QTTPNSEGWHDGYYYSWWSDGGAQATYTNLEGGTYEISWGDGGNLVGGKGWNPGLNARAIHFDGVYQPNGNSYLAVYGWTRNPLVEYYIVENFGTYDPSSDATDLGTVECDGSTYRLGKSTRYNAPSIDGIQTFDQYWSVRQNKRSSGTVQTGCHFEAWARAGLNVNGDHYYQIVATEGYFSSGYARITVADVG

SEQ ID NO: 49653 - protein, 194 aa, Paecilomyces sp.
QTTPNSEGWHDGYYYSWWSDGGAQATYTNLEGGTYEISWGDGGNLVGGKGWNPGLNARDIHFDGVYQPNGNSYLAVYGWTRNPLVEYYIVENFGTYDPSSDATDLGTVECDGSTYRLGKSTRYNAPSIDGIQTFDQYWSVRQNKRSSGTVQTGCHFDAWARAGLNVNGDHYYQIVATEGYFSSGYARITVADVG

SEQ ID NO: 49654 - protein, 194 aa, Paecilomyces sp
QTTPNSEGWHDGYYYSWWSDGGAQATYTNLEGGTYEISWGDGGNLVGGKGWNPGLNARAIHFDGVYQPNGNSYLSVYGWTRNPLVEYYIVENFGTYDPSSDATDLGTVECDGSTYRLGKSTRYNAPSIDGIQTFDQYWSVRQNKRSSGTVQTGCHFDAWARAGLNVNGDHYYQIVATEGYFSSGYARITVADVG

SEQ ID NO: 49655 - protein, 194 aa, Paecilomyces sp
QTTPNSEGWHDGYYYSWWSDGGAQATYTNLEGGTYEISWGDGGNLVGGKGWNPGLNARAIHFDGVYQPNGNSYLAVYGWTRNPLVEYYIVENFGTYDPSSDATDLGMVECDGSTYRLGKSTRYNAPSIDGIQTFDQYWSVRQNKRSSGTVQTGCHFDAWARAGLNVNGDHYYQIVATEGYFSSGYARITVADVG

SEQ ID NO: 49656 - protein, 194 aa, Paecilomyces sp.
QTTPNSEGWHDGYYYSWWSDGGAQATYTNLEGGTYEISWGDGGNLVGGKGWNPGLNARAINFDGVYQPNGNSYLAVYGWTRNPLVEYYIVENFGTYDPSSDATDLGTVECDGSTYRLGKSTRYNAPSIDGIQTFDQYWSVRQNKRSSGTVQTGCHFDAWARAGLNVNGDHYYQIVATEGYFSSGYARITVADVG

SEQ ID NO: 49657 - protein, 194 aa, Paecilomyces sp.
QTTPNSEGWHDGYYYSWWSDGGAQATYTNLEGGTYEISWGDGGNLVGGKGWNPGLNARTIHFDGVYQPNGNSYLAVYGWTRNPLVEYYIVENFGTYDPSSDATDLGTVECDGSTYRLGKSTRYNAPSIDGIQTFDQYWSVRQNKRSSGTVQTGCHFDAWARAGLNVNGDHYYQIVATEGYFSSGYARITVADVG

SEQ ID NO: 49658 - protein, 194 aa, Paecilomyces sp.
QTTPNSEGWHDGYYYSWWSDGGAQATYTNLEGGTYEISWDDGGNLVGGKGWNPGLNARAIHFDGVYQPNGNSYLAVYGWTRNPLVEYYIVENFGTYDPSSDATDLGTVECDGSTYRLGKSTRYNAPSIDGIQTFDQYWSVRQNKRSSGTVQTGCHFDAWARAGLNVNGDHYYQIVATEGYFSSGYARITVADVG

SEQ ID NO: 49659 - protein, 194 aa, Paecilomyces sp
QTTPNSEGWHDGYYYSWWSDGGAQATYTNLEGGTYEISWGDGGNLVGGKGWNPGLNARAIHFFGVYQPNGNSYLAVYGWTRNPLVEYYIVENFGTYDPSSDFTDLGTVECDGSTYRLGKSTRYNAPSIDGIQTFDQYWSVRQNKRSSGTVQTGCHFDAWARAGLNVNGDHYYQIVATEGYFSSGYARITVADVG

SEQ ID NO: 49660 - protein, 194 aa, Paecilomyces sp.
QTTPNSEGWHDGYYYSWWSDGGAQATYTNLEGGTYEISWGDGGNLVGGKGWNPGLNARAIHFDGVYQPNGNSYLAVYGWTRNPLVEYYIVENFGTYDPSSDATDLGTVECDGSTYRLGKSTRYNAPSIDGIQTFDQYWSVRQNKRSSGTVQTKCHFDAWARAGLNVNGDHYYQIVATEGYFSSGYARITVADVG

SEQ ID NO: 49661 - protein, 194 aa, Paecilomyces sp
QTTPNSEGWHDGYYYSWWSDGGAQATYTNLEGGTYEITWGDGGNLVGGKGWNPGLNARAIHFDGVYQPNGNSYLAVYGWTRNPLVEYYIVENFGTYDPSSDATDLGTVECDGSTYRLGKSTRYNAPSIDGIQTFDQYWSVRQNKRSSGTVQTGCHFDAWARAGLNVNGDHYYQIVATEGYFSSGYARITVADVG

SEQ ID NO: 49662 - protein, 194 aa, Paecilomyces sp.
QTTPNSEGWHDGYYYSWWSDGGAQATYTNLEGGTYEISWGDGGNVVGGKGWNPGLNARAIHFDGVYQPNGNSYLAVYGWTRNPLVEYYIVENFGTYDPSSDATDLGTVECDGSTYRLGKSTRYNAPSIDGIQTFDQYWSVRQNKRSSGTVQTGCHFDAWARAGLNVNGDHYYQIVATEGYFSSGYARITVADVG

SEQ ID NO: 49663 - protein, 194 aa, Paecilomyces sp
QTTPNSEGWHDGYYYSWWSDGGAQATYTNLEGGTYEISWGDGGNLVGGKGWNPGLNARAIHFDGVYQPNGNSYLAVYGWTRNPLVEYYIVENFGTYDPSSDATDLGTVECDGSTYRLGKSTRYNAPSIDGIQTFDQYWSVRQNKRSSGTVQTGCHFDAWARAGLNVGGDHYYQIVATEGYFSSGYARITVADVG

SEQ ID NO: 49664 - protein, 194 aa, Paecilomyces sp
QTTPNSEGWHDGYYYSWWSDGGAQATYTNLEGGTYEISWGDGGNLVGGKGWNPGLNARAIHFDGVYQPNGNSYLAVYGWTRNPLVEYYIVENFGTYDPSSDATDLGTVECDGSTYRLGKSTRYNAPSIDGIQTFDQYWSVRQNKRSSGTVQTGCHFDAWARAGLNVNGDHYYQIVATEGYFSSGYARITVAEVG

SEQ ID NO: 49665 - protein, 194 aa, Paecilomyces sp
QTTPNSEGWHDGYYYSWWSDGGAQATYTNLEGGTYEISWGDGGNLVGGKGWNPGLNARAIHFDGVYQPNGNSYLAVYGWMRNPLVEYYIVENFGTYDPSSDATDLGTVECDGSTYRLGKSTRYNAPSIDGIQTFDQYWSVRQNKRSSGTVQTGCHFDAWARAGLNVNGDHYYQIVATEGYFSSGYARITVADVG

SEQ ID NO: 49666 - protein, 194 aa, Paecilomyces sp
QTTPNSEGWHDGYYYSWWSDGGAQATYTNLEGGTYEISWGDGGNLVGGKGWNPGLNARAIHFDGVYQPNGNSYLAVYGWTRNPLVEYYIVENFGTYDPSSDATDLGTVECDGSTYRLGKSTRYNAPSIDGIQTFDQYWSVRQNKRSSGTVQTGCHFDAWARAGLNVWGDHYYQIVATEGYFSSGYARITVADVG

SEQ ID NO: 49667 - protein, 194 aa, Paecilomyces sp
QTTPNSEGWHDGYYYSWWSDGGAQATYTNLEGGTYEISWGDGGNLVGGKGWNPGLNARHIHFDGVYQPNGNSYLAVYGWTRNPLVEYYIVENFGTYDPSSDATDLGTVECDGSTYRLGKSTRYNAPSIDGIQTFDQYWSVRQNKRSSGTVQTGCHFDAWARAGLNVNGDHYYQIVATEGYFSSGYARITVADVG

SEQ ID NO: 49668 - protein, 194 aa, Paecilomyces sp
QTTPNSEGWHDGYYYSWWSDGGAQATYTNLEGGTYEIVWGDGGNLVGGKGWNPGLNARAIHFDGVYQPNGNSYLAVYGWTRNPLVEYYIVENFGTYDPSSDATDLGTVECDGSTYRLGKSTRYNAPSIDGIQTFDQYWSVRQNKRSSGTVQTGCHFDAWARAGLNVNGDHYYQIVATEGYFSSGYARITVADVG

SEQ ID NO: 49669 - protein, 194 aa, Paecilomyces sp
QTTPNSEGWHDGYYYSWWSDGGAQATYTNLEGGTYEISWGDGGNLVGGKGWNPGLPARAIHFDGVYQPNGNSYLAVYGWTRNPLVEYYIVENFGTYDPSSDATDLGTVECDGSTYRLGKSTRYNAPSIDGIQTFDQYWSVRQNKRSSGTVQTGCHFDAWARAGLNVNGDHYYQIVATEGYFSSGYARITVADVG

SEQ ID NO: 49670 - protein, 194 aa, Paecilomyces sp.
QTTPNSEGWHDGYYYSWWSDGGAQATYTNLEGGTYEISWGDGGNLVGGKGWNPGLNARAIHFDGQYQPNGNSYLAVYGWTRNPLVEYYIVENFGTYDPSSDATDLGTVECDGSTYRLGKSTRYNAPSIDGIQTFDQYWSVRQNKRSSGTVQTGCHFDAWARAGLNVNGDHYYQIVATEGYFSSGYARITVADVG

SEQ ID NO: 49671 - protein, 194 aa, Paecilomyces sp
QTTPNSEGWHDGYYYSWWSDGGAQATYTNLEGGTYEIWWGDGGNLVGGKGWNPGLNARAIHFDGVYQPNGNSYLAVYGWTRNPLVEYYIVENFGTYDPSSDATDLGTVECDGSTYRLGKSTRYNAPSIDGIQTFDQYWSVRQNKRSSGTVQTGCHFDAWARAGLNVNGDHYYQIVATEGYFSSGYARITVADVG

SEQ ID NO: 49672 - protein, 194 aa, Paecilomyces sp
QTTPNSEGWHDGYYYSWWSDGGAQATYTNLEGGTYEISWGDGGNLVGGKGWNPGLNARKIHFDGVYQPNGNSYLAVYGWTRNPLVEYYIVENFGTYDPSSDATDLGTVECDGSTYRLGKSTRYNAPSIDGIQTFDQYWSVRQNKRSSGTVQTGCHFDAWARAGLNVNGDHYYQIVATEGYFSSGYARITVADVG

SEQ ID NO: 49673 - protein, 194 aa, Paecilomyces sp
QTTPNSEGWHDGYYYSWWSDGGAQATYTNLEGGTYEISWGDGGNLVGGKGWNPGLNARAIYFDGVYQPNGNSYLAVYGWTRNPLVEYYIVENFGTYDPSSDATDLGTVECDGSTYRLGKSTRYNAPSIDGIQTFDQYWSVRQNKRSSGTVQTGCHFDAWARAGLNVNGDHYYQIVATEGYFSSGYARITVADVG

SEQ ID NO: 49674 - protein, 194 aa, Paecilomyces sp.
QTTPNSEGWHDGYYYSWWSDGGAQATYTNLEGGTYEISWGDGGNLVGGKGWNPGLNARAIHFDGVYQPNGNSYLAVYGWTRNPLVEYYIVENFGTYDPSSDATDLGTVECDGSTYRLGKSTRYNAPSIDGIQTFDQYWSVRQNKRSSGTVSTGCHFDAWARAGLNVNGDHYYQIVATEGYFSSGYARITVADVG

SEQ ID NO: 49675 - protein, 194 aa, Paecilomyces sp.
QTTPNSEGWHDGYYYSWWSDGGAQATYTNLEGGTYEISWGDGGNLVGGKGWNPGLNARAIHFDGVYQPNGNSYLAVYGWTRNPLVEYYIVENFGTYDPSSDATDLGTVECDGSTYRLGKSTRYNAPSIDGIQTFDQYWSVRQNKRSSGTVQTGCHFDAWKRAGLNVNGDHYYQIVATEGYFSSGYARITVADVG

SEQ ID NO: 49676 - protein, 194 aa, Paecilomyces sp
QTTPNSEGWHDGYYYSWWSDGGAQATYTNLEGGTYEISWGDGGNLVGGKGWNPGLIARAIHFDGVYQPNGNSYLAVYGWTRNPLVEYYIVENFGTYDPSSDATDLGTVECDGSTYRLGKSTRYNAPSIDGIQTFDQYWSVRQNKRSSGTVQTGCHFDAWARAGLNVNGDHYYQIVATEGYFSSGYARITVADVG

SEQ ID NO: 49677 - protein, 194 aa, Paecilomyces sp.
QTTPNSEGWHDGYYYSWWSDGGAQATYTNLEGGTYEISWGDGGNLVGGKGWNPGLNERAIHFDGVYQPNGNSYLAVYGWTRNPLVEYYIVENFGTYDPSSDATDLGTVECDGSTYRLGKSTRYNAPSIDGIQTFDQYWSVRQNKRSSGTVQTGCHFDAWARAGLNVNGDHYYQIVATEGYFSSGYARITVADVG

SEQ ID NO: 49678 - protein, 194 aa, Paecilomyces sp.
QTTPNSEGWHDGYYYSWWSDGGAQATYTNLEGGTYEISWGDGGNLVGGKGWNPGLNARAIHFDGVYQPNGNSYLAVYGWTRNPLVEYYIVENFGTYDPSSDATFLGTVECDGSTYRLGKSTRYNAPSIDGIQTFDQYWSVRQNKRSSGTVQTGCHFDAWARAGLNVNGDHYYQIVATEGYFSSGYARITVADVG

SEQ ID NO: 49679 - protein, 194 aa, Paecilomyces sp
QTTPNSEGWHDGYYYSWWSDGGAQATYTNLEGGTYEISWKDGGNLVGGKGWNPGLNARAIHFDGVYQPNGNSYLAVYGWTRNPLVEYYIVENFGTYDPSSDATDLGTVECDGSTYRLGKSTRYNAPSIDGIQTFDQYWSVRQNKRSSGTVQTGCHFDAWARAGLNVNGDHYYQIVATEGYFSSGYARITVADVG

SEQ ID NO: 49680 - protein, 194 aa, Paecilomyces sp
QTTPNSEGWHDGYYYSWWSDGGAQATYTNLEGGTYEISWFDGGNLVGGKGWNPGLNARAIHFDGVYQPNGNSYLAVYGWTRNPLVEYYIVENFGTYDPSSDATDLGTVECDGSTYRLGKSTRYNAPSIDGIQTFDQYWSVRQNKRSSGTVQTGCHFDAWARAGLNVNGDHYYQIVATEGYFSSGYARITVADVG

SEQ ID NO: 49681 - protein, 206 aa, Thermomyces dupontii
FPTGNTTELEKRQTTPNSEGWHDGYYYSWWSDGGAQATYTNLEGGTYEISWGDGGNLVGGKGWNPGLNARAIHFDGVYQPNGNSYLAVYGWTRNPLVEYYIVENFGTYDPSSDATDLGTVECDGSTYRLGKSTRYNAPSIDGIQTFDQYWSVRQNKRSSGTVQTGCHFDAWARAGLNVNGDHYYQIVATEGYFSSGYARITVADVG

SEQ ID NO: 49682 - protein, 144 aa, Chimeric
MQTSITLTSNASGTFDGYYYELWKDTGNTTMTVYTQGRFSCQWSNINNALFRTGKKYNQNWQSLGTIRITYSATYNPNGNSYLCIYGWSTNPLVEFYIVESWGNWRPPGATSLGQVTIDGGTYDIYRTTRVNQPCLAEGSLVLD

SEQ ID NO: 49683 - protein, 143 aa, Dictyoglomus thermophilum
QTSITLTSNASGTFDGYYYELWKDTGNTTMTVYTQGRFSCQWSNINNALFRTGKKYNQNWQSLGTIRITYSATYNPNGNSYLCIYGWSTNPLVEFYIVESWGNWRPPGATSLGQVTIDGGTYDIYRTTRVNQPCLAEGSLVLD

SEQ ID NO: 49684 - protein, 123 aa, Dictyoglomus thermophilum
MQTSITLTSNASGTFDGYYYELWKDTGNTTMTVYTQGRFSCQWSNINNALFRTGKKYNQNWQSLGTIRITYSATYNPNGNSYLCIYGWSTNPLVEFYIVESWGNWRPPGACFDPETEVVTVDG

SEQ ID NO: 49685 - protein, 122 aa, Dictyoglomus thermophilum
MQTSITLTSNASGTFDGYYYELWKDTGNTTMTVYTQGRFSCQWSNINNALFRTGKKYNQNWQSLGTIRITYSATYNPNGNSYLCIYGWSTNPLVEFYIVESWGNWRPPGACVDGDTTVLLDG

SEQ ID NO: 49686 - protein, 118 aa, Dictyoglomus thermophilum
MQTSITLTSNASGTFDGYYYELWKDTGNTTMTVYTQGRFSCQWSNINNALFRTGKKYNQNWQSLGTIRITYSATYNPNGNSYLCIYGWSTNPLVEFYIVESWGNWRPPGACVVGETRI

SEQ ID NO: 49687 - protein, 118 aa, Dictyoglomus thermophilum
MQTSITLTSNASGTFDGYYYELWKDTGNTTMTVYTQGRFSCQWSNINNALFRTGKKYNQNWQSLGTIRITYSATYNPNGNSYLCIYGWSTNPLVEFYIVESWGNWRPPGACFDGKTKI

SEQ ID NO: 49688 - protein, 118 aa, Dictyoglomus thermophilum
MQTSITLTSNASGTFDGYYYELWKDTGNTTMTVYTQGRFSCQWSNINNALFRTGKKYNQNWQSLGTIRITYSATYNPNGNSYLCIYGWSTNPLVEFYIVESWGNWRPPGACVAGDTKI

SEQ ID NO: 49689 - protein, 118 aa, Dictyoglomus thermophilum
MQTSITLTSNASGTFDGYYYELWKDTGNTTMTVYTQGRFSCQWSNINNALFRTGKKYNQNWQSLGTIRITYSATYNPNGNSYLCIYGWSTNPLVEFYIVESWGNWRPPGACFTGDTRI

SEQ ID NO: 49690 - protein, 118 aa, Dictyoglomus thermophilum
MQTSITLTSNASGTFDGYYYELWKDTGNTTMTVYTQGRFSCQWSNINNALFRTGKKYNQNWQSLGTIRITYSATYNPNGNSYLCIYGWSTNPLVEFYIVESWGNWRPPGACFSGDTEI

SEQ ID NO: 49691 - protein, 118 aa, Dictyoglomus thermophilum
MQTSITLTSNASGTFDGYYYELWKDTGNTTMTVYTQGRFSCQWSNINNALFRTGKKYNQNWQSLGTIRITYSATYNPNGNSYLCIYGWSTNPLVEFYIVESWGNWRPPGACLTGDAKI

SEQ ID NO: 49692 - protein, 118 aa, Dictyoglomus thermophilum
MQTSITLTSNASGTFDGYYYELWKDTGNTTMTVYTQGRFSCQWSNINNALFRTGKKYNQNWQSLGTIRITYSATYNPNGNSYLCIYGWSTNPLVEFYIVESWGNWRPPGACVTGDTLI

SEQ ID NO: 49693 - protein, 118 aa, Dictyoglomus thermophilum
MQTSITLTSNASGTFDGYYYELWKDTGNTTMTVYTQGRFSCQWSNINNALFRTGKKYNQNWQSLGTIRITYSATYNPNGNSYLCIYGWSTNPLVEFYIVESWGNWRPPGACIDGNAKI

SEQ ID NO: 49694 - protein, 118 aa, Dictyoglomus thermophilum
MQTSITLTSNASGTFDGYYYELWKDTGNTTMTVYTQGRFSCQWSNINNALFRTGKKYNQNWQSLGTIRITYSATYNPNGNSYLCIYGWSTNPLVEFYIVESWGNWRPPGACISGDSLI

SEQ ID NO: 49695 - protein, 118 aa, Dictyoglomus thermophilum
MQTSITLTSNASGTFDGYYYELWKDTGNTTMTVYTQGRFSCQWSNINNALFRTGKKYNQNWQSLGTIRITYSATYNPNGNSYLCIYGWSTNPLVEFYIVESWGNWRPPGACIEGDAKI

SEQ ID NO: 49696 - protein, 118 aa, Dictyoglomus thermophilum
MQTSITLTSNASGTFDGYYYELWKDTGNTTMTVYTQGRFSCQWSNINNALFRTGKKYNQNWQSLGTIRITYSATYNPNGNSYLCIYGWSTNPLVEFYIVESWGNWRPPGACFSGEEVI

SEQ ID NO: 49697 - protein, 118 aa, Dictyoglomus thermophilum
MQTSITLTSNASGTFDGYYYELWKDTGNTTMTVYTQGRFSCQWSNINNALFRTGKKYNQNWQSLGTIRITYSATYNPNGNSYLCIYGWSTNPLVEFYIVESWGNWRPPGACLAGDTLI

SEQ ID NO: 49698 - protein, 118 aa, Dictyoglomus thermophilum
MQTSITLTSNASGTFDGYYYELWKDTGNTTMTVYTQGRFSCQWSNINNALFRTGKKYNQNWQSLGTIRITYSATYNPNGNSYLCIYGWSTNPLVEFYIVESWGNWRPPGACFSGEETV

SEQ ID NO: 49699 - protein, 118 aa, Dictyoglomus thermophilum
MQTSITLTSNASGTFDGYYYELWKDTGNTTMTVYTQGRFSCQWSNINNALFRTGKKYNQNWQSLGTIRITYSATYNPNGNSYLCIYGWSTNPLVEFYIVESWGNWRPPGACFVGSTRI

SEQ ID NO: 49700 - protein, 194 aa, Paecilomyces sp
QTTPNSEGWHDGYYYSWWSDGGAQATYTNLEGGCYEISWGDGGNLVGGKGWNPGLNARAIHFDGVYQPNGNSYLAVYGWTRNPLVEYYIVENFGTYDPSSDATDLGTVECDGSTYRLGKSTRYNAPSIDGIQTFDQYWSVRQNKRSSGTVQTGCHFDAWARAGLNVNGDHYYQIVATEGYFSSGYARICVADVG

SEQ ID NO: 49701 - protein, 194 aa, Paecilomyces sp
QTTPNSEGWHDGYYYSWWSDGGAQATYTNLEGGTYEISWGDGGNLVGGKGWNPGLNARAIHFDGVYQPNGNSYLAVYGWTRNPLVEYYIVENFGTYDPSSDATDLGTVECDGSTYRLGKSTRYNAPSIDGIQTFDQYWSVRQNKRSSGTVQTGCHFDAWARAGLNVNGDHYYQIVACEGYFSSGYCRITVADVG

SEQ ID NO: 49702 - protein, 155 aa, Pyrococcus sp. GB-D
NFLAGFGFLYAHNSLGTIRITYSATYNPNGNSYLCIYGWSTNPLVEFYIVESWGNWRPPGATSLGQVTIDGGTYDIYRTTRVNQPSIVGTATFDQYWSVRTSKRTSGTVTVTDHFRAWANRGLNLGTIDQITLCVEGYQSSGSANITQNTFSQGS

SEQ ID NO: 49703 - protein, 149 aa, Dictyoglomus thermophilum
MQTSITLTSNASGTFDGYYYELWKDTGNTTMTVYTQGRFSCQWSNINNALFRTGKKYNQNWQSLGTIRITYSATYNPNGNSYLCIYGWSTNPLVEFYIVESWGNWRPPGATSLGQVTIDGGTYDIYRTTRVNQPCLAPGTRVLTEHGYW

SEQ ID NO: 49704 - protein, 144 aa, Dictyoglomus thermophilum
MQTSITLTSNASGTFDGYYYELWKDTGNTTMTVYTQGRFSCQWSNINNALFRTGKKYNQNWQSLGTIRITYSATYNPNGNSYLCIYGWSTNPLVEFYIVESWGNWRPPGATSLGQVTIDGGTYDIYRTTRVNQPCLAYDAEIVQ

SEQ ID NO: 49705 - protein, 143 aa, Thermus thermophilus
QTSITLTSNASGTFDGYNYELWKDTGNTTMTVYTQGRFSCQWSNINNALFRTGKKYNQNWQSLGTIRITYSATYNPNGNSYLCIYGWSTNPLVEFYIVESWGNWRPPGATSLGQVTIDGGTYDIYRTTRVNQPCLAEGSLVLD

SEQ ID NO: 49706 - protein, 143 aa, Dictyoglomus thermophilum
QTSITLTSNASGTFDGYYYELWKDTGNTTMTVYTQGRFSCQWSNINNALFRTGKKYNQNWQSLGTIRITYSATYNPNGNSYLCIYGWSTNPLVEFYIVESWGNWRPPGATSLGQVTIDGGTYDIYRTTRVNQACLAEGSLVLD

SEQ ID NO: 49707 - protein, 143 aa, Dictyoglomus thermophilum
QTSITLTSNASGKFDGYYYELWKDTGNTTMTVYTQGRFSCQWSNINNALFRTGKKYNQNWQSLGTIRITYSATYNPNGNSYLCIYGWSTNPLVEFYIVESWGNWRPPGATSLGQVTIDGGTYDIYRTTRVNQPCLAEGSLVLD

SEQ ID NO: 49708 - protein, 143 aa, Thermus thermophilus HB27
QTSITLTSNASGTFDGYYYELWKDTGNTTMTVYTQGRFSCQWSNINNALFRTGKKYNQNWQSLGTIRITYSATYNPNGNSYLCIYGWSTNPLVEFYIIESWGNWRPPGATSLGQVTIDGGTYDIYRTTRVNQPCLAEGSLVLD

SEQ ID NO: 49709 - protein, 225 aa, Thermomyces lanuginosus
MVGFTPVALAALAATGALAFPAGNATELEKRQTTPNSEGWHDGYYYSWWSDGGAQATYTNLEGGTYEITWGDGGNLVGGKGWNPGLNNRAIHFEGVYQPNGNSYLAVYGWTRNPLVEYYIVENYGTYNPSSGATKLGTVECDGSTYDLGKTTRVNQPSIEGTQTFDQYWSVRQDKRTSGTVTTGCHFDAWRRAGMNVGGDHYYQIVATEGYFSSGYARITVADVG

SEQ ID NO: 49710 - protein, 225 aa, Thermomyces lanuginosus
MVGFTPVALAALAATGALAFPAGNATELEKRQTTPNSEGWHDGYYYSWWSDGGAQATYTNLEGGTYEIEWGDGGNLVGGKGWNPGLNNRAIHFEGVYQPNGNSYLAVYGWTRNPLVEYYIVENYGTYNPSSGATKLGTVECDGSTYDLGKTTRVNQPSIEGTQTFDQYWSVRQDKRTSGTVNTGCHFDAWRRAGMNVGGDHYYQIVATEGYFSSGYARITVADVG

SEQ ID NO: 49711 - protein, 206 aa, Thermomyces dupontii
FPTGNTTELEKRQTTPNSEGWHDGYYYSWWSDGGAQACYTNLEGGTYEICWGDGGNLVGGKGWNPGLNARAIHFDGVYQPNGNSYLAVYGWTRNPLVEYYIVENFGTYDPSSDATDLGTVECDGSTYRLGKSTRYNAPSIDGIQTFDQYWSVRQNKRSSGTVQTGCHFDAWARAGLNVNGDHYYQIVATEGYFSSGYARITVADVG

SEQ ID NO: 49712 - protein, 206 aa, Thermomyces dupontii
FPTGNTTELEKRQTTPNSEGWHDGYYYSWWSDGGAQATYTNLEGGTYEISWGDGGNLVGGKGWNPGLNARAIHFDGVYQPNGNSYLAVYGWTRNPLVEYYIVENFGTYDPSSDATDLGTVESDGSTYRLGKSTRYNAPSIDGIQTFDQYWSVRQNKRSSGTVQTGSHFDAWARAGLNVNGDHYYQIVATEGYFSSGYARITVADVG

SEQ ID NO: 49713 - protein, 119 aa, Dictyoglomus thermophilum
MQTSITLTSNASGTFDGYYYELWKDTGNTTMTVYTQGRFSCQWSNINNALFRTGKKYNQNWQSLGTIRITYSATYNPNGNSYLCIYGWSTNPLVEFYIVESWGNWRPPGACFHGDTLIE

SEQ ID NO: 49714 - protein, 118 aa, Dictyoglomus thermophilum
MQTSITLTSNASGTFDGYYYELWKDTGNTTMTVYTQGRFSCQWSNINNALFRTGKKYNQNWQSLGTIRITYSATYNPNGNSYLCIYGWSTNPLVEFYIVESWGNWRPPGACLTADSTV

SEQ ID NO: 49715 - protein, 118 aa, Dictyoglomus thermophilum
MQTSITLTSNASGTFDGYYYELWKDTGNTTMTVYTQGRFSCQWSNINNALFRTGKKYNQNWQSLGTIRITYSATYNPNGNSYLCIYGWSTNPLVEFYIVESWGNWRPPGACVTGDTLV

SEQ ID NO: 49716 - protein, 118 aa, Dictyoglomus thermophilum
MQTSITLTSNASGTFDGYYYELWKDTGNTTMTVYTQGRFSCQWSNINNALFRTGKKYNQNWQSLGTIRITYSATYNPNGNSYLCIYGWSTNPLVEFYIVESWGNWRPPGACVDGDTSV

SEQ ID NO: 49717 - protein, 118 aa, Dictyoglomus thermophilum
MQTSITLTSNASGTFDGYYYELWKDTGNTTMTVYTQGRFSCQWSNINNALFRTGKKYNQNWQSLGTIRITYSATYNPNGNSYLCIYGWSTNPLVEFYIVESWGNWRPPGACFSGDTLV

SEQ ID NO: 49718 - protein, 118 aa, Dictyoglomus thermophilum
MQTSITLTSNASGTFDGYYYELWKDTGNTTMTVYTQGRFSCQWSNINNALFRTGKKYNQNWQSLGTIRITYSATYNPNGNSYLCIYGWSTNPLVEFYIVESWGNWRPPGACLTSDHTV

SEQ ID NO: 49719 - protein, 118 aa, Dictyoglomus thermophilum
MQTSITLTSNASGTFDGYYYELWKDTGNTTMTVYTQGRFSCQWSNINNALFRTGKKYNQNWQSLGTIRITYSATYNPNGNSYLCIYGWSTNPLVEFYIVESWGNWRPPGACVTGDTKV

SEQ ID NO: 49720 - protein, 118 aa, Dictyoglomus thermophilum
MQTSITLTSNASGTFDGYYYELWKDTGNTTMTVYTQGRFSCQWSNINNALFRTGKKYNQNWQSLGTIRITYSATYNPNGNSYLCIYGWSTNPLVEFYIVESWGNWRPPGACVSGDTLL

SEQ ID NO: 49721 - protein, 118 aa, Dictyoglomus thermophilum
MQTSITLTSNASGTFDGYYYELWKDTGNTTMTVYTQGRFSCQWSNINNALFRTGKKYNQNWQSLGTIRITYSATYNPNGNSYLCIYGWSTNPLVEFYIVESWGNWRPPGACVDGDTLV

SEQ ID NO: 49722 - protein, 118 aa, Dictyoglomus thermophilum
MQTSITLTSNASGTFDGYYYELWKDTGNTTMTVYTQGRFSCQWSNINNALFRTGKKYNQNWQSLGTIRITYSATYNPNGNSYLCIYGWSTNPLVEFYIVESWGNWRPPGASIPGDEVV

SEQ ID NO: 49723 - protein, 118 aa, Dictyoglomus thermophilum
MQTSITLTSNASGTFDGYYYELWKDTGNTTMTVYTQGRFSCQWSNINNALFRTGKKYNQNWQSLGTIRITYSATYNPNGNSYLCIYGWSTNPLVEFYIVESWGNWRPPGACLTGDAKV

SEQ ID NO: 49724 - protein, 149 aa, Dictyoglomus thermophilum
MQTSITLTSNASGTFDGYYYELWKDTGNTTMTVYTQGRFSCQWSNINNALFRTGKKYNQNWQSLGTIRITYSATYNPNGNSYLCIYGWSTNPLVEFYIVESWGNWRPPGATSLGQVTIDGGTYDIYRTTRVNQPCLAPGSKVLTEHGYW

SEQ ID NO: 49725 - protein, 149 aa, Dictyoglomus thermophilum
MQTSITLTSNASGTFDGYYYELWKDTGNTTMTVYTQGRFSCQWSNINNALFRTGKKYNQNWQSLGTIRITYSATYNPNGNSYLCIYGWSTNPLVEFYIVESWGNWRPPGATSLGQVTIDGGTYDIYRTTRVNQPCLTSNSKILTDDGYY

SEQ ID NO: 49726 - protein, 194 aa, Paecilomyces sp
QTTPNSEGWHDGYYYSWWSDGGAQATYTNLEGGCYEISWGDGGNLVGGKGWNPGLNARAIHFDGVYQPNGNSYLAVYGWTRNPLVEYYIVENFGTYDPSSDATDLGTVECDGSTYRLGKSTRYNAPSIDGIQTFDQYWSVRQNKRSSGTVQTGCHFDAWARAGLNVNGDHYYQIVACEGYFSSGYCRICVADVG

SEQ ID NO: 49727 - protein, 146 aa, Dictyoglomus thermophilum
MQTSITLTSNASGTFDGYYYELWKDTGNTTMTVYTQGRFSCQWSNINNALFRTGKKYNQNWQSLGTIRITYSATYNPNGNSYLCIYGWSTNPLVEFYIVESWGNWRPPGATSLGQVTIDGGTYDIYRTTRVNQPCLAPGTKILTEH

SEQ ID NO: 49728 - protein, 145 aa, Dictyoglomus thermophilum
MQTSITLTSNASGTFDGYYYELWKDTGNTTMTVYTQGRFSCQWSNINNALFRTGKKYNQNWQSLGTIRITYSATYNPNGNSYLCIYGWSTNPLVEFYIVESWGNWRPPGATSLGQVTIDGGTYDIYRTTRVNQPCFHGDTLIEIY

SEQ ID NO: 49729 - protein, 225 aa, Paecilomyces sp
MIGITSFALAALAATGALAFPTGNTTELEKRQTTPNSEGWHDGYYYSWWSDGGAQATYTNLEGGTYEISWGDGGNLVGGKGWNPGLNARAIHFDGVYQPNGNSYLAVYGWTRNPLVEYYIVENFGTYDPSSDATDLGTVECDGSTYRLGKSTRYNAPSIDGIQTFDQYWSVRQNKRSSGTVQTGCHFDAWARAGLNVNGDHYYQIVATEGYFSSGYARITVADVG

SEQ ID NO: 49730 - protein, 144 aa, Dictyoglomus thermophilum
MQTSITLTSNASGTFDGYNYELWKDTGNTTMTVYTQGRFSCQWSNINNALFRTGKKYNQNWQSLGTIRITYSATYNPNGNSYMCIYGWSTNPLVEFYIVESWGNWRPPGATSLGQVTIDGGTYDIYRTTRVNQPCLAEGSLVLD

SEQ ID NO: 49731 - protein, 143 aa, unidentified
QTSITLTSNASGTFDGYNYELWKDTGNTTMTVYTQGRFSCQWSNINNALFRTGKKYNQNWQSLGTIRITYSATYNPNGNSYMCIYGWSTNPLVEFYIVESWGNWRPPGATSLGQVTIDGGTYDIYRTTRVNQPCLAEGSLVLD

SEQ ID NO: 49732 - protein, 129 aa, Dictyoglomus thermophilum
MQTSITLTSNASGTFDGYYYELWKDTGNTTMTVYTQGRFSCQWSNINNALFRTGKKYNQNWQSLGTIRITYSATYNPNGNSYLCIYGWSTNPLVEFYIVESWGNWRPPGASVTGDRPVVVRDPGGTVRI

SEQ ID NO: 49733 - protein, 125 aa, Dictyoglomus thermophilum
MQTSITLTSNASGTFDGYYYELWKDTGNTTMTVYTQGRFSCQWSNINNALFRTGKKYNQNWQSLGTIRITYSATYNPNGNSYLCIYGWSTNPLVEFYIVESWGNWRPPGACLTSNSKILTDDGYY

SEQ ID NO: 49734 - protein, 123 aa, Dictyoglomus thermophilum
MQTSITLTSNASGTFDGYYYELWKDTGNTTMTVYTQGRFSCQWSNINNALFRTGKKYNQNWQSLGTIRITYSATYNPNGNSYLCIYGWSTNPLVEFYIVESWGNWRPPGACFAGDTEITVSDG

SEQ ID NO: 49735 - protein, 123 aa, Dictyoglomus thermophilum
MQTSITLTSNASGTFDGYYYELWKDTGNTTMTVYTQGRFSCQWSNINNALFRTGKKYNQNWQSLGTIRITYSATYNPNGNSYLCIYGWSTNPLVEFYIVESWGNWRPPGAAGVLSSKIKIPGG

SEQ ID NO: 49736 - protein, 225 aa, Paecilomyces sp
VIGITSFALAALAATGALAFPTGNTTELEKRQTTPNSEGWHDGYYYSWWSDGGAQATYTNLEGGTYEISWGDGGNLVGGKGWNPGLNARAIHFDGVYQPNGNSYLAVYGWTRNPLVEYYIVENFGTYDPSSDATDLGTVECDGSTYRLGKSTRYNAPSIDGIQTFDQYWSVRQNKRSSGTVQTGCHFDAWARAGLNVNGDHYYQIVATEGYFSSGYARITVADVG

SEQ ID NO: 49737 - protein, 194 aa, Paecilomyces sp
QTTPNSEGWHDGYYYSWWSDGGAQATYTNLEGGCYEISWGDGGNLVGGKGWNPGLNARAIHFYGVYQPNGNSYLAVYGWTRNPLVEYYIVENFGTYDPSSDFTDLGTVECDGSTYRLGKSTRYNAPSIDGIQTFDQYWSVRQNKRSSGTVQTGCHFDAWARAGLNVNGDHYYQIVACEGYFSSGYCRICVADVG

SEQ ID NO: 49738 - protein, 194 aa, Paecilomyces sp
QTTPNSEGWHDGYYYSWWSDGGAQATYTNLEGGCYEISWGDGGNLVGGKGWNPGLNARAIHFFGVYQPNGNSYLAVYGWTRNPLVEYYIVENFGTYDPSSDFTDLGTVECDGSTYRLGKSTRYNAPSIDGIQTFDQYWSVRQNKRSSGTVQTGCHFDAWARAGLNVNGDHYYQIVACEGYFSSGYCRICVADVG

SEQ ID NO: 49739 - protein, 194 aa, Paecilomyces sp
QTTPNSEGWHDGYYYSWWSDGGAQATYTNLEGGCYEISWGDGGNLVGGKGWNPGLNARAIHFDGVYQPNGNSYLAVYGWTRNPLVEYYIVENFGTYDPSSDFTDLGTVECDGSTYRLGKSTRYNAPSIDGIQTFDQYWSVRQNKRSSGTVQTGCHFDAWARAGLNVNGDHYYQIVACEGYFSSGYCRICVADVG

SEQ ID NO: 49740 - protein, 150 aa, Dictyoglomus thermophilum
MQTSITLTSNASGTFDGYYYELWKDTGNTTMTVYTQGRFSCQWSNINNALFRTGKKYNQNWQSLGTIRITYSATYNPNGNSYLCIYGWSTNPLVEFYIVESWGNWRPPGATSLGQVTIDGGTYDIYRTTRVNQPCLSGETAVMTVEYGAI

SEQ ID NO: 49741 - protein, 206 aa, Thermomyces dupontii
FPTGNTTELEKRQTTPNSEGWHDGYYYSWWSDGGAQACYTNLEGGTYEICWGDGGNLVGGKGWNPGLNARAIHFDGVYQPNGNSYLAVYGWTRNPLVEYYIVENFGTYDPSSDATDLGTVESDGSTYRLGKSTRYNAPSIDGIQTFDQYWSVRQNKRSSGTVQTGSHFDAWARAGLNVNGDHYYQIVATEGYFSSGYARITVADVG

SEQ ID NO: 49742 - protein, 128 aa, Dictyoglomus thermophilum
MQTSITLTSNASGTFDGYYYELWKDTGNTTMTVYTQGRFSCQWSNINNALFRTGKKYNQNWQSLGTIRITYSATYNPNGNSYLCIYGWSTNPLVEFYIVESWGNWRPPGACFIGDTLIPLADGKSYRI

SEQ ID NO: 49743 - protein, 123 aa, Dictyoglomus thermophilum
MQTSITLTSNASGTFDGYYYELWKDTGNTTMTVYTQGRFSCQWSNINNALFRTGKKYNQNWQSLGTIRITYSATYNPNGNSYLCIYGWSTNPLVEFYIVESWGNWRPPGACLAEGSLVLDAAT

SEQ ID NO: 49744 - protein, 150 aa, Dictyoglomus thermophilum
MQTSITLTSNASGTFDGYYYELWKDTGNTTMTVYTQGRFSCQWSNINNALFRTGKKYNQNWQSLGTIRITYSATYNPNGNSYLCIYGWSTNPLVEFYIVESWGNWRPPGATSLGQVTIDGGTYDIYRTTRVNQPCFAKGTEVMMHDGSVK

SEQ ID NO: 49745 - protein, 149 aa, Dictyoglomus thermophilum
MQTSITLTSNASGTFDGYYYELWKDTGNTTMTVYTQGRFSCQWSNINNALFRTGKKYNQNWQSLGTIRITYSATYNPNGNSYLCIYGWSTNPLVEFYIVESWGNWRPPGATSLGQVTIDGGTYDIYRTTRVNQPCLGKGTPVMMYDGRT

SEQ ID NO: 49746 - protein, 122 aa, Thermus thermophilus HB27
QTSITLTSNASGTFDGYYYELWKDTGNTTMTVYTQGRFSCQWSNINNALFRTGKKYNQNWQSLGTIRITYSATYNPNGNSYLCIYGWSTNPLVEFYIVESWGNWRPPGACLAEGSLVLDAAT

SEQ ID NO: 49747 - protein, 122 aa, Dictyoglomus thermophilum
QTSITLTSNASGTFDGYYYELWKDTGNTTMTVYTQGRFSCQWSNINNALFRTGKKYNQNWQSLGTIRITYSATYNPNGNSYLCIYGWSTNPLVEFYIVESWGNWRPPGACLAEGSLVSDAAT

SEQ ID NO: 49748 - protein, 120 aa, Dictyoglomus thermophilum
MQTSITLTSNASGTFDGYYYELWKDTGNTTMTVYTQGRFSCQWSNINNALFRTGKKYNQNWQSLGTIRITYSATYNPNGNSYLCIYGWSTNPLVEFYIVESWGNWRPPGACFPAGTVVSG

SEQ ID NO: 49749 - protein, 380 aa, Neosartorya
AGLNTAAKAKGLKYFGSATDNPELTDTAYVAQLSNTDDFGQITPGNSMKWDATEPSQNSFSFANGDAIVNLANKNGQMMRCHTLVWHSQLPNWVSSGSWTNATLLAAMKNHITNVVTHYKGKCYAWDVVNEALNEDGTFRNSIFYQTIGEAYIPIAFATAAAADPSVKLYYNDYNIEYSGAKATAAQNIVKMIKAYGAKIDGVGLQGHFILGSTPSQSALTSVLEGYTALGVEVAYTELDIRMQLPSTDAKLAQQATEYQNVAAACVGTTGCVGVTIWDWTDKYSWVPSVFSGYGAALPWDENYVKKPAYNGILAGLGASGSTMTTTLTTTTKTSTTTTATSTGVAQKWGQCGGIGWTGPTTCVSGTTCQKLNDWYSQCL

SEQ ID NO: 49750 - protein, 225 aa, Malbranchea cinnamomea
MVGFTSFALAALAATGALARPTENTTELEKRQTTPNSEGWHDGYYYSWWSDGGAQATYTNLQGGTYEISWGNGGNLVGGKGWNPGLNARAIQYSGVYQPNGNSYLAVYGWTRNPLVEYYIVENFGTYDPSSGATDLGTVNCDGSTYRLGKSTRVNAPSIDGIQTFDQYWSVRQNKRSSGTVQTGCHFDAWARAGLNVNGNHYYQIVATEGYFSSGYARITVADVG

SEQ ID NO: 49751 - protein, 128 aa, Dictyoglomus thermophilum
MQTSITLTSNASGTFDGYYYELWKDTGNTTMTVYTQGRFSCQWSNINNALFRTGKKYNQNWQSLGTIRITYSATYNPNGNSYLCIYGWSTNPLVEFYIVESWGNWRPPGASYHPRSEVLLADGQRIDI

SEQ ID NO: 49752 - protein, 126 aa, Dictyoglomus thermophilum
MQTSITLTSNASGTFDGYYYELWKDTGNTTMTVYTQGRFSCQWSNINNALFRTGKKYNQNWQSLGTIRITYSATYNPNGNSYLCIYGWSTNPLVEFYIVESWGNWRPPGACMHYDTLVTLADGTQE

SEQ ID NO: 49753 - protein, 122 aa, Dictyoglomus thermophilum
QTSITLTSNASGTFDGYYYELWKDTGNTTMTVYTQGRFSCQWSNINNALFRTGKKYNQNWQSLGTIRITYSATYNPNGNSYLCIYGWSTNPLVEFYIVESWGNWRPPGACLAEGSLVLGAAT

SEQ ID NO: 49754 - protein, 122 aa, Dictyoglomus thermophilum
QTSITLTSNASGTFDGYYYELWKDTGNTTMTVYTQGHFSCQWSNINNALFRTGKKYNQNWQSLGTIRITYSATYNPNGNSYLCIYGWSTNPLVEFYIVESWGNWRPPGACLAEGSLVLDAAT

SEQ ID NO: 49755 - protein, 127 aa, Dictyoglomus thermophilum
MQTSITLTSNASGTFDGYYYELWKDTGNTTMTVYTQGRFSCQWSNINNALFRTGKKYNQNWQSLGTIRITYSATYNPNGNSYLCIYGWSTNPLVEFYIVESWGNWRPPGACVAPDTLINTDNGRVEI

SEQ ID NO: 49756 - protein, 127 aa, Dictyoglomus thermophilum
MQTSITLTSNASGTFDGYYYELWKDTGNTTMTVYTQGRFSCQWSNINNALFRTGKKYNQNWQSLGTIRITYSATYNPNGNSYLCIYGWSTNPLVEFYIVESWGNWRPPGACLTGDTKVIVNGEIREI

SEQ ID NO: 49757 - protein, 127 aa, Dictyoglomus thermophilum
MQTSITLTSNASGTFDGYYYELWKDTGNTTMTVYTQGRFSCQWSNINNALFRTGKKYNQNWQSLGTIRITYSATYNPNGNSYLCIYGWSTNPLVEFYIVESWGNWRPPGACVAPETLIITENGTKEI

SEQ ID NO: 49758 - protein, 130 aa, Dictyoglomus thermophilum
MQTSITLTSNASGTFDGYYYELWKDTGNTTMTVYTQGRFSCQWSNINNALFRTGKKYNQNWQSLGTIRITYSATYNPNGNSYLCIYGWSTNPLVEFYIVESWGNWRPPGACLSGETAVMTVEYGAIPIRR

SEQ ID NO: 49759 - protein, 127 aa, Dictyoglomus thermophilum
MQTSITLTSNASGTFDGYYYELWKDTGNTTMTVYTQGRFSCQWSNINNALFRTGKKYNQNWQSLGTIRITYSATYNPNGNSYLCIYGWSTNPLVEFYIVESWGNWRPPGACLTGDTKVIANGQLFEL

SEQ ID NO: 49760 - protein, 200 aa, Bacteria
QTSITLTSNASGTYDGYYYELWKDSGNTTMTVDTGGRFSCQWSNINNALFRTGKKFNTAWNQLGTVKITYSATYNPNGNSYLCIYGWSKNPLVEFYIVESWGSWRPPGATSLGTVTIDGGTYDIYKTTRVNQPSIEGTTTFDQYWSVRTSKRTSGTVTVTDHFKAWAAKGLNLGTIDQITLCVEGYQSSGSANITQNTFS

SEQ ID NO: 49761 - protein, 192 aa, Dictyoglomus thermophilum
YDGYVYDLSVDEDENFLAGFGFLYAHNSCQWSNINNALFRTGKKYNQNWQSLGTIRITYSATYNPNGNSYLCIYGWSTNPLVEFYIVESWGNWRPPGATSLGQVTIDGGTYDIYRTTRVNQPSIVGTATFDQYWSVRTSKRTSGTVTVTDHFRAWANRGLNLGTIDQITLCVEGYQSSGSANITQNTFSQGS

SEQ ID NO: 49762 - protein, 131 aa, Dictyoglomus thermophilum
MQTSITLTSNASGTFDGYYYELWKDTGNTTMTVYTQGRFSCQWSNINNALFRTGKKYNQNWQSLGTIRITYSATYNPNGNSYLCIYGWSTNPLVEFYIVESWGNWRPPGACLTADSDVLVRSENGDIERQT

SEQ ID NO: 49763 - protein, 198 aa, Caldicellulosiruptor
AITLTSNASGTYDGYYYELWKDSGNTTMTVDTGGRFSCQWSNINNALFRTGKKFNTAWNQLGTVKITYSATYNPNGNSYLCIYGWSKNPLVEFYIVESWGSWRPPGATSLGTVTIDGGTYDIYKTTRVNQPSIEGTTTFDQYWSVRTSKRTSGTVTVTDHFKAWAAKGLNLGTIDQITLCVEGYQSSGSANITQNTFS

SEQ ID NO: 49764 - protein, 188 aa, Dictyoglomus thermophilum
YDGYVYDLSVDEDENFLAGFGFLYAHNSNINNALFRTGKKYNQNWQSLGTIRITYSATYNPNGNSYLCIYGWSTNPLVEFYIVESWGNWRPPGATSLGQVTIDGGTYDIYRTTRVNQPSIVGTATFDQYWSVRTSKRTSGTVTVTDHFRAWANRGLNLGTIDQITLCVEGYQSSGSANITQNTFSQGS

SEQ ID NO: 49765 - protein, 188 aa, Nicotiana tabacum
YDGYVYDLSLDEDENFLAGHGYLMAHNSNINNALFRTGKKYNQNWQSLGTIRITYSATYNPNGNSYLCIYGWSTNPLVEFYIVESWGNWRPPGATSLGQVTIDGGTYDIYRTTRVNQPSIVGTATFDQYWSVRTSKRTSGTVTVTDHFRAWANRGLNLGTIDQITLCVEGYQSSGSANITQNTFSQGS

SEQ ID NO: 49766 - protein, 133 aa, Dictyoglomus thermophilum
MQTSITLTSNASGTFDGYYYELWKDTGNTTMTVYTQGRFSCQWSNINNALFRTGKKYNQNWQSLGTIRITYSATYNPNGNSYLCIYGWSTNPLVEFYIVESWGNWRPPGACLAYDAEIVQADGGVKTIEQIVR

SEQ ID NO: 49767 - protein, 200 aa, Bacteria
QAAITLTSNASGTYDGYYYELWKDSGNTTMTVDTGGRFSCQWSNINNALFRTGKKFNTAWNQLGTVKITYSATYNPNGNSYLCIYGWSKNPLVEFYIVESWGSWRPPGATSLGTVTIDGGTYDIYKTTRVNQPSIEGTTTFDQYWSVRTSKRTSGTVTVTDHFKAWAAKGLNLGTIDQITLCVEGYQSSGSANITQNTFS

SEQ ID NO: 49768 - protein, 198 aa, Caldicellulosiruptor bescii DSM 6725
AITLTSNASGTYDGYYYELWKDSGNTTMTVDTGGRFSCQWSNINNALFRTGKKFSTAWNQLGTVKITYSATYNPNGNSYLCIYGWSRNPLVEFYIVESWGTWRPPGATSLGTVTIDGGTYDIYKTTRVNQPSIEGTTTFDQYWSVRTSKRTSGTVTVTDHFKAWAAKGLNLGTIDQITLCVEGYQSSGSANITQNTFS

SEQ ID NO: 49769 - protein, 206 aa, Synthetic construct
QIVTDNSIGNHDGYDYEFWKDSGGSGTMILNHGGTFSAQWNNVNNILFRKGKKFNETQTHQQVGNMSINYGANFQPNGNAYLCVYGWTVDPLVEYYIVDSWGNWRPPGATPKGTITVDGGTYDIYKHQQVNQPSIQGTATFNQYWSIRQSKRTSGTVTTANHFNAWAALGMNMGAFNYQILVTEGYQSTGSANVYSNTLRINGNPL

SEQ ID NO: 49770 - protein, 200 aa, Anaerocellum thermophilum DSM 6725
QAAITLTSNASGTYDGYYYELWKDSGNTTMTVDTGGRFSCQWSNINNALFRTGKKFSTAWNQLGTVKITYSATYNPNGNSYLCIYGWSRNPLVEFYIVESWGTWRPPGATSLGTVTIDGGTYDIYKTTRVNQPSIEGTTTFDQYWSVRTSKRTSGTVTVTDHFKAWAAKGLNLGTIDQITLCVEGYQSSGSANITQNTFS

SEQ ID NO: 49771 - protein, 164 aa, Dictyoglomus thermophilum
MQTSITLTSNASGTFDGYYYELWKDTGNTTMTVYTQGRFSCQWSNINNALFRTGKKYNQNWQSLGTIRITYSATYNPNGNSYLCIYGWSTNPLVEFYIVESWGNWRPPGATSLGQVTIDGGTYDIYRTTRVNQPCVTAETWVMTDEGARQVSALLDRPFRAVVN

SEQ ID NO: 49772 - protein, 198 aa, Caldicellulosiruptor bescii DSM 6725
AITLTSNASGTYDGYYYELWKDSGNTTMTVDTGGRFSCQWSNINNALFRTGKKFSTAWNQLGTVKITYCATYNPNGNSYLCIYGWSRNPLVEFYIVESWGTWRPPGATSLGTVTIDGGTYDIYKTTRVNQPSIEGTTTFDQYWSVRTSKRTSGTVTVTDHFKAWAAKGLNLGTIDQITLCVEGYQSSGSANITCNTFS

SEQ ID NO: 49773 - protein, 198 aa, Caldicellulosiruptor bescii DSM 6725
AITLTSNASGTYDGYYYELWKDSGNTTMTVDTGCRFSCQWSNINNALFRTGKKFSTAWNQLGTVKITYSATYNPNGNSYLCIYGWSRNPLVEFYIVESWGTWRPPGATSLGTVTIDGGTYDIYKTTRVNQPSIEGTTTFDQYWSVRTSKRTSGTVTVTDHFKAWAAKGLNLGTIDQITLCVEGYQSSGSANITQCTFS

SEQ ID NO: 49774 - protein, 193 aa, Unidentified
TTPNSEGWHDGYYYSWWSDGGGDSTYTNNSGGTYEITWGNGGNLVGGKGWNPGLNARAIHFTGVYQPNGTSYLSVYGWTRNPLVEYYIVENFGSSNPSSGSTDLGTVSCDGSTYTLGQSTRYNAPSIDGTQTFNQYWSVRQDKRSSGTVQTGCHFDAWASAGLNVTGDHYYQIVATEGYFSSGYARITVADVG

SEQ ID NO: 49775 - protein, 169 aa, Dictyoglomus thermophilum
MQTSITLTSNASGTFDGYYYELWKDTGNTTMTVYTQGRFSCQWSNINNALFRTGKKYNQNWQSLGTIRITYSATYNPNGNSYLCIYGWSTNPLVEFYIVESWGNWRPPGATSLGQVTIDGGTYDIYRTTRVNQPCLTADTYVWTDRGLETVAEVFGRAGLPLSSTSRVT

SEQ ID NO: 49776 - protein, 161 aa, Dictyoglomus thermophilum
MQTSITLTSNASGTFDGYYYELWKDTGNTTMTVYTQGRFSCQWSNINNALFRTGKKYNQNWQSLGTIRITYSATYNPNGNSYLCIYGWSTNPLVEFYIVESWGNWRPPGATSLGQVTIDGGTYDIYRTTRVNQPCFPAGTVVSGPSAEAATRRWFEGELVV

SEQ ID NO: 49777 - protein, 143 aa, Dictyoglomus thermophilum
MQTSITLTSNASGTFDGYYYELWKDTGNTTMTVYTQGRFSCQWSNINNALFRTGKKYNQNWQSLGTIRITYSATYNPNGNSYLCIYGWSTNPLVEFYIVESWGNWRPPGACVSGETPVYLADGKTIKIKDLYSSERKKEDNIV

SEQ ID NO: 49778 - protein, 166 aa, Dictyoglomus thermophilum
MQTSITLTSNASGTFDGYYYELWKDTGNTTMTVYTQGRFSCQWSNINNALFRTGKKYNQNWQSLGTIRITYSATYNPNGNSYLCIYGWSTNPLVEFYIVESWGNWRPPGATSLGQVTIDGGTYDIYRTTRVNQPCISGDSLISLASTGKRVSIKDLLDEKDFEIWA

SEQ ID NO: 49779 - protein, 136 aa, Dictyoglomus thermophilum
MQTSITLTSNASGTFDGYYYELWKDTGNTTMTVYTQGRFSCQWSNINNALFRTGKKYNQNWQSLGTIRITYSATYNPNGNSYLCIYGWSTNPLVEFYIVESWGNWRPPGACLSGSTKVIDAATGNLFSLKEIAAQP

SEQ ID NO: 49780 - protein, 162 aa, Dictyoglomus thermophilum
MQTSITLTSNASGTFDGYYYELWKDTGNTTMTVYTQGRFSCQWSNINNALFRTGKKYNQNWQSLGTIRITYSATYNPNGNSYLCIYGWSTNPLVEFYIVESWGNWRPPGATSLGQVTIDGGTYDIYRTTRVNQPCMHPDTYVVTKSGAKKVSELTEGDEVLT

SEQ ID NO: 49781 - protein, 202 aa, Bacteria
QAAMTFTSNATGTYDGYYYELWKDTGNTTMTVDTGGRFSCQWSNINNALFRTGKKFSTAWNQLGTVKITYSATYNPNGNSYLCIYGWSRNPLVEFYIVESWGSWRPPGATSLGTVTIDGATYDIYKTTRVNQPSIEGTRTFDQYWSVRTSKRTSGTVTVTDHFKAWAAKGLNLGTIDQITLCVEGYQSSGSANITQNTFTIG

SEQ ID NO: 49782 - protein, 203 aa, Bacillus sp.
ITSNEIGTHDGYDYEFWKDSGGSGSMTLNSGGTFSAQWSNINNILFRKGKKFNETQTHQQIGNMSITYGANFQPNGNAYLTVYGWTVDPLVEFYIVDSWGTYRPTGTHKGTINVDGGTYDIYETTRVNQPSIKGTATFKQYWSVRTSKRTSGTISVSEHFRAWESRGMPMGKMYEVAMTVEGYQSSGSANVYSNTLTIGGGNP

SEQ ID NO: 49783 - protein, 165 aa, Dictyoglomus thermophilum
MQTSITLTSNASGTFDGYYYELWKDTGNTTMTVYTQGRFSCQWSNINNALFRTGKKYNQNWQSLGTIRITYSATYNPNGNSYLCIYGWSTNPLVEFYIVESWGNWRPPGATSLGQVTIDGGTYDIYRTTRVNQPCLAGDTLITLADGRRVPIRELVSQQNFSVWA

SEQ ID NO: 49784 - protein, 203 aa, Paenibacillus campinasensis
ITSNEIGTHDGYDYEFWKDSGGSGSMTLNSGGAFSAQWSNINNILFRKGKKFNETQTHQQIGNMSITYGANFQPNGNAYLTVYGWTVDPLVEFYIVDSWGTYRPTGTHKGTINVDGGTYDIYETTRVNQPSIKGTATFKQYWSVRTSKRTSGTISVSEHFRAWESRGMPMGKMYEVAMTVEGYQSSGSANVYSNTLTIGGGNP

SEQ ID NO: 49785 - protein, 141 aa, Dictyoglomus thermophilum
MQTSITLTSNASGTFDGYYYELWKDTGNTTMTVYTQGRFSCQWSNINNALFRTGKKYNQNWQSLGTIRITYSATYNPNGNSYLCIYGWSTNPLVEFYIVESWGNWRPPGACVSGDSKVLTEKGPVEIRHLNSGMIVGINGF

SEQ ID NO: 49786 - protein, 167 aa, Dictyoglomus thermophilum
MQTSITLTSNASGTFDGYYYELWKDTGNTTMTVYTQGRFSCQWSNINNALFRTGKKYNQNWQSLGTIRITYSATYNPNGNSYLCIYGWSTNPLVEFYIVESWGNWRPPGATSLGQVTIDGGTYDIYRTTRVNQPCVTGDTLVFTDKGLIEARKLEVGMKVWSGDGWN

SEQ ID NO: 49787 - protein, 201 aa, Bacillus sp. YA-335
ITSNEIGTHDGYDYEFWKDSGGSGSMTLNSGGTFSAQWSNVNNILFRKGKKFDETQTHQQIGNMSINYGATYNPNGNSYLTVYGWTVDPLVEFYIVDSWGTWRPPGGTPKGTINVDGGTYQIYETTRYNQPSIKGTATFQQYWSVRTSKRTSGTISVSEHFRAWESLGMNMGNMYEVALTVEGYQSSGSANVYSNTLTIGG

SEQ ID NO: 49788 - protein, 142 aa, Dictyoglomus thermophilum
MQTSITLTSNASGTFDGYYYELWKDTGNTTMTVYTQGRFSCQWSNINNALFRTGKKYNQNWQSLGTIRITYSATYNPNGNSYLCIYGWSTNPLVEFYIVESWGNWRPPGACQPYSAPVSTPDGPIPIGKLVDANAVGEKVFD

SEQ ID NO: 49789 - protein, 402 aa, Aspergillus clavatus
MVHLPSIAAALAALPLVYGAGLNTAAKAKGLKYLGSATDNGELSDAPYVAQLSNTEDFGQLTPGNSMKWDATEPSQNSFSYAGGDAIVNLAQANGQLMRCHTLVWHSQLPNWVSSGTWTNATLIAAMKNHITNVMTHYKGKCYAWDVVNEALNEDGTYRDSVFYRVIGEAFLPIAFATAAAADPNVKLYYNDYNIENPGNKATGAQRIVKLVQSYGAKIDGVGLQAHFIVGSTPSQSDLTTTLKGYTSLGVEVAYTELDIRMQMPSSSAKLAQQSADYQSVAAACVTTPGCIGITIWDWTDKYSWVPSVFSGYGDACPWDSNYVKKPAYNGILAGLGAGSSTGTTSSSTLTTTTKTSTTTGATTTGVSQKWGQCGGSGWNGPTTCVSGTTCQKQNDWYSQCL

SEQ ID NO: 49790 - protein, 140 aa, Dictyoglomus thermophilum
MQTSITLTSNASGTFDGYYYELWKDTGNTTMTVYTQGRFSCQWSNINNALFRTGKKYNQNWQSLGTIRITYSATYNPNGNSYLCIYGWSTNPLVEFYIVESWGNWRPPGACFAKGTEVMMHDGSVKAIETIEAGEAVMGT

SEQ ID NO: 49791 - protein, 167 aa, Dictyoglomus thermophilum
MQTSITLTSNASGTFDGYYYELWKDTGNTTMTVYTQGRFSCQWSNINNALFRTGKKYNQNWQSLGTIRITYSATYNPNGNSYLCIYGWSTNPLVEFYIVESWGNWRPPGATSLGQVTIDGGTYDIYRTTRVNQPCVSGDSKVLTEKGPVEIRHLNSGMIVGINGFKS

SEQ ID NO: 49792 - protein, 141 aa, Dictyoglomus thermophilum
MQTSITLTSNASGTFDGYYYELWKDTGNTTMTVYTQGRFSCQWSNINNALFRTGKKYNQNWQSLGTIRITYSATYNPNGNSYLCIYGWSTNPLVEFYIVESWGNWRPPGACVSGDSKILTGKGPVEIGRLNSNMIAGIWRF

SEQ ID NO: 49793 - protein, 140 aa, Dictyoglomus thermophilum
MQTSITLTSNASGTFDGYYYELWKDTGNTTMTVYTQGRFSCQWSNINNALFRTGKKYNQNWQSLGTIRITYSATYNPNGNSYLCIYGWSTNPLVEFYIVESWGNWRPPGACLSGDTEVVLGNGMDVVLLTDLVDGACVST

SEQ ID NO: 49794 - protein, 178 aa, Dictyoglomus thermophilum
MQTSITLTSNASGTFDGYYYELWKDTGNTTMTVYTQGRFSCQWSNINNALFRTGKKYNQNWQSLGTIRITYSATYNPNGNSYLCIYGWSTNPLVEFYIVESWGNWRPPGATSLGQVTIDGGTYDIYRTTRVNQPCFVGSTRIPTERGLVPIEELAREGGSFYLVTDNRAPFGGRGAPL

SEQ ID NO: 49795 - protein, 141 aa, Dictyoglomus thermophilum
MQTSITLTSNASGTFDGYYYELWKDTGNTTMTVYTQGRFSCQWSNINNALFRTGKKYNQNWQSLGTIRITYSATYNPNGNSYLCIYGWSTNPLVEFYIVESWGNWRPPGACVTPDTLVSLSDGRIIEIREAVENSEESLLG

SEQ ID NO: 49796 - protein, 148 aa, Dictyoglomus thermophilum
MQTSITLTSNASGTFDGYYYELWKDTGNTTMTVYTQGRFSCQWSNINNALFRTGKKYNQNWQSLGTIRITYSATYNPNGNSYLCIYGWSTNPLVEFYIVESWGNWRPPGACVRGDTTVALADGSEREIRDLVEANLDDPRPVDDGVWD

SEQ ID NO: 49797 - protein, 202 aa, unidentified
QTITSNSVGTHDGYDYEYWKDSGNGTMVLGSGGTFSAEWSNINNILFRKGKKFNETQTHQQIGNISITYGATYQPNGNSYLTVYGWTVDPLVEYYIVDSWGSWRPPGASPKGTVNVDGGTYDIYETTRVNQPSIKGTATFKQYWSVRTSKRTSGTISVSEHFKAWEKLGMTMGKMYEVALTVEGYQSSGSANVYSHTLTIGG

SEQ ID NO: 49798 - protein, 145 aa, Dictyoglomus thermophilum
MQTSITLTSNASGTFDGYYYELWKDTGNTTMTVYTQGRFSCQWSNINNALFRTGKKYNQNWQSLGTIRITYSATYNPNGNSYLCIYGWSTNPLVEFYIVESWGNWRPPGACVTAETWVMTDEGARQVSALLDRPFRAVVNGIAYD

SEQ ID NO: 49799 - protein, 201 aa, Bacillus sp.
ITSNEIGTHDGYDYEFWKDSGGSGSMTLNSGGTFSARWSNVNNILFRKGKKYDTTQTHQQIGNMSINYGATYNPNGNSYLTVYGWTVDPLVEFYIVDSWGTWRPPGGTPKGTINVDGGTYQIYETTRYNQPSIHGTATFQQYWSVRTSKRTSGTISVSEHFRAWESLGMNMGNMYEVALTVEGYQSSGSSNVYSNTLTIGG

SEQ ID NO: 49800 - protein, 147 aa, Dictyoglomus thermophilum
MQTSITLTSNASGTFDGYYYELWKDTGNTTMTVYTQGRFSCQWSNINNALFRTGKKYNQNWQSLGTIRITYSATYNPNGNSYLCIYGWSTNPLVEFYIVESWGNWRPPGACVLHDTEIYVNGMVMEAEQIWQAYAGEAEFDGEGFWT

SEQ ID NO: 49801 - protein, 403 aa, Rasamsonia emersonii
MVRLSPVLLASIAGSGLPLYAQAAGLNTAAKAVGLKYFGTATDNPELSDTAYETELNNTQDFGQLTPANSMKWDATEPQQNTFTFSGGDQIANLAKANGQMLRCHNLVWYNQLPSWVTGGSWTNETLLAAMKNHITNVVTHYKGQCYAWDVVNEALNDDGTYRSNVFYQYIGEAYIPIAFATAAAADPDAKLYYNDYNIEYPGVKATAAQNIVKLVQSYGARIDGVGLQSHFIVGQTPSTSAQQQNMAAFTALGVEVAITELDIRMQLPETSAQLTQQATDYQSTVQACVNTDSCVGITLWDWTDKYSWVPSTFSGWGDACPWDDNYQKKPAYNGILTALGGTPSSSTSYTLTPTTTSSGGSGSPTDVAQHWEQCGGLGWTGPTVCASGFTCTVINEYYSQCL

SEQ ID NO: 49802 - protein, 158 aa, Dictyoglomus thermophilum
MQTSITLTSNASGTFDGYYYELWKDTGNTTMTVYTQGRFSCQWSNINNALFRTGKKYNQNWQSLGTIRITYSATYNPNGNSYLCIYGWSTNPLVEFYIVESWGNWRPPGACVTGDTRVLLADGQRVPIRDLVGQTPEVISVNAEGRLEPAKTDLVWSV

SEQ ID NO: 49803 - protein, 147 aa, Dictyoglomus thermophilum
MQTSITLTSNASGTFDGYYYELWKDTGNTTMTVYTQGRFSCQWSNINNALFRTGKKYNQNWQSLGTIRITYSATYNPNGNSYLCIYGWSTNPLVEFYIVESWGNWRPPGACVTGETLLLTENGYEKAADLYKKQNNLKVVIDNRTKD

SEQ ID NO: 49804 - protein, 405 aa, Rasamsonia byssochlamydoides
MVRNLSALVALLAGYGLPQVQADGLNTAAKAIGKLYFGTATDNPELSDVAYETQLNNTQDFGQITPGNSMKWDATEPEQNTFTFAAGDQIADLAEANGQILRCHNLVWYNQLPSWVTSGSWTNETLLAAMQNHITNVVTHYKGQCYAWDVVNEALNDDGTYRDNVFYQYIGEAYIPIAFATAAAADPNVKLYYNDYNIEYAGVKATAAQNIVKLVQSYGARIDGVGLQSHFIVGETPSTSTQASNMASFTALGVEVAITELDIRMQLPETTALLTQQSTDYQSTVQACVNTPRCVGITIWDWTDKYSWVPSTFSGYGDACPWDDNYQKKPAYYGILTALGGSASTTTVGTGTTTTSTATTTSTGSSGTGVAQHWGQCGGIGWTGPTVCASGYTCTVVNPYYSQCL

SEQ ID NO: 49805 - protein, 405 aa, Rasamsonia byssochlamydoides
MVRNLPVLLALIAGYGLPQVQADGLNTAAKAIGKLYFGTATDNPELSDVAYETQLNNTQDFGQITPANSMKWDATEPEQNTFTFAAGDQIADLAEANGQILRCHNLVWYNQLPSWVTSGSWTNETLLAAMKNHITNVVTHYKGRCYAWDVVNEALNDDGTYRDNVFYQYIGEAYIPIAFETAAAADPNVKLYYNDYNIEYAGVKATAAQNIVKLVQSYGARIDGVGLQSHFIVGETPSTSTQASNMASFTALGVEVAITELDIRMQLPETTALLTQQSTDYQSTVQACVNTPGCVGITLWDWTDKYSWVPSTFSGYGDACPWDDNYQKKPAYYGILTALGGSASTTTVGTGTTTTSTATTSSTGSSGTGVAQHWGQCGGIGWTGPTVCASGYTCTVVNPYYSQCL

SEQ ID NO: 49806 - protein, 204 aa, Aspergillus nidulans
NEEYGGAKAAGARAIVQLIKNAGVKIDGVGFQAHFSVGTVPSRSSLASVLQSFTSLGVEVAYTEADVRIQLPTSATTLAQQSTDFQNLAGSCVDTAGCVGFTIWDWTDKYSWVPSTFSGYGAALPWDENFVKKPAYDGLLVGLGGTVTTTTTTTATSTTTSATATSTATSPHWGQCGGIGWTGPTLCASPWTCTYVNDWYSQCL

SEQ ID NO: 49807 - protein, 201 aa, Lactobacillus halophilus
VTSNETGTHGGYDYEYWKDSGGSGIMTLNSGGTFSAEWSNVNNILFRKGKKFDETQTHQQIGNMSINYGANYQPNGNSYLTVYGWAVDPLVEFYIVDSWGSYRPTGTHKGTINVDGGTYDIYETTRTNQPSIKGTATFKQYWSVRTSKRTSGTISVSEHFKAWENLGMQMGNMYEVALTVEGYQSSGSADVYSNTFTIGGS

SEQ ID NO: 49808 - protein, 251 aa, Aspergillus nidulans
LLDXSTNEDGTYRTNIFYTTMGEAYIPIAFAAAAAADPDVKLYYNDYNLEYGGAKAAGARAIVQLIKNAGVKIDGVGFQAHFSVGTVPSRSSLASVLQSFTSLGVEVAYTEADVRIQLPTSATTLAQQSTDFQNLAGSCVDTAGCVGFTIWDWTDKYSWVPSTFSGYGAALPWDENFVKKPAYDGLLVGLGGTVTTTTTTTATSTTTSATATSTATSPHWGQCGGIGWTGPTLCASPWTCTYVNDWYSQCL

SEQ ID NO: 49809 - protein, 157 aa, Dictyoglomus thermophilum
MQTSITLTSNASGTFDGYYYELWKDTGNTTMTVYTQGRFSCQWSNINNALFRTGKKYNQNWQSLGTIRITYSATYNPNGNSYLCIYGWSTNPLVEFYIVESWGNWRPPGACVEENSLVSTDEGLRPIKDLDNTTAEFEQWDEIDVGVTTDGGTKTAT

SEQ ID NO: 49810 - protein, 184 aa, Dictyoglomus thermophilum
MQTSITLTSNASGTFDGYYYELWKDTGNTTMTVYTQGRFSCQWSNINNALFRTGKKYNQNWQSLGTIRITYSATYNPNGNSYLCIYGWSTNPLVEFYIVESWGNWRPPGATSLGQVTIDGGTYDIYRTTRVNQPCLHPDTLVHTDRGTLRLRELVDPFRRGWQPHTLSVATDEGWRPSPEGYNN

SEQ ID NO: 49811 - protein, 200 aa, Bacillus
ITSNETGVHDGYDYEFWKDDGGGGTMILNSGGTFYADWGGGINNILFRKGKKFDETQTHQQIGNMTLNYGANYNPDGNSYLTVYGWTADPLVEYYIVDSWGTWRPPGANSKGTIQVDGGTYDIYETTRVNQPSIKGNTTFQQYWSVRRDKRTSGTISVSDHFRAWEAHGMPMGKMYEVALTIEGWQSSGWADVYRNELII

SEQ ID NO: 49812 - protein, 200 aa, Bacillus
ITSNETGVHDGYDYEFWKDDGGGGTMILNSGGTFYADWGGGINNILFRKGKKFDETQTHQQIGNMTLNYGVNYNPDGNSYLTVYGWTVDPLVEYYIVDSWGTWRPPGANSKGTIQVDGGTYDIYETTRVNQPSIKGNTTFQQYWSVRRDKRTSGTISVSDHFRAWEAHGMPMGKMYEVALTIEGWQSSGWADVYHNELII

SEQ ID NO: 49813 - protein, 403 aa, Aspergillus terreus
MHMHSLVAALAAGTLPLLASAAGLHQSAVAKGLVYFGSATDNGELSDTAYVSQLSNTNDFGQITPGNSMKWDATEPSRNSFSYSGGDAIANLAEKNGQKLRCHTLVWHSQLPSWVSSGSWTNATLIAAMKNHITNVVTHYKGRCYAWDVVNEALNEDGSYRNSIFYQVIGEAYIPIAFATAAAADPSAKLYYNDYNTEYAGAKATGAQRIVKLVQSYGAKIDGVGLQAHLIVGNVASASTLASVLKGFTSLGVEVAYTELDIRMTLPSTSALLAQQATDYQNVAAACVSTSGCIGITIWDWTDKYSWVPSVFSGQGAALPWDSNFAKKPAYNGILAGLGASSSTSTTSTTLTTTTKTTTSAGSGSTGVSQKWGQCGGLGWTGPTTCVSGTTCQYQNDWYSQCL

SEQ ID NO: 49814 - protein, 166 aa, Dictyoglomus thermophilum
MQTSITLTSNASGTFDGYYYELWKDTGNTTMTVYTQGRFSCQWSNINNALFRTGKKYNQNWQSLGTIRITYSATYNPNGNSYLCIYGWSTNPLVEFYIVESWGNWRPPGASVSYDTPVLIRDPINKIHLVKIGEFIDKFYEEGEERTAKHVNGYYVLSHDGFQVVW

SEQ ID NO: 49815 - protein, 200 aa, Bacillus
ITSNETGVHDGYDYEFWRDDGGGGTMILNSGGTFYADWGGGINNILFRKGKKFDETRTHQQIGNMTLNYGVNYNPDGNSYLTVYGWTVDPLVEYYIVDSWGTWRPPGANSKGTIRVDGGTYDIYETTRVNQPSIKGNTTFQQYWSVRRDKRTSGTISVSDHFRAWEAHGMPMGKMYEVALTIEGWQSSGWADVYRNELRI

SEQ ID NO: 49816 - protein, 200 aa, Bacillus
ITSNETGVHDGYDYEFWKDGGGGGTMILNSGGTFYADWGGGINNILLRKGKKFDETQTHQQIGNMTLNYGVNYNPDGNSYLTVYGWTVDPLVEYYIVDSWGTWRPPGANSKGTIRVDGGTYDIYETTRVNQPSIKGNTTFQQYWSVRRDKRTSGTISVSDHFRAWEAHGMPMGKMYEVALTIEGWQSSGWADAYHNELRI

SEQ ID NO: 49817 - protein, 200 aa, Bacillus
ITSNETGVHDGYDYEFWKDGGGGGTMILNSGGTFYADWGGGINNILFRKGKKFDETQTHQQIGNMTLNYGVNYNPDGNSYLTVYGWTVDPLVEYYIVDSWGTWRPPGANSKGTIRVDGGTYDIYETTRVNQPSIKGNTTFQQYWSVRRDKRTSGTISVSDHFRAWEAHGMPMGKMYEVALTIEGWQSSGWADAYHNELII

SEQ ID NO: 49818 - protein, 334 aa, Penicillium funiculosum
MTLVKSILLALAAGHVAQAQLNTAAKAAGLLYFGTAVDNPDLSDSKYLVNLETADFGQITPANAMKWQPTEPSQGSYTFTQGDQIASLAKSNNDYLRCHNLVWYNQLPSYITSGSWTNATLIAALKEHINGVVTHYKGQCYAWDVVNEALNEDGTYRQNVFYQHIGEAYIPIAFAAAAAADPNAKLYYNDYNIEYAGAKATGAQGIVKLIQAAGGRIDGVGLQSHFIVGQTPSLATQKANMAAFTALGVDVAITELDIRMTLPDTSALQTQQSTDYQTTTTACVQTKGCVGITLWDYTDKYSWVPGTFSGQGDACPWDSNYNKKPAYYGILAGL

SEQ ID NO: 49819 - protein, 156 aa, Dictyoglomus thermophilum
MQTSITLTSNASGTFDGYYYELWKDTGNTTMTVYTQGRFSCQWSNINNALFRTGKKYNQNWQSLGTIRITYSATYNPNGNSYLCIYGWSTNPLVEFYIVESWGNWRPPGACLSADHEVLTSTGWKALPAIKDADQVMTLDLQTGTQQWNSVQATTR

SEQ ID NO: 49820 - protein, 198 aa, Dictyoglomus thermophilum
MQTSITLTSNASGTFDGYYYELWKDTGNTTMTVYTQGRFSCQWSNINNALFRTGKKYNQNWQSLGTIRITYSATYNPNGNSYLCIYGWSTNPLVEFYIVESWGNWRPPGATSLGQVTIDGGTYDIYRTTRVNQPCFAAGTLLHTEQGYVPVEQVVAGVGTRVCTHQGFRNISERFDNGEAEVFRVTTRKGYSVEVTAN

SEQ ID NO: 49821 - protein, 381 aa, Rasamsonia emersonii
AGLNTAAKAVGLKYFGTATDNPELSDTAYETELNNTQDFGQLTPANSMKWDATEPQQNTFTFSGGDQIANLAKANGQMLRCHNLVWYNQLPSWVTGGSWTNETLLAAMKNHITNVVTHYKGQCYAWDVVNEALNDDGTYRSNVFYQYIGEATSPIAFATPPPPTPTPSCTTTTTTSSTPGVKATAAQNIVKLVQSYGARIDGVGLQSHFIVGQTPSTSAQQQNMAAFTALGVEVAITELDIRMQLPETSAQLTQQATDYQSTVQACVNTDSCVGITLWDWTDKYSWVPSTFSGWGDACPWDDNYQKKPAYNGILTALGGTPSSSTSYTLTPTTTPSGGSGSPTDVAQHWEQCGGLGLGLGPTVCASGFTCTVINEYYSQCL

SEQ ID NO: 49822 - protein, 387 aa, Talaromyces pinophilus
LNTAAKAAGLLYFGTAVDNPDLSDSKYIANLETADFGQITPANAMKWQPTEPSQGSYTFTQGDQIASLAKSNNDYLRCHNLVWYNQLPSYVTSGSWTNATLIAALKEHINGVVTHYKGQCYAWDVVNEALNEDGTYRQNVFYQYIGEAYIPIAFAAAAAADPNAKLYYNDYNIEYAGSKATGAQRIVKLIQAAGGRIDGVGLQSHFIVGQTPSLATQKANMAAFTALGVDVAITELDIRMTLPDTSALQTQQSTDYQTTTTACVQTKGCVGITLWDYTDKYSWVPGTFSGQGDACPWDSNYNKKPAYYGILAGLQSGTGSSSSTSSTTLTTTTTPTTASSTTSTTSTSATSGAAHWGQCGGIGWSGPTICVSPYTCQVLNPYYSQCL

SEQ ID NO: 49823 - protein, 200 aa, Bacillus
ITSNETGVHDGYDYEFWRDGGGGGTMILNSGGTFYADWGGGINNILFRKGKKFDETQTHQQIGNMTLNYGVNYNPDGNSYLTVYGWTVDPLVEYYIVDSWGTWRPPGANSKGTIRVDGGTYDIYETTRVNQPSIKGNTTFQQYWSVRRDKRTSGTISVSDHFRAWEAHGMPMGKMYEVALTIEGWQSSGWADAYHNELII

SEQ ID NO: 49824 - protein, 387 aa, Talaromyces pinophilus CF-2612
LNTAAKAAGLLYFGTAVDNPDLSDSKYIANLETADFGQITPANAMKWQPTEPSQGSYTFTQGDQIASLAKSNNDYLRCHNLVWYNQLPSYITSGSWTNATLIAALKEHINGVVTHYKGQCYAWDVVNEALNEDGTYRQNVFYQYIGEAYIPIAFAAAAAADPNAKLYYNDYNIEYAGSKATGAQRIVKLIQAAGGRIDGVGLQSHFIVGQTPSLATQKANMAAFTALGVDVAITELDIRMTLPDTSALQTQQSTDYQTTTTACVQTKGCVGITLWDYTDKYSWVPGTFSGQGDACPWDSNYNKKPAYYGILAGLQSGTGSSSSTSSTTLTTTTTPTTASSTTSTTSTSATSGAAHWGQCGGIGWSGPTICVSPYTCQVLNPYYSQCL

SEQ ID NO: 49825 - protein, 389 aa, Penicillium funiculosus
AQLNTAAKAAGLLYFGTAVDNPDLSDSKYLVNLETADFGQITPANAMKWQPTEPSQGSYTFTQGDQIASLAKSNNDYLRCHNLVWYNQLPSYITSGSWTNATLIAALKEHINGVVTHYKGQCYAWDVVNEALNEDGTYRQNVFYQHIGEAYIPIAFAAAAAADPNAKLYYNDYNIEYAGAKATGAQGIVKLIQAAGGRIDGVGLQSHFIVGQTPSLATQKANMAAFTALGVDVAITELDIRMTLPDTSALQTQQSTDYQTTTTACVQTKGCVGITLWDYTDKYSWVPGTFSGQGDACPWDSNYNKKPAYYGILAGLQSGSGSSSSTSSTTLITTTTPTASSSTTSATTTSATSGAAHWGQCGGIGWSGPTICVSPYTCQVLNPYYSQCL

SEQ ID NO: 49826 - protein, 193 aa, Dictyoglomus thermophilum
MQTSITLTSNASGTFDGYYYELWKDTGNTTMTVYTQGRFSCQWSNINNALFRTGKKYNQNWQSLGTIRITYSATYNPNGNSYLCIYGWSTNPLVEFYIVESWGNWRPPGATSLGQVTIDGGTYDIYRTTRVNQPCVEENSLVSTDEGLRPIKDLDNTTAEFEQWDEIDVGVTTDGGTKTATAVYDNGFANVRQ

SEQ ID NO: 49827 - protein, 392 aa, Talaromyces pinophilus
VAQAQLNTAAKAAGLLYFGTAVDNPDLSDSKYIANLETADFGQITPANAMKWQPTEPSQGSYTFTQGDQIASLAKSNNDYLRCHNLVWYNQLPSYITSGSWTNATLIAALKEHINGVVTHYKGQCYAWDVVNEALNEDGTYRQNVFYQYIGEAYIPIAFAAAAAADPNAKLYYNDYNIEYAGSKATGAQRIVKLIQAAGGRIDGVGLQSHFIVGQTPSLATQKANMAAFTALGVDVAITELDIRMTLPDTSALQTQQSTDYQTTTTACVQTKGCVGITLWDYTDKYSWVPGTFSGQGDACPWDSNYNKKPAYYGILAGLQSGTGSSSSTSSTTLTTTTTPTTASSTTSTTSTSATSGAAHWGQCGGIGWSGPTICVSPYTCQVLNPYYSQCL

SEQ ID NO: 49828 - protein, 404 aa, Unidentified
MVRLSPVLLASIAGSGLPLYAQAAGLNTAAKAVGLKYFGTATDNPELSDTAYETELNNTQDFGQLTPANSMKWDATEPQQNTFTFSGGDQIANLAKANGQMLRCHNLVWYNQLPSWVTGGSWTNETLLAAMKNHITNVVTHYKGQCYAWDVVNEALNDDGTYRSNVFYQYIGEATSPIAFATPPPPTPTPSCTTTTTTSSTPGVKATAAQNIVKLVQSYGARIDGVGLQSHFIVGQTPSTSAQQQNMAAFTALGVEVAITELDIRMQLPETSAQLTQQATDYQSTVQACVNTDSCVGITLWDWTDKYSWVPSTFSGWGDACPWDDNYQKKPAYNGILTALGGTPSSSTSYTLTPTTTPSGGSGSPTDVAQHWEQCGGLGLGLGPTVCASGFTCTVINEYYSQCL

SEQ ID NO: 49829 - protein, 200 aa, Bacillus
ITSNETGVHDGYDYEFWKDDGGGGTMILNSGGTFYADWGGGINNILFRKGKKFDETRTHQQIGNMTLNYGVNYNPDGNSYLTVYGWTVGPLVEYYIVDSWGTWRPPGANSKGTIQVDGGTYDIYETTRVNQPSIKGNTTFQQYWSVRRDKRTSGTIPVSDHFRAWEAHGMPMGKMYEVALTIEGWQSSGWADVYHNELII

SEQ ID NO: 49830 - protein, 406 aa, Talaromyces stipitatus
MVAVKPLILALAAGHLAHAQLNTAAKAAGLLYFGTAVDNGDLSDSQYLPNLETDDFGQITPANSMKWQPTEPSQGSYTFSQGDQIASLAKTNNDYLRCHNLVWYNQLPSYITSGSWTNETLIAALKEHINGVVTHWKGQCYAWDVVNEALNEDGTYRQNVFYQHIGEAYIPIAFAAAAAADPNAKLYYNDYNIEYPGAKATGAQNIVKSIQAAGARIDGVGLQAHFIVGQTPSLASQKANMAAFTALGVDVAITELDIRMTLPDTSALQTQQSTDYQTTTTACVQTKGCVGITLWDFTDKHSWVPGTFSGQGDACPWDSNYKKKPAYYGILAGLQSGAGGSTTLTTTTTSTPTTTSSPATTTTTGAGSGTGAAHWGQCGGNGWTGPTTCVSPYTCQVVNPYYSQCL

SEQ ID NO: 49831 - protein, 407 aa, Talaromyces funiculosus
MTLVKSILLALAAGHVAQAQLNTAAKAAGLLYFGTAVDNPDLSDSKYLVNLETADFGQITPANAMKWQPTEPSQGSYTFTQGDQIASLAKSNNDYLRCHNLVWYNQLPSYITSGSWTNATLIAALKEHINGVVTHYKGQCYAWDVVNEALNEDGTYRQNVFYQHIGEAYIPIAFAAAAAADPNAKLYYNDYNIEYAGAKATGAQGIVKLIQAAGGRIDGVGLQSHFIVGQTPSLATQKANMAAFTALGVDVAITELDIRMTLPDTSALQTQQSTDYQTTTTACVQTKGCVGITLWDYTDKYSWVPGTFSGQGDACPWDSNYNKKPAYYGILAGLQSGSGSSSSTSSTTLITTTTPTASSSTTSATTTSATSGAAHWGQCGGIGWSGPTICVSPYTCQVLNPYYSQCL

SEQ ID NO: 49832 - protein, 407 aa, Talaromyces pinophilus
MTLVKAILLALAVGHVAQAQLNTAAKAAGLLYFGTAVDNPDLSDSKYIANLETADFGQITPANAMKWQPTEPSQGSYTFTQGDQIASLAKSNNDYLRCHNLVWYNQLPSYVTSGSWTNATLIAALKEHINGVVTHYKGQCYAWDVVNEALNEDGTYRQNVFYQYIGEAYIPIAFAAAAAADPNAKLYYNDYNIEYAGSKATGAQRIVKLIQAAGGRIDGVGLQSHFIVGQTPSLATQKANMAAFTALGVDVAITELDIRMTLPDTSALQTQQSTDYQTTTTACVQTKGCVGITLWDYTDKYSWVPGTFSGQGDACPWDSNYNKKPAYYGILAGLQSGTGSSSSTSSTTLTTTTTPTTASSTTSTTSTSATSGAAHWGQCGGIGWSGPTICVSPYTCQVLNPYYSQCL

SEQ ID NO: 49833 - protein, 407 aa, Talaromyces pinophilus
MTLVKAILLALAMGHVAQAQLNTAAKAAGLLYFGTAVDNPDLSDSKYIANLETADFGQITPANAMKWQPTEPSQGSYTFTQGDQIASLAKSNNDYLRCHNLVWYNQLPSYITSGSWTNATLIAALKEHINGVVTHYKGQCYAWDVVNEALNEDGTYRQNVFYQYIGEAYIPIAFAAAAAADPNAKLYYNDYNIEYAGSKATGAQRIVKLIQAAGGRIDGVGLQSHFIVGQTPSLATQKANMAAFTALGVDVAITELDIRMTLPDTSALQTQQSTDYQTTTTACVQTKGCVGITLWDYTDKYSWVPGTFSGQGDACPWDSNYNKKPAYYGILAGLQSGTGSSSSTSSTTLTTTTTPTTASSTTSTTSTSATSGAAHWGQCGGIGWSGPTICVSPYTCQVLNPYYSQCL

SEQ ID NO: 49834 - protein, 382 aa, Penicillium sumatraense
AGLNTAAVAKGQLYFGSATDNPELTDTAYVTQLNNTDDFGQITPGNSQKWDTIEPTQNTFSYTKGDVIANLAKANGQKLRCHNLVWHSQLPSWVTSGTWTNATLLAAMKNHITNVVTHYKGDCYAWDVVNEALNEDGSYRESIWYTTIGPAYLPIAFATAAAADPDVKLYYNDYNIEYSGSKATAALNIVKLIQSYGVKIDGVGLQAHFIVGSTPSQSAQASTMSAYTALGVDVAITELDIRMTLPSTDALLAQQKTDYSNTVAACVATKGCVGVTIWDWTDKYSWVPSTFSGQGAACPWDESYNKKSAYTGILTALGGTATSTTTTVKSSTSSTSTTTSSGGSATGVARWGQCGGNGWTGGTTCASGYTCTYFNDYYSQCL

SEQ ID NO: 49835 - protein, 202 aa, Dictyoglomus thermophilum
MQTSITLTSNASGTFDGYYYELWKDTGNTTMTVYTQGRFSCQWSNINNALFRTGKKYNQNWQSLGTIRITYSATYNPNGNSYLCIYGWSTNPLVEFYIVESWGNWRPPGATSLGQVTIDGGTYDIYRTTRVNQPCVTADTRLATQHGLVPIGWLQANGGALDCTVDRRALGEDRRGTVTRAAVPAFLSAGQAEVFKVTTAEG

SEQ ID NO: 49836 - protein, 201 aa, Unidentified
ITGNEIGTHDGYDYEFWKDEGGYGSMTLNSGGTFSAEWTDVHNILFRKGQKFDTTQTHQQLGNINIDYGVNYQPNGSSYLAVYGWTTDPLVEFYIVDSWGTWRPPGAESKGTIHVDGGTYEIYETTRVQQPSIEGTATFQQYWSVRTDKRTSGTISVSEHFHAWEAHGMPMGNMYEVALTVEGWQSSGSADVYRNNLTIGG

SEQ ID NO: 49837 - protein, 407 aa, Talaromyces marneffei
MTAVKSLLLALAVGQIAQAQLDTAAKAAGLLYFGTAVDNPDLSDSQYLATLQTADFGQITPANGMKWQPTEPTQGTYTFSDGDQIASLAKSNNDYLRCHTLAWYNQLPSYITSGSWTNQTLIAALQEHIKGVVTHYKGQCYAWDVVNEALNEDGTYRQNVFYQHIGEAYIPIAFAAAAAADPNAKLYYNDYNIEYAGAKATGAQGIVKLVKAAGGRIDGVGFQSHFIVGQTPSLAAQKANLASFTALGVDVAITELDIRMTLPDTSALQAQQSTDYQTTTTACVQTKGCVGITIWDFTDKYSWVPGTFSGQGDACPWDSNYNKKPAYYGILAGLKSGSGSPSSSSTLITTTKPTTTSTAPPTTTTSSSPSTGAAHWGQCGGIGWNGPTTCVSPYACQVFNPYYSQCL

SEQ ID NO: 49838 - protein, 166 aa, Dictyoglomus thermophilum
MQTSITLTSNASGTFDGYYYELWKDTGNTTMTVYTQGRFSCQWSNINNALFRTGKKYNQNWQSLGTIRITYSATYNPNGNSYLCIYGWSTNPLVEFYIVESWGNWRPPGACLHGDSLIVTDHGLVPMREVVNHRQRLQVSDGERQQTVYDWNRFADYPTVTMRTRA

SEQ ID NO: 49839 - protein, 385 aa, Evansstolkia leycettana
AGLNTAAKAIGKLYFGTATDNPELSDSTYMQETDNTDDFGQLTPANSMKWDATEPSQNTFTFTNGDQIANLAKSNGQMLRCHNLVWYNQLPSWVTSGSWTNATLLAAMKNHITNVVTHYKGQCYAWDVVNEALNDDGTYRSNVFYQYIGEAYIPIAFATAAAADPNAKLYYNDYNIEYPGAKATAAQNIVKMVKAYGAKIDGVGLQSHFIVGSTPSQSSQQSNMAAFTALGVEVAITELDIRMTLPSTSALLAQQSTDYQSTVSACVNTPKCIGITLWDWTDKYSWVPNTFSGQGDACPWDSNYQKKPAYYGILTALGGSASTSTTTTLVTSTRTSTTTSTSATSTSTGVAQHWGQCGGIGWTGPTTCASPYTCQELNPYYYQCL

SEQ ID NO: 49840 - protein, 172 aa, Dictyoglomus thermophilum
MQTSITLTSNASGTFDGYYYELWKDTGNTTMTVYTQGRFSCQWSNINNALFRTGKKYNQNWQSLGTIRITYSATYNPNGNSYLCIYGWSTNPLVEFYIVESWGNWRPPGACVSGETDIALVEGKTATIGELVESALTDPKPVDDGVWDTADFTVTSAIETGELIERDVTRVW

SEQ ID NO: 49841 - protein, 403 aa, Penicillium sumatraense
MVRLTSKALALVGILPQLSLGAGLNTAAVAKGQLYFGSATDNPELTDTAYVTQLNNTDDFGQITPGNSQKWDTIEPTQNTFSYTKGDVIANLAKANGQKLRCHNLVWHSQLPSWVTSGTWTNATLLAAMKNHITNVVTHYKGDCYAWDVVNEALNEDGSYRESIWYTTIGPAYLPIAFATAAAADPDVKLYYNDYNIEYSGSKATAALNIVKLIQSYGVKIDGVGLQAHFIVGSTPSQSAQASTMSAYTALGVDVAITELDIRMTLPSTDALLAQQKTDYSNTVAACVATKGCVGVTIWDWTDKYSWVPSTFSGQGAACPWDESYNKKSAYTGILTALGGTATSTTTTVKSSTSSTSTTTSSGGSATGVARWGQCGGNGWTGGTTCASGYTCTYFNDYYSQCL

SEQ ID NO: 49842 - protein, 198 aa, Unidentified
VTSNEIGTHGGYDFEFWVDSGSGSMTLKDGGAFSCQWSNINNILFRKGRKFDQTKTHQQLGNIVVEYAADYRPNGNSYLCIYGWTVDPLVEYYIIESWGNWRPPGAQSKGMITVDGGTYDIYETTRVNQPSIIGTATFQQYWSVRTSKKTSGTVSVSQHFRAWESMGMKMGKMYEVATTVEGYQSSGSADVYKNVITI

SEQ ID NO: 49843 - protein, 404 aa, Penicillium sp.
MVCLSTKALLLGAATLPQLVHSAGLDTAAVALGKKYFGTATDNPELTDTAYVAQLNNTQDFGQITPGNSQKWDATEPSQNTFTFTNGDVIADLAEANGQKLRCHNLVWYEQLPSWVSSGTWTNATLLAAMKNHITNVVTHYKGQCYAWDVVNEGLNDDGTYRDNIFYQYIGEAYIPIAFATAAAADPSVKLYYNDYNIESAGAKSTAAQNIVKLVKSYGVKIDGVGLQSHFIVGSTPSQSAQASNMAAFTALGVEVAITELDIRMTLPSTDALLAQQKTDYASTVAACAQTSGCVGITIWDWTDKYSWVPNTFSGQGAACPWDANLVKKPAYTGILTALGGTATSTATTTAKTTLTTSTTSSGSSSTSVAQKWGQCGGSGWTGPTTCVSGTTCTYSNAWYSQCL

SEQ ID NO: 49844 - protein, 405 aa, Evansstolkia leycettana; identical to SEQ ID NO: 53

SEQ ID NO: 49845 - protein, 396 aa, Penicillium chrysogenum
MVHFSTIALALASALPQLTQGAGLHTSAVAKGKLYFGSATDNPELTDVPYLTQLSNTDDFGQITPGNSQKWDALEPSQNTFSYTNGDVIANLAAKNGQKLRCHTLVWHSQLPSWVSSGSWTNATLIAAMKNHITNVVTHYKGKCYAWDVVNEALNEDGTYRDSVFYKYIGEAFLPIAFATAAAADPDAKLYYNDYNIESPGSKSSGAQRIVKLVQQYGAKIDGVGLQAHFIVGSTPSQSAQTTNLAAFTALGVDVAYTELDIRMTLPSTTALLTQQSTDYKNTVAACMANTKCVGITIWDYTDKYSWVPSTFPGQGDACPWDKNLVKKPAYAGILAALGGTSSTTTTLVTSTTTAGSGGATRVPLYGQCGGSGWTGGTTCASGTCKHINDWYSQCL

SEQ ID NO: 49846 - protein, 202 aa, Bacillus subtilis
ITSNQTGTHDGYDYELWKDSGNTSMTLNSGGAFSAQWSNIGNALFRKGKKFPSTKTHSQLGNISINYNATFNPGGNSYLCVYGWTKDPLTEYYIVDNWGTYRPTGTPKGTFTVDGGTYDIYETTRINQPSIIGIATFKQYWSVRQTKRTSGTVSVSEHFKKWESLGMPMGKMYETALTVEGYQSNGSANVTANVLTIGGKPL

SEQ ID NO: 49847 - protein, 202 aa, Bacillus subtilis
ITSNQTGTHDGYDYELWKDSGNTSMTLNSGGAFSAQWSNIGNALFRKGKKFDSTKTHSQLGNISINYNATFNPGGNSYLCVYGWTKDPLTEYYIVDNWGTYRPTGTPKGTFTVDGGTYDIYETTRINQPSIIGIATFKQYWSVRQDKRTSGTVSVSEHFKKWESLGMPMGKMYETALTVEGYQSNGSANVTANVLTIGGKPL

SEQ ID NO: 49848 - protein, 202 aa, Bacillus subtilis
ITSNQTGTHDGYDYELWKDSGNTSMTLNSGGAFSAQWSNIGNALFRKGKKFDSTKTHSQLGNISINYNATFNPGGNSYLCVYGWTKDPLTEYYIVDNWGTYRPTGTPKGTFTVDGGTYDIYETTRYNQPSIIGIATFKQYWSVRQTKRTSGTVSVSEHFKKWESLGMPMGKMYETALTVEGYQSNGSANVTANVLTIGGKPL

SEQ ID NO: 49849 - protein, 202 aa, Bacillus subtilis
ITSNQTGTHDGYDYELWKDSGNTSMTLNSGGAFSAQWSNIGNALFRKGKKFDSTKTHSQLGNISINYNATFTPGGNSYLCVYGWTKDPLTEYYIVDNWGTYRPTGTPKGTFTVDGGTYDIYETTRINQPSIIGIATFKQYWSVRQTKRTSGTVSVSEHFKKWESLGMPMGKMYETALTVEGYQSNGSANVTANVLTIGGKPL

SEQ ID NO: 49850 - protein, 202 aa, Bacillus subtilis
ITSNQTGTHDGYDYELWKDSGNTSMTLNSGGAFSAQWSNIGNALFRKGKKFDSTKTHDQLGNISINYNATFNPGGNSYLCVYGWTKDPLTEYYIVDNWGTYRPTGTPKGTFTVDGGTYDIYETTRINQPSIIGIATFKQYWSVRQTKRTSGTVSVSEHFKKWESLGMPMGKMYETALTVEGYQSNGSANVTANVLTIGGKPL

SEQ ID NO: 49851 - protein, 202 aa, Bacillus subtilis
ITSNQTGTHDGYDYELWKDSGNTSMTLNSGGAFSAQWSNIGNALFRKGKKFDSTKTHSQLGNISINYNATFNPGGNSYLCVYGWTKDPLTEYYIVDNWGTYRPTGTPKGTFTVDGGTYDIYETTRINQPSIIGIATFKQYWSVRQTKRTSGTVSVSEHFKKWESLGMPMGKMYETALTVEGYQSNGSANVTANVLTIGGKPL

SEQ ID NO: 49852 - protein, 175 aa, Dictyoglomus thermophilum
MQTSITLTSNASGTFDGYYYELWKDTGNTTMTVYTQGRFSCQWSNINNALFRTGKKYNQNWQSLGTIRITYSATYNPNGNSYLCIYGWSTNPLVEFYIVESWGNWRPPGACVHGDTRVTLADGHERPIREVVESNLDDPKPVDDGVWDTVDFDVPSLQSDGTVATQNATKVWKRK

SEQ ID NO: 49853 - protein, 199 aa, Bacillus subtilis
ITSNQTGTQDGYDYELWKDSGNTSMTLNSGGAFSAQWSNIGNALFRKGKKFDSTKTHSQLGNISINYNATFNPGGNSYLCVYGWTKDPLTEYYIVDNWGTYRPTGTPKGTFTVDGGTYDIYETTRINQPSIIGIATFKQYWSVRQTKRTSGTVSVSEHFKKWESLGMPMGKMYETALTVEGYQSNGSANVTANVLAISG

SEQ ID NO: 49854 - protein, 202 aa, Bacillus subtilis
ITSNQTGTHDGYDYELWKDHGNTSMTLNSGGAFSAQWSNIGNALFRKGKKFDSTKTHSQLGNISINYNATFNPGGNSYLCVYGWTKDPLTEYYIVDNWGTYRPTGTPKGTFTVDGGTYDIYETTRINQPSIIGIATFKQYWSVRQTKRTSGTVSVSEHFKKWESLGMPMGKMYETALTVEGYQSNGSANVTANVLTIGGKPL

SEQ ID NO: 49855 - protein, 202 aa, Bacillus subtilis
ITSNQTGTHDGYDYELWKDSGNTSMTLNSGGAFSAQWSNIGNALFRKGKKFDSTKTHSQLGNISINYNATFNPGGNSYLCVYGWTKDPLTEYYIVDNWGTYRPTGTPKGTFTVDGGTYDIYETTRINQPSIIGIATFKQYWSVRQTKRTSGTVSVSEHFKKWESLGMPMGKMYETALTVEGFQSNGSANVTANVLTIGGKPL

SEQ ID NO: 49856 - protein, 202 aa, Bacillus subtilis
ITSNQTGTHDGYDYELWKDSGNTSMTLNSGGAFSAQWSNIGIALFRKGKKFDSTKTHSQLGNISINYNATFNPGGNSYLCVYGWTKDPLTEYYIVDNWGTYRPTGTPKGTFTVDGGTYDIYETTRINQPSIIGIATFKQYWSVRQTKRTSGTVSVSEHFKKWESLGMPMGKMYETALTVEGYQSNGSANVTANVLTIGGKPL

SEQ ID NO: 49857 - protein, 202 aa, Bacillus subtilis
ITSNQTGTHDGYDYELWKDHGNTSMTLNSGGAFSAQWSNIGNALFRKGKKFDSTKTHSQLGNISINYNATFNPGGNSYLCVYGWTKDPLTEYYIVDNWGTYRPTGTPKGTFTVDGGTYDIYETTRYNQPSIIGIATFKQYWSVRQTKRTSGTVSVSEHFKKWESLGMPMGKMYETALTVEGYQSNGSANVTANVLTIGGKPL

SEQ ID NO: 49858 - protein, 202 aa, Bacillus subtilis
ITSNQTGTHDGYDYELWKDSGNTSMTLNSGGAFSAQWSNIGNALFRKGKKFDSTKTHSQLGDISINYNATFNPGGNSYLCVYGWTKDPLTEYYIVDNWGTYRPTGTPKGTFTVDGGTYDIYETTRINQPSIIGIATFKQYWSVRQTKRTSGTVSVSEHFKKWESLGMPMGKMYETALTVEGYQSNGSANVTANVLTIGGKPL

SEQ ID NO: 49859 - protein, 202 aa, Bacillus subtilis
ITSNQTGTHDGYDYELWKDSGNTSMTLNSGGAFSAQWSNIGNALFRKGKKFDSTKTYSQLGNISINYNATFNPGGNSYLCVYGWTKDPLTEYYIVDNWGTYRPTGTPKGTFTVDGGTYDIYETTRINQPSIIGIATFKQYWSVRQTKRTSGTVSVSEHFKKWESLGMPMGKMYETALTVEGYQSNGSANVTANVLTIGGKPL

SEQ ID NO: 49860 - protein, 404 aa, Penicillium parvum
MVYLSARTLALVACVLPQLTQASGLDTAAVAIGKVYFGTATDNPELTDTAYVKQLSNTDDFGQITPGNSQKWDATEPSQNSFTFTNGDVVAHLAEGNGQKLRCHNLVWHNQLPNWVTSGSWTNETLLAAMKNHITNVVTHYKGQCYAWDVVNEALNEDGTYRDSIFYQTIGEAYIPIAFKTAAAADPTVKLYYNDYNIEYAGAKATGAQRIVKLIQSYGAKIDGVGLQSHFIVGSTPSQSAQASNMAAFTALGVDVAITELDIRMTLPSTDALLAQQKTDYHSTVAACVQTARCVGVTIWDWTDKYSWVPSTFSGQGAACPWDENFQKKPAYDGILSALGGSASATSTSTAGQSASTTSTSGSGGSTAVAQHWGQCGGQGWTGATSCATGYICTFVNDWYSQCL

SEQ ID NO: 49861 - protein, 181 aa, Dictyoglomus thermophilum
MQTSITLTSNASGTFDGYYYELWKDTGNTTMTVYTQGRFSCQWSNINNALFRTGKKYNQNWQSLGTIRITYSATYNPNGNSYLCIYGWSTNPLVEFYIVESWGNWRPPGACLHPDTLVHTDRGTLRLRELVDPFRRGWQPHTLSVATDEGWRPSPEGYNNGVAPTLRVVLENGLEVQGTLN

SEQ ID NO: 49862 - protein, 199 aa, Bacillus pumilus
ITNNEMGNHSGYDYELWKDYGNTSMTLNNGGAFSAGWNNIGNALFRKGKKFDSTRTHHQLGNISINYNASFNPGGNSYLCVYGWTQSPLAEYYIVDSWGTYRPTGAYKGSFYADGGTYDIYETTRVNQPSIIGIATFKQYWSVRQTKRTSGTVSVSAHFRKWESLGMPMGKMYETAFTVEGYQSSGSANVMTNQLFIGN

SEQ ID NO: 49863 - protein, 199 aa, Bacillus pumilus
ITNNEMGNHSGYDYELWKDYGNTSMTLNNGGAFSAGWNNIGNALFRKGKKFDSTRTHHQLGNISINYNASFNPSGNSYLCVYGWTQSPLAEYYIVDSWGTYRPTGAYKGSFYADGGTYDIYETTRVNQPSIIGIATFKQYWSVRQTKRTSGTVSVSAHFRKWESLGMPMGKMYETAFTVEGYQSSGSANVMTNQLFIGN

SEQ ID NO: 49864 - protein, 199 aa, Bacillus sp.
ITNNEMGNHSGYDYELWKDYGNTSMTLNNGGAFSAGWNNIGNALFRKGKKFDSTRTHHQLGNISINYNASFNPVGNSYLCVYGWTQSPLAEYYIVDSWGTYRPTGTHKGTFYADGGTYDIYETTRVNQPSIIGIATFKQYWSVRQTKRTSGTVSVSAHFKKWESLGMPMGKMYETAFTVEGYQSSGSANVMTNQLFIGN

SEQ ID NO: 49865 - protein, 402 aa, Rasamsonia byssochlamydoides
NLSALVALLAGYGLPQVQADGLNTAAKAIGKLYFGTATDNPELSDVAYETQLNNTQDFGQITPGNSMKWDATEPEQNTFTFAAGDQIADLAEANGQILRCHNLVWYNQLPSWVTSGSWTNETLLAAMQNHITNVVTHYKGQCYAWDVVNEALNDDGTYRDNVFYQYIGEAYIPIAFATAAAADPNVKLYYNDYNIEYAGVKATAAQNIVKLVQSYGARIDGVGLQSHFIVGETPSTSTQASNMASFTALGVEVAITELDIRMQLPETTALLTQQSTDYQSTVQACVNTPRCVGITIWDWTDKYSWVPSTFSGYGDACPWDDNYQKKPAYYGILTALGGSASTTTVGTGTTTTSTATTTSTGSSGTGVAQHWGQCGGIGWTGPTVCASGYTCTVVNPYYSQCL

SEQ ID NO: 49866 - protein, 199 aa, Bacillus pumilus
ITNNEMGNHSGYDYELWKDYGNTSMTLNNGGAFSAGWNNIGNALFRKGKKFDSTRTHHQLGNISINYNASFNPGGNSYLCVYGWTQSPLAEYYIVDSWGTYRPTGAYKGSFYADGGTYDIYETTRVNQPSIIGIATFKQYWSVRQTKRTSGTVSVSAHFRKWESLGMPIGKMYETAFTVEGYQSSGSANVMTNQLFIGN

SEQ ID NO: 49867 - protein, 104 aa, Bacillus pumilus
IVESWGTYRPTGTYKWSFYADGGTYDIYETLRVNQPSIIGDATFKQYVSVRQTKRTSGTVSVSEHFKKWEGLYMPMGKMYETALTVEGYRSTGSANVMTNQLMI

SEQ ID NO: 49868 - protein, 386 aa, Penicillium sp.
AGLNTAAKAIGLKYFGTATDNPELSDTAYETQLNNTQDFGQLTPANSMKWDATEPEQNVFTFSAGDQIANLAKANGQMLRCHNLVWYNQLPSWVTSGSWTNETLLAAMKNHITNVVTHYKGQCYAWDVVNEALNDDGTYRSNVFYQYIGEAYIPIAFATAAAADPNAKLYYNDYNIEYPGAKATAAQNLVKLVQSYGARIDGVGLQSHFIVGETPSTSSQQQNMAAFTALGVEVAITELDIRMQLPETEALLTQQATDYQSTVQACANTKGCVGITVWDWTDKYSWVPSTFSGYGDACPWDANYQKKPAYEGILTGLGQTVTSTTYIISPTTSVGTGTTTSSGGSGGTTGVAQHWEQCGGLGWTGPTVCASGYTCTVINEYYSQCL

SEQ ID NO: 49869 - protein, 199 aa, Bacillus subtilis
ITSNQTGFQDGYDYELWKDYGNTSMTLNSGGAFSAQWSNIGNALFRKGKKFDTTKTHSQLGNISIRYNATFNPGGNSYLCVYGWTKDPLVEYYIVDNWGTYRPTGTPKGTFTVDGGTYDIYETTRINQPSIIGTATFKQYWSVRQTKRTSGTVSVSEHFKKWESLGMPMGKMYETALTVEGYQSNGSANVTTNVLTVGG

SEQ ID NO: 49870 - protein, 324 aa, Aspergillus fumigatus Z5
GLNTAAKAKGLKYFGSATDNPELTDSAYVAQLSNTDDFGQITPGNSMKWDATEPSQNSFSFANGDAVVNLANKNGQLMRCHTLVWHSQLPNWVSSGSWTNATLLAAMKNHITNVVTHYKGKCYAWDVVNEALNEDGTFRNSVFYQIIGPAYIPIAFATAAAADPDVKLYYNDYNIEYSGAKATAAQNIVKMIKAYGAKIDGVGLQAHFIVGSTPSQSDLTTVLKGYTALGVEVAYTELDIRMQLPSTAAKLAQQSTDFQGVAAACVSTTGCVGVTIWDWTDKYSWVPSVFQGYGAPLPWDENYVKKPAYDGLMAGLGASGSGTT

SEQ ID NO: 49871 - protein, 402 aa, Rasamsonia byssochlamydoides
NLPVLLALIAGYGLPQVQADGLNTAAKAIGKLYFGTATDNPELSDVAYETQLNNTQDFGQITPANSMKWDATEPEQNTFTFAAGDQIADLAEANGQILRCHNLVWYNQLPSWVTSGSWTNETLLAAMKNHITNVVTHYKGRCYAWDVVNEALNDDGTYRDNVFYQYIGEAYIPIAFETAAAADPNVKLYYNDYNIEYAGVKATAAQNIVKLVQSYGARIDGVGLQSHFIVGETPSTSTQASNMASFTALGVEVAITELDIRMQLPETTALLTQQSTDYQSTVQACVNTPGCVGITLWDWTDKYSWVPSTFSGYGDACPWDDNYQKKPAYYGILTALGGSASTTTVGTGTTTTSTATTSSTGSSGTGVAQHWGQCGGIGWTGPTVCASGYTCTVVNPYYSQCL

SEQ ID NO: 49872 - protein, 342 aa, Aspergillus aculeatus
MVGLLSITAALAATVLPNIVSAVGLDQAAVAKGLQYFGTATDNPELTDIPYVTQLNNTADFGQITPGNSMKWDATEPSQGTFTFTKGDVIADLAEGNGQYLRCHTLVWYNQLPSWVTSGTWTNATLTAALKNHITNVVSHYKGKCLHWDVVNEALNDDGTYRTNIFYTTIGEAYIPIAFAAAAAADPDAKLFYNDYNLEYGGAKAASARAIVQLVKNAGAKIDGVGLQAHFSVGTVPSTSSLVSVLQSFTALGVEVAYTEADVRILLPTTATTLAQQSSDFQALVQSCVQTTGCVGFTIWDWTDKYSWVPSTFSGYGAALPWDENLVKKPAYNGLLAGMGVT

SEQ ID NO: 49873 - protein, 324 aa, Aspergillus fumigatus Z5
GLNTCAKAKGLKYFGSATDNPELTDSAYVAQLSNTDDFGQITPGNSMKWDATEPSQNSFSFANGDAVVNLANKNGQLMRCHTLVWHSQLPNWVSSGSWTNATLLAAMKNHITNVVTHYKGKCYAWDVVNEALNEDGTFRNSVFYQIIGPAYIPIAFATAAAADPDVKLYYNDYNIEYSGAKATAAQNIVKMIKAYGAKIDGVGLQAHFIVGSTPSQSDLTTVLKGYTALGVEVAYTELDIRMQLPSTAAKLAQQSTDFQGVAAACVSTTGCVGVTIWDWTDKYSWVPSVFQGYGAPLPWDENYVKKPAYDGLMAGLGCSGSGTT

SEQ ID NO: 49874 - protein, 379 aa, Neosartorya
GLNTAAKAKGLKYFGSATDNPELTDTAYVAQLSNTDDFGQITPGNSMKWDATEPSQNSFSFANGDAIVNLANKNGQMMRCHTLVWHSQLPNWVSSGSWTNATLLAAMKNHITNVVTHYKGKCYAWDVVNEALNEDGTFRNSIFYQTIGEAYIPIAFATAAAADPSVKLYYNDYNIEYSGAKATAAQNIVKMIKAYGAKIDGVGLQGHFILGSTPSQSALTSVLEGYTALGVEVAYTELDIRMQLPSTDAKLAQQATEYQNVAAACVGTTGCVGVTIWDWTDKYSWVPSVFSGYGAALPWDENYVKKPAYNGILAGLGASGSTMTTTLTTTTKTSTTTTATSTGVAQKWGQCGGIGWTGPTTCVSGTTCQKLNDWYSQCL

SEQ ID NO: 49875 - protein, 382 aa, Aspergillus steynii IBT 23096
AGLHQAAVAKGLNYFGTATDNPELTDIPYVTQLKNTTDFGQITPGNSQKWDSTEPSQNTFSFTKGDAIADLAKANNQVLRCHNLVWHQQLPNWVTSGSWTNATLTAVLKNHITNVVKHYKGRCYAWDVVNEALNEDGSYRDSIFYRTIGEAYLPIAFAAAAAADPDVKLYYNDYNIEWGGNKAAGAVRIVKLIQSYGVKIDGVGLQGHFTVGNIPGKNDLASTLKTYTVLGVEVAYTEVDVRMETPATDAKLAQQSIDYQNLVQACVETPKCVGFTIWDWTDKYSWVPSTFPGQGAACPWDENLKKKPAYTGLLKGLGGNRSESSSSSSSSTPTSTVSAPHTTSTNVAQKWGQCGGNNWTGPTTCVSGTTCTKLNDWYSQCL

SEQ ID NO: 49876 - protein, 204 aa, Unidentified
RIIYDNETGTHGGYDYELWKDYGNTIMELNDGGTFSCQWSNIGNALFRKGRKFNSDKTYQELGDIVVEYGCDYNPNGNSYLCVYGWTRNPLVEYYIVESWGSWRPPGATPKGTITVDGGTYEIYETTRVNQPSIDGTATFQQYWSVRTSKRTSGTISVTEHFKQWERMGMRMGKMYEVALTVEGYQSSGYANVYKNEIRIGANP

SEQ ID NO: 49877 - protein, 408 aa, Rasamsonia emersonii
MVRLSPVLLASIAGSGLPLAQAAGLNTAAKAIGLKYFGTATDNPELSDTAYETQLNNTQDFGQLTPANSMKWDATEPEQNVFTFSAGDQIANLAKANGQMLRCHNLVWYNQLPSWVTSGSWTNETLLAAMKNHITNVVTHYKGQCYAWDVVNEALNDDGTYRSNVFYQYIGEAYIPIAFATAAAADPNAKLYYNDYNIEYPGAKATAAQNLVKLVQSYGARIDGVGLQSHFIVGETPSTSSQQQNMAAFTALGVEVAITELDIRMQLPETEALLTQQATDYQSTVQACANTKGCVGITVWDWTDKYSWVPSTFSGYGDACPWDANYQKKPAYEGILTGLGQTVTSTTYIISPTTSVGTGTTTSSGGSGGTTGVAQHWEQCGGLGWTGPTVCASGYTCTVINEYYSQCL

SEQ ID NO: 49878 - protein, 410 aa, Penicillium decumbens
MVHLSATSLLLAAGILPNLALGAGLNDAAKAIGQVYFGSATDNPELSDSAYVKQLSNTADFGQITPGNSQKWDATEPSRNVFTFSGGDTVAKLAQSNGQKLRCHNLVWHSQLPSWVTNGNFNNATLISIMKNHITNLVQHYKGQCYAWDVVNEALNEDGSYRQSVWYNTIGPAYLPIAFATAASVDPTVKLYYNDYNIEYSGAKAAGARRIVELVQSYGAKIDGVGLQAHFIVGSTPSKDDQKKVMAGYTAYGVEVAITELDIRMNLPSTNAQLTQQATDYSNTVSACVETKNCVGITIWDWTDKYSWVPSTFSGQGAACPWDSNFQKKPAYNAILNALNAGSSTGGGSPTTTTTTTAAATTTTAPGGSGSTGGMAQHWGQCGGNGWTGPTTCASPYTCQASNPWYSQCL

SEQ ID NO: 49879 - protein, 400 aa, Penicillium capsulatum
MVFLSARTLVLAASVLPSLARASGLETAAVAIGKVYFGTATDNPELTDTAYVTQLNNTDDFGQITPGNSQKWDATEPTQNTFTFTSGDVIAGLAKANGQKLRCHNLVWHNQLPSWVTSGTWTNATLLAAMKNHITNVVKHYKGQCYAWDVVNEALNDDGTYRDDVFYQYIGEAYIPIAFATAAAADPDVKLYYNDYNIESAGAKATAAQKIVKLVQSYGAKIDGVGLQSHFIVGSTPSQSAQASNMAAFTALGVEVAITELDIRMTLPSTDALLAQQKTDYASTVAACVQTDGCVGITIWDWTDKYSWVPSTFSGQGAACPWDENLAKKPAYTGILTALGGTAATTSTAVGSTLTTTTTSTSTATAQHYGQCGGDGWTGAKVCASGYTCTYFNEWYSQCL

SEQ ID NO: 49880 - protein, 203 aa, Thermoclostridium stercorarium subsp. stercorarium DSM 8532
RIIYDNETGTHGGYDYELWKDYGNTIMELNDGGTFSCQWSNIGNALFRKGRKFNSDKTYQELGDIVVEYGCDYNPNGNSYLCVYGWTRNPLVEYYIVESWGSWRPPGATPKGTITVDGGTYEIYETTRVNQPSIDGTATFQQYWSVRTSKRTSGTISVTEHFKQWERMGMRMGKMYEVALTVEGYQSSGYANVYKNEIRIGAN

SEQ ID NO: 49881 - protein, 380 aa, Penicillium sp.
AGLNTAAKAIGLKYFGTATDNPELSDTAYETELNNTQDFGQLTPANSMKWDATEPQQNTFTFSGGDQIANLAKANGQMLRCHNLVWYNQLPSWVTGGSWTNETLLAAMKNHITNVVTHYKGQCYAWDVVNEALNDDGTYRSNVFYQYIGEAYIPIAFATAAAADPDAKLYYNDYNIEYPGAKATAAQNIVKLVQSYGARIDGVGLQSHFIVGQTPSTSAQQQNMAAFTALGVEVAITELDIRMQLPETSAQLTQQATDYQSTVQACVNTDSCVGITLWDWTDKYSWVPSTFSGWGDACPWDDNYQKKPAYNGILTALGGTPSSSTSYTLTPTTTSSGGSGSPTDVAQHWEQCGGLGWTGPTVCASGFTCTVINEYYSQCL

SEQ ID NO: 49882 - protein, 199 aa, Bacillus pumilus
ETIYDNRIGTHSGYDFELWKDYGNTSMTLNNGGAFSAQWNNIGNALFRKGKKFDSTKTHHQLGNISINYNAAFNPGGNSYLCVYGWTQSPLAEYYIVESWGTYRPTGTYKGSFYADGGTYDIYETLRVNQPSIIGDATFKQYWSVRQTKRTSGTVSVSEHFRKWESLGMPMGKMYETALTVEGYRSNGSANVMTNQLMI

SEQ ID NO: 49883 - protein, 199 aa, Bacillus pumilus
ETIYDNRIGTHGGYDFELWKDYGNTSMTLNNGGAFSAQWNNIGNALFRKGKKFDSTKTHHQLGNISINYNAAFNPGGNSYLCVYGWTQSPLAEYYIVESWGTYRPTGTYKGSFYADGGTYDIYETLRVNQPSIIGDATFKQYWSVRQTKRTSGTVSVSQHFRKWESLGMPMGKMYETALTVEGYRSNGSANVFTNQLMI

SEQ ID NO: 49884 - protein, 199 aa, Bacillus pumilus
ETIYDNRIGTHSGYDFELWKDYGNTSMTLNNGGAFSAQWNNIGNALFRKGKKFDSTKTHHQLGNISINYNAAFNPGGNSYLCVYGWTQSPLAEYYIVESWGTYRPTGTYKGSFYADGGTYDIYETLRVNQPSIIGDATFKQYWSVRQTKRTSGTVSVSEHFRKWESLGMPMGKMYETALTVEGYRSNGSANVITNQLMI

SEQ ID NO: 49885 - protein, 383 aa, Aspergillus aculeatus
GLDQAAVAKGLQYFGTATDNPELTDIPYVTQLNNTADFGQITPGNSMKWDATEPSQGTFTFTNGDVIADLAEGNGQYLRCHTLVWYNQLPSWVTSGTWTNATLTAALKNHITNVVSHYKGKCLHWDVVNEALNDDGTYRTNIFYTTIGEAYIPIAFAAAAAADPDAKLFYNDYNLEYGGAKAASARAIVQLVKNAGAKIDGVGLQAHFSVGTVPSTSSLISVLQSFTALGVEVAYTEADVRILLPTTATTLAQQSSDFQALVQSCVQTTGCVGFTIWDWTDKYSWVPSTFSGYGAALPWDENLVKKPAYNGLLAGMGVTVTTTTTTTTATATGKTTTTTAGAASTGTTAAHWGQCGGLNWSGPTVCASGYTCTYVNDYYSQCL

SEQ ID NO: 49886 - protein, 314 aa, Aspergillus oryzae
AGLHDAAVAKGLLYFGTATDNPELTNTSYVTQLNNTGDFGQITPGNSQKWDSTEPSQNEFSFTNGDVIADLADANDQKLRCHNLVWHQQLPNWVSSGSWTNETLTAVLQNHITNVVKHYKGRCYAWDVVNEALADDGSYRDSIWYKTVGEAYIPIAFAAAAAADKDVKLYYNDYSIEWGGSKSTAAQNIVKLIQSYGGKIDGVGLQAHFTVGQTPARKDLASNLKAFTDLGVEVAYTEVDVRMETPATDANLQQQSTEFANIVGACLDTEGCVGVTIWDWTDKYSWVPSTFPGYGAACPWDENFEKKPAYQGIL

SEQ ID NO: 49887 - protein, 382 aa, Rasamsonia byssochlamydoides
GLNTAAKAIGKLYFGTATDNPELSDVAYETQLNNTQDFGQITPGNSMKWDATEPEQNTFTFAAGDQIADLAEANGQILRCHNLVWYNQLPSWVTSGSWTNETLLAAMQNHITNVVTHYKGQCYAWDVVNEALNDDGTYRDNVFYQYIGEAYIPIAFATAAAADPNVKLYYNDYNIEYAGVKATAAQNIVKLVQSYGARIDGVGLQSHFIVGETPSTSTQASNMASFTALGVEVAITELDIRMQLPETTALLTQQSTDYQSTVQACVNTPRCVGITIWDWTDKYSWVPSTFSGYGDACPWDDNYQKKPAYYGILTALGGSASTTTVGTGTTTTSTATTTSTGSSGTGVAQHWGQCGGIGWTGPTVCASGYTCTVVNPYYSQCL

SEQ ID NO: 49888 - protein, 399 aa, Neosartorya
MVHLSSIAAALTALPLVYGAGLNTAAKAKGLKYFGSATDNPELTDTAYVAQLSNTDDFGQITPGNSMKWDATEPSQNSFSFANGDAIVNLANKNGQMMRCHTLVWHSQLPNWVSSGSWTNATLLAAMKNHITNVVTHYKGKCYAWDVVNEALNEDGTFRNSIFYQTIGEAYIPIAFATAAAADPSVKLYYNDYNIEYSGAKATAAQNIVKMIKAYGAKIDGVGLQGHFILGSTPSQSALTSVLEGYTALGVEVAYTELDIRMQLPSTDAKLAQQATEYQNVAAACVGTTGCVGVTIWDWTDKYSWVPSVFSGYGAALPWDENYVKKPAYNGILAGLGASGSTMTTTLTTTTKTSTTTTATSTGVAQKWGQCGGIGWTGPTTCVSGTTCQKLNDWYSQCL

SEQ ID NO: 49889 - protein, 197 aa, Bacillus altitudinis
IYNNEMGTHSGYDYELWKDYGNTSMTLNNGGAFTAGWNSIGNALFRKGKKFDSTKTHHQLGNISINYNANFNPGGNSYLCVYGWTQSPLAEYYIVDSWGTYRPTGAYKGSFYADGGTYDIYETTRVNQPSIIGIATFKQYWSVRQTKRTSGTVSVSAHFNKWESLGMPMGKMYETAFTVEGYQSSGSANVMTNQLFI

SEQ ID NO: 49890 - protein, 377 aa, Aspergillus fumigatus
GLNTAAKAKGLKYFGSATDNPELTDSAYVAQLSNTDDFGQITPGNSMKWDATEPSQNSFSFANGDAVVNLANKNGQLMRCHTLVWYSQLPNWVSSGSWTNATLLAAMKNHITNVVTHYKGKCYAWDVVNEALNEDGTFRNSVFYQIIGPAYIPIAFATAAAADPDVKLYYNDYNIEYSGAKATAAQNIVKMIKAYGAKIDGVGLQAHFIVGSTPSQSDLTTVLKGYTALGVEVAYTELDIRMQLPSTAAKLAQQSTDFQGVAAACVSTTGCVGVTIWDWTDKYSWVPSVFQGYGAPLPWDENYVKKPAYDGLMAGLGASGSGTTTTTTTTSTTTGGTDPTGVAQKWGQCGGIGWTGPTTCVSGTTCQKLNDWYSQCL

SEQ ID NO: 49891 - protein, 393 aa, Neosartorya fischeri
MVHLSSFAAALAALPLVYGAGLNTAAKAKGLKYFGSATDNPELTDSAYVAQLSNTDDFGQITPGNSMKWDATEPSQNSFSFANGDAVVNLANKNGQLMRCHTLVWHSQLPNWVSSGSWTNATLLAAMKNHITNVVTHYKGKCYAWDVVNEALNEDGTFRNSVFYQIIGPAYIPIAFATAAAADPDVKLYYNDYNIEYSGAKATAAQNIVKMIKAYGAKIDGVGLQAHFIVGSTPSQSDLTTVLKGYTALGVEVAYTELDIRMQMPSTAAKLAQQSTDFQGVAAACVSTTGCVGVTIWDWTDKYSWVPSVFQGYGAPLPWDENYVKKPAYNGLMAGLGATGSGTTTTTTTTGGAEPTGVAQKWGQCGGIGWNGPTTCVSGSICQKVNDWYSQCL

SEQ ID NO: 49892 - protein, 199 aa, Bacillus pumilus
ETIYDNRIGTHSGYDFELFKDYGNTSMTLNNGGAFSAQWNNIGNALFRKGKKFDSTKTHHQLGNISINYNAAFNPGGNSYLCVYGWTQSPLAEYYIVESWGTYRPTGTYKGSFYADGGTYDIYETLRVNQPSIIGDATFKQYWSVRQTKRTSGTVSVSEHFRKWESLGMPMGKMYETALTVEGYRSNGSANVMTNQLMI

SEQ ID NO: 49893 - protein, 199 aa, Bacillus pumilus
ETIYDNRIGTHSGYDFELHKDYGNTSMTLNNGGAFSAQWNNIGNALFRKGKKFDSTKTHHQLGNISINYNAAFNPGGNSYLCVYGWTQSPLAEYYIVESWGTYRPTGTYKGSFYADGGTYDIYETLRVNQPSIIGDATFKQYWSVRQTKRTSGTVSVSEHFRKWESLGMPMGKMYETALTVEGYRSNGSANVMTNQLMI

SEQ ID NO: 49894 - protein, 199 aa, Bacillus pumilus
ETIYDNRIGTHSGYDFELYKDYGNTSMTLNNGGAFSAQWNNIGNALFRKGKKFDSTKTHHQLGNISINYNAAFNPGGNSYLCVYGWTQSPLAEYYIVESWGTYRPTGTYKGSFYADGGTYDIYETLRVNQPSIIGDATFKQYWSVRQTKRTSGTVSVSEHFRKWESLGMPMGKMYETALTVEGYRSNGSANVMTNQLMI

SEQ ID NO: 49895 - protein, 377 aa, Aspergillus fumigatus
GLNTAAKAKGLKYFGSATDNPELTDSAYVAQLSNTDDFGQITPGNSMKWDATEPSQNSFSFANGDAVVNLANKNGQLMRCHTLVWHSQLPNWVSSGSWTNATLLAAMKNHITNVVTHYKGKCYAWDVVNEALNEDGTFRNSVFYQIIGPAYIPIAFATAAAADPDVKLYYNDYNIEYSGAKATAAQNIVKMIKAYGAKIDGVGLQAHFIVGSTPSQSDLTTVLKGYTALGVEVAYTELDIRMQLPSTAAKLAQQSTDFQGVAAACVSTTGCVGVTIWDWTDKYSWVPSVFQGYGAPLPWDENYVKKPAYDGLMAGLGASGSGTTTTTTTTSTTTGGTDPTGVAQKWGQCGGIGWTGPTTCVSGTTCQKLNDWYSQCL

SEQ ID NO: 49896 - protein, 383 aa, Aspergillus aculeatus
GLDQAAVAKGLQYFGTATDNPELTDIPYVTQLNNTADFGQITPGNSMKWDATEPSQGTFTFTKGDVIADLAEGNGQYLRCHTLVWYNQLPSWVTSGTWTNATLTAALKNHITNVVSHYKGKCLHWDVVNEALNDDGTYRTNIFYTTIGEAYIPIAFAAAAAADPDAKLFYNDYNLEYGGAKAASARAIVQLVKNAGAKIDGVGLQAHFSVGTVPSTSSLVSVLQSFTALGVEVAYTEADVRILLPTTATTLAQQSSDFQALVQSCVQTTGCVGFTIWDWTDKYSWVPSTFSGYGAALPWDENLVKKPAYNGLLAGMGVTVTTTTTTTTATATGKTTTTTTGATSTGTTAAHWGQCGGLNWSGPTACATGYTCTYVNDYYSQCL

SEQ ID NO: 49897 - protein, 313 aa, Aspergillus oryzae
GLHDAAVAKGLLYFGTATDNPELTNTSYVTQLNNTGDFGQITPGNSQKWDSTEPSQNEFSFTNGDVIADLADANDQKLRCHNLVWHQQLPNWVSSGSWTNETLTAVLQNHITNVVKHYKGRCYAWDVVNEALADDGSYRDSIWYKTVGEAYIPIAFAAAAAADKDVKLYYNDYSIEWGGSKSTAAQNIVKLIQSYGGKIDGVGLQAHFTVGQTPARKDLASNLKAFTDLGVEVAYTEVDVRMETPATDANLQQQSTEFANIVGACLDTEGCVGVTIWDWTDKYSWVPSTFPGYGAACPWDENFEKKPAYQGIL

SEQ ID NO: 49898 - protein, 197 aa, Dictyoglomus thermophilum
MQTSITLTSNASGTFDGYYYELWKDTGNTTMTVYTQGRFSCQWSNINNALFRTGKKYNQNWQSLGTIRITYSATYNPNGNSYLCIYGWSTNPLVEFYIVESWGNWRPPGACISMDSMILTTEGYKSLQEIFETQGVKVDNKEKVIELKYPLINRYGDVEYTSHFTKNGEKPTKRIKTNKGIELVNTYNHPLLVREGF

SEQ ID NO: 49899 - protein, 382 aa, Rasamsonia byssochlamydoides
GLNTAAKAIGKLYFGTATDNPELSDVAYETQLNNTQDFGQITPANSMKWDATEPEQNTFTFAAGDQIADLAEANGQILRCHNLVWYNQLPSWVTSGSWTNETLLAAMKNHITNVVTHYKGRCYAWDVVNEALNDDGTYRDNVFYQYIGEAYIPIAFETAAAADPNVKLYYNDYNIEYAGVKATAAQNIVKLVQSYGARIDGVGLQSHFIVGETPSTSTQASNMASFTALGVEVAITELDIRMQLPETTALLTQQSTDYQSTVQACVNTPGCVGITLWDWTDKYSWVPSTFSGYGDACPWDDNYQKKPAYYGILTALGGSASTTTVGTGTTTTSTATTSSTGSSGTGVAQHWGQCGGIGWTGPTVCASGYTCTVVNPYYSQCL

SEQ ID NO: 49900 - protein, 381 aa, Aspergillus steynii IBT 23096
GLHQAAVAKGLNYFGTATDNPELTDIPYVTQLKNTTDFGQITPGNSQKWDSTEPSQNTFSFTKGDAIADLAKANNQVLRCHNLVWHQQLPNWVTSGSWTNATLTAVLKNHITNVVKHYKGRCYAWDVVNEALNEDGSYRDSIFYRTIGEAYLPIAFAAAAAADPDVKLYYNDYNIEWGGNKAAGAVRIVKLIQSYGVKIDGVGLQGHFTVGNIPGKNDLASTLKTYTVLGVEVAYTEVDVRMETPATDAKLAQQSIDYQNLVQACVETPKCVGFTIWDWTDKYSWVPSTFPGQGAACPWDENLKKKPAYTGLLKGLGGNRSESSSSSSSSTPTSTVSAPHTTSTNVAQKWGQCGGNNWTGPTTCVSGTTCTKLNDWYSQCL

SEQ ID NO: 49901 - protein, 397 aa, Aspergillus fumigatus
MVHLSSLAAALAALPLVYGAGLNTAAKAKGLKYFGSATDNPELTDSAYVAQLSNTDDFGQITPGNSMKWDATEPSQNSFSFANGDAVANLANKNGQLMRCHTLVWHSQLPNWVSSGSWTNATLLAAMKNHITNVVTHYKGKCYAWDVVNEALNEDGTFRNSVFYQIIGPAYIPIAFATAAAADPDVKLYYNDYNIEYSGAKATAAQNIVKMIKAYGAKIDGVGLQAHFIVGSTPSQSDLTTVLKGYTALGVEVAYTELDIRMQLPSTAAKLAQQSTDFQGVAAACVSTTGCVGVTIWDWTDKYSWVPSVFQGYGAPLPWDENYVKKPAYDGLMAGLGASGSGTTTTTTTTSTTTGGTDPTGVAQKWGQCGGIGWTGPTTCVSGTTCQKLNDWYSQCL

SEQ ID NO: 49902 - protein, 397 aa, Aspergillus fumigatus
MVHLSSLAAALAALPLVYGAGLNTAAKAKGLKYFGSATDNPELTDSAYVAQLSNTDDFGQITPGNSMKWDATEPSQNSFSFTNGDAVVNLANKNGQLMRCHTLVWHSQLPNWVSSGSWTNATLLAAMKNHITNVVTHYKGKCYAWDVVNEALNEDGTFRNSVFYQIIGPAYIPIAFATAAAADPDVKLYYNDYNIEYSGAKATAAQNIVKMIKAYGAKIDGVGLQAHFIVGSTPSQSDLTTVLKGYTALGVEVAYTELDIRMQLPSTAAKLAQQSTDFQGVAAACVSTTGCVGVTIWDWTDKYSWVPSVFQGYGAPLPWDENYVKKPAYDGLMAGLGASGSGTTTTTTTTSTTTGGTDPTGVAQKWGQCGGIGWTGPTTCVSGTTCQKLNDWYSQCL

SEQ ID NO: 49903 - protein, 397 aa, Aspergillus fumigatus
MVHLSSLAAALAALPLVYGAGLNTAAKAKGLKYFGSATDNPELTDSAYVAQLSNTDDFGQITPGNSMKWDATEPSQNSFSFANGDAVVNLANKNGQLMRCHTLVWHSQLPNWVSSGSWTNATLLAAMKNHITNVVTHYKGKCYAWDVVNEALNEDGTFRNSVFYQIIGPAYIPIAFATAAAADPDVKLYYNDYNIEYSGAKATAAQNIVKMIKAYGAKIDGVGLQAHFIVGSTPSQSDLTTVLKGYTALGVEVAYTELDIRMQLPSTAAKLAQQSTDFQGVAAACVSTTGCVGVTIWDWTDKYSWVPSVFQGYGAPLPWDENYVKKPAYDGLMAGLGASGSTTTTTTTTTSTTTGGTDPTGVAQKWGQCGGIGWTGPTTCVSGTTCQKLNDWYSQCL

SEQ ID NO: 49904 - protein, 397 aa, Aspergillus fumigatus
MVHLSSLAAALAALPLVYGAGLNTAAKAKGLKYFGSATDNPELTDSAYVAQLSNTDDFGQITPGNSMKWDATEPSQNSFSFANGDAVVNLANKNGQLMRCHTLVWHSQLPNWVSSGSWTNATLLAAMKNHITNVVTHYKGKCYAWDVVNEALNEDGTFRNSVFYQIIGPAYIPIAFATAAAADPDVKLYYNDYNIEYSGAKATAAQNIVKMIKAYGAKIDGVGLQAHFIVGSTPSQSDLTTVLKGYTALGVEVAYTELDIRMQLPSTAAKLAQQSTDFQGVAAACVSTTGCVGVTIWDWTDKYSWVPSVFQGYGAPLPWDENYVKKPAYDGLMAGLGASGSGTTTTTTTTTTTTGGTDPTGVAQKWGQCGGIGWTGPTTCVSGTTCQKLNDWYSQCL

SEQ ID NO: 49905 - protein, 397 aa, Aspergillus fumigatus
MVHLSSLAAALAALPLVYGAGLNTAAKAKGLKYFGSATDNPELTDSAYVAQLSNTDDFGQITPGNSMKWDATEPSQNSFSFANGDAVVNLANKNGQLMRCHTLVWHSQLPNWVSSGSWTNATLLAAMKNHITNVVTHYKGKCYAWDVVNEALNEDGTFRNSVFYQIIGPAYIPIAFATAAAADPDVKLYYNDYNIEYSGAKATAAQNIVKMIKAYGAKIDGVGLQAHFIVGSTPSQSDLTTVLKGFTALGVEVAYTELDIRMQLPSTAAKLAQQSTDFQGVAAACVSTTGCVGVTIWDWTDKYSWVPSVFQGYGAPLPWDENYVKKPAYDGLMAGLGASGSGTTTTTTTTSTTTGGTDPTGVAQKWGQCGGIGWTGPTTCVSGTTCQKLNDWYSQCL

SEQ ID NO: 49906 - protein, 397 aa, Aspergillus fumigatus
MVHLSSLAAALAALPLVYGAGLNTAAKAKGLKYFGSATDNPELTDSAYVAQLSNTDDFGQITPGNSMKWDATEPSQNSFSFANGDAVVNLANKNGQLMRCHTLVWHSQLPNWVSSGSWTNATLLAAMKNHITNVVTHYKGKCYAWDVVNEALNEDGTFRNSVFYQIIGPAYIPIAFATAAAADPDVKLYYNDYNIEYSGAKATAAQNIVKLIKAYGAKIDGVGLQAHFIVGSTPSQSDLTTVLKGYTALGVEVAYTELDIRMQLPSTAAKLAQQSTDFQGVAAACVSTTGCVGVTIWDWTDKYSWVPSVFQGYGAPLPWDENYVKKPAYDGLMAGLGASGSGTTTTTTTTSTTTGGTDPTGVAQKWGQCGGIGWTGPTTCVSGTTCQKLNDWYSQCL

SEQ ID NO: 49907 - protein, 397 aa, Aspergillus fumigatus
MVHLSSLAAALAALPLVYGAGLNTAAKAKGLKYFGSATDNPELTDSAYVAQLSNTDDFGQITPGNSMKWDATEPSQNSFSFANGDAVVNLANKNGQLMRCHTLVWHSQLPNWVSSGSWTNATLLAAMKNHITNVVTHYKGKCYAWDVVNEALNDDGTFRNSVFYQIIGPAYIPIAFATAAAADPDVKLYYNDYNIEYSGAKATAAQNIVKMIKAYGAKIDGVGLQAHFIVGSTPSQSDLTTVLKGYTALGVEVAYTELDIRMQLPSTAAKLAQQSTDFQGVAAACVSTTGCVGVTIWDWTDKYSWVPSVFQGYGAPLPWDENYVKKPAYDGLMAGLGASGSGTTTTTTTTSTTTGGTDPTGVAQKWGQCGGIGWTGPTTCVSGTTCQKLNDWYSQCL

SEQ ID NO: 49908 - protein, 397 aa, Aspergillus fumigatus
MVHLSSLAAALAALPLVYGAGLNTAAKAKGLKYFGSATDNPELTDSAYVAQLSNTDDFGQITPGNSMKWDATEPSQNSFSFANGDAVVNLANKNGQLLRCHTLVWHSQLPNWVSSGSWTNATLLAAMKNHITNVVTHYKGKCYAWDVVNEALNEDGTFRNSVFYQIIGPAYIPIAFATAAAADPDVKLYYNDYNIEYSGAKATAAQNIVKMIKAYGAKIDGVGLQAHFIVGSTPSQSDLTTVLKGYTALGVEVAYTELDIRMQLPSTAAKLAQQSTDFQGVAAACVSTTGCVGVTIWDWTDKYSWVPSVFQGYGAPLPWDENYVKKPAYDGLMAGLGASGSGTTTTTTTTSTTTGGTDPTGVAQKWGQCGGIGWTGPTTCVSGTTCQKLNDWYSQCL

SEQ ID NO: 49909 - protein, 397 aa, Aspergillus fumigatus
MVHLSSLAAALAALPLVYGAGLNTAAKAKGLKYFGSATDNPELTDSAYVAQLSNTDDFGQITPGNSMKWDATEPSQNSFSFANGDAVVNLANKNGQLMRCHTLVWHSQLPSWVSSGSWTNATLLAAMKNHITNVVTHYKGKCYAWDVVNEALNEDGTFRNSVFYQIIGPAYIPIAFATAAAADPDVKLYYNDYNIEYSGAKATAAQNIVKMIKAYGAKIDGVGLQAHFIVGSTPSQSDLTTVLKGYTALGVEVAYTELDIRMQLPSTAAKLAQQSTDFQGVAAACVSTTGCVGVTIWDWTDKYSWVPSVFQGYGAPLPWDENYVKKPAYDGLMAGLGASGSGTTTTTTTTSTTTGGTDPTGVAQKWGQCGGIGWTGPTTCVSGTTCQKLNDWYSQCL

SEQ ID NO: 49910 - protein, 397 aa, Aspergillus fumigatus
MVHLSSLAAALAALPLVYGAGLNTAAKAKGLKYFGSATDNPELTDSAYVAQLSNTDDFGQITPGNSMKWDATEPSQNSFSFANGDAIVNLANKNGQLMRCHTLVWHSQLPNWVSSGSWTNATLLAAMKNHITNVVTHYKGKCYAWDVVNEALNEDGTFRNSVFYQIIGPAYIPIAFATAAAADPDVKLYYNDYNIEYSGAKATAAQNIVKMIKAYGAKIDGVGLQAHFIVGSTPSQSDLTTVLKGYTALGVEVAYTELDIRMQLPSTAAKLAQQSTDFQGVAAACVSTTGCVGVTIWDWTDKYSWVPSVFQGYGAPLPWDENYVKKPAYDGLMAGLGASGSGTTTTTTTTSTTTGGTDPTGVAQKWGQCGGIGWTGPTTCVSGTTCQKLNDWYSQCL

SEQ ID NO: 49911 - protein, 403 aa, Penicillium sp.
MVRLSPVLLASIAGSGLPLYAQAAGLNTAAKAIGLKYFGTATDNPELSDTAYETELNNTQDFGQLTPANSMKWDATEPQQNTFTFSGGDQIANLAKANGQMLRCHNLVWYNQLPSWVTGGSWTNETLLAAMKNHITNVVTHYKGQCYAWDVVNEALNDDGTYRSNVFYQYIGEAYIPIAFATAAAADPDAKLYYNDYNIEYPGAKATAAQNIVKLVQSYGARIDGVGLQSHFIVGQTPSTSAQQQNMAAFTALGVEVAITELDIRMQLPETSAQLTQQATDYQSTVQACVNTDSCVGITLWDWTDKYSWVPSTFSGWGDACPWDDNYQKKPAYNGILTALGGTPSSSTSYTLTPTTTSSGGSGSPTDVAQHWEQCGGLGWTGPTVCASGFTCTVINEYYSQCL

SEQ ID NO: 49912 - protein, 200 aa, Paenibacillus sp.
ITSNQTGTQDGYDYELWKDSGTTSMTLNSGGAFSATWSNINNALFRKGKKFNATQTHQQIGNISINYAATFNPGGNSYLTVYGWTKSSLIEYYIMDNWGTYRPSGTNKGSFSVDGGTYDIYETTRVNQPSIEGTATFKQYWSIRTAKRSSGTISVSEHFKKWESLGMSLGKLYEVALTVEGYQSSGNANVTTNVLTIGGS

SEQ ID NO: 49913 - protein, 188 aa, Nocardiopsis sp. NRRL 18262; identical to SEQ ID NO: 80

SEQ ID NO: 49914 - protein, 187 aa, Nocardiopsis sp.
ADIIGGLAYTMGGRCSVGFAATNAAGQPGFVTAGHCGRVGTQVTIGNGRGVFEQSVFPGNDAAFVRGTSNFTLTNLVSRYNTGGYATVAGHNQAPIGSSVCRSGSTTGWHCGTIQARGQSVSYPEGTVTNMTRTTVCAEPGDSGGSYISGTQAQGVTSGGSGNCRTGGTTFYQEVTPMVNSWGVRLR

SEQ ID NO: 49915 - protein, 366 aa, Meripilus giganteus [sequence omitted]

SEQ ID NO: 49916 - protein, 547 aa, Meripilus giganteus
TPTGRNLKLHEAREDLPAGFSLRGAASPDTTLKLRIALVQNNFAELEDKLYDVSTPSSANYGNHLSKEEVEQYIAPAPESVKAVNAWLTENGLDAHTISPAGDWLAFEVPVSKANELFDADFSVFTHDESGLEAIRTLAYSIPAELQGHLDLVHPTVTFPNPNAHLPVVRSTQPIRNLTGRAIPASCASTITPACLQAIYGIPTTKATQSSNKLAVSGFIDQFANKADLKSFLAQFRKDISSSTTFSLQTLDGGENDQSPSEAGIEANLDIQYTVGLATGVPTTFISVGDDFQDGNLEGFLDIINFLLGESNPPQVLTTSYGQNENTISAKLANQLCNAYAQLGARGTSILFASGDGGVSGSQSAHCSNFVPTFPSGCPFMTSVGATQGVSPETAAAFSSGGFSNVFGIPSYQASAVSGYLSALGSTNSGKFNRSGRGFPDVSTQGVDFQIVSGGQTIGVDGTSCASPTFASVISLVNDRLIAAGKSPLGFLNPFLYSSAGKAALNDVTSGSNPGCSTNGFPAKAGWDPVTGLGTPNFAKLLTAVGL

SEQ ID NO: 49917 - protein, 564 aa, Meripilus giganteus; identical to SEQ ID NO: 81

SEQ ID NO: 49918 - protein, 365 aa, Meripilus giganteus
IPASCASTITPACLQAIYGIPTTKATQSSNKLAVSGFIDQFANKADLKSFLAQFRKDISSSTTFSLQTLDGGENDQSPSEAGIEANLDIQYTVGLATGVPTTFISVGDDFQDGNLEGFLDIINFLLGESNPPQVLTTSYGQNENTISAKLANQLCNAYAQLGARGTSILFASGDGGVSGSQSAHCSNFVPTFPSGCPFMTSVGATQGVSPETAAAFSSGGFSNVFGIPSYQASAVSGYLSALGSTNSGKFNRSGRGFPDVSTQGVDFQIVSGGQTIGVDGTSCASPTFASVISLVNDRLIAAGKSPLGFLNPFLYSSAGKAALNDVTSGSNPGCSTNGFPAKAGWDPVTGLGTPNFAKLLTAVGL

SEQ ID NO: 49919 - protein, 187 aa, Nocardiopsis sp.
DIIGGLAYTMGGRCSVGFAATNAAGQPGFVTAGHCGRVGTQVTIGNGRGVFEQSVFPGNDAAFVRGTSNFTLTNLVSRYNTGGYATVAGHNQAPIGSSVCRSGSTTGWHCGTIQARGQSVSYPEGTVTNMTRTTVCAEPGDSGGSYISGTQAQGVTSGGSGNCRTGGTTFYQEVTPMVNSWGVRLRT

SEQ ID NO: 49920 - protein, 366 aa, Meripilus giganteus
AIPASCASTITPACLQAIYGIPTTKATQSSNKLAVSGFIDQFANKADLKSFLAQFRKDISSSTTFSLQTLDGGENDQSPSEAGIEANLDIQYTVGLATGVPTTFISVGDDFQDGNLEGFLDIINFLLGESNPPQVLTTSYGQNENTISAKLANQLCNAYAQLGARGTSILFASGDGGVSGSQSAHCSNFVPTFPSGCPFMTSVGATQGVSPEIAAAFSSGGFSNVFGIPSYQASAVSGYLSALGSTNSGKFNRSGRGFPDVSTQGVDFQIVSGGQTIGVDGTSCASPTFASVISLVNDRLIAAGKSPLGFLNPFLYSSAGKAALNDVTSGSNPGCSTNGFPAKAGWDPVTGLGTPNFAKLLTAVGL

SEQ ID NO: 49921 - protein, 366 aa, Meripilus giganteus
AIPASCASTITPACLQAIYGIPTTKATQSSNKLAVSGFIDQFANKADLKSFLAQFRKDISSSTTFSLQTLDGGENDQSPSRAGIEANLDIQYTVGLATGVPTTFISVGDDFQDGNLEGFLDIINFLLGESNPPQVLTTSYGQNENTISAKLANQLCNAYAQLGARGTSILFASGDGGVSGSQSAHCSNFVPTFPSGCPFMTSVGATQGVSPETAAAFSSGGFSNVFGIPSYQASAVSGYLSALGSTNSGKFNRSGRGFPDVSTQGVDFQIVSGGQTIGVDGTSCASPTFASVISLVNDRLIAAGKSPLGFLNPFLYSSAGKAALNDVTSGSNPGCSTNGFPAKAGWDPVTGLGTPNFAKLLTAVGL

SEQ ID NO: 49922 - protein, 366 aa, Meripilus giganteus
AIPASCASTITPACLQAIYGIPTTKATQSSNKLAVSGFIDQFANKADLKSFLAQFRKDISSSTTFSLQTLDGGENDQSPSEAGIEANLDIQYTVGLATGVPTTFISVGDDFQDGNLEGFLDIINFLLGESNPPQVLTTSYGQNENTISAKLANQLCNAYAQLGARGTSILFASGDGGVSGSQSAHCSNFVPTFPSGCPFMTSVGATQGVSPETAAFFSSGGFSNVFGIPSYQASAVSGYLSALGSTNSGKFNRSGRGFPDVSTQGVDFQIVSGGQTIGVDGTSCASPTFASVISLVNDRLIAAGKSPLGFLNPFLYSSAGKAALNDVTSGSNPGCSTNGFPAKAGWDPVTGLGTPNFAKLLTAVGL

SEQ ID NO: 49923 - protein, 366 aa, Meripilus giganteus
AIPASCASTITPACLQAIYGIPTTKATQSSNKLAVSGFIDQFANKADLKSFLAQFRKDISSSTTFSLQTLDGGENDQSPSEAGIEANLDIQYLVGLATGVPTTFISVGDDFQDGNLEGFLDIINFLLGESNPPQVLTTSYGQNENTISAKLANQLCNAYAQLGARGTSILFASGDGGVSGSQSAHCSNFVPTFPSGCPFMTSVGATQGVSPETAAAFSSGGFSNVFGIPSYQASAVSGYLSALGSTNSGKFNRSGRGFPDVSTQGVDFQIVSGGQTIGVDGTSCASPTFASVISLVNDRLIAAGKSPLGFLNPFLYSSAGKAALNDVTSGSNPGCSTNGFPAKAGWDPVTGLGTPNFAKLLTAVGL

SEQ ID NO: 49924 - protein, 366 aa, Meripilus giganteus
AIPASCASTITPACLQAIYGIPTTKATQSSNKLAVSGFIDQFANKADLKSFLAQFRKDISSSTTFSLQTLDGGENDLSPSEAGIEANLDIQYTVGLATGVPTTFISVGDDFQDGNLEGFLDIINFLLGESNPPQVLTTSYGQNENTISAKLANQLCNAYAQLGARGTSILFASGDGGVSGSQSAHCSNFVPTFPSGCPFMTSVGATQGVSPETAAAFSSGGFSNVFGIPSYQASAVSGYLSALGSTNSGKFNRSGRGFPDVSTQGVDFQIVSGGQTIGVDGTSCASPTFASVISLVNDRLIAAGKSPLGFLNPFLYSSAGKAALNDVTSGSNPGCSTNGFPAKAGWDPVTGLGTPNFAKLLTAVGL

SEQ ID NO: 49925 - protein, 366 aa, Meripilus giganteus
AIPASCASTITPACLQAIYGIPTTKATQSSNKLAVSGFIDQFANKADLKSFLAQFRKDISSSTTFSLQTLDGGENDQSPSEAGIEANLDIQYTVGLATGVPTTFISVGDDFQDGNLEGFLDIINFLLGESNPPQVLTTSYGQNENTISAKLANQLCNAYAQLGARGTSILFASGDGGVSGSQSAHCSNFVPTFPSGCPFMTSVGATQGVSPETAAAFSSGGFSNVFGIPSYQASAVSGYLSALGSTNSGKFNRSGRGFPDVSTQGVDFQIVSGGQTIGVDGTSCASPTFASVISLVNDRLIAAGKSPLGFLNPLLYSSAGKAALNDVTSGSNPGCSTNGFPAKAGWDPVTGLGTPNFAKLLTAVGL

SEQ ID NO: 49926 - protein, 366 aa, Meripilus giganteus
AIPASCASTITPACLQAIYGIPTTKATQSSNKLAVSGFIDQFANKADLKSFLAQFRKDISSSTTFSLQTLDGGENDQSPSHAGIEANLDIQYTVGLATGVPTTFISVGDDFQDGNLEGFLDIINFLLGESNPPQVLTTSYGQNENTISAKLANQLCNAYAQLGARGTSILFASGDGGVSGSQSAHCSNFVPTFPSGCPFMTSVGATQGVSPETAAAFSSGGFSNVFGIPSYQASAVSGYLSALGSTNSGKFNRSGRGFPDVSTQGVDFQIVSGGQTIGVDGTSCASPTFASVISLVNDRLIAAGKSPLGFLNPFLYSSAGKAALNDVTSGSNPGCSTNGFPAKAGWDPVTGLGTPNFAKLLTAVGL

SEQ ID NO: 49927 - protein, 366 aa, Meripilus giganteus
AIPASCASTITPACLQAIYGIPTTKATQSSNKLAVSGFIDQFANKADLKSFLAQFRKDISSSTTFSLQTLDGGENDQSPSEAGIEANLDIQYTVGLATGVPTTFISVGDDKQDGNLEGFLDIINFLLGESNPPQVLTTSYGQNENTISAKLANQLCNAYAQLGARGTSILFASGDGGVSGSQSAHCSNFVPTFPSGCPFMTSVGATQGVSPETAAAFSSGGFSNVFGIPSYQASAVSGYLSALGSTNSGKFNRSGRGFPDVSTQGVDFQIVSGGQTIGVDGTSCASPTFASVISLVNDRLIAAGKSPLGFLNPFLYSSAGKAALNDVTSGSNPGCSTNGFPAKAGWDPVTGLGTPNFAKLLTAVGL

SEQ ID NO: 49928 - protein, 366 aa, Meripilus giganteus
AIPASCASTITPACLQAIYGIPTTKATQSSNKLAVSGFIDQFANKADLKSFLAQFRKDISSSTTFSLQTLDGGENDQSPSEAGIEANLDIQYTVGLATGVPTTFISVGDDFQDGNLEGFLDIINFLLGESNPPQVLTTSYGQNENTISAKLANQLCNAYAQLGARGTSILFASGDGGVSGSQSAHCSNFVPTFPSGCPFMTSVGATQGVSPETAAAFSSGGFSNVFGIPSYQASAVSGYLSALGSTNSGKFNRSGRGFPDVSTQGVDFQIVSGGQTIGVDGTSCASPTFASVISLVNDRLIAAGKSPLGFLNPFLYSSAGKAALNDVTSGSNPGCSTSGFPAKAGWDPVTGLGTPNFAKLLTAVGL

SEQ ID NO: 49929 - protein, 366 aa, Meripilus giganteus
AIPASCASTITPACLQAIYGIPTTKATQSSNKLAVSGFIDQFANKADLKSFLAQFRKDISSSTTFSLQTLDGGENDQSPSEAGIEANLDIQYTVGLATGVPTTFISVGDDFQDGNLEGFLDIINFLLGESNPPQVLTTSYGQNENTISAKLANQLCNAYAQLGARGTSILFASGDGGVSGSQSAHCSNFVPTFPSGCPFMTSVGATQGVSPETAAAFSSGGFSNVFGIPSYQASAVSGYLSALGSTNSGKFNRSGRGFPDVSTQGVDFQIVSGGQTIGVDGTSCASPTFASVISLVNDNLIAAGKSPLGFLNPFLYSSAGKAALNDVTSGSNPGCSTNGFPAKAGWDPVTGLGTPNFAKLLTAVGL

SEQ ID NO: 49930 - protein, 366 aa, Meripilus giganteus
AIPASCASTITPACLQAIYGIPTTKATQSSNKLAVSGFIDQFANKADLKSFLSQFRKDISSSTTFSLQTLDGGENDQSPSEAGIEANLDIQYTVGLATGVPTTFISVGDDFQDGNLEGFLDIINFLLGESNPPQVLTTSYGQNENTISAKLANQLCNAYAQLGARGTSILFASGDGGVSGSQSAHCSNFVPTFPSGCPFMTSVGATQGVSPETAAAFSSGGFSNVFGIPSYQASAVSGYLSALGSTNSGKFNRSGRGFPDVSTQGVDFQIVSGGQTIGVDGTSCASPTFASVISLVNDRLIAAGKSPLGFLNPFLYSSAGKAALNDVTSGSNPGCSTNGFPAKAGWDPVTGLGTPNFAKLLTAVGL

SEQ ID NO: 49931 - protein, 366 aa, Meripilus giganteus
AIPASCASTITPACLQAIYGIPTTKATQSSNKLAVSGFIDQFANKADLKSFLAQFRKDISSSTTFSLQTLDGGENDQSPSEAGIEANLDIQYTVGLATGVPTTFISVGDDFQDGNLEGFLDIINFLLGESNPPQVLTTSYGQNENTISAKLANQLCNAYAQLGARGTSILFASGDGGVSGSQSAHCSNFVPTFPSGCPFMTSVGATQGVSPETAAAFSSGGFSNVFGWPSYQASAVSGYLSALGSTNSGKFNRSGRGFPDVSTQGVDFQIVSGGQTIGVDGTSCASPTFASVISLVNDRLIAAGKSPLGFLNPFLYSSAGKAALNDVTSGSNPGCSTNGFPAKAGWDPVTGLGTPNFAKLLTAVGL

SEQ ID NO: 49932 - protein, 366 aa, Meripilus giganteus
AIPASCASTITPACLQAIYGIPTTKATQSSNKLAVSGFIDQFANKADLKSFLAQFRKDISSSTTFSLQTLDGGENDQSPSEAGIEANLDIQYTVGLATGVPTTFISVGDDFQDGNLEGFLDIINFLLGESNPPQVLTTSYGQNENTISAKLANQLCNAYAQLGARGTSILFASGDGGVSGSQSAHCSNFVPTFPSGCPFMTSVGATQGVSPETAAAFSSGGFSNVFGIPSYQASAVSGYLSALGSTNSGKFNRSGRGFPDVSTQGVDFQIVSGGQTIGVDGTSCASPTFASVISLVNDRLIAAGKSPLGPLNPFLYSSAGKAALNDVTSGSNPGCSTNGFPAKAGWDPVTGLGTPNFAKLLTAVGL

SEQ ID NO: 49933 - protein, 366 aa, Meripilus giganteus
AIPASCASTITPACLQAIYGIPTTKATQSSNKLAVSGFIDQFANKADLKSFLAQFRKDISSSTTFSLQTLDGGENDQSPSEAGIEANLDIQYTVGLATGVPTTFISVGDDFQDGNLEGFLDIINFLLGESNPPQVLTTSYGQNENTISAKLANQLCNAYAQLGARGTSILFASGDGGVSGSQSAHCSNFVPTFPSGCPFMTSVGATQGVSPETAAAFSSGGFSNVFGIPSYQASAVSGYLSALGSTNSGKFNRSGRGFPDVSTQGVDFQIVRGGQTIGVDGTSCASPTFASVISLVNDRLIAAGKSPLGFLNPFLYSSAGKAALNDVTSGSNPGCSTNGFPAKAGWDPVTGLGTPNFAKLLTAVGL

SEQ ID NO: 49934 - protein, 366 aa, Meripilus giganteus
AIPASCASTITPACLQAIYGIPTTKATQSSNKLAVSGFIDQFANKADLKSFLAQFRKDISSSTTFSLQTLDGGENDQSPSEAGIEANLDIQYTVGLATGVPTTFISVGDDFQDGNLEGFLDIINFLLGESNPPQVLTTSYGQNENTISAKLANNLCNAYAQLGARGTSILFASGDGGVSGSQSAHCSNFVPTFPSGCPFMTSVGATQGVSPETAAAFSSGGFSNVFGIPSYQASAVSGYLSALGSTNSGKFNRSGRGFPDVSTQGVDFQIVSGGQTIGVDGTSCASPTFASVISLVNDRLIAAGKSPLGFLNPFLYSSAGKAALNDVTSGSNPGCSTNGFPAKAGWDPVTGLGTPNFAKLLTAVGL

SEQ ID NO: 49935 - protein, 366 aa, Meripilus giganteus
AIPASCASTITPACLQAIYGIPTTKATQSSNKLAVSGFIDQFANKADLKSFLAQFRKDISSSTTFSLQTLDGGENDQSPSEAGIEANLDIQYTVGLATGVPTTFISVGDDFQDGNLEGFLDIINFLLGESNPPQVLTTSYMQNENTISAKLANQLCNAYAQLGARGTSILFASGDGGVSGSQSAHCSNFVPTFPSGCPFMTSVGATQGVSPETAAAFSSGGFSNVFGIPSYQASAVSGYLSALGSTNSGKFNRSGRGFPDVSTQGVDFQIVSGGQTIGVDGTSCASPTFASVISLVNDRLIAAGKSPLGFLNPFLYSSAGKAALNDVTSGSNPGCSTNGFPAKAGWDPVTGLGTPNFAKLLTAVGL

SEQ ID NO: 49936 - protein, 366 aa, Meripilus giganteus
AIPASCASTITPACLQAIYGIPTTKATQSSNKLAVSGFIDQFANKADLKSFLAQFRKDISSSTTFSLQTLDGGENDQSPSEAGIEANLDIQYTVGLATGVPTTFISVGDDFQDGNLEGFLDIINFLLGESNPPQVLTTSYGQNENTISAKLANQLCIAYAQLGARGTSILFASGDGGVSGSQSAHCSNFVPTFPSGCPFMTSVGATQGVSPETAAAFSSGGFSNVFGIPSYQASAVSGYLSALGSTNSGKFNRSGRGFPDVSTQGVDFQIVSGGQTIGVDGTSCASPTFASVISLVNDRLIAAGKSPLGFLNPFLYSSAGKAALNDVTSGSNPGCSTNGFPAKAGWDPVTGLGTPNFAKLLTAVGL

SEQ ID NO: 49937 - protein, 366 aa, Meripilus giganteus
AIPASCASTITPACLQAIYGIPTTKATQSSNKLAVSGFIDQFANKADLKSFLAQFRKDISSSTTFSLQTLDGGENDQSPSEAGIEANLDIQYTVGLATGVPTTFISVGDDFQDGNLEGFLDIINFLLGESNPPQVLTTSYGQNENTISAKLANQLCNAYAQLGARGTSILFASGDGGVSGSQSAHCSNFVPTFPSGCPFMTSVGATQGGSPETAAAFSSGGFSNVFGIPSYQASAVSGYLSALGSTNSGKFNRSGRGFPDVSTQGVDFQIVSGGQTIGVDGTSCASPTFASVISLVNDRLIAAGKSPLGFLNPFLYSSAGKAALNDVTSGSNPGCSTNGFPAKAGWDPVTGLGTPNFAKLLTAVGL

SEQ ID NO: 49938 - protein, 366 aa, Meripilus giganteus
AIPASCASTITPACLQAIYGIPTTKATQSSNKLAVSGFIDQFANKADLKSFLAQFRKDISSSTTFSLQTLDGGENDQSPSEAGIEANLDIQYTVGLATGVPTTFISVGDDFQDGNLEGFLDIINFLLGESNPPQVLTTSYGQNENTISAKLANQLCNAYAQLGARGTSILFASGDGGVSGSQSAHCSLFVPTFPSGCPFMTSVGATQGVSPETAAAFSSGGFSNVFGIPSYQASAVSGYLSALGSTNSGKFNRSGRGFPDVSTQGVDFQIVSGGQTIGVDGTSCASPTFASVISLVNDRLIAAGKSPLGFLNPFLYSSAGKAALNDVTSGSNPGCSTNGFPAKAGWDPVTGLGTPNFAKLLTAVGL

SEQ ID NO: 49939 - protein, 366 aa, Meripilus giganteus
AIPASCASTITPACLQAIYGIPTTKATQSSNKLAVSGFIDQFANKADLKSFLAQFRKDISSSTTFSLQTLDGGENDQSPSEAGIEANLDIQYTVGLATGVPTTFISVGDDFQDGNLEGFLDIILFLLGESNPPQVLTTSYGQNENTISAKLANQLCNAYAQLGARGTSILFASGDGGVSGSQSAHCSNFVPTFPSGCPFMTSVGATQGVSPETAAAFSSGGFSNVFGIPSYQASAVSGYLSALGSTNSGKFNRSGRGFPDVSTQGVDFQIVSGGQTIGVDGTSCASPTFASVISLVNDRLIAAGKSPLGFLNPFLYSSAGKAALNDVTSGSNPGCSTNGFPAKAGWDPVTGLGTPNFAKLLTAVGL

SEQ ID NO: 49940 - protein, 366 aa, Meripilus giganteus
AIPASCASTITPACLQAIYGIPTTKATQSSNKLAVSGFIDQFANKADLKSFLAQFRKDISSSTTFSLQTLDGGENDQSPSEAGIEANLDIQYTVGLATGVPTTFISVGDDFQDGNLEGFLDIINFLLGESNPPQVLTTSYGQNENTISAKLANQLCNAYAQLGARGTSILFASGDGGVSGSQSAHCSNFVPTFPSGCPFMTSVGATQGVSPETAAAFSSGGFSNVFGIPSYQASAVSGYLSALGSTNSGKFNRSGRGFPDVSTQGVDFQIVSGGQTIGVDGTSCASPTFASVITLVNDRLIAAGKSPLGFLNPFLYSSAGKAALNDVTSGSNPGCSTNGFPAKAGWDPVTGLGTPNFAKLLTAVGL

SEQ ID NO: 49941 - protein, 366 aa, Meripilus giganteus
AIPASCASTITPACLQAIYGIPTTKATQSSNKLAVSGFIDQFANKADLKSFLAQFRKDISSSTTFSLQTLDGGENDQSPSEAGIEANLDIQYTVGLATGVPTTFISVGDDFQDGNLEGFLDIINFLLGESNPPQVLTTSYGQNENTISAKLANRLCNAYAQLGARGTSILFASGDGGVSGSQSAHCSNFVPTFPSGCPFMTSVGATQGVSPETAAAFSSGGFSNVFGIPSYQASAVSGYLSALGSTNSGKFNRSGRGFPDVSTQGVDFQIVSGGQTIGVDGTSCASPTFASVISLVNDRLIAAGKSPLGFLNPFLYSSAGKAALNDVTSGSNPGCSTNGFPAKAGWDPVTGLGTPNFAKLLTAVGL

SEQ ID NO: 49942 - protein, 366 aa, Meripilus giganteus
AIPASCASTITPACLQAIYGIPTTKATQSSNKLAVSGFIDQFANKADLKSFLAQFRKDISSSTTFSLQTLDGGENDQSPSEAGIEANLDIQYTVGLATGVPTTFISVGDDFQDGNLEGFLDIINFLLGESNPPQVLTTSYGQNENTISAKLANQLCNAYAQLGARGTSILFASGDGGVSGSQSAHCSNFVPTFPSGCPFMTSVGATQGVSPETAAAFSSGGFSNVFGIPSYQASAVSGYLSALGSTNSGKFNRSGRGFPDVSTQGVDFQLVSGGQTIGVDGTSCASPTFASVISLVNDRLIAAGKSPLGFLNPFLYSSAGKAALNDVTSGSNPGCSTNGFPAKAGWDPVTGLGTPNFAKLLTAVGL

SEQ ID NO: 49943 - protein, 366 aa, Meripilus giganteus
AIPASCASTITPACLQAIYGIPTTKATQSSNKLAVSGFIDQFANKADLKSFLAQFRKDISSSTTFSLQTLDGGENDQSPSEAGIEANLDIQYTVGLATGVPTTFISVGDDFQDGNLEGFLDIINFLLGESNPPQVLTTSYGQNENTISAKLANQLCNAYAQLGARGTSILFASGDGGVSGSQSAHCSNFVPTFPSGCPFMTSVGATQGVSPETAAAFSSGGFSNVFGIPSYQASAVSGYLSALGSTNSGKFNRSGRGFPDVSTQGVDFQIVSGGATIGVDGTSCASPTFASVISLVNDRLIAAGKSPLGFLNPFLYSSAGKAALNDVTSGSNPGCSTNGFPAKAGWDPVTGLGTPNFAKLLTAVGL

SEQ ID NO: 49944 - protein, 366 aa, Meripilus giganteus
AIPASCASTITPACLQAIYGIPTTKATQSSNKLAVSGFIDQFANKADLKSFLAQFRKDISSSTTFSLQTLDGGENDQSPSEAGIEANLDIQYTVGLATGVPTTFISVGDDFQDGNLEGFLDIINFLLGESNPPQVLTTSYGQNENTISAKLANQLCNAYAQLGARGTSILFASGDGGVSGSQSAHCSNFVPTFPSGCPFMTSVGATQGVSPETAAAFSSGGFSNVFGIPSYQASAVSGYLSALGSTNSGKFNRSGRGFPDVSTQGVDFQIVSGGQTIGVDGTSCASPTFASVISLVNDRLIAASKSPLGFLNPFLYSSAGKAALNDVTSGSNPGCSTNGFPAKAGWDPVTGLGTPNFAKLLTAVGL

SEQ ID NO: 49945 - protein, 366 aa, Meripilus giganteus
AIPASCASTITPACLQAIYGIPTTKATQSSNKLAVSGFIDQKANKADLKSFLAQFRKDISSSTTFSLQTLDGGENDQSPSEAGIEANLDIQYTVGLATGVPTTFISVGDDFQDGNLEGFLDIINFLLGESNPPQVLTTSYGQNENTISAKLANQLCNAYAQLGARGTSILFASGDGGVSGSQSAHCSNFVPTFPSGCPFMTSVGATQGVSPETAAAFSSGGFSNVFGIPSYQASAVSGYLSALGSTNSGKFNRSGRGFPDVSTQGVDFQIVSGGQTIGVDGTSCASPTFASVISLVNDRLIAAGKSPLGFLNPFLYSSAGKAALNDVTSGSNPGCSTNGFPAKAGWDPVTGLGTPNFAKLLTAVGL

SEQ ID NO: 49946 - protein, 366 aa, Meripilus giganteus
AIPASCASTITPACLQAIYGIPTTKATQSSNKLAVSGFIDQFANKADLKSFLAQFRKDISSSTTFSLQTLDGGENDQSPSEAGIEANLDIQYTVGLATGVPTTFISVGDDFQDGNLEGFLDIINFLLGESNPPQVLTTSYGQNENTISAKLANQLCNAYAQLGARGTSILFASGDGGVSGSQSAHCSNFVPTFPSGCPFMTSVGATQGVSPETAAAFSSGGFSNVFGIPSYQASAVSGYLSALGSTNSGKFNRSGRGFPDVSTQGVDFQIRSGGQTIGVDGTSCASPTFASVISLVNDRLIAAGKSPLGFLNPFLYSSAGKAALNDVTSGSNPGCSTNGFPAKAGWDPVTGLGTPNFAKLLTAVGL

SEQ ID NO: 49947 - protein, 366 aa, Meripilus giganteus
AIPASCASTITPACLQAIYGIPTTKATQSSNKLAVSGFIDQFANKADLKSFLAQFRKDISSSTTFSLQTLDGGENDQSPSEAGIEANLDIQYTVGLATGVPTTFISVGDDFQDGNLEGFLDIINFLLGESNPPQVLTTSYGQNENTISAKLANQLCNAYAQLGARGTSILFASGDGGVSGSQSAHCSNFVPTFPSGCPFMTSVGATQGVSPETAAAFSSGGFSNVFGIPSYQASAVSGYLSALGSTNSGKFNRSGRGFPDVSTQGVDFQIVSGGQFIGVDGTSCASPTFASVISLVNDRLIAAGKSPLGFLNPFLYSSAGKAALNDVTSGSNPGCSTNGFPAKAGWDPVTGLGTPNFAKLLTAVGL

SEQ ID NO: 49948 - protein, 366 aa, Meripilus giganteus
AIPASCASTITPACLQAIYGIPTTKATQSSNKLAVSGFIDQFANKADLKSFLAQFRKDISSSTTFSLQTLDGGENDQSPSEAGIEANLDIQYTVGLATGVPTTFISVGDDFQDGNLEGFLDIINFLLGESNPPQVLTTSYGQNENTISAKLANQLCNAYAQLGARGTSILFASGDGGVSGSQSAHCSNFVPTFPSGCPFMTSVGATQGVSPERAAAFSSGGFSNVFGIPSYQASAVSGYLSALGSTNSGKFNRSGRGFPDVSTQGVDFQIVSGGQTIGVDGTSCASPTFASVISLVNDRLIAAGKSPLGFLNPFLYSSAGKAALNDVTSGSNPGCSTNGFPAKAGWDPVTGLGTPNFAKLLTAVGL

SEQ ID NO: 49949 - protein, 366 aa, Meripilus giganteus
AIPASCASTITPACLQAIYGIPTTKATQSSNKLAVSGFIDQFANKADLKSFLAQFRKDIQSSTTFSLQTLDGGENDQSPSEAGIEANLDIQYTVGLATGVPTTFISVGDDFQDGNLEGFLDIINFLLGESNPPQVLTTSYGQNENTISAKLANQLCNAYAQLGARGTSILFASGDGGVSGSQSAHCSNFVPTFPSGCPFMTSVGATQGVSPETAAAFSSGGFSNVFGIPSYQASAVSGYLSALGSTNSGKFNRSGRGFPDVSTQGVDFQIVSGGQTIGVDGTSCASPTFASVISLVNDRLIAAGKSPLGFLNPFLYSSAGKAALNDVTSGSNPGCSTNGFPAKAGWDPVTGLGTPNFAKLLTAVGL

SEQ ID NO: 49950 - protein, 366 aa, Meripilus giganteus
AIPASCASTITPACLQAIYGIPTTKATQSSNKLAVSGFIDQFANKADLKSFLAQFRKDISSSTTFSLQTLDGGENDQSPSEAGIEANLDIQYTVGLATGVPTTFISVGDDFQDGNLEGFLDIINFLLGESNPPQVLTTSYGQNENTISAKLANQLCNAYAQLGARGTSILFASGDGGVSGSQSAHCSNFVPTFPSGCPFMTSVGATQGVSPETAAAFSSGGFSNVFGIPSYQASAVSGYLSALGSTNSGKFNRSGRGFPDVSTQGVDFQIVSGGQTIGVDGTSCASPTFASVISLVNDRLIAAGKSPLGFLNPFLYSSAGKAALNDVTSGSNPGCSTNGFPAKAGWDPVTGLGTPNFRKLLTAVGL

SEQ ID NO: 49951 - protein, 366 aa, Meripilus giganteus
AIPASCASTITPACLQAIYGIPTTKATQSSNKLAVSGFIDQFANKADLKSFLAQFRKDISSSTTFSLQTLDGGENDQSPSEAGIEANLDIQYTVGLATGVPTTFISVGDDFQDGNLEGFLDIINFLLGESNPPQVLTTSYGQNENTISAKLANQLCNAYAQLGARGTSILFASGDGGVSGSQPAHCSNFVPTFPSGCPFMTSVGATQGVSPETAAAFSSGGFSNVFGIPSYQASAVSGYLSALGSTNSGKFNRSGRGFPDVSTQGVDFQIVSGGQTIGVDGTSCASPTFASVISLVNDRLIAAGKSPLGFLNPFLYSSAGKAALNDVTSGSNPGCSTNGFPAKAGWDPVTGLGTPNFAKLLTAVGL

SEQ ID NO: 49952 - protein, 366 aa, Meripilus giganteus
AIPASCASTITPACLQAIYGIPTTKATQSSNKLAVSGFIDQFANKADLKSFLAQFRKDISSSTTFSLQTLDGGENDQSPSEAGIEANLDIQYTVGLATGVPTTFISVGDDFQDGNLEGFLDIINFLLGESNPPQVLTTSYGQNENTISAKLANQLCNAYAQLGARGTSILFASGDGGVSGSQSAHCSNFVPTFPSGCPFMTSVGATQHVSPETAAAFSSGGFSNVFGIPSYQASAVSGYLSALGSTNSGKFNRSGRGFPDVSTQGVDFQIVSGGQTIGVDGTSCASPTFASVISLVNDRLIAAGKSPLGFLNPFLYSSAGKAALNDVTSGSNPGCSTNGFPAKAGWDPVTGLGTPNFAKLLTAVGL

SEQ ID NO: 49953 - protein, 366 aa, Meripilus giganteus
AIPASCASTITPACLQAIYGIPTTKATQSSNKLRVSGFIDQFANKADLKSFLAQFRKDISSSTTFSLQTLDGGENDQSPSEAGIEANLDIQYTVGLATGVPTTFISVGDDFQDGNLEGFLDIINFLLGESNPPQVLTTSYGQNENTISAKLANQLCNAYAQLGARGTSILFASGDGGVSGSQSAHCSNFVPTFPSGCPFMTSVGATQGVSPETAAAFSSGGFSNVFGIPSYQASAVSGYLSALGSTNSGKFNRSGRGFPDVSTQGVDFQIVSGGQTIGVDGTSCASPTFASVISLVNDRLIAAGKSPLGFLNPFLYSSAGKAALNDVTSGSNPGCSTNGFPAKAGWDPVTGLGTPNFAKLLTAVGL

SEQ ID NO: 49954 - protein, 366 aa, Meripilus giganteus
AIPASCASTITPACLQAIYGIPTTKATQSSNKLAVSGFIDQFANKADLKSFLAQFRKDISSSTTFSLQTLDGGENDQSPSEAGIEANLDIQYTVGLATGVPTTFISVGDDFQDGNLEGFLDIINFLLGESNPPQVLTTSYAQNENTISAKLANQLCNAYAQLGARGTSILFASGDGGVSGSQSAHCSNFVPTFPSGCPFMTSVGATQGVSPETAAAFSSGGFSNVFGIPSYQASAVSGYLSALGSTNSGKFNRSGRGFPDVSTQGVDFQIVSGGQTIGVDGTSCASPTFASVISLVNDRLIAAGKSPLGFLNPFLYSSAGKAALNDVTSGSNPGCSTNGFPAKAGWDPVTGLGTPNFAKLLTAVGL

SEQ ID NO: 49955 - protein, 366 aa, Meripilus giganteus
AIPASCASTITPACLQAIYGIPTTKATQSSNKLAVSGFIDQFANKADLKSFLAQFRKDISSSTTFSLQTLDGGENDQSPSEAGIEANLDIQYTVGLATGVPTTFISVGDDFQDGNLEGFLDIINFLCGESNPPQVLTTSYGQNENTISAKLANQLCNAYAQLGARGTSILFASGDGGVSGSQSAHCSNFVPTFPSGCPFMTSVGATQGVSPETAAAFSSGGFSNVFGIPSYQASAVSGYLSALGSTNSGKFNRSGRGFPDVSTQGVDFQIVSGGQTIGVDGTSCASPTFASVISLVNDRLIAAGKSPLGFLNPFLYSSAGKAALNDVTSGSNPGCSTNGFPAKAGWDPVTGLGTPNFAKLLTAVGL

SEQ ID NO: 49956 - protein, 366 aa, Meripilus giganteus
AIPASCASTITPACLQAIYGIPTTKATQSSNKLAVSGFIDQFANKADLKSFLAQFRKDISSSTTFSLQTLDGGENDQSPSEAGIEANLDIQYTVGLATGVPTTFISVGDDFQDGNLEGFLDIINFLLGESNPPQVLTTSYGQNENTISAKLANQLCNAYAQLGARGTSILFASGDGGVSGSQSAHCSNFVPTFPSGCPFMTSVGATQGVSPETAAAFSSGGFSNVFGIPSYQASAVSGYLSALGSTNSGKFNRSGRGFPDVSTQGVDFQIVYGGQTIGVDGTSCASPTFASVISLVNDRLIAAGKSPLGFLNPFLYSSAGKAALNDVTSGSNPGCSTNGFPAKAGWDPVTGLGTPNFAKLLTAVGL

SEQ ID NO: 49957 - protein, 366 aa, Meripilus giganteus
AIPASCASTITPACLQAIYGIPTTKATQSSNKLAVSGFIDQFANKADLKSFLAQFRKDISSSTTFSLQTLDGGENDQSPSEAGIEANLDIQYTVGLATGVPTTFISVGDDFQDGNLEGFLDIINFLLGESNPPQVLTTSYGQNENTISAKLANQLCNAYAQLGARGTSILFASGDGGVSGSQSAHCSNFVPTFPSGCPFMTSVGATQGVSPETAAAFSSGGFSNVFGIPSYQASAVSGYLSALGSTNSGKFNRSGRGFPDVSTQGVDFQIVSGGQTIGVDGTSCASPTFASVISLVNDRLIAAGKSPLGFLNPFLYSSAGKAASNDVTSGSNPGCSTNGFPAKAGWDPVTGLGTPNFAKLLTAVGL

SEQ ID NO: 49958 - protein, 366 aa, Meripilus giganteus
AIPASCASTITPACLQAIYGIPTTKATQSSNKLAVSGFIDQFANKADLKSFLAQFRKDISSSTTFSLQTLDGGENDQSPSEAGIEANLDIQYTVGLATGVPTTFISVGDDFQDGNLEGFLDIINFLLGESNPPQVLTTSYGQNENTISAKLANQLCNAYAQLGARGTSILFASGDGGVSGSQSAHCSNFVPTFPSGCPFMTSVGATQGVSPETAAAFSSGGFSNVFGIPSYQASAVSGYLSALGSTNSGKFNRSGRGFPDVSTQGVDFQIVSGGQTIGVDGTSCASPTFASVISLVNDRLIAAGKSPLGFLNPFLYSSAGKAALNDVTIGSNPGCSTNGFPAKAGWDPVTGLGTPNFAKLLTAVGL

SEQ ID NO: 49959 - protein, 366 aa, Meripilus giganteus
AIPASCASTITPACLQAIYGIPTTKATQSSNKLAVSGFIDQFANKADLKSFLAQFRKDISSSTTFSLQTLDGGENDQSPSEAGIEANLDIQYTVGLATGVPTTFISVGDDFQDGNLEGFLDIINFLLWESNPPQVLTTSYGQNENTISAKLANQLCNAYAQLGARGTSILFASGDGGVSGSQSAHCSNFVPTFPSGCPFMTSVGATQGVSPETAAAFSSGGFSNVFGIPSYQASAVSGYLSALGSTNSGKFNRSGRGFPDVSTQGVDFQIVSGGQTIGVDGTSCASPTFASVISLVNDRLIAAGKSPLGFLNPFLYSSAGKAALNDVTSGSNPGCSTNGFPAKAGWDPVTGLGTPNFAKLLTAVGL

SEQ ID NO: 49960 - protein, 366 aa, Meripilus giganteus
AIPASCASTITPACLQAIYGIPTTKATQSSNKLAVSGFIDQFANKADLKSFLAQFRKDISSSTTFSLQTLDGGENDQSPSEAGIEANLDIQYTVGLATGVPTTFISVGDDFQDGNLEGFLDIINFLLGESNPPQVLTTSYGQNENTISAKLANMLCNAYAQLGARGTSILFASGDGGVSGSQSAHCSNFVPTFPSGCPFMTSVGATQGVSPETAAAFSSGGFSNVFGIPSYQASAVSGYLSALGSTNSGKFNRSGRGFPDVSTQGVDFQIVSGGQTIGVDGTSCASPTFASVISLVNDRLIAAGKSPLGFLNPFLYSSAGKAALNDVTSGSNPGCSTNGFPAKAGWDPVTGLGTPNFAKLLTAVGL

SEQ ID NO: 49961 - protein, 366 aa, Meripilus giganteus
AIPASCASTITPACLQAIYGIPTTKATQSSNKLAVSGFIDQFANKADLKSFLAQFRKDISSSTTFSLQTLDGGENDQSPSEAGIEANLDIQYTVGLATGVPTTFISVGDDFQDGNLEGFLDIINFLLGESNPPQVLTTSYGQNENTISAKLANQLCNAYAQLGARGTSILFASGDGGVSGSQSAHCSNFVPTFPSGCPFMTSVGATQGVSPETAAAFSSGGFSNVFGIPSYQASAVSGYLSALGSTNSGKFNRSGRGFPDVSTQGVDFQIVSGGQTIGVDGTSCASPTFASVISLVNDRLIAAGKSPLGFLNPFLYSSAGKAALNDVTSGSNPGCSTNGFRAKAGWDPVTGLGTPNFAKLLTAVGL

SEQ ID NO: 49962 - protein, 366 aa, Meripilus giganteus
AIPASCASTITPACLQAIYGIPTTKATQSSNKLAVSGFIDQFANKADLKSFLAQFRKDISSSTTFSLQTLDGGENDQSPSEAGIEANLDIQYTSGLATGVPTTFISVGDDFQDGNLEGFLDIINFLLGESNPPQVLTTSYGQNENTISAKLANQLCNAYAQLGARGTSILFASGDGGVSGSQSAHCSNFVPTFPSGCPFMTSVGATQGVSPETAAAFSSGGFSNVFGIPSYQASAVSGYLSALGSTNSGKFNRSGRGFPDVSTQGVDFQIVSGGQTIGVDGTSCASPTFASVISLVNDRLIAAGKSPLGFLNPFLYSSAGKAALNDVTSGSNPGCSTNGFPAKAGWDPVTGLGTPNFAKLLTAVGL

SEQ ID NO: 49963 - protein, 366 aa, Meripilus giganteus
AIPASCASTITPACLQAIYGIPTTKATQSSNKLAVSGFIDQFANKADLKSFLAQFRKDISSSTTFSLQTLDGGENDQSPSEAGIEANLDIQYTVGLATGVPTTFISVGDDFQDGNLEGFLDIINFLLGESNPPQVLTTSYGQNENTISAKLANQLCNAHAQLGARGTSILFASGDGGVSGSQSAHCSNFVPTFPSGCPFMTSVGATQGVSPETAAAFSSGGFSNVFGIPSYQASAVSGYLSALGSTNSGKFNRSGRGFPDVSTQGVDFQIVSGGQTIGVDGTSCASPTFASVISLVNDRLIAAGKSPLGFLNPFLYSSAGKAALNDVTSGSNPGCSTNGFPAKAGWDPVTGLGTPNFAKLLTAVGL

SEQ ID NO: 49964 - protein, 366 aa, Meripilus giganteus
AIPASCASTITPACLQAIYGIPTTKATQSSNKLAVSGFIDQFANKADLKSFLAQFRKDISSSTTFSLQTLDGGENDQSPSEAGIEANLDIQYTVGLATGVPTTFISVGDDFQDGNLEGFLDIINFLLGESNPPQVLTTSYGQNENTISAKLANQLCNAYAQLGARGTSILFASGDGGVSGSFSAHCSNFVPTFPSGCPFMTSVGATQGVSPETAAAFSSGGFSNVFGIPSYQASAVSGYLSALGSTNSGKFNRSGRGFPDVSTQGVDFQIVSGGQTIGVDGTSCASPTFASVISLVNDRLIAAGKSPLGFLNPFLYSSAGKAALNDVTSGSNPGCSTNGFPAKAGWDPVTGLGTPNFAKLLTAVGL

SEQ ID NO: 49965 - protein, 366 aa, Meripilus giganteus
AIPASCASTITPACLQAIYGIPTTKATQSSNKLAVSGFIDQFANKADLKSFLAQFRKDISSSRTFSLQTLDGGENDQSPSEAGIEANLDIQYTVGLATGVPTTFISVGDDFQDGNLEGFLDIINFLLGESNPPQVLTTSYGQNENTISAKLANQLCNAYAQLGARGTSILFASGDGGVSGSQSAHCSNFVPTFPSGCPFMTSVGATQGVSPETAAAFSSGGFSNVFGIPSYQASAVSGYLSALGSTNSGKFNRSGRGFPDVSTQGVDFQIVSGGQTIGVDGTSCASPTFASVISLVNDRLIAAGKSPLGFLNPFLYSSAGKAALNDVTSGSNPGCSTNGFPAKAGWDPVTGLGTPNFAKLLTAVGL

SEQ ID NO: 49966 - protein, 366 aa, Meripilus giganteus
AIPASCASTITPACLQAIYGIPTTKATQSSNKLAVSGFIDQFANKADLKSFLAQFRKDISSLTTFSLQTLDGGENDQSPSEAGIEANLDIQYTVGLATGVPTTFISVGDDFQDGNLEGFLDIINFLLGESNPPQVLTTSYGQNENTISAKLANQLCNAYAQLGARGTSILFASGDGGVSGSQSAHCSNFVPTFPSGCPFMTSVGATQGVSPETAAAFSSGGFSNVFGIPSYQASAVSGYLSALGSTNSGKFNRSGRGFPDVSTQGVDFQIVSGGQTIGVDGTSCASPTFASVISLVNDRLIAAGKSPLGFLNPFLYSSAGKAALNDVTSGSNPGCSTNGFPAKAGWDPVTGLGTPNFAKLLTAVGL

SEQ ID NO: 49967 - protein, 366 aa, Meripilus giganteus
AIPASCASTITPACLQAIYGIPTTKATQSSNKLAVSGFIDQFANKADLKSFLAQFRKDISSSTTFSLQTLDGGENDQSPSEAGIEANLDIQYTVGLATGVPTTFISVGDDFQDGNLEGFLDIINFLLGELNPPQVLTTSYGQNENTISAKLANQLCNAYAQLGARGTSILFASGDGGVSGSQSAHCSNFVPTFPSGCPFMTSVGATQGVSPETAAAFSSGGFSNVFGIPSYQASAVSGYLSALGSTNSGKFNRSGRGFPDVSTQGVDFQIVSGGQTIGVDGTSCASPTFASVISLVNDRLIAAGKSPLGFLNPFLYSSAGKAALNDVTSGSNPGCSTNGFPAKAGWDPVTGLGTPNFAKLLTAVGL

SEQ ID NO: 49968 - protein, 366 aa, Meripilus giganteus
AIPASCASTITPACLQAIYGIPTTKATQSSNKLAVSGFIDQFANKADLKSFLAQFRKDISSSTTFSLQTLDGGENDQSPSEAGIEANLDIQYTVGLATGVPTTFISVGDDFQDGNLEGFLDIINFLLGESNPPQVLTTSYGQNENTISAKLANQLCNAYAQLGARGTSILFASGDGGVSGSQSAHCSNFVPTFPSGCPFMTSVGATQGVSPETAAAFSSGGFSNVFGIPSYQASAVSGYLSALGSTNSGKFNRSGRGFPDVSTQGVDFQIVSGGQTIGVDGTSCASPTFASVISLVNDRLIAAGKSPLGFLNPFLYSSAGLAALNDVTSGSNPGCSTNGFPAKAGWDPVTGLGTPNFAKLLTAVGL

SEQ ID NO: 49969 - protein, 366 aa, Meripilus giganteus
AIPASCASTITPACLQAIYGIPTTKATQSSNKLAVSGFIDQFANKADLKSFLAQFRKDISSSTTFSLQTLDGGENDQSPSEAGIEANLDIQYTVGLATGVPITFISVGDDFQDGNLEGFLDIINFLLGESNPPQVLTTSYGQNENTISAKLANQLCNAYAQLGARGTSILFASGDGGVSGSQSAHCSNFVPTFPSGCPFMTSVGATQGVSPETAAAFSSGGFSNVFGIPSYQASAVSGYLSALGSTNSGKFNRSGRGFPDVSTQGVDFQIVSGGQTIGVDGTSCASPTFASVISLVNDRLIAAGKSPLGFLNPFLYSSAGKAALNDVTSGSNPGCSTNGFPAKAGWDPVTGLGTPNFAKLLTAVGL

SEQ ID NO: 49970 - protein, 366 aa, Meripilus giganteus
AIPASCASTITPACLQAIYGIPTTKATQSSNKLAVSGFIDQFANKADLKSFLAQFRKDISSSTTFSLQTLDGGENDQSPSEAGIEANLDIQYTVGLATGVPTTFISVGDDFQDGNLQGFLDIINFLLGESNPPQVLTTSYGQNENTISAKLANQLCNAYAQLGARGTSILFASGDGGVSGSQSAHCSNFVPTFPSGCPFMTSVGATQGVSPETAAAFSSGGFSNVFGIPSYQASAVSGYLSALGSTNSGKFNRSGRGFPDVSTQGVDFQIVSGGQTIGVDGTSCASPTFASVISLVNDRLIAAGKSPLGFLNPFLYSSAGKAALNDVTSGSNPGCSTNGFPAKAGWDPVTGLGTPNFAKLLTAVGL

SEQ ID NO: 49971 - protein, 366 aa, Meripilus giganteus
AIPASCASTITPACLQAIYGIPTTKATQSSNKLAVSGFIDQRANKADLKSFLAQFRKDISSSTTFSLQTLDGGENDQSPSEAGIEANLDIQYTVGLATGVPTTFISVGDDFQDGNLEGFLDIINFLLGESNPPQVLTTSYGQNENTISAKLANQLCNAYAQLGARGTSILFASGDGGVSGSQSAHCSNFVPTFPSGCPFMTSVGATQGVSPETAAAFSSGGFSNVFGIPSYQASAVSGYLSALGSTNSGKFNRSGRGFPDVSTQGVDFQIVSGGQTIGVDGTSCASPTFASVISLVNDRLIAAGKSPLGFLNPFLYSSAGKAALNDVTSGSNPGCSTNGFPAKAGWDPVTGLGTPNFAKLLTAVGL

SEQ ID NO: 49972 - protein, 366 aa, Meripilus giganteus
AIPASCASTITPACLQAIYGIPTTKATQSSNKLAVSGFIDQFANKADLKSFLAQFRKDISSSTTFSLQTLDGGENDQSPSEAGIEANLDIQYTVGLATGVPTTFISVGDDFQDGNLEGFLDIINFLLGESNPPQVLTTSYGQNENTISAKLANQLCNAYAQLGARGTSILFASGDGGVSGSQSAHCSNFVPTFPSGCPFMTSVGATQGVSPETAAAFSSGGFSNVFGIPSIQASAVSGYLSALGSTNSGKFNRSGRGFPDVSTQGVDFQIVSGGQTIGVDGTSCASPTFASVISLVNDRLIAAGKSPLGFLNPFLYSSAGKAALNDVTSGSNPGCSTNGFPAKAGWDPVTGLGTPNFAKLLTAVGL

SEQ ID NO: 49973 - protein, 366 aa, Meripilus giganteus
AIPASCASTITPACLQAIYGIPTTKATQSSNKLAVSGFIDQFANKADLKSFLAQFRKDISSSTTFSLQTLDGGENDQSPSEAGIEANLDIQYTVGLATGVPTTFISVGDDFQDGNLEGFLDIINFLLGESNPPQVLTTSYGQNENTISAKLANQLCNAYAQLGARGTSILFASGDGGVSGSQSAHCSNFVPTFPSGCPFMTSVGATQGVSPETAAAFSSGGFSNVFGIPSYQASAVSGYLSALGSTNSGKFNRSGRGFPDVSTQGVDFQIVSGGQTIGVDGTSCASPTFASVISLVNDRLIAAGKSPLGFLNPFLYSSAGKAALNDVTSGSNPGCSTNGFPAKAGWDPVTGLGTPNFAKLSTAVGL

SEQ ID NO: 49974 - protein, 366 aa, Meripilus giganteus
AIPASCASTITPACLQAIYGIPTTKATQSSNKLAVSGFIDQFANKADLKSFLAQFRKDISSSTTFSLQTLDGGENDQSPSEAGIEANLDIQYTVGLATGVPTTFISVGDDFQDGNLEGFLDIINFLLGESNPPQVLTTSYGQNENTISAKLANQLCNAYAQLGARGTSILFASGDGGVSGSQSAHCSNFVPTFPSGCPFSTSVGATQGVSPETAAAFSSGGFSNVFGIPSYQASAVSGYLSALGSTNSGKFNRSGRGFPDVSTQGVDFQIVSGGQTIGVDGTSCASPTFASVISLVNDRLIAAGKSPLGFLNPFLYSSAGKAALNDVTSGSNPGCSTNGFPAKAGWDPVTGLGTPNFAKLLTAVGL

SEQ ID NO: 49975 - protein, 366 aa, Meripilus giganteus
AIPASCASTITPACLQAIYGIPTTKATQSSNKLAVSGFVDQFANKADLKSFLAQFRKDISSSTTFSLQTLDGGENDQSPSEAGIEANLDIQYTVGLATGVPTTFISVGDDFQDGNLEGFLDIINFLLGESNPPQVLTTSYGQNENTISAKLANQLCNAYAQLGARGTSILFASGDGGVSGSQSAHCSNFVPTFPSGCPFMTSVGATQGVSPETAAAFSSGGFSNVFGIPSYQASAVSGYLSALGSTNSGKFNRSGRGFPDVSTQGVDFQIVSGGQTIGVDGTSCASPTFASVISLVNDRLIAAGKSPLGFLNPFLYSSAGKAALNDVTSGSNPGCSTNGFPAKAGWDPVTGLGTPNFAKLLTAVGL

SEQ ID NO: 49976 - protein, 366 aa, Meripilus giganteus
AIPASCASTITPACLQAIYGIPTTKATQSSNKLAVSGFIDQFANKADLKSFLAQFRKDISSSTTFSLQTLDGGENDQSPSEAGIEANLDIQYTVGLATGVPTTFISVGDDFQDGNLEGFLDIINFLLGESNPPQVLTTSYGQNENTISAKLANQLCNAYAQLGARGTSILFASGDGGVSGSQSAHCSNFVPTFPSGCPFMTSVGATQGVSPETAAAFSSGGFSNVFGIPSYQASAVSGYLSALGSTNSGKFNRSGRGFPDVSTQGVDFQIVSGGQTIGVDGTSCASPTFASVISLVNDRLIAAGKSPLGFLNPFLYSSAGKAALNDVTSGSNPGCSTNGFPAKAGWDPVTGLGTPNFAKLLQAVGL

SEQ ID NO: 49977 - protein, 366 aa, Meripilus giganteus
AIPASCASTITPACLQAIYGIPTTKATQSSNKLAVSGFIDQFANKADLKSFLIQFRKDISSSTTFSLQTLDGGENDQSPSEAGIEANLDIQYTVGLATGVPTTFISVGDDFQDGNLEGFLDIINFLLGESNPPQVLTTSYGQNENTISAKLANQLCNAYAQLGARGTSILFASGDGGVSGSQSAHCSNFVPTFPSGCPFMTSVGATQGVSPETAAAFSSGGFSNVFGIPSYQASAVSGYLSALGSTNSGKFNRSGRGFPDVSTQGVDFQIVSGGQTIGVDGTSCASPTFASVISLVNDRLIAAGKSPLGFLNPFLYSSAGKAALNDVTSGSNPGCSTNGFPAKAGWDPVTGLGTPNFAKLLTAVGL

SEQ ID NO: 49978 - protein, 366 aa, Meripilus giganteus
AIPASCASTITPACLQAIYGIPTTKATQSSNKLAVSGFIDQFANKADLKSFLAQFRKDISSSTTFSLQTLDGGENDQSPSEAGIEANLDIQYTVGLATGVPTTFISVGDDFQDGNLEGFLDIINFLLGESNPPQVLTTSYGQNENTISAKLANQLCNAYAQLGARGTSILFASGDGGVSGSQSAHCSNFVPTFPSGCPFMTSVGATQGVSPETAAAISSGGFSNVFGIPSYQASAVSGYLSALGSTNSGKFNRSGRGFPDVSTQGVDFQIVSGGQTIGVDGTSCASPTFASVISLVNDRLIAAGKSPLGFLNPFLYSSAGKAALNDVTSGSNPGCSTNGFPAKAGWDPVTGLGTPNFAKLLTAVGL

SEQ ID NO: 49979 - protein, 366 aa, Meripilus giganteus
AIPASCASTITPACLQAIYGIPTTKATQSSNKLAVSGFIDQFANKADLKSFLAQFRKDISSSTTFSLQTLDGGENDQSPSEAGIEANLDIQYTVGLATGVPTTFISVGDDFQDGNLEGFLDIINFLLGESNPPQVLTTSYGQNENTISAKLANQLCNAYAQLGARGTSILFASGDGGVSGSQSAHCSNFVPTFPSGCPFMTSVGATQGVSPETAAAFSSGGFSNVFGIPSYQASAVSGYLSALGSTNSGKFNRSGRGFPDVSTQGVDFQIVSGGKTIGVDGTSCASPTFASVISLVNDRLIAAGKSPLGFLNPFLYSSAGKAALNDVTSGSNPGCSTNGFPAKAGWDPVTGLGTPNFAKLLTAVGL

SEQ ID NO: 49980 - protein, 366 aa, Meripilus giganteus
AIPASCASTITPACLQAIYGIPTTKATQSSNKLAVSGFIDQFANKADLKSFLAQFRKDISSSTTFSLQTLDGGENDQSPSEAGIEANLDIQYTVGLATGVPTTFISVGDDFQDGNLEGFLDIINFLLGESNPPQVLTTSYGQNENTISAKLANQLCNAYAQLGARGTSILFASGDGGVSGSQSAHCSNFVPTFPSGCPFMTSVGATQGVSPETAAAFSSGGFSNVFGIPSYQASAVSGYLSALGSTNSGKFNRSGRGFPDVSTQGVDFQIVSGGQTIGVDGTSCASPTFASVISLVNDRLIAAGKSPLGFLNPFLYSSAGKAALNDVTSGSNPGCSTNGFPAKAGWDPVTGLGTPNFAKLLLAVGL

SEQ ID NO: 49981 - protein, 366 aa, Meripilus giganteus
AIPASCASTITPACLQAIYGIPTTKATQSSNKLAVSGFIDQFANKADLKSFLAQFRKDISSSTTFSLQTLDGGENDQSPSEAGIEANLDIQYTVGLATGVPTTFISVGDDFQDGNLEGFLDIINFLLGESNPPQVLTTSYGQNENTISAKLANQLCNAGAQLGARGTSILFASGDGGVSGSQSAHCSNFVPTFPSGCPFMTSVGATQGVSPETAAAFSSGGFSNVFGIPSYQASAVSGYLSALGSTNSGKFNRSGRGFPDVSTQGVDFQIVSGGQTIGVDGTSCASPTFASVISLVNDRLIAAGKSPLGFLNPFLYSSAGKAALNDVTSGSNPGCSTNGFPAKAGWDPVTGLGTPNFAKLLTAVGL

SEQ ID NO: 49982 - protein, 366 aa, Meripilus giganteus
AIPASCASTITPACLQAIYGIPTTKATQSSNKLAVSGFIDQFANKADLKSFLAQFRKDIPSSTTFSLQTLDGGENDQSPSEAGIEANLDIQYTVGLATGVPTTFISVGDDFQDGNLEGFLDIINFLLGESNPPQVLTTSYGQNENTISAKLANQLCNAYAQLGARGTSILFASGDGGVSGSQSAHCSNFVPTFPSGCPFMTSVGATQGVSPETAAAFSSGGFSNVFGIPSYQASAVSGYLSALGSTNSGKFNRSGRGFPDVSTQGVDFQIVSGGQTIGVDGTSCASPTFASVISLVNDRLIAAGKSPLGFLNPFLYSSAGKAALNDVTSGSNPGCSTNGFPAKAGWDPVTGLGTPNFAKLLTAVGL

SEQ ID NO: 49983 - protein, 366 aa, Meripilus giganteus
AIPASCASTITPACLQAIYGIPTTKATQSSNKLAVSGFIDQFANKADLKSFLAQFRKDPSSSTTFSLQTLDGGENDQSPSEAGIEANLDIQYTVGLATGVPTTFISVGDDFQDGNLEGFLDIINFLLGESNPPQVLTTSYGQNENTISAKLANQLCNAYAQLGARGTSILFASGDGGVSGSQSAHCSNFVPTFPSGCPFMTSVGATQGVSPETAAAFSSGGFSNVFGIPSYQASAVSGYLSALGSTNSGKFNRSGRGFPDVSTQGVDFQIVSGGQTIGVDGTSCASPTFASVISLVNDRLIAAGKSPLGFLNPFLYSSAGKAALNDVTSGSNPGCSTNGFPAKAGWDPVTGLGTPNFAKLLTAVGL

SEQ ID NO: 49984 - protein, 366 aa, Meripilus giganteus
AIPASCASTITPACLQAIYGIPTTKATQSSNKLAVSGFIDQFANKADLKSFLAQFRKDISSSTTFSLQTLDGGENDQSPSEAGIEANLDIQYTVGLATGVPTTFISVGDDFQDGNLEGFLDIINFLLGESNPPQVLTTSYGQNENTISAKLANQLCNAYAQLGARGTSILFASGDGGVSGSQSAHCSNFVPTFPSGCPFMTSVGATQGVSPETAAAFSSGGFSNVFGIPSYQASAVSGYLSALGSTNSGKFNRSGRGFPDVSTQGVDFQIVSGGQTIGVDGTSCASPTFASVISLVNDRLIAAGKSPLGFLNPFLYSSAGKAALNDVTSGANPGCSTNGFPAKAGWDPVTGLGTPNFAKLLTAVGL

SEQ ID NO: 49985 - protein, 366 aa, Meripilus giganteus
AIPASCASTITPACLQAIYGIPTTKATQSSNKLAVSGFIDQFANKADLKSFLAQFRKDISSPTTFSLQTLDGGENDQSPSEAGIEANLDIQYTVGLATGVPTTFISVGDDFQDGNLEGFLDIINFLLGESNPPQVLTTSYGQNENTISAKLANQLCNAYAQLGARGTSILFASGDGGVSGSQSAHCSNFVPTFPSGCPFMTSVGATQGVSPETAAAFSSGGFSNVFGIPSYQASAVSGYLSALGSTNSGKFNRSGRGFPDVSTQGVDFQIVSGGQTIGVDGTSCASPTFASVISLVNDRLIAAGKSPLGFLNPFLYSSAGKAALNDVTSGSNPGCSTNGFPAKAGWDPVTGLGTPNFAKLLTAVGL

SEQ ID NO: 49986 - protein, 366 aa, Meripilus giganteus
AIPASCASTITPACLQAIYGIPTTKATQSSNKLAVSGFIDQFANKADLKSFLAQFRKDISSSTTFSLQTLDGGENDQSPSEAGIEANLDIQYTVGLATGVPTTFISVGDDFQDGNLEGFLDIINFLLGESNPPQVLTTSYGQNENTISAKLANQLCNAYAQLGARGTSILFASGDGGVSGSQSAHCSNFVPTFPSGCPFMTSVGATQGVSPETAAAFSSGGFSNVFGIPSYQASAVSGYLSALGSTNSGKFNRSGRGFPDVSTQGVDFQIVMGGQTIGVDGTSCASPTFASVISLVNDRLIAAGKSPLGFLNPFLYSSAGKAALNDVTSGSNPGCSTNGFPAKAGWDPVTGLGTPNFAKLLTAVGL

SEQ ID NO: 49987 - protein, 366 aa, Meripilus giganteus
AIPASCASTITPACLQAIYGIPTTKATQPSNKLAVSGFIDQFANKADLKSFLAQFRKDISSSTTFSLQTLDGGENDQSPSEAGIEANLDIQYTVGLATGVPTTFISVGDDFQDGNLEGFLDIINFLLGESNPPQVLTTSYGQNENTISAKLANQLCNAYAQLGARGTSILFASGDGGVSGSQSAHCSNFVPTFPSGCPFMTSVGATQGVSPETAAAFSSGGFSNVFGIPSYQASAVSGYLSALGSTNSGKFNRSGRGFPDVSTQGVDFQIVSGGQTIGVDGTSCASPTFASVISLVNDRLIAAGKSPLGFLNPFLYSSAGKAALNDVTSGSNPGCSTNGFPAKAGWDPVTGLGTPNFAKLLTAVGL

SEQ ID NO: 49988 - protein, 366 aa, Meripilus giganteus
AIPASCASTITPACLQAIYGIPTTKATQSSNKLAVSGFIDQFANKADLKSFLAQFRKDISSSTTFSLQTLDGGENDQSPSEAGIEANLDIQYTVGLATGVPTTFISVGDDFQDGNLEGFLDIITFLLGESNPPQVLTTSYGQNENTISAKLANQLCNAYAQLGARGTSILFASGDGGVSGSQSAHCSNFVPTFPSGCPFMTSVGATQGVSPETAAAFSSGGFSNVFGIPSYQASAVSGYLSALGSTNSGKFNRSGRGFPDVSTQGVDFQIVSGGQTIGVDGTSCASPTFASVISLVNDRLIAAGKSPLGFLNPFLYSSAGKAALNDVTSGSNPGCSTNGFPAKAGWDPVTGLGTPNFAKLLTAVGL

SEQ ID NO: 49989 - protein, 366 aa, Meripilus giganteus
AIPASCASTITPACLQAIYGIPTTKATQSSNKLAVSGFIDQFANKADLKSFLAQFRKDISSSTTFSLQTLDGGENDQSPSEAGIEANLDIQYTVGLATGVPTTFISVGDDFQDGNLEGFLDIINFLLGESNPPQVLTTSYGQNENCISAKLANQLCNAYAQLGARGTSILFASGDGGVSGSQSAHCSNFVPTFPSGCPFMTSVGATQGVSPETAAAFSSGGFSNVFGIPSYQASAVSGYLSALGSTNSGKFNRSGRGFPDVSTQGVDFQIVSGGQTIGVDGTSCASPTFASVISLVNDRLIAAGKSPLGFLNPFLYSSAGKAALNDVTSGSNPGCSTNGFPAKAGWDPVTGLGTPNFAKLLTAVGL

SEQ ID NO: 49990 - protein, 366 aa, Meripilus giganteus
AIPASCASTITPACLQAIYGIPTTKATQSSNKLAVSGFIDQFANKADLKSFLAQFRKDISSSTTFSLQTLDGGENDQSPSEAGIEANLDIQYTVGLATGVPTTFISVGDDFQDGNLEGFLDIINFLLGESNPPQVLTTSYVQNENTISAKLANQLCNAYAQLGARGTSILFASGDGGVSGSQSAHCSNFVPTFPSGCPFMTSVGATQGVSPETAAAFSSGGFSNVFGIPSYQASAVSGYLSALGSTNSGKFNRSGRGFPDVSTQGVDFQIVSGGQTIGVDGTSCASPTFASVISLVNDRLIAAGKSPLGFLNPFLYSSAGKAALNDVTSGSNPGCSTNGFPAKAGWDPVTGLGTPNFAKLLTAVGL

SEQ ID NO: 49991 - protein, 366 aa, Meripilus giganteus
AIPASCASTITPACLQAIYGIPTTKATQSSNKLAVSGFIDQFANKADLKSFLAQFRKDISSCTTFSLQTLDGGENDQSPSEAGIEANLDIQYTVGLATGVPTTFISVGDDFQDGNLEGFLDIINFLLGESNPPQVLTTSYGQNENTISAKLANQLCNAYAQLGARGTSILFASGDGGVSGSQSAHCSNFVPTFPSGCPFMTSVGATQGVSPETAAAFSSGGFSNVFGIPSYQASAVSGYLSALGSTNSGKFNRSGRGFPDVSTQGVDFQIVSGGQTIGVDGTSCASPTFASVISLVNDRLIAAGKSPLGFLNPFLYSSAGKAALNDVTSGSNPGCSTNGFPAKAGWDPVTGLGTPNFAKLLTAVGL

SEQ ID NO: 49992 - protein, 366 aa, Meripilus giganteus
AIPASCASTITPACLQAIYGIPTTKATQSSNKLAVSGFIDQFANKADLKSFLAQFRKDISSSTTFSLQTLDGGENDQSPSEAGIEANLDIQYTVGLATGVPTTFISVGDDFQDGNLHGFLDIINFLLGESNPPQVLTTSYGQNENTISAKLANQLCNAYAQLGARGTSILFASGDGGVSGSQSAHCSNFVPTFPSGCPFMTSVGATQGVSPETAAAFSSGGFSNVFGIPSYQASAVSGYLSALGSTNSGKFNRSGRGFPDVSTQGVDFQIVSGGQTIGVDGTSCASPTFASVISLVNDRLIAAGKSPLGFLNPFLYSSAGKAALNDVTSGSNPGCSTNGFPAKAGWDPVTGLGTPNFAKLLTAVGL

SEQ ID NO: 49993 - protein, 366 aa, Meripilus giganteus
AIPASCASTITPACLQAIYGIPTTKATQSSNKLAVSGFIDQFANKADLKSFLAQFRKDISSSTTFSLQTLDGGENDQSPSEAGIEANLDIQYTVGLATGVPTTFISVGDDFQDGNLEGFLDIINFLLGESNPPQVLTTSYGQNENTISAKLANQLCNAYAQLGARGTSILFASGDGGVSGSQSAHCSNFVPTFPSGCPFMTSVGATQGVSPETAAAFSSGGFSNVFGIPSYQASAVSGYLSALGSTNSGKFNRSGRGFPDVSTQGVDFQIVAGGQTIGVDGTSCASPTFASVISLVNDRLIAAGKSPLGFLNPFLYSSAGKAALNDVTSGSNPGCSTNGFPAKAGWDPVTGLGTPNFAKLLTAVGL

SEQ ID NO: 49994 - protein, 366 aa, Meripilus giganteus
AIPASCASTITPACLQAIYGIPTTKATQSSNKLAVSGFIDQFANKADLKSFLAQFRKDISSSTTFSLQTLDGGENDQSPSEAGIEANLDIQYTVGLATGVPTTFISVGDDFQDGNLEGFLDIINFLLGESNPPQVLTTSYGQNENTISAKLANQLCNAYAQLGARGTSILFASGDGGVSGSQSAHCSNFVPTFPSGCPFMTSVGATQGVSPETAAAFSSGGFSNVFGIPSYQASAVSGYLSALGSTNSGKFNRSGRGFPDVSTQGVDFQIVSGGQTIGVDGTSCASPTFASVISLVNDRLIAAGKSPLGFLNPFLYSSAGRAALNDVTSGSNPGCSTNGFPAKAGWDPVTGLGTPNFAKLLTAVGL

SEQ ID NO: 49995 - protein, 366 aa, Meripilus giganteus
AIPASCASTITPACLQAIYGIPTTKATQSSNKLAVSGFIDQFANKADLKSFLAQFRKDISSSTTFSLQTLDGGENDQSPSEAGIEANLDIQYTVGLATGVPTTFISVGDDFQDGNLEGFLDIINFLLGESNPPQVLTTSYGQNENTISAKLANQLCNAYAQLGARGTSILFASGDGGVSGSQSAHCSNFVPTFPSGCPFMTSVGATQGVSPETAAAFSSGGFSNVFGIPSYQASAVSGYLSALGSTNSGKFNRSGRGFPDVSTQGVDFQIVSGGQTIGVDGTSCASPTFASVISLVNDRLIAAGKSPLGFLNPFLYRSAGKAALNDVTSGSNPGCSTNGFPAKAGWDPVTGLGTPNFAKLLTAVGL

SEQ ID NO: 49996 - protein, 366 aa, Meripilus giganteus
AIPASCASTITPACLQAIYGIPTTKATQSSNKLAVSGFIDQFANKADLKSFLAQFRKDISSSTTFSLQTLDGGENDQSPSEAGIEANLDIQYTVGLATGVPTTFISVGDDFQDGNLEGFLDIINFLLGESNPPQVLTTSYGQNENTISAKLANQLCNAYAQLGARGTSILFASGDGGVSGSQSAHCSNFVPTFPSGCPFMTSVGATQGVSPETAAAFSSGGFSNVFGIPSYQASAVSGYLSALGSTNSGKFNRSGRGFPDVSTQGVDFXIVSGGQTIGVDGTSCASPTFASVISLVNDRLIAAGKSPLGFLNPFLYSSAGKAALNDVTSGSNPGCSTNGFPAKAGWDPVTGLGTPNFAKLLTAVGL

SEQ ID NO: 49997 - protein, 366 aa, Meripilus giganteus
AIPASCASTITPACLQAIYGIPTTKATQSSNKLAVSGFIDQFANKADLKSFLAQFRKDISSSTTFSLQTLDGGENDQSPSEAGIEANLDIQYTVGLATGVPTTFISVGDDFQDGNLEGFLDIINFLLGESNPPQVLTTSYGQNENTISAKLAMQLCNAYAQLGARGTSILFASGDGGVSGSQSAHCSNFVPTFPSGCPFMTSVGATQGVSPETAAAFSSGGFSNVFGIPSYQASAVSGYLSALGSTNSGKFNRSGRGFPDVSTQGVDFQIVSGGQTIGVDGTSCASPTFASVISLVNDRLIAAGKSPLGFLNPFLYSSAGKAALNDVTSGSNPGCSTNGFPAKAGWDPVTGLGTPNFAKLLTAVGL

SEQ ID NO: 49998 - protein, 366 aa, Meripilus giganteus
AIPASCASHITPACLQAIYGIPTTKATQSSNKLAVSGFIDQFANKADLKSFLAQFRKDISSSTTFSLQTLDGGENDQSPSEAGIEANLDIQYTVGLATGVPTTFISVGDDFQDGNLEGFLDIINFLLGESNPPQVLTTSYGQNENTISAKLANQLCNAYAQLGARGTSILFASGDGGVSGSQSAHCSNFVPTFPSGCPFMTSVGATQGVSPETAAAFSSGGFSNVFGIPSYQASAVSGYLSALGSTNSGKFNRSGRGFPDVSTQGVDFQIVSGGQTIGVDGTSCASPTFASVISLVNDRLIAAGKSPLGFLNPFLYSSAGKAALNDVTSGSNPGCSTNGFPAKAGWDPVTGLGTPNFAKLLTAVGL

SEQ ID NO: 49999 - protein, 366 aa, Meripilus giganteus
AIPASCASTITPACLQAIYGIPTTKATQSSNKLAVSGFIDQFANKADLKSFLAQFRKDISSSTTFSLQTLDGGENDQSPSEAGIEANLDIQYTVGLATGVPTTFISVGDDFQDGNLEGFLDIINFLLGESNPPQVLTTSYGQNENTISAKLANQLCNAYAQLGARGTSILFASGDGGVSGSQSAHCSNFVPTFPSGCPFMTSVGATQGVSPETAAAFSSGGFSNVFGIPSYQASAVSGYLSALGSTNSGKFNRSGRGFPDVSTQGVDFQIVSGGVTIGVDGTSCASPTFASVISLVNDRLIAAGKSPLGFLNPFLYSSAGKAALNDVTSGSNPGCSTNGFPAKAGWDPVTGLGTPNFAKLLTAVGL

SEQ ID NO: 50000 - protein, 366 aa, Meripilus giganteus
AIPASCASTITPACLQAIYGIPTTKATQSSNKLAVSGFIDQFANKADLKSFLAQFRKDISSSTTFSLQTLDGGENDQSPSEAGIEANLDIQYTVGLATGVPTTFISVGDDFQDGNLEGFLDIINFLLGESNPPQVLTTSYGQNENTISAKLANQLCNAYAQLGARGTSSLFASGDGGVSGSQSAHCSNFVPTFPSGCPFMTSVGATQGVSPETAAAFSSGGFSNVFGIPSYQASAVSGYLSALGSTNSGKFNRSGRGFPDVSTQGVDFQIVSGGQTIGVDGTSCASPTFASVISLVNDRLIAAGKSPLGFLNPFLYSSAGKAALNDVTSGSNPGCSTNGFPAKAGWDPVTGLGTPNFAKLLTAVGL

SEQ ID NO: 50001 - protein, 366 aa, Meripilus giganteus
AIPASCASTITPACLQAIYGIPTTKATQSSNKLAVSGFIDQFANKADLKSFLAQFRKDISSSTTFSLQTLDGGENDQSPSEAGIEANLDIQYTVGLATGVPTTFISVGKDFQDGNLEGFLDIINFLLGESNPPQVLTTSYGQNENTISAKLANQLCNAYAQLGARGTSILFASGDGGVSGSQSAHCSNFVPTFPSGCPFMTSVGATQGVSPETAAAFSSGGFSNVFGIPSYQASAVSGYLSALGSTNSGKFNRSGRGFPDVSTQGVDFQIVSGGQTIGVDGTSCASPTFASVISLVNDRLIAAGKSPLGFLNPFLYSSAGKAALNDVTSGSNPGCSTNGFPAKAGWDPVTGLGTPNFAKLLTAVGL

SEQ ID NO: 50002 - protein, 366 aa, Meripilus giganteus
AIPASCASTITPACLQAIYGIPTTKATQSSNKLAVSGFIDQFANKADLKLFLAQFRKDISSSTTFSLQTLDGGENDQSPSEAGIEANLDIQYTVGLATGVPTTFISVGDDFQDGNLEGFLDIINFLLGESNPPQVLTTSYGQNENTISAKLANQLCNAYAQLGARGTSILFASGDGGVSGSQSAHCSNFVPTFPSGCPFMTSVGATQGVSPETAAAFSSGGFSNVFGIPSYQASAVSGYLSALGSTNSGKFNRSGRGFPDVSTQGVDFQIVSGGQTIGVDGTSCASPTFASVISLVNDRLIAAGKSPLGFLNPFLYSSAGKAALNDVTSGSNPGCSTNGFPAKAGWDPVTGLGTPNFAKLLTAVGL

SEQ ID NO: 50003 - protein, 366 aa, Meripilus giganteus
AIPASCASTITPACLQAIYGIPTTKATQSSNKLAVSGFIDQFANKADLKSFLAQFRKDISSSTTFSLQTLDGGENDQSPSEAGIEANLDIQYTVGLATGVPTTFISVGDDFQDGNLEGFLDIINFLLGESSPPQVLTTSYGQNENTISAKLANQLCNAYAQLGARGTSILFASGDGGVSGSQSAHCSNFVPTFPSGCPFMTSVGATQGVSPETAAAFSSGGFSNVFGIPSYQASAVSGYLSALGSTNSGKFNRSGRGFPDVSTQGVDFQIVSGGQTIGVDGTSCASPTFASVISLVNDRLIAAGKSPLGFLNPFLYSSAGKAALNDVTSGSNPGCSTNGFPAKAGWDPVTGLGTPNFAKLLTAVGL

SEQ ID NO: 50004 - protein, 366 aa, Meripilus giganteus
AIPASCASTITPACLQAIYGIPTTKATQSSNKLAVSGFIDQFANKADLKSFLAQFRKDISSSTTFSLQTLDGGENDQSPSEAGIEANLDIQYTVGLATGVPTTFISVGDDFQDGNLEGFLDIINFLLGESNPPQVLTTSYGQNENTISAKLANQLCNAYAQLGARGDSILFASGDGGVSGSQSAHCSNFVPTFPSGCPFMTSVGATQGVSPETAAAFSSGGFSNVFGIPSYQASAVSGYLSALGSTNSGKFNRSGRGFPDVSTQGVDFQIVSGGQTIGVDGTSCASPTFASVISLVNDRLIAAGKSPLGFLNPFLYSSAGKAALNDVTSGSNPGCSTNGFPAKAGWDPVTGLGTPNFAKLLTAVGL

SEQ ID NO: 50005 - protein, 366 aa, Meripilus giganteus
AIPASCASTITPACLQAIYGIPTTKATQSSNKLAVSGFIDQFANKADLKSFLAQFRKDISSSTTFSLQTLDGGENDQSPSEAGIEANLDIQYTVGLATGVPTTFISVGDDFMDGNLEGFLDIINFLLGESNPPQVLTTSYGQNENTISAKLANQLCNAYAQLGARGTSILFASGDGGVSGSQSAHCSNFVPTFPSGCPFMTSVGATQGVSPETAAAFSSGGFSNVFGIPSYQASAVSGYLSALGSTNSGKFNRSGRGFPDVSTQGVDFQIVSGGQTIGVDGTSCASPTFASVISLVNDRLIAAGKSPLGFLNPFLYSSAGKAALNDVTSGSNPGCSTNGFPAKAGWDPVTGLGTPNFAKLLTAVGL

SEQ ID NO: 50006 - protein, 366 aa, Meripilus giganteus
AIPASCASTITPACLQAIYGIPTTKATQSSNKLAVSGFIDQFANKADLKSFLAQFRKDISSSTTFSLQTLDGGENDQSPSEAGIEANLDIQYTVGLATGVPTTFISVGDDFQDGNLEGFLDIINFLLGESNPPQVLTTSYGQNENTISAKLANQLCNAYAELGARGTSILFASGDGGVSGSQSAHCSNFVPTFPSGCPFMTSVGATQGVSPETAAAFSSGGFSNVFGIPSYQASAVSGYLSALGSTNSGKFNRSGRGFPDVSTQGVDFQIVSGGQTIGVDGTSCASPTFASVISLVNDRLIAAGKSPLGFLNPFLYSSAGKAALNDVTSGSNPGCSTNGFPAKAGWDPVTGLGTPNFAKLLTAVGL

SEQ ID NO: 50007 - protein, 366 aa, Meripilus giganteus
AIPASCASTITPACLQAIYGIPTTKATQSSNKLAVSGFIDQFANKADLKSFLAQFRKDISSSTTFSLQTLDGGENDQSPSEAGIEANLDIQYTVGLATGVPTTFISVGDDFQDGNLEGFLDIINFLLGESNPPQVLTTSYGQNENTISAKLANQLCNAYAQLGARGTSILFASGDGGVSGSQSAHCSNFVPTFPSGCPFMTSVGATQGVSPETAAAFSSGGFSNVFGIPSYQASAVSGYLSALGSTNSGKFNRSGRGFPDVSTQGVDFQIVSGGQTIGVDGTSCASPTFASVISLVNDRLIAAGKSPLGFLNPFLYSSAGKAALNDVTSGSNPGCSTNGFPAKPGWDPVTGLGTPNFAKLLTAVGL

SEQ ID NO: 50008 - protein, 366 aa, Meripilus giganteus
AIPASCASTITPACLQAIYGIPTTKATQSSNKLAVSGFIDQFANKADLKSFLAQFRKDISSSTTFSLQTLDGGENDQSPSEAGIEANLDIQYTVGLATGVPTTFISVGDDFQDGNLEGFLDIINFLLGESNPPQVLTTSYGQNENTISAKLANQLCNAYAQLGARGTSILFASGDGGVSGSQSAHCSNFVPTFPSGCPFMTSVGATQGVSPETAAAFSSGGFSNVFGIPSYQASAVSGYLSALGSTNSGKFNRSGRGFPDVSTQGVDFQIVSGGQTIGVDGTSCASPTFASVISLVNDRLIAAGTSPLGFLNPFLYSSAGKAALNDVTSGSNPGCSTNGFPAKAGWDPVTGLGTPNFAKLLTAVGL

SEQ ID NO: 50009 - protein, 366 aa, Meripilus giganteus
AIPASCASTITPACLQAIYGIPTTKATQSSNKLAVSGFIDQSANKADLKSFLAQFRKDISSSTTFSLQTLDGGENDQSPSEAGIEANLDIQYTVGLATGVPTTFISVGDDFQDGNLEGFLDIINFLLGESNPPQVLTTSYGQNENTISAKLANQLCNAYAQLGARGTSILFASGDGGVSGSQSAHCSNFVPTFPSGCPFMTSVGATQGVSPETAAAFSSGGFSNVFGIPSYQASAVSGYLSALGSTNSGKFNRSGRGFPDVSTQGVDFQIVSGGQTIGVDGTSCASPTFASVISLVNDRLIAAGKSPLGFLNPFLYSSAGKAALNDVTSGSNPGCSTNGFPAKAGWDPVTGLGTPNFAKLLTAVGL

SEQ ID NO: 50010 - protein, 366 aa, Meripilus giganteus
AIPASCASTITPACLQAIYGIPTTKATQSSNKLAVSGFIDQFANKADLKSFLAQFRKDISSSTTFSLQTLDGGENDQSPSEAGIEANLDIQYTVGLATGVPTTFISVGDDFQDGNLEGFLDIINFLLGESNPPQVLTTSYGQNENTISAKLANQLCNAYAQLGARGTSILFASGDGGVSGSQSYHCSNFVPTFPSGCPFMTSVGATQGVSPETAAAFSSGGFSNVFGIPSYQASAVSGYLSALGSTNSGKFNRSGRGFPDVSTQGVDFQIVSGGQTIGVDGTSCASPTFASVISLVNDRLIAAGKSPLGFLNPFLYSSAGKAALNDVTSGSNPGCSTNGFPAKAGWDPVTGLGTPNFAKLLTAVGL

SEQ ID NO: 50011 - protein, 366 aa, Meripilus giganteus
AIPASCASTITPACLQAIYGIPTTKATQSSNKLAVSGFIDQFANKADLKSFLAQFRKDISSSTTFSLQTLDGGENDQSPSEAGIEANLDIQYTVGLATGVPTTFISVGDDFQDGNLEGFLDIINFLLGESNPPQVLTTSYGQNERTISAKLANQLCNAYAQLGARGTSILFASGDGGVSGSQSAHCSNFVPTFPSGCPFMTSVGATQGVSPETAAAFSSGGFSNVFGIPSYQASAVSGYLSALGSTNSGKFNRSGRGFPDVSTQGVDFQIVSGGQTIGVDGTSCASPTFASVISLVNDRLIAAGKSPLGFLNPFLYSSAGKAALNDVTSGSNPGCSTNGFPAKAGWDPVTGLGTPNFAKLLTAVGL

SEQ ID NO: 50012 - protein, 366 aa, Meripilus giganteus
AIPASCASTITPACLQAIYGIPTTKATQSSNKLAVSGFIDQFANKADLKSFLAQFRKDISSSTTFSLQTLDGGENDQSPSEAGIEANLDIQYTVGLATGVPTTFISVGDDFQDGNLEGFLDIINFLLGESNPPQVLTTSYGQNENTISAKLANQLCNAYAQLGARGTSILFASGDGGVSGSQSVHCSNFVPTFPSGCPFMTSVGATQGVSPETAAAFSSGGFSNVFGIPSYQASAVSGYLSALGSTNSGKFNRSGRGFPDVSTQGVDFQIVSGGQTIGVDGTSCASPTFASVISLVNDRLIAAGKSPLGFLNPFLYSSAGKAALNDVTSGSNPGCSTNGFPAKAGWDPVTGLGTPNFAKLLTAVGL

SEQ ID NO: 50013 - protein, 366 aa, Meripilus giganteus
AIPASCASTITPACLQAIYGIPTTKATQSSNKLAVSGFIDQFANKADLKSFLAQFRKDISSSTTFSLQTLDGGENDQSPSEAGIEANLDIQYTVGLATGVPTTFISVGDDFQDGGLEGFLDIINFLLGESNPPQVLTTSYGQNENTISAKLANQLCNAYAQLGARGTSILFASGDGGVSGSQSAHCSNFVPTFPSGCPFMTSVGATQGVSPETAAAFSSGGFSNVFGIPSYQASAVSGYLSALGSTNSGKFNRSGRGFPDVSTQGVDFQIVSGGQTIGVDGTSCASPTFASVISLVNDRLIAAGKSPLGFLNPFLYSSAGKAALNDVTSGSNPGCSTNGFPAKAGWDPVTGLGTPNFAKLLTAVGL

SEQ ID NO: 50014 - protein, 366 aa, Meripilus giganteus
AIPASCASTITPACLQAIYGIPTTKATQSSNKLAVSGFIDQFANKADLKSFLAQFRKDISSSTTFSLQTLDGGENDQSPSEAGIEANLDIQYTVGLATGVPTTFISVGDDFQDGNLEGFLDIINFLLGESNPPQVLTTSYGQNENTISAKLANQLCNAYAALGARGTSILFASGDGGVSGSQSAHCSNFVPTFPSGCPFMTSVGATQGVSPETAAAFSSGGFSNVFGIPSYQASAVSGYLSALGSTNSGKFNRSGRGFPDVSTQGVDFQIVSGGQTIGVDGTSCASPTFASVISLVNDRLIAAGKSPLGFLNPFLYSSAGKAALNDVTSGSNPGCSTNGFPAKAGWDPVTGLGTPNFAKLLTAVGL

SEQ ID NO: 50015 - protein, 366 aa, Meripilus giganteus
AIPASCASTITPACLQAIYGIPTTKATQSSNKLAVSGFIDQFANKADLKSFLAQFRKDISSSTTFSLQTLDGGENDQSPSEAGIEANLDIQYTVGLATGVPTTFISVGDDFQDGNLEGFLDIINFLLGESNPPQVLTTSYGQNENTISAKLANQLCNAYAQLGARGTSILFASGDGGVSGSQSAHCSNFVPTFPSGCPFMTSVGATQGVSPETAAAFSSGGFSNVFGIPSYQASAVSGYLSALGSTNSGKFNRSGRGFPDVSTQGVDFLIVSGGQTIGVDGTSCASPTFASVISLVNDRLIAAGKSPLGFLNPFLYSSAGKAALNDVTSGSNPGCSTNGFPAKAGWDPVTGLGTPNFAKLLTAVGL

SEQ ID NO: 50016 - protein, 366 aa, Meripilus giganteus
AIPASCASTITPACLQAIYGIPTTKATQSSNKLAVSGFIDQFANKADLKSFLAQFRKDISSSTTFSLQTLDGGENDQSPSEAGIEANLDIQYTVGLATGVPTTFISVGDDFQDGNLEGFLDIINFLLGESNPPQVLTTSYGQNENTISAKLANQLCNAYAQLGARGTSILFASGDGGVSGSQSAHCSNFVPTFPSGCPFMTSVGATQGVSPETAAAFSSGGFSNVFGIPSYQASAVSGYLSALGSTNSGKFNRSGRGFPDVSTQGVTFQIVSGGQTIGVDGTSCASPTFASVISLVNDRLIAAGKSPLGFLNPFLYSSAGKAALNDVTSGSNPGCSTNGFPAKAGWDPVTGLGTPNFAKLLTAVGL

SEQ ID NO: 50017 - protein, 366 aa, Meripilus giganteus
AIPASCASTITPACLQAIYGIPTTKATQSSNKLAVSGFIDQFANKADLKSFLAQFRKDISSSTTFSLQTLDGGENDQSPSEAGIEANLDIQYTVGLATGVPTTFISVGDDFQDGNLEGFLDIINFLLGESNPPQVLTTSYGQNENTISAKLANQLCNAYAQLGARGTSILFASGDGGVSGSQSAHCSNFVPTFPSGCPFMTSVGATQGVSPETAAAFSSGGFSNVFGIPSYQASAVSGYLSALGSTNSGKFNRSGRGFPDVSTQGVDFQIVSGGQTIGVDGTSCASPTFASVISLTNDRLIAAGKSPLGFLNPFLYSSAGKAALNDVTSGSNPGCSTNGFPAKAGWDPVTGLGTPNFAKLLTAVGL

SEQ ID NO: 50018 - protein, 366 aa, Meripilus giganteus
AIPASCASTITPACLQAIYGIPTTKATQSSNKLAVSGFIDQFANKADLKSFLAQFRKDISSSTTFSLQTLDGGENDQSPSEAGIEANLDIQYTVGLATGVPTTFISVGDDFQDGNLEGFLDIINFLLGESNPPQVLTTSYGQNENTISAKLANQLCNAYAQLGARGTSILFASGDGGVSGSQSAHCSNFVPTFPSGCPFMTSVGATQYVSPETAAAFSSGGFSNVFGIPSYQASAVSGYLSALGSTNSGKFNRSGRGFPDVSTQGVDFQIVSGGQTIGVDGTSCASPTFASVISLVNDRLIAAGKSPLGFLNPFLYSSAGKAALNDVTSGSNPGCSTNGFPAKAGWDPVTGLGTPNFAKLLTAVGL

SEQ ID NO: 50019 - protein, 366 aa, Meripilus giganteus
AIPASCASTITPACLQAIYGIPTTKATQSSNKLAVSGFIDQFANKADLKSFLAQFRKDISSSTTFSLQTLDGGENDQSPSEAGIEANLDIQYTVGLATGVPVTFISVGDDFQDGNLEGFLDIINFLLGESNPPQVLTTSYGQNENTISAKLANQLCNAYAQLGARGTSILFASGDGGVSGSQSAHCSNFVPTFPSGCPFMTSVGATQGVSPETAAAFSSGGFSNVFGIPSYQASAVSGYLSALGSTNSGKFNRSGRGFPDVSTQGVDFQIVSGGQTIGVDGTSCASPTFASVISLVNDRLIAAGKSPLGFLNPFLYSSAGKAALNDVTSGSNPGCSTNGFPAKAGWDPVTGLGTPNFAKLLTAVGL

SEQ ID NO: 50020 - protein, 366 aa, Meripilus giganteus
AIPASCASTITPACLQAIYGIPTTKATQSSNKLAVSGFIDQFANKADLKSFLAQFRKDISSSTTFSLQTLDGGENDQSPSEAGIEANLDIQYTVGLATGVPTTFISVGDDFQDGNLEGFLDIINFLLGESNPPQVLTTSYGQNENTISAKLANQLCNAYAQLGARGTSILFASGDGGVSGSQSAHCSNFVPTFPSGCPFMTSVGATQGVSPETAAAFSSGGFSNVFGIPSYQASAVSGYLSALGSTNSGKFNRSGRGFPDVSTQGVDFQIVSGGQTIGVDGTSCASPTFASVISLVNDRLIAAGMSPLGFLNPFLYSSAGKAALNDVTSGSNPGCSTNGFPAKAGWDPVTGLGTPNFAKLLTAVGL

SEQ ID NO: 50021 - protein, 366 aa, Meripilus giganteus
AIPASCASTITPACLQAIYGIPTTKATQSSNKLAVSGLIDQFANKADLKSFLAQFRKDISSSTTFSLQTLDGGENDQSPSEAGIEANLDIQYTVGLATGVPTTFISVGDDFQDGNLEGFLDIINFLLGESNPPQVLTTSYGQNENTISAKLANQLCNAYAQLGARGTSILFASGDGGVSGSQSAHCSNFVPTFPSGCPFMTSVGATQGVSPETAAAFSSGGFSNVFGIPSYQASAVSGYLSALGSTNSGKFNRSGRGFPDVSTQGVDFQIVSGGQTIGVDGTSCASPTFASVISLVNDRLIAAGKSPLGFLNPFLYSSAGKAALNDVTSGSNPGCSTNGFPAKAGWDPVTGLGTPNFAKLLTAVGL

SEQ ID NO: 50022 - protein, 366 aa, Meripilus giganteus
AIPASCASTITPACLQAIYGIPTTKATQSSNKLAVSGFIDQFANKADLKSFLAQFRKDISSSTTFSLQTLDGGENDQSPSEAGIEANLDIQYTVGLATGVFTTFISVGDDFQDGNLEGFLDIINFLLGESNPPQVLTTSYGQNENTISAKLANQLCNAYAQLGARGTSILFASGDGGVSGSQSAHCSNFVPTFPSGCPFMTSVGATQGVSPETAAAFSSGGFSNVFGIPSYQASAVSGYLSALGSTNSGKFNRSGRGFPDVSTQGVDFQIVSGGQTIGVDGTSCASPTFASVISLVNDRLIAAGKSPLGFLNPFLYSSAGKAALNDVTSGSNPGCSTNGFPAKAGWDPVTGLGTPNFAKLLTAVGL

SEQ ID NO: 50023 - protein, 366 aa, Meripilus giganteus
AIPASCASTITPACLQAIYGIPTTKATQSSNKLAVSGFIDQFANKADLKSFLAQFRKDISSSTTFSLQTLDGGENDQSPSEAGIEANLDIQYTVGLATGVPTTFISVGDDFQDGNLEGFLDIINFLLGESNPPQVLTTSYGQNENTISAKLANQLCNAYAQLGARGTSILFASGDGGVSGSQSAHCSNFVPTFPSGCPFMTSVGATQGVSPETAAAFSSGGFSNVFGIPSYQASAVSGYLSALGSTNSGKFNRSGRGFPDVSTQGVDFQIVSGGQTIGVDGTSCASPTFASVISLVNDRLIAAGKSPLGFLNPFLYSSAGKAALNDVTSGSNPGCSTNGFPAKAGWDPVTGLGTPNFAKLLAAVGL

SEQ ID NO: 50024 - protein, 366 aa, Meripilus giganteus
AIPASCASTITPACLQAIYGIPTTKATQSSNKLAVSGFIDQFANKADLKSFLAQFRKDISSSTTFSLQTLDGGENDQSPSEAGIEANLDIQYTVGLATGVPTTFISVGDDFQDGNLEGFLDIINFLLGESNPPQVLTTSYGQNENTISAKLANQLCNAYAQLGARGTSILFASGNGGVSGSQSAHCSNFVPTFPSGCPFMTSVGATQGVSPETAAAFSSGGFSNVFGIPSYQASAVSGYLSALGSTNSGKFNRSGRGFPDVSTQGVDFQIVSGGQTIGVDGTSCASPTFASVISLVNDRLIAAGKSPLGFLNPFLYSSAGKAALNDVTSGSNPGCSTNGFPAKAGWDPVTGLGTPNFAKLLTAVGL

SEQ ID NO: 50025 - protein, 366 aa, Meripilus giganteus
AIPASCASTITPACLQAIYGIPTTKATQSSNKLAVSGFIDQFANKADLKSFLAQFRKDISSSTTFSLQTLDGGENDQSPSEAGIEANLDIQYTVGLATGVPTTFISVGDDFQDGNLEGFLDIINFLLGESNPPQVLTTSYGQNENTISAKLANQLCNAYAQLGARGTSILFASGDGGVSGSQMAHCSNFVPTFPSGCPFMTSVGATQGVSPETAAAFSSGGFSNVFGIPSYQASAVSGYLSALGSTNSGKFNRSGRGFPDVSTQGVDFQIVSGGQTIGVDGTSCASPTFASVISLVNDRLIAAGKSPLGFLNPFLYSSAGKAALNDVTSGSNPGCSTNGFPAKAGWDPVTGLGTPNFAKLLTAVGL

SEQ ID NO: 50026 - protein, 366 aa, Meripilus giganteus
AIPASCASTITPACLQAIYGIPTTKATQSSNKLAVSGFIDQFANKADLKSFLAQFRKDISSSTTFSLQTLDGGENDQSPSEAGIEANLDIQYTVGLATGVPTTFISVGDDFQDGNLEGFLDIINFLLGESNPPQVLTTSYGQNENTISVKLANQLCNAYAQLGARGTSILFASGDGGVSGSQSAHCSNFVPTFPSGCPFMTSVGATQGVSPETAAAFSSGGFSNVFGIPSYQASAVSGYLSALGSTNSGKFNRSGRGFPDVSTQGVDFQIVSGGQTIGVDGTSCASPTFASVISLVNDRLIAAGKSPLGFLNPFLYSSAGKAALNDVTSGSNPGCSTNGFPAKAGWDPVTGLGTPNFAKLLTAVGL

SEQ ID NO: 50027 - protein, 366 aa, Meripilus giganteus
AIPASCASTITPACLQAIYGIPTTKATQSSNKLAVSGFIDQFANKADLKSFLAQFRKDISSSTTFSLQTLDGGENDQSPSEAGIEANLDIQYTVGLATGVPTTFISVGDDFQDGNLEGFLDIINFLLGESNPPQVLTTSYGSNENTISAKLANQLCNAYAQLGARGTSILFASGDGGVSGSQSAHCSNFVPTFPSGCPFMTSVGATQGVSPETAAAFSSGGFSNVFGIPSYQASAVSGYLSALGSTNSGKFNRSGRGFPDVSTQGVDFQIVSGGQTIGVDGTSCASPTFASVISLVNDRLIAAGKSPLGFLNPFLYSSAGKAALNDVTSGSNPGCSTNGFPAKAGWDPVTGLGTPNFAKLLTAVGL

SEQ ID NO: 50028 - protein, 366 aa, Meripilus giganteus
AIPASCASTITPACLQAIYGIPTTKATQSSNKLAVSGFIDQFANKADLKSFLAQFRKDISSSTTFSLQTLDGGENDQSPSEAGIEANLDIQYTVGLATGVPTTFISVGDDFQDGNLEGFLDIINFLLGESNPPQVLTTSYGQNENTISAKLANALCNAYAQLGARGTSILFASGDGGVSGSQSAHCSNFVPTFPSGCPFMTSVGATQGVSPETAAAFSSGGFSNVFGIPSYQASAVSGYLSALGSTNSGKFNRSGRGFPDVSTQGVDFQIVSGGQTIGVDGTSCASPTFASVISLVNDRLIAAGKSPLGFLNPFLYSSAGKAALNDVTSGSNPGCSTNGFPAKAGWDPVTGLGTPNFAKLLTAVGL

SEQ ID NO: 50029 - protein, 366 aa, Meripilus giganteus
AIPASCASTITPACLQAIYGIPTTKATQSSNKLAVSGFIDQFANKADLKSFLAQFRKDISSSTTFSLQTLDGGENDQSPSEAGIEANLDIQYTVGLATGVPTTFISVGDDFQDGNLEGFLDIINFLLGESNPPQVLTTSYGQNENTISAKLANQLCNAYAQLGARGTSILFASGDGGVSGSQSAHCSNFVPTFPSGCPFMTSVGATQGVSPETAAAFSSGGFSNVFGIPSYQASAVSGYLSALGSTNSGKFNRSGRGFPDVSTQGVDFQIVSGGQTIGVDGTSCASPTFASVISLVNDRLIAAGKSPPGFLNPFLYSSAGKAALNDVTSGSNPGCSTNGFPAKAGWDPVTGLGTPNFAKLLTAVGL

SEQ ID NO: 50030 - protein, 366 aa, Meripilus giganteus
AIPASCASTITPACLQAIYGIPTTKATQSSNKLAVSGFIDQFANKADLKSFLAQFRKDISSSTTFSLQTLDGGENDQSPSEAGIEANLDIQYTVGLATGVPTTFISVGDDFQDGNLEGFLDIINFLLGESNPPQVLTTSYGQNENTISAKLANQLCNAYAQLGARGTSILFASGDGGVSGSQSWHCSNFVPTFPSGCPFMTSVGATQGVSPETAAAFSSGGFSNVFGIPSYQASAVSGYLSALGSTNSGKFNRSGRGFPDVSTQGVDFQIVSGGQTIGVDGTSCASPTFASVISLVNDRLIAAGKSPLGFLNPFLYSSAGKAALNDVTSGSNPGCSTNGFPAKAGWDPVTGLGTPNFAKLLTAVGL

SEQ ID NO: 50031 - protein, 366 aa, Meripilus giganteus
AIPASCASTITPACLQAIYGIPTTKATQSSNWLAVSGFIDQFANKADLKSFLAQFRKDISSSTTFSLQTLDGGENDQSPSEAGIEANLDIQYTVGLATGVPTTFISVGDDFQDGNLEGFLDIINFLLGESNPPQVLTTSYGQNENTISAKLANQLCNAYAQLGARGTSILFASGDGGVSGSQSAHCSNFVPTFPSGCPFMTSVGATQGVSPETAAAFSSGGFSNVFGIPSYQASAVSGYLSALGSTNSGKFNRSGRGFPDVSTQGVDFQIVSGGQTIGVDGTSCASPTFASVISLVNDRLIAAGKSPLGFLNPFLYSSAGKAALNDVTSGSNPGCSTNGFPAKAGWDPVTGLGTPNFAKLLTAVGL

SEQ ID NO: 50032 - protein, 366 aa, Meripilus giganteus
AIPASCASTITPACLQAIYGIPTTKATQSSNKLAVSGFIDQFANKADLKAFLAQFRKDISSSTTFSLQTLDGGENDQSPSEAGIEANLDIQYTVGLATGVPTTFISVGDDFQDGNLEGFLDIINFLLGESNPPQVLTTSYGQNENTISAKLANQLCNAYAQLGARGTSILFASGDGGVSGSQSAHCSNFVPTFPSGCPFMTSVGATQGVSPETAAAFSSGGFSNVFGIPSYQASAVSGYLSALGSTNSGKFNRSGRGFPDVSTQGVDFQIVSGGQTIGVDGTSCASPTFASVISLVNDRLIAAGKSPLGFLNPFLYSSAGKAALNDVTSGSNPGCSTNGFPAKAGWDPVTGLGTPNFAKLLTAVGL

SEQ ID NO: 50033 - protein, 366 aa, Meripilus giganteus
AIPASCASTITPACLQAIYGIPTTKATQSSNKLAVSGFIDQFANKADLKSFLAQFRKDISSSTTFSLQTLDGGENDQSPSEAGIEANLDIQYTVGLATGVPTTFISVGDDFQDGNLEGFLDIINFLLGESNPPQVLTTSYGQNENTISAKLANQLCNAYAQLGARGTSILFASGDGGVSGSQSAHCSNFVPTFPSGCPFMTSVGATQGVSPETAAAFSSGGFSNVFGIPSYQASAVSGYLSALGSTNSGKFNRSGRGFPDVSTQGVDFQIVSGGQTIGVDGTSCASPTFASVISLVNDRLIAAGKMPLGFLNPFLYSSAGKAALNDVTSGSNPGCSTNGFPAKAGWDPVTGLGTPNFAKLLTAVGL

SEQ ID NO: 50034 - protein, 366 aa, Meripilus giganteus
AIPASCASTITPACLQAIYGIPTTKATQSSNKLAVSGFIDQFANKADLKSFLAQFRKDISSSTTFSLQTLDGGENDQSPSEAGIEANLDIQYTVGLATGVPTTFISVGDDFQDGNLEGFLDIINFLLGESNPPQVLTTSYGQNENTISAKLANQLCNAYAQLGARGTSILFASGDGGVSGSQSAHCSNFVPTFPSGCPFMTSVGATQGVSPETAAAFSSGGFSNVFGIPSYQASAVSGYLSALGSTNSGKFNRSGRGFPDVSTQGVDFQIVSGGQTVGVDGTSCASPTFASVISLVNDRLIAAGKSPLGFLNPFLYSSAGKAALNDVTSGSNPGCSTNGFPAKAGWDPVTGLGTPNFAKLLTAVGL

SEQ ID NO: 50035 - protein, 366 aa, Meripilus giganteus
AIPASCASTITPACLQAIYGIPTTKATQSSNKLAVSGFIDQFANKADLKSFLAQFRKDISSSTTFSLQTLDGGENDQSPSEAGIEANLDIQYTVGLATGVPTTFISVGDDFQDGNLEGFLDIINFLLGESNPPQVLTTSYGQNENTISAKLANQLCNAYAQLGARGTSILFASGDGGVSGSQSAHCSNFVPTFPSGCPFMTSVGATQGVSPETAAAFSSGGFSNVFGIPSYQASAVSGYLSALGSTNSGKFNRSGRGFPDVSTQGVSFQIVSGGQTIGVDGTSCASPTFASVISLVNDRLIAAGKSPLGFLNPFLYSSAGKAALNDVTSGSNPGCSTNGFPAKAGWDPVTGLGTPNFAKLLTAVGL

SEQ ID NO: 50036 - protein, 366 aa, Meripilus giganteus
AIPASCASTITPACLQAIYGIPTTKATQSSNKLAVSGFIDQFANKADLKSFLAQFRKDISSSTTFSLQTLDGGENDQSPSEAGIEANLDIQYTVGLATGVPTTFISVGDDFQDGNLEGFLDIINFLLGESNPPQVLTTSYGQNENTISAKLANQLCNAYAQLGARGTSILFASGDGGVSGSQSAHCSNFVPTFPSGCPFMTSVGATQGVSPETAAAFSSGGFSNVFGIPSYQASAVSGYLSALGSTNSGKFNRSGRGFPDVSTQGVDFQIVSGGQTIGVHGTSCASPTFASVISLVNDRLIAAGKSPLGFLNPFLYSSAGKAALNDVTSGSNPGCSTNGFPAKAGWDPVTGLGTPNFAKLLTAVGL

SEQ ID NO: 50037 - protein, 366 aa, Meripilus giganteus
AIPASCASTITPACLQAIYGIPTTKATQSSNKLAVSGFIDQFANKADLKSFLAQFRKDISSSTTFSLQTLDGGENDQSPSEAGIEANLDIQYTVGLATGVPTTFISVGDDFQDGNLEGFLDIINFLLGESNPPQVLTTSYGQNENTISAKLANQLCNAYAQLGARGTSILFASGDGGVSGSQSAHCSNFVPTFPSGCPFMTSVGATQGVSPETAAAFSSGGFSNVFGIPSYQASAVSGYLSALGSTNSGKFSRSGRGFPDVSTQGVDFQIVSGGQTIGVDGTSCASPTFASVISLVNDRLIAAGKSPLGFLNPFLYSSAGKAALNDVTSGSNPGCSTNGFPAKAGWDPVTGLGTPNFAKLLTAVGL

SEQ ID NO: 50038 - protein, 366 aa, Meripilus giganteus
AIPASCASTITPACLQAIYGIPTTKATQSSNKLAVSGFIDQFANKADLKSFLAQFRKDISSSTTFSLQTLDGGENDQSPSEAGIEANLDIQYTVGLATGVPTTFISVGDDFQDGNLEGFLDIINFLLGESNPPQVLTTSYGQNENTISAKLANQLCNAYAQLGARGTSILFASGDGGVSGSQSAHCSNFVPTFPSGCPFMTSVGATQGVSPETAAAFSSGGFSNVFGLPSYQASAVSGYLSALGSTNSGKFNRSGRGFPDVSTQGVDFQIVSGGQTIGVDGTSCASPTFASVISLVNDRLIAAGKSPLGFLNPFLYSSAGKAALNDVTSGSNPGCSTNGFPAKAGWDPVTGLGTPNFAKLLTAVGL

SEQ ID NO: 50039 - protein, 366 aa, Meripilus giganteus
AIPASCASTITPACLQAIYGIPTTKATQSSNKLAVSGFIDQFANKADLKSFLAQFRKDISSSTTFSLQTLDGGENDQSPSEAGIEANLDIQYTVGLATGVPTTFISVGDDFQDGNLEGFLDIINFLLGESNPPQVLTTSYGQNENTISAKLANQLCNAYAQLGARGTSILFASGDGGVSGSQSAHCSNFVPTFPSGCPFMTSVGATQGVSPETAAAFSSGGFSNVFGIPSYQAQAVSGYLSALGSTNSGKFNRSGRGFPDVSTQGVDFQIVSGGQTIGVDGTSCASPTFASVISLVNDRLIAAGKSPLGFLNPFLYSSAGKAALNDVTSGSNPGCSTNGFPAKAGWDPVTGLGTPNFAKLLTAVGL

SEQ ID NO: 50040 - protein, 366 aa, Meripilus giganteus
AIPASCASTITPACLQAIYGIPTTKATQSSNKLAVSGFIDQFANKCDLKSFLAQFRKDISSSTTFSLQTLDGGENDQSPSEAGIEANLDIQYTVGLATGVPTTFISVGDDFQDGNLEGFLDIINFLLGESNPPQVLTTSYGQNENTISAKLANQLCNAYAQLGARGTSILFASGDGGVSGSQSAHCSNFVPTFPSGCPFMTSVGATQGVSPETAAAFSSGGFSNVFGIPSYQASAVSGYLSALGSTNSGKFNRSGRGFPDVSTQGVDFQIVSGGQTIGVDGTSCASPTFASVISLVNDRLIAAGKSPLGFLNPFLYSSAGKAALNDVTSGSNPGCSTNGFPAKAGWDPVTGLGTPNFAKLLTAVGL

SEQ ID NO: 50041 - protein, 366 aa, Meripilus giganteus
AIPASCASTITPACLQAIYGIPTTKATQSSNKLAVSGFIDQFANKADLKSFLAQFRKDISSSTTFSLQTLDGGENDQSPSEAGIEANLDIQYTVGLATGVPTTFISVGDDFQDGNLEGFLDIINFLLGESNPPQVLTTSYGQNENTISAKLANQLCNAYAQLGARGTSILFASGDGGVSGSQSAHCSNFVPTFPSGCPFMTSVGATQGVSPETAAAFSSGGFSNVFGIPSYQASAVSGYLSALGSTNSGKFNRSGRGFPDVSTQGVDFQIVSGGQTIGVDGTSCASPTFASVISLVNDRLIAAGKSPLGFLNPFLYSSAGKAALNDVTSGSNPGCSTNGFPAKAGWDPVTGLGTPNFAKLLTASGL

SEQ ID NO: 50042 - protein, 366 aa, Meripilus giganteus
AIPASCASTITPACLQAIYGIPTTKATQSSNKLAVSGFIDQFANKADLKSFLAQFRKDISSSTTFSLQTLDGGENDQSPSEAGIEANLDIQYTVGLATGVPTTFISVGDDFQDGNLEGFLDIINFLLGESNPPQVLTTSYGQNENTISAKLANQLCNAYAQLGARGTSILFASGDGGVSGSQSAHCSNFVPTFPSGCPFMTSVGATQGVSPETAAAFSSGGFSNVFGIPSYQASAVSGYLSALGSTNSGKFNRSGRGFPDVSTQGVDFQIVSGGQTIGVDGTSCASPTFASVISLVNDRLIAAGKSPLGFLNPFLYSPAGKAALNDVTSGSNPGCSTNGFPAKAGWDPVTGLGTPNFAKLLTAVGL

SEQ ID NO: 50043 - protein, 366 aa, Meripilus giganteus
AIPASCASTITPACLQAIYGIPTTKATQSSNKLAVSGFIDLFANKADLKSFLAQFRKDISSSTTFSLQTLDGGENDQSPSEAGIEANLDIQYTVGLATGVPTTFISVGDDFQDGNLEGFLDIINFLLGESNPPQVLTTSYGQNENTISAKLANQLCNAYAQLGARGTSILFASGDGGVSGSQSAHCSNFVPTFPSGCPFMTSVGATQGVSPETAAAFSSGGFSNVFGIPSYQASAVSGYLSALGSTNSGKFNRSGRGFPDVSTQGVDFQIVSGGQTIGVDGTSCASPTFASVISLVNDRLIAAGKSPLGFLNPFLYSSAGKAALNDVTSGSNPGCSTNGFPAKAGWDPVTGLGTPNFAKLLTAVGL

SEQ ID NO: 50044 - protein, 366 aa, Meripilus giganteus
AIPASCASTITPACLQAIYGIPTTKATQSSNKLAVSGFIDQFANKADLKSFLAQFRKDISSSTTFSLQTLDGGENDQSPSEAGIEANLDIQYTVGLATGVPTTFISVGDDFQDGNLEGFLDIINFLLGESNPPQVLTTSYGQNENTISAKLANQLCNAYAQLGARGTSILFASGDGGVSGSQSAHCSNFVPTFPSGCPFMTSVGATQGVSPETAAAFSSGGFSNVFGIPSYQASAVSGYLSALGSTNSGKFNRSGRGFPDVSTQGVDFQIVSGGQTISVDGTSCASPTFASVISLVNDRLIAAGKSPLGFLNPFLYSSAGKAALNDVTSGSNPGCSTNGFPAKAGWDPVTGLGTPNFAKLLTAVGL

SEQ ID NO: 50045 - protein, 366 aa, Meripilus giganteus
AIPASCASTITPACLQAIYGIPTTKATQSSNKLAVSGFIDQFANKADLKSFLAQFRKDISSSTTFSLQTLDGGENDQSPSEAGIEANLDIQYTVGLATGVPTTFISVGDDFQDGNLEGFLDIINFLLGESNPPQVLTTSYGQNENTISAKLANQLCNAYAQLGARGTSILFASGDGGVSGSQSAHCSNFVPTFPSGCPFMTSVGATQGVSPETAAAFSSGGFSNVFGIPSYQASAVSGYLSALGSTNSGKFNRSGRGFPDVSTQGVDFQIVSGGQTIGVDGTSCASPTFASVISLVNDRLIAAYKSPLGFLNPFLYSSAGKAALNDVTSGSNPGCSTNGFPAKAGWDPVTGLGTPNFAKLLTAVGL

SEQ ID NO: 50046 - protein, 366 aa, Meripilus giganteus
AIPASCASTITPACLQAIYGIPTTKATQSSNKLAVSGFIDQFANKADLKSFLAQFRKDISSSTTFSLQTLDGGENDQSPSEAGIEANLDIQYTVGFATGVPTTFISVGDDFQDGNLEGFLDIINFLLGESNPPQVLTTSYGQNENTISAKLANQLCNAYAQLGARGTSILFASGDGGVSGSQSAHCSNFVPTFPSGCPFMTSVGATQGVSPETAAAFSSGGFSNVFGIPSYQASAVSGYLSALGSTNSGKFNRSGRGFPDVSTQGVDFQIVSGGQTIGVDGTSCASPTFASVISLVNDRLIAAGKSPLGFLNPFLYSSAGKAALNDVTSGSNPGCSTNGFPAKAGWDPVTGLGTPNFAKLLTAVGL

SEQ ID NO: 50047 - protein, 366 aa, Meripilus giganteus
AIPASCASTITPACLQAIYGIPTTKATQRSNKLAVSGFIDQFANKADLKSFLAQFRKDISSSTTFSLQTLDGGENDQSPSEAGIEANLDIQYTVGLATGVPTTFISVGDDFQDGNLEGFLDIINFLLGESNPPQVLTTSYGQNENTISAKLANQLCNAYAQLGARGTSILFASGDGGVSGSQSAHCSNFVPTFPSGCPFMTSVGATQGVSPETAAAFSSGGFSNVFGIPSYQASAVSGYLSALGSTNSGKFNRSGRGFPDVSTQGVDFQIVSGGQTIGVDGTSCASPTFASVISLVNDRLIAAGKSPLGFLNPFLYSSAGKAALNDVTSGSNPGCSTNGFPAKAGWDPVTGLGTPNFAKLLTAVGL

SEQ ID NO: 50048 - protein, 366 aa, Meripilus giganteus
AIPASCASTITPACLQAIYGIPTTKATQSSNKLAVSGFISQFANKADLKSFLAQFRKDISSSTTFSLQTLDGGENDQSPSEAGIEANLDIQYTVGLATGVPTTFISVGDDFQDGNLEGFLDIINFLLGESNPPQVLTTSYGQNENTISAKLANQLCNAYAQLGARGTSILFASGDGGVSGSQSAHCSNFVPTFPSGCPFMTSVGATQGVSPETAAAFSSGGFSNVFGIPSYQASAVSGYLSALGSTNSGKFNRSGRGFPDVSTQGVDFQIVSGGQTIGVDGTSCASPTFASVISLVNDRLIAAGKSPLGFLNPFLYSSAGKAALNDVTSGSNPGCSTNGFPAKAGWDPVTGLGTPNFAKLLTAVGL

SEQ ID NO: 50049 - protein, 366 aa, Meripilus giganteus
AIPASCASTITPACLQAIYGIPTTKATQSSNKLAVSGFIDQFANKADLKSFLAQFRKDISSSTTFSLQTLDGGENDQSPSEAGIEANLDIQYTVGLATGVPTTFISVGDDFQDGNLEGFLDIINFLLGESNPPQVLTTSYGQNENTISAKLANQLCNAYAQLGARGTSILFASGIGGVSGSQSAHCSNFVPTFPSGCPFMTSVGATQGVSPETAAAFSSGGFSNVFGIPSYQASAVSGYLSALGSTNSGKFNRSGRGFPDVSTQGVDFQIVSGGQTIGVDGTSCASPTFASVISLVNDRLIAAGKSPLGFLNPFLYSSAGKAALNDVTSGSNPGCSTNGFPAKAGWDPVTGLGTPNFAKLLTAVGL

SEQ ID NO: 50050 - protein, 366 aa, Meripilus giganteus
AIPASCASTITPACLQAIYGIPTTKATQSSNKLAVSGFIDQFANKADLKSFLAQFRKDISSSTTFSLQTLDGGENDQSPSEAGIEANLDIQYTVGLATGVPTTFISVGDDFQDGNLEGFLDIINFLLGESNPPQVLTTSYGQNENTISAKLANQLCNAYAQLGARGTSILFASGDGGVSGSQSAHCSNFVPTFPSGCPFMTSVGATQGVSPETAAAFSSGGFSNVFGIPSYQASAVSGYLSALGSTNSGKFNRSGRGFPDVSTQGVDFQIVSGGQTIGVDGTSCASPTFASVISLVNDRLIAAGKSPLGFLNPFLYSSAGKAALNDVTSGSNPGCSTNGFPAAAGWDPVTGLGTPNFAKLLTAVGL

SEQ ID NO: 50051 - protein, 366 aa, Meripilus giganteus
AIPASCASTITPACLQAIYGIPTTKATQSSNKLAVSGFIDQFANKADLKSFLAQFRKDISSSTTFSLQTLDGGENDQSPSEAGIEANLDIQYTVGLATGVPTTFISVGDDFQDGNLEGFLDIINFLLGESNPPQVLTTSYGQNENTISAKLANQLCNAYAQLGARGTSILFASGDGGVSGSQSAHCSNFVPTFPSGCPFMTSVGATQGVSPETAAAFSSGGFSNVFGIPSYQASAVSGYLSALGSTNSGKFNRSGRGFPDVSTQGVDFQIVSGGQTIGVDGTSCASPTFASVISLVNDRLIAAGKSPLGFLNPFLYSSAGKAALNDVTSGSNPGCSTNGFPATAGWDPVTGLGTPNFAKLLTAVGL

SEQ ID NO: 50052 - protein, 366 aa, Meripilus giganteus
AIPASCASTITPACLQAIYGIPTTKATQSSNKLAVSGFIDQFANKADLKSFLAQFRKDISSSTTFSLQTLDGGENDQSPSEAGIEANLDIQYTVGLATGVPTTFISVGDDFQDGNLEGFLDIINFLLGESNPPQVLTTSYGQNENTISAKLANQLCNAYAQLGARGTSILFASGDGGVSGSQSAHCSNFVPTFPSGCPFMTSVGATQGVSPETAAAFSSGGFSNVFGIPSYQASAVSGYLSALGSTNSGKFNRSGRGFPDVSTQGVDFQIVSGGQTIGVDGTSCASPTFASVISLVNDRLIAAGKSPLGFLNPFLYSSAGKAALNDVTSGSNPGCSTNGFPAKAGWDPVTGLGTPNFLKLLTAVGL

SEQ ID NO: 50053 - protein, 366 aa, Meripilus giganteus
AIPASCASTITPACLQAIYGIPTTKATQSSNKLAVSGFIDQFANKADLKSFLAQFRKDISSSTTFSLQTLDGGENDQSPSEAGIEANLDIQYTVGLATGVPTTFISVGDDFQDGNLEGFLDIIKFLLGESNPPQVLTTSYGQNENTISAKLANQLCNAYAQLGARGTSILFASGDGGVSGSQSAHCSNFVPTFPSGCPFMTSVGATQGVSPETAAAFSSGGFSNVFGIPSYQASAVSGYLSALGSTNSGKFNRSGRGFPDVSTQGVDFQIVSGGQTIGVDGTSCASPTFASVISLVNDRLIAAGKSPLGFLNPFLYSSAGKAALNDVTSGSNPGCSTNGFPAKAGWDPVTGLGTPNFAKLLTAVGL

SEQ ID NO: 50054 - protein, 366 aa, Meripilus giganteus
AIPASCASTITPACLQAIYGIPTTKATQSSNKLAVSGFIDQFANKADLKSFLAQFRKDISSSTTFSLQTLDGGENDQSPSEAGIEANLDIQYTVGLATGVPTTFISVGDDFQDGNLEGFLDIINFLLGESNPPQVLTTSYGQNENTISAKLANQLCNAYAQLGARGTSILFASGDGGVSGSQSAHCSNFVPTFPSGCPFMTSVGATQGVSPENAAAFSSGGFSNVFGIPSYQASAVSGYLSALGSTNSGKFNRSGRGFPDVSTQGVDFQIVSGGQTIGVDGTSCASPTFASVISLVNDRLIAAGKSPLGFLNPFLYSSAGKAALNDVTSGSNPGCSTNGFPAKAGWDPVTGLGTPNFAKLLTAVGL

SEQ ID NO: 50055 - protein, 366 aa, Meripilus giganteus
AIPASCASTITPACLQAIYGIPTTKATQSSNKLAVSGFIDQFANKADLKSFLAQFRKDISSSTTFSLQTLDGGENDQSPSEAGIEANLDIQYTVGLATGVPTTFISVGHDFQDGNLEGFLDIINFLLGESNPPQVLTTSYGQNENTISAKLANQLCNAYAQLGARGTSILFASGDGGVSGSQSAHCSNFVPTFPSGCPFMTSVGATQGVSPETAAAFSSGGFSNVFGIPSYQASAVSGYLSALGSTNSGKFNRSGRGFPDVSTQGVDFQIVSGGQTIGVDGTSCASPTFASVISLVNDRLIAAGKSPLGFLNPFLYSSAGKAALNDVTSGSNPGCSTNGFPAKAGWDPVTGLGTPNFAKLLTAVGL

SEQ ID NO: 50056 - protein, 366 aa, Meripilus giganteus
AIPASCASTITPACLQAIYGIPTTKATQSSNKLAVSGFIDIFANKADLKSFLAQFRKDISSSTTFSLQTLDGGENDQSPSEAGIEANLDIQYTVGLATGVPTTFISVGDDFQDGNLEGFLDIINFLLGESNPPQVLTTSYGQNENTISAKLANQLCNAYAQLGARGTSILFASGDGGVSGSQSAHCSNFVPTFPSGCPFMTSVGATQGVSPETAAAFSSGGFSNVFGIPSYQASAVSGYLSALGSTNSGKFNRSGRGFPDVSTQGVDFQIVSGGQTIGVDGTSCASPTFASVISLVNDRLIAAGKSPLGFLNPFLYSSAGKAALNDVTSGSNPGCSTNGFPAKAGWDPVTGLGTPNFAKLLTAVGL

SEQ ID NO: 50057 - protein, 366 aa, Meripilus giganteus
AIPASCASTITPACLQAIYGIPTTKATQSSNKLAVSGFIDQFANKADLKSFLAQFRKDISSSTTFSLQTLDGGENDQSPSEAGIEANLDIQYTVGLATGVPTTFISVGDDFQDGNLEGFLDIINFLLGESNPPQVLTTSYGQNENTISAKLANQLCNAYAQLGARGTSILFASGDGGVSGSQSAHCSNFVPTFPSGCPFMTSVGATQGVSPETAAAFSSGGFSNVFGIPSYQASAVSGYLSALGSTNSGKFNRSGRGFPDVSTQGVLFQIVSGGQTIGVDGTSCASPTFASVISLVNDRLIAAGKSPLGFLNPFLYSSAGKAALNDVTSGSNPGCSTNGFPAKAGWDPVTGLGTPNFAKLLTAVGL

SEQ ID NO: 50058 - protein, 366 aa, Meripilus giganteus
AIPASCASTITPACLQAIYGIPTTKATQSSNKLAVSGFIDQFANKADLKSFLAQFRKDISSSTTFSLQTLDGGENDQSPSEAGIEANLDIQYTVGLATGVPTTFISVGDDFQDGNLEGFLDIINFLLGESNPPQVLTTSYGQNENTISAKLANQLCNAYAQLGARGTSILFASGDGGVSGSQSAHCSNFVPTFPSGCPFMTSVGATQGVSPETAAAFSSGGFSNVFGIPSYQASAVSGYLSALGSTNSGKFNRSGRGFPDVSTQGVDFQIVSGGQTIGVDGTSCASPTFASVISLVNDRLIAAGKSPLGFLNPFLYSSAGQAALNDVTSGSNPGCSTNGFPAKAGWDPVTGLGTPNFAKLLTAVGL

SEQ ID NO: 50059 - protein, 366 aa, Meripilus giganteus
AIPASCASTITPACLQAIYGIPTTKATQSSNKLAVSGFIDQFANKADLKSFLAQFRKDISSSTTFSLQTLDGGENDQSPSEAGIEANLDIQYTVGLATGVPTTFISVGDDFQDGNLEGFLDIINFLLGESNPPQVLTTSYGQNENTISAKLANQLCNAYAQLGARGTSILFASGDGGVSGSVSAHCSNFVPTFPSGCPFMTSVGATQGVSPETAAAFSSGGFSNVFGIPSYQASAVSGYLSALGSTNSGKFNRSGRGFPDVSTQGVDFQIVSGGQTIGVDGTSCASPTFASVISLVNDRLIAAGKSPLGFLNPFLYSSAGKAALNDVTSGSNPGCSTNGFPAKAGWDPVTGLGTPNFAKLLTAVGL

SEQ ID NO: 50060 - protein, 366 aa, Meripilus giganteus
AIPASCASTITPACLQAIYGIPTTKATQSSNKLAVSGFIDQFANKADLKSFLAQFRKDISSSTTFSLQTLDGGENDQSPSEAGIEANLDIQYTVGLATGVPTTFISVGDDFQDGNLEGFLDIINFLLGESNPPQVLTTSYGQNENTISAKLANQLCNAYAQLGARGTSILFASGDGGVSGSQSAHCSNFVPTFPSGCPFMTSVGATQGYSPETAAAFSSGGFSNVFGIPSYQASAVSGYLSALGSTNSGKFNRSGRGFPDVSTQGVDFQIVSGGQTIGVDGTSCASPTFASVISLVNDRLIAAGKSPLGFLNPFLYSSAGKAALNDVTSGSNPGCSTNGFPAKAGWDPVTGLGTPNFAKLLTAVGL

SEQ ID NO: 50061 - protein, 366 aa, Meripilus giganteus
AIPASCASTITPACLQAIYGIPTTKATQSENKLAVSGFIDQFANKADLKSFLAQFRKDISSSTTFSLQTLDGGENDQSPSEAGIEANLDIQYTVGLATGVPTTFISVGDDFQDGNLEGFLDIINFLLGESNPPQVLTTSYGQNENTISAKLANQLCNAYAQLGARGTSILFASGDGGVSGSQSAHCSNFVPTFPSGCPFMTSVGATQGVSPETAAAFSSGGFSNVFGIPSYQASAVSGYLSALGSTNSGKFNRSGRGFPDVSTQGVDFQIVSGGQTIGVDGTSCASPTFASVISLVNDRLIAAGKSPLGFLNPFLYSSAGKAALNDVTSGSNPGCSTNGFPAKAGWDPVTGLGTPNFAKLLTAVGL

SEQ ID NO: 50062 - protein, 366 aa, Meripilus giganteus
AIPASCASTITPACLQAIYGIPTTKATQSSNKLAVSGFIDQFANKADLKSFLAQFRKDISSSTTFSLQTLDGGENDQSPSEAGIEANLDIQYTVGLATGVPTTFISVGDDFQDGNLEGFLDIINFLLGESNPPQVLTTSYGQNENTISAKLANQLCNAYAQLGARGTSILFASGDGGVSGSQSAHCSNFVPTFPSGCPFMTSVGATQGVSPETAAAFSSGGFSNVFGIPSYQASAVSGYLSALGSTNSGKFNRSGRGFPDVSTQGVDFQIVSGGQTIGVDGTSCASPTFAVVISLVNDRLIAAGKSPLGFLNPFLYSSAGKAALNDVTSGSNPGCSTNGFPAKAGWDPVTGLGTPNFAKLLTAVGL

SEQ ID NO: 50063 - protein, 366 aa, Meripilus giganteus
AIPASCASTITPACLQAIYGIPTTKATQSSNKLAVSGFIDQFANKADLKSFLAQFRKDISSSTTFSLQTLDGGENDQSPSEAGIEANLDIQYTVGLATGVPTTFISVGDDFQDGNLEGFLDIINFLLGESNPPQVLTTSYGQNENTISAKLANQLCNAYAQLGARGTSILFASGDGGVSGSQSAHCSNFVPTFPSGCPFMTSVGATQGVSPETAAAFSSGGFSNVFGIPSYQASAVSGYLSALGSTNSGKFNRSGRGFPDVSTQGVDFQIVSGGQTIGVDGTSCASPTFASVISLVNDRLIAFGKSPLGFLNPFLYSSAGKAALNDVTSGSNPGCSTNGFPAKAGWDPVTGLGTPNFAKLLTAVGL

SEQ ID NO: 50064 - protein, 366 aa, Meripilus giganteus
AIPASCASTITPACLQAIYGIPTTKATQSSNKLAVSGFIDQFANKADLKSFLAQFRKDISSSTTFSLQTLDGGENDQSPSEAGIEANLDIQYTVGLATGVPTTFISVGDDFQDGNLEGFLDIINFLLGESNPPQVLTTSYGQNENTISAKLANQLCNAYAQLGARGTSILFASGDGGVSGSQSAHCSNFVPTFPSGCPFMTSVGATQGVSPETAAAFSSGGFSNVFGIPSYQASAVSGYLSALGSTNSGKFNRSGRGFPDVSTQGVDFQIVSGGQTIGVDGTSCASPTFASVISLVNDRLIAAGKSPLGFLNPFLYSSAGKAALNDVTSGSNPGCSTNGFPAVAGWDPVTGLGTPNFAKLLTAVGL

SEQ ID NO: 50065 - protein, 366 aa, Meripilus giganteus
AIPASCASTITPACLQAIYGIPTTKATQSSNKLAVSGFIDQFANKADLKSFLAQFRKDISSSTTFSLQTLDGGENDQSPSEAGIEANLDIQYTVGLATGVPTTFISVGDDFQDGNLEGFLDIINFLLGESNPPQVLTTSYGNNENTISAKLANQLCNAYAQLGARGTSILFASGDGGVSGSQSAHCSNFVPTFPSGCPFMTSVGATQGVSPETAAAFSSGGFSNVFGIPSYQASAVSGYLSALGSTNSGKFNRSGRGFPDVSTQGVDFQIVSGGQTIGVDGTSCASPTFASVISLVNDRLIAAGKSPLGFLNPFLYSSAGKAALNDVTSGSNPGCSTNGFPAKAGWDPVTGLGTPNFAKLLTAVGL

SEQ ID NO: 50066 - protein, 366 aa, Meripilus giganteus
AIPASCASTITPACLQAIYGIPTTKATQSSNKLAVSGFIDQFANKADLKSFLAQFRKDISSSTTFSLQTLDGGENDQSPSEAGIEANLDIQYTVGLATGVPTTFISVGDDFQDGNLEGFLDIINFLLGESNPPQVLTTSYGQNENTISAKLANQLCNAYAQLGARGTSILFASGDGGVSGSQSAHCSNFVPTFPSGCPFMTSVGATQGVSPELAAAFSSGGFSNVFGIPSYQASAVSGYLSALGSTNSGKFNRSGRGFPDVSTQGVDFQIVSGGQTIGVDGTSCASPTFASVISLVNDRLIAAGKSPLGFLNPFLYSSAGKAALNDVTSGSNPGCSTNGFPAKAGWDPVTGLGTPNFAKLLTAVGL

SEQ ID NO: 50067 - protein, 366 aa, Meripilus giganteus
AIPASCASTITPACLQAIYGIPTTKATQSSNKLAVSGFIDQFANKADLKSFLAQFRKDISSSTTFSLQTLDGGENDQSPSEAGIEANLDIQYTVGLATGVPTTFISVGDDFQDGNLEGFLDIINFLLGESNPPQVCTTSYGQNENTISAKLANQLCNAYAQLGARGTSILFASGDGGVSGSQSAHCSNFVPTFPSGCPFMTSVGATQGVSPETAAAFSSGGFSNVFGIPSYQASAVSGYLSALGSTNSGKFNRSGRGFPDVSTQGVDFQIVSGGQTIGVDGTSCASPTFASVISLVNDRLIAAGKSPLGFLNPFLYSSAGKAALNDVTSGSNPGCSTNGFPAKAGWDPVTGLGTPNFAKLLTAVGL

SEQ ID NO: 50068 - protein, 366 aa, Meripilus giganteus
AIPASCASTITPACLQAIYGIPTTKATQSSNKLAVSGFIDQFANKADLKSFLAQFRKDISSSTTFSLQTLDGGENDQSPSEAGIEANLDIQYTVGLATGVPTTFISVGDDFQDGNLEGFLDIINFLLGESNPPQVLTTSYGQNENTISAKLANQLCNAYAQLGARGTSILFASGDGGVSGSQSAHCSNFVPTFPSGCPFMTSVGATQGVSPETAAAFSSGGFSNVFGIPSYQASAVSGYLSALGSTNSGKFNRSGRGFPDVSTQGVDFQIVSGGQTIGVDGTSCASPTFASVISLVNDRLIAHGKSPLGFLNPFLYSSAGKAALNDVTSGSNPGCSTNGFPAKAGWDPVTGLGTPNFAKLLTAVGL

SEQ ID NO: 50069 - protein, 366 aa, Meripilus giganteus
AIPASCASTITPACLQAIYGIPTTKATQSSNKLAVSGFIDQFANKADLKSFLAQFRKDISSSTTFSLQTLDGGENDQSPSSAGIEANLDIQYTVGLATGVPTTFISVGDDFQDGNLEGFLDIINFLLGESNPPQVLTTSYGQNENTISAKLANQLCNAYAQLGARGTSILFASGDGGVSGSQSAHCSNFVPTFPSGCPFMTSVGATQGVSPETAAAFSSGGFSNVFGIPSYQASAVSGYLSALGSTNSGKFNRSGRGFPDVSTQGVDFQIVSGGQTIGVDGTSCASPTFASVISLVNDRLIAAGKSPLGFLNPFLYSSAGKAALNDVTSGSNPGCSTNGFPAKAGWDPVTGLGTPNFAKLLTAVGL

SEQ ID NO: 50070 - protein, 366 aa, Meripilus giganteus
AIPASCASTITPACLQAIYGIPTTKATQSSNKLAVSGFIDQFANKADLKSFLAQFRKDISSSTTFSLQTLDGGENDQSPSEAGIEANLDIQYTVGLATGVPTTFISVGDDFQDGNLEGFLDIINFLLGESNPPQVLTTSYGQNENTISAKLANQLCNAYAQLGARGTSILFASGDGGVSGSQSAHCSNFVPTFPSGCPFMTSVGATQGVSPETAAAFSSGGFSNVFGIPSYQASAVSGYLSALSSTNSGKFNRSGRGFPDVSTQGVDFQIVSGGQTIGVDGTSCASPTFASVISLVNDRLIAAGKSPLGFLNPFLYSSAGKAALNDVTSGSNPGCSTNGFPAKAGWDPVTGLGTPNFAKLLTAVGL

SEQ ID NO: 50071 - protein, 366 aa, Meripilus giganteus
AIPASCASTITPACLQAIYGIPTTKATQSSNKLAVSGFIDQFANKADLKSFLAQFRKDISSSTTFSLQTLDGGENDQSPSEAGIEANLDIQYTVGLATGVPTTFISVGDDFQDGNLEGFLDIINFLLGESNPPQVLTTSYGQNENTISAKLANQLCNAYAQLGARGTSILFASGDGGVSGSQSAHCSNFVPTFPSGCPFMTSVGATQGVSPETAAAFSSGGFSNVFGIPSYQASAVSGYLSALGSTNSGKFNRSGRGFPDVSTQGVDFQIVSGGQTIGVTGTSCASPTFASVISLVNDRLIAAGKSPLGFLNPFLYSSAGKAALNDVTSGSNPGCSTNGFPAKAGWDPVTGLGTPNFAKLLTAVGL

SEQ ID NO: 50072 - protein, 366 aa, Meripilus giganteus
AIPASCASTITPACLQAIYGIPTTKATQSSNKLAVSGFIDQFANKADLKSFLAQFRKDISSSTTFSLQTLDGGENDQSPSEAGIEANLDIQYTVGLATGVPTTFISVGDDFQDGNLEGFLDIINFLLGESNPPQVLTTSYGQNENTISAKLANQLCNAYAQLGARGTSILFASGDGGVSGSQSAHCSNFVPTFPSGCPFMTSVGATQGVSPETAAAFSSGGFSNVFGIPSYQASAVSGYLSALGSTNSGKFNRSGRGFPDVSTQGVDFQSVSGGQTIGVDGTSCASPTFASVISLVNDRLIAAGKSPLGFLNPFLYSSAGKAALNDVTSGSNPGCSTNGFPAKAGWDPVTGLGTPNFAKLLTAVGL

SEQ ID NO: 50073 - protein, 366 aa, Meripilus giganteus
AIPASCASTITPACLQAIYGIPTTKATQSSNKLAVSGFIDQFANKADLKSFLAQFRKDISSSTTFSLQTLDGGENDQSPSEAGIEANLDIQYTVGLATGVPTTFISVGDDFQDGNLEGFLDIINFLLGESNPPQVLTTSYGQNENTISAKLANQLCNAYAQLGARGTSILFASGDGGVSGSQSAHCSNFVPTFPSGCPFMTSVGATQGVSPETAAAFSSGGFSNVFGIPSYQASAVSGYLSALGSTNSGKFNRSGRGFPDVSTQGVDFQIVSGGQTIGVDGTSCASPTFASVISLVNDRLIAARKSPLGFLNPFLYSSAGKAALNDVTSGSNPGCSTNGFPAKAGWDPVTGLGTPNFAKLLTAVGL

SEQ ID NO: 50074 - protein, 366 aa, Meripilus giganteus
AIPASCASTITPACLQAIYGIPTTKATQSSNKLAVSGFIDQFANKADLKSFLAQFRKDISSSTTFSLQTLDGGENDQSPSEAGIEANLDIQYTVGLATGVPTTFISVGDDFQDGNLEGFLDIINFLLGESNPPQVLTTSYGQNENTISAKLANQLCNAYAQLGARGTSILFASGDGGVSGSQSAHCSNFVPTFPSGCPFMTSVGATQGVSPETAAAFSSGGFSNVFGIPSYQASAVSGYLSALGSTNSGKFNRSGRGFPDVSTQGVDFQIVSGGQTIGVDGTSCASPTFASVISLVNDRLIAAGKSPLGFLNPFLYSSAGKAALNDVTSGSNPGCSTNGFPAKAGWDPVTGLGTPNFAKLRTAVGL

SEQ ID NO: 50075 - protein, 366 aa, Meripilus giganteus
AIPASCASTITPACLQAIYGIPTTKATQSSNKLAVSGFIDQFANKADLKSFLAQFRKDISSSTTFSLQTLDGGENDQSPSEAGIEANLDIQYTVGLATGVPTTFISVGDDFQDGNLEGFLDIINFLLGESNPPQVLTTSYGQNENTISAKLANQLCNAYAQLGARGTSILFASGDGGVSGSQSAHCSNFVPTFPSGCPFMTSVGATQGVSPETAAAFSSGGFSNVFGIPSYQASAVSGYLSALGSTNSGKFNRSGRGFPDVSTQGVDFQIVSGGQTIGVDGTSCASPTFASVISLVNDRLIAAGKSPLGFLNPFLYSSAGKAALNDVTSGSNPGCSTNGFPAKAGWDPVTGLGTPNFACLLTAVGL

SEQ ID NO: 50076 - protein, 366 aa, Meripilus giganteus
AIPASCASTITPACLQAIYGIPTTKATQSSNKLAVSGFIDQFANKADLKSFLAQFRKDISSSTTFSLQTLDGGENDQSPSEAGIEANLDIQYTVGLATGVPTTFISVGDDFQDGNLEGFLDIINFLLGESNPPQVLTTSYGQNENTISAKLANKLCNAYAQLGARGTSILFASGDGGVSGSQSAHCSNFVPTFPSGCPFMTSVGATQGVSPETAAAFSSGGFSNVFGIPSYQASAVSGYLSALGSTNSGKFNRSGRGFPDVSTQGVDFQIVSGGQTIGVDGTSCASPTFASVISLVNDRLIAAGKSPLGFLNPFLYSSAGKAALNDVTSGSNPGCSTNGFPAKAGWDPVTGLGTPNFAKLLTAVGL

SEQ ID NO: 50077 - protein, 366 aa, Meripilus giganteus
AIPASCASTITPACLQAIYGIPTTKATQSSNKLAVSGFIDQFANKADLKSFLAQFRKDISSSTTFSLQTLDGGENDQSPSEAGIEANLDIQYTVGLATGVPTTFISVGDDFQDGNLEGFLDIINFLLGESNPPQVLTTSYGQNENTISAKLANQLCNAYAQLGARGTSILFASGDGGVSGSQSAHCSNFVPTFPSGCPFMTSVGATQGHSPETAAAFSSGGFSNVFGIPSYQASAVSGYLSALGSTNSGKFNRSGRGFPDVSTQGVDFQIVSGGQTIGVDGTSCASPTFASVISLVNDRLIAAGKSPLGFLNPFLYSSAGKAALNDVTSGSNPGCSTNGFPAKAGWDPVTGLGTPNFAKLLTAVGL

SEQ ID NO: 50078 - protein, 366 aa, Meripilus giganteus
AIPASCASTITPACLQAIYGIPTTKATQSSNKLAVSGFIDQFANKADLKSFLAQFRKDISSSTTFSLQTLDGGENDQSPSEAGIEANLDIQYTVGLATGVPTTFISVGDDFQDGNLEGFLDIINFLLGESNPPQVLTTSYGQNENTISAKLANQLCNAYAQLGARGTSILFASGDGGVSGSQSAHCSNFVPTFPSGCPFMTSVGATQGVSPETAAAFSSGGFSNVFGIPSYQASAVSGYLSALGSTNSGKFNRSGRGFPDVSTQGVDFQIVSGGQTIGVDGTSCASPTFASVISLVNDRLIAAGKSPLGFLNPFLYSSAGKAALNDVTSGSNPGCSTNGFPAKAGWDYVTGLGTPNFAKLLTAVGL

SEQ ID NO: 50079 - protein, 366 aa, Meripilus giganteus
AIPASCASTITPACLQAIYGIPTTKATQSSNKLAVSGFIDQFANKADLKSFLAQFRKDISSSTTFSLQTLDGGENDQSPSEAGIEANLDIQYTVGLATGVPTTFISVGDDFQDGNLEGFLDIINFLLGESNPPQVLTTSYGQNENTSSAKLANQLCNAYAQLGARGTSILFASGDGGVSGSQSAHCSNFVPTFPSGCPFMTSVGATQGVSPETAAAFSSGGFSNVFGIPSYQASAVSGYLSALGSTNSGKFNRSGRGFPDVSTQGVDFQIVSGGQTIGVDGTSCASPTFASVISLVNDRLIAAGKSPLGFLNPFLYSSAGKAALNDVTSGSNPGCSTNGFPAKAGWDPVTGLGTPNFAKLLTAVGL

SEQ ID NO: 50080 - protein, 366 aa, Meripilus giganteus
AIPASCASTITPACLQAIYGIPTTKATQSSNKLAVSGFIDQFANKADLKSFLAQFRKDISSSTTFSLQTLDGGENDQSPSEAGIEAFLDIQYTVGLATGVPTTFISVGDDFQDGNLEGFLDIINFLLGESNPPQVLTTSYGQNENTISAKLANQLCNAYAQLGARGTSILFASGDGGVSGSQSAHCSNFVPTFPSGCPFMTSVGATQGVSPETAAAFSSGGFSNVFGIPSYQASAVSGYLSALGSTNSGKFNRSGRGFPDVSTQGVDFQIVSGGQTIGVDGTSCASPTFASVISLVNDRLIAAGKSPLGFLNPFLYSSAGKAALNDVTSGSNPGCSTNGFPAKAGWDPVTGLGTPNFAKLLTAVGL

SEQ ID NO: 50081 - protein, 366 aa, Meripilus giganteus
AIPASCASTITPACLQAIYGIPTTKATQSSNKLAVSGFIDQFANKADLKSFLAQFRKDISSSTTFSLQTLDGGENDQSPSEAGIEANLDIQYTVGLATGVPTTFISVGDDFQDGNLEGFLDIINFLLGESNPPQVLTTSYGQNENTISAKLANQLCNAYAQLGARGTSILFASGDGGVSGSQSAHCSNFVPTFPSGCPFMTSVGATQGVSPETAAAFSSGGFSNVFGIPSYQASAVSGYLSALGSTNSGKFNRSGRGFPDVSTQGVDFQIVSGGQTIGVNGTSCASPTFASVISLVNDRLIAAGKSPLGFLNPFLYSSAGKAALNDVTSGSNPGCSTNGFPAKAGWDPVTGLGTPNFAKLLTAVGL

SEQ ID NO: 50082 - protein, 366 aa, Meripilus giganteus
AIPASCASTITPACLQAIYGIPTTKATQSSNKLAVSGFIDQFANKADLKSFLAQFRKDISSSTIFSLQTLDGGENDQSPSEAGIEANLDIQYTVGLATGVPTTFISVGDDFQDGNLEGFLDIINFLLGESNPPQVLTTSYGQNENTISAKLANQLCNAYAQLGARGTSILFASGDGGVSGSQSAHCSNFVPTFPSGCPFMTSVGATQGVSPETAAAFSSGGFSNVFGIPSYQASAVSGYLSALGSTNSGKFNRSGRGFPDVSTQGVDFQIVSGGQTIGVDGTSCASPTFASVISLVNDRLIAAGKSPLGFLNPFLYSSAGKAALNDVTSGSNPGCSTNGFPAKAGWDPVTGLGTPNFAKLLTAVGL

SEQ ID NO: 50083 - protein, 366 aa, Meripilus giganteus
AIPASCASTITPACLQAIYGIPTTKATQSSNKLAVSGFIDQFANKADLKSFLAQFRKDISSSTTFSLQTLDGGENDQSPSEAGIEANLDIQYTVGLATGVPTTFISVGDDFQDGNLWGFLDIINFLLGESNPPQVLTTSYGQNENTISAKLANQLCNAYAQLGARGTSILFASGDGGVSGSQSAHCSNFVPTFPSGCPFMTSVGATQGVSPETAAAFSSGGFSNVFGIPSYQASAVSGYLSALGSTNSGKFNRSGRGFPDVSTQGVDFQIVSGGQTIGVDGTSCASPTFASVISLVNDRLIAAGKSPLGFLNPFLYSSAGKAALNDVTSGSNPGCSTNGFPAKAGWDPVTGLGTPNFAKLLTAVGL

SEQ ID NO: 50084 - protein, 366 aa, Meripilus giganteus
AIPASCASTITPACLQAIYGIPTTKATQSSNKLAVSGFIDQFANKADLKSFLAQFRKDISSSTTFSLQTLDGGENDQSPSEAGIEANLDIQYTVGLATGVPTTFISVGDDFQDGNLEGFLDIINFLLGESNPPQVLTTSYGQNENTISAKLANQLCNAYAQLGARGTSILFASGDGGVSGSQSAHCSNFVPTFPSGCPFMTSVGATQGNSPETAAAFSSGGFSNVFGIPSYQASAVSGYLSALGSTNSGKFNRSGRGFPDVSTQGVDFQIVSGGQTIGVDGTSCASPTFASVISLVNDRLIAAGKSPLGFLNPFLYSSAGKAALNDVTSGSNPGCSTNGFPAKAGWDPVTGLGTPNFAKLLTAVGL

SEQ ID NO: 50085 - protein, 366 aa, Meripilus giganteus
AIPASCASTITPACLQAIYGIPTTKATQSSNKLAVSGFIDQFANKADLKSFLAQFRKDISSSTTFSLQTLDGGENDQSPSEAGIEANLDIQYTVGLATGVPTTFISVGDDFQDGNLEGFLDIINFLLGESNPPQVLTTSYGQNENTISAKLANQLCNAYAQLGARGTSILFASGDGGVSGSQSIHCSNFVPTFPSGCPFMTSVGATQGVSPETAAAFSSGGFSNVFGIPSYQASAVSGYLSALGSTNSGKFNRSGRGFPDVSTQGVDFQIVSGGQTIGVDGTSCASPTFASVISLVNDRLIAAGKSPLGFLNPFLYSSAGKAALNDVTSGSNPGCSTNGFPAKAGWDPVTGLGTPNFAKLLTAVGL

SEQ ID NO: 50086 - protein, 366 aa, Meripilus giganteus
AIPASCASTITPACLQAIYGIPTTKATQSSNKLAVSGFIDQFANKADLKSFLAQFRKDISSSTTFSLQTLDGGENDQSPSEAGIEANLDIQYTVGLATGVPTTFISVGDDFQDGNLEGFLDIINFLLGEFNPPQVLTTSYGQNENTISAKLANQLCNAYAQLGARGTSILFASGDGGVSGSQSAHCSNFVPTFPSGCPFMTSVGATQGVSPETAAAFSSGGFSNVFGIPSYQASAVSGYLSALGSTNSGKFNRSGRGFPDVSTQGVDFQIVSGGQTIGVDGTSCASPTFASVISLVNDRLIAAGKSPLGFLNPFLYSSAGKAALNDVTSGSNPGCSTNGFPAKAGWDPVTGLGTPNFAKLLTAVGL

SEQ ID NO: 50087 - protein, 366 aa, Meripilus giganteus
AIPASCASTITPACLQAIYRIPTTKATQSSNKLAVSGFIDQFANKADLKSFLAQFRKDISSSTTFSLQTLDGGENDQSPSEAGIEANLDIQYTVGLATGVPTTFISVGDDFQDGNLEGFLDIINFLLGESNPPQVLTTSYGQNENTISAKLANQLCNAYAQLGARGTSILFASGDGGVSGSQSAHCSNFVPTFPSGCPFMTSVGATQGVSPETAAAFSSGGFSNVFGIPSYQASAVSGYLSALGSTNSGKFNRSGRGFPDVSTQGVDFQIVSGGQTIGVDGTSCASPTFASVISLVNDRLIAAGKSPLGFLNPFLYSSAGKAALNDVTSGSNPGCSTNGFPAKAGWDPVTGLGTPNFAKLLTAVGL

SEQ ID NO: 50088 - protein, 366 aa, Meripilus giganteus
AIPASCASTITPACLQAIYGIPTTKATQSSNKLAVSGFIDQFANKADLKSFLAQFRKDISSSTTFSLQTLDGGENDQSPSEAGIEANLDIQYTVGLATGVPTTFISVGDDFQDGNLEGFLDIINFLLGESNPPQVLTTSYGQNENTISAKLANQLCNAYAQLGARGTSILFASGDGGVSGSQSAHCSNFVPTFPSGCPFMTSVGATQGVSPETAAAFSSGGFSNVFGIPSYQASAVSGYLSALGSTNSGKFNRSGRGFPDVSTQGVDFQIVSGGQTIGVMGTSCASPTFASVISLVNDRLIAAGKSPLGFLNPFLYSSAGKAALNDVTSGSNPGCSTNGFPAKAGWDPVTGLGTPNFAKLLTAVGL

SEQ ID NO: 50089 - protein, 366 aa, Meripilus giganteus
AIPASCASTITPACLQAIYGIPTTKATQSSNKLAVSGFIDQFANKADLKSFLAQFRKDISSSTTFSLQTLDGGENDQSPSEAGIEANLDIQYTVGLATGVPTTFISVGDDFQDGNLEGFLDIINFLLGESNPPQVLTTSYGQNENTISAKLANQLCYAYAQLGARGTSILFASGDGGVSGSQSAHCSNFVPTFPSGCPFMTSVGATQGVSPETAAAFSSGGFSNVFGIPSYQASAVSGYLSALGSTNSGKFNRSGRGFPDVSTQGVDFQIVSGGQTIGVDGTSCASPTFASVISLVNDRLIAAGKSPLGFLNPFLYSSAGKAALNDVTSGSNPGCSTNGFPAKAGWDPVTGLGTPNFAKLLTAVGL

SEQ ID NO: 50090 - protein, 366 aa, Meripilus giganteus
AIPASCASTITPACLQAIYGIPTTKATQSSNKLAVSGFIDQFANKADLKSFLAQFRKDISSSTTFSLQTLDGGENDQSPSEAGIEANLDIQYTVGLATGVPTTFISVGDDFQDGNLEGFLDIINFLLGESNPPQVLTTSYGQNENTISAKLANQLCNAYAQLGARGTSILFASGDGGVSGSQSAHCSNFVPTFPSGCPFMTSVGATQGVSPETAAAFSSGGFSNVFGIPSYQASAVSGYLSALGSTNSGKFNRSGRGFPDVSTQGVDFQIVSGGQTIGVDGTSCASPTFASVISLVNDRLIACGKSPLGFLNPFLYSSAGKAALNDVTSGSNPGCSTNGFPAKAGWDPVTGLGTPNFAKLLTAVGL

SEQ ID NO: 50091 - protein, 366 aa, Meripilus giganteus
AIPASCASTITPACLQAIYGIPTTKATQSSNKLAVSGFIDQFANKADLKSFLAQFRKDISSSTTFSLQTLDGGENDQSPSEAGIEANLDIQYTVGLATGVPTTFISVGDDFQDGNLEGFLDIINFLLGESNPPQVLTTSYGQNENTISAKLANQLCNAYAQLGARGTSILFASGDGGVSGSQSAHCSNFVPTFPSGCPFMTSVGATQGVSPETAAAFSSGGFSNVFGIPSYQASAVSGYLSALGSTNSGKFNRSGRGFPDVSTQGVDFQIVSGGQTIGVDGTSCASPTFASVISLVNDRLIAAGKSPLGFLNPFLYSSAGKAALNDVTSGSNRGCSTNGFPAKAGWDPVTGLGTPNFAKLLTAVGL

SEQ ID NO: 50092 - protein, 366 aa, Meripilus giganteus
AIPASCASTITPACLQAIYGIPTTKATQSSNKLAVSGFIDQFANKADLKSFLAQFRKDISSSTTFSLQTLDGGENDQSPSEAGIEANLDIQYTVGLATGVPTTFISVGDDFQDGNLEGFLDIINFLLGESNPPQVLTTSYGQNENTISAKLANQLCNAYAQLGARGTSILFASGDGGVSGSQSKHCSNFVPTFPSGCPFMTSVGATQGVSPETAAAFSSGGFSNVFGIPSYQASAVSGYLSALGSTNSGKFNRSGRGFPDVSTQGVDFQIVSGGQTIGVDGTSCASPTFASVISLVNDRLIAAGKSPLGFLNPFLYSSAGKAALNDVTSGSNPGCSTNGFPAKAGWDPVTGLGTPNFAKLLTAVGL

SEQ ID NO: 50093 - protein, 366 aa, Meripilus giganteus
AIPASCASTITPACLQAIYGIPTTKATQSSNKLAVSGFIDQFANKADLKSFLAQFRKDISSSTTFSLQTLDGGENDQSPSEAGIEANLDIQYTVGLATGVPTTFISVGDDFQDGNLEGFLDIINFLLGSSNPPQVLTTSYGQNENTISAKLANQLCNAYAQLGARGTSILFASGDGGVSGSQSAHCSNFVPTFPSGCPFMTSVGATQGVSPETAAAFSSGGFSNVFGIPSYQASAVSGYLSALGSTNSGKFNRSGRGFPDVSTQGVDFQIVSGGQTIGVDGTSCASPTFASVISLVNDRLIAAGKSPLGFLNPFLYSSAGKAALNDVTSGSNPGCSTNGFPAKAGWDPVTGLGTPNFAKLLTAVGL

SEQ ID NO: 50094 - protein, 366 aa, Meripilus giganteus
AIPASCASTITPACLQAIYGIPTTKATQSSNKLAVSGFIDQFANKADLKSFLAQFRKDISSSTTFSLQTLDGGENDQSPSEAGIEANLDIQYTVGLATGVPTTFISVGDDFQDGNLEGFLDIINFLLGESNPPQVLTTSYGQNENTISAKLANQLCNAYAQLGARGTSILFASGDGGVSGSQSAHCSNFVPTFPSGCPFMTSVGATQGVSPETAAAFSSGGFSNVFGIPSYQASAVSGYLSALGSTNSGKFNRSGRGFPDVSTQGVDFTIVSGGQTIGVDGTSCASPTFASVISLVNDRLIAAGKSPLGFLNPFLYSSAGKAALNDVTSGSNPGCSTNGFPAKAGWDPVTGLGTPNFAKLLTAVGL

SEQ ID NO: 50095 - protein, 366 aa, Meripilus giganteus
AIPASCASTITPACLQAIYGIPTTKATQSSNKLAVSGFIDQFANKADLKSFLAQFRKDISSSTTFSLQTLDGGENDQSPSEAGIEANLDIQYTVGLATGVPTTFISVGDDFQDGNLSGFLDIINFLLGESNPPQVLTTSYGQNENTISAKLANQLCNAYAQLGARGTSILFASGDGGVSGSQSAHCSNFVPTFPSGCPFMTSVGATQGVSPETAAAFSSGGFSNVFGIPSYQASAVSGYLSALGSTNSGKFNRSGRGFPDVSTQGVDFQIVSGGQTIGVDGTSCASPTFASVISLVNDRLIAAGKSPLGFLNPFLYSSAGKAALNDVTSGSNPGCSTNGFPAKAGWDPVTGLGTPNFAKLLTAVGL

SEQ ID NO: 50096 - protein, 366 aa, Meripilus giganteus
AIPASCASTITPACLQAIYGIPTTKATQSSNKLAVSGFIDQFANKADLKSFLAQFRKDISSSTTFSLQTLDGGENDQSPSEAGIEANLDIQYTVGLATGVPTTFISVGDDFQDGNLDGFLDIINFLLGESNPPQVLTTSYGQNENTISAKLANQLCNAYAQLGARGTSILFASGDGGVSGSQSAHCSNFVPTFPSGCPFMTSVGATQGVSPETAAAFSSGGFSNVFGIPSYQASAVSGYLSALGSTNSGKFNRSGRGFPDVSTQGVDFQIVSGGQTIGVDGTSCASPTFASVISLVNDRLIAAGKSPLGFLNPFLYSSAGKAALNDVTSGSNPGCSTNGFPAKAGWDPVTGLGTPNFAKLLTAVGL

SEQ ID NO: 50097 - protein, 366 aa, Meripilus giganteus
AIPASCASTITPACLQAIYGIPTTKATQSSNKLAVSGFIDQFANKADLKSFLAQFRKDISSSTTFSLQTLDGGENDQSPSEAGIEANLDIQYTVGLATGVPTTFISVGDDFQDGNLEGFLDIINFLLGESNPPQVLTTSYGQNENTISAKLANQLCNAYAQLGARGTSILFASGDGGVSGSQSAHCSNFVPTFPSGCPFMTSVGATQGVSPETAAAFSSGGFSNVFGIPSYQASAVSGYLSALGSTNSGKFNRSGRGFPDVSTQGVDFQIMSGGQTIGVDGTSCASPTFASVISLVNDRLIAAGKSPLGFLNPFLYSSAGKAALNDVTSGSNPGCSTNGFPAKAGWDPVTGLGTPNFAKLLTAVGL

SEQ ID NO: 50098 - protein, 366 aa, Meripilus giganteus
AIPASCASTITPACLQAIYGIPTTKATQSSNKLAVSGFIDQFANKADLKSFLAQFRKDISSSTTFSLQTLDGGENDQSPSEAGIEANLDIQYTVGLATGVPTTFISVGDDFQDGNLEGFLDIINFLLGESNPPQVLTTSYGQNENTISAKLANQLCNAYAQLGARGTSILFASGDGGVSGSQSAHCSNFVPTFPSGCPFMTSVGATQGVSPETAAAFSSGGFSNVFGIPSYQASAVSGYLSALGSTNSGKFNRSGRGPPDVSTQGVDFQIVSGGQTIGVDGTSCASPTFASVISLVNDRLIAAGKSPLGFLNPFLYSSAGKAALNDVTSGSNPGCSTNGFPAKAGWDPVTGLGTPNFAKLLTAVGL

SEQ ID NO: 50099 - protein, 366 aa, Meripilus giganteus
AIPASCASTITPACLQAIYGIPTTKATQSSNKLAVSGFIDQFANKADLKSFLAQFRKDIRSSTTFSLQTLDGGENDQSPSEAGIEANLDIQYTVGLATGVPTTFISVGDDFQDGNLEGFLDIINFLLGESNPPQVLTTSYGQNENTISAKLANQLCNAYAQLGARGTSILFASGDGGVSGSQSAHCSNFVPTFPSGCPFMTSVGATQGVSPETAAAFSSGGFSNVFGIPSYQASAVSGYLSALGSTNSGKFNRSGRGFPDVSTQGVDFQIVSGGQTIGVDGTSCASPTFASVISLVNDRLIAAGKSPLGFLNPFLYSSAGKAALNDVTSGSNPGCSTNGFPAKAGWDPVTGLGTPNFAKLLTAVGL

SEQ ID NO: 50100 - protein, 366 aa, Meripilus giganteus
AIPASCASTITPACLQAIYGIPTTKATQSSNKLAVSGFIDQFANKADLKSFLAQFRKDISSSTTFSLQTLDGGENDQSPSEAGIEANLDIQYTVGLATGVPTTFISVGDDFQDGNLEGFLDIINFLLGESNPPQVLTTSYGQNENTISAKLANQLCNAYAQLGARGTSILFASGDGGVSGSQSAHCSNFVPTFPSGCPFMTSVGATQGVSPETAAAFSSGGFSNVFGIPSYQASAVSGYLSALGSTNSGKFNRSGRGFPDVSTQGVDFQIVSGGQTIGVDGTSCASPTFASVISLVNDRLIAAGKSPLGFLNPFLYLSAGKAALNDVTSGSNPGCSTNGFPAKAGWDPVTGLGTPNFAKLLTAVGL

SEQ ID NO: 50101 - protein, 366 aa, Meripilus giganteus
AIPASCASTITPACLQAIYGIPTTKATQSSNKLAVSGFIDQFANKADLKSFLAQFRKDISSSTTFSLQTLDGGENDQSPSEAGIEANLDIQYTVGLATGVPTTFISVGDDFQDGNLEGFLDIINFLLGESNPPQVLTTSYGQNENTISAKLANQLCNAYAQLGARGTSILFASGDGGVSGSQSAHCSNFVPTFPSGCPFMTSVGATQGVSPETAAAFSSGGFSNVFGIPSYQASAVSGYLSALGSTNSGKFNRSGRGFPDVSTQGVHFQIVSGGQTIGVDGTSCASPTFASVISLVNDRLIAAGKSPLGFLNPFLYSSAGKAALNDVTSGSNPGCSTNGFPAKAGWDPVTGLGTPNFAKLLTAVGL

SEQ ID NO: 50102 - protein, 366 aa, Meripilus giganteus
AIPASCASTITPACLQAIYGIPTTKATQSSNKLAVSGFIDQFANKADLKSFLAQFRKDISSSTTFSLQTLDGGENDQSPSEAGIEANLDIQYTVGLATGVPTTFISVGDDFQDGNLEGFLDIINFLLGESNPPQVLTTSYGQNENTISAKLANQLCNAYAQLGARGTSILFASGDGGVSGSQSAHCSNFVPTFPSGCPFMTSVGATQGVSPETAAAFSSGGFSNVFGIPSYQASAVSGYLSALGSTNSGKFNRSGRGFPDVSTQGVDFCIVSGGQTIGVDGTSCASPTFASVISLVNDRLIAAGKSPLGFLNPFLYSSAGKAALNDVTSGSNPGCSTNGFPAKAGWDPVTGLGTPNFAKLLTAVGL

SEQ ID NO: 50103 - protein, 366 aa, Meripilus giganteus
AIPASCASTITPACLQAIYGIPTTKATQSSNKLAVSGFIDQFANKADLKQFLAQFRKDISSSTTFSLQTLDGGENDQSPSEAGIEANLDIQYTVGLATGVPTTFISVGDDFQDGNLEGFLDIINFLLGESNPPQVLTTSYGQNENTISAKLANQLCNAYAQLGARGTSILFASGDGGVSGSQSAHCSNFVPTFPSGCPFMTSVGATQGVSPETAAAFSSGGFSNVFGIPSYQASAVSGYLSALGSTNSGKFNRSGRGFPDVSTQGVDFQIVSGGQTIGVDGTSCASPTFASVISLVNDRLIAAGKSPLGFLNPFLYSSAGKAALNDVTSGSNPGCSTNGFPAKAGWDPVTGLGTPNFAKLLTAVGL

SEQ ID NO: 50104 - protein, 366 aa, Meripilus giganteus
AIPASCASTITPACLQAIYGIPTTKATQSSNKLAVSGFIDQFANKADLKSFLAQFRKDISSSTTFSLQTLDGGENDQSPSEAGIEANLDIQYTVGLATGVPTTFISVGDDFQDGNLEGFLDIINFLLGESNPPQVLTTSYGQNENTISAKLAFQLCNAYAQLGARGTSILFASGDGGVSGSQSAHCSNFVPTFPSGCPFMTSVGATQGVSPETAAAFSSGGFSNVFGIPSYQASAVSGYLSALGSTNSGKFNRSGRGFPDVSTQGVDFQIVSGGQTIGVDGTSCASPTFASVISLVNDRLIAAGKSPLGFLNPFLYSSAGKAALNDVTSGSNPGCSTNGFPAKAGWDPVTGLGTPNFAKLLTAVGL

SEQ ID NO: 50105 - protein, 366 aa, Meripilus giganteus
AIPASCASTITPACLQAIYGIPTTKATQSSNKLAVSGFIDQFANKADLKSFLAQFRKDISSSTTFSLQTLDGGENDQSPSEAGIEANLDIQYTVGLATGVPTTFISVGDDFQDGNLEGFLDIINFLLGESNPPQVLTTSYGQNENTISAKLANQLCNAYAQLGARGTSILFASGDGGVSGSQSAHCSNFVPTFPSGCPFMTSVGATQGVSPETAAAFSSGGFSNVFGIPSYQASAVSGYLSALGSTNSGKFNRSGRGFPDVSTQGVDFQIVSGGQTIGVDGTSCASPGFASVISLVNDRLIAAGKSPLGFLNPFLYSSAGKAALNDVTSGSNPGCSTNGFPAKAGWDPVTGLGTPNFAKLLTAVGL

SEQ ID NO: 50106 - protein, 366 aa, Meripilus giganteus
AIPASCASTITPACLQAIYGIPTTKATQSSNKLAVSGFIDQFANKADLKSFLAQFRKDISSSTTFSLQTLDGGENDQSPSEAGIEANLDIQYTVGLATGVPTTFISVGDDFQDGNLEGFLDIINFLLGESNPPLVLTTSYGQNENTISAKLANQLCNAYAQLGARGTSILFASGDGGVSGSQSAHCSNFVPTFPSGCPFMTSVGATQGVSPETAAAFSSGGFSNVFGIPSYQASAVSGYLSALGSTNSGKFNRSGRGFPDVSTQGVDFQIVSGGQTIGVDGTSCASPTFASVISLVNDRLIAAGKSPLGFLNPFLYSSAGKAALNDVTSGSNPGCSTNGFPAKAGWDPVTGLGTPNFAKLLTAVGL

SEQ ID NO: 50107 - protein, 366 aa, Meripilus giganteus
AIPASCASTITPACLQAIYGIPTTKATQSSNKLAVSGFIDQFANKADLKSFLAQFRKDISSSTTFSLQTLDGGENDQSPSEAGIEANLDIQYTVGLATGVPTTFISVGDDFQDGNLEGFLDIINFLLGESNPPQVLTTSYGQNENTISAKLANQLCNAYAQLGARGTSILFASGDGGVSGSQSAHCSNFVPTFPSGCPFMTSVGATQGVSPETAAAFSSGGFSNVFGIPSYQASAVSGYLSALGSTNSGKFNRSGRGFPDVSTQGVDFQIVSGGQTIGVDGTSCASPTFASVISLVNDRLIAAGKSPLGFLNPFLYSSAGKAALNDVTSGSNPGCSTNGFPAKAGWDPVTGLGTINFAKLLTAVGL

SEQ ID NO: 50108 - protein, 366 aa, Meripilus giganteus
AIPASCASTITPACLQAIYGIPTTKATQSSNKLAVSGFIDQFANKADLKSFLARFRKDISSSTTFSLQTLDGGENDQSPSEAGIEANLDIQYTVGLATGVPTTFISVGDDFQDGNLEGFLDIINFLLGESNPPQVLTTSYGQNENTISAKLANQLCNAYAQLGARGTSILFASGDGGVSGSQSAHCSNFVPTFPSGCPFMTSVGATQGVSPETAAAFSSGGFSNVFGIPSYQASAVSGYLSALGSTNSGKFNRSGRGFPDVSTQGVDFQIVSGGQTIGVDGTSCASPTFASVISLVNDRLIAAGKSPLGFLNPFLYSSAGKAALNDVTSGSNPGCSTNGFPAKAGWDPVTGLGTPNFAKLLTAVGL

SEQ ID NO: 50109 - protein, 366 aa, Meripilus giganteus
AIPASCASTITPACLQAIYGIPTTKATQSSNKLAVSGFIDQFANKADLKSFLAQFRKDISSSTTFSLQTLDGGENDQSPSEPGIEANLDIQYTVGLATGVPTTFISVGDDFQDGNLEGFLDIINFLLGESNPPQVLTTSYGQNENTISAKLANQLCNAYAQLGARGTSILFASGDGGVSGSQSAHCSNFVPTFPSGCPFMTSVGATQGVSPETAAAFSSGGFSNVFGIPSYQASAVSGYLSALGSTNSGKFNRSGRGFPDVSTQGVDFQIVSGGQTIGVDGTSCASPTFASVISLVNDRLIAAGKSPLGFLNPFLYSSAGKAALNDVTSGSNPGCSTNGFPAKAGWDPVTGLGTPNFAKLLTAVGL

SEQ ID NO: 50110 - protein, 366 aa, Meripilus giganteus
AIPASCASTITPACLQAIYGIPTTKATQSSNKLAVSGFIDQFANKADLKSFLAQFRKDISSSTTFSLQTLDGGENDQSPSEAGIEANLDIQYTVGLATGVPTTFISVGDDFQDGNLEGFLDIINFLLGESNPPQVLTTSYGQNENTISAKLANQLCNAYAQLGARGTSILFASGDGGVSGSQSAHCSNFVPTFPSGCPFMTSVGATQGVSPETAAAFSSGGFSNVFGIPSYQASAVSGYLSALGSTNSGKFNRSGRGFPDVSTQGTDFQIVSGGQTIGVDGTSCASPTFASVISLVNDRLIAAGKSPLGFLNPFLYSSAGKAALNDVTSGSNPGCSTNGFPAKAGWDPVTGLGTPNFAKLLTAVGL

SEQ ID NO: 50111 - protein, 366 aa, Meripilus giganteus
AIPASCASTITPACLQAIYGIPTTKATQSSNKLAVSGFIDQFANKADLKSFLAQFRKDISSSTTFSLQTLDGGHNDQSPSEAGIEANLDIQYTVGLATGVPTTFISVGDDFQDGNLEGFLDIINFLLGESNPPQVLTTSYGQNENTISAKLANQLCNAYAQLGARGTSILFASGDGGVSGSQSAHCSNFVPTFPSGCPFMTSVGATQGVSPETAAAFSSGGFSNVFGIPSYQASAVSGYLSALGSTNSGKFNRSGRGFPDVSTQGVDFQIVSGGQTIGVDGTSCASPTFASVISLVNDRLIAAGKSPLGFLNPFLYSSAGKAALNDVTSGSNPGCSTNGFPAKAGWDPVTGLGTPNFAKLLTAVGL

SEQ ID NO: 50112 - protein, 366 aa, Meripilus giganteus
AIPASCASTITPACLQAIYGIPTTKATQSSNKLAVSGFIDQFANKADLKSFLAQFRKDISFSTTFSLQTLDGGENDQSPSEAGIEANLDIQYTVGLATGVPTTFISVGDDFQDGNLEGFLDIINFLLGESNPPQVLTTSYGQNENTISAKLANQLCNAYAQLGARGTSILFASGDGGVSGSQSAHCSNFVPTFPSGCPFMTSVGATQGVSPETAAAFSSGGFSNVFGIPSYQASAVSGYLSALGSTNSGKFNRSGRGFPDVSTQGVDFQIVSGGQTIGVDGTSCASPTFASVISLVNDRLIAAGKSPLGFLNPFLYSSAGKAALNDVTSGSNPGCSTNGFPAKAGWDPVTGLGTPNFAKLLTAVGL

SEQ ID NO: 50113 - protein, 366 aa, Meripilus giganteus
AIPASCASTITPACLQAIYLIPTTKATQSSNKLAVSGFIDQFANKADLKSFLAQFRKDISSSTTFSLQTLDGGENDQSPSEAGIEANLDIQYTVGLATGVPTTFISVGDDFQDGNLEGFLDIINFLLGESNPPQVLTTSYGQNENTISAKLANQLCNAYAQLGARGTSILFASGDGGVSGSQSAHCSNFVPTFPSGCPFMTSVGATQGVSPETAAAFSSGGFSNVFGIPSYQASAVSGYLSALGSTNSGKFNRSGRGFPDVSTQGVDFQIVSGGQTIGVDGTSCASPTFASVISLVNDRLIAAGKSPLGFLNPFLYSSAGKAALNDVTSGSNPGCSTNGFPAKAGWDPVTGLGTPNFAKLLTAVGL

SEQ ID NO: 50114 - protein, 366 aa, Meripilus giganteus
AIPASCASTITPACLQAIYGIPTTKATQSSNKLAVSGFIDQFANKADLKSFLAQFRKDISSSTTFSLQTLDGGENDQSPSEAGIEANLDIQYTVGLATGVPTTFISVGDDFQDGNLEGFLDIINFLLGESNPPQVLTTSYGQNENTISAKLANQLCNAYAQLGARGTSILFASGDGGVSGSQSAHCSNFVPTFPSGCPFMTSVGATQGVSPETAAAFSSGGFSNVFGIPSYQASAVSGYLSALGSTNSGKFNRSGRGFPDVSTQGVDFQIVSGGQTIGVDGTSCASPTFASVISLVNDRLIAAGKSPLGFLNPFLYSSAGKAALNDVTSGSNPGCSTNGFPAKAGWDPVTGLGTPNFAKLLIAVGL

SEQ ID NO: 50115 - protein, 366 aa, Meripilus giganteus
AIPASCASTITPACLQAIYGIPTTKATQSSNKLAVSGFIDQFANKADLKSFLAQFRKDISSSTTFSLQTLDGGENDQSPSEAGIEANLDIQYTVGLATGVPTTFISVGDDFQDGNLEGFLDIINFLLGESNPPQVLTTSYGQNENTISAKLANQLCNAYAQLGARGTSILFASGDGGVSGSQSAHCSNFVPTFPSGCPFMTSVGATQGVSPETAAAFSSGGFSNVFGIPSYQASAVSGYLSALGSTNSGKFNRSGRGFPDVSTQGVDFQIVSGGQTIGVSGTSCASPTFASVISLVNDRLIAAGKSPLGFLNPFLYSSAGKAALNDVTSGSNPGCSTNGFPAKAGWDPVTGLGTPNFAKLLTAVGL

SEQ ID NO: 50116 - protein, 366 aa, Meripilus giganteus
AIPASCASTITPACLQAIYGIPTTKATQSSNKLAVSGFIDYFANKADLKSFLAQFRKDISSSTTFSLQTLDGGENDQSPSEAGIEANLDIQYTVGLATGVPTTFISVGDDFQDGNLEGFLDIINFLLGESNPPQVLTTSYGQNENTISAKLANQLCNAYAQLGARGTSILFASGDGGVSGSQSAHCSNFVPTFPSGCPFMTSVGATQGVSPETAAAFSSGGFSNVFGIPSYQASAVSGYLSALGSTNSGKFNRSGRGFPDVSTQGVDFQIVSGGQTIGVDGTSCASPTFASVISLVNDRLIAAGKSPLGFLNPFLYSSAGKAALNDVTSGSNPGCSTNGFPAKAGWDPVTGLGTPNFAKLLTAVGL

SEQ ID NO: 50117 - protein, 366 aa, Meripilus giganteus
AIPASCASTITPACLQAIYGIPTTKATQSSNKLAVSGFIDQFANKADLKSFLAQFRKDISSSTTFSLQTLDGGENDQSPSEAGIEANLDIQYTVGLATGVPTTFISVGDDFQDGNLEGFLDIINFLLGESNPPQVLTTSYGQNENTISAKLANQLCNAYAQLGARGTSILFASGDGGVSGSQSAHCSNFVPTFPSGCPFMTSVGATQGVSPETAAAFSSGGFSNVFGIPSYQASAVSGYLSALGSTNSGKFNRSGRGFPDVSTQGVDFQIVSGGQTIGVDGTSCASPTFASCISLVNDRLIAAGKSPLGFLNPFLYSSAGKAALNDVTSGSNPGCSTNGFPAKAGWDPVTGLGTPNFAKLLTAVGL

SEQ ID NO: 50118 - protein, 366 aa, Meripilus giganteus
AIPASCASTITPACLQAIYGIPTTKATQSSNKLAVSGFIDQFANKADLKSFLAQFRKDISSSTTFSLQTLDGGENDQSPSEAGIEANLDIQYTVGLATGVPTTFISVGDDFQDGNLEGFLDIINFLLEESNPPQVLTTSYGQNENTISAKLANQLCNAYAQLGARGTSILFASGDGGVSGSQSAHCSNFVPTFPSGCPFMTSVGATQGVSPETAAAFSSGGFSNVFGIPSYQASAVSGYLSALGSTNSGKFNRSGRGFPDVSTQGVDFQIVSGGQTIGVDGTSCASPTFASVISLVNDRLIAAGKSPLGFLNPFLYSSAGKAALNDVTSGSNPGCSTNGFPAKAGWDPVTGLGTPNFAKLLTAVGL

SEQ ID NO: 50119 - protein, 366 aa, Meripilus giganteus
AIPASCASTITPACLQAIYGIPTTKATQSSNKLAVSGFIDQFANKADLKSFLAQFRKDISSSTTFSLQTLDGGENDQSPSEAGIEANLDIQYTVGLATGVPTTFISVGDDFQDGNLEGFLDIINFLLGESNPPQVLTTSYGQNENTISAKLANQLCNAYAQLGARGTSILFASGDGGVSGSQSAHCSNFVPTFPSGCPFMTSVGATQGVSPETAAAFSSGGFSNVFGIPSYQASAVSGYLSALGSTNSGKFNRSGRGFPDVSTQGVDFQIVSGGQTIGVDGTSCASPTFASVIVLVNDRLIAAGKSPLGFLNPFLYSSAGKAALNDVTSGSNPGCSTNGFPAKAGWDPVTGLGTPNFAKLLTAVGL

SEQ ID NO: 50120 - protein, 366 aa, Meripilus giganteus
AIPASCASTITPACLQAIYGIPTTKATQSSNKLAVSGFIDQFANKADLKSFLAQFRKDISSSTTFSLQTLDGGENDQSPSEAGIEANLDIQYTVGLATGVPTTFISVGDDFQDGNLEGFLDIINFLLGESNPPQVLTTSYGQNENTISAKLANQLCNAYAQLGARGTSILFASGDGGVSGSQSAHCSNFVPTFPSGCPFMTSVGATQGVSPETAAAFSSGGFSNVFGIPSYQASAVSGYLSALGSTNSGKFNRSGRGFPDVSTQGVDFQIVSGGQTIGVDGTSCASPTFASVISLVNDRLIAAGKSPLGFLNPFLYSSAGKAALNDVTSGSNPGCSTNGFPAKAGWDPVTGLGTPNFAKLLTFVGL

SEQ ID NO: 50121 - protein, 366 aa, Meripilus giganteus
AIPASCASTITPACLQAIYGIPTTKATQSSNKLAVSGFIDQFANKADLKSFLAQFRKDISSSTTFSLQTLDGGENDQSPSEAGIEANLDIQYTVGLATGVPTTFISVGDDFQDGNLEGFLDIINFLLGESNPPQVLTTSYGQNENTISAKLANQLCNAYAQLGARGTSILFASGDGGVSGSQSAHCSNFVPTFPSGCPFMTSVGATQGVSPETAAAFSSGGFSNVFGIPSYQASAVSGYLSALGSTNSGKFNRSGRGFPDVPTQGVDFQIVSGGQTIGVDGTSCASPTFASVISLVNDRLIAAGKSPLGFLNPFLYSSAGKAALNDVTSGSNPGCSTNGFPAKAGWDPVTGLGTPNFAKLLTAVGL

SEQ ID NO: 50122 - protein, 366 aa, Meripilus giganteus
AIPASCASTITPACLQAIYGIPTTKATQSSNKLAVSGFIDQFANKADLKSFLAQFRKDISSSTTFSLQTLDGGENDQSPSEAGIEANLDIQYTVGLATGVPTTFISVGDDFQDGNLEGFLDIINFLLGESNPPQVLTTSYGQNENTISAKLANQLCNAYAQLGARGTSILFASGDGGVSGSQSAHCSNFVPTFPSGCPFMTSVGATQGVSPETAAAFSSGGFSNVFGIPSYQASAVSGYLSALGSTNSGKFNRSGRGFPDVSTQGVDFQIVSGGQTIGVDGTSCASPTFASVISLVNDRLIAAGKSPLGFLNPFLYSSAGKAALNDVTSGSNPGCSTNGFPAKAGWDPVTGLGTPYFAKLLTAVGL

SEQ ID NO: 50123 - protein, 366 aa, Meripilus giganteus
AIPASCASTITPACLQAIYGIPTTKATQSSNKLAVSGFIDQFANKADLKSFLAQFRKDISSSTTFSLQTLDGGENDQSPSEAGIEANLDIQYTVGLATGVPTTFISVGDDFQDCNLEGFLDIINFLLGESNPPQVLTTSYGQNENTISAKLANQLCNAYAQLGARGTSILFASGDGGVSGSQSAHCSNFVPTFPSGCPFMTSVGATQGVSPETAAAFSSGGFSNVFGIPSYQASAVSGYLSALGSTNSGKFNRSGRGFPDVSTQGVDFQIVSGGQTIGVDGTSCASPTFASVISLVNDRLIAAGKSPLGFLNPFLYSSAGKAALNDVTSGSNPGCSTNGFPAKAGWDPVTGLGTPNFAKLLTAVGL

SEQ ID NO: 50124 - protein, 366 aa, Meripilus giganteus
AIPASCASTITPACLQAIYGIPTTKATQSSNKLAVSGFIDQFANKADLKSFLAQFRKDISSSTTFSLQTLDGGENDQSPSEAGIEANLDIQYTVGLATGVPTTFISVGDDFQDGNLEGFLDIINFLLGESNPPQVLTTSYGQNENTISAKLANQLCNAYAQLGARGTSILFASGDGGVSGSQSAHCSNFVPTFPSGCPFMTSVGATQGVSPETAAAFSSGGFSNVFGIPSYQASAVSGYLSALGSTNSGKFNRSGRGFPDVSTQGVDFQIVSGGQTIGVDGTSCASPTFASVISLVNDRLIAAGKSPLGFLNPFLYSSAGKAALNDVTSGSNPGCSTNGFPAKAGWDPVTGLGTPNFAKLTTAVGL

SEQ ID NO: 50125 - protein, 366 aa, Meripilus giganteus
AIPASCASTITPACLQAIYGIPTTKATQSSNKLAVSGFIDQFANKADLKSFLAQFRKDISSSTTFSLQTLDGGENDQSPSEAGIEANLDIQYTVGLATGVPTTFISVGDDFQDGNLEGFLDIINFLLGESNPPQVLTTSYGQNENTISAKLANQLCNAYAQLGARGTSILFASGDGGVSGSQSAHCSNFVPTFPSGCPFMTSVGATQGVSPETAAAFSSGGFSNVFGIPSYQASAVSGYLSALGSTNSGKFNRSGRGFPDVSTQGVDFQIVSGGQTIGVDGTSCASPTFASVISLVNDRLIAAGKSPLGFLNPFLYSSAGKAALNDVTSGSNPGCSTNGFPAKAGWDPVTGLGTPNFAKLLPAVGL

SEQ ID NO: 50126 - protein, 366 aa, Meripilus giganteus
AIPASCASTITPACLQAIYGIPTTKATQSSNKLAVSGFIDQFANKADLKSFLAQNRKDISSSTTFSLQTLDGGENDQSPSEAGIEANLDIQYTVGLATGVPTTFISVGDDFQDGNLEGFLDIINFLLGESNPPQVLTTSYGQNENTISAKLANQLCNAYAQLGARGTSILFASGDGGVSGSQSAHCSNFVPTFPSGCPFMTSVGATQGVSPETAAAFSSGGFSNVFGIPSYQASAVSGYLSALGSTNSGKFNRSGRGFPDVSTQGVDFQIVSGGQTIGVDGTSCASPTFASVISLVNDRLIAAGKSPLGFLNPFLYSSAGKAALNDVTSGSNPGCSTNGFPAKAGWDPVTGLGTPNFAKLLTAVGL

SEQ ID NO: 50127 - protein, 366 aa, Meripilus giganteus
AIPASCASTITPACLQAIYGIPTTKATQSSNKLAVSGFIDQFANKADLKSFLAQFRKDISSSTTFSLQTLDGGENDQSPSEAGIEANLDIQYTVGLATGVPTTFISVGDDFQDGNLEGFLDIINFLLGESNPPQVLTTSYGQNENTISAKLANQLCNAYAQLGARGTSILFASGDGGVSGSQSAHCSNFVPTFPSGCPFMTSVGATQGVSPESAAAFSSGGFSNVFGIPSYQASAVSGYLSALGSTNSGKFNRSGRGFPDVSTQGVDFQIVSGGQTIGVDGTSCASPTFASVISLVNDRLIAAGKSPLGFLNPFLYSSAGKAALNDVTSGSNPGCSTNGFPAKAGWDPVTGLGTPNFAKLLTAVGL

SEQ ID NO: 50128 - protein, 366 aa, Meripilus giganteus
AIPASCASTITPACLQAIYGIPTTKATQSSNKLAVSGFIDQFANKADLKSFLAQFRKDISSSTTFSLQTLDGGENDQSPSEAGIEANLDIQYTVGLATGVPTTFISVGMDFQDGNLEGFLDIINFLLGESNPPQVLTTSYGQNENTISAKLANQLCNAYAQLGARGTSILFASGDGGVSGSQSAHCSNFVPTFPSGCPFMTSVGATQGVSPETAAAFSSGGFSNVFGIPSYQASAVSGYLSALGSTNSGKFNRSGRGFPDVSTQGVDFQIVSGGQTIGVDGTSCASPTFASVISLVNDRLIAAGKSPLGFLNPFLYSSAGKAALNDVTSGSNPGCSTNGFPAKAGWDPVTGLGTPNFAKLLTAVGL

SEQ ID NO: 50129 - protein, 366 aa, Meripilus giganteus
AIPASCASTITPACLQAIYGIPTTKATQSSNKLAVSGFIDQFANKADLKSFLAQFRKDISSSTTFSLQTLDGGENDQSPSEAGIEANLDIQYTVGLATGVPTTFISVGDDFQDGNLEGFLDIINFLLGESNPPQVLTTSYGQNENTISAKLANQLCNAYAQLGARGTSILFASGDGGVSGSQSAHCSNFVPTFPSGCPFMTSVGATQGVYPETAAAFSSGGFSNVFGIPSYQASAVSGYLSALGSTNSGKFNRSGRGFPDVSTQGVDFQIVSGGQTIGVDGTSCASPTFASVISLVNDRLIAAGKSPLGFLNPFLYSSAGKAALNDVTSGSNPGCSTNGFPAKAGWDPVTGLGTPNFAKLLTAVGL

SEQ ID NO: 50130 - protein, 366 aa, Meripilus giganteus
AIPASCASTITPACLQAIYGIPTTKATQSSNKLAVSGFIDQFANKADLKSFLAQFRKDISSSTTFSLQTLDGGENDQSPSEAGIEANLDIQYTVGLATGVPTTFISVGDDFQDGNLEGFLDIINFLLGESNPPQVLTTSYGQNENTISAFLANQLCNAYAQLGARGTSILFASGDGGVSGSQSAHCSNFVPTFPSGCPFMTSVGATQGVSPETAAAFSSGGFSNVFGIPSYQASAVSGYLSALGSTNSGKFNRSGRGFPDVSTQGVDFQIVSGGQTIGVDGTSCASPTFASVISLVNDRLIAAGKSPLGFLNPFLYSSAGKAALNDVTSGSNPGCSTNGFPAKAGWDPVTGLGTPNFAKLLTAVGL

SEQ ID NO: 50131 - protein, 366 aa, Meripilus giganteus
AIPASCASTITPACLQAIYGIPTTKATQSSNKLAVSGFIDQFANKADLKSFLAQFRKDISSSTTFSLQTLDGGENDQSPSEAGIEANLDIQYTVGLATGVPTTFISVGDDFQDGNLEGFLDIINFLLGESNPPQVLTTSYGQNENTISAKLANQLCNAYAQLGARGTSILFASGDGGVSGSQSAHCSNFVPTFPSGCPFMTSVGATQGVSPETAAAFSSGGFSNVFGIPSYQASAVSGYLSALGSTNSGKFNRSGRGFPDVSTQGVDFQIVSGGQTIGVDGTSCASPTFASVISLVNDRLIAAGKSPLGFLNPFLYSSAGKAALNPVTSGSNPGCSTNGFPAKAGWDPVTGLGTPNFAKLLTAVGL

SEQ ID NO: 50132 - protein, 366 aa, Meripilus giganteus
AIPASCASTITPACLQAIYGIPTTKATQSSNKLAVSGFIDQFANKADLKSFLAQFRKDISSSTTFSLQTLDGGENDQSPSEAGIEANLDIQYTVGLATGVPTTFISVGDDFQDGNLEGFLDIINFLLGESNPPQVLTTSYGQNENTISAKLANQLCNAYAQLGARGTSILFASGDGGVSGSQSAHCSNFVPTFPSGCPFMTSVGATQGVSPETAAAFSSGGFSNVFGIPSYQASAVSGYLSALGSTNSGKFNRSGRGFPDVSTQGFDFQIVSGGQTIGVDGTSCASPTFASVISLVNDRLIAAGKSPLGFLNPFLYSSAGKAALNDVTSGSNPGCSTNGFPAKAGWDPVTGLGTPNFAKLLTAVGL

SEQ ID NO: 50133 - protein, 366 aa, Meripilus giganteus
AIPASCASTITPACLQAIYGIPTTKATQSSNKLAVSGFIDQFANKADLKSFLAQFRKDISSSTTFSLQTLDGGENDQSPSEAGIEANLDIQYTVGLATGVPTTFISVGDDFQDGNLEGFLDIINFLLGEPNPPQVLTTSYGQNENTISAKLANQLCNAYAQLGARGTSILFASGDGGVSGSQSAHCSNFVPTFPSGCPFMTSVGATQGVSPETAAAFSSGGFSNVFGIPSYQASAVSGYLSALGSTNSGKFNRSGRGFPDVSTQGVDFQIVSGGQTIGVDGTSCASPTFASVISLVNDRLIAAGKSPLGFLNPFLYSSAGKAALNDVTSGSNPGCSTNGFPAKAGWDPVTGLGTPNFAKLLTAVGL

SEQ ID NO: 50134 - protein, 366 aa, Meripilus giganteus
AIPASCASTITPACLQAIYGIPTTKATQSSNKLAVSGFIDQFANKADLKSFLAQFRKDISSSTTFSLQTLDGGENDQSPSEAGIEANLDIQYTVGLATGVPTTFISVGDDFQDGNLEGFLDIINFLLGESNPPQVLTTSYGQNENTISAKLANQLCNAYAQLGARGTSILFASGDGGVSGSQSAHCSNFVPTFPSGCPFMTSVGATQGVSPETAAAFSSGGFSNVFGIPSYQASAVSGYLSALGSTNSGKFNRSGRGFPDVSTQGVDFQIVSGGQTIGVDGTSCASPTFASVISLVNDRLIAAGKSPLGFLNPFLYSSAGKAALNDVTSGSNPGCSTRGFPAKAGWDPVTGLGTPNFAKLLTAVGL

SEQ ID NO: 50135 - protein, 366 aa, Meripilus giganteus
AIPASCASTITPACLQAIYGIPTTKATQSSNKLAVSGFIDQFANKADLKSFLAQFRKDISSSTTFSLQTLDGGENDQSPSEAGIEANLDIQYTVGLATGVPTTFISVGDDFQDGNLEGFLDIINFLLGESNPPQVLTTSYGQNENTISAKLANQLCNAYAQLGARGTSILFASGDGGVSGSQSAHCSNFVPTFPSGCPFMTSVGATQGVSPETAAAFSSGGFSNVFGIPSYQASAVSGYLSALGSTNSGKFNRSGRGFPDVSTQGVDFQIVSGGQTIGVDGTSGASPTFASVISLVNDRLIAAGKSPLGFLNPFLYSSAGKAALNDVTSGSNPGCSTNGFPAKAGWDPVTGLGTPNFAKLLTAVGL

SEQ ID NO: 50136 - protein, 366 aa, Meripilus giganteus
AIPASCASTITPACLQAIYGIPTTKATQSSNKLAVSGFIDQFANKADLKSFLAQFRKDISSSTTFSLQTLDGGENYQSPSEAGIEANLDIQYTVGLATGVPTTFISVGDDFQDGNLEGFLDIINFLLGESNPPQVLTTSYGQNENTISAKLANQLCNAYAQLGARGTSILFASGDGGVSGSQSAHCSNFVPTFPSGCPFMTSVGATQGVSPETAAAFSSGGFSNVFGIPSYQASAVSGYLSALGSTNSGKFNRSGRGFPDVSTQGVDFQIVSGGQTIGVDGTSCASPTFASVISLVNDRLIAAGKSPLGFLNPFLYSSAGKAALNDVTSGSNPGCSTNGFPAKAGWDPVTGLGTPNFAKLLTAVGL

SEQ ID NO: 50137 - protein, 366 aa, Meripilus giganteus
AIPASCASTITPACLQAIYGIPTTPATQSSNKLAVSGFIDQFANKADLKSFLAQFRKDISSSTTFSLQTLDGGENDQSPSEAGIEANLDIQYTVGLATGVPTTFISVGDDFQDGNLEGFLDIINFLLGESNPPQVLTTSYGQNENTISAKLANQLCNAYAQLGARGTSILFASGDGGVSGSQSAHCSNFVPTFPSGCPFMTSVGATQGVSPETAAAFSSGGFSNVFGIPSYQASAVSGYLSALGSTNSGKFNRSGRGFPDVSTQGVDFQIVSGGQTIGVDGTSCASPTFASVISLVNDRLIAAGKSPLGFLNPFLYSSAGKAALNDVTSGSNPGCSTNGFPAKAGWDPVTGLGTPNFAKLLTAVGL

SEQ ID NO: 50138 - protein, 366 aa, Meripilus giganteus
AIPASCASTITPACLQAIYGIPTTKATQSSNKLAVSGFIDQFANKADLKSFLAQFRKDISSSTTFSLQTLDGGENDQSPSEAGIEANLDIQYTVGLATGVPTTFISVGDDFQDGNLEGFLDIINFLLGESNPPQVLTTSYGQNENTISAKLANQLCNAYAQLGARGTSILFASGDGGVSGSQSAHCSNFVPTFPSGCPFMTSVGATQGVSPETAAAFSSGGFSNVFGIPSYQASAVSGYLSALGSTNSGKFNRSGRGFPDVSTQGVDFQIVSGGQTIGVDGTSCASPTFASVISLVNDRLIAAGFSPLGFLNPFLYSSAGKAALNDVTSGSNPGCSTNGFPAKAGWDPVTGLGTPNFAKLLTAVGL

SEQ ID NO: 50139 - protein, 366 aa, Meripilus giganteus
AIPASCASTITPACLQAIYGIPTTKATQSSNKLAVSGFIDQFANKADLKSFLAQFRKDISSSTTFSLQTLDGGENDQSPSEAGIEANLDIQYTVGLATGVPTTFISVGDDFQDGNLEGFLDIINFLLGESNPPQVLTTSYGQNENTISAKLANQLCNAYAQLGARGTSILFASGDGGVSGSQSAHCSNFVPTFPSGCPFMTSVGATQGVRPETAAAFSSGGFSNVFGIPSYQASAVSGYLSALGSTNSGKFNRSGRGFPDVSTQGVDFQIVSGGQTIGVDGTSCASPTFASVISLVNDRLIAAGKSPLGFLNPFLYSSAGKAALNDVTSGSNPGCSTNGFPAKAGWDPVTGLGTPNFAKLLTAVGL

SEQ ID NO: 50140 - protein, 366 aa, Meripilus giganteus
AIPASCASTITPACLQAIYGIPTTKATQSSNKLAVSGFIDQFANKADLKSFLAQFRKDISSSTTFSLQTLDGGENDQSPSEAGIEANLDIQYTVGLATGVPTTFISVGDDFQDGNLEGFLDIINFLLGESNPPQVLTTSYGQNENTISAKLANQLCNAYAQLGARGTSILFASGDGGVSGSQSAHCSNFVPTFPSGCPFMTSVGATQGVSPETAAAFSSGGFSNVFGIPSYQASAVSGYLSALGSTNSGKFNRSGRGFPDVSTQGVDFQIVSGGQTIGVDGTSCASPTFASVISLVNDRLIAAGKSPLGFLNPFLYSSAGKAALNDVTWGSNPGCSTNGFPAKAGWDPVTGLGTPNFAKLLTAVGL

SEQ ID NO: 50141 - protein, 366 aa, Meripilus giganteus
AIPASCASTITPACLQAIYGIPTTKATQSSNKLAVSGFIDQFANKADLKSFLAQFRKDISSSTTFSLQTLDGGENDQSPSEAGIEANLDIQYTVGLATGVPTTFISVGDDFQDGNLEGFLDIINFLLGESNPPQVLTTSYGQNENTISAKLANQLCNAYAQLGARGTSILFASGDGGVSGSQSAHCSNFVPTFPSGCPFMTSVGATQGVSPETAAAFSSGGFSNVFGIPSYQASAVSGYLSALRSTNSGKFNRSGRGFPDVSTQGVDFQIVSGGQTIGVDGTSCASPTFASVISLVNDRLIAAGKSPLGFLNPFLYSSAGKAALNDVTSGSNPGCSTNGFPAKAGWDPVTGLGTPNFAKLLTAVGL

SEQ ID NO: 50142 - protein, 366 aa, Meripilus giganteus
AIPASCASTITPACLQAIYGIPTTKATQSSNKLAVSGFIDQFANKADLKSFLAQFRKDISSSTTFSLQTLDGGENDQSPSEAGIEANLDIQYTVGLATGVPTTFISVGDDFQDGNLEGFLDIINFLLGESNPPQVLTTSYGQNENTISAKLANQLCNAYAQLGARGTSILFASGDGGVSGSQSAHCSNFVPTFPSGCPFMTSVGATQGVSPETAAAFSSGGFSNVFGQPSYQASAVSGYLSALGSTNSGKFNRSGRGFPDVSTQGVDFQIVSGGQTIGVDGTSCASPTFASVISLVNDRLIAAGKSPLGFLNPFLYSSAGKAALNDVTSGSNPGCSTNGFPAKAGWDPVTGLGTPNFAKLLTAVGL

SEQ ID NO: 50143 - protein, 366 aa, Meripilus giganteus
AIPASCASTITPACLQAIYGIPTTKATQSSNKLAVSGFIDQFANKADLKSFLAQFRKDISSSTTFSLQTLDGGENDQSPSEAGIEANLDIQYTVGLATGVPTTFISVGDDFQDGNLEGFLDIINFLLGESNPPQVLTTSYGQNENTISAKLANQLCNAYAQLGARGFSILFASGDGGVSGSQSAHCSNFVPTFPSGCPFMTSVGATQGVSPETAAAFSSGGFSNVFGIPSYQASAVSGYLSALGSTNSGKFNRSGRGFPDVSTQGVDFQIVSGGQTIGVDGTSCASPTFASVISLVNDRLIAAGKSPLGFLNPFLYSSAGKAALNDVTSGSNPGCSTNGFPAKAGWDPVTGLGTPNFAKLLTAVGL

SEQ ID NO: 50144 - protein, 366 aa, Meripilus giganteus
AIPASCASTITPACLQAIYGIPTTKASQSSNKLAVSGFIDQFANKADLKSFLAQFRKDISSSTTFSLQTLDGGENDQSPSEAGIEANLDIQYTVGLATGVPTTFISVGDDFQDGNLEGFLDIINFLLGESNPPQVLTTSYGQNENTISAKLANQLCNAYAQLGARGTSILFASGDGGVSGSQSAHCSNFVPTFPSGCPFMTSVGATQGVSPETAAAFSSGGFSNVFGIPSYQASAVSGYLSALGSTNSGKFNRSGRGFPDVSTQGVDFQIVSGGQTIGVDGTSCASPTFASVISLVNDRLIAAGKSPLGFLNPFLYSSAGKAALNDVTSGSNPGCSTNGFPAKAGWDPVTGLGTPNFAKLLTAVGL

SEQ ID NO: 50145 - protein, 366 aa, Meripilus giganteus
AIPASCASTITPACLQAIYGIPTTKATQSSNKLAVSGFIDQFANKADLKSFLAQFRKDISSSTTFSLQTLDGGENDQSPSEAGIEANLDIQYTVGLATGVPTTFISVGDDFQDGNLEGFLDIINFLLGESNPPQVLTTSYGQNENTISAKLANQLCNAYAQLGARGTSILFASGDGGVSGSQSAHCSNFVPTFPSGCPFMTSVGATQGVSPETAAAFSSGGFSNVFGIPSYQASAVSGYLSALGSTNSGKFNRSGRGFPDVSTQGVDFQIVSGGQTIGVDGTSCASPTFASVISLVNDRLIAAGKSPLGFLNPFLYSSAGKAALNDVTSGSNPGCSTNGFPAKAGWDPVTGLGTPNFAKLLVAVGL

SEQ ID NO: 50146 - protein, 366 aa, Meripilus giganteus
AIPASCASTITPACLQAIYGIPTTKATQSSNKLAVSGFIDQFANKADLKSFLAQFRKDISSSTTFSLQTLDGGENDQSPSEAGIEANLDIQYTVGLATGVPTTFISVGDDFQDGNLEGFLDIINFLLGESNPPQVLTTSYGQNENTISAKLANQLCNAYAQLGARGTSILFASGDGGVSGSQSAHCSNFVPTFPSGCPFMTSVGATQGVSPETAAAFSSGGFSNVFGIPSYQASAVSGYLSALGSTNSGKFNRSGRGFPDVSTQGVDFQIVSGGQTIGVDGTSCASPTFASVISLVNDRLIAAGKSPLGFLNPFLYSSAGKAALNDVTSGSNPGCSTNGFPAKAGWDPVTGLGTPNFAKLLTMVGL

SEQ ID NO: 50147 - protein, 366 aa, Meripilus giganteus
AIPASCASTITPACLQAIYGIPTTKATQSSNKLAVSGFIDQFANKADLKSFLAQFRKDISSSTTFSLQTLDGGENDQSPSEAGIEANLDIQYTVGLATGVPTTFISVGDDFQDGNLEGFLDIINFLLGESNPPQVLTTSYGQNENTISAKLANQLCNAYAQLGARGTSILFASGDGGVSGSQSAHCSNFVPTFPSGCPFMTSVGATQGVSPETAAAFSSGGFSNVFGIPSYQASAVSGYLSALGSTNSGKFNRSGRGFPDVSTQGVDFQIVSGGQTIGVDGTSCASPTFASVISLVNDRLIAAGKSPLGFLNPFLYSSAGKAALNDVTSGSNPGCSTHGFPAKAGWDPVTGLGTPNFAKLLTAVGL

SEQ ID NO: 50148 - protein, 366 aa, Meripilus giganteus
AIPASCASTITPACLQAIYGIPTTKATQSSNKLAVSGFIDQFANKADLKSFLAQFRKDISSSTTFSLQTLDGGENDQSPSEAGIEANLDIQYTVGLATGVPTTFISVGDDFQDGNLEGFLDIINFLLGESNPPQVLTTSYGQNENTISAKLANQLCNAYAQLGARGTSILFASGDGGVSGSQSLHCSNFVPTFPSGCPFMTSVGATQGVSPETAAAFSSGGFSNVFGIPSYQASAVSGYLSALGSTNSGKFNRSGRGFPDVSTQGVDFQIVSGGQTIGVDGTSCASPTFASVISLVNDRLIAAGKSPLGFLNPFLYSSAGKAALNDVTSGSNPGCSTNGFPAKAGWDPVTGLGTPNFAKLLTAVGL

SEQ ID NO: 50149 - protein, 366 aa, Meripilus giganteus
AIPASCASTITPACLQAIYGIPTTKATQSSNKLAVSGFIDQFANKADLKSFLAQFRKDISSSTTFSLQTLDGGENDQSPSEAGIEANLDIQYTVGLATGVPTTFISVGDDFQDGALEGFLDIINFLLGESNPPQVLTTSYGQNENTISAKLANQLCNAYAQLGARGTSILFASGDGGVSGSQSAHCSNFVPTFPSGCPFMTSVGATQGVSPETAAAFSSGGFSNVFGIPSYQASAVSGYLSALGSTNSGKFNRSGRGFPDVSTQGVDFQIVSGGQTIGVDGTSCASPTFASVISLVNDRLIAAGKSPLGFLNPFLYSSAGKAALNDVTSGSNPGCSTNGFPAKAGWDPVTGLGTPNFAKLLTAVGL

SEQ ID NO: 50150 - protein, 366 aa, Meripilus giganteus
AIPASCASTITPACLQAIYGIPTTKATQSSNKLAVSGFIDQFANKADLKSFLAQFRKDISSSTTFSLQTLDGGENDQSPSEAGIEANLDIQYTVGLATGVPTTFISVGDDFQDGNLEGFLDIIMFLLGESNPPQVLTTSYGQNENTISAKLANQLCNAYAQLGARGTSILFASGDGGVSGSQSAHCSNFVPTFPSGCPFMTSVGATQGVSPETAAAFSSGGFSNVFGIPSYQASAVSGYLSALGSTNSGKFNRSGRGFPDVSTQGVDFQIVSGGQTIGVDGTSCASPTFASVISLVNDRLIAAGKSPLGFLNPFLYSSAGKAALNDVTSGSNPGCSTNGFPAKAGWDPVTGLGTPNFAKLLTAVGL

SEQ ID NO: 50151 - protein, 366 aa, Meripilus giganteus
AIPASCASTITPACLQAIYGIPTTKATQSSNKLAVSGFIDQFANKADLKSFLAQFRKDISSSTTFSLQTLDGGENDQSPSEAGIEANLDIQYTVGLATGVPTTFISVGDDFQDGNLEGFLDIINFLLGESNPPQVLTTSYGLNENTISAKLANQLCNAYAQLGARGTSILFASGDGGVSGSQSAHCSNFVPTFPSGCPFMTSVGATQGVSPETAAAFSSGGFSNVFGIPSYQASAVSGYLSALGSTNSGKFNRSGRGFPDVSTQGVDFQIVSGGQTIGVDGTSCASPTFASVISLVNDRLIAAGKSPLGFLNPFLYSSAGKAALNDVTSGSNPGCSTNGFPAKAGWDPVTGLGTPNFAKLLTAVGL

SEQ ID NO: 50152 - protein, 366 aa, Meripilus giganteus
AIPASCASTITPACLQAIYGIPTTKATQSSNKLAVSGFIDQFANKADLKSFLAQFRKDISSSTTFSLQTLDGGENDQSPSEAGIEANLDIQYTVGLATGVPTTFISVGDDFQDGNLEGFLDIINFLLGESNPPQVLTTSYGQNENTISAKLANQLCFAYAQLGARGTSILFASGDGGVSGSQSAHCSNFVPTFPSGCPFMTSVGATQGVSPETAAAFSSGGFSNVFGIPSYQASAVSGYLSALGSTNSGKFNRSGRGFPDVSTQGVDFQIVSGGQTIGVDGTSCASPTFASVISLVNDRLIAAGKSPLGFLNPFLYSSAGKAALNDVTSGSNPGCSTNGFPAKAGWDPVTGLGTPNFAKLLTAVGL

SEQ ID NO: 50153 - protein, 366 aa, Meripilus giganteus
AIPASCASTITPACLQAIYGIPTTKATQSSNKLAVSGFIDQFANKADLKSFLAQFRKDISSSTTFSLQTLDGGENDQSPSEAGIEANLDIQYTVGLATGVPTTFISVGDDFQDGNLEGFLDIINFLLGESNPPQVLTTSYGQNENTISAKLANQLCNAYAQLGARGTSILFASGDGGVSGSQLAHCSNFVPTFPSGCPFMTSVGATQGVSPETAAAFSSGGFSNVFGIPSYQASAVSGYLSALGSTNSGKFNRSGRGFPDVSTQGVDFQIVSGGQTIGVDGTSCASPTFASVISLVNDRLIAAGKSPLGFLNPFLYSSAGKAALNDVTSGSNPGCSTNGFPAKAGWDPVTGLGTPNFAKLLTAVGL

SEQ ID NO: 50154 - protein, 366 aa, Meripilus giganteus
AIPASCASTITPACLQAIYGIPTTKATQSSNKLAVSGFIDQFANKADLKSFLAQFRKDISSSTTFSLQTLDGGENDQSPSEAGIEANLDIQYTVGLATGVPTTFISVGDDFQDGNLEGFLDIINFLLGESNPPQVLTTSYGQNENTISAKLANQLCNAYAQLGARGTSILFASGDGGVSGSQSAHCSNFVPTFPSGCPFMTSVGATQGVSPETAAAFSSGGFSNVFGIPSYQASAVSGYLSALGPTNSGKFNRSGRGFPDVSTQGVDFQIVSGGQTIGVDGTSCASPTFASVISLVNDRLIAAGKSPLGFLNPFLYSSAGKAALNDVTSGSNPGCSTNGFPAKAGWDPVTGLGTPNFAKLLTAVGL

SEQ ID NO: 50155 - protein, 366 aa, Meripilus giganteus
AIPASCASTITPACLQAIYGIPTTKATQSSNKLAVSGFIDQFANKADLKSFLAQFRKDISSSTTFSLQTLDGGENDQSPSEAGIEANLDIQYTVGLATGVPTTFISVGDDFQDGNLEGFLDIINFLLGESNPPQVLTTSYGQNENTISAKLANQLCNAYAQLGARGTSILFASGDGGVSGSQSAHCSNFVPTFPSGCPFMTSVGATQGVSPETAAAFSSGGFSNVFGIPSYQASAVSGYLSALGSTNSGKFNRSGRGFPDGSTQGVDFQIVSGGQTIGVDGTSCASPTFASVISLVNDRLIAAGKSPLGFLNPFLYSSAGKAALNDVTSGSNPGCSTNGFPAKAGWDPVTGLGTPNFAKLLTAVGL

SEQ ID NO: 50156 - protein, 366 aa, Meripilus giganteus
AIPASCASTITPACLQAIYGIPTTKATQSSNKLAVSGFIDQFANKADLKSFLAQFRKDISSSTTFSLQTLDGGENDQSPSEAGIEANLDIQYTVGLATGVPTTFISVGDDFQDGNLEGFLDIINFLLGESNPPQVLTTSYGQNENTISAKLANQLCNAYAQLGARGTSILFASGDGGVSGSQSAHCSNFVPTFPSGCPFMTSVGATQGVSPETAAAFSSGGFSNVFGIPSYQASAVSGYLSALGSTNSGKFNRSGRGFPDVSTQGVDFQIVSGGQTIGVDGTSCASPIFASVISLVNDRLIAAGKSPLGFLNPFLYSSAGKAALNDVTSGSNPGCSTNGFPAKAGWDPVTGLGTPNFAKLLTAVGL

SEQ ID NO: 50157 - protein, 366 aa, Meripilus giganteus
AIPASCASTITPACLQAIYGIPTTKATQSSNKLAVSGFIDQFANKADLKSFLAQFRKDISSSTTFSLQTLDGGRNDQSPSEAGIEANLDIQYTVGLATGVPTTFISVGDDFQDGNLEGFLDIINFLLGESNPPQVLTTSYGQNENTISAKLANQLCNAYAQLGARGTSILFASGDGGVSGSQSAHCSNFVPTFPSGCPFMTSVGATQGVSPETAAAFSSGGFSNVFGIPSYQASAVSGYLSALGSTNSGKFNRSGRGFPDVSTQGVDFQIVSGGQTIGVDGTSCASPTFASVISLVNDRLIAAGKSPLGFLNPFLYSSAGKAALNDVTSGSNPGCSTNGFPAKAGWDPVTGLGTPNFAKLLTAVGL

SEQ ID NO: 50158 - protein, 366 aa, Meripilus giganteus
AIPASCASTITPACLQAIYGIPTTKATQSSNKLAVSGFIDQFANKADLKSFLAQFRKDISSSTTFSLQTLDGGENDQSPSEAGIEANLDIQYTVGLATGVPTTFISVGDDFQDGNLEGFLDIINFLLGESNPPQVLTTSYGQNENTISAKLANQLCNAYAQLGARGTSILFASGDGGVSGSQSAHCSNFVPTFPSGCPFMTSVGATQGVSPETAAAFSSGGFSNVFGIPSYQASAVSGYLSALGSTNSGKFNCSGRGFPDVSTQGVDFQIVSGGQTIGVDGTSCASPTFASVISLVNDRLIAAGKSPLGFLNPFLYSSAGKAALNDVTSGSNPGCSTNGFPAKAGWDPVTGLGTPNFAKLLTAVGL

SEQ ID NO: 50159 - protein, 366 aa, Meripilus giganteus
AIPASCASTITPACLQAIYGIPTTKATQSSNKLAVSGFIDQFANKADLKSFLAQFRKDISSSTTFSLQTLDGGENDQSPSEAGIEANLDIQYTVGLATGVPTTFISVGDDFQDGNLEGFLDIINFLLGESNPPQVLTTSYGQNENTISAKLANQLCNAYAQLGARGTSILFASGDGGVSGSQSAHCSNFVPTFPSGCPFMTSVGATQGVSPETAAAFSSGGFSNVFGFPSYQASAVSGYLSALGSTNSGKFNRSGRGFPDVSTQGVDFQIVSGGQTIGVDGTSCASPTFASVISLVNDRLIAAGKSPLGFLNPFLYSSAGKAALNDVTSGSNPGCSTNGFPAKAGWDPVTGLGTPNFAKLLTAVGL

SEQ ID NO: 50160 - protein, 366 aa, Meripilus giganteus
AIPASCASTITPACLQAIYGIPTTKATQSSNKLAVSGFIDQFANKADLKSFLAQFRKDISSSTTFSLQTLDGGENDQSPSEAGIEANLDIQYTVGLATGVPTTFISVGDDFQDGNLEGFLDIINFLLGESNPPQVLTTSYGQNENTISAKLANQLCNAYAQLGARGTSILFASGDGGVSGSQSAHCSNFVPTFPSGCPFMTSVGATQGVSPETAAAFSSGGFSNVFGIPSYQASAVSGYLSALGSTNSGKFNRSGRGFPDVSTQGVDFQIKSGGQTIGVDGTSCASPTFASVISLVNDRLIAAGKSPLGFLNPFLYSSAGKAALNDVTSGSNPGCSTNGFPAKAGWDPVTGLGTPNFAKLLTAVGL

SEQ ID NO: 50161 - protein, 366 aa, Meripilus giganteus
AIPASCASTITPACLQAIYGIPTTKATQSSNKLAVSGFIDQFANKADLKSFLAQFRKDISSSTTFSLQTLDGGENDQSPSEAGIEANLDIQYTVGLATGVPTTFISVGDDFQDGNLEGFLDKINFLLGESNPPQVLTTSYGQNENTISAKLANQLCNAYAQLGARGTSILFASGDGGVSGSQSAHCSNFVPTFPSGCPFMTSVGATQGVSPETAAAFSSGGFSNVFGIPSYQASAVSGYLSALGSTNSGKFNRSGRGFPDVSTQGVDFQIVSGGQTIGVDGTSCASPTFASVISLVNDRLIAAGKSPLGFLNPFLYSSAGKAALNDVTSGSNPGCSTNGFPAKAGWDPVTGLGTPNFAKLLTAVGL

SEQ ID NO: 50162 - protein, 366 aa, Meripilus giganteus
AIPASCASTITPACLQAIYGIPTTKATQSSNKLAVSGFIDQFANKADLKSFLAQFRKDISSSTTFSLQTLDGGENDQSPSEAGIEANLDIQYTVGLATGVPTTFISVGDDFQDGNLEGFLDIINFLLGESNPPQVLTTSYGQNENTISAKLANQLCNAYAQLGARGTSILFASGDGGVSGSQSAHCSNFVPTFPSGCPFMTSVGATQGVSPETAAAFSSGGFSNVFGIPSYQASAVSGYLSALGSTNSGKFNRSGRGFPDVSTQGVDFQIVSGGQTIGVDGTSCASPTFASVISLVNDRLIAAGKSPLGFLNPFLYESAGKAALNDVTSGSNPGCSTNGFPAKAGWDPVTGLGTPNFAKLLTAVGL

SEQ ID NO: 50163 - protein, 366 aa, Meripilus giganteus
AIPASCASTITPACLQAIYGIPTTKATQSSNKLAVSGFIDQFANKADLKSFLAQFRKDIESSTTFSLQTLDGGENDQSPSEAGIEANLDIQYTVGLATGVPTTFISVGDDFQDGNLEGFLDIINFLLGESNPPQVLTTSYGQNENTISAKLANQLCNAYAQLGARGTSILFASGDGGVSGSQSAHCSNFVPTFPSGCPFMTSVGATQGVSPETAAAFSSGGFSNVFGIPSYQASAVSGYLSALGSTNSGKFNRSGRGFPDVSTQGVDFQIVSGGQTIGVDGTSCASPTFASVISLVNDRLIAAGKSPLGFLNPFLYSSAGKAALNDVTSGSNPGCSTNGFPAKAGWDPVTGLGTPNFAKLLTAVGL

SEQ ID NO: 50164 - protein, 366 aa, Meripilus giganteus
AIPASCASTITPACLQAIYGIPTTKATQSSNKLAVSGFIDQFANMADLKSFLAQFRKDISSSTTFSLQTLDGGENDQSPSEAGIEANLDIQYTVGLATGVPTTFISVGDDFQDGNLEGFLDIINFLLGESNPPQVLTTSYGQNENTISAKLANQLCNAYAQLGARGTSILFASGDGGVSGSQSAHCSNFVPTFPSGCPFMTSVGATQGVSPETAAAFSSGGFSNVFGIPSYQASAVSGYLSALGSTNSGKFNRSGRGFPDVSTQGVDFQIVSGGQTIGVDGTSCASPTFASVISLVNDRLIAAGKSPLGFLNPFLYSSAGKAALNDVTSGSNPGCSTNGFPAKAGWDPVTGLGTPNFAKLLTAVGL

SEQ ID NO: 50165 - protein, 366 aa, Meripilus giganteus
AIPASCASTITPACLQAIYGIPTTKATQSSNKLAVSGFIDQFANKADLKSFLAQFRKDIYSSTTFSLQTLDGGENDQSPSEAGIEANLDIQYTVGLATGVPTTFISVGDDFQDGNLEGFLDIINFLLGESNPPQVLTTSYGQNENTISAKLANQLCNAYAQLGARGTSILFASGDGGVSGSQSAHCSNFVPTFPSGCPFMTSVGATQGVSPETAAAFSSGGFSNVFGIPSYQASAVSGYLSALGSTNSGKFNRSGRGFPDVSTQGVDFQIVSGGQTIGVDGTSCASPTFASVISLVNDRLIAAGKSPLGFLNPFLYSSAGKAALNDVTSGSNPGCSTNGFPAKAGWDPVTGLGTPNFAKLLTAVGL

SEQ ID NO: 50166 - protein, 366 aa, Meripilus giganteus
AIPASCASTITPACLQAIYGIPTTKATQSSNKLAVSGFIDQFANKADLKSFLAQFRKDISSSTTFSLQTLDGGENDQSPSEAGIEANLDIQYTVGLATGVPTTFISVGDDFQDGNLEGFLDIINFLLGESNPPQVLTTSYGQNENTISAKLANQLCNAYAQLGARGTSILFASGDGGVSGSQSAHCSNFVPTFPSGCPFMTSVGATQGVSPETAAAFSSGGFSNVFGIPSYQASAVSGYLSALGSTNSGKFNRSGRGFPDVSTQGVDFQIVSGGQTIGVDGTSCASPTFASVISLVNDRLIAAGKSPVGFLNPFLYSSAGKAALNDVTSGSNPGCSTNGFPAKAGWDPVTGLGTPNFAKLLTAVGL

SEQ ID NO: 50167 - protein, 366 aa, Meripilus giganteus
AIPASCASTITPACLQAIYGIPTTKATQSSNKLAVSGFIDQFANKADLKSFLAQFRKDISSSTTFSLQTLDGGENDQSPSEAGIEANLDIQYSVGLATGVPTTFISVGDDFQDGNLEGFLDIINFLLGESNPPQVLTTSYGQNENTISAKLANQLCNAYAQLGARGTSILFASGDGGVSGSQSAHCSNFVPTFPSGCPFMTSVGATQGVSPETAAAFSSGGFSNVFGIPSYQASAVSGYLSALGSTNSGKFNRSGRGFPDVSTQGVDFQIVSGGQTIGVDGTSCASPTFASVISLVNDRLIAAGKSPLGFLNPFLYSSAGKAALNDVTSGSNPGCSTNGFPAKAGWDPVTGLGTPNFAKLLTAVGL

SEQ ID NO: 50168 - protein, 366 aa, Meripilus giganteus
ALPASCASTITPACLQAIYGIPTTKATQSSNKLAVSGFIDQFANKADLKSFLAQFRKDISSSTTFSLQTLDGGENDQSPSEAGIEANLDIQYTVGLATGVPTTFISVGDDFQDGNLEGFLDIINFLLGESNPPQVLTTSYGQNENTISAKLANQLCNAYAQLGARGTSILFASGDGGVSGSQSAHCSNFVPTFPSGCPFMTSVGATQGVSPETAAAFSSGGFSNVFGIPSYQASAVSGYLSALGSTNSGKFNRSGRGFPDVSTQGVDFQIVSGGQTIGVDGTSCASPTFASVISLVNDRLIAAGKSPLGFLNPFLYSSAGKAALNDVTSGSNPGCSTNGFPAKAGWDPVTGLGTPNFAKLLTAVGL

SEQ ID NO: 50169 - protein, 366 aa, Meripilus giganteus
AIPASCASTITPACLQAIYGIPTTKATQSSNKLAVSGFIDQFANKADLKSFLAQFRKDISSSTTFSLQTLDGGENDQSPSEAGIEANLDIQYTVGLATGVPTTFISVGDDFQDGNLNGFLDIINFLLGESNPPQVLTTSYGQNENTISAKLANQLCNAYAQLGARGTSILFASGDGGVSGSQSAHCSNFVPTFPSGCPFMTSVGATQGVSPETAAAFSSGGFSNVFGIPSYQASAVSGYLSALGSTNSGKFNRSGRGFPDVSTQGVDFQIVSGGQTIGVDGTSCASPTFASVISLVNDRLIAAGKSPLGFLNPFLYSSAGKAALNDVTSGSNPGCSTNGFPAKAGWDPVTGLGTPNFAKLLTAVGL

SEQ ID NO: 50170 - protein, 366 aa, Meripilus giganteus
AIPASCASTITPACLQAIYGIPTTKATQSSNKLAVSGFIDQFANKADLKSFLAQFRKDISSSTTFSLQTLDGGENDQSPSEAGIEANLDIQYTVGLATGVPTTFISVGDDFQDGNLEGFLDIINFLLGESNPPQVLTTSYGQNENTISAKLANQLCNAYAQLGARGTSILFASGDGGVSGSQSAHCSNFVPTFPSGCPFMTSVGATQGVSPETAAAFSSGGFSNVFGIPSYQASAVSGYLSALGSTNSGKFNRSGRGFPDVSTQGCDFQIVSGGQTIGVDGTSCASPTFASVISLVNDRLIAAGKSPLGFLNPFLYSSAGKAALNDVTSGSNPGCSTNGFPAKAGWDPVTGLGTPNFAKLLTAVGL

SEQ ID NO: 50171 - protein, 366 aa, Meripilus giganteus
AIPASCASTITPACLQAIYGIPTTKATQSSNKLAVSGFIDQFANKADLKSFLAQFRKDISSSTTFSLQTLDGGENDQSPSEAGIEANLDIQYTVGLATGVPTTFISVGDDFQDGNLEGFLDIINFLLGESNPPQVLTTSYGQNENTISAKLANQLCNAYAQLGARGTSILFASGDGGVSGSQSHHCSNFVPTFPSGCPFMTSVGATQGVSPETAAAFSSGGFSNVFGIPSYQASAVSGYLSALGSTNSGKFNRSGRGFPDVSTQGVDFQIVSGGQTIGVDGTSCASPTFASVISLVNDRLIAAGKSPLGFLNPFLYSSAGKAALNDVTSGSNPGCSTNGFPAKAGWDPVTGLGTPNFAKLLTAVGL

SEQ ID NO: 50172 - protein, 366 aa, Meripilus giganteus
AIPASCASTITPACLQAIYGIPTTKATQSSNKLAVSGFIDQFANKADLKSFLAQFRKDISSSTTFSLQTLDGGENDQSPSEAGIEANLDIQYTVGLATGVPTTFISVGDDFQDGNLEGFLDIINFLLGESNPPQVLTTSYGQNENTISAKLANQLCNAYAQLGARGTSILFASGDGGVSGSQSAHCSNFVPTFPSGCPMMTSVGATQGVSPETAAAFSSGGFSNVFGIPSYQASAVSGYLSALGSTNSGKFNRSGRGFPDVSTQGVDFQIVSGGQTIGVDGTSCASPTFASVISLVNDRLIAAGKSPLGFLNPFLYSSAGKAALNDVTSGSNPGCSTNGFPAKAGWDPVTGLGTPNFAKLLTAVGL

SEQ ID NO: 50173 - protein, 366 aa, Meripilus giganteus
AIPASCASTITPACLQAIYGIPTTKATQSSNKLAVSGFIDQFANKADLKSFLAQFRKDISSSTTFSLQTLDGGENDQSPSEAGIEANLDIQYTVGLATGVPTTFISVGDDFQDGNLEGFLDIINFLLGESNPPQVLTTSYGQNENTISAKLANQLCNAYAQLGARGTSILFASGDGGVSGSQSAHCSNFVPTFPSGCPFMTSVGATQGVSPETAAAFSSGGFSNVFGIPSYQASAVSGYLSALGSTNSGKFNRSGRGFPDVSTQGVDFQIVSGGQTIGVDGTSCASPTFASVISLVNDRLIAAGKSPLGFLNPFLYSSAGKAALNDVTSGSNPGCSTNGFPAKAGWDPVTGLGTPNFAKLLKAVGL

SEQ ID NO: 50174 - protein, 366 aa, Meripilus giganteus
AIPASCASTITPACLQAIYGIPTTKATQSSNKLAVSGFIDQFANKADLKSFLAQFRKDISSSTTFSLQTLDGGENDQSPSEAGIEANLDIQYTVGLATGVPTTFISVGDDFQDGNLEGFLDIINFLLGESNPPQVLTTSYGQNENTISAKLANQLCNAYAQLGARGTSILFASGDGGVSGSQSAHCSNFVPTFPSGCPFMTSVGATQGVSPETAAAFSSGGFSNVFGIPSYQASAVSGYLSALGSTNSGKFNRSGRGFPDVSTQGVDFQIVSGGQTIGVDGTSCASPTFASVISLVNDRLIAAGKSPLGFLNPFLYSSAGKAALNDTTSGSNPGCSTNGFPAKAGWDPVTGLGTPNFAKLLTAVGL

SEQ ID NO: 50175 - protein, 366 aa, Meripilus giganteus
AIPASCASTITPACLQAIYGIPTTKATQSSNKLAVSGFIDQFANKADLKSFLAQFRKDISSSTTFSLQTLDGGENDQSPSEAGIEANLDIQYTVGLATGVPTTFISVGDDFQDGNLEGFLDIINFLLGESNPPQVLTTSYGQNENTISAKLANQLCNAYAQLGARGTSILFASGDGGVSGSTSAHCSNFVPTFPSGCPFMTSVGATQGVSPETAAAFSSGGFSNVFGIPSYQASAVSGYLSALGSTNSGKFNRSGRGFPDVSTQGVDFQIVSGGQTIGVDGTSCASPTFASVISLVNDRLIAAGKSPLGFLNPFLYSSAGKAALNDVTSGSNPGCSTNGFPAKAGWDPVTGLGTPNFAKLLTAVGL

SEQ ID NO: 50176 - protein, 366 aa, Meripilus giganteus
AIPASCASTITPACLQAIYGIPTTKATQSSNKLAVSGFIDQFANKADLKSFLAQFRKDISSSTTFSLQTLDGGENDQSPSEAGIEANLDIQYTVGLATGVPTTFISVGDDFQDGNLEGFLDIINFLLGESNPPQVLTTSYGQNENTISAKLADQLCNAYAQLGARGTSILFASGDGGVSGSQSAHCSNFVPTFPSGCPFMTSVGATQGVSPETAAAFSSGGFSNVFGIPSYQASAVSGYLSALGSTNSGKFNRSGRGFPDVSTQGVDFQIVSGGQTIGVDGTSCASPTFASVISLVNDRLIAAGKSPLGFLNPFLYSSAGKAALNDVTSGSNPGCSTNGFPAKAGWDPVTGLGTPNFAKLLTAVGL

SEQ ID NO: 50177 - protein, 366 aa, Meripilus giganteus
AIPASCASTITPACLQAIYGIPTTKATQSSNKLAVSGFIDQFANKADLKSFLAQFRKDISSSTTFSLQTLDGGENDQSPSEAGIEANLDIQYTVGLATGVPTTFISVGDDFQDGNLEGFLDIINFLLGESNPPQVLTTSYGQNENTISAKLANQLCNAYAQLGARGTSILFASGDGGVSGSQSAHCSNFVPTFPSGCPFMTSVGATQGVSPETAAAFSSGGFSNVFGIPSYQASAVSGYLSALGSTNSGKFNRSGRGFPDVSTQGVDFQIVSGGQTIGVDGTSCASPTFASVISLVNDRLIAAGKSPLGFLNPFLYSSAGKAALNDVTSGSNPGCSTNGFPAKAGWDPVTGLGTPNFYKLLTAVGL

SEQ ID NO: 50178 - protein, 366 aa, Meripilus giganteus
AIPASCASTITPACLQAIYGIPTTKATQSSNKLAVSGFIDQFANKADLKSFLAQFRKMISSSTTFSLQTLDGGENDQSPSEAGIEANLDIQYTVGLATGVPTTFISVGDDFQDGNLEGFLDIINFLLGESNPPQVLTTSYGQNENTISAKLANQLCNAYAQLGARGTSILFASGDGGVSGSQSAHCSNFVPTFPSGCPFMTSVGATQGVSPETAAAFSSGGFSNVFGIPSYQASAVSGYLSALGSTNSGKFNRSGRGFPDVSTQGVDFQIVSGGQTIGVDGTSCASPTFASVISLVNDRLIAAGKSPLGFLNPFLYSSAGKAALNDVTSGSNPGCSTNGFPAKAGWDPVTGLGTPNFAKLLTAVGL

SEQ ID NO: 50179 - protein, 366 aa, Meripilus giganteus
AIPASCASTITPACLQAIYGIPTTKATQSSNKLAVSGFIDQFANKADLKSFLAQFRKDISSSTTFSLQTLDGGENDQSPSEAGIEANLDIQYTVGLATGVPTTFISVGDDFQDGNLEGFLDIINFLLGESNPPQVLTTSYGQNENTISAKLANQLCNAYAQLGARGTSILFASGDGGVSGSQSAHCSNFVPTFPSGCPFMTSVGATQGVSPETAAAFSSGGFSNVFGHPSYQASAVSGYLSALGSTNSGKFNRSGRGFPDVSTQGVDFQIVSGGQTIGVDGTSCASPTFASVISLVNDRLIAAGKSPLGFLNPFLYSSAGKAALNDVTSGSNPGCSTNGFPAKAGWDPVTGLGTPNFAKLLTAVGL

SEQ ID NO: 50180 - protein, 366 aa, Meripilus giganteus
AIPASCASTITPACLQAIYGIPTTKATQSSNKLAVSGFIDQFANKADLKSFLAQFRKDISSSTTFSLQTLDGGENVQSPSEAGIEANLDIQYTVGLATGVPTTFISVGDDFQDGNLEGFLDIINFLLGESNPPQVLTTSYGQNENTISAKLANQLCNAYAQLGARGTSILFASGDGGVSGSQSAHCSNFVPTFPSGCPFMTSVGATQGVSPETAAAFSSGGFSNVFGIPSYQASAVSGYLSALGSTNSGKFNRSGRGFPDVSTQGVDFQIVSGGQTIGVDGTSCASPTFASVISLVNDRLIAAGKSPLGFLNPFLYSSAGKAALNDVTSGSNPGCSTNGFPAKAGWDPVTGLGTPNFAKLLTAVGL

SEQ ID NO: 50181 - protein, 366 aa, Meripilus giganteus
AIPASCASTITPACLQAIYGIPTTKATQSSNKLAVSGFIDQFANKADLKSFLAQFRKDISSSTTFSLQTLDGGENDQSPSEAGIEANLDIQYTVGLATGVPTTFISVGDDFQDGNLEGFLDIINFLLGESNPPQVLTTSYGQNENTISAKLANQLCNAYAQLGARGTSILFASGDGGVSGSQSAHCSNFVPTFPSGCPFMTSVGATQGVSPETAAAFSSGGFSNVFGIPSYQASAVSGYLSALGSTNSGKFNRSGRGFPDVSTQGVDFQIVSGGQTIGVDGTSCASPTFASVISLVNDRLIAAGKSPLGFLNPFLYSSAGKAALNDVTSGYNPGCSTNGFPAKAGWDPVTGLGTPNFAKLLTAVGL

SEQ ID NO: 50182 - protein, 366 aa, Meripilus giganteus
AIPASCASTITPACLQAIYGIPTTKATQASNKLAVSGFIDQFANKADLKSFLAQFRKDISSSTTFSLQTLDGGENDQSPSEAGIEANLDIQYTVGLATGVPTTFISVGDDFQDGNLEGFLDIINFLLGESNPPQVLTTSYGQNENTISAKLANQLCNAYAQLGARGTSILFASGDGGVSGSQSAHCSNFVPTFPSGCPFMTSVGATQGVSPETAAAFSSGGFSNVFGIPSYQASAVSGYLSALGSTNSGKFNRSGRGFPDVSTQGVDFQIVSGGQTIGVDGTSCASPTFASVISLVNDRLIAAGKSPLGFLNPFLYSSAGKAALNDVTSGSNPGCSTNGFPAKAGWDPVTGLGTPNFAKLLTAVGL

SEQ ID NO: 50183 - protein, 366 aa, Meripilus giganteus
AIPASCASTITPACLQAIYGIPTTKATQSSNKLAVSGFIDQFANKADLKSFLAQFRKDISSSTTFSLQTLDGGENDQSPSEAGIEANLDIQYTVGLATGVPTTFISVGDDFQDGNLEGFLDIINFLLGESNPPQVLTTSYGQNENTISAKLANQLCNAYAQLGARGTSILFASGDGGVSGSQSQHCSNFVPTFPSGCPFMTSVGATQGVSPETAAAFSSGGFSNVFGIPSYQASAVSGYLSALGSTNSGKFNRSGRGFPDVSTQGVDFQIVSGGQTIGVDGTSCASPTFASVISLVNDRLIAAGKSPLGFLNPFLYSSAGKAALNDVTSGSNPGCSTNGFPAKAGWDPVTGLGTPNFAKLLTAVGL

SEQ ID NO: 50184 - protein, 366 aa, Meripilus giganteus
AIPASCASTITPACLQAIYGIPTTKATQSSNKLAVSGFIDQFANKADLKSFLAQFRKDISSSTTFSLQTLDGGENDQSPSEAGIEANLDIQYTVGLATGVPTTFISVGDDFQDGNLEGFLDIINFLLGESNPPQVLTTSYGQNENTISAKLANQLCNAYAQLGARGTSILFASGDGGVSGSQSAHCSNFVPTFPSGCPFMTSVGATQGVSPETAAAFSSGGFSNVFGIPSYQASAVSGYLSALGSTNSGKFNRSGRGFPDVSTQGVDFQIVSGGQTIGVDGTSCASPTFASVISLVNDRLIAAGKRPLGFLNPFLYSSAGKAALNDVTSGSNPGCSTNGFPAKAGWDPVTGLGTPNFAKLLTAVGL

SEQ ID NO: 50185 - protein, 366 aa, Meripilus giganteus
AIPASCASTITPACLQAIYGIPTTKATQSSNKLAVSGFIDQFANKADLKSFLAQFRKDISSSTTFSLQTLDGGENDQSPSEAGIEANLDIQYTVGLATGVPTTFISVGDDFQDGNLEGFLDIINFLLGESNPPQVLTTSYGQNENTISDKLANQLCNAYAQLGARGTSILFASGDGGVSGSQSAHCSNFVPTFPSGCPFMTSVGATQGVSPETAAAFSSGGFSNVFGIPSYQASAVSGYLSALGSTNSGKFNRSGRGFPDVSTQGVDFQIVSGGQTIGVDGTSCASPTFASVISLVNDRLIAAGKSPLGFLNPFLYSSAGKAALNDVTSGSNPGCSTNGFPAKAGWDPVTGLGTPNFAKLLTAVGL

SEQ ID NO: 50186 - protein, 366 aa, Meripilus giganteus
AIPASCASTITPACLQAIYGIPTTKATQSSNKLAVSGFIDQFANKADLKSFLAQFRKDISSSTTFSLQTLDGGENDQSPSEAGIEANLDIQYTVGLATGVLTTFISVGDDFQDGNLEGFLDIINFLLGESNPPQVLTTSYGQNENTISAKLANQLCNAYAQLGARGTSILFASGDGGVSGSQSAHCSNFVPTFPSGCPFMTSVGATQGVSPETAAAFSSGGFSNVFGIPSYQASAVSGYLSALGSTNSGKFNRSGRGFPDVSTQGVDFQIVSGGQTIGVDGTSCASPTFASVISLVNDRLIAAGKSPLGFLNPFLYSSAGKAALNDVTSGSNPGCSTNGFPAKAGWDPVTGLGTPNFAKLLTAVGL

SEQ ID NO: 50187 - protein, 366 aa, Meripilus giganteus
AIPASCASTITPACLQAIYGIPTTKATQSSNKLAVSGFIDQFANKADLKSFLAQFRKDISSSTTFSLQTLDGGENDQSPSEAGIEANLDIQYTVGLATGVPTTFISVGDDFQDGNLEGFLDIINFLLGESNPPQVLTTSYGQNENTISAKLANQLCNAYAQLGARGTSILFASGDGGVSGSQSAHCSNFVPTFPSGCPFMTSVGATQGVSPETAAAFSSGGFSNVFGIPSYQASAVSGYLSALGSTNSGKFNRSGRGFPDVSTQGVDFQIVSGGQTIGVDGTSCASPTFASVISLVNDRLIAAGKSPLGFLNPFLYSSAGKAALNDVTDGSNPGCSTNGFPAKAGWDPVTGLGTPNFAKLLTAVGL

SEQ ID NO: 50188 - protein, 366 aa, Meripilus giganteus
AIPASCASTITPACLQAIYGIPTTKATQSSNKLAVSGFIDQFANKADLKSFLAQFRKDISSSTTFSLQTLDGGENDQSPSEAGIEANLDIQYTVGLATGVPTTFISVGDDFQDGNLEGFLDIINFLLGESNPPQVLTTSYGQNENTISAKLANQLCNAYAQLGARGTSILFASGDGGVSGSQSAHCSNFVPTFPSGCPFMTSVGATQGVSPETAAAFSSGGFSNVFGIPSYQASAVSGYLSALGSTNSGKFNRSGRGFPDVSTQGVDFQIVSGGQTIGVDGTSCASPTFASVISLVNDRLIAAGKSPLGFLNPFLYSSFGKAALNDVTSGSNPGCSTNGFPAKAGWDPVTGLGTPNFAKLLTAVGL

SEQ ID NO: 50189 - protein, 366 aa, Meripilus giganteus
AIPASCASTITPACLQAIYGIPTTKATQSSNKLAVSGFIDQFANKADLKSFLAQFRKDISSSTTFSLQTLDGGENDQSPSEAGIEANLDIQYTVGLATGVPTTFISVGDDFQDGNLEGFLDIINFLLGESNPPQVLTTSYGQNENTISAKLANQLCNAYAQLGARGTSILFASGDGGVSGSQSAHCSNFVPTFPSGCPFMTSVGATQGVSPETAAAFSSGGFSNVFGIPSYQASAVSGYLSALGSTNSGKFNRSGRGFPDVSTQGVDFQIVSGGQTIGVDGTSCASPTFASVYSLVNDRLIAAGKSPLGFLNPFLYSSAGKAALNDVTSGSNPGCSTNGFPAKAGWDPVTGLGTPNFAKLLTAVGL

SEQ ID NO: 50190 - protein, 366 aa, Meripilus giganteus
AIPASCASTITPACLQAIYGIPTTKATQSSNKLAVSGFIDQFANKADLKSFLAQFRKDISSSTTFSLQTLDGGENDQSPSEAGIEANLDIQYTVGLATGVPTTFISVGDDFQDGNLEGFLDIINFLLGESNPPQVLTTSYGQNENTISAKLANQLCNAYAQLGARGTSILFASGDGGVSGSQSAHCSNFVPTFPSGCPFMTSVGATQGVSPETAAAFSSGGFSNVFGIPSYQASAVSGYLSALGSTNSGKFNRSGRGFPDVSTQGVDFQIVVGGQTIGVDGTSCASPTFASVISLVNDRLIAAGKSPLGFLNPFLYSSAGKAALNDVTSGSNPGCSTNGFPAKAGWDPVTGLGTPNFAKLLTAVGL

SEQ ID NO: 50191 - protein, 366 aa, Meripilus giganteus
AIPASCASTITPACLQAIYGIPTTKATQSSNKLAVSGFIDQFANKADLKSFLAQFRKDISSSTTFSLQTLDGGENDQSPSEAGIEANLDIQYTVGLATGVPTTFISVGDDFQDGNLEGFLDIINFLLGESNPPQVLTTSYGQNENTISAKLANQLCNAYAQLGLRGTSILFASGDGGVSGSQSAHCSNFVPTFPSGCPFMTSVGATQGVSPETAAAFSSGGFSNVFGIPSYQASAVSGYLSALGSTNSGKFNRSGRGFPDVSTQGVDFQIVSGGQTIGVDGTSCASPTFASVISLVNDRLIAAGKSPLGFLNPFLYSSAGKAALNDVTSGSNPGCSTNGFPAKAGWDPVTGLGTPNFAKLLTAVGL

SEQ ID NO: 50192 - protein, 366 aa, Meripilus giganteus
AIPASCASTITPACLQAIYGIPTTKATQSSNKLAVSGFIDQFANKADLKSFLAQFRKDISSSTTFSLQTLDGGENDQSPSEAGIEANLDIQYTVGLATGVPTTFISVGDDFQDGNLEGFLDIINFLLGYSNPPQVLTTSYGQNENTISAKLANQLCNAYAQLGARGTSILFASGDGGVSGSQSAHCSNFVPTFPSGCPFMTSVGATQGVSPETAAAFSSGGFSNVFGIPSYQASAVSGYLSALGSTNSGKFNRSGRGFPDVSTQGVDFQIVSGGQTIGVDGTSCASPTFASVISLVNDRLIAAGKSPLGFLNPFLYSSAGKAALNDVTSGSNPGCSTNGFPAKAGWDPVTGLGTPNFAKLLTAVGL

SEQ ID NO: 50193 - protein, 366 aa, Meripilus giganteus
AIPASCASTITPACLQAIYGIPTTKATQSSNKLAVSGFIDQFANKADLKSFLAQFRKDISSSTTFSLQTLDGGENDQSPSEAGIEANLDIQYTVGLATGVPTTFISVGDDFQDGNLEGFLDIINFLLGESNPPQVLTTSYGQNENTISAKLANQLCNAYAQLGARGTSILFASGDGGVSGSQSAHCSNFVPTFPSGCPFMTSVGATQGVSPETAAAFSSGGFSNVFGIPSYQASAVSGYLSALGSTNSGKFNRSGRGFPDVSTQGVDFQIVSGGQTIGVDGTSCASPTFASVISLVNDRLIAAGKSPLGFLNPFLYISAGKAALNDVTSGSNPGCSTNGFPAKAGWDPVTGLGTPNFAKLLTAVGL

SEQ ID NO: 50194 - protein, 366 aa, Meripilus giganteus
AIPASCASTITPACLQAIYGIPTTKATQSSNKLAVSGFLDQFANKADLKSFLAQFRKDISSSTTFSLQTLDGGENDQSPSEAGIEANLDIQYTVGLATGVPTTFISVGDDFQDGNLEGFLDIINFLLGESNPPQVLTTSYGQNENTISAKLANQLCNAYAQLGARGTSILFASGDGGVSGSQSAHCSNFVPTFPSGCPFMTSVGATQGVSPETAAAFSSGGFSNVFGIPSYQASAVSGYLSALGSTNSGKFNRSGRGFPDVSTQGVDFQIVSGGQTIGVDGTSCASPTFASVISLVNDRLIAAGKSPLGFLNPFLYSSAGKAALNDVTSGSNPGCSTNGFPAKAGWDPVTGLGTPNFAKLLTAVGL

SEQ ID NO: 50195 - protein, 366 aa, Meripilus giganteus
AIPASCASTITPACLQAIYGIPTTKATQSSNKLAVSGFIDQFANKADLKSFLAQFRKDISSSTTFSLQTLDGGENDQSPSEAGIEANLDIQYTVGLATGVPTTFISVGDDFQDGNLEGFLDIINFLLGESNPPQVLTTSYGQNENTISAKLANQLCNAYAQLGARGTSILFASGDGGVSGSQSAHCSNFVPTFPSGCPFMTSVGATQGVSPETAAAFSSGGFSNVFGIPSYQASAVSGYLSALGSTNSGKFNRSGRGFPDVSTQGVDFQIVSGGQTIGVDGTSCASPTFASVISLINDRLIAAGKSPLGFLNPFLYSSAGKAALNDVTSGSNPGCSTNGFPAKAGWDPVTGLGTPNFAKLLTAVGL

SEQ ID NO: 50196 - protein, 366 aa, Meripilus giganteus
AIPASCASTITPACLQAIYGIPTTKATQSSNKLAVSGFIDQFANKADLKSFLAQFRKDISSSTTFSLQTLDGGENDQSPSEAGIEANLDIQYTVGLATGVPTTFISVGDDFQDGNLEGFLDIINFLLGESNPPQVLTTSYGQNENTISAKLANQLCNAYAQLGARGTSILFASGDGGVSGSQSAHCSNFVPTFPSGCPFMTSVGATQGVSPETAAAFSSGGFSNVFGIPSYQASAVSGYLSALGSTNSGKFNRSGRGFPDVSTQGVDFQIVSGGQTIGVDGTSCASPTFASVISLVNDRLIAAGSSPLGFLNPFLYSSAGKAALNDVTSGSNPGCSTNGFPAKAGWDPVTGLGTPNFAKLLTAVGL

SEQ ID NO: 50197 - protein, 366 aa, Meripilus giganteus
AIPASCASTITPACLQAIYGIPTTKATQSSNKLAVSGFIDQFANKADLKSFLAQFRKDISSSTTFSLQTLDGGENDQDPSEAGIEANLDIQYTVGLATGVPTTFISVGDDFQDGNLEGFLDIINFLLGESNPPQVLTTSYGQNENTISAKLANQLCNAYAQLGARGTSILFASGDGGVSGSQSAHCSNFVPTFPSGCPFMTSVGATQGVSPETAAAFSSGGFSNVFGIPSYQASAVSGYLSALGSTNSGKFNRSGRGFPDVSTQGVDFQIVSGGQTIGVDGTSCASPTFASVISLVNDRLIAAGKSPLGFLNPFLYSSAGKAALNDVTSGSNPGCSTNGFPAKAGWDPVTGLGTPNFAKLLTAVGL

SEQ ID NO: 50198 - protein, 366 aa, Meripilus giganteus
AIPASCASTITPACLQAIYGIPTTKATQSSNKLAVSGFIDQFANKADLKSFLAQFRKDISSSTTFSLQTLDGGENDQSPSEAGIEANLDIQYTVGLATGVPTTFISVGDDFQDGNLEGFLDIINFLLGESNPPQVLTTSYGQNENTISAKLANQLCNAYAQLGARGTSILFASGDGGVSGSQSAHCSNFVPTFPSGCPFMTSVGATQGVSPETAAAFSSGGFSNVFGIPSYQASAVSGYLSALGSTNSGKFNRSGRGFPDVSTQGVDFQIVSGGQTIGVDGTSCASPTFASVISLVNDRLIAAGLSPLGFLNPFLYSSAGKAALNDVTSGSNPGCSTNGFPAKAGWDPVTGLGTPNFAKLLTAVGL

SEQ ID NO: 50199 - protein, 366 aa, Meripilus giganteus
AIPASCASTITPACLQAIYGIPTTKATQSSNKLAVSGFIDQFANKADLKSFLAQFRKDISSSTTFSLQTLDGGENDQSPSEAGIEANLDIQYTVGLATGVPTTFISVGDDFQDGNLEGFLDIINFLLGESNPPQVLTTSYGQNENTISAKLANQLCNAYAQLGARGTSILFASGDGGVSGSQSAHCSNFVPTFPSGCPFMTSVGATQGVSPETAAAFSSGGFSNVFGYPSYQASAVSGYLSALGSTNSGKFNRSGRGFPDVSTQGVDFQIVSGGQTIGVDGTSCASPTFASVISLVNDRLIAAGKSPLGFLNPFLYSSAGKAALNDVTSGSNPGCSTNGFPAKAGWDPVTGLGTPNFAKLLTAVGL

SEQ ID NO: 50200 - protein, 366 aa, Meripilus giganteus
AIPASCASTITPACLQAIYGIPTTKATQSSNKLAVSGFIDQFANKADLKSFLAQFRKDISSSTTFSLQTLDGGENDQSPSEAGIEANLDIQYTVGLATGVPTTFISVGDDFQDGNLEGFLDIINFLLGESNPPQVLTTSYGQNENTISAKLANQLCNASAQLGARGTSILFASGDGGVSGSQSAHCSNFVPTFPSGCPFMTSVGATQGVSPETAAAFSSGGFSNVFGIPSYQASAVSGYLSALGSTNSGKFNRSGRGFPDVSTQGVDFQIVSGGQTIGVDGTSCASPTFASVISLVNDRLIAAGKSPLGFLNPFLYSSAGKAALNDVTSGSNPGCSTNGFPAKAGWDPVTGLGTPNFAKLLTAVGL

SEQ ID NO: 50201 - protein, 366 aa, Meripilus giganteus
AIPASCASTITPACLQAIYGIPTTKATQSSNKLAVSGFIDQFANKADLKSFLAQFRKDISSSTTFSLQTLDGGENDQSPSEAGIEANLDIQYTVGLATGVPTTFISVGDDFQDGNLEGFLDIINFLLGESNPPQVLTTSYGQNENMISAKLANQLCNAYAQLGARGTSILFASGDGGVSGSQSAHCSNFVPTFPSGCPFMTSVGATQGVSPETAAAFSSGGFSNVFGIPSYQASAVSGYLSALGSTNSGKFNRSGRGFPDVSTQGVDFQIVSGGQTIGVDGTSCASPTFASVISLVNDRLIAAGKSPLGFLNPFLYSSAGKAALNDVTSGSNPGCSTNGFPAKAGWDPVTGLGTPNFAKLLTAVGL

SEQ ID NO: 50202 - protein, 366 aa, Meripilus giganteus
AIPASCASTITPACLQAIYGIPTTKATQSSNKLAVSGFIDQFANKADLKSFLAQLRKDISSSTTFSLQTLDGGENDQSPSEAGIEANLDIQYTVGLATGVPTTFISVGDDFQDGNLEGFLDIINFLLGESNPPQVLTTSYGQNENTISAKLANQLCNAYAQLGARGTSILFASGDGGVSGSQSAHCSNFVPTFPSGCPFMTSVGATQGVSPETAAAFSSGGFSNVFGIPSYQASAVSGYLSALGSTNSGKFNRSGRGFPDVSTQGVDFQIVSGGQTIGVDGTSCASPTFASVISLVNDRLIAAGKSPLGFLNPFLYSSAGKAALNDVTSGSNPGCSTNGFPAKAGWDPVTGLGTPNFAKLLTAVGL

SEQ ID NO: 50203 - protein, 366 aa, Meripilus giganteus
AIPASCASTITPACLQAIYGIPTTKATQSSNKLAVSGFIDQFANKADLKSFLAQFRKDISSSTTFSLQTLDGGENDQSPSEAGIEANLDIQYTVGLATGVPTTFISVGDDFQDGDLEGFLDIINFLLGESNPPQVLTTSYGQNENTISAKLANQLCNAYAQLGARGTSILFASGDGGVSGSQSAHCSNFVPTFPSGCPFMTSVGATQGVSPETAAAFSSGGFSNVFGIPSYQASAVSGYLSALGSTNSGKFNRSGRGFPDVSTQGVDFQIVSGGQTIGVDGTSCASPTFASVISLVNDRLIAAGKSPLGFLNPFLYSSAGKAALNDVTSGSNPGCSTNGFPAKAGWDPVTGLGTPNFAKLLTAVGL

SEQ ID NO: 50204 - protein, 366 aa, Meripilus giganteus
AIPASCASTITPACLQAIYGIPTTKATQSSNKLAVSGFIDQFANKADLKSFLAQFRKDISSSTTFSLQTLDGGENDQSPSEAGIEANLDIQYTVGLATGVPTTFISVGDDFQDGCLEGFLDIINFLLGESNPPQVLTTSYGQNENTISAKLANQLCNAYAQLGARGTSILFASGDGGVSGSQSAHCSNFVPTFPSGCPFMTSVGATQGVSPETAAAFSSGGFSNVFGIPSYQASAVSGYLSALGSTNSGKFNRSGRGFPDVSTQGVDFQIVSGGQTIGVDGTSCASPTFASVISLVNDRLIAAGKSPLGFLNPFLYSSAGKAALNDVTSGSNPGCSTNGFPAKAGWDPVTGLGTPNFAKLLTAVGL

SEQ ID NO: 50205 - protein, 366 aa, Meripilus giganteus
AIPASCASTITPACLQAIYGIPTTKATQSSNKLAVSGFIDQFANKADLKSFLAQFRKDISSSTTFSLQTLDGGENDQSPSEAGIEANLDIQYTVGLATGVPTTFISVGDDFQDGNLEGFLDIINFLLGESNPPQVLTTSYGQNENTISAKLANQLCNAYAQLGARGTSILFASGDGGVSGSQSAHCSNFVPTFPSGCPFMTSVGATQGVSPETAAAFSSGGFSNVFGIPSYQASAVSGYLSALGSTNSGKFNRSGRGFPDVSTQGVDFQIVSGGQTIGVDGTSCASPTFASVISLVNDRLIAAGKSPLGFLNLFLYSSAGKAALNDVTSGSNPGCSTNGFPAKAGWDPVTGLGTPNFAKLLTAVGL

SEQ ID NO: 50206 - protein, 366 aa, Meripilus giganteus
AIPASCASTITPACLQAIYGIPTTKATQSSNKLAVSGFIDQFANKADLKSFLAQFRKDISSSTTFSLQTLDGGENDQSPSEAGIEANLDIQYTVGLATGVPTTFISVGDDFQDGNLEGFLDIINFLLGESNPPQVLTTSYGQNENVISAKLANQLCNAYAQLGARGTSILFASGDGGVSGSQSAHCSNFVPTFPSGCPFMTSVGATQGVSPETAAAFSSGGFSNVFGIPSYQASAVSGYLSALGSTNSGKFNRSGRGFPDVSTQGVDFQIVSGGQTIGVDGTSCASPTFASVISLVNDRLIAAGKSPLGFLNPFLYSSAGKAALNDVTSGSNPGCSTNGFPAKAGWDPVTGLGTPNFAKLLTAVGL

SEQ ID NO: 50207 - protein, 366 aa, Meripilus giganteus
AIPASCASTITPACLQAIYGIPTTKATQSSNKLAVSGFIDQFANKADLKSFLAQFRKDISSSTTFSLQTLDGGENDQSPSEAGIEANLDIQYTVGLATGVPTTFISVGDDFQDGNLEGFLDIINFLLGESNPPQVLTTSYGQNEWTISAKLANQLCNAYAQLGARGTSILFASGDGGVSGSQSAHCSNFVPTFPSGCPFMTSVGATQGVSPETAAAFSSGGFSNVFGIPSYQASAVSGYLSALGSTNSGKFNRSGRGFPDVSTQGVDFQIVSGGQTIGVDGTSCASPTFASVISLVNDRLIAAGKSPLGFLNPFLYSSAGKAALNDVTSGSNPGCSTNGFPAKAGWDPVTGLGTPNFAKLLTAVGL

SEQ ID NO: 50208 - protein, 366 aa, Meripilus giganteus
AIPASCASTITPACLQAIYGIPTTKATQSSNKLAVSGFIDQFANKADLKSFLAQFRKDISSSTTFSLQTLDGGENDQSPSEAGIEANLDIQYTVGLATGVPTTFISVGDDFQDGNLEGFLDIINFLLGESNPPQVLTTSYGQNENTISAKLANQLCNAYAQLGARGTSILFASGDGGVSGSQSAHCSNFVPTFPSGCPFMTSVGATQGVSPETAAAFSSGGFSNVFGIPSYQASAVSGYLSALGSTNSGKFNRSGRGFPDVSTQGVDFQIVSGGQTIGVDGTSCASPTFASVISLVNDRLIAAGKSPLGFLNPILYSSAGKAALNDVTSGSNPGCSTNGFPAKAGWDPVTGLGTPNFAKLLTAVGL

SEQ ID NO: 50209 - protein, 366 aa, Meripilus giganteus
AIPASCASTITPACLQAIYGIPTTKATQSSNKLAVSGFIDQFANKADLKSFLAQFRKDISSSTTFSLQTLDGGENDQSPSEAGIEANLDIQYTVGLATGVPTTFISVGDDFQDGPLEGFLDIINFLLGESNPPQVLTTSYGQNENTISAKLANQLCNAYAQLGARGTSILFASGDGGVSGSQSAHCSNFVPTFPSGCPFMTSVGATQGVSPETAAAFSSGGFSNVFGIPSYQASAVSGYLSALGSTNSGKFNRSGRGFPDVSTQGVDFQIVSGGQTIGVDGTSCASPTFASVISLVNDRLIAAGKSPLGFLNPFLYSSAGKAALNDVTSGSNPGCSTNGFPAKAGWDPVTGLGTPNFAKLLTAVGL

SEQ ID NO: 50210 - protein, 366 aa, Meripilus giganteus
AIPASCASTITPACLQAIYGIPTTKATQSSNKLAVSGFIDQFANKADLKSFLAQFRKDISSSTTFSLQTLDGGENDQSPSEAGIEANLDIQYTVGLATGVPTTFISVGDDFQDGNLEGFLDIINFLLGESNPPQVLTTSYGQNENTISARLANQLCNAYAQLGARGTSILFASGDGGVSGSQSAHCSNFVPTFPSGCPFMTSVGATQGVSPETAAAFSSGGFSNVFGIPSYQASAVSGYLSALGSTNSGKFNRSGRGFPDVSTQGVDFQIVSGGQTIGVDGTSCASPTFASVISLVNDRLIAAGKSPLGFLNPFLYSSAGKAALNDVTSGSNPGCSTNGFPAKAGWDPVTGLGTPNFAKLLTAVGL

SEQ ID NO: 50211 - protein, 366 aa, Meripilus giganteus
AIPASCASTITPACLQAIYGIPTTKATQSSNKLAVSGFIDQFANKADLKSFLAQFRKDISSSTTFSLQTLDGGENDQSPSEAGIEANLDIQYTVGLATGVPTTFISVGDDFQDGNLLGFLDIINFLLGESNPPQVLTTSYGQNENTISAKLANQLCNAYAQLGARGTSILFASGDGGVSGSQSAHCSNFVPTFPSGCPFMTSVGATQGVSPETAAAFSSGGFSNVFGIPSYQASAVSGYLSALGSTNSGKFNRSGRGFPDVSTQGVDFQIVSGGQTIGVDGTSCASPTFASVISLVNDRLIAAGKSPLGFLNPFLYSSAGKAALNDVTSGSNPGCSTNGFPAKAGWDPVTGLGTPNFAKLLTAVGL

SEQ ID NO: 50212 - protein, 366 aa, Meripilus giganteus
AIPASCASTITPACLQAIYGIPTTKATQSSNKLAVSGFIDQFANKADLKSFLAQFRKDISSSTTFSLQTLDGGENDQSPSEAGIEANLDIQYTVGLATGVPTTFISVGDDFQDGNLEGFLDIINFLLGESNPPQVLTTSYGQNENTISAKLANQLCNAYAQLGARGTSILFASGDGGVSGSQSAHCSNFVPTFPSGCPFMTSVGATQGVSPETAAAFSSGGFSNVFGIPSYQASAVLGYLSALGSTNSGKFNRSGRGFPDVSTQGVDFQIVSGGQTIGVDGTSCASPTFASVISLVNDRLIAAGKSPLGFLNPFLYSSAGKAALNDVTSGSNPGCSTNGFPAKAGWDPVTGLGTPNFAKLLTAVGL

SEQ ID NO: 50213 - protein, 366 aa, Meripilus giganteus
AIPASCASTITPACLQAIYGIPTTKATQSSNKLAVSGFIDQFANKADLKSFLAQFRKDISSSTTFSLQTLDGGENDQSPSEAGIEANLDIQYTVGLATGVPTTFISVGDDFQDGNLEGFLDIINMLLGESNPPQVLTTSYGQNENTISAKLANQLCNAYAQLGARGTSILFASGDGGVSGSQSAHCSNFVPTFPSGCPFMTSVGATQGVSPETAAAFSSGGFSNVFGIPSYQASAVSGYLSALGSTNSGKFNRSGRGFPDVSTQGVDFQIVSGGQTIGVDGTSCASPTFASVISLVNDRLIAAGKSPLGFLNPFLYSSAGKAALNDVTSGSNPGCSTNGFPAKAGWDPVTGLGTPNFAKLLTAVGL

SEQ ID NO: 50214 - protein, 366 aa, Meripilus giganteus
AIPASCASTITPACLQAIYGIPTTKATQSSNKLAVSGFIDQFANKADLKSFLAQFRKDISSSTTFSLQTLDGGENDQSPSEAGIEANLDIQYTVGLATGVPTTFISVGDDFQDGNLEGFLDIINFLLGESNPPQVLTTSYGQNENTISAKLANQLCNAYAQLGARGTSILFASGDGGVSGSQSAHCSNFVPTFPSGCPFMTSVGATQGVSPETAAAFSSGGFSNVFGIPSYQASAVSGYLSALGSTNSGKFNRSGRGFPDVSTQGVDFQIVSGGQTIGVDGTSCASPTFASVISLVNDRLIAAGKSPLGFLNPFLYSSAGKAALNDVTSGSNPGCSTNGFPAKAGWDPVTGLGTPNFAKLLCAVGL

SEQ ID NO: 50215 - protein, 366 aa, Meripilus giganteus
AIPASCASTITPACLQAIYGIPTTKATQSSNKLAVSGFIDQFANKADLKSFLAQFRKDISSSTTFSLQTLDGGENDQSPSEAGIEANLDIQYTVGLATGVPTTFISVGDDFQDGNLEGFLDIINFLLGESNPPQVLTTSYGQNENTISAKLANQLCNAYAQLGARGTSILFASGDGGVSGSQSAHCSNFVPTFPSGCPFMTSVGATQGVSPETAAAFSSGGFSNVFGMPSYQASAVSGYLSALGSTNSGKFNRSGRGFPDVSTQGVDFQIVSGGQTIGVDGTSCASPTFASVISLVNDRLIAAGKSPLGFLNPFLYSSAGKAALNDVTSGSNPGCSTNGFPAKAGWDPVTGLGTPNFAKLLTAVGL

SEQ ID NO: 50216 - protein, 366 aa, Meripilus giganteus
AIPASCASTITPACLQAIYGIPTTKATQSSNKLAVSGFIDQFANKADLKSFLAQFRKDISSSTTFSLQTLDGGENDQSPSEAGIEANLDIQYTVGLATGVPTTFISVGDDFQDGNLEGFLDIINFLLGESNPPQVLTTSYGQNENTISAKLANQLCNAYAQLGARGTSILFASGDGGVSGSQSAHCSNFVPTFPSGCPYMTSVGATQGVSPETAAAFSSGGFSNVFGIPSYQASAVSGYLSALGSTNSGKFNRSGRGFPDVSTQGVDFQIVSGGQTIGVDGTSCASPTFASVISLVNDRLIAAGKSPLGFLNPFLYSSAGKAALNDVTSGSNPGCSTNGFPAKAGWDPVTGLGTPNFAKLLTAVGL

SEQ ID NO: 50217 - protein, 366 aa, Meripilus giganteus
AIPASCASTITPACLQAIYGIPTTKATQSSNKLAVSGFIDQFANKADLKSFLAQRRKDISSSTTFSLQTLDGGENDQSPSEAGIEANLDIQYTVGLATGVPTTFISVGDDFQDGNLEGFLDIINFLLGESNPPQVLTTSYGQNENTISAKLANQLCNAYAQLGARGTSILFASGDGGVSGSQSAHCSNFVPTFPSGCPFMTSVGATQGVSPETAAAFSSGGFSNVFGIPSYQASAVSGYLSALGSTNSGKFNRSGRGFPDVSTQGVDFQIVSGGQTIGVDGTSCASPTFASVISLVNDRLIAAGKSPLGFLNPFLYSSAGKAALNDVTSGSNPGCSTNGFPAKAGWDPVTGLGTPNFAKLLTAVGL

SEQ ID NO: 50218 - protein, 366 aa, Meripilus giganteus
AIPASCASTITPACLQAIYGIPTTKATQSSNKLAVSGFIDQFANKADLKCFLAQFRKDISSSTTFSLQTLDGGENDQSPSEAGIEANLDIQYTVGLATGVPTTFISVGDDFQDGNLEGFLDIINFLLGESNPPQVLTTSYGQNENTISAKLANQLCNAYAQLGARGTSILFASGDGGVSGSQSAHCSNFVPTFPSGCPFMTSVGATQGVSPETAAAFSSGGFSNVFGIPSYQASAVSGYLSALGSTNSGKFNRSGRGFPDVSTQGVDFQIVSGGQTIGVDGTSCASPTFASVISLVNDRLIAAGKSPLGFLNPFLYSSAGKAALNDVTSGSNPGCSTNGFPAKAGWDPVTGLGTPNFAKLLTAVGL

SEQ ID NO: 50219 - protein, 366 aa, Meripilus giganteus
AIPASCASTITPACLQAIYGIPTTKATQSSNKLAVSGFIDQFANKADLKSFLAQFRKDISSSTTFSLQTLDGGENDQSPSEAGIEANLDIQYTVGLATGVPTTFISVGDDFQDGNLEGFLDIINFLLGESNPPQVLTTSYGQNENTISAKLANQLCNAYAQLGARGTSILFASGDGGVSGSQSAHCSNFVPTFPSGCPFMTSVGATQGVSPETAAAFSSGGFSNVFGIPSYQASAVSGYLSALGSTNSGKFNRSGRGFPDVSTQGVDFQIVSGGQTIGVDGTSCASPTFASVISLVNDRLIAAGKSPLGFLNPFLYSSQGKAALNDVTSGSNPGCSTNGFPAKAGWDPVTGLGTPNFAKLLTAVGL

SEQ ID NO: 50220 - protein, 366 aa, Meripilus giganteus
AIPASCASTITPACLQAIYGIPTTKATQSSNKLAVSGFIDQFANKADLKSFLAQFRKDISSSTTFSLQTLDGGENDQSPSEAGIEANLDIQYTVGLATGVPTTFISVGDDFQDGTLEGFLDIINFLLGESNPPQVLTTSYGQNENTISAKLANQLCNAYAQLGARGTSILFASGDGGVSGSQSAHCSNFVPTFPSGCPFMTSVGATQGVSPETAAAFSSGGFSNVFGIPSYQASAVSGYLSALGSTNSGKFNRSGRGFPDVSTQGVDFQIVSGGQTIGVDGTSCASPTFASVISLVNDRLIAAGKSPLGFLNPFLYSSAGKAALNDVTSGSNPGCSTNGFPAKAGWDPVTGLGTPNFAKLLTAVGL

SEQ ID NO: 50221 - protein, 366 aa, Meripilus giganteus
AIPASCASTITPACLQAIYGIPTTKATQSSNKLAVSGFIDQFANKADLKSFLAQFRKDISSSTTFSLQTLDGGENDQSPSEAGIEANLDIQYTVGLATGVPTTFISVGDDFQDGNLEGFLDIINFLLGESNPPQVLTTSYGQNENTISAKLANQLCNAYAQLGARGTSILFASGDGGVSGSQSAHCSNFVPTFPSGCPFMTSVGATQGVSPETAAAFSSGGFSNVFGIPSYQASAVQGYLSALGSTNSGKFNRSGRGFPDVSTQGVDFQIVSGGQTIGVDGTSCASPTFASVISLVNDRLIAAGKSPLGFLNPFLYSSAGKAALNDVTSGSNPGCSTNGFPAKAGWDPVTGLGTPNFAKLLTAVGL

SEQ ID NO: 50222 - protein, 366 aa, Meripilus giganteus
AIPASCASTITPACLQAIYGIPTTKATQSSNKLAVSGFIDQFANKADLKSFLAQFRKDISSSTTFSLQTLDGGENDQSPSEAGIEANLDIQYTVGLATGVPTTFISVGDDFQDGNLEGFLDIINFLLGESNPPQVLTTSYGQNENTISAKLANQLCNAYAQLGARGTSILFASGDGGVSGSQSAHCSNFVPTFPSGCPFMTSVGATQGVSPETAAAFSSGGFSNVFGIPSYQASAVSGYLSALGSTNSGKFNRSGRGFPDVSTQGVDFQIVSGGQTIGVDGTSCASPTFASVISLVNDRLIAAGKSPLGFLNPFLYSSAGKAALNDVTSGSNPGCSTNGFPAKAGWDPVTGLGTPNFASLLTAVGL

SEQ ID NO: 50223 - protein, 366 aa, Meripilus giganteus
AIPASCASTITPACLQAIYGIPTTKATQSSNKLAVSGFIDQFANKADLKSFLAQFRKDISSSTTFSLQTLDGGENDQSPSEAGIEANLDIQYTVGLATGVPTTFISVGDDFQDGNLEGFLDIINFLLGESNPPQVLTTSYGQNENTISAKLAYQLCNAYAQLGARGTSILFASGDGGVSGSQSAHCSNFVPTFPSGCPFMTSVGATQGVSPETAAAFSSGGFSNVFGIPSYQASAVSGYLSALGSTNSGKFNRSGRGFPDVSTQGVDFQIVSGGQTIGVDGTSCASPTFASVISLVNDRLIAAGKSPLGFLNPFLYSSAGKAALNDVTSGSNPGCSTNGFPAKAGWDPVTGLGTPNFAKLLTAVGL

SEQ ID NO: 50224 - protein, 366 aa, Meripilus giganteus
AIPASCASTITPACLQAIYGIPTTKATQSSNKLAVSGFIDQFANKADLKSFLAQFRKDISSSTTFSLQTLDGGENDQSPSEAGIEANLDIQYTVGLATGVPTTFISVGDDFQDGNLEGFLDIINFLLGESNPPQVLTTSYGQNENTISAKLANQLCNAYAQLGARGTSILFASGDGGVSGSQSAHCSNFVPTFPSGCPFMTSVGATQGVSPETAAAFSSGGFSNVFGIPSYQASAVSGYLSALGSTNSGKFNRSGRGFPDVSTQGVDFQIVSGGQTIGVDGTSCASPTFASVISLVNDRLIAAGCSPLGFLNPFLYSSAGKAALNDVTSGSNPGCSTNGFPAKAGWDPVTGLGTPNFAKLLTAVGL

SEQ ID NO: 50225 - protein, 366 aa, Meripilus giganteus
AIPASCASTITPACLQAIYGIPTTKATQSSNKLAVSGFIDQFANKADLKSFLAQFRKDISSSTTFSLQTLDGGENDQSPSEAGIEANLDIQYTVGLATGVPTTFISVGDDFQDGNLEGFLDIINFLLGESNPPQVLTTSYGQNENTISAKLANQLCNAYAQLGARGTSILFASGDGGVSGSQSAHCSNFVPTFPSGCPFMTSVGATQGVSPETAAAFSSGGFSNVFGIPSSQASAVSGYLSALGSTNSGKFNRSGRGFPDVSTQGVDFQIVSGGQTIGVDGTSCASPTFASVISLVNDRLIAAGKSPLGFLNPFLYSSAGKAALNDVTSGSNPGCSTNGFPAKAGWDPVTGLGTPNFAKLLTAVGL

SEQ ID NO: 50226 - protein, 366 aa, Meripilus giganteus
AIPASCASTITPACLQAIYGIPTTKATQSSNKLAVSGFIDQFANKADLKSFLAQFRKDISSSTTFSLQTLDGGENDQSPSEAGIEANLDIQYTVGLATGVPTTFISVGDDFQDGNLEGFLDIINFLLGESNPPQVLTTSYGQNENTISAKLANQLCNAYAQLGARGTSILFASGDGGVSGSQSAHCSNFVPTFPSGCPFMTSVGATQGVSPETAAAFSSGGFSNVFGIPSYQASAVSGYLSALGSTNSGKFNRSGRGFPDVSTQGVDFQIVSGGQTIGVDGTSCASPTFASVISLVNDRLIAAGKSPLGFLNPFLYSSAGKAALNDVTSGSNPGCSTNGFNAKAGWDPVTGLGTPNFAKLLTAVGL

SEQ ID NO: 50227 - protein, 366 aa, Meripilus giganteus
AIPASCASTITPACLQAIYGIVTTKATQSSNKLAVSGFIDQFANKADLKSFLAQFRKDISSSTTFSLQTLDGGENDQSPSEAGIEANLDIQYTVGLATGVPTTFISVGDDFQDGNLEGFLDIINFLLGESNPPQVLTTSYGQNENTISAKLANQLCNAYAQLGARGTSILFASGDGGVSGSQSAHCSNFVPTFPSGCPFMTSVGATQGVSPETAAAFSSGGFSNVFGIPSYQASAVSGYLSALGSTNSGKFNRSGRGFPDVSTQGVDFQIVSGGQTIGVDGTSCASPTFASVISLVNDRLIAAGKSPLGFLNPFLYSSAGKAALNDVTSGSNPGCSTNGFPAKAGWDPVTGLGTPNFAKLLTAVGL

SEQ ID NO: 50228 - protein, 366 aa, Meripilus giganteus
AIPASCASTITPACLQAIYGIPTTKATQSSNKLAVSGFIDQFANKADLKSFLAQFRKDISSSTTFSLQTLDGGENRQSPSEAGIEANLDIQYTVGLATGVPTTFISVGDDFQDGNLEGFLDIINFLLGESNPPQVLTTSYGQNENTISAKLANQLCNAYAQLGARGTSILFASGDGGVSGSQSAHCSNFVPTFPSGCPFMTSVGATQGVSPETAAAFSSGGFSNVFGIPSYQASAVSGYLSALGSTNSGKFNRSGRGFPDVSTQGVDFQIVSGGQTIGVDGTSCASPTFASVISLVNDRLIAAGKSPLGFLNPFLYSSAGKAALNDVTSGSNPGCSTNGFPAKAGWDPVTGLGTPNFAKLLTAVGL

SEQ ID NO: 50229 - protein, 366 aa, Meripilus giganteus
AIPASCASTITPACLQAIYGIPTTKATQSSNKLAVSGFIDQFANKADLKSFLAQFRKDISSSTTFSLQTLDGGENDQSPSEAGIEANLDIQYTVGLATGVPTTFISVGDDFQDGNLEGFLDIINFLLGESNPPQVLTTSYGQNENTISAKLANQLCNAYAQLGARGTSILFASGDGGVSGSQSAHCSNFVPTFPSGCPFMTSVGATQGVSPETAAAFSSGGFSNVFGIPSYQASAVSGYLSALGSTNSGKFNRSGRGFPDVSTQGVDFQIVSGGQTIGVDGTSCASPTFASVISLVNDRLIAAGKSPLGFLNPFLYSSAGKAALNDVTCGSNPGCSTNGFPAKAGWDPVTGLGTPNFAKLLTAVGL

SEQ ID NO: 50230 - protein, 366 aa, Meripilus giganteus
AIPASCASTITPACLQAIYGIPTTKATQSSNKLAVSGFIDQFANKADLKSFLAQFRKDISSSTTFSLQTLDGGENDQSPSEAGIEANLDIQYTVGLATGVPTTFISVGDDFQDGNLEGFLDIINFLLGESNPPQVLTTSYGQNENTISAKLANQLCNAYAQLGARGTSILFASGDGGVSGSQSAHCSNFVPTFPSGCPFMTSVGATQGVSPETAAAFSSGGFSNVFGIPSYQASAVSGYLSALGSTNSGKFNRSGRGFPDVSTQGKDFQIVSGGQTIGVDGTSCASPTFASVISLVNDRLIAAGKSPLGFLNPFLYSSAGKAALNDVTSGSNPGCSTNGFPAKAGWDPVTGLGTPNFAKLLTAVGL

SEQ ID NO: 50231 - protein, 366 aa, Meripilus giganteus
AIPASCASTITPACLQAIYGIPTTKATQSSNKLAVSGFIDQFANKADLKSFLAQFRKDISSSTTFSLQTLDGGENDQSPSEAGIEANLDIQYTVGLATGVPTTFISVGDDFQDGNLEGFLDIINFLLGESNPPQVLTTSYGQNENTISAKLANQLCNAYAQLGARGTSILFASGDGGVSGSQSSHCSNFVPTFPSGCPFMTSVGATQGVSPETAAAFSSGGFSNVFGIPSYQASAVSGYLSALGSTNSGKFNRSGRGFPDVSTQGVDFQIVSGGQTIGVDGTSCASPTFASVISLVNDRLIAAGKSPLGFLNPFLYSSAGKAALNDVTSGSNPGCSTNGFPAKAGWDPVTGLGTPNFAKLLTAVGL

SEQ ID NO: 50232 - protein, 366 aa, Meripilus giganteus
AIPASCASTITPACLQAIYGIPTTKATQSSNKLAVSGFIDQFANKADLKSFLAQFRKDISSSTTFSLQTLDGGENDQSPSEAGIEANLDIQYTVGLATGVPTTFISVGDDFQDGNLEGFLDIINFLLGESNPPQVLTTSYGQNELTISAKLANQLCNAYAQLGARGTSILFASGDGGVSGSQSAHCSNFVPTFPSGCPFMTSVGATQGVSPETAAAFSSGGFSNVFGIPSYQASAVSGYLSALGSTNSGKFNRSGRGFPDVSTQGVDFQIVSGGQTIGVDGTSCASPTFASVISLVNDRLIAAGKSPLGFLNPFLYSSAGKAALNDVTSGSNPGCSTNGFPAKAGWDPVTGLGTPNFAKLLTAVGL

SEQ ID NO: 50233 - protein, 366 aa, Meripilus giganteus
AIPASCASTITPACLQAIYGIPTTKATQSSNKLAVSGFIDQFANKADLKSFLAQFRKDISSSTTFSLQTLDGGENDQSPSEAGIEANLDIQYTVGLATGVPTTFISVGDDFQDGNLEGFLDIINFLLGESNPPQVLTTSYGQNENTISAKLANQLCNAYAQLGARGTSILFASGDGGVSGSQSAHCSNFVPTFPSGCPFMTSVGATQGFSPETAAAFSSGGFSNVFGIPSYQASAVSGYLSALGSTNSGKFNRSGRGFPDVSTQGVDFQIVSGGQTIGVDGTSCASPTFASVISLVNDRLIAAGKSPLGFLNPFLYSSAGKAALNDVTSGSNPGCSTNGFPAKAGWDPVTGLGTPNFAKLLTAVGL

SEQ ID NO: 50234 - protein, 366 aa, Meripilus giganteus
AIPASCASTITPACLQAIYGIPTTKATQSSNKLAVSGFIDQFANKADLKSFLAQFRKDISSSTTFSLQTLDGGENDQSPSEAGIEANLDIQYTVGLATGVPTTFISVGDDFQDGNLEGFLDIINFLLGESNPPQVLTTSYGQNENTISAKLANQLCNAYAQLGARGTSILFASGDGGVSGSQSAHCSNFVPTFPSGCPFMTSVGATQGVLPETAAAFSSGGFSNVFGIPSYQASAVSGYLSALGSTNSGKFNRSGRGFPDVSTQGVDFQIVSGGQTIGVDGTSCASPTFASVISLVNDRLIAAGKSPLGFLNPFLYSSAGKAALNDVTSGSNPGCSTNGFPAKAGWDPVTGLGTPNFAKLLTAVGL

SEQ ID NO: 50235 - protein, 366 aa, Meripilus giganteus
AIPASCASTITPACLQAIYGIPTTKATQSSNKLAVSGFIDQFANKADLKSFLAQFRKDISSSTTFSLQTLDGGENDQSPSKAGIEANLDIQYTVGLATGVPTTFISVGDDFQDGNLEGFLDIINFLLGESNPPQVLTTSYGQNENTISAKLANQLCNAYAQLGARGTSILFASGDGGVSGSQSAHCSNFVPTFPSGCPFMTSVGATQGVSPETAAAFSSGGFSNVFGIPSYQASAVSGYLSALGSTNSGKFNRSGRGFPDVSTQGVDFQIVSGGQTIGVDGTSCASPTFASVISLVNDRLIAAGKSPLGFLNPFLYSSAGKAALNDVTSGSNPGCSTNGFPAKAGWDPVTGLGTPNFAKLLTAVGL

SEQ ID NO: 50236 - protein, 366 aa, Meripilus giganteus
AIPASCASTITPACLQAIYGIPTTKATQSSNKLAVSGFIDQFANKADLKSFLAQFRKDISSSTTFSLQTLDGGENDQSPSEAGIEANLDIQYTVGLATGVPTTFISVGPDFQDGNLEGFLDIINFLLGESNPPQVLTTSYGQNENTISAKLANQLCNAYAQLGARGTSILFASGDGGVSGSQSAHCSNFVPTFPSGCPFMTSVGATQGVSPETAAAFSSGGFSNVFGIPSYQASAVSGYLSALGSTNSGKFNRSGRGFPDVSTQGVDFQIVSGGQTIGVDGTSCASPTFASVISLVNDRLIAAGKSPLGFLNPFLYSSAGKAALNDVTSGSNPGCSTNGFPAKAGWDPVTGLGTPNFAKLLTAVGL

SEQ ID NO: 50237 - protein, 366 aa, Meripilus giganteus
AIPASCASTITPACLQAIYGIPTTKATQSSNKLAVSGFIDQFANKADLKSFLAQFRKDISSSTTFSLQTLDGGENDQSPSEAGIEANLDIQYTVGLATGVPTTFISVGDDFQDGNLEGFLDIINFLLGESNPPQVLTTSYGQNENTISAKLANQLCNAYAQLGARGTSILFASGDGGVSGSQSAHCSNFVPTFPSGCPFMTSVGATQGVSPETAAAFSSGGFSNVFGIPSYQASAVSGYLSALGSSNSGKFNRSGRGFPDVSTQGVDFQIVSGGQTIGVDGTSCASPTFASVISLVNDRLIAAGKSPLGFLNPFLYSSAGKAALNDVTSGSNPGCSTNGFPAKAGWDPVTGLGTPNFAKLLTAVGL

SEQ ID NO: 50238 - protein, 366 aa, Meripilus giganteus
AIPASCASTITPACLQAIYGIPTTKATQSSNKLAVSGFIDQFANKADLKSFLAQFRKDISSSTTFSLQTLDGGENDQSPSEAGIEANLDIQYTVGLATGVPTTFISVGDDFQDANLEGFLDIINFLLGESNPPQVLTTSYGQNENTISAKLANQLCNAYAQLGARGTSILFASGDGGVSGSQSAHCSNFVPTFPSGCPFMTSVGATQGVSPETAAAFSSGGFSNVFGIPSYQASAVSGYLSALGSTNSGKFNRSGRGFPDVSTQGVDFQIVSGGQTIGVDGTSCASPTFASVISLVNDRLIAAGKSPLGFLNPFLYSSAGKAALNDVTSGSNPGCSTNGFPAKAGWDPVTGLGTPNFAKLLTAVGL

SEQ ID NO: 50239 - protein, 366 aa, Meripilus giganteus
AIPASCASTITPACLQAIYGIPTTKATQSSNKLAVSGFIDQFANKADLKSFLAVFRKDISSSTTFSLQTLDGGENDQSPSEAGIEANLDIQYTVGLATGVPTTFISVGDDFQDGNLEGFLDIINFLLGESNPPQVLTTSYGQNENTISAKLANQLCNAYAQLGARGTSILFASGDGGVSGSQSAHCSNFVPTFPSGCPFMTSVGATQGVSPETAAAFSSGGFSNVFGIPSYQASAVSGYLSALGSTNSGKFNRSGRGFPDVSTQGVDFQIVSGGQTIGVDGTSCASPTFASVISLVNDRLIAAGKSPLGFLNPFLYSSAGKAALNDVTSGSNPGCSTNGFPAKAGWDPVTGLGTPNFAKLLTAVGL

SEQ ID NO: 50240 - protein, 366 aa, Meripilus giganteus
AIPASCASTITPACLQAIYGIPTTKATQSSNKLAVSGFIDQFANKADLKSFLAQFRKDISSSTTFSLQTLDGGENDQSPSEAGIEANLDIQYTVGLATGVPTTFISVGDDFQDGNLEGFLDIINFLLGESNPPQVLTTSYGQNENTISAKLANQLCNAYAQLGARGTSILFASGDGGVSGSQSAHCSNFVPTFPSGCPFMTSVGATQGVSPETAAAFSSGGFSNVFGIPSYQASAVSGYLSALGSTNSGKFNRSGRGFPDVSTQGVDFQIVSGGQTIGVDGTSCASPTFASVISLVNDRLIAAGKSPLGFLNPFLYSSAGKAALNDVTSGSNVGCSTNGFPAKAGWDPVTGLGTPNFAKLLTAVGL

SEQ ID NO: 50241 - protein, 366 aa, Meripilus giganteus
AIPASCASTITPACLQAIYGIPTTKATQSSNKLAVSGFIDQFANKADLKSFLAQFRKDICSSTTFSLQTLDGGENDQSPSEAGIEANLDIQYTVGLATGVPTTFISVGDDFQDGNLEGFLDIINFLLGESNPPQVLTTSYGQNENTISAKLANQLCNAYAQLGARGTSILFASGDGGVSGSQSAHCSNFVPTFPSGCPFMTSVGATQGVSPETAAAFSSGGFSNVFGIPSYQASAVSGYLSALGSTNSGKFNRSGRGFPDVSTQGVDFQIVSGGQTIGVDGTSCASPTFASVISLVNDRLIAAGKSPLGFLNPFLYSSAGKAALNDVTSGSNPGCSTNGFPAKAGWDPVTGLGTPNFAKLLTAVGL

SEQ ID NO: 50242 - protein, 366 aa, Meripilus giganteus
AIPASCASTITPACLQAIYGIPTTKATQSSNKLAVSGFIDQFANKADLKSFLAQFRKDISSSTTFSLQTLDGGENDQSPSEAGIEANLDIQYTVGLATGVPTTFISVGDDFQDGNLEGFLDIINFLLGESNPPQVLTTSYGQNENTISAKLANQLCNAYAQLGARGTSILFASGDGGVSGSQSAHCSNFVPTFPSGCPFMTSVGATQGVSPETAAAFSSGGFSNVFGIPSYQASAVSGYLSALGSTNSGKFNRSGRGFPDVSTQGVDFQIVSGGQTIGVDGTSCASPTFASVISLVNDRLIAAGKSPLGFLNPFLYSSAGKDALNDVTSGSNPGCSTNGFPAKAGWDPVTGLGTPNFAKLLTAVGL

SEQ ID NO: 50243 - protein, 366 aa, Meripilus giganteus
AIPASCASTITPACLQAIYGIPTTKATQSSNKLAVSGFIDQFANKADLKSFLAQFRKDISSSTTFSLQTLDGGENDQSPSEAGIEANLDIQYTVGLATGVPTTFISVGDDFQDPNLEGFLDIINFLLGESNPPQVLTTSYGQNENTISAKLANQLCNAYAQLGARGTSILFASGDGGVSGSQSAHCSNFVPTFPSGCPFMTSVGATQGVSPETAAAFSSGGFSNVFGIPSYQASAVSGYLSALGSTNSGKFNRSGRGFPDVSTQGVDFQIVSGGQTIGVDGTSCASPTFASVISLVNDRLIAAGKSPLGFLNPFLYSSAGKAALNDVTSGSNPGCSTNGFPAKAGWDPVTGLGTPNFAKLLTAVGL

SEQ ID NO: 50244 - protein, 366 aa, Meripilus giganteus
AIPASCASTITPACLQAIYGIPTTKATQSSNKLAVSGFIDQFANKADLKSFLAQFRKDISSSTTFSLQTLDGGENDQSPSEAGIEANLDIQYTVGLATGVPTTFISVGDDFQDGNLEGFLDIINFLLGESNPPQVLTTSYGQNENTISAKLANQLCNAYAQLGARGTSILFASGDGGVSGSQSAHCSNFVPTFPSGCPFMTSVGATQGVSPETAAAFSSGGFSNVFGIPSYQASAVSGYLSALGSTNSGKFNRSGRGFPDVSTQGVDFQIVSGGQTIGVDGTSCASPTFASVISLVNDRLIAAGKSPLGFLNPFLYSSAGKAALNDVTSGSNPGCSTNGFPAKAGWDPVTGLGTPNFAKLLTEVGL

SEQ ID NO: 50245 - protein, 366 aa, Meripilus giganteus
AIPASCASTITPACLQAIYGIPTTKATQSSNKLAVSGFIDQFANKADLKSFLAQFRKDISSSTTFSLQTLDGGENDQSPSEAGIEANLDIQYTVGLATGVPTTFISVGDDFQDGNLEGFLDIINFLLGESNPPQVLTTSYGQNENTISAKLANQLCNAYAQLGARGTSILFASGDGGVSGSQSAHCSNFVPTFPSGCPFMTSVGATQGVSPETAAAFSSGGFSNVFGIPSYQASAVSGYLSALGSTNSGKFNRSGRGFPDVSTQGVDFQIVSGGQTIGVDGTSCASPTFASVISLVNDRLIAAGKSPLGYLNPFLYSSAGKAALNDVTSGSNPGCSTNGFPAKAGWDPVTGLGTPNFAKLLTAVGL

SEQ ID NO: 50246 - protein, 366 aa, Meripilus giganteus
AIPASCASTITPACLQAIYGIPTTKATQSSNKLAVSGFIDQFANKADLKSFLAQFRKDISSSTTFSLQTLDGGENDQSPSEAGIEANLDIQYTVGLATGVPTTFISVGDDFQDGNLEGFLDIINFLLGESNPPQVLTTSYGMNENTISAKLANQLCNAYAQLGARGTSILFASGDGGVSGSQSAHCSNFVPTFPSGCPFMTSVGATQGVSPETAAAFSSGGFSNVFGIPSYQASAVSGYLSALGSTNSGKFNRSGRGFPDVSTQGVDFQIVSGGQTIGVDGTSCASPTFASVISLVNDRLIAAGKSPLGFLNPFLYSSAGKAALNDVTSGSNPGCSTNGFPAKAGWDPVTGLGTPNFAKLLTAVGL

SEQ ID NO: 50247 - protein, 366 aa, Meripilus giganteus
AIPASCASTITPACLQAIYGIPTTKATQSSNKLAVSGFIDQFANKADLKSFLAQFRKDISSSTTFSLQTLDGGENDQSPSEAGIEANLDIQYTVGLATGVPTTFISVGDDFQDGNLEGFLDIINFLLGESNPPQVLTTSYGQNENTISAKLANQLCNAYAQLGARGTSILFASGDGGVSGSQSAHCSNFVPTFPSGCPFMTSVGATQGVSPETAAAFSSGGFSNVFGIPSYQASAVSGYLSALGSTNSGKFNRSGRGFPDVSTQGVDFQIVSGGQTIGVDGTSCASPTFASVISLVNDRLIAAGKSPLGFLNPFLYGSAGKAALNDVTSGSNPGCSTNGFPAKAGWDPVTGLGTPNFAKLLTAVGL

SEQ ID NO: 50248 - protein, 366 aa, Meripilus giganteus
AIPASCASTITPACLQAIYGIPTTKATQSSNKLAVSGFIDQFANKADLKSFLAQFRKDISSSTTFSLQTLDGGENDQSPSEAGIEANLDIQYTVGLATGVPTVFISVGDDFQDGNLEGFLDIINFLLGESNPPQVLTTSYGQNENTISAKLANQLCNAYAQLGARGTSILFASGDGGVSGSQSAHCSNFVPTFPSGCPFMTSVGATQGVSPETAAAFSSGGFSNVFGIPSYQASAVSGYLSALGSTNSGKFNRSGRGFPDVSTQGVDFQIVSGGQTIGVDGTSCASPTFASVISLVNDRLIAAGKSPLGFLNPFLYSSAGKAALNDVTSGSNPGCSTNGFPAKAGWDPVTGLGTPNFAKLLTAVGL

SEQ ID NO: 50249 - protein, 366 aa, Meripilus giganteus
AIPASCASTITPACLQAIYGIPTTKATQSSNKLAVSGFIDQFANKADLKSFLAQFRKDISSSTTFSLQTLDGGENDQSPSEAGIEANLDIQYTVGLATGVPTTFISVGDDFQDGNLEGFLDIINFLLGESNPPQVLTTSYGQNEITISAKLANQLCNAYAQLGARGTSILFASGDGGVSGSQSAHCSNFVPTFPSGCPFMTSVGATQGVSPETAAAFSSGGFSNVFGIPSYQASAVSGYLSALGSTNSGKFNRSGRGFPDVSTQGVDFQIVSGGQTIGVDGTSCASPTFASVISLVNDRLIAAGKSPLGFLNPFLYSSAGKAALNDVTSGSNPGCSTNGFPAKAGWDPVTGLGTPNFAKLLTAVGL

SEQ ID NO: 50250 - protein, 366 aa, Meripilus giganteus
AIPASCASTITPACLQAIYGIPTTKATQSSNKLAVSGFIDQFANKADLKSFLAQFRKDISSSTTFSLQTLDGGENDQSPSEAGIEANLDIQYTVGLATGVPTTFISVGDDFQDGNLEGFLDIINFLLGESNPPQVLTTSYGQNENTISAKLANQLCNAYAQLGARGTSILFASGDGGVSGSQSAHCSNFVPTFPSGCPFMTSVGATQGVSPETAAAFSSGGFSNVFGIPSYQASAVSGYLSALGSTNSGKFNRSGRGFPDVSTQGVDFQIVSGGQTIGVDGTSCASPTFASVISLVNDRLIAAGKSPLGFLNPFLYSSAGKAALNDVTSGSNPGCSTNGFPAKAGWIPVTGLGTPNFAKLLTAVGL

SEQ ID NO: 50251 - protein, 366 aa, Meripilus giganteus
AIPASCASTITPACLQAIYGIPTTKATQSSNKLAVSGFIDQFANKADLKSFLAQFRKDISSSTTFSLQTLDGGENDQSPSEAGIEANLDIQYTVGLATGVPTTFISVGDDFQDGNLEGFLDIINFLLGESNPPQVLTTSYGQNENTISAKLANQLCNAYAQLGARGTSILFASGDGGVSGSQSAHCSNFVPTFPSGCPFMTSVGATQGVSPETAAAFSSGGFSNVFGIPSYQASAVSGYLSALLSTNSGKFNRSGRGFPDVSTQGVDFQIVSGGQTIGVDGTSCASPTFASVISLVNDRLIAAGKSPLGFLNPFLYSSAGKAALNDVTSGSNPGCSTNGFPAKAGWDPVTGLGTPNFAKLLTAVGL

SEQ ID NO: 50252 - protein, 366 aa, Meripilus giganteus
AIPASCASTITPACLQAIYGIPTTKATQSSNKLAVSGFIDQFANKADLKSFLAQFRKDISSSTTFSLQTLDGGENDQSPSEAGIEANLDIQYTVGLATGVPTTFISVGDDFQDGNLEGFLDIINFLLGESNPPQVLTTSYGQNENTISAKLANQLCNAYAQLGARGTSILFASGDGGVSGSQSAHCSNFVPTFPSGCPFMTSVGATQGVSPETAAAFSSGGFSNVFGIPSYQASAVSGYLSALGSTNSGKFNRSGRGFPDVSTQGVDFQIVSGGQTIGVDGTSCASPTFASVISLVNDRLIAAGKLPLGFLNPFLYSSAGKAALNDVTSGSNPGCSTNGFPAKAGWDPVTGLGTPNFAKLLTAVGL

SEQ ID NO: 50253 - protein, 366 aa, Meripilus giganteus
AIPASCASTITPACLQAIYGIPTTKATQSSNKLAVSGFIDQFANKADLKSFLAQFRKDISSSTTFSLQTLDGGENDQSPSEAGIEANLDIQYTVGLATGVPTTFISVGDDFQDGNLEGFLDIINFLLGESNPPQVLTTSYGQNENTISAKLANQLCNAYAQLGARGTSILFASGDGGVSGSQSAHCSNFVPTFPSGCPFMTSVGATQGVSPETAAAFSSGGFSNVFGIPSYQASAVSGYLSALGSTNSGKFNRSGRGFPDVSTQGVDFQIVSGGQTIGVDGTSCASPTFASVTSLVNDRLIAAGKSPLGFLNPFLYSSAGKAALNDVTSGSNPGCSTNGFPAKAGWDPVTGLGTPNFAKLLTAVGL

SEQ ID NO: 50254 - protein, 366 aa, Meripilus giganteus
AIPASCASTITPACLQAIYGIPTTKATQSSNKLAVSGFIDQFANKADLKSFLAQFRKDISSSTTFSLQTLDGGENDQSPSEAGIEANLDIQYTVGLATGVPTTFISVGDDFQDGNLEGFLDIINFLLGESNPPQVLTTSYGQNENTISAKLANQLCNAYAQLGARGTSILFASGDGGVSGSQSAHCSNFVPTFPSGCPFMTSVGATQGVSPETAAAFSSGGFSNVFGIPSYQASAVSGYLSALGSTNSGKFKRSGRGFPDVSTQGVDFQIVSGGQTIGVDGTSCASPTFASVISLVNDRLIAAGKSPLGFLNPFLYSSAGKAALNDVTSGSNPGCSTNGFPAKAGWDPVTGLGTPNFAKLLTAVGL

SEQ ID NO: 50255 - protein, 366 aa, Meripilus giganteus
AIPASCASTITPACLQAIYGIPTTKATQSSNKLAVSGFIDQFANKADLKSFLAQFRKDISSSTTFSLQTLDGGENDQSPSEAGIEANLDIQYTVGLATGVPTTFISVGDDFQDGNLEGFLDIINFLLGESNPPQVLTTSYGQNENTISAKLANQLCNAYAQLGARGTSILFASGDGGVSGSQSAHCSNFVPTFPSGCPFMTSVGATQGVSPETAAAFSSGGFSNVFGIPSYQASAVSGYLSALGSTNSGKFNRSGRGFPDVSTQGVDFQIVSGGQTIGVDGTSCASPTFASVISLVNDRLIAAGKSPLGFLNPFLYSSAGKAALNDVTSGSNPGCSTNGFPAKAGWDPVTGLGTPNFALLLTAVGL

SEQ ID NO: 50256 - protein, 366 aa, Meripilus giganteus
AIPASCASTITPACLQAIYGIPTTKATQSSNKLAVSGFIDQFANKADLKSFLAQTRKDISSSTTFSLQTLDGGENDQSPSEAGIEANLDIQYTVGLATGVPTTFISVGDDFQDGNLEGFLDIINFLLGESNPPQVLTTSYGQNENTISAKLANQLCNAYAQLGARGTSILFASGDGGVSGSQSAHCSNFVPTFPSGCPFMTSVGATQGVSPETAAAFSSGGFSNVFGIPSYQASAVSGYLSALGSTNSGKFNRSGRGFPDVSTQGVDFQIVSGGQTIGVDGTSCASPTFASVISLVNDRLIAAGKSPLGFLNPFLYSSAGKAALNDVTSGSNPGCSTNGFPAKAGWDPVTGLGTPNFAKLLTAVGL

SEQ ID NO: 50257 - protein, 366 aa, Meripilus giganteus
AIPASCASTITPACLQAIYGIPTTKATQSSNKLAVSGFIDQFANKADLKSFLAQFRKDISSSTTFSLQTLDGGENDQSPSEAGIEANLDIQYTVGLATGVPTTFISVGDDFQDGNLEGFLDIINFLLGESNPPQVLTTSYGQNENTISAKLANQLCNAFAQLGARGTSILFASGDGGVSGSQSAHCSNFVPTFPSGCPFMTSVGATQGVSPETAAAFSSGGFSNVFGIPSYQASAVSGYLSALGSTNSGKFNRSGRGFPDVSTQGVDFQIVSGGQTIGVDGTSCASPTFASVISLVNDRLIAAGKSPLGFLNPFLYSSAGKAALNDVTSGSNPGCSTNGFPAKAGWDPVTGLGTPNFAKLLTAVGL

SEQ ID NO: 50258 - protein, 366 aa, Meripilus giganteus
AIPASCASTITPACLQAIYGIPTTKATQSSNKLAVSGFIDQFANKADLKSFLAQFRKDISSSTTFSLQTLDGGENDQSPSEAGIEANLDIQYTVGLATGVPTTFISVGDDFQDGNLEGFLDIINFLLGESNPPQVLTTSYGQNENTISAKLANQLCNAYAQLGARGTSILFASGDGGVSGSQSAHCSNFVPTFPSGCPFMTSVGATQGVSPETAAAFSSGGFSNVFGIPSYQASAVSGYLSALGSTNSGKFNRSGRGFPDVSTQGSDFQIVSGGQTIGVDGTSCASPTFASVISLVNDRLIAAGKSPLGFLNPFLYSSAGKAALNDVTSGSNPGCSTNGFPAKAGWDPVTGLGTPNFAKLLTAVGL

SEQ ID NO: 50259 - protein, 366 aa, Meripilus giganteus
AIPASCASTITPACLQAIYGIPTTKATQSSNKLAVSGFIDQFANKADLKSFLAQFRKDISSSTTFSLQTLDGGENDQSPSEAGIEANLDIQYTVGLATGVPTTFISVGDDFQDGNLEGFLDIINFLLGESNPPQVLTTSYGQNENTISAKLANQLCNAYAQLGARGTSILFASGDGGVSGSQSAHCSNFVPTFPSGCPFMTSVGATQGVSPETAAAFSSGGFSNVFGIPSYQASAVSGYLSALGSTNSGKFNRSGRGFPDVSTQGVDFQIVSGGQTIGVDGTSCASPTFASVISLVNDRLIAAGKSPLGFLNPFLYSSAGKAALNDVTSGSNPGCGTNGFPAKAGWDPVTGLGTPNFAKLLTAVGL

SEQ ID NO: 50260 - protein, 366 aa, Meripilus giganteus
AIPASCASTITPACLQAIYGIPTTKATQSSNKLAVSGFIDQFANKADLKTFLAQFRKDISSSTTFSLQTLDGGENDQSPSEAGIEANLDIQYTVGLATGVPTTFISVGDDFQDGNLEGFLDIINFLLGESNPPQVLTTSYGQNENTISAKLANQLCNAYAQLGARGTSILFASGDGGVSGSQSAHCSNFVPTFPSGCPFMTSVGATQGVSPETAAAFSSGGFSNVFGIPSYQASAVSGYLSALGSTNSGKFNRSGRGFPDVSTQGVDFQIVSGGQTIGVDGTSCASPTFASVISLVNDRLIAAGKSPLGFLNPFLYSSAGKAALNDVTSGSNPGCSTNGFPAKAGWDPVTGLGTPNFAKLLTAVGL

SEQ ID NO: 50261 - protein, 366 aa, Meripilus giganteus
AIPASCASTITPACLQAIYGIPTTKATQSSNKLAVSGFIDQFANKADLKSFLAQFRKDISSSTTFSLQTLDGGENDQSPSEAGIEANLDIQYTVGLATGVPTTFISVGDDFHDGNLEGFLDIINFLLGESNPPQVLTTSYGQNENTISAKLANQLCNAYAQLGARGTSILFASGDGGVSGSQSAHCSNFVPTFPSGCPFMTSVGATQGVSPETAAAFSSGGFSNVFGIPSYQASAVSGYLSALGSTNSGKFNRSGRGFPDVSTQGVDFQIVSGGQTIGVDGTSCASPTFASVISLVNDRLIAAGKSPLGFLNPFLYSSAGKAALNDVTSGSNPGCSTNGFPAKAGWDPVTGLGTPNFAKLLTAVGL

SEQ ID NO: 50262 - protein, 366 aa, Meripilus giganteus
AIPASCASTITPACLQAIYGIPTTKATQSSNKLAVSGFIDQFANKADLKSFLAQFRKDISSSTTFSLQTLDGGENDQSPSEAGIEANLDIQYTVGLATGVPTTFISVGDDFQDGNLEGFLDIINLLLGESNPPQVLTTSYGQNENTISAKLANQLCNAYAQLGARGTSILFASGDGGVSGSQSAHCSNFVPTFPSGCPFMTSVGATQGVSPETAAAFSSGGFSNVFGIPSYQASAVSGYLSALGSTNSGKFNRSGRGFPDVSTQGVDFQIVSGGQTIGVDGTSCASPTFASVISLVNDRLIAAGKSPLGFLNPFLYSSAGKAALNDVTSGSNPGCSTNGFPAKAGWDPVTGLGTPNFAKLLTAVGL

SEQ ID NO: 50263 - protein, 366 aa, Meripilus giganteus
AIPASCASTITPACLQAIYGIPTTKATQSSNKLAVSGFIDQFANKADLKSFLAQFRKDISSVTTFSLQTLDGGENDQSPSEAGIEANLDIQYTVGLATGVPTTFISVGDDFQDGNLEGFLDIINFLLGESNPPQVLTTSYGQNENTISAKLANQLCNAYAQLGARGTSILFASGDGGVSGSQSAHCSNFVPTFPSGCPFMTSVGATQGVSPETAAAFSSGGFSNVFGIPSYQASAVSGYLSALGSTNSGKFNRSGRGFPDVSTQGVDFQIVSGGQTIGVDGTSCASPTFASVISLVNDRLIAAGKSPLGFLNPFLYSSAGKAALNDVTSGSNPGCSTNGFPAKAGWDPVTGLGTPNFAKLLTAVGL

SEQ ID NO: 50264 - protein, 366 aa, Meripilus giganteus
AIPASCASTITPACLQAIYGIPTTKATQSSNKLAVSGFIDQFANKADLKSFLAQFRKDISSSTTFSLQTLDGGENDQSPSEAGIEANLDIQYTVGLATGVPTTFISVGDDFQDGNLEGFLDIINFLLGESNPPQVLTTSYGQNENTISAKLANQLCNAYAQLGARGTSILFASGDGGVSGSQSAHCSNFVPTFPSGCPFMTSVGATQGVSPETAAAFSSGGFSNVFGIPSYQASAVSGYLSALGSTNSGKFNRSGRGFPDVSTQGVDFQIVSGGQTIGVDGTSCASPTFASVISLANDRLIAAGKSPLGFLNPFLYSSAGKAALNDVTSGSNPGCSTNGFPAKAGWDPVTGLGTPNFAKLLTAVGL

SEQ ID NO: 50265 - protein, 366 aa, Meripilus giganteus
AIPASCASTITPACLQAIYGIPTTKATQSSNKLAVSGFIDQFANKADLKSFLAQFRKDISSSTTFSLQTLDGGENDQSPSEAGIEANLDIQYTVGLATGVPTTFISVGDDFQDGNLEGFLDIINFLLGESNPPQVLTTSYGQNENTISAKLANQLCNAYAQLGARGTSILFASGDGGVSGSQSAHCSNFVPTFPSGCPFMTSVGATQGVSPETAAAFSSGGFSNVFGIPSYQASAVSGYLSALGSTNSGKFNRSGRGFPDVSTQGVDFQIVSGGQTIGVDGTSCASPTFASVISLVNDRLIAAGKSPLGFLNPFLYSSAGKAALNDVTSGSNPGCSTNGFPAKAGWDPVTGLGTPNFAKLETAVGL

SEQ ID NO: 50266 - protein, 366 aa, Meripilus giganteus
AIPASCASTITPACLQAIYGIPTTKATQSSNKLAVSGFIDQFANKADLKSFLAQFRKDISSSTTFSLQTLDGGENDQSPSEAGIEANLDIQYTVGLATGVPTTFISVGDDFQDGNLEGFLDIINFLLGESNPPQVLTTSYGQNENTISAKLANQLCNAYAQLGARGTSILFASGDGGVSGSQSAHCSNFVPTFPSGCPFMTSVGATQGVSPETAAAFSSGGFSNVFGIPSYQASAVSGYLSALGSTNSGKFNRSGRGFPDVSTQGVDFQIVSGGQTIGVDGTSCASPTFASVISLVNDRLIAAGKSPLGFLNPFLYSSAGKAALNDVTSGSNPGCSTNGFPAKAGWDPVTGLGTPNFAKLLTAIGL

SEQ ID NO: 50267 - protein, 366 aa, Meripilus giganteus
AIPASCASTITPACLQAIYGIPTTKATQSSNKLAVSGFIDQFANKADLKSFLAQFRKDISSSTTFSLQTLDGGENDQSPSEAGIEANLDIQYTVGLATGVPTTFISVGDDFQDGNLEGFLDIINFLLGESNPPQVLTTSYGQNENTISAKLANQLCNAYAQLGARGWSILFASGDGGVSGSQSAHCSNFVPTFPSGCPFMTSVGATQGVSPETAAAFSSGGFSNVFGIPSYQASAVSGYLSALGSTNSGKFNRSGRGFPDVSTQGVDFQIVSGGQTIGVDGTSCASPTFASVISLVNDRLIAAGKSPLGFLNPFLYSSAGKAALNDVTSGSNPGCSTNGFPAKAGWDPVTGLGTPNFAKLLTAVGL

SEQ ID NO: 50268 - protein, 366 aa, Meripilus giganteus
AIPASCASTITPACLQAIYGIPTTKATQSSNKLAVSGFIYQFANKADLKSFLAQFRKDISSSTTFSLQTLDGGENDQSPSEAGIEANLDIQYTVGLATGVPTTFISVGDDFQDGNLEGFLDIINFLLGESNPPQVLTTSYGQNENTISAKLANQLCNAYAQLGARGTSILFASGDGGVSGSQSAHCSNFVPTFPSGCPFMTSVGATQGVSPETAAAFSSGGFSNVFGIPSYQASAVSGYLSALGSTNSGKFNRSGRGFPDVSTQGVDFQIVSGGQTIGVDGTSCASPTFASVISLVNDRLIAAGKSPLGFLNPFLYSSAGKAALNDVTSGSNPGCSTNGFPAKAGWDPVTGLGTPNFAKLLTAVGL

SEQ ID NO: 50269 - protein, 366 aa, Meripilus giganteus
AIPASCASTITPACLQAIYGIPTTKATQSSNKLAVSGFIDQFANKADLKSFLAQFRKDISSSTTFSLQTLDGGENDQSPSEAGIEANLDIQYTVGLATGVPTTFISVGDDFQDGNLEGFLDIINFLLGESNPPQVLTTSYGQNENTISAKLANQLCNAYAQLGARGTSILFASGDGGVSGSQSAHCSNFVPTFPSGCPFMTSVGATQGVSPETAAAFSSGGFSNVFGIPSYQASAVSGYLSALGSTNSGKFNRSGRGFPDVSTQGVDFQIVSGGQTIGVDGTSCASPTFASVISLVNDRLIAAGYSPLGFLNPFLYSSAGKAALNDVTSGSNPGCSTNGFPAKAGWDPVTGLGTPNFAKLLTAVGL

SEQ ID NO: 50270 - protein, 366 aa, Meripilus giganteus
AIPASCASTITPACLQAIYGIPTTKATQSSNKLAVSGFIDQFANKADLKSFLAQFRLDISSSTTFSLQTLDGGENDQSPSEAGIEANLDIQYTVGLATGVPTTFISVGDDFQDGNLEGFLDIINFLLGESNPPQVLTTSYGQNENTISAKLANQLCNAYAQLGARGTSILFASGDGGVSGSQSAHCSNFVPTFPSGCPFMTSVGATQGVSPETAAAFSSGGFSNVFGIPSYQASAVSGYLSALGSTNSGKFNRSGRGFPDVSTQGVDFQIVSGGQTIGVDGTSCASPTFASVISLVNDRLIAAGKSPLGFLNPFLYSSAGKAALNDVTSGSNPGCSTNGFPAKAGWDPVTGLGTPNFAKLLTAVGL

SEQ ID NO: 50271 - protein, 366 aa, Meripilus giganteus
AIPASCASTITPACLQAIYGIPTTKATQSSNKLAVSGFIDQFANKADLKSFLAQFRKDISSSTTFSLQTLDGGENDQSPSEAGIEANLDIQYTVGLATGVPTTFISVGDDFQDGNLEGFLDLINFLLGESNPPQVLTTSYGQNENTISAKLANQLCNAYAQLGARGTSILFASGDGGVSGSQSAHCSNFVPTFPSGCPFMTSVGATQGVSPETAAAFSSGGFSNVFGIPSYQASAVSGYLSALGSTNSGKFNRSGRGFPDVSTQGVDFQIVSGGQTIGVDGTSCASPTFASVISLVNDRLIAAGKSPLGFLNPFLYSSAGKAALNDVTSGSNPGCSTNGFPAKAGWDPVTGLGTPNFAKLLTAVGL

SEQ ID NO: 50272 - protein, 366 aa, Meripilus giganteus
AIPASCASTITPACLQAIYGIPTTKATQSSNKLAVSGFIDQFANKADLKSFLAQFRKDISSSTTFSLQTLDGGENDQSPSEAGIEANLDIQYTVGLATGVPTTFISVGDDFQDGNLEGFLDIINFLLGESNPPQVLTTSYGQNENTISAKLALQLCNAYAQLGARGTSILFASGDGGVSGSQSAHCSNFVPTFPSGCPFMTSVGATQGVSPETAAAFSSGGFSNVFGIPSYQASAVSGYLSALGSTNSGKFNRSGRGFPDVSTQGVDFQIVSGGQTIGVDGTSCASPTFASVISLVNDRLIAAGKSPLGFLNPFLYSSAGKAALNDVTSGSNPGCSTNGFPAKAGWDPVTGLGTPNFAKLLTAVGL

SEQ ID NO: 50273 - protein, 366 aa, Meripilus giganteus
AIPASCASTITPACLQAIYGIPTTKATQSSNKLAVSGFIDQFANKADLKSFLAQFRKDISSSTTFSLQTLDGGENDQSPSEAGIEANLDIQYTVGLATGVPTTFISVGDDFQDGNLEGFLDIINFLLGESNPPQVLTTSYGQNENTISAKLANQLCNAYAQLGARGTSILFASGDGGVSGSQSAHCSNFVPTFPSGCPFMTSVGATQGVSPETAAAFSSGGFSNVFGIPSYQASAVSGYLSALGSTNSGKFNRSGRGFPDVSTQGVDFQIVSGGQTIGVDGTSCASPVFASVISLVNDRLIAAGKSPLGFLNPFLYSSAGKAALNDVTSGSNPGCSTNGFPAKAGWDPVTGLGTPNFAKLLTAVGL

SEQ ID NO: 50274 - protein, 366 aa, Meripilus giganteus
AIPASCASTITPACLQAIYGIPTTKATQSSNKLAVSGFIDQFANKADLKSFLAQFRKDISSSTTFSLQTLDGGENDQSPSEAGIEANLDIQYTVGLATGVPTTFISVGDDFQDGNLEGFLDIINFLLGESNPPQVLTTSYGQNENTISAKLANQLCNAYAQLGARGTSILFASGDGGVSGSQSAHCSNFVPTFPSGCPFMTSVGATFGVSPETAAAFSSGGFSNVFGIPSYQASAVSGYLSALGSTNSGKFNRSGRGFPDVSTQGVDFQIVSGGQTIGVDGTSCASPTFASVISLVNDRLIAAGKSPLGFLNPFLYSSAGKAALNDVTSGSNPGCSTNGFPAKAGWDPVTGLGTPNFAKLLTAVGL

SEQ ID NO: 50275 - protein, 366 aa, Meripilus giganteus
AIPASCASTITPACLQAIYGIPTTKATQSSNKLAVSGFIDQFANKADLKSFLEQFRKDISSSTTFSLQTLDGGENDQSPSEAGIEANLDIQYTVGLATGVPTTFISVGDDFQDGNLEGFLDIINFLLGESNPPQVLTTSYGQNENTISAKLANQLCNAYAQLGARGTSILFASGDGGVSGSQSAHCSNFVPTFPSGCPFMTSVGATQGVSPETAAAFSSGGFSNVFGIPSYQASAVSGYLSALGSTNSGKFNRSGRGFPDVSTQGVDFQIVSGGQTIGVDGTSCASPTFASVISLVNDRLIAAGKSPLGFLNPFLYSSAGKAALNDVTSGSNPGCSTNGFPAKAGWDPVTGLGTPNFAKLLTAVGL

SEQ ID NO: 50276 - protein, 366 aa, Meripilus giganteus
AIPASCASTITPACLQAIYGIPTTKATQSSNKLAVSGFIDQFANKADLKSFLAQFRKDISSSTTFSLQTLDGGENDQSPSEAGIEANLDIQYTVGLATGVPTTFISVGDDFQDGNLEGFLDIINFLLGESNPPQVLTTSYGQNENTISAKLANQLCNAYAQLGARGTSILFASGDGGVSGSQSAHCSNFVPTFPSGCPFMTSVGATQGVSPETAAAFSSGGFSNVFGIPSYQASAVSGYLSALGSTNSGKFNRSGRGFPDVSTQGVDFQIVSGGQTIGVDGTSCASPTFASVISLVNDRLIAAGKSPLGFLNPFLYSSAGKAAQNDVTSGSNPGCSTNGFPAKAGWDPVTGLGTPNFAKLLTAVGL

SEQ ID NO: 50277 - protein, 366 aa, Meripilus giganteus
AIPASCASTITPACLQAIYGIPTTKATQSSNKLAVSGFIDQFANKADLKSFLAQFRKDISSSTTFSLQTLDGGENDQSPSEAGIEANLDIQYTVGLATGVPTTFISVGDDFQDGNLEGFLDIINFLLGESNPPQVLTTSYGQNENTISAKLANQLCNAYAQLGARGTSILFASGDGGVSGSQSAHCSNFVPTFPSGCPFMTSVGATQGVSPETAAAFSSGGFSNVFGIPSYQASAVSGYLSALGSTNSGKFNRSGRGFPDVSTQGVDFQIVSGGQTIGVDGTSCASPTFASVISLVNDRLIAAGKSPLGFLNPFLYSSAGKAALNDVTSGSNPGCSTNGFPAKASWDPVTGLGTPNFAKLLTAVGL

SEQ ID NO: 50278 - protein, 366 aa, Meripilus giganteus
AIPASCASTITPACLQAIYGIPTTKATQSSNKLAVSGFIDQFANKADLKSFLAQFRKDMSSSTTFSLQTLDGGENDQSPSEAGIEANLDIQYTVGLATGVPTTFISVGDDFQDGNLEGFLDIINFLLGESNPPQVLTTSYGQNENTISAKLANQLCNAYAQLGARGTSILFASGDGGVSGSQSAHCSNFVPTFPSGCPFMTSVGATQGVSPETAAAFSSGGFSNVFGIPSYQASAVSGYLSALGSTNSGKFNRSGRGFPDVSTQGVDFQIVSGGQTIGVDGTSCASPTFASVISLVNDRLIAAGKSPLGFLNPFLYSSAGKAALNDVTSGSNPGCSTNGFPAKAGWDPVTGLGTPNFAKLLTAVGL

SEQ ID NO: 50279 - protein, 366 aa, Meripilus giganteus
AIPASCASTITPACLQAIYGIPTTKATQSSNKLAVSGFIDQFANKADLKSFLAQFRKDISSSTTFSLQTLDGGENDQSPSEAGIEANLDIQYTVGLATGVPTTFISVGDDFQDGNLEGFLDIINFLLGESNPPQVLTTSYGQNENTISAKLANQLCNAYAQLGARGTSILFASGDGGVSGSQSAHCSNFVPTFPSGCPFMTSVGATQGVSPETAAAFSSGGFSNYFGIPSYQASAVSGYLSALGSTNSGKFNRSGRGFPDVSTQGVDFQIVSGGQTIGVDGTSCASPTFASVISLVNDRLIAAGKSPLGFLNPFLYSSAGKAALNDVTSGSNPGCSTNGFPAKAGWDPVTGLGTPNFAKLLTAVGL

SEQ ID NO: 50280 - protein, 366 aa, Meripilus giganteus
AIPASCASTITPACLQAIYGIPTTKATQSSNKLAVSGFIDQFANKADLKSFLAQFRKDISSSTTFSLQTLDGGENDQSPSEAGIEANLDIQYTVGLATGVPTTFISVGDDFQDGNLEGFLDIINFLLRESNPPQVLTTSYGQNENTISAKLANQLCNAYAQLGARGTSILFASGDGGVSGSQSAHCSNFVPTFPSGCPFMTSVGATQGVSPETAAAFSSGGFSNVFGIPSYQASAVSGYLSALGSTNSGKFNRSGRGFPDVSTQGVDFQIVSGGQTIGVDGTSCASPTFASVISLVNDRLIAAGKSPLGFLNPFLYSSAGKAALNDVTSGSNPGCSTNGFPAKAGWDPVTGLGTPNFAKLLTAVGL

SEQ ID NO: 50281 - protein, 366 aa, Meripilus giganteus
AIPASCASTITPACLQAIYGIPTTKATQSSNKLAVSGFIDQFANKADLKSFLAQFRKDISSSTTFSLQTLDGGENLQSPSEAGIEANLDIQYTVGLATGVPTTFISVGDDFQDGNLEGFLDIINFLLGESNPPQVLTTSYGQNENTISAKLANQLCNAYAQLGARGTSILFASGDGGVSGSQSAHCSNFVPTFPSGCPFMTSVGATQGVSPETAAAFSSGGFSNVFGIPSYQASAVSGYLSALGSTNSGKFNRSGRGFPDVSTQGVDFQIVSGGQTIGVDGTSCASPTFASVISLVNDRLIAAGKSPLGFLNPFLYSSAGKAALNDVTSGSNPGCSTNGFPAKAGWDPVTGLGTPNFAKLLTAVGL

SEQ ID NO: 50282 - protein, 366 aa, Meripilus giganteus
AIPASCASTITPACLQAIYGIPTTKATQSSNKLAVSGFIDQFANKADLKSFLAQFRKDISSSTTFSLQTLDGGENDQSPSEAGIEANLDIQYTVGLATGVPTTFISVGDDFQDGNLEGFLDIINFLLGESNPPQVLTTSYGQNENTISAKLANQLCNAYAQLGARGTSILFASGDGGVSGSQSAHCSNFVPTFPSGCPFMTSVGATQGVEPETAAAFSSGGFSNVFGIPSYQASAVSGYLSALGSTNSGKFNRSGRGFPDVSTQGVDFQIVSGGQTIGVDGTSCASPTFASVISLVNDRLIAAGKSPLGFLNPFLYSSAGKAALNDVTSGSNPGCSTNGFPAKAGWDPVTGLGTPNFAKLLTAVGL

SEQ ID NO: 50283 - protein, 366 aa, Meripilus giganteus
AIPASCASTITPACLQAIYGIPTTKATQSSNKLAVSGFIDQFANKADLKSFLAQFRKDISSSTTFSLQTLDGGENDQSPSEAGIEANLDIQYTVGLATGVPTTFISVGDDFQDGNLEGFLDIINFLLGESNPPQVLTTSYGQNENTISAKLANQLCNAYAQLGARGTSILFASGDGGVSGSQSAHCSNFVPTFPSGCPFMTSVGATQGVSPETAAAFSSGGFSNVFGIPSYQASAVSGYLSALGSTNSGKFNRSGRGFPDVSTQGVDFQIVSGGQTIGVDGTSCASPTFASVISLVNDRLIAAGKSPLGFLNPFLYSRAGKAALNDVTSGSNPGCSTNGFPAKAGWDPVTGLGTPNFAKLLTAVGL

SEQ ID NO: 50284 - protein, 366 aa, Meripilus giganteus
AIPASCASTITPACLQAIYGIPTTKATQSSNKLAVSGFIDQFANKADLKSFLAQFRKDISSSTTFSLQTLDGGENDQSPSEAGIEANLDIQYTVGLATGVPTTFISVGDDFQDGNLEGFLDIIDFLLGESNPPQVLTTSYGQNENTISAKLANQLCNAYAQLGARGTSILFASGDGGVSGSQSAHCSNFVPTFPSGCPFMTSVGATQGVSPETAAAFSSGGFSNVFGIPSYQASAVSGYLSALGSTNSGKFNRSGRGFPDVSTQGVDFQIVSGGQTIGVDGTSCASPTFASVISLVNDRLIAAGKSPLGFLNPFLYSSAGKAALNDVTSGSNPGCSTNGFPAKAGWDPVTGLGTPNFAKLLTAVGL

SEQ ID NO: 50285 - protein, 366 aa, Meripilus giganteus
AIPASCASTITPACLQAIYGIPTTKATQSSNKLAVSGFIDVFANKADLKSFLAQFRKDISSSTTFSLQTLDGGENDQSPSEAGIEANLDIQYTVGLATGVPTTFISVGDDFQDGNLEGFLDIINFLLGESNPPQVLTTSYGQNENTISAKLANQLCNAYAQLGARGTSILFASGDGGVSGSQSAHCSNFVPTFPSGCPFMTSVGATQGVSPETAAAFSSGGFSNVFGIPSYQASAVSGYLSALGSTNSGKFNRSGRGFPDVSTQGVDFQIVSGGQTIGVDGTSCASPTFASVISLVNDRLIAAGKSPLGFLNPFLYSSAGKAALNDVTSGSNPGCSTNGFPAKAGWDPVTGLGTPNFAKLLTAVGL

SEQ ID NO: 50286 - protein, 366 aa, Meripilus giganteus
AIPASCASTITPACLQAIYGIPTTKATQSSNKLAVSGFIDQFANKADLKSFLAQFRKDISSSTTFSLQTLDGGENDQSPSEAGIEANLDIQYTVGLATGVPTTFISVGDDFQDGNLEGFLDIINFLLGESNPPQVLTTSYGQNENTISAKLANQLCNAYAQLGARGTSILFASGDGGVSGSQSAHCSNFVPTFPSGCPFMTSVGATQGVSPETAAAFSSGGFSNVFGIPSYQASAVSGYLSALGSTNSGKFNRSGRGFPDASTQGVDFQIVSGGQTIGVDGTSCASPTFASVISLVNDRLIAAGKSPLGFLNPFLYSSAGKAALNDVTSGSNPGCSTNGFPAKAGWDPVTGLGTPNFAKLLTAVGL

SEQ ID NO: 50287 - protein, 366 aa, Meripilus giganteus
AIPASCASTITPACLQAIYGIPTTKATQSSNKLAVSGFIDQFANKADLKSFLAQFRKDISSSTTFSLQTLDGGENDQSPSEAGIEANLDIQYTVGLATGVPTTFISVGDDFQDGNLEGFLDIINFLLGESNPPQVLTTSYGQNENTISAKLANQLCNAYAQLGARGTSILFASGDGGVSGSQSAHCSNFVPTFPSGCPFMTSVGATQGVSPETAAAFSSGGFSNVFGIPSYQASAVSGYLSALGSTNSGKFNRSGRGFPDVSTQGVDFQIVSGGQTIGVDGTSCASPTFASVISLVNDRLIAAGKSPLGFLNPFLYSSAGKAALNDVTSGSNPGCSTNGFPAHAGWDPVTGLGTPNFAKLLTAVGL

SEQ ID NO: 50288 - protein, 366 aa, Meripilus giganteus
AIPASCASTITPACLQAIYGIPTTKATQSSNKLAVSGFIDQFANKADLKSFLAQFRKDISSSTTFSLQTLDGGENDQSPSEAGIEANLDIQYTVGLATGVPTTFISVGDDFQDGNLEGFLDIINFLLGESNPPQVLTTSYGQNENTISAKLANQLCNAYAQLGARGTSILFASGDGGVSGSQSAHCSNFVPTFPSGCPFMTSVGATQGVSPETAAAFSSGGFSNVFGIPSYQASAVSGYLSALNSTNSGKFNRSGRGFPDVSTQGVDFQIVSGGQTIGVDGTSCASPTFASVISLVNDRLIAAGKSPLGFLNPFLYSSAGKAALNDVTSGSNPGCSTNGFPAKAGWDPVTGLGTPNFAKLLTAVGL

SEQ ID NO: 50289 - protein, 366 aa, Meripilus giganteus
AIPASCASTITPACLQAIYGIPTTKATQSSNKLAVSGFIDQFANKADLKSFLAQFRKDISSSTTFSLQTLDGGENDQSPSEAGIEANLDIQYTVGLATGVPTTFISVGDDFQDGNLEGFLDIINFLLGESNPPQVLTTSYGQNENTISAKLANQLCNAYAQLGARGTSILFASGDGGVSGSQSAHCSNFVPTFPSGCPFMTSVGATQGVSPETAAAFSSGGFSNVFGIPSYQASAVSGYLSALGSTNSGKFNRSGRGFPDVSTQGVDFQIVSGGQTIGVDGTSCASPTFASVISLLNDRLIAAGKSPLGFLNPFLYSSAGKAALNDVTSGSNPGCSTNGFPAKAGWDPVTGLGTPNFAKLLTAVGL

SEQ ID NO: 50290 - protein, 366 aa, Meripilus giganteus
AIPASCASTITPACLQAIYGIPTTKATQSSNKLAVSGFIDQFANKADLKSFLAQFRKDISSSTTFSLQTLDGGENDQSPSEAGIEANLDIQYTVGLATGVPTTFISVGDDFQDGNLEGFLDIINFLLGESNPPQVLTTSYGQNENTISAKLAPQLCNAYAQLGARGTSILFASGDGGVSGSQSAHCSNFVPTFPSGCPFMTSVGATQGVSPETAAAFSSGGFSNVFGIPSYQASAVSGYLSALGSTNSGKFNRSGRGFPDVSTQGVDFQIVSGGQTIGVDGTSCASPTFASVISLVNDRLIAAGKSPLGFLNPFLYSSAGKAALNDVTSGSNPGCSTNGFPAKAGWDPVTGLGTPNFAKLLTAVGL

SEQ ID NO: 50291 - protein, 366 aa, Meripilus giganteus
AIPASCASTITPACLQAIYGIPTTKATQSSNKLAVSGFIDQFANKADLKSFLAQFRKDISSSTTFSLQTLDGGENDQSPSEAGIEANLDIQYTVGLATGVPTTFISVGDDFQDGNLEGFLDIINFLLGESNPPQVLTTSYGQNENTISAKLANQLCNAYAQLGARGTSILFASGDGGVSGSQSAHCSNFVPTFPSGCPFMTSVGATQGVSPETAAAFSSGGFSNVFGIPSYQASAVSGYLSALGSTNSGKFNRSGRGFPDVSTQGVDFQIVSGGQTIGVDGTSCASPTFASVISLRNDRLIAAGKSPLGFLNPFLYSSAGKAALNDVTSGSNPGCSTNGFPAKAGWDPVTGLGTPNFAKLLTAVGL

SEQ ID NO: 50292 - protein, 366 aa, Meripilus giganteus
AIPASCASTITPACLQAIYGIPTTKATQSSNKLAVSGFIDQFANKADLKSFLAQFRKDISSSTTFFLQTLDGGENDQSPSEAGIEANLDIQYTVGLATGVPTTFISVGDDFQDGNLEGFLDIINFLLGESNPPQVLTTSYGQNENTISAKLANQLCNAYAQLGARGTSILFASGDGGVSGSQSAHCSNFVPTFPSGCPFMTSVGATQGVSPETAAAFSSGGFSNVFGIPSYQASAVSGYLSALGSTNSGKFNRSGRGFPDVSTQGVDFQIVSGGQTIGVDGTSCASPTFASVISLVNDRLIAAGKSPLGFLNPFLYSSAGKAALNDVTSGSNPGCSTNGFPAKAGWDPVTGLGTPNFAKLLTAVGL

SEQ ID NO: 50293 - protein, 366 aa, Meripilus giganteus
AIPASCASTITPACLQAIYGIPTTKATQSSNKLAVSGFIDQFANKADLKSFLAQFRKDISSSTTFSLQTLDGGENDQSPSEAGIEANLDIQYTVGLATGVPTTFISVGDDFQDGNLEGFLDIINFLLNESNPPQVLTTSYGQNENTISAKLANQLCNAYAQLGARGTSILFASGDGGVSGSQSAHCSNFVPTFPSGCPFMTSVGATQGVSPETAAAFSSGGFSNVFGIPSYQASAVSGYLSALGSTNSGKFNRSGRGFPDVSTQGVDFQIVSGGQTIGVDGTSCASPTFASVISLVNDRLIAAGKSPLGFLNPFLYSSAGKAALNDVTSGSNPGCSTNGFPAKAGWDPVTGLGTPNFAKLLTAVGL

SEQ ID NO: 50294 - protein, 366 aa, Meripilus giganteus
AIPASCASTITPACLQAIYGIPTTKATQSSNKLAVSGFIDQFANKADLKSFLAQFRKDISSSTTFSLQTLDGGENDQSPSEAGIEANLDIQYTVGLATGVPTTFISVGDDFQDGNLEGFLDIINFLLGEINPPQVLTTSYGQNENTISAKLANQLCNAYAQLGARGTSILFASGDGGVSGSQSAHCSNFVPTFPSGCPFMTSVGATQGVSPETAAAFSSGGFSNVFGIPSYQASAVSGYLSALGSTNSGKFNRSGRGFPDVSTQGVDFQIVSGGQTIGVDGTSCASPTFASVISLVNDRLIAAGKSPLGFLNPFLYSSAGKAALNDVTSGSNPGCSTNGFPAKAGWDPVTGLGTPNFAKLLTAVGL

SEQ ID NO: 50295 - protein, 366 aa, Meripilus giganteus
AIPASCASTITPACLQAIYGIPTTKATQSSNKLAVSGFIDQFANKADLKSFLAQFRKDISSSTTFSLQTLDGGENDQSPSEAGIEASLDIQYTVGLATGVPTTFISVGDDFQDGNLEGFLDIINFLLGESNPPQVLTTSYGQNENTISAKLANQLCNAYAQLGARGTSILFASGDGGVSGSQSAHCSNFVPTFPSGCPFMTSVGATQGVSPETAAAFSSGGFSNVFGIPSYQASAVSGYLSALGSTNSGKFNRSGRGFPDVSTQGVDFQIVSGGQTIGVDGTSCASPTFASVISLVNDRLIAAGKSPLGFLNPFLYSSAGKAALNDVTSGSNPGCSTNGFPAKAGWDPVTGLGTPNFAKLLTAVGL

SEQ ID NO: 50296 - protein, 366 aa, Meripilus giganteus
AIPASCASTITPACLQAIYGIPTTKATQSSNKLAVSGFIDQFANKADLKSFLAQFRKDISSSTTFSLQTLDGGENDQSPSEAGIEANLDIQYTVGLATGVPTTFISVGDDFQDGNLEGFLDIINFLLGESNPPQVLTTSYGQNENTISAKLANQLCNAYAQLGARGTSILFASGDGGVSGSQSAHCSNFVPTFPSGCPFMTSVGATQGVSPETAAAFSSGGFSNVFGIPSYQASAVSGYLSALGSTNSGKFNRSGRGFPDVSTQGVDFQIVSGGQTIGVDGTSCASPTFASVISLVNDRLIAAGKSPLGFLNPFLYSSAGKAALNDVTSGSNPGCNTNGFPAKAGWDPVTGLGTPNFAKLLTAVGL

SEQ ID NO: 50297 - protein, 366 aa, Meripilus giganteus
AIPASCASTITPACLQAIYGIPTTKATQSSNKLAVSGFIDQFANKADLKSFLAQFRKDISSSTTFSLQTLDGGENDQSPSEAGIEANLDIQYTVGLATGVPTTFISVGDDFQDGNLEGFLDIINFLLAESNPPQVLTTSYGQNENTISAKLANQLCNAYAQLGARGTSILFASGDGGVSGSQSAHCSNFVPTFPSGCPFMTSVGATQGVSPETAAAFSSGGFSNVFGIPSYQASAVSGYLSALGSTNSGKFNRSGRGFPDVSTQGVDFQIVSGGQTIGVDGTSCASPTFASVISLVNDRLIAAGKSPLGFLNPFLYSSAGKAALNDVTSGSNPGCSTNGFPAKAGWDPVTGLGTPNFAKLLTAVGL

SEQ ID NO: 50298 - protein, 366 aa, Meripilus giganteus
AIPASCASTITPACLQAIYGIPTTKATQSSNKLAVSGFIDQFANKADLKSFLAQFRKDISSSTTFSLQTLDGGENDQSPSEAGIEANLDIQYTVGLATGVPTTFISVGDDFQDGNLEGFLDIINFLLGESNPPQVLTTSYGQNENTISAKLARQLCNAYAQLGARGTSILFASGDGGVSGSQSAHCSNFVPTFPSGCPFMTSVGATQGVSPETAAAFSSGGFSNVFGIPSYQASAVSGYLSALGSTNSGKFNRSGRGFPDVSTQGVDFQIVSGGQTIGVDGTSCASPTFASVISLVNDRLIAAGKSPLGFLNPFLYSSAGKAALNDVTSGSNPGCSTNGFPAKAGWDPVTGLGTPNFAKLLTAVGL

SEQ ID NO: 50299 - protein, 366 aa, Meripilus giganteus
AIPASCASTITPACLQAIYGIPTTKATQSSNKLAVSGFIDQFANKADLKSFLAQFRKDISSSTTFSLQTLDGGENDQSPSEAGIEANLDIQYTVGLATGVPTTFISVGDDFQDGNLEGFLDIINFLLGESNPPQVLTTSYGQNENTISAKLANQLCMAYAQLGARGTSILFASGDGGVSGSQSAHCSNFVPTFPSGCPFMTSVGATQGVSPETAAAFSSGGFSNVFGIPSYQASAVSGYLSALGSTNSGKFNRSGRGFPDVSTQGVDFQIVSGGQTIGVDGTSCASPTFASVISLVNDRLIAAGKSPLGFLNPFLYSSAGKAALNDVTSGSNPGCSTNGFPAKAGWDPVTGLGTPNFAKLLTAVGL

SEQ ID NO: 50300 - protein, 366 aa, Meripilus giganteus
AIPASCASTITPACLQAIYGIPTTKATQSSNKLAVSGFIDQFANKADLKSFLAQFRKDISSSTTFSLQTLDGGENDQSPSEAGIEANLDIQYTVGLATGVPTTFISVGDDFQDGNLEGFLDIANFLLGESNPPQVLTTSYGQNENTISAKLANQLCNAYAQLGARGTSILFASGDGGVSGSQSAHCSNFVPTFPSGCPFMTSVGATQGVSPETAAAFSSGGFSNVFGIPSYQASAVSGYLSALGSTNSGKFNRSGRGFPDVSTQGVDFQIVSGGQTIGVDGTSCASPTFASVISLVNDRLIAAGKSPLGFLNPFLYSSAGKAALNDVTSGSNPGCSTNGFPAKAGWDPVTGLGTPNFAKLLTAVGL

SEQ ID NO: 50301 - protein, 366 aa, Meripilus giganteus
AIPASCASTITPACLQAIYGIPTTKATQSSNKLAVSGFIDQFANKADLKSFLAMFRKDISSSTTFSLQTLDGGENDQSPSEAGIEANLDIQYTVGLATGVPTTFISVGDDFQDGNLEGFLDIINFLLGESNPPQVLTTSYGQNENTISAKLANQLCNAYAQLGARGTSILFASGDGGVSGSQSAHCSNFVPTFPSGCPFMTSVGATQGVSPETAAAFSSGGFSNVFGIPSYQASAVSGYLSALGSTNSGKFNRSGRGFPDVSTQGVDFQIVSGGQTIGVDGTSCASPTFASVISLVNDRLIAAGKSPLGFLNPFLYSSAGKAALNDVTSGSNPGCSTNGFPAKAGWDPVTGLGTPNFAKLLTAVGL

SEQ ID NO: 50302 - protein, 366 aa, Meripilus giganteus
AIPASCASTITPACLQAIYGIPTTKATQSSNKLAVSGFIDQFANKADLKSFLAQFRKDISSSTTFSLQTLDGGENDQSPSEAGIEANLDIQYTVGLATGVPTTFISVGDDFQDGNLEGFLDIINFLLGESNPPQVLTTSYGQNENTISAKLANQLCNAYAQLGARGTSILFASGDGGVSGSQSAHCSNFVPTFPSGCPFMTSVGATQGVSPETAAAFSSGGFSNVFGIPSYQASAVSGYLSALGSTNSGKFNRSGRGFPDVSTQGVDFQIVSGGQTIGVDGTSCASPTFASVISLVNDRLIAAGKSPLGFLNPFLYSSAGKAALNDVTSGSNPGCSTMGFPAKAGWDPVTGLGTPNFAKLLTAVGL

SEQ ID NO: 50303 - protein, 366 aa, Meripilus giganteus
AIPASCASTITPACLQAIYGIPTTKATQSSNKLAVSGFIDQFANKADLKSFLAQFRKDISSSTTFSLQTLDGGENDQSPSEAGIEANLDIQYTVGLATGVPTTFISVGDDFQDGNLPGFLDIINFLLGESNPPQVLTTSYGQNENTISAKLANQLCNAYAQLGARGTSILFASGDGGVSGSQSAHCSNFVPTFPSGCPFMTSVGATQGVSPETAAAFSSGGFSNVFGIPSYQASAVSGYLSALGSTNSGKFNRSGRGFPDVSTQGVDFQIVSGGQTIGVDGTSCASPTFASVISLVNDRLIAAGKSPLGFLNPFLYSSAGKAALNDVTSGSNPGCSTNGFPAKAGWDPVTGLGTPNFAKLLTAVGL

SEQ ID NO: 50304 - protein, 366 aa, Meripilus giganteus
AIPASCASTITPACLQAIYGIPTTKATQSSNKLAVSGFIDQFANKADLKSFLAQFRKDISSSTTFSLQTLDGGENDQSPSPAGIEANLDIQYTVGLATGVPTTFISVGDDFQDGNLEGFLDIINFLLGESNPPQVLTTSYGQNENTISAKLANQLCNAYAQLGARGTSILFASGDGGVSGSQSAHCSNFVPTFPSGCPFMTSVGATQGVSPETAAAFSSGGFSNVFGIPSYQASAVSGYLSALGSTNSGKFNRSGRGFPDVSTQGVDFQIVSGGQTIGVDGTSCASPTFASVISLVNDRLIAAGKSPLGFLNPFLYSSAGKAALNDVTSGSNPGCSTNGFPAKAGWDPVTGLGTPNFAKLLTAVGL

SEQ ID NO: 50305 - protein, 366 aa, Meripilus giganteus
AIPASCASTITPACLQAIYGIPTTKATQSSNKLAVSGFIDQFANKADLKSFLAQFRKDISSSTTFSLQTLDGGENDQSPSEAGIEANLDIQYTVGLATGVPTTFISVGDDFQDGNLEGFLDIINFLLGESNPPQVLTTSYGQNENTISAKLANQLCNAYAQLGARGTSILFASGDGGVSGSQSAHCSNFVPTFPSGCPFMTSVGATQGVSPETAAAFSSGGFSNVFGIPSYQASAVSGYLSALGSTNSGKFNRSGRGFPDVSTQGVDFQIVSGGQTIGVDGTSCASPTFASVISLVNDRLIAAHKSPLGFLNPFLYSSAGKAALNDVTSGSNPGCSTNGFPAKAGWDPVTGLGTPNFAKLLTAVGL

SEQ ID NO: 50306 - protein, 366 aa, Meripilus giganteus
AIPASCASTITPACLQAIYGIPTTKATQSSNKLAVSGFIDQFANKADLKSFLAQFRKDISSSTTFSLQTLDGGENDQSPSEAGIEANLDIQYTVGLATGVPTTFISVGDDFQDGNLEGFLDIINFLLGESNPPQVLTTSYGQNENTISAKLANQLCNAYAQLGARGTSILFASGDGGVSGSQSAHCSNFVPTFPSGCPFMTSVGATLGVSPETAAAFSSGGFSNVFGIPSYQASAVSGYLSALGSTNSGKFNRSGRGFPDVSTQGVDFQIVSGGQTIGVDGTSCASPTFASVISLVNDRLIAAGKSPLGFLNPFLYSSAGKAALNDVTSGSNPGCSTNGFPAKAGWDPVTGLGTPNFAKLLTAVGL

SEQ ID NO: 50307 - protein, 366 aa, Meripilus giganteus
AIPASCASTITPACLQAIYGIPTTKATQSSNKLAVSGFIDQFANKADLKSFLAQFRKDISSSTTFSLQTLDGGENDQSPSEAGIEANLDIQYTVGLATGVPTTFISVGDDFQDGNLEGFLDIINFLLGESNPPQVLTTSYGQNENTISAKLANQLCNAYAQLGARGTSILFASGDGGVSGSQSAHCSNFVPTFPSGCPFMTSVGATQGVSPETAAAFSSGGFSNVFGIPSYQASAVSGYLSALGSTNSGKFNRSGRGFPDVSTQGLDFQIVSGGQTIGVDGTSCASPTFASVISLVNDRLIAAGKSPLGFLNPFLYSSAGKAALNDVTSGSNPGCSTNGFPAKAGWDPVTGLGTPNFAKLLTAVGL

SEQ ID NO: 50308 - protein, 366 aa, Meripilus giganteus
AIPASCASTITPACLQAIYGIPTTKATQSSNKLAVSGFIDQFANKADLKSFLAQFRKDISSSTTFSLQTLDGGENDQSPSEAGIEANLDIQYTVGLATGVPTTFISVGDDFQDGNLEGFLDIINFLLGESNPPRVLTTSYGQNENTISAKLANQLCNAYAQLGARGTSILFASGDGGVSGSQSAHCSNFVPTFPSGCPFMTSVGATQGVSPETAAAFSSGGFSNVFGIPSYQASAVSGYLSALGSTNSGKFNRSGRGFPDVSTQGVDFQIVSGGQTIGVDGTSCASPTFASVISLVNDRLIAAGKSPLGFLNPFLYSSAGKAALNDVTSGSNPGCSTNGFPAKAGWDPVTGLGTPNFAKLLTAVGL

SEQ ID NO: 50309 - protein, 366 aa, Meripilus giganteus
AIPASCASTITPACLQAIYGIPTTKATQSSNKLAVSGFIDQFANKADLKSFLAQFRKDISSSTTFSLQTLDGGENDQSPSEAGIEANLDIQYTVGLATGVPTTFISVGDDFQDGNLEGFLDIINFLLGESNPPQVLTTSYLQNENTISAKLANQLCNAYAQLGARGTSILFASGDGGVSGSQSAHCSNFVPTFPSGCPFMTSVGATQGVSPETAAAFSSGGFSNVFGIPSYQASAVSGYLSALGSTNSGKFNRSGRGFPDVSTQGVDFQIVSGGQTIGVDGTSCASPTFASVISLVNDRLIAAGKSPLGFLNPFLYSSAGKAALNDVTSGSNPGCSTNGFPAKAGWDPVTGLGTPNFAKLLTAVGL

SEQ ID NO: 50310 - protein, 366 aa, Meripilus giganteus
AIPASCASTITPACLQAIYGIPTTKATQSSNKLAVSGFIDQFANKADLKSFLAQFRKDISSSTTFSLQTLDGGENDQSPSEAGIEANLDIQYTVGLATGVPTTFISVGDDFQDGNLEGFLDIINFLLGESNPPQVLTTSYGQNENTISAKLANYLCNAYAQLGARGTSILFASGDGGVSGSQSAHCSNFVPTFPSGCPFMTSVGATQGVSPETAAAFSSGGFSNVFGIPSYQASAVSGYLSALGSTNSGKFNRSGRGFPDVSTQGVDFQIVSGGQTIGVDGTSCASPTFASVISLVNDRLIAAGKSPLGFLNPFLYSSAGKAALNDVTSGSNPGCSTNGFPAKAGWDPVTGLGTPNFAKLLTAVGL

SEQ ID NO: 50311 - protein, 366 aa, Meripilus giganteus
AIPASCASTITPACLQAIYGIPTTKATQSSNKLAVSGFIDQFANKADLKSFLAQFRKDISSSTTFSLQTLDGGENDQSPSEAGIEANLDIQYTVGLATGVPTTFISVGDDFQDGNLEGFLDIINFLLGESNPPQVLTTSYGQNENTISAKLANQLCNAYAQLGARGTSILFASGDGGVSGSQSAHCSNFVPTFPSGCPFMTSVGATQGVSPETAAAFSSGGFSNVFGIPSYQASAVSGYLSALGSTNSGKFNRSGRGFPDVSTQGVDFQIVSGGQTIGVDGTSCASPTFASVISLVNDRLIAAGKSPLGFLNPFLYSSAGKAALNDVTSGSNPGCSTNGFPAKAGWDPVTGLGTPNFAKLLRAVGL

SEQ ID NO: 50312 - protein, 366 aa, Meripilus giganteus
AIPASCASTITPACLQAIYGIPTTKATQSSNKLAVSGFIDQFANKADLKSFLAQFRKDISSSTTFSLQTLDGGENDQSPSEAGIEANLDIQYTVGLATGVPTTFISVGDDFQDGNLEGFLDIINFLLGESNPPQVLTTSYGQNENTISAKLANQLCNAYAQLGARGTSILFASGDGGVSGSQSAHCSNFVPTFPSGCPFMTSVGATQGVSPETAAAFSSGGFSNVFGIPSYQASAVSGYLSALGSTNSGKFNRSGRGFPDVSTQGVDFQIVSGGQTIGVDGTSCASPTFASVISLVNDRLIAAGISPLGFLNPFLYSSAGKAALNDVTSGSNPGCSTNGFPAKAGWDPVTGLGTPNFAKLLTAVGL

SEQ ID NO: 50313 - protein, 366 aa, Meripilus giganteus
AIPASCASTITPACLQAIYGIPTTKATQSSNKLAVSGFIDQFANKADLKSFLAQFRKDISSSTTFSLQTLDGGENDQSPSEAGIEANLDIQYTVGLATGVPTTFISVGDDFQDGNLEGFLDIINFLLGESNPPQVLTTSYGQNENTISAKLANQLCNAYAQLGARGTSILFASGDGGVSGSQSAHCSNFVPTFPSGCPFMTSVGATQGVSPETAAAFSSGGFSNVFGIPSYQASAVSGYLSALGSTNSGKFNRSGRGFPDVSTQGVDFQIVSGGQTIGVDGTSCASPTFASVISLVNDRLIAAGKSPLGFLNPFLYSSAGKAALNDVTSGSNPGCSTNGFPAKAKWDPVTGLGTPNFAKLLTAVGL

SEQ ID NO: 50314 - protein, 366 aa, Meripilus giganteus
AIPASCASTITPACLQAIYGIPTTKATQSSNKLAVSGFIDQFANKADLKSFLAQFRKDISSSTTFSLQTLDGGENDQSPSEAGIEANLDIQYTVGLATGVPTTFISVGDDHQDGNLEGFLDIINFLLGESNPPQVLTTSYGQNENTISAKLANQLCNAYAQLGARGTSILFASGDGGVSGSQSAHCSNFVPTFPSGCPFMTSVGATQGVSPETAAAFSSGGFSNVFGIPSYQASAVSGYLSALGSTNSGKFNRSGRGFPDVSTQGVDFQIVSGGQTIGVDGTSCASPTFASVISLVNDRLIAAGKSPLGFLNPFLYSSAGKAALNDVTSGSNPGCSTNGFPAKAGWDPVTGLGTPNFAKLLTAVGL

SEQ ID NO: 50315 - protein, 366 aa, Meripilus giganteus
AIPASCASTITPACLQAIYGIPTTKATQSSNKLAVSGFIDQFANKADLKSFLAQFRKDISSSTTFSLQTLDGGENDQSPSEAGIEANLDIQYTVGLATGVPTTFISVGDDFQDGNLEGFLDIINFLLGESNPPQVLTTSYGQNENTISAKLANQLCNAYAQLGARGTSILFASGDGGVSGSQSAHCSNFVPTFPSGCPFLTSVGATQGVSPETAAAFSSGGFSNVFGIPSYQASAVSGYLSALGSTNSGKFNRSGRGFPDVSTQGVDFQIVSGGQTIGVDGTSCASPTFASVISLVNDRLIAAGKSPLGFLNPFLYSSAGKAALNDVTSGSNPGCSTNGFPAKAGWDPVTGLGTPNFAKLLTAVGL

SEQ ID NO: 50316 - protein, 366 aa, Meripilus giganteus
AIPASCASTITPACLQAIYGIPTTKATQSSNKLAVSGFIDQFANKADLKSFLAQFRKDISSSTTFSLQTLDGGENDQSPSEAGIEANLDIQYTVGLATGVPTTFISVGDDFQDGNLEGFLDIINFLLGESNPPQVLTTSYGQNENTISAKLANQLCNAYAQLGARGTSILFASGDGGVSGSQSAHCSNFVPTFPSGCPFMTSVGATQGVSPETAAAFSSGGFSNVFGIPSYQASAVSGYLSALGSTNSGKFNRSGRGFPDVSTQGVDFQIVSGGQTIGVDGTSCASPTFASVISLVNDRLIAAGKSPLGFLNPFLYASAGKAALNDVTSGSNPGCSTNGFPAKAGWDPVTGLGTPNFAKLLTAVGL

SEQ ID NO: 50317 - protein, 366 aa, Meripilus giganteus
AIPASCASTITPACLQAIYGIPTTKATQSSNKLAVSGFIDQFANKADLKSFLAQFRKDISSSATFSLQTLDGGENDQSPSEAGIEANLDIQYTVGLATGVPTTFISVGDDFQDGNLEGFLDIINFLLGESNPPQVLTTSYGQNENTISAKLANQLCNAYAQLGARGTSILFASGDGGVSGSQSAHCSNFVPTFPSGCPFMTSVGATQGVSPETAAAFSSGGFSNVFGIPSYQASAVSGYLSALGSTNSGKFNRSGRGFPDVSTQGVDFQIVSGGQTIGVDGTSCASPTFASVISLVNDRLIAAGKSPLGFLNPFLYSSAGKAALNDVTSGSNPGCSTNGFPAKAGWDPVTGLGTPNFAKLLTAVGL

SEQ ID NO: 50318 - protein, 366 aa, Meripilus giganteus
AIPASCASTITPACLQAIYGIPTTKATQSSNKLAVSGFIDQFANKADLKSFLAQFRKDISSSTTFSLQTLDGGENDQSPSEAGIEANLDIQYTVGLATGVPTTFISVGDDPQDGNLEGFLDIINFLLGESNPPQVLTTSYGQNENTISAKLANQLCNAYAQLGARGTSILFASGDGGVSGSQSAHCSNFVPTFPSGCPFMTSVGATQGVSPETAAAFSSGGFSNVFGIPSYQASAVSGYLSALGSTNSGKFNRSGRGFPDVSTQGVDFQIVSGGQTIGVDGTSCASPTFASVISLVNDRLIAAGKSPLGFLNPFLYSSAGKAALNDVTSGSNPGCSTNGFPAKAGWDPVTGLGTPNFAKLLTAVGL

SEQ ID NO: 50319 - protein, 366 aa, Meripilus giganteus
AIPASCASTITPACLQAIYGIPTTKATQSSNKLAVSGFIDQFANKADLKSFLAQFRKDISSSTTFSLQTLDGGENDQSPSEAGIEANLDIQYTVGLATGVPTTFISVGDDFQDGNLEGFLDIINFLLGESNPPQVLTTSYGQNENTISAKLANQLCNAYAQLGARGTSILFASGDGGVSGSQSAHCSNFVPTFPSGCPFMTSVGATQGVSPETAAAFSSGGFSNVFGIPSYQASAVSGYLSALGSTNSGKFNRSGRGFPDVSTQGVDFQIFSGGQTIGVDGTSCASPTFASVISLVNDRLIAAGKSPLGFLNPFLYSSAGKAALNDVTSGSNPGCSTNGFPAKAGWDPVTGLGTPNFAKLLTAVGL

SEQ ID NO: 50320 - protein, 366 aa, Meripilus giganteus
AIPASCASTITPACLQAIYGIPTTKATQSSNKLAVSGFIDQFANKADLKSFLAQFRKDISSSTTFSLQCLDGGENDQSPSEAGIEANLDIQYTVGLATGVPTTFISVGDDFQDGNLEGFLDIINFLLGESNPPQVLTTSYGQNENTISAKLANQLCNAYAQLGARGTSILFASGDGGVSGSQSAHCSNFVPTFPSGCPFMTSVGATQGVSPETAAAFSSGGFSNVFGIPSYQASAVSGYLSALGSTNSGKFNRSGRGFPDVSTQGVDFQIVSGGQTIGVDGTSCASPTFASVISLVNDRLIAAGKSPLGFLNPFLYSSAGKAALNDVTSGSNPGCSTNGFPAKAGWDPVTGLGTPNFAKLLTAVGL

SEQ ID NO: 50321 - protein, 366 aa, Meripilus giganteus
AIPASCASTITPACLQAIYGIPTTKATQSSNKLAVSGFIDQFANKADLKSFLAQFRKDISSSTTFSLQTLDGGENDQSPSEAGIEANLDIQYTVGLATGVPTTFISVGDDFQDGNLEGFLDIINFLLGESNPPQVLTTSYGQNENTISAKLANQLCNAYAQLGARGTSILFASGDGGVSGSQSAHCSNFVPTFPSGCPFMTSVGATQGVSPETAAAFSSGGFSNVFGIPSYQASAVSGYLSALGSTNSGKFNRSGRGFPDVSTQGVDFQIVSGGQTIGVDGTSCASPTFASVISLVNDRLIAAGKSPLGFLNPFLYSSAGKAALNDVTSGSNPGCSTNGFPAKAGWDPVTGLGTPNFAKLLTAMGL

SEQ ID NO: 50322 - protein, 366 aa, Meripilus giganteus
AIPASCASTITPACLQAIYGIPTTKATQSSNKLAVSGFIDQFANKADLKSFLAQFRKDISSSTTFSLQTLDGGENDQSPSEAGIEANLDIQYTVGLATGVPTTFISVGDDFQDGNLEGFLDIINFLLGESNPPQVLTTSYRQNENTISAKLANQLCNAYAQLGARGTSILFASGDGGVSGSQSAHCSNFVPTFPSGCPFMTSVGATQGVSPETAAAFSSGGFSNVFGIPSYQASAVSGYLSALGSTNSGKFNRSGRGFPDVSTQGVDFQIVSGGQTIGVDGTSCASPTFASVISLVNDRLIAAGKSPLGFLNPFLYSSAGKAALNDVTSGSNPGCSTNGFPAKAGWDPVTGLGTPNFAKLLTAVGL

SEQ ID NO: 50323 - protein, 366 aa, Meripilus giganteus
AIPASCASTITPACLQAIYGIPTTKATQSSNKLAVSGFIDQFANKADLKSFLAQFRKDISSSTTFSLQTLDGGENDQSPSEAGIEANLDIQYTVGLATGVPTTFISVGDDFQDGNLEGFLDIINFLLGESNPPQVLTTSYGQNESTISAKLANQLCNAYAQLGARGTSILFASGDGGVSGSQSAHCSNFVPTFPSGCPFMTSVGATQGVSPETAAAFSSGGFSNVFGIPSYQASAVSGYLSALGSTNSGKFNRSGRGFPDVSTQGVDFQIVSGGQTIGVDGTSCASPTFASVISLVNDRLIAAGKSPLGFLNPFLYSSAGKAALNDVTSGSNPGCSTNGFPAKAGWDPVTGLGTPNFAKLLTAVGL

SEQ ID NO: 50324 - protein, 366 aa, Meripilus giganteus
AIPASCASTITPACLQAIYGIPTTKATQSSNKLAVSGFIDQFANKADLKSFLAQFRKDISSSTTFSLQTLDGGENDQSPSEAGIEANLDIQYTVGLATGVPTTFISVGDDFQDGNLEGFLDIINFLLGESNPPQVLTTSYGQNENTISAKLANQLCNAYAQLGARGTSILFASGDGGVSGSQSAHCSNFVPTFPSGCPFMTSVGATQGVSPETAAAFSSGGFSNVFGIPSYQASAVSGYLSALGSTNSGKFNRSGRGFPDVSTQGVDFQIVSGGQTIGVDGTSCASPTFASVISLVNDRLIAAGKSPLGFLNPFLYSSAGKAALNDVTSGSNPGCSTNGFPAKAGWDPVTGLGTPNFAKLVTAVGL

SEQ ID NO: 50325 - protein, 366 aa, Meripilus giganteus
AIPASCASTITPACLQAIYGIPTTKATQSSNKLAVSGFIDQFANKADLKSFLAQFRKDISSSTTFSLQTLDGGENDQSPSELGIEANLDIQYTVGLATGVPTTFISVGDDFQDGNLEGFLDIINFLLGESNPPQVLTTSYGQNENTISAKLANQLCNAYAQLGARGTSILFASGDGGVSGSQSAHCSNFVPTFPSGCPFMTSVGATQGVSPETAAAFSSGGFSNVFGIPSYQASAVSGYLSALGSTNSGKFNRSGRGFPDVSTQGVDFQIVSGGQTIGVDGTSCASPTFASVISLVNDRLIAAGKSPLGFLNPFLYSSAGKAALNDVTSGSNPGCSTNGFPAKAGWDPVTGLGTPNFAKLLTAVGL

SEQ ID NO: 50326 - protein, 366 aa, Meripilus giganteus
AIPASCASTITPACLQAIYGIPTTKATQSSNKLAVSGFIDQFANKADLKSFLAQFRKDISSSTTFSLQTLDGGENDQSPSEAGIEANLDIQYTVGLATGVPTTFISVGDDFQDGNLEGFLDIINFLLGESNPPQVLTTSYGQNENTISAKLANQLCNAYAQLGARGTSILFASGDGGVSGSQSAHCSNFVPTFPSGCPFMTSVGATQGVSPEYAAAFSSGGFSNVFGIPSYQASAVSGYLSALGSTNSGKFNRSGRGFPDVSTQGVDFQIVSGGQTIGVDGTSCASPTFASVISLVNDRLIAAGKSPLGFLNPFLYSSAGKAALNDVTSGSNPGCSTNGFPAKAGWDPVTGLGTPNFAKLLTAVGL

SEQ ID NO: 50327 - protein, 366 aa, Meripilus giganteus
AIPASCASTITPACLQAIYGIPTTKATQSSNKLAVSGFIDQFANKADLKSFLAQFRKDISSSTTFSLQTLDGGENDQSPSEAGIEANLDIQYTVGLATGVPTTFISVGDDFQDGNLEGFLDIINFLLGESNPPQVLTTSYGQNENTISAKLAGQLCNAYAQLGARGTSILFASGDGGVSGSQSAHCSNFVPTFPSGCPFMTSVGATQGVSPETAAAFSSGGFSNVFGIPSYQASAVSGYLSALGSTNSGKFNRSGRGFPDVSTQGVDFQIVSGGQTIGVDGTSCASPTFASVISLVNDRLIAAGKSPLGFLNPFLYSSAGKAALNDVTSGSNPGCSTNGFPAKAGWDPVTGLGTPNFAKLLTAVGL

SEQ ID NO: 50328 - protein, 366 aa, Meripilus giganteus
AIPASCASTITPACLQAIYGIPTTKATQSSNKLAVSGFIDQFANKADLKSFLAQFRKDISSSTTFSLQTLDGGENDQSPSEAGIEANLDIQYTVGLATGVPTTFISVGDDFQDGNLEGFLDIINFLLGESNPPQVLTTSYGQNENTISAKLANQLCNAYAQLGARGTSILFASGDGGVSGSQSAHCSNFVPTFPSGCPFMTSVGATQGVSPETAAAFSSGGFSNVFGIPSYQASAVSGYLSALGSTNSGKFNRSGRGFPDVSTQGVDFQIVSGGQTIGVDGTSCASPTFASVISLVNDRLIAAGKSPLGFLNPFLYKSAGKAALNDVTSGSNPGCSTNGFPAKAGWDPVTGLGTPNFAKLLTAVGL

SEQ ID NO: 50329 - protein, 366 aa, Meripilus giganteus
AIPASCASTITPACLQAIYGIPTTKATQSSNKLAVSGFIDQFANKADLKSFLAQFRKDISSSTTFSLQTLDGGENDQSPSEAGIEANLDIQYTVGLATGVMTTFISVGDDFQDGNLEGFLDIINFLLGESNPPQVLTTSYGQNENTISAKLANQLCNAYAQLGARGTSILFASGDGGVSGSQSAHCSNFVPTFPSGCPFMTSVGATQGVSPETAAAFSSGGFSNVFGIPSYQASAVSGYLSALGSTNSGKFNRSGRGFPDVSTQGVDFQIVSGGQTIGVDGTSCASPTFASVISLVNDRLIAAGKSPLGFLNPFLYSSAGKAALNDVTSGSNPGCSTNGFPAKAGWDPVTGLGTPNFAKLLTAVGL

SEQ ID NO: 50330 - protein, 366 aa, Meripilus giganteus
AIPASCASTITPACLQAIYGIPTTKATQSSNKLAVSGFIDQFANKADLKSFLAQFRKDISSSTTFSLQTLDGGENDQSPSEAGIEANLDIQYTVGLATGVPTTFISVGDDFQDGNLEGFLDIINFLLGESNPPQVLTTSYGQNENTISAKLANQLCNAYAQLGARGTSILFASGDGGVSGSQSFHCSNFVPTFPSGCPFMTSVGATQGVSPETAAAFSSGGFSNVFGIPSYQASAVSGYLSALGSTNSGKFNRSGRGFPDVSTQGVDFQIVSGGQTIGVDGTSCASPTFASVISLVNDRLIAAGKSPLGFLNPFLYSSAGKAALNDVTSGSNPGCSTNGFPAKAGWDPVTGLGTPNFAKLLTAVGL

SEQ ID NO: 50331 - protein, 366 aa, Meripilus giganteus
AIPAKCASTITPACLQAIYGIPTTKATQSSNKLAVSGFIDQFANKADLKSFLAQFRKDISSSTTFSLQTLDGGENDQSPSEAGIEANLDIQYTVGLATGVPTTFISVGDDFQDGNLEGFLDIINFLLGESNPPQVLTTSYGQNENTISAKLANQLCNAYAQLGARGTSILFASGDGGVSGSQSAHCSNFVPTFPSGCPFMTSVGATQGVSPETAAAFSSGGFSNVFGIPSYQASAVSGYLSALGSTNSGKFNRSGRGFPDVSTQGVDFQIVSGGQTIGVDGTSCASPTFASVISLVNDRLIAAGKSPLGFLNPFLYSSAGKAALNDVTSGSNPGCSTNGFPAKAGWDPVTGLGTPNFAKLLTAVGL

SEQ ID NO: 50332 - protein, 366 aa, Meripilus giganteus
AIPASCASTITPACLQAIYGIPTTKATQSSNKLAVSGFIDQFANKADLKSFLAQFRKDISSSTTFSLQTLDGGENDQSPSEAGIEANLDIQYTVGLATGVPTTFISVGDDFQDGNLEGFLDIINFLLGESNPPQVLTTSYGQNENTISAKLANQLCNAYAQLGARGTSILFASGDGGVSGSQSAHCSNFVPTFPSGCPFMTSVGATQGVSPETAAAFSSGGFSNVFGIPSYQASAVSGYLSALGSTNSGKFNRSGRGFPDVSTQGVDFQIVSGGQTIGVDGTSCASPTFASVISLVNDRLIAAGKSPLGFLNPFLYSSAGKAALNDVTSGSNPGCSTNGFPAKAGWDPVTGLGTPNFPKLLTAVGL

SEQ ID NO: 50333 - protein, 366 aa, Meripilus giganteus
AIPASCASTITPACLQAIYGIPTTKATQSSNKLAVSGFIDQFANKADLKSFLAQFRKDISSSTTFSLQTLDGGENDQSPSEAGIEANLDIQYTVGLATGVPTTFISVGDDFQDGNLEGFLDIINFLLGESNPPQVLTTSYGQNENTISAKLANQLCNAYAQLGARGTSILFASGDGGVSGSQSAHCSNFVPTFPSGCPFMTSVGATQGVSPETAAAFSSGGFSNVFGIPSYQASAVSGYLSALGSTNSGKFNRSGRGFPDVSTQGVDFQIVSGGLTIGVDGTSCASPTFASVISLVNDRLIAAGKSPLGFLNPFLYSSAGKAALNDVTSGSNPGCSTNGFPAKAGWDPVTGLGTPNFAKLLTAVGL

SEQ ID NO: 50334 - protein, 366 aa, Meripilus giganteus
AIPASCASTITPACLQAIYGIPTTKATQSSNKLAVSGFIDQFANKADLKSFLAQFRKDISSSTTFSLQTLDGGENDQSPSEAGIEANLDIQYTVGLATGVPTTFISVGDDFQDGNLEGFLDIINFLLGESNPPQVLTTSYGQNENTISAKLANQLCNAYAQLGARGTSILFASGDGGVSGSQSAHCSNFVPTFPSGCPFMTSVGATQGVSPETAAAFSSGGFSNVFGIPSYQASAVSGYLSALGSTNSGKFNRSGRGFPDVSTQGVDFQIVSGGQTIGVDGTSCASPTFASVISLVNDRLIAAGKSPLGFLNPFLYSSAGKAALNDVTSGSNPGCTTNGFPAKAGWDPVTGLGTPNFAKLLTAVGL

SEQ ID NO: 50335 - protein, 366 aa, Meripilus giganteus
AIPASCASTITPACLQPIYGIPTTKATQSSNKLAVSGFIDQFANKADLKSFLAQFRKDISSSTTFSLQTLDGGENDQSPSEAGIEANLDIQYTVGLATGVPTTFISVGDDFQDGNLEGFLDIINFLLGESNPPQVLTTSYGQNENTISAKLANQLCNAYAQLGARGTSILFASGDGGVSGSQSAHCSNFVPTFPSGCPFMTSVGATQGVSPETAAAFSSGGFSNVFGIPSYQASAVSGYLSALGSTNSGKFNRSGRGFPDVSTQGVDFQIVSGGQTIGVDGTSCASPTFASVISLVNDRLIAAGKSPLGFLNPFLYSSAGKAALNDVTSGSNPGCSTNGFPAKAGWDPVTGLGTPNFAKLLTAVGL

SEQ ID NO: 50336 - protein, 366 aa, Meripilus giganteus
AIPASCASTITPACLQAIYGIPTTKATQSSNKLAVSGFIDQFANKADLKSFLAQFRVDISSSTTFSLQTLDGGENDQSPSEAGIEANLDIQYTVGLATGVPTTFISVGDDFQDGNLEGFLDIINFLLGESNPPQVLTTSYGQNENTISAKLANQLCNAYAQLGARGTSILFASGDGGVSGSQSAHCSNFVPTFPSGCPFMTSVGATQGVSPETAAAFSSGGFSNVFGIPSYQASAVSGYLSALGSTNSGKFNRSGRGFPDVSTQGVDFQIVSGGQTIGVDGTSCASPTFASVISLVNDRLIAAGKSPLGFLNPFLYSSAGKAALNDVTSGSNPGCSTNGFPAKAGWDPVTGLGTPNFAKLLTAVGL

SEQ ID NO: 50337 - protein, 366 aa, Meripilus giganteus
AIPASCASTITPACLQAIYGIPTTKATQSSNKLAVSGFIDQFANKADLKSFLAQFRKDISSSTTFSLQTLDGGENDQSPSEAGIEANLDIQYTVGLATGVPTTFISVGDDFQDGNLEGFLDIINFLLGESNPPQVLTTSYGQNENTISAKLANQLCNAYAQLGARGTSILFASGDGGVSGSQSAHCSNFVPTFPSGCPFMTSVGATQGVSPETAAAFSSGGFSNVFGIPSYQASAVSGYLSALGSTNSGKFNRSGRGFPDVSTQGVDFQIVSGGQTLGVDGTSCASPTFASVISLVNDRLIAAGKSPLGFLNPFLYSSAGKAALNDVTSGSNPGCSTNGFPAKAGWDPVTGLGTPNFAKLLTAVGL

SEQ ID NO: 50338 - protein, 366 aa, Meripilus giganteus
AIPASCASTITPACLQAIYGIPTTKATQSSNKLAVSGFIDQFANKADLKSFLAQFRKDISSSTTFSLQTLDGGENDQSPSEAGIEANLDIQYTVGLATGVPTTFISVGDDFQDGNLFGFLDIINFLLGESNPPQVLTTSYGQNENTISAKLANQLCNAYAQLGARGTSILFASGDGGVSGSQSAHCSNFVPTFPSGCPFMTSVGATQGVSPETAAAFSSGGFSNVFGIPSYQASAVSGYLSALGSTNSGKFNRSGRGFPDVSTQGVDFQIVSGGQTIGVDGTSCASPTFASVISLVNDRLIAAGKSPLGFLNPFLYSSAGKAALNDVTSGSNPGCSTNGFPAKAGWDPVTGLGTPNFAKLLTAVGL

SEQ ID NO: 50339 - protein, 366 aa, Meripilus giganteus
AIPASCASTITPACLQAIYGIPTTKATQSSNKLAVSGFIDQFANKADLKSFLAQFRKDISSSTTFSLQTLDGGENDQSPSEAGIEANLDIQYTVGLATGVPTTFISVGDDFQDGNLEGFLDIINFLLGESNPPQVLTTSYGQNENTISAKLANQLCNAYAQLGARGTSILFASGDGGVSGSQSAHCSNFVPTFPSGCPFMTSVGATQGVSPETAAAFSSGGFSNVFGIPSYQASAVSGYLSALGSTNSCKFNRSGRGFPDVSTQGVDFQIVSGGQTIGVDGTSCASPTFASVISLVNDRLIAAGKSPLGFLNPFLYSSAGKAALNDVTSGSNPGCSTNGFPAKAGWDPVTGLGTPNFAKLLTAVGL

SEQ ID NO: 50340 - protein, 366 aa, Meripilus giganteus
AIPASCASTITPACLQAIYGIPTTKATQSSNKLNVSGFIDQFANKADLKSFLAQFRKDISSSTTFSLQTLDGGENDQSPSEAGIEANLDIQYTVGLATGVPTTFISVGDDFQDGNLEGFLDIINFLLGESNPPQVLTTSYGQNENTISAKLANQLCNAYAQLGARGTSILFASGDGGVSGSQSAHCSNFVPTFPSGCPFMTSVGATQGVSPETAAAFSSGGFSNVFGIPSYQASAVSGYLSALGSTNSGKFNRSGRGFPDVSTQGVDFQIVSGGQTIGVDGTSCASPTFASVISLVNDRLIAAGKSPLGFLNPFLYSSAGKAALNDVTSGSNPGCSTNGFPAKAGWDPVTGLGTPNFAKLLTAVGL

SEQ ID NO: 50341 - protein, 366 aa, Meripilus giganteus
AIPASCASTITPACLQAIYGIPTTKATQSSNKLAVSGFIDQFANKADLKSFLAQFRKDISSSTTFSLYTLDGGENDQSPSEAGIEANLDIQYTVGLATGVPTTFISVGDDFQDGNLEGFLDIINFLLGESNPPQVLTTSYGQNENTISAKLANQLCNAYAQLGARGTSILFASGDGGVSGSQSAHCSNFVPTFPSGCPFMTSVGATQGVSPETAAAFSSGGFSNVFGIPSYQASAVSGYLSALGSTNSGKFNRSGRGFPDVSTQGVDFQIVSGGQTIGVDGTSCASPTFASVISLVNDRLIAAGKSPLGFLNPFLYSSAGKAALNDVTSGSNPGCSTNGFPAKAGWDPVTGLGTPNFAKLLTAVGL

SEQ ID NO: 50342 - protein, 366 aa, Meripilus giganteus
AIPASCASTITPACLQAIYGIPTTKATQSSNKLAVSGFIDQFANKADLKSFLAQFRKDISSSTTFSLQTLDGGENDQSPSEAGIEANLDIQYTVGLATGVPTTFISVGDDFQDGNLEGFLDIINFLLGESNPPQVLTTSYGQNENTISAKLANQLCNAYAQLGARGTSILFASGDGGVSGSQSAHCSQFVPTFPSGCPFMTSVGATQGVSPETAAAFSSGGFSNVFGIPSYQASAVSGYLSALGSTNSGKFNRSGRGFPDVSTQGVDFQIVSGGQTIGVDGTSCASPTFASVISLVNDRLIAAGKSPLGFLNPFLYSSAGKAALNDVTSGSNPGCSTNGFPAKAGWDPVTGLGTPNFAKLLTAVGL

SEQ ID NO: 50343 - protein, 366 aa, Meripilus giganteus
AIPASCASTITPACLQAIYGIPTTKATQSSNKLAVSGFIDQFANKADLKSFLAQFRKDISSSTTFSLQTLDGGENDQSPSEAGIEANLDIQYTVGLATGVPTTFISVGDDFQDGNLEGFLDIINFLLGESNPPQVLTTSYGQNENTISAKLANQLCNAYAQLGARGTSILFASGDGGVSGSQSAHCSNFVPTFPSGCPFMTSVGATQGVSPETAAAFSSGGFSNVFGIPSYQASAVSGYLSALGSTNSGKFNRSGRGFPDVSTQGVDFQIVSGGQTIGVYGTSCASPTFASVISLVNDRLIAAGKSPLGFLNPFLYSSAGKAALNDVTSGSNPGCSTNGFPAKAGWDPVTGLGTPNFAKLLTAVGL

SEQ ID NO: 50344 - protein, 366 aa, Meripilus giganteus
AIPASCASTITPACLQAIYGIPTTKATQSSNKLAVSGFIDQFANKADLKSFLAIFRKDISSSTTFSLQTLDGGENDQSPSEAGIEANLDIQYTVGLATGVPTTFISVGDDFQDGNLEGFLDIINFLLGESNPPQVLTTSYGQNENTISAKLANQLCNAYAQLGARGTSILFASGDGGVSGSQSAHCSNFVPTFPSGCPFMTSVGATQGVSPETAAAFSSGGFSNVFGIPSYQASAVSGYLSALGSTNSGKFNRSGRGFPDVSTQGVDFQIVSGGQTIGVDGTSCASPTFASVISLVNDRLIAAGKSPLGFLNPFLYSSAGKAALNDVTSGSNPGCSTNGFPAKAGWDPVTGLGTPNFAKLLTAVGL

SEQ ID NO: 50345 - protein, 366 aa, Meripilus giganteus
AIPASCASTITPACLQAIYGIPTTKATQSSNKLAVSGFIDQFANKADLKSFLAQFRKDISSSTTFSLQTLDGGENNQSPSEAGIEANLDIQYTVGLATGVPTTFISVGDDFQDGNLEGFLDIINFLLGESNPPQVLTTSYGQNENTISAKLANQLCNAYAQLGARGTSILFASGDGGVSGSQSAHCSNFVPTFPSGCPFMTSVGATQGVSPETAAAFSSGGFSNVFGIPSYQASAVSGYLSALGSTNSGKFNRSGRGFPDVSTQGVDFQIVSGGQTIGVDGTSCASPTFASVISLVNDRLIAAGKSPLGFLNPFLYSSAGKAALNDVTSGSNPGCSTNGFPAKAGWDPVTGLGTPNFAKLLTAVGL

SEQ ID NO: 50346 - protein, 366 aa, Meripilus giganteus
AIPASCASTITPACLQAIYGIPTTKATQSSNKLAVSGFIDQFANKADLKSFLAQFRKDISSSTTFSLQTLDGGENDQSPSEAGIEANLDIQYTVGLATGVPTTFISVGDDFQDGNLEGFLDIINFLLGESNPPQVLTTSYGQNENAISAKLANQLCNAYAQLGARGTSILFASGDGGVSGSQSAHCSNFVPTFPSGCPFMTSVGATQGVSPETAAAFSSGGFSNVFGIPSYQASAVSGYLSALGSTNSGKFNRSGRGFPDVSTQGVDFQIVSGGQTIGVDGTSCASPTFASVISLVNDRLIAAGKSPLGFLNPFLYSSAGKAALNDVTSGSNPGCSTNGFPAKAGWDPVTGLGTPNFAKLLTAVGL

SEQ ID NO: 50347 - protein, 366 aa, Meripilus giganteus
AIPASCASTITPACLQAIYGIPTTKATQSSNKLAVSGFIDQFANKADLKSFLAQFRKDISSSTTFSLQTLDGGENDQSPSEAGIEANLDIQYTVGLATGVPTTFISVGDDFQDGNLEGFLDIINFLLGESNPPQVLTTSYGQNENTISAKLANQLCNAYAQLGARGTSILFASGDGGVSGSQSAHCSNFVPTFPSGCPFMTSVGATQGVSPETAAAFSSGGFSNVFGIPSYQASAVSGYLSALGSTNSGKFNRSGRGFPDVSTQGVDFQIVSGGQTIGVDGTSCASPTFASVISLVNDRLIAAGKSPLGFLNPFLYSSAGKAALNDVTSGSNPGCSTNGFPAKKGWDPVTGLGTPNFAKLLTAVGL

SEQ ID NO: 50348 - protein, 366 aa, Meripilus giganteus
AIPASCASTITPACLQAIYGIPTTKATQSSNKLAVSGFIDQFANKADLKSFLAQFRKDISSSTTFSLQTLDGGENDQSPSEAGIEANLDIQYTVGLATGVPCTFISVGDDFQDGNLEGFLDIINFLLGESNPPQVLTTSYGQNENTISAKLANQLCNAYAQLGARGTSILFASGDGGVSGSQSAHCSNFVPTFPSGCPFMTSVGATQGVSPETAAAFSSGGFSNVFGIPSYQASAVSGYLSALGSTNSGKFNRSGRGFPDVSTQGVDFQIVSGGQTIGVDGTSCASPTFASVISLVNDRLIAAGKSPLGFLNPFLYSSAGKAALNDVTSGSNPGCSTNGFPAKAGWDPVTGLGTPNFAKLLTAVGL

SEQ ID NO: 50349 - protein, 366 aa, Meripilus giganteus
AIPASCASTITPACLQAIYGIPTTKATQSSNKLAVSGFIDQFANKADLKSFLAQFRKDISSSTTFSLQTLDGGENDQSPSEAGIEANLDIQYTVGLATGVPTTFISVGDDFQDGNLEGFLDIINFLLGESNPPQVLTTSYGQNENTISAKLANQLCNAYAQLGARGTSILFASGDGGVSGSQSAHCSNFVPTFPSGCPFMTSVGATQGVSPETAAAFSSGGFSNVFGIPSYQASAVSGYLSALGSTNSGKFNRSGRGFPDVSTQGVDFQIVSGGQLIGVDGTSCASPTFASVISLVNDRLIAAGKSPLGFLNPFLYSSAGKAALNDVTSGSNPGCSTNGFPAKAGWDPVTGLGTPNFAKLLTAVGL

SEQ ID NO: 50350 - protein, 366 aa, Meripilus giganteus
AIPASCASTITPACLQAIYGIPTTKATQSSNKLAVSGFIDQFANKADLKSFLAQFRKDISSSTTFSLQTLDGGENDQSPSEAGIEANLDIQYTVGLATGVPTTFISVGDDFQDGNLGGFLDIINFLLGESNPPQVLTTSYGQNENTISAKLANQLCNAYAQLGARGTSILFASGDGGVSGSQSAHCSNFVPTFPSGCPFMTSVGATQGVSPETAAAFSSGGFSNVFGIPSYQASAVSGYLSALGSTNSGKFNRSGRGFPDVSTQGVDFQIVSGGQTIGVDGTSCASPTFASVISLVNDRLIAAGKSPLGFLNPFLYSSAGKAALNDVTSGSNPGCSTNGFPAKAGWDPVTGLGTPNFAKLLTAVGL

SEQ ID NO: 50351 - protein, 366 aa, Meripilus giganteus
AIPASCASTITPACLQAIYGIPTTKATQSSNKLAVSGFIDQFANKADLKSFLAQFRKDISSSTTFSLQTLDGGENDQSPSEAGIEANLDIQYTVGLATGVPTTFISVGDDFQDGNLEGFLDIINFLLGESNPPQVLTTSYGQNENTISAKLANQLCNAYAQLGARGTSILFASGDGGVSGSQSAHCSNFVPTFPSGCPFMTSVGATQGVSPETAAAFSSGGFSNVFGIPSYQASAVSGYLSALGSTNSGKFNRSGRGFPDVSTQGVDFQIVSGGQTIGVDGTSCASPTFASVISLVNDRLIAAGKSPLGFLNPFLYSSAGKAALNDVTSGSNPGCSTNGFPAKAGWDPVTGLGTPNFAKLMTAVGL

SEQ ID NO: 50352 - protein, 366 aa, Meripilus giganteus
AIPASCASTITPACLQAIYGIPTTKATQSSNKLAVSGFIDQFANKADLKSFLAQFRKDISSSTTFSLQTLDGGENDQSPSEAGIEANLDIQYTVGLATGVPTTFISVGDDFQDGNLEGFLDIINFLLGESNPPQVLTTSYGQNENTISAKLANQLCNAYAQLGARGTSILFASGDGGVSGSQSAHCSNFVPTFPSGCPFMTSVGATQGVSPETAAAFSSGGFSNVFGIPSYQASAVSGYLSALGSTNSGKFNRSGRGFPDVSTQGVDFQIVSGGQTIGVDGTSCASPTFASVISLVNDPLIAAGKSPLGFLNPFLYSSAGKAALNDVTSGSNPGCSTNGFPAKAGWDPVTGLGTPNFAKLLTAVGL

SEQ ID NO: 50353 - protein, 366 aa, Meripilus giganteus
AIPASCASTITPACLQAIYGIPTTKATQSSNKLAVSGFIDQFANKADLKSFLAQFRKDISSSTTFSLQTLDGGENDQSPSEAGIEANLDIQYTVGLATGVPTTFISVGDDFQDGNLEGFLDRINFLLGESNPPQVLTTSYGQNENTISAKLANQLCNAYAQLGARGTSILFASGDGGVSGSQSAHCSNFVPTFPSGCPFMTSVGATQGVSPETAAAFSSGGFSNVFGIPSYQASAVSGYLSALGSTNSGKFNRSGRGFPDVSTQGVDFQIVSGGQTIGVDGTSCASPTFASVISLVNDRLIAAGKSPLGFLNPFLYSSAGKAALNDVTSGSNPGCSTNGFPAKAGWDPVTGLGTPNFAKLLTAVGL

SEQ ID NO: 50354 - protein, 366 aa, Meripilus giganteus
AIPASCASTITPACLQAIYGIPTTKATQSSNKLAVSGFIDQFANKADLKSFLAQFRKDISSSTTFSLQTLDGGENDQSPSEAGIEANLDIQYTVGLATGVPTTFISVGDDFSDGNLEGFLDIINFLLGESNPPQVLTTSYGQNENTISAKLANQLCNAYAQLGARGTSILFASGDGGVSGSQSAHCSNFVPTFPSGCPFMTSVGATQGVSPETAAAFSSGGFSNVFGIPSYQASAVSGYLSALGSTNSGKFNRSGRGFPDVSTQGVDFQIVSGGQTIGVDGTSCASPTFASVISLVNDRLIAAGKSPLGFLNPFLYSSAGKAALNDVTSGSNPGCSTNGFPAKAGWDPVTGLGTPNFAKLLTAVGL

SEQ ID NO: 50355 - protein, 366 aa, Meripilus giganteus
AIPASCASTITPACLQAIYGIPTTKATQSSNKLAVSGFIDQFANKADLKSFLAQFRKDISSSTTFSLQTLDGGENDQSPSEAGIEANLDIQYTVGSATGVPTTFISVGDDFQDGNLEGFLDIINFLLGESNPPQVLTTSYGQNENTISAKLANQLCNAYAQLGARGTSILFASGDGGVSGSQSAHCSNFVPTFPSGCPFMTSVGATQGVSPETAAAFSSGGFSNVFGIPSYQASAVSGYLSALGSTNSGKFNRSGRGFPDVSTQGVDFQIVSGGQTIGVDGTSCASPTFASVISLVNDRLIAAGKSPLGFLNPFLYSSAGKAALNDVTSGSNPGCSTNGFPAKAGWDPVTGLGTPNFAKLLTAVGL

SEQ ID NO: 50356 - protein, 366 aa, Meripilus giganteus
AIPASCASTITPACLQAIYGIPTTKATQSSNKLAVSGFIDQFANKADLKSFLAQFRKDISSSTTFSLQTLDGGENDQSPSEAGIEANLDIQYTVGLATGVPTTFISVGDDFQDGNLEGFLDIINFLLGESNPPQVLTTSYGQNENTISAKLANQLCNAYAQLGARGTSILFASGDGGVSGSQSAHCSNFVPTFPSGCPFMTSVGATQGVSPETAAAFSSGGFSNVFGIPSYQASAVSGYLSALGSTNSGKFNRSGRGFPDVSTQGVDFQIVSGGQTIGVDGTSCASPTFASVISLVNDRLIAAGKSPLGMLNPFLYSSAGKAALNDVTSGSNPGCSTNGFPAKAGWDPVTGLGTPNFAKLLTAVGL

SEQ ID NO: 50357 - protein, 366 aa, Meripilus giganteus
AIPASCASTITPACLQAIYGIPTTKATQSSNKLAVSGFIDQFANKADLKSFLAQFRKDISSSTTFSLQTLDGGENDQSPSEAGIEANLDIQYTVGLATGVPTTFISVGDDFQDGNLEGFLDIINFLLGESNPPQVLTTSYGQNENTISAKLANQLCNAYAQLGARGTSILFASGDGGVSGSQSAHCSNFVPTFPSGCPFMTSVGATQGVSPETAAAFSSGGFSNVFGIPSYQASAVSGYLSVLGSTNSGKFNRSGRGFPDVSTQGVDFQIVSGGQTIGVDGTSCASPTFASVISLVNDRLIAAGKSPLGFLNPFLYSSAGKAALNDVTSGSNPGCSTNGFPAKAGWDPVTGLGTPNFAKLLTAVGL

SEQ ID NO: 50358 - protein, 366 aa, Meripilus giganteus
AIPASCASTITPACLQAIYGIPTTKATQSSNKLAVSGFIDQFANKADLKSFLAQFRKDISSSTTFSLQTLDGGENDQSPSEAGIEANLDIQYTVGLATGVPTTFISVGDDFQDGNLEGFLDIINFLLGESNPPQVLTTSYGQNENTISAKLANQLCNAYAQLGARGTSILFASGDGGVSGSQSAHCSNFVPTFPSGCPFMTSVGATQGVSPETAAAFSSGGFSNVFGIPSYQASAVSGYLSALGSTNSGKFNRSGRGFPDVSTQGVDFQIVSGGQTIGVDGTSCASPTFASVISLVNDRLIAAGKSPLGFLNPFLYSSAGKAALNDVTSGSNPGCKTNGFPAKAGWDPVTGLGTPNFAKLLTAVGL

SEQ ID NO: 50359 - protein, 366 aa, Meripilus giganteus
AIPASCASTITPACLQAIYGIPTTKATQSSNKLAVSGFIDQFANKADLKSFLAQFRKDISSSTTFSLQTLDGGENDQSPSEAGIEANLDIQYTVGLATGVPTTFISVGDDFQDGNLEGFLDIINFLLGESNPPQVLTTSYGQNENTISAKLANQLCNAYAQLGARGTSILFASGDGGVSGSQAAHCSNFVPTFPSGCPFMTSVGATQGVSPETAAAFSSGGFSNVFGIPSYQASAVSGYLSALGSTNSGKFNRSGRGFPDVSTQGVDFQIVSGGQTIGVDGTSCASPTFASVISLVNDRLIAAGKSPLGFLNPFLYSSAGKAALNDVTSGSNPGCSTNGFPAKAGWDPVTGLGTPNFAKLLTAVGL

SEQ ID NO: 50360 - protein, 366 aa, Meripilus giganteus
AIPASCASTITPACLQAIYGIPTTKATQSSNKLAVSGFIDQFANKADLKSFLAQFRKDISSSTTFSLQTLDGGENDQSPSEAGIEANLDIQYTVGLATGVPTTFISVGDDFQDGNLEGFLDIINFLLGESNPPQVLTTSYGQNENTISAKLANQLCNAYAQLGARGTSILFASGDGGVSGSQSAHCSNFVPTFPSGCPFMTSVGATQGWSPETAAAFSSGGFSNVFGIPSYQASAVSGYLSALGSTNSGKFNRSGRGFPDVSTQGVDFQIVSGGQTIGVDGTSCASPTFASVISLVNDRLIAAGKSPLGFLNPFLYSSAGKAALNDVTSGSNPGCSTNGFPAKAGWDPVTGLGTPNFAKLLTAVGL

SEQ ID NO: 50361 - protein, 366 aa, Meripilus giganteus
AIPASCASTITPACLQAIYGIPTTKATQSSNKLAVSGFIDQFANKADLKSFLAQFRKDISSSTTFSLQTLDGGENDQSPSEAGIEANLDIQYTVGLATGVPTTFISVGDDFQDGNLEGFLDIINFLLGESNPPQVLTTSYGQNENTISAKLANQLCNAYAQLGARGTSILFASGDGGVSGSQSAHCSNFVPTFPSGCPFMTSVGATQGVSPETAAAFSSGGFSNVFGIPSYQASAVSGYLSALGSTNSGKFNRSGRGFPDVSTQGVDFQIVSGGQTIGVDGTSCASPTFASVISLVNDRLIAAGKSPTGFLNPFLYSSAGKAALNDVTSGSNPGCSTNGFPAKAGWDPVTGLGTPNFAKLLTAVGL

SEQ ID NO: 50362 - protein, 366 aa, Meripilus giganteus
AIPASCASTITPACLQAIYGIPTTKATQSSNKLAVSGFIDQFANKADLKSFLAQFRKDISSSTTFSLQTLDGGENDQSPSEAGIEANLDIQYTVGLATGVPTTFISVGDDFQDGNLEGFLDIINFLLGESNPPQVLTTSYGQNENTISAKLANQLCNAYAQLGARGTSILFASGDGGVSGSQSAHCSNFVPTFPSGCPFMTSVGATQGVSPETAAAFSSGGFSNVFGIPSYQASAVSGYLSALGSTNSGKFNRSGRGFPDVSTQGVNFQIVSGGQTIGVDGTSCASPTFASVISLVNDRLIAAGKSPLGFLNPFLYSSAGKAALNDVTSGSNPGCSTNGFPAKAGWDPVTGLGTPNFAKLLTAVGL

SEQ ID NO: 50363 - protein, 366 aa, Meripilus giganteus
AIPASCASTITPACLQAIYGIPTTKATQSSNKLAVSGFIDQFANKADLKSFLAQFRKDISSSTTFSLQTLDGGENDQSPSEAGIEANLDIQYTVGLATGVPTTFISVGDDFQDGNLEGFLDIINFLLGESNPPQVLTTSYGQNENTISAKLANLLCNAYAQLGARGTSILFASGDGGVSGSQSAHCSNFVPTFPSGCPFMTSVGATQGVSPETAAAFSSGGFSNVFGIPSYQASAVSGYLSALGSTNSGKFNRSGRGFPDVSTQGVDFQIVSGGQTIGVDGTSCASPTFASVISLVNDRLIAAGKSPLGFLNPFLYSSAGKAALNDVTSGSNPGCSTNGFPAKAGWDPVTGLGTPNFAKLLTAVGL

SEQ ID NO: 50364 - protein, 366 aa, Meripilus giganteus
AIPASCASTITPACLQAIYGIPTTKATQSSNKLAVSGFIDQFANKADLKSFLAQFRKDISSSTTFSLQTLDGGENDQSPSEAGIEANLDIQYTVGLATGVPTTFISVGDDFQDGNLEGFLDIINFLLGESNPPQVLTTSYGQNENTISAKLANQLCNAYAQLGARGTSILFASGDGGVSGSQSAHCSNFVPTFPSGCPFMTSVGATQGVSPETAAAFSSGGFSNVFGIPSYQASAVSGYLSALGSTNSGKFNRSGRGFPDVSTQGVDFQIVSGGFTIGVDGTSCASPTFASVISLVNDRLIAAGKSPLGFLNPFLYSSAGKAALNDVTSGSNPGCSTNGFPAKAGWDPVTGLGTPNFAKLLTAVGL

SEQ ID NO: 50365 - protein, 366 aa, Meripilus giganteus
AIPASCASTITPACLQAIYGIPTTKATQSSNKLAVSGFIDQFANKADLKSFLAQFRKDISSSTTFSLQTLDGGENDQSPSEAGIEANLDIQYTVGLATGVPTTFISVGDDFQDGNLEGFLDIINFLLGESNPPQVLTTSYGQNENTISAKLANQLCNAYAQLGARGTSILFASGDGGVSGSQSAHCSNFVPTFPSGCPFMTSVGATQGVSPETAAAFSSGGFSNVFGIPSYQASAVSGYLSALGSTNSGRFNRSGRGFPDVSTQGVDFQIVSGGQTIGVDGTSCASPTFASVISLVNDRLIAAGKSPLGFLNPFLYSSAGKAALNDVTSGSNPGCSTNGFPAKAGWDPVTGLGTPNFAKLLTAVGL

SEQ ID NO: 50366 - protein, 366 aa, Meripilus giganteus
AIPASCASTITPACLQAIYGIPTTKATQSSNKLAVSGFIDQFANKADLKSFLAQFRKDISSSTTFSVQTLDGGENDQSPSEAGIEANLDIQYTVGLATGVPTTFISVGDDFQDGNLEGFLDIINFLLGESNPPQVLTTSYGQNENTISAKLANQLCNAYAQLGARGTSILFASGDGGVSGSQSAHCSNFVPTFPSGCPFMTSVGATQGVSPETAAAFSSGGFSNVFGIPSYQASAVSGYLSALGSTNSGKFNRSGRGFPDVSTQGVDFQIVSGGQTIGVDGTSCASPTFASVISLVNDRLIAAGKSPLGFLNPFLYSSAGKAALNDVTSGSNPGCSTNGFPAKAGWDPVTGLGTPNFAKLLTAVGL

SEQ ID NO: 50367 - protein, 366 aa, Meripilus giganteus
AIPASCASTITPACLQAIYGIPTTKATQSSNKLAVSGFIDQFANKADLKSFLAQFRKDISSSTTFSLQTLDGGENDQSPSEAGIEANLDIQYTVGLATGVPTTFISVGDDFQDGNLEGFLDIINFLLGESNPPQVLTTSYGQNENTISAKLANQLCNAYAQLGARGTSILFASGDGGVSGSQSAHCSNFVPTFPSGCPFMTSVGATQGVSPETAAAFSSGGFSNVFGIPSYQASAVSGYLSALGSTNSGKFNRSGRGFPDVSTQGVDFQIVSGGQTIGVDGTSCASPCFASVISLVNDRLIAAGKSPLGFLNPFLYSSAGKAALNDVTSGSNPGCSTNGFPAKAGWDPVTGLGTPNFAKLLTAVGL

SEQ ID NO: 50368 - protein, 366 aa, Meripilus giganteus
AIPASCASTITPACLQAIYGIPTTKATQSSNKLAVSGFIDQFANKADLKSFLAQFRKDISSSTTFSLQTLDGGENKQSPSEAGIEANLDIQYTVGLATGVPTTFISVGDDFQDGNLEGFLDIINFLLGESNPPQVLTTSYGQNENTISAKLANQLCNAYAQLGARGTSILFASGDGGVSGSQSAHCSNFVPTFPSGCPFMTSVGATQGVSPETAAAFSSGGFSNVFGIPSYQASAVSGYLSALGSTNSGKFNRSGRGFPDVSTQGVDFQIVSGGQTIGVDGTSCASPTFASVISLVNDRLIAAGKSPLGFLNPFLYSSAGKAALNDVTSGSNPGCSTNGFPAKAGWDPVTGLGTPNFAKLLTAVGL

SEQ ID NO: 50369 - protein, 366 aa, Meripilus giganteus
AIPASCASTITPACLQAIYGIPTTKATQSSNKLAVSGFIDQFANKADLKSFLAQFRKDISSSTTFSLQTLDGGENDQSPSEAGIEANLDIQYTVGLATGVPTTFISVGDDFQDGNLEGFLDIINFLLGESNPPQVLTTSYGWNENTISAKLANQLCNAYAQLGARGTSILFASGDGGVSGSQSAHCSNFVPTFPSGCPFMTSVGATQGVSPETAAAFSSGGFSNVFGIPSYQASAVSGYLSALGSTNSGKFNRSGRGFPDVSTQGVDFQIVSGGQTIGVDGTSCASPTFASVISLVNDRLIAAGKSPLGFLNPFLYSSAGKAALNDVTSGSNPGCSTNGFPAKAGWDPVTGLGTPNFAKLLTAVGL

SEQ ID NO: 50370 - protein, 366 aa, Meripilus giganteus
AIPASCASTITPACLQAIYGIPTTKATQSSNKLAVSGFIDQFANLADLKSFLAQFRKDISSSTTFSLQTLDGGENDQSPSEAGIEANLDIQYTVGLATGVPTTFISVGDDFQDGNLEGFLDIINFLLGESNPPQVLTTSYGQNENTISAKLANQLCNAYAQLGARGTSILFASGDGGVSGSQSAHCSNFVPTFPSGCPFMTSVGATQGVSPETAAAFSSGGFSNVFGIPSYQASAVSGYLSALGSTNSGKFNRSGRGFPDVSTQGVDFQIVSGGQTIGVDGTSCASPTFASVISLVNDRLIAAGKSPLGFLNPFLYSSAGKAALNDVTSGSNPGCSTNGFPAKAGWDPVTGLGTPNFAKLLTAVGL

SEQ ID NO: 50371 - protein, 366 aa, Meripilus giganteus
AIPASCASTITPACLQAIYGIPTTKATQSSNKLAVSGFIDQFANKADLKSFLAQFRKDISSSTTFSLQTLDGGENDQSPSEAGIEANLDIQYTVGLATGVPTTFISVGDDFQDGNLEGFLDIINFLLGESNPPQVLTTSYTQNENTISAKLANQLCNAYAQLGARGTSILFASGDGGVSGSQSAHCSNFVPTFPSGCPFMTSVGATQGVSPETAAAFSSGGFSNVFGIPSYQASAVSGYLSALGSTNSGKFNRSGRGFPDVSTQGVDFQIVSGGQTIGVDGTSCASPTFASVISLVNDRLIAAGKSPLGFLNPFLYSSAGKAALNDVTSGSNPGCSTNGFPAKAGWDPVTGLGTPNFAKLLTAVGL

SEQ ID NO: 50372 - protein, 366 aa, Meripilus giganteus
AIPASCASTITPACLQAIYGIPTTKATQSSNKLAVSGFIDQFANKADLKSFLAQFRKDISSSTTFSLQTLDGGENDQSPSEAGIEANLDIQYTVGLATGVPTTFISVGDDFQDGNLEGFLDIINFLLGESNPPQVLTTSYGQNENTISAKLANQLCNAYAQLGARGTSILFASGDGGVSGSQSAHCSNFVPTFPSGCPFMTSVGATQGVSPETAAAFSSGGFSNVFGIPSYQASAVSGYLSALGSTNSGKFNRSGRGFPDVSTQGVDFQIVSGGQTIGVDGTSCASPTFASVISLVNDRLIAAGKSPLGFLNPFLYSSAGKAALNDVTSGSNPGCSTNGFPAKAGWDPVTGLGTRNFAKLLTAVGL

SEQ ID NO: 50373 - protein, 366 aa, Meripilus giganteus
AIPASCASTITPACLQAIYGIPTTKATQSSNKLAVSGFYDQFANKADLKSFLAQFRKDISSSTTFSLQTLDGGENDQSPSEAGIEANLDIQYTVGLATGVPTTFISVGDDFQDGNLEGFLDIINFLLGESNPPQVLTTSYGQNENTISAKLANQLCNAYAQLGARGTSILFASGDGGVSGSQSAHCSNFVPTFPSGCPFMTSVGATQGVSPETAAAFSSGGFSNVFGIPSYQASAVSGYLSALGSTNSGKFNRSGRGFPDVSTQGVDFQIVSGGQTIGVDGTSCASPTFASVISLVNDRLIAAGKSPLGFLNPFLYSSAGKAALNDVTSGSNPGCSTNGFPAKAGWDPVTGLGTPNFAKLLTAVGL

SEQ ID NO: 50374 - protein, 366 aa, Meripilus giganteus
AIPASCASTITPACLQAIYGIPTTKATQSSNKLAVSGFIDQFANKADLKSFLAQFRKDISSSTTFSLQTLDGGENDQSPSEAGIEANLDIQYTVGLATGVPTTFISVGDDFQDGNLEGFLDIINFLLGEDNPPQVLTTSYGQNENTISAKLANQLCNAYAQLGARGTSILFASGDGGVSGSQSAHCSNFVPTFPSGCPFMTSVGATQGVSPETAAAFSSGGFSNVFGIPSYQASAVSGYLSALGSTNSGKFNRSGRGFPDVSTQGVDFQIVSGGQTIGVDGTSCASPTFASVISLVNDRLIAAGKSPLGFLNPFLYSSAGKAALNDVTSGSNPGCSTNGFPAKAGWDPVTGLGTPNFAKLLTAVGL

SEQ ID NO: 50375 - protein, 366 aa, Meripilus giganteus
AIPASCASTITPACLQAIYGIPTTKATQSSNKLAVSGFIDQFANKADLKSFLAQFRKDISSSTTFSLQTLDGGENDQSPSEAGIEANLDIQYTVGLATGVPTTFISVGDDFQDGNLEGFLDIINFLLGESNPPQVLTTSYGQNENTISAKLANQLCNAYAQLGARGTSILFASGDGGVSGSQSAHCSNFVPTFPSGCPFMTSVGATQGVSPETAAAFSSGGFSNVFGIPSYQASAVSGYLSALGSTNSGKFNRSGRGFPDVSTQGVDFQIVSGGQYIGVDGTSCASPTFASVISLVNDRLIAAGKSPLGFLNPFLYSSAGKAALNDVTSGSNPGCSTNGFPAKAGWDPVTGLGTPNFAKLLTAVGL

SEQ ID NO: 50376 - protein, 366 aa, Meripilus giganteus
AIPASCASTITPACLQAIYGIPTTKATQSSNKLAVSGFIDQYANKADLKSFLAQFRKDISSSTTFSLQTLDGGENDQSPSEAGIEANLDIQYTVGLATGVPTTFISVGDDFQDGNLEGFLDIINFLLGESNPPQVLTTSYGQNENTISAKLANQLCNAYAQLGARGTSILFASGDGGVSGSQSAHCSNFVPTFPSGCPFMTSVGATQGVSPETAAAFSSGGFSNVFGIPSYQASAVSGYLSALGSTNSGKFNRSGRGFPDVSTQGVDFQIVSGGQTIGVDGTSCASPTFASVISLVNDRLIAAGKSPLGFLNPFLYSSAGKAALNDVTSGSNPGCSTNGFPAKAGWDPVTGLGTPNFAKLLTAVGL

SEQ ID NO: 50377 - protein, 366 aa, Meripilus giganteus
AIPASCASTITPACLQAIYGIPTTKATQSSNKLAVSGFIDQFANKADLKSFLAQFRKDISSSTTFSLQTLDGGENDQSPSEAGIEANLDIQYTVGLATGVPTTFISVGDDFQDGNLEGFLDIINFLLGESNPPQVLTTSYGQNENTISAKLANQLCNAYAQLGARGTSILFASGDGGVSGSQSAHCSNFVPTFPSGCPFMTSVGATQGVSPETAAAFSSGGFSNVFGIPSYQASAVSGYLSALGSTNSGKFNRSGRGFPDVSTQGVDFQIVSGGQTIGVDGTSCASPTFASVISLVNDRLIAAGKSPLGFLNPFLYHSAGKAALNDVTSGSNPGCSTNGFPAKAGWDPVTGLGTPNFAKLLTAVGL

SEQ ID NO: 50378 - protein, 366 aa, Meripilus giganteus
AIPASCASTITPACLQAIYGIPTTKATQSSNKLAVSGFIDQFANKADLKSFLAQFRKDISSSTTFSLQTLDGGENDQSPSEAGIEANLDIQYTVGLATGVPTTFISVGDDFQDGYLEGFLDIINFLLGESNPPQVLTTSYGQNENTISAKLANQLCNAYAQLGARGTSILFASGDGGVSGSQSAHCSNFVPTFPSGCPFMTSVGATQGVSPETAAAFSSGGFSNVFGIPSYQASAVSGYLSALGSTNSGKFNRSGRGFPDVSTQGVDFQIVSGGQTIGVDGTSCASPTFASVISLVNDRLIAAGKSPLGFLNPFLYSSAGKAALNDVTSGSNPGCSTNGFPAKAGWDPVTGLGTPNFAKLLTAVGL

SEQ ID NO: 50379 - protein, 366 aa, Meripilus giganteus
AIPASCASTITPACLQAIYGIPTTKATQSSNKLAVSGFIDQFANKADLKSFLAQFRKDISSSTTFSLQTLDGGENDQSPSEAGIEANLDIQYTVGLATGVPTTFISVGDDFQDGNLEGFLDIINFLLGESNPPQVLTTSYGQNENTISAKLANQLCNAYAQLGARGTSILFASGDGGVSGSQSTHCSNFVPTFPSGCPFMTSVGATQGVSPETAAAFSSGGFSNVFGIPSYQASAVSGYLSALGSTNSGKFNRSGRGFPDVSTQGVDFQIVSGGQTIGVDGTSCASPTFASVISLVNDRLIAAGKSPLGFLNPFLYSSAGKAALNDVTSGSNPGCSTNGFPAKAGWDPVTGLGTPNFAKLLTAVGL

SEQ ID NO: 50380 - protein, 366 aa, Meripilus giganteus
AIPASCASTITPACLQAIYGIPTTKATQSSNKLAVSGFIDQFANKADLKSFLAQFRKDISSSTTFSLQTLDGGENDQSPSEAGIEANLDIQYTVGLATGVPTTFISVGDDFQDGNLEGFLDIINFLLGESNPPQVLTTSYGQNENTISAKLANQLCNAYAQLGARGTSILFASGDGGVSGSQSAHCSNFVPTFPSGCPFMTSVGATQGVSPETAAAFSSGGFSNVFGIPSYQASAVSGYLSALGSTNSGKFNRSGRGFPDVSTQGVDFQIVSGGQTIGVDGTSCASPTFASVISLVNDRLIAAGKSPLGFLNPFLYSSAGKAALNDVTSGSNPGCSTNGFPAKAGWDPVTGLGTPNFAKLLTLVGL

SEQ ID NO: 50381 - protein, 366 aa, Meripilus giganteus
AIPASCASTITPACLQAIYGIPTTKATQSSNKLAVSGFIDQFANYADLKSFLAQFRKDISSSTTFSLQTLDGGENDQSPSEAGIEANLDIQYTVGLATGVPTTFISVGDDFQDGNLEGFLDIINFLLGESNPPQVLTTSYGQNENTISAKLANQLCNAYAQLGARGTSILFASGDGGVSGSQSAHCSNFVPTFPSGCPFMTSVGATQGVSPETAAAFSSGGFSNVFGIPSYQASAVSGYLSALGSTNSGKFNRSGRGFPDVSTQGVDFQIVSGGQTIGVDGTSCASPTFASVISLVNDRLIAAGKSPLGFLNPFLYSSAGKAALNDVTSGSNPGCSTNGFPAKAGWDPVTGLGTPNFAKLLTAVGL

SEQ ID NO: 50382 - protein, 366 aa, Meripilus giganteus
AIPASCASTITPACLQAIYGIPTTKATQSSNKLAVSGFIDQFANKADLKSFLAQFRKDISSSTTFSLQTLDGGENDQSPSEAGIEANLDIQYTVGLATGVPTTFISVGDDFQDGNLEGFLDIINFLLGESNPPQVLTTSYGQNENTISAKLANQLCNAYAQLGARGTSILFASGDGGVSGSQSAHCSNFVPTFPSGCPFMTSVGATQGVSPETAAAFSSGGFSNVFGIPSYQASAVSGYLSALGSTNSGKFNRSGRGFPDVSTQGVDFQIVSGGQTIGVDGTSAASPTFASVISLVNDRLIAAGKSPLGFLNPFLYSSAGKAALNDVTSGSNPGCSTNGFPAKAGWDPVTGLGTPNFAKLLTAVGL

SEQ ID NO: 50383 - protein, 366 aa, Meripilus giganteus
AIPASCASTITPACLQAIYGIPTTKATQSSNKLAVSGFIDQFANKADLKSFLAQFRKDISSSTTFSLQTLDGGENDQSPSEAGIEANLDIQYTVGLATGVPTTFISVGDDFQDGNLEGFLDIINFLLGESNPPQVLTTSYGQNENTISAKLANWLCNAYAQLGARGTSILFASGDGGVSGSQSAHCSNFVPTFPSGCPFMTSVGATQGVSPETAAAFSSGGFSNVFGIPSYQASAVSGYLSALGSTNSGKFNRSGRGFPDVSTQGVDFQIVSGGQTIGVDGTSCASPTFASVISLVNDRLIAAGKSPLGFLNPFLYSSAGKAALNDVTSGSNPGCSTNGFPAKAGWDPVTGLGTPNFAKLLTAVGL

SEQ ID NO: 50384 - protein, 366 aa, Meripilus giganteus
AIPASCASTITPACLQAIYGIPTTKATQSSNKLAVSGFIDQFANKADLKSFLAQFRKDISSSTTFSLQTLDGGENDQSPSEAGIEANLDIQYTVGLATGVPTTFISVGDDFQDGRLEGFLDIINFLLGESNPPQVLTTSYGQNENTISAKLANQLCNAYAQLGARGTSILFASGDGGVSGSQSAHCSNFVPTFPSGCPFMTSVGATQGVSPETAAAFSSGGFSNVFGIPSYQASAVSGYLSALGSTNSGKFNRSGRGFPDVSTQGVDFQIVSGGQTIGVDGTSCASPTFASVISLVNDRLIAAGKSPLGFLNPFLYSSAGKAALNDVTSGSNPGCSTNGFPAKAGWDPVTGLGTPNFAKLLTAVGL

SEQ ID NO: 50385 - protein, 366 aa, Meripilus giganteus
AIPASCASTITPACLQAIYGIPTTKATQSSNKLAVSGFIDQFANKADLKSFLAQFRKDISSSTTFSLQTLDGGENDQSPSEAGIEANLDIQYTVGLATGVPTTFISVGDDFQDGNLEGFLDIINFLLGESNPPQVLTTSYGQNENTISAKLANQLCNAYAQLGARGTSILFASGDGGVSGSQSAHCSNFVPTFPSGCPFMTSVGATQGVSPETAARFSSGGFSNVFGIPSYQASAVSGYLSALGSTNSGKFNRSGRGFPDVSTQGVDFQIVSGGQTIGVDGTSCASPTFASVISLVNDRLIAAGKSPLGFLNPFLYSSAGKAALNDVTSGSNPGCSTNGFPAKAGWDPVTGLGTPNFAKLLTAVGL

SEQ ID NO: 50386 - protein, 366 aa, Meripilus giganteus
AIPASCASTITPACLQAIYGIPTTKATQSSNKLAVSGFIDQFANKADLKSFLAQFRKDISSSTTFSLQTLDGGENDQSPSEAGIEANLDIQYTVGLATGVPTTFISVGDDFQDGNLEGFLDIINFLLGESNPPQVLTTSYGQNENTISAKLANQLCNAYAQLGARGTSILFASGDGGVSGSQSAHCSNFVPTFPSGCPFMTSVGATQGVSPETAAAFSSGGFSNVFGIPSYQASAVSGYLSALGSTNSGKFNRSGRGFPDVSTQGVDFQIVSGGQTIGVDGTSCASPTFASVISLVNDRLIAAGKSPLGFLNPFLYSSAGKAALLDVTSGSNPGCSTNGFPAKAGWDPVTGLGTPNFAKLLTAVGL

SEQ ID NO: 50387 - protein, 366 aa, Meripilus giganteus
AIPASCASTITPACLQAIYGIPTTKATQSSNKLAVSGFIDQFANKADLKSFLAQFRKDISSSTTFSLQTLDGGENDQSPSEAGIEANLDIQYTVGLATGVPTTFISVGDDFQDGNLEGFLDIINFLLGESNPPQVLTTSYGQNENTISAKLANQLCNAYAQLGARGTSILFASGDGGVSGSQSAHCSNFVPTFPSGCPFMTSVGATQGVSPETAAAFSSGGFSNVFGIPSYQASAVSGYLSALGSTNSGKFNRSGRGFPDVSTQGVDFQIVSGGQTIGVDGTSCASPTFASVISLVNDRLIAAGKSCLGFLNPFLYSSAGKAALNDVTSGSNPGCSTNGFPAKAGWDPVTGLGTPNFAKLLTAVGL

SEQ ID NO: 50388 - protein, 366 aa, Meripilus giganteus
AIPASCASTITPACLQAIYGIPTTKATQSSNKLAVSGFIDQFANKADLKSFLAQFRKDISSSTTFSLQTLDGGENDQSPSEAGIEANLDIQYTVGLATGVPTTFISVGDDFQDGNLEGFLDIINFLLGESNPPQVLTTSYGQNENTISAKLANQLCNAYAQLGARGTSILFASGDGGVSGSQSAHCSNFVPTFPSGCPFMTSVGATQGVSPETAAAFSSGGFSNVFGIPSYQASAVSGYLSALGSTNSGKFNRSGRGFPDVSTQGVDFQIVSGGQTIGVDGTSCASPTFASVISLVNDRLIAAGKSPLGFLNPFLYNSAGKAALNDVTSGSNPGCSTNGFPAKAGWDPVTGLGTPNFAKLLTAVGL

SEQ ID NO: 50389 - protein, 366 aa, Meripilus giganteus
AIPASCASTITPACLQAIYGIPTTKATQSSNKLAVSGFIDQFANKADLKSFLAQFRKDISSSTTFSLQTLDGGENDQSPSEAGIEANLDIQYTVGLATGVPTTFISVGDWFQDGNLEGFLDIINFLLGESNPPQVLTTSYGQNENTISAKLANQLCNAYAQLGARGTSILFASGDGGVSGSQSAHCSNFVPTFPSGCPFMTSVGATQGVSPETAAAFSSGGFSNVFGIPSYQASAVSGYLSALGSTNSGKFNRSGRGFPDVSTQGVDFQIVSGGQTIGVDGTSCASPTFASVISLVNDRLIAAGKSPLGFLNPFLYSSAGKAALNDVTSGSNPGCSTNGFPAKAGWDPVTGLGTPNFAKLLTAVGL

SEQ ID NO: 50390 - protein, 366 aa, Meripilus giganteus
AIPAYCASTITPACLQAIYGIPTTKATQSSNKLAVSGFIDQFANKADLKSFLAQFRKDISSSTTFSLQTLDGGENDQSPSEAGIEANLDIQYTVGLATGVPTTFISVGDDFQDGNLEGFLDIINFLLGESNPPQVLTTSYGQNENTISAKLANQLCNAYAQLGARGTSILFASGDGGVSGSQSAHCSNFVPTFPSGCPFMTSVGATQGVSPETAAAFSSGGFSNVFGIPSYQASAVSGYLSALGSTNSGKFNRSGRGFPDVSTQGVDFQIVSGGQTIGVDGTSCASPTFASVISLVNDRLIAAGKSPLGFLNPFLYSSAGKAALNDVTSGSNPGCSTNGFPAKAGWDPVTGLGTPNFAKLLTAVGL

SEQ ID NO: 50391 - protein, 366 aa, Meripilus giganteus
AIPASCASTITPACLQAIYGIPTTKATQSSNKLAVSGFIDQFANKADLKSFLAQFRKDISSSTGFSLQTLDGGENDQSPSEAGIEANLDIQYTVGLATGVPTTFISVGDDFQDGNLEGFLDIINFLLGESNPPQVLTTSYGQNENTISAKLANQLCNAYAQLGARGTSILFASGDGGVSGSQSAHCSNFVPTFPSGCPFMTSVGATQGVSPETAAAFSSGGFSNVFGIPSYQASAVSGYLSALGSTNSGKFNRSGRGFPDVSTQGVDFQIVSGGQTIGVDGTSCASPTFASVISLVNDRLIAAGKSPLGFLNPFLYSSAGKAALNDVTSGSNPGCSTNGFPAKAGWDPVTGLGTPNFAKLLTAVGL

SEQ ID NO: 50392 - protein, 366 aa, Meripilus giganteus
AIPASCASTITPACLQAIYGIPTTKATQSSNKLAVSGFIDQFANKADLKSFLAQFRKDISSSTTFSLQTLDGGENDQSPSEAGIEANLDIQYTVGLATGVPTTFISVGDDFQDGNLEGFLDIINFLLGESNPPQVLTTSYGQNENTISAKLANQLCNAYAQLGARGTSILFASGDGGVSGSQSAHCSNFVPTFPSGCPFMTSVGATQGVSPETAAAFSSGGFSNVFGIPSYQASAVSGYLSALGSTNSGKFNRSGRGFPDVSTQGVDFQIVSGGQTIGVDGTSCASPTFASVISLVNDRLIAAGKSPLGFLNPFLYSSAGKAALNDVTSGTNPGCSTNGFPAKAGWDPVTGLGTPNFAKLLTAVGL

SEQ ID NO: 50393 - protein, 366 aa, Meripilus giganteus
AIPASCASTITPACLQAIYGIPTTKATQSSNKLAVSGFIDQFANKADLKSFLAQFRKDISSSTTFSLQTLDGGENDQSPSEAGIEANLDIQYTVGLATGVPTTFISVGDDFRDGNLEGFLDIINFLLGESNPPQVLTTSYGQNENTISAKLANQLCNAYAQLGARGTSILFASGDGGVSGSQSAHCSNFVPTFPSGCPFMTSVGATQGVSPETAAAFSSGGFSNVFGIPSYQASAVSGYLSALGSTNSGKFNRSGRGFPDVSTQGVDFQIVSGGQTIGVDGTSCASPTFASVISLVNDRLIAAGKSPLGFLNPFLYSSAGKAALNDVTSGSNPGCSTNGFPAKAGWDPVTGLGTPNFAKLLTAVGL

SEQ ID NO: 50394 - protein, 366 aa, Meripilus giganteus
AIPASCASTITPACLQAIYGIPTTKATQSSNKLAVSGFIDQFANKADLKSFLAQFRKDISSSTTFSLQTLDGGENDQSPSEAGIEANLDIQYTVGLATGVPTTFISVGDDFQDGNLEGFLDIINFLLGEGNPPQVLTTSYGQNENTISAKLANQLCNAYAQLGARGTSILFASGDGGVSGSQSAHCSNFVPTFPSGCPFMTSVGATQGVSPETAAAFSSGGFSNVFGIPSYQASAVSGYLSALGSTNSGKFNRSGRGFPDVSTQGVDFQIVSGGQTIGVDGTSCASPTFASVISLVNDRLIAAGKSPLGFLNPFLYSSAGKAALNDVTSGSNPGCSTNGFPAKAGWDPVTGLGTPNFAKLLTAVGL

SEQ ID NO: 50395 - protein, 366 aa, Meripilus giganteus
AIPASCASTITPACLQAIYGIPTTKATQSSNKLAVSGFIDQFANKADLKSFLAQFRKDISSSTTFSLQTLDGGENDQSPSEAGIEANLDIQYTVGLATGVPTTFISVGDDFQDGNLEGFLDIINFLLGESNPPQVLTTSYGQNENTISAKLANQLCNAYAQLGARGTSILFASGDGGVSGSQSAHCSNFVPTFPSGCPFMTSVGATQGVSPETAAAFSSGGFSNVFGIPSYQASAVSGYLSLLGSTNSGKFNRSGRGFPDVSTQGVDFQIVSGGQTIGVDGTSCASPTFASVISLVNDRLIAAGKSPLGFLNPFLYSSAGKAALNDVTSGSNPGCSTNGFPAKAGWDPVTGLGTPNFAKLLTAVGL

SEQ ID NO: 50396 - protein, 366 aa, Meripilus giganteus
AIPASCASTITPACLQAIYGIPTTKATQSSNKLAVSGFIDQFANKADLKSFLAQFRKDISSSTTFSLQTLDGGENDQSPSEAGIEANLDIQYTVGLATGVPTTFISVGDDFQDGNLEGFLDIINFLLGESNPPQVLTTSYGQNEPTISAKLANQLCNAYAQLGARGTSILFASGDGGVSGSQSAHCSNFVPTFPSGCPFMTSVGATQGVSPETAAAFSSGGFSNVFGIPSYQASAVSGYLSALGSTNSGKFNRSGRGFPDVSTQGVDFQIVSGGQTIGVDGTSCASPTFASVISLVNDRLIAAGKSPLGFLNPFLYSSAGKAALNDVTSGSNPGCSTNGFPAKAGWDPVTGLGTPNFAKLLTAVGL

SEQ ID NO: 50397 - protein, 366 aa, Meripilus giganteus
AIPASCASTITPACLQAIYGIPTTKATQSSNKLAVSGFIDQFANKADLKSFLAQFRKDISSSTTFSLQTLDGGENDQSPSEAGIEANLDIQYTVGLATGVPTTFISVGDDFQDGNLEGFLDIINFLLGESNPPQVLTTSYGQNENTISAKLANQLCNAYAQLGARGTSILFASGDGGVSGSQSAHCSNFVPTFPSGCPFMTSVGATQGVSPETAAAFSSGGFSNVFGIPSYQASAVSGYLSALGSTNSGKFNRSGRGFPDVSTQGVDFFIVSGGQTIGVDGTSCASPTFASVISLVNDRLIAAGKSPLGFLNPFLYSSAGKAALNDVTSGSNPGCSTNGFPAKAGWDPVTGLGTPNFAKLLTAVGL

SEQ ID NO: 50398 - protein, 366 aa, Meripilus giganteus
AIPASCASTITPACLQAIYGIPTTKATQSSNKLAVSGFIDQFANKADLKSFLAQFRKDISSSTTFSLQTLDGGENDQSPSEAGIEANLDIQYTVGLATGVPTTFISVGDDFQDGNLEGFLDIINFLLGESNPPQVLTTSYGQNEFTISAKLANQLCNAYAQLGARGTSILFASGDGGVSGSQSAHCSNFVPTFPSGCPFMTSVGATQGVSPETAAAFSSGGFSNVFGIPSYQASAVSGYLSALGSTNSGKFNRSGRGFPDVSTQGVDFQIVSGGQTIGVDGTSCASPTFASVISLVNDRLIAAGKSPLGFLNPFLYSSAGKAALNDVTSGSNPGCSTNGFPAKAGWDPVTGLGTPNFAKLLTAVGL

SEQ ID NO: 50399 - protein, 366 aa, Meripilus giganteus
AIPASCASTITPACLQAIYGIPTTKATQSSNKLAVSGFIDQFANKADLKSFLAQFRKDISSSTTFSLQTLDGGENDQSPSEAGIEANLDIQYTVGLATGVPTTFISVGDDFQDGNLEGFLDIINFLLGESNPPQVLTTSYGQNENTISAKLANQLCNAYAQLGARGSSILFASGDGGVSGSQSAHCSNFVPTFPSGCPFMTSVGATQGVSPETAAAFSSGGFSNVFGIPSYQASAVSGYLSALGSTNSGKFNRSGRGFPDVSTQGVDFQIVSGGQTIGVDGTSCASPTFASVISLVNDRLIAAGKSPLGFLNPFLYSSAGKAALNDVTSGSNPGCSTNGFPAKAGWDPVTGLGTPNFAKLLTAVGL

SEQ ID NO: 50400 - protein, 366 aa, Meripilus giganteus
AIPASCASTITPACLQAIYGIPTTKATQSSNKLAVSGFIDQFANKADLKSFLAQFRKDISSSTTFSLQTLDGGENDQSPSEAGIEANLDIQYTVGLATGVPTTFISVGDDFQDGNLEGFLDIINFLLGESNPPQVLTTSYGQNENTISAKLANQLCNAYAQLGARGTSILFASGDGGVSGSQSAHCSNFVPTFPSGCPFMTSVGATQGVSPETAAAFSSGGFSNVFGIPSYQASAVSGYLSALGSTNSGKFNRSGRGFPDVSTQGVDFQIVSGGQTIGVDGTSCSSPTFASVISLVNDRLIAAGKSPLGFLNPFLYSSAGKAALNDVTSGSNPGCSTNGFPAKAGWDPVTGLGTPNFAKLLTAVGL

SEQ ID NO: 50401 - protein, 366 aa, Meripilus giganteus
AIPASCASTITPACLQAIYGIPTTKATQSSNKLAVSGFIDQFANKADLKSFLAQFRKDISSSTCFSLQTLDGGENDQSPSEAGIEANLDIQYTVGLATGVPTTFISVGDDFQDGNLEGFLDIINFLLGESNPPQVLTTSYGQNENTISAKLANQLCNAYAQLGARGTSILFASGDGGVSGSQSAHCSNFVPTFPSGCPFMTSVGATQGVSPETAAAFSSGGFSNVFGIPSYQASAVSGYLSALGSTNSGKFNRSGRGFPDVSTQGVDFQIVSGGQTIGVDGTSCASPTFASVISLVNDRLIAAGKSPLGFLNPFLYSSAGKAALNDVTSGSNPGCSTNGFPAKAGWDPVTGLGTPNFAKLLTAVGL

SEQ ID NO: 50402 - protein, 366 aa, Meripilus giganteus
AIPASCASTITPACLQAIYGIPTTKATQSSNKLAVSGFIDQFANKADLKSFLLQFRKDISSSTTFSLQTLDGGENDQSPSEAGIEANLDIQYTVGLATGVPTTFISVGDDFQDGNLEGFLDIINFLLGESNPPQVLTTSYGQNENTISAKLANQLCNAYAQLGARGTSILFASGDGGVSGSQSAHCSNFVPTFPSGCPFMTSVGATQGVSPETAAAFSSGGFSNVFGIPSYQASAVSGYLSALGSTNSGKFNRSGRGFPDVSTQGVDFQIVSGGQTIGVDGTSCASPTFASVISLVNDRLIAAGKSPLGFLNPFLYSSAGKAALNDVTSGSNPGCSTNGFPAKAGWDPVTGLGTPNFAKLLTAVGL

SEQ ID NO: 50403 - protein, 366 aa, Meripilus giganteus
AIPASCASTITPACLQAIYGIPTTKATQSSNKLAVSGFIDQFANKADLKSFLAQFRKDISSSTTFSLQTLDGGENDQSPSEAGIEANLDIQYTVGLATGVPTTFISVGDDFQDGNLEGFLDIINFLLGESNPPQVLTTSYGQNENTISAKLANQLCNAYAQLGARGTSILFASGDGGVSGSQSAHCSNFVPTFPSGCPFMTSVGATQGVTPETAAAFSSGGFSNVFGIPSYQASAVSGYLSALGSTNSGKFNRSGRGFPDVSTQGVDFQIVSGGQTIGVDGTSCASPTFASVISLVNDRLIAAGKSPLGFLNPFLYSSAGKAALNDVTSGSNPGCSTNGFPAKAGWDPVTGLGTPNFAKLLTAVGL

SEQ ID NO: 50404 - protein, 366 aa, Meripilus giganteus
AIPASCASTITPACLQAIYGIPTTKATQSSNKLAVSGFIDQFANKADLKSFLAQFRKDISSSTTFSLQTLDGGENDQSPSEAGIEANLDIQYTVGWATGVPTTFISVGDDFQDGNLEGFLDIINFLLGESNPPQVLTTSYGQNENTISAKLANQLCNAYAQLGARGTSILFASGDGGVSGSQSAHCSNFVPTFPSGCPFMTSVGATQGVSPETAAAFSSGGFSNVFGIPSYQASAVSGYLSALGSTNSGKFNRSGRGFPDVSTQGVDFQIVSGGQTIGVDGTSCASPTFASVISLVNDRLIAAGKSPLGFLNPFLYSSAGKAALNDVTSGSNPGCSTNGFPAKAGWDPVTGLGTPNFAKLLTAVGL

SEQ ID NO: 50405 - protein, 366 aa, Meripilus giganteus
AIPASCASTITPACLQAIYGIPTTKATQSSNKLAVSGFIDQFANKADLKSFLAQFRKDISSSTTFSLQTLDGGENGQSPSEAGIEANLDIQYTVGLATGVPTTFISVGDDFQDGNLEGFLDIINFLLGESNPPQVLTTSYGQNENTISAKLANQLCNAYAQLGARGTSILFASGDGGVSGSQSAHCSNFVPTFPSGCPFMTSVGATQGVSPETAAAFSSGGFSNVFGIPSYQASAVSGYLSALGSTNSGKFNRSGRGFPDVSTQGVDFQIVSGGQTIGVDGTSCASPTFASVISLVNDRLIAAGKSPLGFLNPFLYSSAGKAALNDVTSGSNPGCSTNGFPAKAGWDPVTGLGTPNFAKLLTAVGL

SEQ ID NO: 50406 - protein, 366 aa, Meripilus giganteus
AIPASCASTITPACLQAIYGIPTTKATQSSNKLAVSGFIDQFANKADLKSFLAQFRKDISSSTTFSLQTLDGGENDQSPSEAGIEANLDIQYTVGLATGVPTTFISVGDDFQDGNLEGFLDIINFLLGESNPPQVLTTSYGQNENTISAKLANQLCNAYAQLGARGTSILFASGDGGVSGSQSAHCSNFVPTFPSGCPFMTSVGATQGVSPETAAAFSSGGFSNVFGTPSYQASAVSGYLSALGSTNSGKFNRSGRGFPDVSTQGVDFQIVSGGQTIGVDGTSCASPTFASVISLVNDRLIAAGKSPLGFLNPFLYSSAGKAALNDVTSGSNPGCSTNGFPAKAGWDPVTGLGTPNFAKLLTAVGL

SEQ ID NO: 50407 - protein, 366 aa, Meripilus giganteus
AIPASCASTITPACLQAIYGIPTTKATQSSNKLAVSGFIDQFANKADLKSFLAQFRKDISSSTTFSLQTLDGGENDQSPSEAGIEANLDIQYTVGLATGVPTTFISVGDDFQDGNLEGFLDIINFLLGESNPPQVLTTSYGQNENTISAKLANQLCNAYAQLGARGTSILFASGDGGVSGSQSAHCSNFVPTFPSGCPFMTSVGATQGVSPEWAAAFSSGGFSNVFGIPSYQASAVSGYLSALGSTNSGKFNRSGRGFPDVSTQGVDFQIVSGGQTIGVDGTSCASPTFASVISLVNDRLIAAGKSPLGFLNPFLYSSAGKAALNDVTSGSNPGCSTNGFPAKAGWDPVTGLGTPNFAKLLTAVGL

SEQ ID NO: 50408 - protein, 366 aa, Meripilus giganteus
AIPASCASTITPACLQAIYGIPTTKATQSSNKLAVSGFIDQFANKADLKSFLAQFRKDISSSTTFSLQTLDGGENDQSPSEAGIEANLDIQYTVGLATGVPTTFISVGDDFQDGNLEGFLDIINFLLGESNPPQVLTTSYGQNENTISAKLANQLCNAYAQLGARGTSILFASGDGGVSGSQSDHCSNFVPTFPSGCPFMTSVGATQGVSPETAAAFSSGGFSNVFGIPSYQASAVSGYLSALGSTNSGKFNRSGRGFPDVSTQGVDFQIVSGGQTIGVDGTSCASPTFASVISLVNDRLIAAGKSPLGFLNPFLYSSAGKAALNDVTSGSNPGCSTNGFPAKAGWDPVTGLGTPNFAKLLTAVGL

SEQ ID NO: 50409 - protein, 366 aa, Meripilus giganteus
AIPASCASTITPACLQAIYGIPTTKATQSSNKLAVSGFIDQFANKADLKSFLAQFRKDISSNTTFSLQTLDGGENDQSPSEAGIEANLDIQYTVGLATGVPTTFISVGDDFQDGNLEGFLDIINFLLGESNPPQVLTTSYGQNENTISAKLANQLCNAYAQLGARGTSILFASGDGGVSGSQSAHCSNFVPTFPSGCPFMTSVGATQGVSPETAAAFSSGGFSNVFGIPSYQASAVSGYLSALGSTNSGKFNRSGRGFPDVSTQGVDFQIVSGGQTIGVDGTSCASPTFASVISLVNDRLIAAGKSPLGFLNPFLYSSAGKAALNDVTSGSNPGCSTNGFPAKAGWDPVTGLGTPNFAKLLTAVGL

SEQ ID NO: 50410 - protein, 366 aa, Meripilus giganteus
AIPASCASTITPACLQAIYGIPTTKATQSSNKLAVSGFIDQFANKADLKSFLAQFRKDISSSTTFSLQTLDGGENDQSPSEAGIEANLDIQYTVGLATGVPTTFISVGDDFQDGNLEGFLDIINFLLGESNPPQVLTTSYGQNENTISAKLAAQLCNAYAQLGARGTSILFASGDGGVSGSQSAHCSNFVPTFPSGCPFMTSVGATQGVSPETAAAFSSGGFSNVFGIPSYQASAVSGYLSALGSTNSGKFNRSGRGFPDVSTQGVDFQIVSGGQTIGVDGTSCASPTFASVISLVNDRLIAAGKSPLGFLNPFLYSSAGKAALNDVTSGSNPGCSTNGFPAKAGWDPVTGLGTPNFAKLLTAVGL

SEQ ID NO: 50411 - protein, 366 aa, Meripilus giganteus
AIPASCASTITPACLQAIYGIPTTKATQSSNKLAVSGFIDQFANKADLKSFLAQFRKDISSSTTFSLQTLDGGENDQSPSEAGIEANLDIQYTVGLATGVPTTFISVGDDFQDGNLEGFLDIINFLLGESNPPQVLTTSYGQNENTISAKLANQLCNAYAQLGARGTSILFASGDGGVSGSQSAHCSNFVPTFPSGCPFMTSVGATQGVSPETAAAFSSGGFSNVFGIPSYQASAVSGYLSALGSTNSGKFNRSGRGFPDVSTQGVDFQIVSGGQTIGVDGTSCASPTFASVISLVNDRLIAAGKSPLGFLNPFLYSSAGKAALNDVTSGSNPGCSTNGFPAKAGWDPVTGLGTPNFAKLLYAVGL

SEQ ID NO: 50412 - protein, 366 aa, Meripilus giganteus
AIPASCASTITPACLQAIYGIPTTKATQSSNKLAVSGFIDQFANKADLKSFLAQFRKDDSSSTTFSLQTLDGGENDQSPSEAGIEANLDIQYTVGLATGVPTTFISVGDDFQDGNLEGFLDIINFLLGESNPPQVLTTSYGQNENTISAKLANQLCNAYAQLGARGTSILFASGDGGVSGSQSAHCSNFVPTFPSGCPFMTSVGATQGVSPETAAAFSSGGFSNVFGIPSYQASAVSGYLSALGSTNSGKFNRSGRGFPDVSTQGVDFQIVSGGQTIGVDGTSCASPTFASVISLVNDRLIAAGKSPLGFLNPFLYSSAGKAALNDVTSGSNPGCSTNGFPAKAGWDPVTGLGTPNFAKLLTAVGL

SEQ ID NO: 50413 - protein, 366 aa, Meripilus giganteus
AIPASCASTITPACLQAIYGIPTTKATQSSNKLAVSGFIDQFANKADLKSFLAQFRKDISSSTTFSLQTLDGGENDQSPSEAGIEANLDIQYTVGLATGVPTTFISVGDDFQDGNLEGFLDIINFLLGESNPPQVLTTSYGQNENTISAKLANQLCNAYAQLGARGTSILFASGDGGVSGSQSAHCSNFVPTFPSGCPFMTSVGATQGVSPETAAAFSSGGFSNVFGIPSYQASAVSGYLSALGSTNSGKFNRSGRGFPDVSTQGVVFQIVSGGQTIGVDGTSCASPTFASVISLVNDRLIAAGKSPLGFLNPFLYSSAGKAALNDVTSGSNPGCSTNGFPAKAGWDPVTGLGTPNFAKLLTAVGL

SEQ ID NO: 50414 - protein, 366 aa, Meripilus giganteus
AIPASCASTITPACLQAIYGIPTTKATQSSNKLAVSGFIDQFANKADLKSFLAQFRKDISSSTTFSLQTLDGGENDQSPSEAGIEANLDIQYTVGLATGVPTTFISVGDDFQDGNLEGFLDIINFLLGESNPPQVLTTSYGQNENTISAKLANQLCNAYAQLGARGTSILFASGDGGVSGSQSAHCSNFVPTFPSGCPFMTSVGATQGVSPETAAAFSSGGFSNVFGIPSYQASAVSGYLSALGSTNSGKFNRSGRGFPDVSTQGVDFQIVSGGQTIGVDGTSCASPTFASVISLVNDRLIAAGKSPLGFLNPFLYSSAGKAALNDVTHGSNPGCSTNGFPAKAGWDPVTGLGTPNFAKLLTAVGL

SEQ ID NO: 50415 - protein, 366 aa, Meripilus giganteus
AIPASCASTITPACLQAIYGIPTTKATQSSNKLAVSGFIDQFANKADLKSFLAQFRKDGSSSTTFSLQTLDGGENDQSPSEAGIEANLDIQYTVGLATGVPTTFISVGDDFQDGNLEGFLDIINFLLGESNPPQVLTTSYGQNENTISAKLANQLCNAYAQLGARGTSILFASGDGGVSGSQSAHCSNFVPTFPSGCPFMTSVGATQGVSPETAAAFSSGGFSNVFGIPSYQASAVSGYLSALGSTNSGKFNRSGRGFPDVSTQGVDFQIVSGGQTIGVDGTSCASPTFASVISLVNDRLIAAGKSPLGFLNPFLYSSAGKAALNDVTSGSNPGCSTNGFPAKAGWDPVTGLGTPNFAKLLTAVGL

SEQ ID NO: 50416 - protein, 366 aa, Meripilus giganteus
AIPASCASTITPACLQAIYGIPTTKATQSSNKLAVSGFIDQFANKADLKSFLAQFRKDISSSTTFSLQTLDGGENDQSPSEAGIEANLDIQYTVGLATGVPTTFISVGDDYQDGNLEGFLDIINFLLGESNPPQVLTTSYGQNENTISAKLANQLCNAYAQLGARGTSILFASGDGGVSGSQSAHCSNFVPTFPSGCPFMTSVGATQGVSPETAAAFSSGGFSNVFGIPSYQASAVSGYLSALGSTNSGKFNRSGRGFPDVSTQGVDFQIVSGGQTIGVDGTSCASPTFASVISLVNDRLIAAGKSPLGFLNPFLYSSAGKAALNDVTSGSNPGCSTNGFPAKAGWDPVTGLGTPNFAKLLTAVGL

SEQ ID NO: 50417 - protein, 366 aa, Meripilus giganteus
AIPASCASTITPACLQAIYGIPTTKATQSSNKLAVSGFIDQFANKADLKSFLAQFRKDISSSTTFSLQTLDGGENDQSPSEAGIEANLDIQYTVGLATGVPTTFISVGDDFQDGNLEGFLDIINFLLGESNPPQVLTTSYGQNENTISAKLANQLCNAYAQLGARGTSILFASGDGGVSGSQSAHCSNFVPTFPSGCPFMTSVGATQGVSPETAAAFSSGGFSNVFGIPSYQASAVSGYLSALGSTNSGKFNRSGRGFPDVSTQGVDFQIVSGGQTIGVDGTSCASPTFASVISLVNDRLIAAGKSPLGFLNPFLYSSAGKAALNDVTLGSNPGCSTNGFPAKAGWDPVTGLGTPNFAKLLTAVGL

SEQ ID NO: 50418 - protein, 366 aa, Meripilus giganteus
AIPASCASTITPACLQAIYGIPTTKATQSSNKLAVSGFIDQFANKADLKSFLAQFRKDISSSTTFSLQTLDGGENDQSPSEAGIEANLDIQYTVGLATGVPTTFISVGDDFQDGNLEGFLDIINFLLGESNPPQVLTTSYGQNENTISAKLANQLCNAYAQLGARGTSILFASGDGGVSGSGSAHCSNFVPTFPSGCPFMTSVGATQGVSPETAAAFSSGGFSNVFGIPSYQASAVSGYLSALGSTNSGKFNRSGRGFPDVSTQGVDFQIVSGGQTIGVDGTSCASPTFASVISLVNDRLIAAGKSPLGFLNPFLYSSAGKAALNDVTSGSNPGCSTNGFPAKAGWDPVTGLGTPNFAKLLTAVGL

SEQ ID NO: 50419 - protein, 366 aa, Meripilus giganteus
AIPASCASTITPACLQAIYGIPTTKATQSSNKLAVSGFIDQFANKADLKSFLAQFRKDISSSTTFSLQTLDGGENDQSPSEAGIEANLDIQYTVGLATGVPTTFISVGDDFQDGNLEGFLDIINFLLGESNPPQVLTTSYGQNENTISAKLANQLCNAYAQLGARGTSILFASGDGGVSGSQSAHCSNFVPTFPSGCPLMTSVGATQGVSPETAAAFSSGGFSNVFGIPSYQASAVSGYLSALGSTNSGKFNRSGRGFPDVSTQGVDFQIVSGGQTIGVDGTSCASPTFASVISLVNDRLIAAGKSPLGFLNPFLYSSAGKAALNDVTSGSNPGCSTNGFPAKAGWDPVTGLGTPNFAKLLTAVGL

SEQ ID NO: 50420 - protein, 366 aa, Meripilus giganteus
AIPASCASTITPACLQAIYGIPTTKATQSSNKLAVSGFIDQFANKADLKSFLAQFRKDISSSTTFSLQTLDGGENDQSPSEAGIEANLDIQYTVGLATGVPTTFISVGDDFQDGNLEGFLDIINFLLGESNPPQVLTTSYGQNENTISAKLANQLCNAYAQLGARGTSILFASGDGGVSGSQSAHCSNFVPTFPSGCPFMTSVGATQGVSPETAAAFSSGGFSNVFGIPSYQASAVFGYLSALGSTNSGKFNRSGRGFPDVSTQGVDFQIVSGGQTIGVDGTSCASPTFASVISLVNDRLIAAGKSPLGFLNPFLYSSAGKAALNDVTSGSNPGCSTNGFPAKAGWDPVTGLGTPNFAKLLTAVGL

SEQ ID NO: 50421 - protein, 366 aa, Meripilus giganteus
AIPASCASTITPACLQAIYGIPTTKATQSSNKLAVSGFIDQFANKADLKSFLAQFRKDISSSTTFSLQTLDGGENDQSPSEAGIEANLDIQYTVGLATGVPTTFISVGDDFQDGNLEGFLDIINFLLGESNPPQVLTTSYGQNENTISAKLANQLCNAYAQLGARGTSILFASGDGGVSGSQSAHCSNFVPTFPSGCPFMTSVGATQGVSPETAAAFSSGGFSNVFGIPSYQASAVSGYLSALGSTNSGKFNRSGRGFPDVSTQGVDFQIVSGGQTIGVDGTSCASPTFASVISLVNDRLIAAGKSPLGFLNPFLYSSAGKAALNDVTSGSNPGCSTNGFPAKAGWDGVTGLGTPNFAKLLTAVGL

SEQ ID NO: 50422 - protein, 366 aa, Meripilus giganteus
AIPASCASTITPACLQAIYGIPTTKATQSSNKLAVSGFIDQFANKADLKSFLAQFRKDISSSTTFSLQTLDGGENDQSPSEAGIEANLDIQYTVGLATGVPTIFISVGDDFQDGNLEGFLDIINFLLGESNPPQVLTTSYGQNENTISAKLANQLCNAYAQLGARGTSILFASGDGGVSGSQSAHCSNFVPTFPSGCPFMTSVGATQGVSPETAAAFSSGGFSNVFGIPSYQASAVSGYLSALGSTNSGKFNRSGRGFPDVSTQGVDFQIVSGGQTIGVDGTSCASPTFASVISLVNDRLIAAGKSPLGFLNPFLYSSAGKAALNDVTSGSNPGCSTNGFPAKAGWDPVTGLGTPNFAKLLTAVGL

SEQ ID NO: 50423 - protein, 366 aa, Meripilus giganteus
AIPASCASTITPACLQAIYGIPTTKATQSSNKLAVSGFIDQFANKADLKSFLAQFRPDISSSTTFSLQTLDGGENDQSPSEAGIEANLDIQYTVGLATGVPTTFISVGDDFQDGNLEGFLDIINFLLGESNPPQVLTTSYGQNENTISAKLANQLCNAYAQLGARGTSILFASGDGGVSGSQSAHCSNFVPTFPSGCPFMTSVGATQGVSPETAAAFSSGGFSNVFGIPSYQASAVSGYLSALGSTNSGKFNRSGRGFPDVSTQGVDFQIVSGGQTIGVDGTSCASPTFASVISLVNDRLIAAGKSPLGFLNPFLYSSAGKAALNDVTSGSNPGCSTNGFPAKAGWDPVTGLGTPNFAKLLTAVGL

SEQ ID NO: 50424 - protein, 366 aa, Meripilus giganteus
AIPASCASTITPACLQAIYGIPTTKATQNSNKLAVSGFIDQFANKADLKSFLAQFRKDISSSTTFSLQTLDGGENDQSPSEAGIEANLDIQYTVGLATGVPTTFISVGDDFQDGNLEGFLDIINFLLGESNPPQVLTTSYGQNENTISAKLANQLCNAYAQLGARGTSILFASGDGGVSGSQSAHCSNFVPTFPSGCPFMTSVGATQGVSPETAAAFSSGGFSNVFGIPSYQASAVSGYLSALGSTNSGKFNRSGRGFPDVSTQGVDFQIVSGGQTIGVDGTSCASPTFASVISLVNDRLIAAGKSPLGFLNPFLYSSAGKAALNDVTSGSNPGCSTNGFPAKAGWDPVTGLGTPNFAKLLTAVGL

SEQ ID NO: 50425 - protein, 366 aa, Meripilus giganteus
AIPASCASTITPACLQAIYGIPTTKATQSSNKLAVSGFIDQFANKADLKSFLAQFRKDISSSTDFSLQTLDGGENDQSPSEAGIEANLDIQYTVGLATGVPTTFISVGDDFQDGNLEGFLDIINFLLGESNPPQVLTTSYGQNENTISAKLANQLCNAYAQLGARGTSILFASGDGGVSGSQSAHCSNFVPTFPSGCPFMTSVGATQGVSPETAAAFSSGGFSNVFGIPSYQASAVSGYLSALGSTNSGKFNRSGRGFPDVSTQGVDFQIVSGGQTIGVDGTSCASPTFASVISLVNDRLIAAGKSPLGFLNPFLYSSAGKAALNDVTSGSNPGCSTNGFPAKAGWDPVTGLGTPNFAKLLTAVGL

SEQ ID NO: 50426 - protein, 366 aa, Meripilus giganteus
AIPASCASTITPACLQAIYGIPTTKATQSSNKLAVSGFIDQFANKADLKSFLAQFRKDISSSTTFSLQTLDGGENDQSPSEAGIEANLDIQYTVGLATGVPTTFISVGDDFQDGNLEGFLDIINFLLGESNPPQVLTTSYGQNENTISAKLANQLCNAYAQLGARGTSILFASGDGGVSGSQSAHCSNFVPTFPSGCPFMTSVGATQGVSPETAAAFSSGGFSNVFGIPSYQASAVSGYLSALGSTNSGKFNRSGRGFPDVSTQGVDFQIVSGGQTIGVDGTSCASPTFASVISLVNDRLIAAGKSPLGFLNPFLYSSAGKAALNDVTVGSNPGCSTNGFPAKAGWDPVTGLGTPNFAKLLTAVGL

SEQ ID NO: 50427 - protein, 366 aa, Meripilus giganteus
AIPASCASTITPACLQAIYGIPTTKATQSSNKLAVSGFIDQFANKADLKSFLAQFRKDISSSTTFSLQTLDGGENDQSPSEAGIEANLDIQYTVGLATGVPTTFISVGDDFQDGNLEGFLDIINFLLGLSNPPQVLTTSYGQNENTISAKLANQLCNAYAQLGARGTSILFASGDGGVSGSQSAHCSNFVPTFPSGCPFMTSVGATQGVSPETAAAFSSGGFSNVFGIPSYQASAVSGYLSALGSTNSGKFNRSGRGFPDVSTQGVDFQIVSGGQTIGVDGTSCASPTFASVISLVNDRLIAAGKSPLGFLNPFLYSSAGKAALNDVTSGSNPGCSTNGFPAKAGWDPVTGLGTPNFAKLLTAVGL

SEQ ID NO: 50428 - protein, 366 aa, Meripilus giganteus
AIPASCASTITPACLQAIYGIPTTKATQSSNKLAVSGFIDQFANKADLKSFLAQFRKDISSSTTFSLQTLDGGENDQSPSEAGIEANLDIQYTVGLATGVPTTFISVGDDFQDGNLEGFLDIINFLLGESNPPQVLTTSYGQNENTISAKLANQLCNAYAQLGARGTSILFASGDGGVSGSQSAHCSNFVPTFPSGCPFMTSVGATQGVSPETAAAFSSGGFSNVFGIPSYQASAVSGYLSALGSTNSGKFNRSGRGFPDVSTQGVDFQIVSGGQTIGVDGTSCASPTFASVISLVNDRLIAAGKSPLGFLNPFLYSSAGKAALNDVTSGSNPGCSTNGFPAKAGWDPVTGLGTPNFAKLLMAVGL

SEQ ID NO: 50429 - protein, 366 aa, Meripilus giganteus
AIPASCASTITPACLQAIYGIPTTKATQSSNKLAVSGFIDQFANKADLKSFLAQFRKDISSSTTFSLQTLDGGENDQSPSEAGIEANLDIQYTVGLATGVPTTFISVGDDFQDGNLEGFLDIINFLLGESNPPQVLTTSYGQNEVTISAKLANQLCNAYAQLGARGTSILFASGDGGVSGSQSAHCSNFVPTFPSGCPFMTSVGATQGVSPETAAAFSSGGFSNVFGIPSYQASAVSGYLSALGSTNSGKFNRSGRGFPDVSTQGVDFQIVSGGQTIGVDGTSCASPTFASVISLVNDRLIAAGKSPLGFLNPFLYSSAGKAALNDVTSGSNPGCSTNGFPAKAGWDPVTGLGTPNFAKLLTAVGL

SEQ ID NO: 50430 - protein, 366 aa, Meripilus giganteus
AIPASCASTITPACLQAIYGIPTTKATQSSNKLAVSGFIDQFANKADLKSFLAQFRKDISSSTTFSLQTLDGGENDQSPSEAGIEANLDIQYTVGLATGVPTTFISVGDDFQDGNLEGFLDIINFLLGESNPPQVLTTSYGQNENTISAKLANQLCNAYAQLGARGTSILFASGDGGVSGSQSAHCSNFVPTFPSGCPFMTSVGATQGVSPETAAAFSSGGFSNVFGIPSYQASAVSGYLSALGSTNSGKFNRSGRGFPDVSTQGVDFQIVSGGQTIGVDGTSCASPTFASVISLVNDRLIASGKSPLGFLNPFLYSSAGKAALNDVTSGSNPGCSTNGFPAKAGWDPVTGLGTPNFAKLLTAVGL

SEQ ID NO: 50431 - protein, 366 aa, Meripilus giganteus
AIPASCASTITPACLQAIYGIPTTKATQSSNKLAVSGFIDQFANKADLKSFLAQFRKDISSSTTFSLQTLDGGENDQSPSAAGIEANLDIQYTVGLATGVPTTFISVGDDFQDGNLEGFLDIINFLLGESNPPQVLTTSYGQNENTISAKLANQLCNAYAQLGARGTSILFASGDGGVSGSQSAHCSNFVPTFPSGCPFMTSVGATQGVSPETAAAFSSGGFSNVFGIPSYQASAVSGYLSALGSTNSGKFNRSGRGFPDVSTQGVDFQIVSGGQTIGVDGTSCASPTFASVISLVNDRLIAAGKSPLGFLNPFLYSSAGKAALNDVTSGSNPGCSTNGFPAKAGWDPVTGLGTPNFAKLLTAVGL

SEQ ID NO: 50432 - protein, 366 aa, Meripilus giganteus
AIPASCASTITPACLQAIYGIPTTKATQSSNKLAVSGFIDQFANKADLKSFLAQFRKDISSSTTFSLQTLDGGENDQSPSEAGIEANLDIQYTVGLATGVPTTFISVGDDFQDGNLEGFLDIINFLLGESNPPQVLTTSYGQNENTISAKLANQLCNAYAQLGARGTSILFASGDGGVSGSQSAHCSNFVPTFPSGCPFMTSVGATQGVSPETAAAFSSGGFSNVFGIPSYQASAVIGYLSALGSTNSGKFNRSGRGFPDVSTQGVDFQIVSGGQTIGVDGTSCASPTFASVISLVNDRLIAAGKSPLGFLNPFLYSSAGKAALNDVTSGSNPGCSTNGFPAKAGWDPVTGLGTPNFAKLLTAVGL

SEQ ID NO: 50433 - protein, 366 aa, Meripilus giganteus
AIPASCASTITPACLQAIYGIPTTKATQSSNKLAVSGFIDQFANKADLKSFLAQFRKDISSSTTFSLQTLDGGENDQSPSEAGIEANLDIQYTVGLATGVPTTFISVGDDFQDGNLEGFLDIINFLLGESNPPQVLTTSYGQNENTISAKLANQLCNAYAQLGARGTSILFASGDGGVSGSQSAHCSNFVPTFPSGCPFMTSVGATQGVSPETAAAFSSGGFSNVFGIPSYQASAVSGYLSALGSTNSGKFNRSGRGFPDVSTQGVDFQIVSGGQTIGVDGTSCASPTFASVISLVNDRLIAAGHSPLGFLNPFLYSSAGKAALNDVTSGSNPGCSTNGFPAKAGWDPVTGLGTPNFAKLLTAVGL

SEQ ID NO: 50434 - protein, 366 aa, Meripilus giganteus
AIPASCASTITPACLQAIYGIPTTKATQSSNKLAVSGFIFQFANKADLKSFLAQFRKDISSSTTFSLQTLDGGENDQSPSEAGIEANLDIQYTVGLATGVPTTFISVGDDFQDGNLEGFLDIINFLLGESNPPQVLTTSYGQNENTISAKLANQLCNAYAQLGARGTSILFASGDGGVSGSQSAHCSNFVPTFPSGCPFMTSVGATQGVSPETAAAFSSGGFSNVFGIPSYQASAVSGYLSALGSTNSGKFNRSGRGFPDVSTQGVDFQIVSGGQTIGVDGTSCASPTFASVISLVNDRLIAAGKSPLGFLNPFLYSSAGKAALNDVTSGSNPGCSTNGFPAKAGWDPVTGLGTPNFAKLLTAVGL

SEQ ID NO: 50435 - protein, 366 aa, Meripilus giganteus
AIPASCASTITPACLQAIYGIPTTKATQSSNKLAVSGFIDQFANKADLKSFLAQFRKDISSSTTFSLQTLDGGENDQSPSEAGIEANLDIQYTVGLATGVPTTFISVGDDFQDGNLEGFLDIINFLLGESNPPQVLTTSYGQNENTISAKLANQLCNAYAQLGARGTSILFASGDGGVSGSQSAHCSNFVPTFPSGCPFMTSVGATQGVSPETAAAYSSGGFSNVFGIPSYQASAVSGYLSALGSTNSGKFNRSGRGFPDVSTQGVDFQIVSGGQTIGVDGTSCASPTFASVISLVNDRLIAAGKSPLGFLNPFLYSSAGKAALNDVTSGSNPGCSTNGFPAKAGWDPVTGLGTPNFAKLLTAVGL

SEQ ID NO: 50436 - protein, 366 aa, Meripilus giganteus
AIPASCASTITPACLQAIYGIPTTKATQSSNKLAVSGFIDQFANKADLKSFLAQFRKDISSSTTFSLQTLDGGENDQSPSEAGIEANLDIQYTVGLATGVPTTFISVGDDFQDGNLEGFLDIINFLLGVSNPPQVLTTSYGQNENTISAKLANQLCNAYAQLGARGTSILFASGDGGVSGSQSAHCSNFVPTFPSGCPFMTSVGATQGVSPETAAAFSSGGFSNVFGIPSYQASAVSGYLSALGSTNSGKFNRSGRGFPDVSTQGVDFQIVSGGQTIGVDGTSCASPTFASVISLVNDRLIAAGKSPLGFLNPFLYSSAGKAALNDVTSGSNPGCSTNGFPAKAGWDPVTGLGTPNFAKLLTAVGL

SEQ ID NO: 50437 - protein, 366 aa, Meripilus giganteus
AIPASCASTITPACLQAIYGIPTTKATQSSNKLAVSGFIDQFANKADLKSFLAQFRKDISSSTTFSLQTLDGGENDQSPSEAGIEANLDIQYTVGLATGVPTTFISVGDDSQDGNLEGFLDIINFLLGESNPPQVLTTSYGQNENTISAKLANQLCNAYAQLGARGTSILFASGDGGVSGSQSAHCSNFVPTFPSGCPFMTSVGATQGVSPETAAAFSSGGFSNVFGIPSYQASAVSGYLSALGSTNSGKFNRSGRGFPDVSTQGVDFQIVSGGQTIGVDGTSCASPTFASVISLVNDRLIAAGKSPLGFLNPFLYSSAGKAALNDVTSGSNPGCSTNGFPAKAGWDPVTGLGTPNFAKLLTAVGL

SEQ ID NO: 50438 - protein, 366 aa, Meripilus giganteus
AIPASCASTITPACLQAIYGIPTTKATQSSNKLAVSGFIDQFANKADLKSFLAQFRKDISSSTTFSLQTLDGGENDQSPSEAGIEANLDIQYTVGLATGVPTTFISVGDDFQDGNLEGFLDIINFLLGESNPPQVLTTSYGQNENNISAKLANQLCNAYAQLGARGTSILFASGDGGVSGSQSAHCSNFVPTFPSGCPFMTSVGATQGVSPETAAAFSSGGFSNVFGIPSYQASAVSGYLSALGSTNSGKFNRSGRGFPDVSTQGVDFQIVSGGQTIGVDGTSCASPTFASVISLVNDRLIAAGKSPLGFLNPFLYSSAGKAALNDVTSGSNPGCSTNGFPAKAGWDPVTGLGTPNFAKLLTAVGL

SEQ ID NO: 50439 - protein, 366 aa, Meripilus giganteus
AIPASCASTITPACLQAIYGIPTTKATQSSNKLAVSGFIDQFANKADLKSFLAQFRKDISSSTTFSLQTLDGGENDQSPSEAGIEANLDIQYTVGLATGVPTTFISVGDDFQDGNLEGFLDIINFLLGESNPPQVLTTSYGQNENTISAKLANQLCNAYAQLGARGTSILFASGDGGVSGSQSAHCSNFVPTFPSGCPFMTSVGATQGVSPETAAAFSSGGFSNVFGIPSYQASAVSGYLSALGSTNSGKFNRSGRGFPDVSTQGVDFVIVSGGQTIGVDGTSCASPTFASVISLVNDRLIAAGKSPLGFLNPFLYSSAGKAALNDVTSGSNPGCSTNGFPAKAGWDPVTGLGTPNFAKLLTAVGL

SEQ ID NO: 50440 - protein, 366 aa, Meripilus giganteus
AIPASCASTITPACLQAIYGIPTTKATQSSNKLAVSGFIDQFANKADLKSFLAQFRKDISSSTTFSLQTLDGGENDQSPSEAGIEANLDIQYTVGLATGVPTTFISVGDDFQDGNLEGFLDIINFLLGESNPPQVLTTSYGANENTISAKLANQLCNAYAQLGARGTSILFASGDGGVSGSQSAHCSNFVPTFPSGCPFMTSVGATQGVSPETAAAFSSGGFSNVFGIPSYQASAVSGYLSALGSTNSGKFNRSGRGFPDVSTQGVDFQIVSGGQTIGVDGTSCASPTFASVISLVNDRLIAAGKSPLGFLNPFLYSSAGKAALNDVTSGSNPGCSTNGFPAKAGWDPVTGLGTPNFAKLLTAVGL

SEQ ID NO: 50441 - protein, 366 aa, Meripilus giganteus
AIPASCASTITPACLQAIYGIPTTKATQSSNKLAVSGFIDQFANKADLKSFLALFRKDISSSTTFSLQTLDGGENDQSPSEAGIEANLDIQYTVGLATGVPTTFISVGDDFQDGNLEGFLDIINFLLGESNPPQVLTTSYGQNENTISAKLANQLCNAYAQLGARGTSILFASGDGGVSGSQSAHCSNFVPTFPSGCPFMTSVGATQGVSPETAAAFSSGGFSNVFGIPSYQASAVSGYLSALGSTNSGKFNRSGRGFPDVSTQGVDFQIVSGGQTIGVDGTSCASPTFASVISLVNDRLIAAGKSPLGFLNPFLYSSAGKAALNDVTSGSNPGCSTNGFPAKAGWDPVTGLGTPNFAKLLTAVGL

SEQ ID NO: 50442 - protein, 366 aa, Meripilus giganteus
AIPASCASTITPACLQAIYGIPTTKATQSSNKLAVSGFIDQFANKADLKSFLAQFRKDISSSTTFSLQTLDGGENDQSPSEAGIEANLDIQYTVGLATGVPTTFISVGDDFQDGNLEGFLDIINFLLGESNPPQVLTTSYGQNENTISAKLANQLCNAYAQLGARGTSILFASGDGGVSGSQSAHCSNFVPTFPSGCPFMTSVGATQGVSPETAAAFSSGGFSNVFGIPSYQASAVSGYLSALGSTNSGKFNRSGRGFPDVSTQGVDFQIVSGGQTIGVDGTSCASPTFASVISLPNDRLIAAGKSPLGFLNPFLYSSAGKAALNDVTSGSNPGCSTNGFPAKAGWDPVTGLGTPNFAKLLTAVGL

SEQ ID NO: 50443 - protein, 366 aa, Meripilus giganteus
AIPASCASTITPACLQAIYGIPTTKATQSSNKLAVSGFIDQFANKADLKSFLAQFRKDISSSTTFSLQTLDGGENDQSPSEAGIEANLDIQYTVGLATGVPTTFISVGDDFQDGNLEGFLDIINFLLGESNPPQVLTTSYGQNENTISAKLANQLCNAYAQLGARGTSILFASGDGGVSGSQSAHCSNFVPTFPSGCPFMTSVGATQGVSPETAAAFSSGGFSNVFGIPSYQASAVSGYLSALGSTNSGKFNRSGRGFPDVSTQGVDFQIVSGGQTIGVDGTSCASPTFASVISLVNDRLIAAGKSPLGFLNPFLYSSAGSAALNDVTSGSNPGCSTNGFPAKAGWDPVTGLGTPNFAKLLTAVGL

SEQ ID NO: 50444 - protein, 366 aa, Meripilus giganteus
AIPASCASTITPACLQAIYGIPTTKATQSSNKLAVSGFIDQFANKADLKSFLAQFRKDISSSTTFSLQTLDGGENDQSPSYAGIEANLDIQYTVGLATGVPTTFISVGDDFQDGNLEGFLDIINFLLGESNPPQVLTTSYGQNENTISAKLANQLCNAYAQLGARGTSILFASGDGGVSGSQSAHCSNFVPTFPSGCPFMTSVGATQGVSPETAAAFSSGGFSNVFGIPSYQASAVSGYLSALGSTNSGKFNRSGRGFPDVSTQGVDFQIVSGGQTIGVDGTSCASPTFASVISLVNDRLIAAGKSPLGFLNPFLYSSAGKAALNDVTSGSNPGCSTNGFPAKAGWDPVTGLGTPNFAKLLTAVGL

SEQ ID NO: 50445 - protein, 366 aa, Meripilus giganteus
AIPASCASTITPACLQAIYGIPTTKATQSSNKLAVSGFIDQFANKADLKSFLAQFRKDISSSTTFSLQTLDGGENDQSPSEAGIEANLDIQYTVGLATGVPTTFISVGDDFQDGNLEGFLDIINFLLGESNPPQVLTTSYGQNENTISAKLANQLCNAYAQLGARGTSILFASGDGGVSGSQSAHCSNFVPTFPSGCPFMTSVGATQGVSPETAAAFSSGGFSNVFGIPSYQASAVSGYLSALGSTNSGKFNRSGRGFPDVSTQGVDFQIVLGGQTIGVDGTSCASPTFASVISLVNDRLIAAGKSPLGFLNPFLYSSAGKAALNDVTSGSNPGCSTNGFPAKAGWDPVTGLGTPNFAKLLTAVGL

SEQ ID NO: 50446 - protein, 366 aa, Meripilus giganteus
AIPASCASTITPACLQAIYGIPTTKATQCSNKLAVSGFIDQFANKADLKSFLAQFRKDISSSTTFSLQTLDGGENDQSPSEAGIEANLDIQYTVGLATGVPTTFISVGDDFQDGNLEGFLDIINFLLGESNPPQVLTTSYGQNENTISAKLANQLCNAYAQLGARGTSILFASGDGGVSGSQSAHCSNFVPTFPSGCPFMTSVGATQGVSPETAAAFSSGGFSNVFGIPSYQASAVSGYLSALGSTNSGKFNRSGRGFPDVSTQGVDFQIVSGGQTIGVDGTSCASPTFASVISLVNDRLIAAGKSPLGFLNPFLYSSAGKAALNDVTSGSNPGCSTNGFPAKAGWDPVTGLGTPNFAKLLTAVGL

SEQ ID NO: 50447 - protein, 366 aa, Meripilus giganteus
AIPASCASTITPACLQAIYGIPTTKATQSSNKLAVSGFIDQFANKADLKSFLAQFRKDISSSTTFSLQTLDGGENDQSPSEAGIEANLDIQYTVGLATGVPTTFISVGDDFQDGNLEGFLDIINFLLGESNPPQVLTTSYGQNENTISAKLANQLCNAYAQLGARGTSILFASGDGGVSGSQSAHCSNFVPTFPSGCPFMTSVGATQGVSPETAALFSSGGFSNVFGIPSYQASAVSGYLSALGSTNSGKFNRSGRGFPDVSTQGVDFQIVSGGQTIGVDGTSCASPTFASVISLVNDRLIAAGKSPLGFLNPFLYSSAGKAALNDVTSGSNPGCSTNGFPAKAGWDPVTGLGTPNFAKLLTAVGL

SEQ ID NO: 50448 - protein, 366 aa, Meripilus giganteus
AIPASCASTITPACLQAIYGIPTTKATQSSNKLAVSGFIDQFANKADLKIFLAQFRKDISSSTTFSLQTLDGGENDQSPSEAGIEANLDIQYTVGLATGVPTTFISVGDDFQDGNLEGFLDIINFLLGESNPPQVLTTSYGQNENTISAKLANQLCNAYAQLGARGTSILFASGDGGVSGSQSAHCSNFVPTFPSGCPFMTSVGATQGVSPETAAAFSSGGFSNVFGIPSYQASAVSGYLSALGSTNSGKFNRSGRGFPDVSTQGVDFQIVSGGQTIGVDGTSCASPTFASVISLVNDRLIAAGKSPLGFLNPFLYSSAGKAALNDVTSGSNPGCSTNGFPAKAGWDPVTGLGTPNFAKLLTAVGL

SEQ ID NO: 50449 - protein, 366 aa, Meripilus giganteus
AIPASCASTITPACLQAIYGIPTTKATQSSNKLAVSGFIDQFANKADLKSFLAQFRKDISSSTTFSLQTLDGGENDQSPSEAGIEANLDIQYTVGLATGVPTTFISVGDDFQDGNLEGFLDIINFLLGESNPPQVLTTSYGFNENTISAKLANQLCNAYAQLGARGTSILFASGDGGVSGSQSAHCSNFVPTFPSGCPFMTSVGATQGVSPETAAAFSSGGFSNVFGIPSYQASAVSGYLSALGSTNSGKFNRSGRGFPDVSTQGVDFQIVSGGQTIGVDGTSCASPTFASVISLVNDRLIAAGKSPLGFLNPFLYSSAGKAALNDVTSGSNPGCSTNGFPAKAGWDPVTGLGTPNFAKLLTAVGL

SEQ ID NO: 50450 - protein, 366 aa, Meripilus giganteus
AIPASCASTITPACLQAIYGIPTTKATQSSNKLAVSGFIDQFANKADLKSFLAQFRKDISSSTTFSLQTLDGGENDQSPSEAGIEANLDIQYTVGLATGVPTTFISVGDDFQDGNLEGFLDIINKLLGESNPPQVLTTSYGQNENTISAKLANQLCNAYAQLGARGTSILFASGDGGVSGSQSAHCSNFVPTFPSGCPFMTSVGATQGVSPETAAAFSSGGFSNVFGIPSYQASAVSGYLSALGSTNSGKFNRSGRGFPDVSTQGVDFQIVSGGQTIGVDGTSCASPTFASVISLVNDRLIAAGKSPLGFLNPFLYSSAGKAALNDVTSGSNPGCSTNGFPAKAGWDPVTGLGTPNFAKLLTAVGL

SEQ ID NO: 50451 - protein, 366 aa, Meripilus giganteus
AIPASCASTITPACLQAIYGIPTTKATQSSNKLAVSGFIDQFANKADLKSFLAQFRKDISSSTTFSLQTLDGGENDQSPSEAGIEANLDIQYTVGLATGVPTTFISVGDDFQDGNLEGFLDIINFLLGESNPPQVLTTSYGQNENTISAKLANQLCAAYAQLGARGTSILFASGDGGVSGSQSAHCSNFVPTFPSGCPFMTSVGATQGVSPETAAAFSSGGFSNVFGIPSYQASAVSGYLSALGSTNSGKFNRSGRGFPDVSTQGVDFQIVSGGQTIGVDGTSCASPTFASVISLVNDRLIAAGKSPLGFLNPFLYSSAGKAALNDVTSGSNPGCSTNGFPAKAGWDPVTGLGTPNFAKLLTAVGL

SEQ ID NO: 50452 - protein, 366 aa, Meripilus giganteus
AIPASCASTITPACLQAIYGIPTTKATQSSNKLAVSGFIDQFANKADLKSFLAQFRKDISSSTTFSLQTLDGGENDQSPSEAGIEANLDIQYTVGLATGVPTTFISVGDDFQDGNLEGFLDIINFLLGESNPPQVLTTSYGQNENTISAKLANQLCNAYAQLGARGTSILFASGDGGVSGSQSAHCSNFVPTFPSGCPFMTSVGATQGVSPETAAAFSSGGFSNVFGIPSYQASAVSGYLSALGSTNSGKFNRSGRGFPDVSTQGVDFQIVSGGQTIGVDGTSCASPTFASVISLVNDRLIAAPKSPLGFLNPFLYSSAGKAALNDVTSGSNPGCSTNGFPAKAGWDPVTGLGTPNFAKLLTAVGL

SEQ ID NO: 50453 - protein, 366 aa, Meripilus giganteus
AIPASCASTITPACLQAIYGIPTTKATQSSNKLAVSGFIDQFANKADLKSFLKQFRKDISSSTTFSLQTLDGGENDQSPSEAGIEANLDIQYTVGLATGVPTTFISVGDDFQDGNLEGFLDIINFLLGESNPPQVLTTSYGQNENTISAKLANQLCNAYAQLGARGTSILFASGDGGVSGSQSAHCSNFVPTFPSGCPFMTSVGATQGVSPETAAAFSSGGFSNVFGIPSYQASAVSGYLSALGSTNSGKFNRSGRGFPDVSTQGVDFQIVSGGQTIGVDGTSCASPTFASVISLVNDRLIAAGKSPLGFLNPFLYSSAGKAALNDVTSGSNPGCSTNGFPAKAGWDPVTGLGTPNFAKLLTAVGL

SEQ ID NO: 50454 - protein, 366 aa, Meripilus giganteus
AIPASCASTITPACLQAIYGIPTTKATQSSNKLAVSGFIDQFANKADLKSFLAQFRKDILSSTTFSLQTLDGGENDQSPSEAGIEANLDIQYTVGLATGVPTTFISVGDDFQDGNLEGFLDIINFLLGESNPPQVLTTSYGQNENTISAKLANQLCNAYAQLGARGTSILFASGDGGVSGSQSAHCSNFVPTFPSGCPFMTSVGATQGVSPETAAAFSSGGFSNVFGIPSYQASAVSGYLSALGSTNSGKFNRSGRGFPDVSTQGVDFQIVSGGQTIGVDGTSCASPTFASVISLVNDRLIAAGKSPLGFLNPFLYSSAGKAALNDVTSGSNPGCSTNGFPAKAGWDPVTGLGTPNFAKLLTAVGL

SEQ ID NO: 50455 - protein, 366 aa, Meripilus giganteus
AIPASCASTITPACLQAIYGIPTTKATQSSNKLAVSGFIDQFANKADLKSFLAQFRKDISDSTTFSLQTLDGGENDQSPSEAGIEANLDIQYTVGLATGVPTTFISVGDDFQDGNLEGFLDIINFLLGESNPPQVLTTSYGQNENTISAKLANQLCNAYAQLGARGTSILFASGDGGVSGSQSAHCSNFVPTFPSGCPFMTSVGATQGVSPETAAAFSSGGFSNVFGIPSYQASAVSGYLSALGSTNSGKFNRSGRGFPDVSTQGVDFQIVSGGQTIGVDGTSCASPTFASVISLVNDRLIAAGKSPLGFLNPFLYSSAGKAALNDVTSGSNPGCSTNGFPAKAGWDPVTGLGTPNFAKLLTAVGL

SEQ ID NO: 50456 - protein, 366 aa, Meripilus giganteus
AIPASCASTITPACLQAIYGIPTTKATQSSNKLAVSGFIDQFANKADLKSFLAQFRKDISSSTTFSLQTLDGGENDQSPSEAGIEANLDIQYTVGLATGVPTTFISVGDDFQDGNLEGFLDIINFLLGESNPPQVLTTSYGQNENTISAKLANQLCNAYAQLGARGTSILFASGDGGVSGSQSAHCSNFVPTFPSGCPFMTSVGATQGVSPETAAAFSSGGFSNVFGIPSYQASAVSGYLSALGSTNSGKFNRSGRGFPDVSTQGVDFQIVSGGQTIGVDGTSCASPTFASVISLVNDRLIAVGKSPLGFLNPFLYSSAGKAALNDVTSGSNPGCSTNGFPAKAGWDPVTGLGTPNFAKLLTAVGL

SEQ ID NO: 50457 - protein, 366 aa, Meripilus giganteus
AIPASCASTITPACLQAIYGIPTTKATQSSNKLAVSGFIDQFANKADLKSFLAQFRKDISSSTTFSLQTLDGGENDQSPSEAGIEANLDIQYTVGLATGVPTTFISVGDDFQDGNLEGFLDIINFLLGESNPPQVLTTSYGQNENTISAKLANQLCNAYAQLGARGASILFASGDGGVSGSQSAHCSNFVPTFPSGCPFMTSVGATQGVSPETAAAFSSGGFSNVFGIPSYQASAVSGYLSALGSTNSGKFNRSGRGFPDVSTQGVDFQIVSGGQTIGVDGTSCASPTFASVISLVNDRLIAAGKSPLGFLNPFLYSSAGKAALNDVTSGSNPGCSTNGFPAKAGWDPVTGLGTPNFAKLLTAVGL

SEQ ID NO: 50458 - protein, 366 aa, Meripilus giganteus
AIPASCASTITPACLQAIYGIPTTKATQSSNKLAVSGFIDQFANKADLKSFLAQFRKDISSSTTFSLQTLDGGENDQSPSEAGIEANLDIQYTVGLATGVPTTFISVGDDFQDGNLEGFLDIINFLLGESNPPQVLTTSYGQNENRISAKLANQLCNAYAQLGARGTSILFASGDGGVSGSQSAHCSNFVPTFPSGCPFMTSVGATQGVSPETAAAFSSGGFSNVFGIPSYQASAVSGYLSALGSTNSGKFNRSGRGFPDVSTQGVDFQIVSGGQTIGVDGTSCASPTFASVISLVNDRLIAAGKSPLGFLNPFLYSSAGKAALNDVTSGSNPGCSTNGFPAKAGWDPVTGLGTPNFAKLLTAVGL

SEQ ID NO: 50459 - protein, 366 aa, Meripilus giganteus
AIPASCASTITPACLQAIYGIPTTKATQSSNKLAVSGFIDQFANKADLKSFLAQFRKDISSSTTFSLQTLDGGENDQSPSEAGIEANLDIQYTVGLATGVPTTFISVGDDFQDGNLEGFLDIINFLLGESNPPQVLTTSYGQNENTISAKLANQLCNAYAQLGARGTSILFASGDGGVSGSQSAHCSNFVPTFPSGCPFMTSVGATQGVSPETAAAFSSGGFSNVFGIPSYQASAVSGYLSALGSTNSGKFNRSGRGFPDVSTQGVDFSIVSGGQTIGVDGTSCASPTFASVISLVNDRLIAAGKSPLGFLNPFLYSSAGKAALNDVTSGSNPGCSTNGFPAKAGWDPVTGLGTPNFAKLLTAVGL

SEQ ID NO: 50460 - protein, 366 aa, Meripilus giganteus
AIPASCASTITPACLQAIYGIPTTKATQSSNKLAVSGFIDQFANKADLKSFLAQFRKDISSSTTFSLQTLDGGENDQSPLEAGIEANLDIQYTVGLATGVPTTFISVGDDFQDGNLEGFLDIINFLLGESNPPQVLTTSYGQNENTISAKLANQLCNAYAQLGARGTSILFASGDGGVSGSQSAHCSNFVPTFPSGCPFMTSVGATQGVSPETAAAFSSGGFSNVFGIPSYQASAVSGYLSALGSTNSGKFNRSGRGFPDVSTQGVDFQIVSGGQTIGVDGTSCASPTFASVISLVNDRLIAAGKSPLGFLNPFLYSSAGKAALNDVTSGSNPGCSTNGFPAKAGWDPVTGLGTPNFAKLLTAVGL

SEQ ID NO: 50461 - protein, 366 aa, Meripilus giganteus
AIPASCASTITPACLQAIYGIPTTKATQISNKLAVSGFIDQFANKADLKSFLAQFRKDISSSTTFSLQTLDGGENDQSPSEAGIEANLDIQYTVGLATGVPTTFISVGDDFQDGNLEGFLDIINFLLGESNPPQVLTTSYGQNENTISAKLANQLCNAYAQLGARGTSILFASGDGGVSGSQSAHCSNFVPTFPSGCPFMTSVGATQGVSPETAAAFSSGGFSNVFGIPSYQASAVSGYLSALGSTNSGKFNRSGRGFPDVSTQGVDFQIVSGGQTIGVDGTSCASPTFASVISLVNDRLIAAGKSPLGFLNPFLYSSAGKAALNDVTSGSNPGCSTNGFPAKAGWDPVTGLGTPNFAKLLTAVGL

SEQ ID NO: 50462 - protein, 366 aa, Meripilus giganteus
AIPASCASTITPACLQAIYGIPTTKATQSSNKLAVSGFIDQFANKADLKSFLAQFRKDISSSTTFSLQTLDGGENDQSPSEAGIEANLDIQYTVGLATGVPTTFISVGDDFQDGNLEGFLDIINFLLGESNPPQVLTTSYGQNENTISAKLANFLCNAYAQLGARGTSILFASGDGGVSGSQSAHCSNFVPTFPSGCPFMTSVGATQGVSPETAAAFSSGGFSNVFGIPSYQASAVSGYLSALGSTNSGKFNRSGRGFPDVSTQGVDFQIVSGGQTIGVDGTSCASPTFASVISLVNDRLIAAGKSPLGFLNPFLYSSAGKAALNDVTSGSNPGCSTNGFPAKAGWDPVTGLGTPNFAKLLTAVGL

SEQ ID NO: 50463 - protein, 366 aa, Meripilus giganteus
AIPAICASTITPACLQAIYGIPTTKATQSSNKLAVSGFIDQFANKADLKSFLAQFRKDISSSTTFSLQTLDGGENDQSPSEAGIEANLDIQYTVGLATGVPTTFISVGDDFQDGNLEGFLDIINFLLGESNPPQVLTTSYGQNENTISAKLANQLCNAYAQLGARGTSILFASGDGGVSGSQSAHCSNFVPTFPSGCPFMTSVGATQGVSPETAAAFSSGGFSNVFGIPSYQASAVSGYLSALGSTNSGKFNRSGRGFPDVSTQGVDFQIVSGGQTIGVDGTSCASPTFASVISLVNDRLIAAGKSPLGFLNPFLYSSAGKAALNDVTSGSNPGCSTNGFPAKAGWDPVTGLGTPNFAKLLTAVGL

SEQ ID NO: 50464 - protein, 366 aa, Meripilus giganteus
AIPASCASTITPACLQAIYGIPTTKATQSSNKLAVSGFIDQFANKADLKSFLAQFRKDISSSTMFSLQTLDGGENDQSPSEAGIEANLDIQYTVGLATGVPTTFISVGDDFQDGNLEGFLDIINFLLGESNPPQVLTTSYGQNENTISAKLANQLCNAYAQLGARGTSILFASGDGGVSGSQSAHCSNFVPTFPSGCPFMTSVGATQGVSPETAAAFSSGGFSNVFGIPSYQASAVSGYLSALGSTNSGKFNRSGRGFPDVSTQGVDFQIVSGGQTIGVDGTSCASPTFASVISLVNDRLIAAGKSPLGFLNPFLYSSAGKAALNDVTSGSNPGCSTNGFPAKAGWDPVTGLGTPNFAKLLTAVGL

SEQ ID NO: 50465 - protein, 366 aa, Meripilus giganteus
AIPASCASTITPACLQAIYGIPTTKATQSSNKLAVSGFIDQFANKADLKSFLAQFRKDISSSTTFLLQTLDGGENDQSPSEAGIEANLDIQYTVGLATGVPTTFISVGDDFQDGNLEGFLDIINFLLGESNPPQVLTTSYGQNENTISAKLANQLCNAYAQLGARGTSILFASGDGGVSGSQSAHCSNFVPTFPSGCPFMTSVGATQGVSPETAAAFSSGGFSNVFGIPSYQASAVSGYLSALGSTNSGKFNRSGRGFPDVSTQGVDFQIVSGGQTIGVDGTSCASPTFASVISLVNDRLIAAGKSPLGFLNPFLYSSAGKAALNDVTSGSNPGCSTNGFPAKAGWDPVTGLGTPNFAKLLTAVGL

SEQ ID NO: 50466 - protein, 366 aa, Meripilus giganteus
AIPASCASTITPACLQAIYGIPTTKATQSSNKLAVSGFIDQFANKADLKSFLAQFRKDISSSTTFSLQTLDGGENDQSPSEAGIEANLDIQYTVGLATGVPTTFISVGDDFQDGNLEGFLDIINFLLGESNPPQVLTTSYGQNENTISAKLANQLCNAYAQLGARGTSILFASGDGGVSGSQSAHCSNFVPTFPSGCPFMTSVGATQGVSPETAAAFSSGGFSNVFGIPSYQASAVSGYLSALGSTNSGKFNRSGRGFPDVSTQGVDFQIVSGGQVIGVDGTSCASPTFASVISLVNDRLIAAGKSPLGFLNPFLYSSAGKAALNDVTSGSNPGCSTNGFPAKAGWDPVTGLGTPNFAKLLTAVGL

SEQ ID NO: 50467 - protein, 366 aa, Meripilus giganteus
AIPASCASTITPACLQAIYGIPTTKATQSSNKLAVSGFIDQFANKADLKSFLAQFRKDISSSTTFSLQTLDGGENDQSPSEAGIEANLDIQYTVGLATGVPTTFISVGDDFQDGNLEGFLDIINFLLGESNPPQVLTTSYGQNENTISAKLANQLCNAYAQLGARGTSILFASGDGGVSGSQSAHCSNFVPTFPSGCPFMTSVGATQGLSPETAAAFSSGGFSNVFGIPSYQASAVSGYLSALGSTNSGKFNRSGRGFPDVSTQGVDFQIVSGGQTIGVDGTSCASPTFASVISLVNDRLIAAGKSPLGFLNPFLYSSAGKAALNDVTSGSNPGCSTNGFPAKAGWDPVTGLGTPNFAKLLTAVGL

SEQ ID NO: 50468 - protein, 366 aa, Meripilus giganteus
AIPASCASTITPACLQAIYGIPTTKATQSSNKLAVSGFIDQFANKADLKSFLAQFRKDISSSTTFSLQTLDGGENDQSPSEAGIEANLDIQYTVGLATGVPTTFISVGDDFQDGNLEGFLDIINFLLGESNPPQVLTTSYGQNENTISAKLANQLCNAYAQLGARGTSILFASGDGGVSGSQSAHCSNFVPTFPSGCPFMTSVGATQGVSPETAAAFSSGGFSNVFGIPSYQASAVSGYLSALGSTNSGKFNRSGRGFPDVSTQGVAFQIVSGGQTIGVDGTSCASPTFASVISLVNDRLIAAGKSPLGFLNPFLYSSAGKAALNDVTSGSNPGCSTNGFPAKAGWDPVTGLGTPNFAKLLTAVGL

SEQ ID NO: 50469 - protein, 366 aa, Meripilus giganteus
AIPASCASTITPACLQAIYGIPTTKATQSSNKLAVSGFIDQFANKADLKSFLAQFRKDISSSTTFSLQTLDGGENDQSPSEAGIEANLDIQYTVGLATGVPTTFISVGDDFQDGNLEGFLDIINFLLGESNPPQVLTTSYGQNENTISAKLANQLCNAYAQLGARGTSILFASGDGGVSGSQSAHCSNFVPTFPSGCPFMTSVGATQGVSPETAAAFSSGGFSNVFGIPSFQASAVSGYLSALGSTNSGKFNRSGRGFPDVSTQGVDFQIVSGGQTIGVDGTSCASPTFASVISLVNDRLIAAGKSPLGFLNPFLYSSAGKAALNDVTSGSNPGCSTNGFPAKAGWDPVTGLGTPNFAKLLTAVGL

SEQ ID NO: 50470 - protein, 366 aa, Meripilus giganteus
AIPASCASTITPACLQAIYGIPTTKATQSSNKLAVSGFIDQFANKADLKSFLAQFRKDISSSTTFSLQTLDGGENDQSPSEAGIEANLDIQYTVGLATGVPTTFISVGDDFQDGNLEGFLDIINFLLGESNPPQVLTTSYGQNENTISAKLANILCNAYAQLGARGTSILFASGDGGVSGSQSAHCSNFVPTFPSGCPFMTSVGATQGVSPETAAAFSSGGFSNVFGIPSYQASAVSGYLSALGSTNSGKFNRSGRGFPDVSTQGVDFQIVSGGQTIGVDGTSCASPTFASVISLVNDRLIAAGKSPLGFLNPFLYSSAGKAALNDVTSGSNPGCSTNGFPAKAGWDPVTGLGTPNFAKLLTAVGL

SEQ ID NO: 50471 - protein, 366 aa, Meripilus giganteus
AIPASCASTITPACLQAIYGIPTTKATQSSNKLAVSGFIDQFANKADLKSFLAQFRKDISSSTTFSLQTLDGGENDQSPSEAGIEANLDIQYTVGLATGVPTTFISVGDDFQDGNLEGFLDIINFLLGESNPPQVLTTSYGQNENTISAKLANQLCNAYAQLGARGTSILFASGDGGVSGSQSAHCSNFVPTFPSGCPFMTSVGATQGVSPETAAAFSSGGFSNVFGIPSYQASAVSGYLSALGSTNSGKFNRSGRGFPDVSTQGVDFQIVSGGQTIGVDGTSCASPTFASVISLVNDRLIAAGKSPLGFLNPFLYSSAGKAALNDVTNGSNPGCSTNGFPAKAGWDPVTGLGTPNFAKLLTAVGL

SEQ ID NO: 50472 - protein, 366 aa, Meripilus giganteus
AIPASCASTITPACLQAIYGIPTTKATQSSNKLAVSGFIDQFANKADLKSFLAQFRKDISSSTTFSLQTLDGGENDQSPSEAGIEANLDIQYTVGLATGVPTTFISVGDDFQDGNLEGFLDIINFLLGESNPPQVLTTSYGQNENTISAKLANQLCNAYAQLGARGTSILFASGDGGVSGSQSAHCSNFVPTFPSGCPFMTSVGATQGVSPETAAAFSSGGFSNVFGIPSYQASAVSGYLSALGSTNSGKFNRSGRGFPDVSTQGVDFQIVSGGQTIGVDGTSCASPTFASVISLVNDRLIAAGKSPLGFLNPFLYSSAGKAALNDVTSGSNPGCSTNGFPAKAGWDPVTGLGTPNFAKLLTALGL

SEQ ID NO: 50473 - protein, 366 aa, Meripilus giganteus
AIPASCASTITPACLQAIYGIPTTKATQSSNKLAVSGFIDQFANKADLKSFLAQFRKDISSSTTFSLQTLDGGENPQSPSEAGIEANLDIQYTVGLATGVPTTFISVGDDFQDGNLEGFLDIINFLLGESNPPQVLTTSYGQNENTISAKLANQLCNAYAQLGARGTSILFASGDGGVSGSQSAHCSNFVPTFPSGCPFMTSVGATQGVSPETAAAFSSGGFSNVFGIPSYQASAVSGYLSALGSTNSGKFNRSGRGFPDVSTQGVDFQIVSGGQTIGVDGTSCASPTFASVISLVNDRLIAAGKSPLGFLNPFLYSSAGKAALNDVTSGSNPGCSTNGFPAKAGWDPVTGLGTPNFAKLLTAVGL

SEQ ID NO: 50474 - protein, 366 aa, Meripilus giganteus
AIPASCASTITPACLQAIYGIPTTKATQSSNKLAVSGFIDQFANKADLKSFLAQFRKDVSSSTTFSLQTLDGGENDQSPSEAGIEANLDIQYTVGLATGVPTTFISVGDDFQDGNLEGFLDIINFLLGESNPPQVLTTSYGQNENTISAKLANQLCNAYAQLGARGTSILFASGDGGVSGSQSAHCSNFVPTFPSGCPFMTSVGATQGVSPETAAAFSSGGFSNVFGIPSYQASAVSGYLSALGSTNSGKFNRSGRGFPDVSTQGVDFQIVSGGQTIGVDGTSCASPTFASVISLVNDRLIAAGKSPLGFLNPFLYSSAGKAALNDVTSGSNPGCSTNGFPAKAGWDPVTGLGTPNFAKLLTAVGL

SEQ ID NO: 50475 - protein, 366 aa, Meripilus giganteus
AIPASCASTITPACLQAIYGIPTTKATQSSNKLAVSGFIDQFANKADLKSFLAQFRKDISSSTTFSLQTLDGGENDQSPSEAGIEANLDIQYTVGLATGVPTTFISVGDDFQDGNLEGFLDIINFLLGESNPPQVLTTSYGQNENTISAKLANQLCNAYAQLGARGTSILFASGDGGVSGSQSAHCSNFVPTFPSGCPFMTSVGATQGVSPETAAAFSSGGFSNVFGIPSYQASAVKGYLSALGSTNSGKFNRSGRGFPDVSTQGVDFQIVSGGQTIGVDGTSCASPTFASVISLVNDRLIAAGKSPLGFLNPFLYSSAGKAALNDVTSGSNPGCSTNGFPAKAGWDPVTGLGTPNFAKLLTAVGL

SEQ ID NO: 50476 - protein, 366 aa, Meripilus giganteus
AIPASCASTITPACLQAIYGIPTTKATQSSNKLAVSGFIDQFANKADLKSFLAQFRKDISSSTTFSLQTLDGGENDQSPSEAGIEANLDIQYTVGLATGVPTTFISVGDDFQDGNLEGFLDIINFLLGESNPPQVLTTSYGQNENTISAKLANQLCNAYAQLGARGTSILFASGDGGVSGSQSAHCSNFVPTFPSGCPFMTSVGSTQGVSPETAAAFSSGGFSNVFGIPSYQASAVSGYLSALGSTNSGKFNRSGRGFPDVSTQGVDFQIVSGGQTIGVDGTSCASPTFASVISLVNDRLIAAGKSPLGFLNPFLYSSAGKAALNDVTSGSNPGCSTNGFPAKAGWDPVTGLGTPNFAKLLTAVGL

SEQ ID NO: 50477 - protein, 366 aa, Meripilus giganteus
AIPASCASTITPACLQAIYGIPTTKATQSSNKLAVSGFIDQFANKADLKSFLAQFRKDISSSTTFSLQTLDGGENDQSPSEAGIEANLDIQYTVGLATGVPTTFISVGDDFQDGNLEGFLDIINFLLGESNPPQVLTTSYGQNENTISAKLANQLCNAYAQLGARGTSILFASGDGGVSGSQSAHCSNFVPTFPSGCPFMTSVGATQGVSPETAAAFSSGGFSNVFGIPSYQASAVSGYLSALGSTNSGKFNRSGRGFPDVSTQGVDFQAVSGGQTIGVDGTSCASPTFASVISLVNDRLIAAGKSPLGFLNPFLYSSAGKAALNDVTSGSNPGCSTNGFPAKAGWDPVTGLGTPNFAKLLTAVGL

SEQ ID NO: 50478 - protein, 366 aa, Meripilus giganteus
AIPASCASTITPACLQAIYGIPTTKATQSSNKLAVSGFIDQFANKADLKSFLAQFRKDISSSTTFSLQTLDGGENDQSPSEAGIEANLDIQYTVGLATGVPTTFISVGDDFQDGNLEGFLDIINFLLGESNPPQVLTTSYGQNENTISAKLANQLCNAYAQLGARGTSILFASGDGGVSGSQSRHCSNFVPTFPSGCPFMTSVGATQGVSPETAAAFSSGGFSNVFGIPSYQASAVSGYLSALGSTNSGKFNRSGRGFPDVSTQGVDFQIVSGGQTIGVDGTSCASPTFASVISLVNDRLIAAGKSPLGFLNPFLYSSAGKAALNDVTSGSNPGCSTNGFPAKAGWDPVTGLGTPNFAKLLTAVGL

SEQ ID NO: 50479 - protein, 366 aa, Meripilus giganteus
AIPASCASTITPACLQAIYGIPTTKATQSSNKLAVSGFIDQFANKADLKSFLAQFRKDISSSTTFSLQTLDGGENDQSPSEAGIEANLDIQYTVGLALGVPTTFISVGDDFQDGNLEGFLDIINFLLGESNPPQVLTTSYGQNENTISAKLANQLCNAYAQLGARGTSILFASGDGGVSGSQSAHCSNFVPTFPSGCPFMTSVGATQGVSPETAAAFSSGGFSNVFGIPSYQASAVSGYLSALGSTNSGKFNRSGRGFPDVSTQGVDFQIVSGGQTIGVDGTSCASPTFASVISLVNDRLIAAGKSPLGFLNPFLYSSAGKAALNDVTSGSNPGCSTNGFPAKAGWDPVTGLGTPNFAKLLTAVGL

SEQ ID NO: 50480 - protein, 366 aa, Meripilus giganteus
AIPASCASTITPACLQAIYGIPTTKATQSSNKLAVSGFIDQFANKADLKSFLAQFRKDISSSTTFSLQTLDGGENDQSPSEAGIEANLDIQYTVGLATGVPTTFISVGDDFQDGNLEGFLDIINFLLGESNPPQVLTTSYGQNENTISAKLANQLCNAYAQLGARGTSILFASGDGGVSGSQSAHCSNFVPTFPSGCPFMTSVGATQGVSPETAAAFSSGGFSNVFGIPSYQASAVSGYLSALGSTNSGKFNRSGRGFPDVSTQGVDFQIVSGGQTIGVDGTSCASPTFASVMSLVNDRLIAAGKSPLGFLNPFLYSSAGKAALNDVTSGSNPGCSTNGFPAKAGWDPVTGLGTPNFAKLLTAVGL

SEQ ID NO: 50481 - protein, 366 aa, Meripilus giganteus
AIPASCASTITPACLQAIYGIPTTKATQSSNKLAVSGFIDQFANKADLKSFLAQFRKDISSSTTFSLQTLDGGENDQSPSEAGIEANLDIQYTVGLATGVPTTFISVGDDFQDGNLEGFLDIINFLLGESNPPQVLTTSYGQNENTISAKLANQLCNAYAQLGARGTSILFASGDGGVSGSQSAHCSNFVPTFPSGCPFMTSVGATQGVSPETAAAFSSGGFSNVFGIPSYQASAVSGYLSALGSTNSGKFNRSGRGFPDVSTQGVDFQCVSGGQTIGVDGTSCASPTFASVISLVNDRLIAAGKSPLGFLNPFLYSSAGKAALNDVTSGSNPGCSTNGFPAKAGWDPVTGLGTPNFAKLLTAVGL

SEQ ID NO: 50482 - protein, 366 aa, Meripilus giganteus
AIPASCASTITPACLQAIYGIPTTKATQSSNKLAVSGFIDQFANKADLKSFLAQFRKDISSSTTFTLQTLDGGENDQSPSEAGIEANLDIQYTVGLATGVPTTFISVGDDFQDGNLEGFLDIINFLLGESNPPQVLTTSYGQNENTISAKLANQLCNAYAQLGARGTSILFASGDGGVSGSQSAHCSNFVPTFPSGCPFMTSVGATQGVSPETAAAFSSGGFSNVFGIPSYQASAVSGYLSALGSTNSGKFNRSGRGFPDVSTQGVDFQIVSGGQTIGVDGTSCASPTFASVISLVNDRLIAAGKSPLGFLNPFLYSSAGKAALNDVTSGSNPGCSTNGFPAKAGWDPVTGLGTPNFAKLLTAVGL

SEQ ID NO: 50483 - protein, 366 aa, Meripilus giganteus
AIPASCASTITPACLQAIYGIPTTKATQSSNKLAVSGFIDQFANKADLKSFLAQFRKDISSSTTFSLQTLDGGENDQSPSEAGIEANLDIQYTVGLATGVPTTFISVGDDFQDGNLEGFLDIINFLLFESNPPQVLTTSYGQNENTISAKLANQLCNAYAQLGARGTSILFASGDGGVSGSQSAHCSNFVPTFPSGCPFMTSVGATQGVSPETAAAFSSGGFSNVFGIPSYQASAVSGYLSALGSTNSGKFNRSGRGFPDVSTQGVDFQIVSGGQTIGVDGTSCASPTFASVISLVNDRLIAAGKSPLGFLNPFLYSSAGKAALNDVTSGSNPGCSTNGFPAKAGWDPVTGLGTPNFAKLLTAVGL

SEQ ID NO: 50484 - protein, 366 aa, Meripilus giganteus
AIPASCASTITPACLQAIYGIPTTKATQSSNKLAVSGFIDQFANKADLKSFLAQFRKDISSSTTFSLQTLDGGENDQSPSEAGIEANLDIQYTVGLATGVPTTFISVGDDFQDGNLEGFLDIINFLLGESNPPQVLTTSYCQNENTISAKLANQLCNAYAQLGARGTSILFASGDGGVSGSQSAHCSNFVPTFPSGCPFMTSVGATQGVSPETAAAFSSGGFSNVFGIPSYQASAVSGYLSALGSTNSGKFNRSGRGFPDVSTQGVDFQIVSGGQTIGVDGTSCASPTFASVISLVNDRLIAAGKSPLGFLNPFLYSSAGKAALNDVTSGSNPGCSTNGFPAKAGWDPVTGLGTPNFAKLLTAVGL

SEQ ID NO: 50485 - protein, 366 aa, Meripilus giganteus
AIPASCASTITPACLQAIYGIPTTKATQSSNKLAVSGFIDQFANKADLKSFLAQFRKDISSSTTFSLQTLDGGENDQSPSEAGIEANLDIQYTVGLATGVPTTFISVGDDFQDGNLEGFLDIINFLLGESNPPQVLTTSYGQNENTISAKLANQLCNAYAQLGARGTSILFASGDGGVSGSQSAHCSNFVPTFPSGCPFMTSVGATQGVSPETAAAFSSGGFSNVFGIPSYQASAVSGYLSALGSTNSGKFNRSGRGFPDVSTQGVDFQIVSGGQTIGVFGTSCASPTFASVISLVNDRLIAAGKSPLGFLNPFLYSSAGKAALNDVTSGSNPGCSTNGFPAKAGWDPVTGLGTPNFAKLLTAVGL

SEQ ID NO: 50486 - protein, 366 aa, Meripilus giganteus
AIPASCASTITPACLQAIYGIPTTKATQSSNKLAVSGFIPQFANKADLKSFLAQFRKDISSSTTFSLQTLDGGENDQSPSEAGIEANLDIQYTVGLATGVPTTFISVGDDFQDGNLEGFLDIINFLLGESNPPQVLTTSYGQNENTISAKLANQLCNAYAQLGARGTSILFASGDGGVSGSQSAHCSNFVPTFPSGCPFMTSVGATQGVSPETAAAFSSGGFSNVFGIPSYQASAVSGYLSALGSTNSGKFNRSGRGFPDVSTQGVDFQIVSGGQTIGVDGTSCASPTFASVISLVNDRLIAAGKSPLGFLNPFLYSSAGKAALNDVTSGSNPGCSTNGFPAKAGWDPVTGLGTPNFAKLLTAVGL

SEQ ID NO: 50487 - protein, 366 aa, Meripilus giganteus
AIPASCASTITPACLQAIYGIPTTKATQSSNKLAVSGFIDQFANKADLKSFLAQFRKDISSSTTFSLQTLDGGENDQSPSEAGIEANLDIQYTVGLATGVPTTFISVGDDFQDGNLEGFLDIINFLLGESNPPQVLTTSYGQNEGTISAKLANQLCNAYAQLGARGTSILFASGDGGVSGSQSAHCSNFVPTFPSGCPFMTSVGATQGVSPETAAAFSSGGFSNVFGIPSYQASAVSGYLSALGSTNSGKFNRSGRGFPDVSTQGVDFQIVSGGQTIGVDGTSCASPTFASVISLVNDRLIAAGKSPLGFLNPFLYSSAGKAALNDVTSGSNPGCSTNGFPAKAGWDPVTGLGTPNFAKLLTAVGL

SEQ ID NO: 50488 - protein, 366 aa, Meripilus giganteus
AIPASCASTITPACLQAIYGIPTTKATQSSNKLAVSGFIDQFANKADLKSFLAQFRKDISSSTTFSLQTLDGGENDQSPSEAGIEANLDIQYTVGLATGVPTTFISVGDDFQDGNLEGFLDIINFLLGESNPPQVLTTSYGQNENTISAKLANQLCNAYAQLGARGTSILFASGDGGVSGSQSAHCSNFVPTFPSGCPFMTSVGATQGVSPETAAAFSSGGFSNVFGVPSYQASAVSGYLSALGSTNSGKFNRSGRGFPDVSTQGVDFQIVSGGQTIGVDGTSCASPTFASVISLVNDRLIAAGKSPLGFLNPFLYSSAGKAALNDVTSGSNPGCSTNGFPAKAGWDPVTGLGTPNFAKLLTAVGL

SEQ ID NO: 50489 - protein, 366 aa, Meripilus giganteus
AIPASCASTITPACLQAIYGIPTTKATQSSNKLAVSGFIDQFANKADLKSFLAQFRKDISSSTTFSLQTLDGGENDQSPSEAGIEANLDIQYTVGLATGVPTTFISVGDDFQDGNLEGFLDIINFLLGESNPPQVLTTSYGQNENTISAKLANQLCNAYAQLGARGTSILFASGDGGVSGSQSAHCSNFVPTFPSGCPFMTSVGATQGVSPETAAAFSSGGFSNVFGIPSYQASAVSGYLSALPSTNSGKFNRSGRGFPDVSTQGVDFQIVSGGQTIGVDGTSCASPTFASVISLVNDRLIAAGKSPLGFLNPFLYSSAGKAALNDVTSGSNPGCSTNGFPAKAGWDPVTGLGTPNFAKLLTAVGL

SEQ ID NO: 50490 - protein, 366 aa, Meripilus giganteus
AIPASCASTITPACLQAIYGIPTTKATQSSNKLAVSGFIDQFANKADLKSFLAQFRKDISSSTTFSLQTLDGGENDQSPSEAGIEANLDIQYTVGLATGVPTTFISVGDDFQDGNLEGFLDIINFLLGESNPPQVLTTSYGQNENTISAKLANQLCNAYAQLGARGTSILFASGDGGVSGSQSAHCSNFVPTFPSGCPFMTSVGATQGVSPETAAAFSSGGFSNVFGIPSYQASAVSGYLSALGSTNSGKFNRSGRGFPDVSTQGVDFQIVSGGQTIGVDGTSCASPTFASVISLVNDRLIAAGKSPLGFLNPFLYSSAGKAALNDVTSGSNPGCSTNGFPAKAGWDSVTGLGTPNFAKLLTAVGL

SEQ ID NO: 50491 - protein, 366 aa, Meripilus giganteus
AIPASCASTITPACLQAIYGIPTTKATQSSNKLAVSGFIDQFANKADLKSFLAQFRKDISSSTTFSLQTLDGGENDQSPSEAGIEANLDIQYTVGLATGVPTTFISVGDDFQDGNLEGFLDIINFLLGESNPPQVLTTSYGQNENTISAKLANQLCNAYAQLGARGTSILFASGDGGVSGSQSAHCSNFVPTFPSGCPFMTSVGATQGVSPETAAAFSSGGFSNVFGIPSYQASAVSGYLSALGSTNSGKFNRSGRGFPDVSTQGVDFQIVSGGQTIGVDGTSCASPTFASVISLVNDRLIAAGKSPLGFLNPFLYWSAGKAALNDVTSGSNPGCSTNGFPAKAGWDPVTGLGTPNFAKLLTAVGL

SEQ ID NO: 50492 - protein, 366 aa, Meripilus giganteus
AIPASCASTITPACLQAIYGIPTTKATQSSNKLAVSGFIDQFANKADLKSFLAQFRKDISSSTTFSLQTLDGGENDQSPSEAGIEANLDIQYTVGLATGVPTTFISVGDDFQDGNLEGFLDIINFLLGESNPPQVLTTSYGQNENTISAKLANQLCNAYAQLGARGTSILFASGDGGVSGSQSAHCSNFVPTFPSGCPFMTSVGATQGVSPETAAAFSSGGFSNVFGIPSYQASAVSGYLSALGSTNSGKFNRSGRGFPDVSTQGVDFQIISGGQTIGVDGTSCASPTFASVISLVNDRLIAAGKSPLGFLNPFLYSSAGKAALNDVTSGSNPGCSTNGFPAKAGWDPVTGLGTPNFAKLLTAVGL

SEQ ID NO: 50493 - protein, 366 aa, Meripilus giganteus
AIPASCASTITPACLQAIYGIPTTKATQSSNKLAVSGFIDQFANKADLKSFLAQFRKDISSSTTFSLQTLDGGENDQSPSEAGIEANLDIQYTVGLATGVPTTFISVGDDFQDGNLEGFLDIINFLLGESNPPQVKTTSYGQNENTISAKLANQLCNAYAQLGARGTSILFASGDGGVSGSQSAHCSNFVPTFPSGCPFMTSVGATQGVSPETAAAFSSGGFSNVFGIPSYQASAVSGYLSALGSTNSGKFNRSGRGFPDVSTQGVDFQIVSGGQTIGVDGTSCASPTFASVISLVNDRLIAAGKSPLGFLNPFLYSSAGKAALNDVTSGSNPGCSTNGFPAKAGWDPVTGLGTPNFAKLLTAVGL

SEQ ID NO: 50494 - protein, 366 aa, Meripilus giganteus
AIPASCASTITPACLQAIYGIPTTKATQSSNKLAVSGFIDQFANKADLKSFLAQFRKDISSSTTFSLQTLDGGENDQSPSEAGIEANLDIQYTVGLATGVPTTFISVGDDFQDGNLEGFLDIINFLLGESNPPQVLTTSYGQNENTISAKLANQLCNAYAQLGARGTSILFASGDGGVSGSQSAHCSNFVPTFPSGCPFMTSVGATQGVSPETAAAFSSGGFSNVFGIPSYQASAVSGYLSALGSTNSGKFNRSGRGFPDVSTQGVDFQIVSGRQTIGVDGTSCASPTFASVISLVNDRLIAAGKSPLGFLNPFLYSSAGKAALNDVTSGSNPGCSTNGFPAKAGWDPVTGLGTPNFAKLLTAVGL

SEQ ID NO: 50495 - protein, 366 aa, Meripilus giganteus
AIPASCASTITPACLQAIYGIPTTKATQSSNKLAVSGFIDQFANKADLKSFLAQFRKDISSSTTFSLQTLDGGENDQSPSEAGIEANLDIQYTVGLATCVPTTFISVGDDFQDGNLEGFLDIINFLLGESNPPQVLTTSYGQNENTISAKLANQLCNAYAQLGARGTSILFASGDGGVSGSQSAHCSNFVPTFPSGCPFMTSVGATQGVSPETAAAFSSGGFSNVFGIPSYQASAVSGYLSALGSTNSGKFNRSGRGFPDVSTQGVDFQIVSGGQTIGVDGTSCASPTFASVISLVNDRLIAAGKSPLGFLNPFLYSSAGKAALNDVTSGSNPGCSTNGFPAKAGWDPVTGLGTPNFAKLLTAVGL

SEQ ID NO: 50496 - protein, 366 aa, Meripilus giganteus
AIPASCASTITPACLQAIYGIPTTKATQLSNKLAVSGFIDQFANKADLKSFLAQFRKDISSSTTFSLQTLDGGENDQSPSEAGIEANLDIQYTVGLATGVPTTFISVGDDFQDGNLEGFLDIINFLLGESNPPQVLTTSYGQNENTISAKLANQLCNAYAQLGARGTSILFASGDGGVSGSQSAHCSNFVPTFPSGCPFMTSVGATQGVSPETAAAFSSGGFSNVFGIPSYQASAVSGYLSALGSTNSGKFNRSGRGFPDVSTQGVDFQIVSGGQTIGVDGTSCASPTFASVISLVNDRLIAAGKSPLGFLNPFLYSSAGKAALNDVTSGSNPGCSTNGFPAKAGWDPVTGLGTPNFAKLLTAVGL

SEQ ID NO: 50497 - protein, 366 aa, Meripilus giganteus
AIPASCASTITPACLQAIYGIPTTKATQSSNKLAVSGFIDQFANKADLKSFLAQFRKDISSSTTFSLQTLDGGENDQSPSEAGIEANLDIQYTVGLATGVPTTFISVGDDFQDGNLEGFLDIINFLLGESNPPQVLTTSYGQNENTISAKLANQLCNAYAQLGARGTSILFASGDGGVSGSQSAHCSNFVPTFPSGCPFMTSVGATQGVSPETAAAFSSGGFSNVFGIPSYQASAVSGYLSALGSTNSGKFNRSGRGFPDVSTQGVDFQIVSGGQTIGVDGTSCASPTFASVISLVNDRLIAAGKSPLGFLNPFLYYSAGKAALNDVTSGSNPGCSTNGFPAKAGWDPVTGLGTPNFAKLLTAVGL

SEQ ID NO: 50498 - protein, 366 aa, Meripilus giganteus
AIPASCASTITPACLQAIYGIPTTKATQSSNKLAVSGFIDQFANKADLKSFLAQFRKDISSSTTFMLQTLDGGENDQSPSEAGIEANLDIQYTVGLATGVPTTFISVGDDFQDGNLEGFLDIINFLLGESNPPQVLTTSYGQNENTISAKLANQLCNAYAQLGARGTSILFASGDGGVSGSQSAHCSNFVPTFPSGCPFMTSVGATQGVSPETAAAFSSGGFSNVFGIPSYQASAVSGYLSALGSTNSGKFNRSGRGFPDVSTQGVDFQIVSGGQTIGVDGTSCASPTFASVISLVNDRLIAAGKSPLGFLNPFLYSSAGKAALNDVTSGSNPGCSTNGFPAKAGWDPVTGLGTPNFAKLLTAVGL

SEQ ID NO: 50499 - protein, 366 aa, Meripilus giganteus
AIPASCASTITPACLQAIYGIPTTKATQSSNKLAVSGFIDQFANKADLKSFLAQFRKDISSSTTFSLQTLDGGENDQSPSEAGIEANLDIQYTVGLATGVPTTFISVGDDFQDGNLEGFLDIINFLLGESNPPQVLTTSYGQNENTISAKLANQLCNAYAQLGARGTSILFASGDGGVSGSQSAHCSNFVPTFPSGCPFMTSVGATQGVSPETAAAFSSGGFSNVFGIPSYQASAVSGYLSALGSTNSGKFNRSGRGFPDVSTQGVDFQIVSGGQTIGVDGTSCASPAFASVISLVNDRLIAAGKSPLGFLNPFLYSSAGKAALNDVTSGSNPGCSTNGFPAKAGWDPVTGLGTPNFAKLLTAVGL

SEQ ID NO: 50500 - protein, 366 aa, Meripilus giganteus
AIPASCASTITPACLQAIYGIPTTKATQSSNKLAVSGFIDQFANKADLKSFLAQFRKDISSSTTFSLQTLDGGENDQSPSEAGIEANLDIQYTVGLATGVPTTFISVGDDFQDGNLEGFLDIINFLLGESNPPQVLTTSYGQNENTISAKLANQLCNAYAQLGARGTSILFASGDGGVSGSQSAHCSNFVPTFPSGCPFMTSVGATQGVSPETAAAFSSGGFSNVFGIPSYQASAVSGYLSILGSTNSGKFNRSGRGFPDVSTQGVDFQIVSGGQTIGVDGTSCASPTFASVISLVNDRLIAAGKSPLGFLNPFLYSSAGKAALNDVTSGSNPGCSTNGFPAKAGWDPVTGLGTPNFAKLLTAVGL

SEQ ID NO: 50501 - protein, 366 aa, Meripilus giganteus
AIPASCASTITPACLQAIYGIPTTKATQSSNKLAVSGFIDQFANKADLKSFLAQFRKDISSSTTFSLQTLDGGENDQSPSEAGIEANLDIQYTVGLATGVPTTFISVGDDFQDGNLEGFLDIIIFLLGESNPPQVLTTSYGQNENTISAKLANQLCNAYAQLGARGTSILFASGDGGVSGSQSAHCSNFVPTFPSGCPFMTSVGATQGVSPETAAAFSSGGFSNVFGIPSYQASAVSGYLSALGSTNSGKFNRSGRGFPDVSTQGVDFQIVSGGQTIGVDGTSCASPTFASVISLVNDRLIAAGKSPLGFLNPFLYSSAGKAALNDVTSGSNPGCSTNGFPAKAGWDPVTGLGTPNFAKLLTAVGL

SEQ ID NO: 50502 - protein, 366 aa, Meripilus giganteus
AIPASCASTITPACLQAIYGIPTTKATQSSNKLAVSGFIDQFANKADLKSFLAQFRKDISSSTTFSLQTLDGGENDQSPSEAGIEANLDIQYTVGLATGVPTTFISVGDDFQDGNLEGFLDIINFLLGESNPPQVLTTSYGQNENTISAKLANQLCNAYAQLGARGTSILFASGDGGVSGSQSALCSNFVPTFPSGCPFMTSVGATQGVSPETAAAFSSGGFSNVFGIPSYQASAVSGYLSALGSTNSGKFNRSGRGFPDVSTQGVDFQIVSGGQTIGVDGTSCASPTFASVISLVNDRLIAAGKSPLGFLNPFLYSSAGKAALNDVTSGSNPGCSTNGFPAKAGWDPVTGLGTPNFAKLLTAVGL

SEQ ID NO: 50503 - protein, 366 aa, Meripilus giganteus
AIPASCASTITPACLQAIYGIPTTKATQSSNKLAVSGFINQFANKADLKSFLAQFRKDISSSTTFSLQTLDGGENDQSPSEAGIEANLDIQYTVGLATGVPTTFISVGDDFQDGNLEGFLDIINFLLGESNPPQVLTTSYGQNENTISAKLANQLCNAYAQLGARGTSILFASGDGGVSGSQSAHCSNFVPTFPSGCPFMTSVGATQGVSPETAAAFSSGGFSNVFGIPSYQASAVSGYLSALGSTNSGKFNRSGRGFPDVSTQGVDFQIVSGGQTIGVDGTSCASPTFASVISLVNDRLIAAGKSPLGFLNPFLYSSAGKAALNDVTSGSNPGCSTNGFPAKAGWDPVTGLGTPNFAKLLTAVGL

SEQ ID NO: 50504 - protein, 366 aa, Meripilus giganteus
AIPASCASTITPACLQAIYGIPTTKATQSSNKLAVSGFIDQFANKADLKSFLAQFRKDISSSTTFSLQTLDGGENDQSPSEAGIEANLDIQYTVGLATGVPTTFISVGDDFQDGNLEGFLDIINFLLGESNPPQVLTTSYGQNENTISAKLANQLCNAYAQLGARGTSILFASGDGGVSGSQSAHCSNFVPTFPSGCPFMTSVGATQGVSPETAAAFSSGGFSNVFGIPSYQASAVSGYLSALGSTNSGKFNRSGRGFPDVSTQGVDFQIVSGGQRIGVDGTSCASPTFASVISLVNDRLIAAGKSPLGFLNPFLYSSAGKAALNDVTSGSNPGCSTNGFPAKAGWDPVTGLGTPNFAKLLTAVGL

SEQ ID NO: 50505 - protein, 366 aa, Meripilus giganteus
AIPASCASTITPACLQAIYGIPTTKATQSSNKLAVSGFIDQFANKADLKSFLAQFRKDISSSTTFSLQTLDGGENDQSPSEAGIEANLDIQYTVGLATGVPTTFISVGDDFQDGNLEGFLDIINFLLGESNPPQVLTTSYGQNENTISAKLANQLCNAYAQLGARGTSILFASGDGGVSGSQSAHCSNFVPTFPSGCPFMTSVGATQGVSPETAAAFSSGGFSNVFGIPSYQASAVSGYLSALGSTNSGKFNRSGRGFPDVSTQGVDFQIVSGGQTIGVDGTSCASPTFASVISLVNDRLIAAGKSPLGFLNPFLYSSAGKAALNDVTSQSNPGCSTNGFPAKAGWDPVTGLGTPNFAKLLTAVGL

SEQ ID NO: 50506 - protein, 366 aa, Meripilus giganteus
AIPASCASTITPACLQAIYGIPTTKATQSSNKLAVSGFIDQFANKADLKSFLAQFRKDISSSTTFSLQTLDGGENDQSPSEAGIEANLDIQYTVGLATGVPTTFISVGDDFQDGNLEGFLDIINFLLGENNPPQVLTTSYGQNENTISAKLANQLCNAYAQLGARGTSILFASGDGGVSGSQSAHCSNFVPTFPSGCPFMTSVGATQGVSPETAAAFSSGGFSNVFGIPSYQASAVSGYLSALGSTNSGKFNRSGRGFPDVSTQGVDFQIVSGGQTIGVDGTSCASPTFASVISLVNDRLIAAGKSPLGFLNPFLYSSAGKAALNDVTSGSNPGCSTNGFPAKAGWDPVTGLGTPNFAKLLTAVGL

SEQ ID NO: 50507 - protein, 366 aa, Meripilus giganteus
AIPASCASTITPACLQAIYGIPTTKATQSSNKLAVSGFIDQFANKKDLKSFLAQFRKDISSSTTFSLQTLDGGENDQSPSEAGIEANLDIQYTVGLATGVPTTFISVGDDFQDGNLEGFLDIINFLLGESNPPQVLTTSYGQNENTISAKLANQLCNAYAQLGARGTSILFASGDGGVSGSQSAHCSNFVPTFPSGCPFMTSVGATQGVSPETAAAFSSGGFSNVFGIPSYQASAVSGYLSALGSTNSGKFNRSGRGFPDVSTQGVDFQIVSGGQTIGVDGTSCASPTFASVISLVNDRLIAAGKSPLGFLNPFLYSSAGKAALNDVTSGSNPGCSTNGFPAKAGWDPVTGLGTPNFAKLLTAVGL

SEQ ID NO: 50508 - protein, 366 aa, Meripilus giganteus
AIPASCASTITPACLQAIYGIPTTKATQSSNKLAVSGFIDQFANKADLKSFLAQFRKDISSSTTFSLQTLDGGENDQSPSEAGIEANLDIQYTVGLATGVPTTFISVGDDFQDGNLEGFLDIINFLLGESNPPQVLTTSYFQNENTISAKLANQLCNAYAQLGARGTSILFASGDGGVSGSQSAHCSNFVPTFPSGCPFMTSVGATQGVSPETAAAFSSGGFSNVFGIPSYQASAVSGYLSALGSTNSGKFNRSGRGFPDVSTQGVDFQIVSGGQTIGVDGTSCASPTFASVISLVNDRLIAAGKSPLGFLNPFLYSSAGKAALNDVTSGSNPGCSTNGFPAKAGWDPVTGLGTPNFAKLLTAVGL

SEQ ID NO: 50509 - protein, 366 aa, Meripilus giganteus
AIPASCASTITPACLQAIYGIPTTKATQSSNKLAVSGFIDQFANKADLKSFLAQFRKDISSSTTFSLQTLDGGENDQSPSEAGIEANLDIQYTVGLATGVPTTFISVGDDFQDGNLEGFLDIINFLLLESNPPQVLTTSYGQNENTISAKLANQLCNAYAQLGARGTSILFASGDGGVSGSQSAHCSNFVPTFPSGCPFMTSVGATQGVSPETAAAFSSGGFSNVFGIPSYQASAVSGYLSALGSTNSGKFNRSGRGFPDVSTQGVDFQIVSGGQTIGVDGTSCASPTFASVISLVNDRLIAAGKSPLGFLNPFLYSSAGKAALNDVTSGSNPGCSTNGFPAKAGWDPVTGLGTPNFAKLLTAVGL

SEQ ID NO: 50510 - protein, 366 aa, Meripilus giganteus
AIPASCASTITPACLQAIYGIPTTKATQSSNKLAVSGFIDQFANKADLKSFLASFRKDISSSTTFSLQTLDGGENDQSPSEAGIEANLDIQYTVGLATGVPTTFISVGDDFQDGNLEGFLDIINFLLGESNPPQVLTTSYGQNENTISAKLANQLCNAYAQLGARGTSILFASGDGGVSGSQSAHCSNFVPTFPSGCPFMTSVGATQGVSPETAAAFSSGGFSNVFGIPSYQASAVSGYLSALGSTNSGKFNRSGRGFPDVSTQGVDFQIVSGGQTIGVDGTSCASPTFASVISLVNDRLIAAGKSPLGFLNPFLYSSAGKAALNDVTSGSNPGCSTNGFPAKAGWDPVTGLGTPNFAKLLTAVGL

SEQ ID NO: 50511 - protein, 366 aa, Meripilus giganteus
AIPASCASTITPACLQAIYGIPTTKATQSSNKLAVSGFIDQFANKADLKSFLAQFRKDISSSTTFSLQTLDGGENDQSPSEAGIEANLDIQYTVGLATGVPTTFISVGDDFQDGNLEGFLDIINFLLGESNPPQVLTTSYGQNENTISAKLANCLCNAYAQLGARGTSILFASGDGGVSGSQSAHCSNFVPTFPSGCPFMTSVGATQGVSPETAAAFSSGGFSNVFGIPSYQASAVSGYLSALGSTNSGKFNRSGRGFPDVSTQGVDFQIVSGGQTIGVDGTSCASPTFASVISLVNDRLIAAGKSPLGFLNPFLYSSAGKAALNDVTSGSNPGCSTNGFPAKAGWDPVTGLGTPNFAKLLTAVGL

SEQ ID NO: 50512 - protein, 366 aa, Meripilus giganteus
AIPASCASTITPACLQAIYGIPTTKATQSSNKLAVSGFIDQFANKADLKSFLAQFRKDISSSTTFSLQTLDGGENDQSPSEAGIEANLDIQYTVGLATGVPTTFISVGDDFQDGNLEGFLDIINFLLGESNPPQVLTTSYGQNENTISAKLANQLCNAYAQLGARGTSILFASGDGGVSGSQSAHCSNFVPTFPSGCPFMTSVGATQGVSPETAAAFSSGGFSNVFGIPSYQASAVSGYLSALGSTNSGKFNRSGRGFPDVSTQGVDFIIVSGGQTIGVDGTSCASPTFASVISLVNDRLIAAGKSPLGFLNPFLYSSAGKAALNDVTSGSNPGCSTNGFPAKAGWDPVTGLGTPNFAKLLTAVGL

SEQ ID NO: 50513 - protein, 366 aa, Meripilus giganteus
AIPASCASTITPACLQAIYGIPTTKATQSSNKLAVSGFIDQFANKADLKSFLAQFRKDISSSTTFSLQTLDGGENDQSPSEAGIEANLDIQYTVGLATGVPTTFISVGDDFQDGNLEGFLDIINFLLGESNPPQVLTTSYGQNENTISAKLANQLCNAYAQLGARGTSILFASGDGGVSGSQSAHCSNFVPTFPSGCPFMTSVGATQGVSPETAAAFSSGGFSNVFGIPSYQASAVSGYLSALGSTNSGKFNRSGRGFPDVSTQGVDFQIVSGGQTIGVDGTSCASPTFASVISLVNDRLIAAGKSPLGFLNPFLYSSAGKAALNDVTSGSNPGCSTNGFPAKAGWDPVTGLGTPNFAKLLHAVGL

SEQ ID NO: 50514 - protein, 366 aa, Meripilus giganteus
AIPASCASTITPACLQAIYGIPTTKATQSSNKLAVSGFIDQFANKADLKSFLCQFRKDISSSTTFSLQTLDGGENDQSPSEAGIEANLDIQYTVGLATGVPTTFISVGDDFQDGNLEGFLDIINFLLGESNPPQVLTTSYGQNENTISAKLANQLCNAYAQLGARGTSILFASGDGGVSGSQSAHCSNFVPTFPSGCPFMTSVGATQGVSPETAAAFSSGGFSNVFGIPSYQASAVSGYLSALGSTNSGKFNRSGRGFPDVSTQGVDFQIVSGGQTIGVDGTSCASPTFASVISLVNDRLIAAGKSPLGFLNPFLYSSAGKAALNDVTSGSNPGCSTNGFPAKAGWDPVTGLGTPNFAKLLTAVGL

SEQ ID NO: 50515 - protein, 366 aa, Meripilus giganteus
AIPASCASTITPACLQAIYGIPTTKATQSSNKLAVSGFIDQFANKADLKSFLVQFRKDISSSTTFSLQTLDGGENDQSPSEAGIEANLDIQYTVGLATGVPTTFISVGDDFQDGNLEGFLDIINFLLGESNPPQVLTTSYGQNENTISAKLANQLCNAYAQLGARGTSILFASGDGGVSGSQSAHCSNFVPTFPSGCPFMTSVGATQGVSPETAAAFSSGGFSNVFGIPSYQASAVSGYLSALGSTNSGKFNRSGRGFPDVSTQGVDFQIVSGGQTIGVDGTSCASPTFASVISLVNDRLIAAGKSPLGFLNPFLYSSAGKAALNDVTSGSNPGCSTNGFPAKAGWDPVTGLGTPNFAKLLTAVGL

SEQ ID NO: 50516 - protein, 366 aa, Meripilus giganteus
AIPASCASTITPACLQAIYGIPTTKATQSSNKLAVSGFIDQFANKADLKSFLAQFRKDISSSTTFSLQTLDGGENDQSPSEAGIEANLDIQYTVGLATGVPTTFISVGDDFQDGNLEGFLDIINFLLGESNPPQVLTTSYGQNENTISAKLANQLCNAYAQLGARGTSILFASGDGGVSGSQSAHCSNFVPTFPSGCPFMTSVGATQGVSPEFAAAFSSGGFSNVFGIPSYQASAVSGYLSALGSTNSGKFNRSGRGFPDVSTQGVDFQIVSGGQTIGVDGTSCASPTFASVISLVNDRLIAAGKSPLGFLNPFLYSSAGKAALNDVTSGSNPGCSTNGFPAKAGWDPVTGLGTPNFAKLLTAVGL

SEQ ID NO: 50517 - protein, 366 aa, Meripilus giganteus
AIPASCASTITPACLQAIYGIPTTKATQSSNKLAVSGFIDQFANKADLKSFLAQFRKDISSSTTFSLQTLDGGENDQSPSEAGIEANLDIQYTVGLATGVPTTFISVGDDFQDGNLEGFLDIINFLLGESNPPQVLTTSYGQNENTISAKLANQLCNAYAQLGARGTSILFASGDGGVSGSCSAHCSNFVPTFPSGCPFMTSVGATQGVSPETAAAFSSGGFSNVFGIPSYQASAVSGYLSALGSTNSGKFNRSGRGFPDVSTQGVDFQIVSGGQTIGVDGTSCASPTFASVISLVNDRLIAAGKSPLGFLNPFLYSSAGKAALNDVTSGSNPGCSTNGFPAKAGWDPVTGLGTPNFAKLLTAVGL

SEQ ID NO: 50518 - protein, 366 aa, Meripilus giganteus
AIPASCASTITPACLQAIYGIPTTKATQSSNKLAVSGFIDQFANKADLKSFLAQFRKDISSSTTFSLQTLDGGENDQSPSEAGIEANLDIQYTVGLATGVPTTFISVGDDFQDGNLEGFLDIINFLLGESNPPQVLTTSYGQNENTISAKLANQLCNAYAQLGARGTSILFASGDGGVSGSQSAPCSNFVPTFPSGCPFMTSVGATQGVSPETAAAFSSGGFSNVFGIPSYQASAVSGYLSALGSTNSGKFNRSGRGFPDVSTQGVDFQIVSGGQTIGVDGTSCASPTFASVISLVNDRLIAAGKSPLGFLNPFLYSSAGKAALNDVTSGSNPGCSTNGFPAKAGWDPVTGLGTPNFAKLLTAVGL

SEQ ID NO: 50519 - protein, 366 aa, Meripilus giganteus
AIPASCASTITPACLQAIYGIPTTKATQSSNKLAVSGFIDQFANKADLKSFLAQFRKDISSSTTFSLQTLDGGENDQSPSEAGIEANLDIQYTVGLATGVPTTFISVGDDFQDGNLEGFLDIINFLLGESVPPQVLTTSYGQNENTISAKLANQLCNAYAQLGARGTSILFASGDGGVSGSQSAHCSNFVPTFPSGCPFMTSVGATQGVSPETAAAFSSGGFSNVFGIPSYQASAVSGYLSALGSTNSGKFNRSGRGFPDVSTQGVDFQIVSGGQTIGVDGTSCASPTFASVISLVNDRLIAAGKSPLGFLNPFLYSSAGKAALNDVTSGSNPGCSTNGFPAKAGWDPVTGLGTPNFAKLLTAVGL

SEQ ID NO: 50520 - protein, 366 aa, Meripilus giganteus
AIPASCASTITPACLQAIYGIPTTKATQSSNKLAVSGFIDQFANKADLKSFLAYFRKDISSSTTFSLQTLDGGENDQSPSEAGIEANLDIQYTVGLATGVPTTFISVGDDFQDGNLEGFLDIINFLLGESNPPQVLTTSYGQNENTISAKLANQLCNAYAQLGARGTSILFASGDGGVSGSQSAHCSNFVPTFPSGCPFMTSVGATQGVSPETAAAFSSGGFSNVFGIPSYQASAVSGYLSALGSTNSGKFNRSGRGFPDVSTQGVDFQIVSGGQTIGVDGTSCASPTFASVISLVNDRLIAAGKSPLGFLNPFLYSSAGKAALNDVTSGSNPGCSTNGFPAKAGWDPVTGLGTPNFAKLLTAVGL

SEQ ID NO: 50521 - protein, 366 aa, Meripilus giganteus
AIPASCASTITPACLQAIYGIPTTKATQSSNKLAVSGFIDQFANKEDLKSFLAQFRKDISSSTTFSLQTLDGGENDQSPSEAGIEANLDIQYTVGLATGVPTTFISVGDDFQDGNLEGFLDIINFLLGESNPPQVLTTSYGQNENTISAKLANQLCNAYAQLGARGTSILFASGDGGVSGSQSAHCSNFVPTFPSGCPFMTSVGATQGVSPETAAAFSSGGFSNVFGIPSYQASAVSGYLSALGSTNSGKFNRSGRGFPDVSTQGVDFQIVSGGQTIGVDGTSCASPTFASVISLVNDRLIAAGKSPLGFLNPFLYSSAGKAALNDVTSGSNPGCSTNGFPAKAGWDPVTGLGTPNFAKLLTAVGL

SEQ ID NO: 50522 - protein, 366 aa, Meripilus giganteus
AIPALCASTITPACLQAIYGIPTTKATQSSNKLAVSGFIDQFANKADLKSFLAQFRKDISSSTTFSLQTLDGGENDQSPSEAGIEANLDIQYTVGLATGVPTTFISVGDDFQDGNLEGFLDIINFLLGESNPPQVLTTSYGQNENTISAKLANQLCNAYAQLGARGTSILFASGDGGVSGSQSAHCSNFVPTFPSGCPFMTSVGATQGVSPETAAAFSSGGFSNVFGIPSYQASAVSGYLSALGSTNSGKFNRSGRGFPDVSTQGVDFQIVSGGQTIGVDGTSCASPTFASVISLVNDRLIAAGKSPLGFLNPFLYSSAGKAALNDVTSGSNPGCSTNGFPAKAGWDPVTGLGTPNFAKLLTAVGL

SEQ ID NO: 50523 - protein, 366 aa, Meripilus giganteus
AIPASCASTITPACLQAIYGIPTTKATQSSNKLAVSGFIDQFANKADLKSFLAQFRKDISSSTTFSLQTLDGGENDQSPSEAGIEANLDIQYTVGLATGVPTTFISVGDDFQDGNLEGFLDIINFLLGESNPPQVLTTSYGQNENTISAKLANQLCLAYAQLGARGTSILFASGDGGVSGSQSAHCSNFVPTFPSGCPFMTSVGATQGVSPETAAAFSSGGFSNVFGIPSYQASAVSGYLSALGSTNSGKFNRSGRGFPDVSTQGVDFQIVSGGQTIGVDGTSCASPTFASVISLVNDRLIAAGKSPLGFLNPFLYSSAGKAALNDVTSGSNPGCSTNGFPAKAGWDPVTGLGTPNFAKLLTAVGL

SEQ ID NO: 50524 - protein, 366 aa, Meripilus giganteus
AIPASCASTITPACLQAIYGIPTTKATQSSNKLAVSGFIDQFANKADLKSFLAQFRKDISSSTTFSLQTLDGGENDQSPSEAGIEANLDIQYTVGLATGVPTTFISVGDDFQDGNLEGFLDIINFLLGESNPPQVLTTSYGQNENTISAKLANQLCNAYAQLGARGTSILFASGDGGVSGSQSAHCSNFVPTFPSGCPFMTSVGATQGVSPETAAAFSSGGFSNVFGIPSYQASAVSGYLSALGSTNSGKFNRSGRGFPDVSTQGVDFQIVSGGQTIGVDGTSCASPTFASVISLVNDRLIAAGKSPLGFLNPFLYSSAGKAALNDVTSGSNPGCSTNGFPAKAGWDLVTGLGTPNFAKLLTAVGL

SEQ ID NO: 50525 - protein, 366 aa, Meripilus giganteus
AIPASCASTITPACLQAIYGIPTTKATQSSNKLAVSGFIDQFANKADLKSFLAQFRKDISSSTTFSLQTLDGGENDQSPSEAGIEANLDIQYTVGLATGVPTTFQSVGDDFQDGNLEGFLDIINFLLGESNPPQVLTTSYGQNENTISAKLANQLCNAYAQLGARGTSILFASGDGGVSGSQSAHCSNFVPTFPSGCPFMTSVGATQGVSPETAAAFSSGGFSNVFGIPSYQASAVSGYLSALGSTNSGKFNRSGRGFPDVSTQGVDFQIVSGGQTIGVDGTSCASPTFASVISLVNDRLIAAGKSPLGFLNPFLYSSAGKAALNDVTSGSNPGCSTNGFPAKAGWDPVTGLGTPNFAKLLTAVGL

SEQ ID NO: 50526 - protein, 366 aa, Meripilus giganteus
AIPASCASTITPACLQAIYGIPTTKATQSSNKLAVSGFIDQFANKADLKSFLAQFRKDISSSTTFSLQTLDGGENDQSPSEAGIEANLDIQYTVGLATGVPTTFISVGDDFQDGNLEGFLDIINFLLGESNPPQVLTTSYGQNENTISAKLANQLCNAYAQLGARGTSILFASGDGGVSGSQSAHCSNFVPTFPSGCPFMTSVGATQGVSPETAAAFSSGGFSNVFGIPSYQASAVSGYLSALGSTNSGKFNRSGRGFPDVSTQGVDFQIVSGGQTIGVDGTSCASPTFASVISLVNDRLIAAGKSPLGFLNPFLYSSAGKAALNDVTSGSNPGCSTNGFPAKAGWDPVTGLGTPNFAWLLTAVGL

SEQ ID NO: 50527 - protein, 366 aa, Meripilus giganteus
AIPASCASTITPACLQAIYGIPTTKATQSSNKLAVSGFIDQFANKADLKSFLAQFRKDISSSTTFSLQTLDGGENDQSPSEAGIEANLDIQYTVGLATGVPTTFISVGDDFQDGNLEGFLDIINFLLGESNPPQVLTTSYGQNENTISAKLANQLCNAYAQLGARGTSILFASGDGGVSGSQSAHCSNFVPTFPSGCPFMTSVGATQGVSPETAAAFSSGGFSNVFGIPSYQASAVSGYLSALGSTNSGKFNRSGRGFPDVSTQGVDFQIVSGGQTIGVDGTSCASPTFASVISLVNDRLIAAGKSPLGFLNPFLYSSAGKAALNDVTSGSNPGCSTTGFPAKAGWDPVTGLGTPNFAKLLTAVGL

SEQ ID NO: 50528 - protein, 366 aa, Meripilus giganteus
AIPASCASTITPACLQAIYGIPTTKATQSSNKLAVSGFIHQFANKADLKSFLAQFRKDISSSTTFSLQTLDGGENDQSPSEAGIEANLDIQYTVGLATGVPTTFISVGDDFQDGNLEGFLDIINFLLGESNPPQVLTTSYGQNENTISAKLANQLCNAYAQLGARGTSILFASGDGGVSGSQSAHCSNFVPTFPSGCPFMTSVGATQGVSPETAAAFSSGGFSNVFGIPSYQASAVSGYLSALGSTNSGKFNRSGRGFPDVSTQGVDFQIVSGGQTIGVDGTSCASPTFASVISLVNDRLIAAGKSPLGFLNPFLYSSAGKAALNDVTSGSNPGCSTNGFPAKAGWDPVTGLGTPNFAKLLTAVGL

SEQ ID NO: 50529 - protein, 366 aa, Meripilus giganteus
AIPASCASTITPACLQAIYGIPTTKATQSSNKLAVSGFIDQFANKADLKSFLAQHRKDISSSTTFSLQTLDGGENDQSPSEAGIEANLDIQYTVGLATGVPTTFISVGDDFQDGNLEGFLDIINFLLGESNPPQVLTTSYGQNENTISAKLANQLCNAYAQLGARGTSILFASGDGGVSGSQSAHCSNFVPTFPSGCPFMTSVGATQGVSPETAAAFSSGGFSNVFGIPSYQASAVSGYLSALGSTNSGKFNRSGRGFPDVSTQGVDFQIVSGGQTIGVDGTSCASPTFASVISLVNDRLIAAGKSPLGFLNPFLYSSAGKAALNDVTSGSNPGCSTNGFPAKAGWDPVTGLGTPNFAKLLTAVGL

SEQ ID NO: 50530 - protein, 366 aa, Meripilus giganteus
AIPASCASTITPACLQAIYGIPTTKATQSSNKLAVSGFIDQFANKADLKSFLAQFRKDISSSTTFSLQTLDGGENDQSPSEAGIEANLDIQYTVGLATGVPTTFISVGDDFQDGNLEGFLDIINFLLGESNPPQVLTTSYGQNENTISAKLANQLCNAYAQLGARGTSILFASGDGGVSGSQSAHCSNFVPTFPSGCPFMTSVGATQGVSPETAAAFSSGGFSNVFGIPSYQASAVSGYLSALGSTNSGKFNRSGRGFPDVSTQGVDFQIVSGGQTIGVDGTSCASPTFASVISLVNDRLIAAGKSPLGFLNPFLYSSAGKAALNDVTSGSNPGCLTNGFPAKAGWDPVTGLGTPNFAKLLTAVGL

SEQ ID NO: 50531 - protein, 366 aa, Meripilus giganteus
AIPASCASTITPACLQAIYGIPTTKATQSSNKLAVSGFIDQFANKADLKSFLAQFRKDISSSTTFSLQTLDGGENDQSPSEAGIEANLDIQYTVGLATGVPTTFISVGDDFQDGNLEGFLDIINFLLGESNPPQVLTTSYGQNENTISAKLANQLCNAYAQLGARGVSILFASGDGGVSGSQSAHCSNFVPTFPSGCPFMTSVGATQGVSPETAAAFSSGGFSNVFGIPSYQASAVSGYLSALGSTNSGKFNRSGRGFPDVSTQGVDFQIVSGGQTIGVDGTSCASPTFASVISLVNDRLIAAGKSPLGFLNPFLYSSAGKAALNDVTSGSNPGCSTNGFPAKAGWDPVTGLGTPNFAKLLTAVGL

SEQ ID NO: 50532 - protein, 366 aa, Meripilus giganteus
AIPASCASTITPACLQAIYGIPTTKATQSSNKLLVSGFIDQFANKADLKSFLAQFRKDISSSTTFSLQTLDGGENDQSPSEAGIEANLDIQYTVGLATGVPTTFISVGDDFQDGNLEGFLDIINFLLGESNPPQVLTTSYGQNENTISAKLANQLCNAYAQLGARGTSILFASGDGGVSGSQSAHCSNFVPTFPSGCPFMTSVGATQGVSPETAAAFSSGGFSNVFGIPSYQASAVSGYLSALGSTNSGKFNRSGRGFPDVSTQGVDFQIVSGGQTIGVDGTSCASPTFASVISLVNDRLIAAGKSPLGFLNPFLYSSAGKAALNDVTSGSNPGCSTNGFPAKAGWDPVTGLGTPNFAKLLTAVGL

SEQ ID NO: 50533 - protein, 366 aa, Meripilus giganteus
AIPASCASTITPACLQAIYGIPTTKATQSSNKLAVSGFIDQFANKADLKSFLAQFRKDISSSTTFSLQTLDGGENDQSPSEAGIEANLDIQYTVGLATGVPTTFISVGDDFQDGNLEGFLDIINFLLGESNPPQVLTTSYGQNENTISAKLANQLCNAYAQLGARGTSFLFASGDGGVSGSQSAHCSNFVPTFPSGCPFMTSVGATQGVSPETAAAFSSGGFSNVFGIPSYQASAVSGYLSALGSTNSGKFNRSGRGFPDVSTQGVDFQIVSGGQTIGVDGTSCASPTFASVISLVNDRLIAAGKSPLGFLNPFLYSSAGKAALNDVTSGSNPGCSTNGFPAKAGWDPVTGLGTPNFAKLLTAVGL

SEQ ID NO: 50534 - protein, 366 aa, Meripilus giganteus
AIPASCASTITPACLQAIYGIPTTKATQSSNKLAVSGFIDQFANKADLKSFLAQFRKDISSSTTFSLQTLDGGENDQSPSEAGIEANLDIQYTVGLATGVPTTFISVGDDFQDGNLEGFLDIINFLLGESNPPQVLTTSYGQNENTISAKLANQLCNAYAQLGARGTSILFASGDGGVSGSQSAHCSNFVPTFPSGCPFMTSVGATQGVSPETAAAFSSGGFSNVFGIPSYQASAVSGYLSALGSTNSGKFNRSGRGFPDVSTQGVDFQIVSGGQTIGVDGTSCASPTFASVISLVNDRLIAAGKSPLGFLNPFLYSSWGKAALNDVTSGSNPGCSTNGFPAKAGWDPVTGLGTPNFAKLLTAVGL

SEQ ID NO: 50535 - protein, 366 aa, Meripilus giganteus
AIPASCASTITPACLQAIYGIPTTKATQSSNKLAVSGFIDQFANKADLKSFLAQFRKDISSSTTFSLQTLDGGENDQSPSEAGIEANLDIQYTVGLATGVPTTFISVGDDFQDGNLEGFLDIINFLLGESNPPQVLTTSYGQNENTISAKLANQLCNAYAQLGARGTSILFASGDGGVSGSQSAHCSNFVPTFPSGCPFMTSVGATQGVSPETAAAFSSGGFSNVFGIPSYQASAVSGYLSALGSTNSGKFNRSGRGFPDVSTQGVDFQIVSGGQTIGVDGTSCASPTFASVISLVNDRLIAAGKSPLGFLNPFLYSSAGKAALNDVTSGSNPGCSTNGFPAKLGWDPVTGLGTPNFAKLLTAVGL

SEQ ID NO: 50536 - protein, 366 aa, Meripilus giganteus
AIPASCASTITPACLQAIYGIPTTKATQSSNKLAVSGFIDQFANKADLKSFLAQFRKDISSSTTFSLQTLDGGENDQSPSEAGIEANLDIQYTVGLATGVPTTFISVGDDFQDGNLEGFLDIINFLLGESNPPQVLTTSYGQNENTISAKLANQLCNAYAQLGARGTSILFASGDGGVSGSQSAHCSNFVPTFPSGCPFMTSVGATQGVSPETAAAFSSGGFSNVFGIPSYQASAVSGYLSALGSTNSGKFNRSGRGFPDVSTQGVDFQIVSGGQTIGVDGTSCASPTFASVISLVNDRLIAAGKSPLGFLNPFLYSSAGKAALNDVTSGSNPGCSTNGFPAKAGWDPVTGLGTPNFAKLLNAVGL

SEQ ID NO: 50537 - protein, 366 aa, Meripilus giganteus
AIPASCASTITPACLQAIYGIPTTKATQSSNKLAVSGFGDQFANKADLKSFLAQFRKDISSSTTFSLQTLDGGENDQSPSEAGIEANLDIQYTVGLATGVPTTFISVGDDFQDGNLEGFLDIINFLLGESNPPQVLTTSYGQNENTISAKLANQLCNAYAQLGARGTSILFASGDGGVSGSQSAHCSNFVPTFPSGCPFMTSVGATQGVSPETAAAFSSGGFSNVFGIPSYQASAVSGYLSALGSTNSGKFNRSGRGFPDVSTQGVDFQIVSGGQTIGVDGTSCASPTFASVISLVNDRLIAAGKSPLGFLNPFLYSSAGKAALNDVTSGSNPGCSTNGFPAKAGWDPVTGLGTPNFAKLLTAVGL

SEQ ID NO: 50538 - protein, 366 aa, Meripilus giganteus
AIPASCASTITPACLQAIYGIPTTKATQSSNKLAVSGFIDQFANKADLKSFLAQFRKDISSSTTFSLQTLDGGENDQSPSEAGIEANLDIQYTVGLATGVPTTFISVGDDFQDGNLEGFLDIINFLLGESNPPQVLTTSYGQNENTISAKLANQLCNAYAQLGARGTSILFASGDGGVSGSQSAHCSNFVPTFPSGCPFMTSVGATQGVSPETAAAFSSGGFSNVFGIPSYQASAVSGYLSALGSTNSGKFNRSGRGFPDVSTQGVDFQIVSGGQTIGVDGTSCASPTFASVISLVNDRLIAAGKSPLGFLNPFLYSSAGKAALNDVTSGGNPGCSTNGFPAKAGWDPVTGLGTPNFAKLLTAVGL

SEQ ID NO: 50539 - protein, 366 aa, Meripilus giganteus
AIPASCASTITPACLQAIYGIPTTKATQSSNKLAVSGFIDQFANKADLKSFLAQFRSDISSSTTFSLQTLDGGENDQSPSEAGIEANLDIQYTVGLATGVPTTFISVGDDFQDGNLEGFLDIINFLLGESNPPQVLTTSYGQNENTISAKLANQLCNAYAQLGARGTSILFASGDGGVSGSQSAHCSNFVPTFPSGCPFMTSVGATQGVSPETAAAFSSGGFSNVFGIPSYQASAVSGYLSALGSTNSGKFNRSGRGFPDVSTQGVDFQIVSGGQTIGVDGTSCASPTFASVISLVNDRLIAAGKSPLGFLNPFLYSSAGKAALNDVTSGSNPGCSTNGFPAKAGWDPVTGLGTPNFAKLLTAVGL

SEQ ID NO: 50540 - protein, 366 aa, Meripilus giganteus
AIPASCASTITPACLQAIYGIPTTKATQSSNKLAVSGFIDQFANKADLKSFLAQFRKDISSSTTFSLQTLDGGENDQSPSEAGIEANLDIQYTVGLATGVPTKFISVGDDFQDGNLEGFLDIINFLLGESNPPQVLTTSYGQNENTISAKLANQLCNAYAQLGARGTSILFASGDGGVSGSQSAHCSNFVPTFPSGCPFMTSVGATQGVSPETAAAFSSGGFSNVFGIPSYQASAVSGYLSALGSTNSGKFNRSGRGFPDVSTQGVDFQIVSGGQTIGVDGTSCASPTFASVISLVNDRLIAAGKSPLGFLNPFLYSSAGKAALNDVTSGSNPGCSTNGFPAKAGWDPVTGLGTPNFAKLLTAVGL

SEQ ID NO: 50541 - protein, 366 aa, Meripilus giganteus
AIPASCASTITPACLQAIYGIPTTKATQSSNKLAVSGFIDQFANKADLKSFLAQFRKDISSSTTFSLQTLDGGENDQSPSEFGIEANLDIQYTVGLATGVPTTFISVGDDFQDGNLEGFLDIINFLLGESNPPQVLTTSYGQNENTISAKLANQLCNAYAQLGARGTSILFASGDGGVSGSQSAHCSNFVPTFPSGCPFMTSVGATQGVSPETAAAFSSGGFSNVFGIPSYQASAVSGYLSALGSTNSGKFNRSGRGFPDVSTQGVDFQIVSGGQTIGVDGTSCASPTFASVISLVNDRLIAAGKSPLGFLNPFLYSSAGKAALNDVTSGSNPGCSTNGFPAKAGWDPVTGLGTPNFAKLLTAVGL

SEQ ID NO: 50542 - protein, 366 aa, Meripilus giganteus
AIPASCASTITPACLQAIYGIPTTKATQSSNKLAVSGFIDQFANKADLKSFLAQFRKDISSSTTFSLQTLDGGENDQSPSEAGIEANLDIQYTVGLATGVPTTFISVGDDFQDGNLEGFLDIINFLLGESNPPQVLTTSYGQNENTISAKLANQLCNAYAQLGARGTSILFASGDGGVSGSQSAHCSNFVPTFPSGCPFMTSVGATQGVSPETAAAFSSGGFSNVFGIPSYQASAVSGYLSALGSTNSGKFNRSGRGFPDVSTQGVDFQIVSGGQTIGVDGTSCASPTFASVISLVNDRLIAAGKSPLGFLNPFLYSSAGKAALNDCTSGSNPGCSTNGFPAKAGWDPVTGLGTPNFAKLLTAVGL

SEQ ID NO: 50543 - protein, 366 aa, Meripilus giganteus
AIPASCASTITPACLQAIYGIPTTKATQSSNKLAVSGFIDQFANKADLKSFLAQFRKDISSSTTFSLQTLDGGENDQSPSEAGIEANLDIQYTVGLATGVPTTFISVGDDFQDGNLEGFLDIINFLLGESNPPQVLTTSYGQNENLISAKLANQLCNAYAQLGARGTSILFASGDGGVSGSQSAHCSNFVPTFPSGCPFMTSVGATQGVSPETAAAFSSGGFSNVFGIPSYQASAVSGYLSALGSTNSGKFNRSGRGFPDVSTQGVDFQIVSGGQTIGVDGTSCASPTFASVISLVNDRLIAAGKSPLGFLNPFLYSSAGKAALNDVTSGSNPGCSTNGFPAKAGWDPVTGLGTPNFAKLLTAVGL

SEQ ID NO: 50544 - protein, 366 aa, Meripilus giganteus
AIPASCASTITPACLQAIYGIPTTKATQSSNKLAVSGFIDQFANKADLKMFLAQFRKDISSSTTFSLQTLDGGENDQSPSEAGIEANLDIQYTVGLATGVPTTFISVGDDFQDGNLEGFLDIINFLLGESNPPQVLTTSYGQNENTISAKLANQLCNAYAQLGARGTSILFASGDGGVSGSQSAHCSNFVPTFPSGCPFMTSVGATQGVSPETAAAFSSGGFSNVFGIPSYQASAVSGYLSALGSTNSGKFNRSGRGFPDVSTQGVDFQIVSGGQTIGVDGTSCASPTFASVISLVNDRLIAAGKSPLGFLNPFLYSSAGKAALNDVTSGSNPGCSTNGFPAKAGWDPVTGLGTPNFAKLLTAVGL

SEQ ID NO: 50545 - protein, 366 aa, Meripilus giganteus
AIPASCASTITPACLQAIYGIPTTKATQSSNKLAVSGFIDQFANKADLKSFLAQFRKDISSSTTFSLQTLDGGENDQSPSEAGIEANLDIQYTVGLATGVPTTFISVGDDFQDGNLEGFLDIINFLLGESNPPQVLTTSYGQNENTISAKLANQLCNAYAQLGARGTSILFASGDGGVSGSQSAHCSNFVPTFPSGCPFMTSVGATQGVSPEHAAAFSSGGFSNVFGIPSYQASAVSGYLSALGSTNSGKFNRSGRGFPDVSTQGVDFQIVSGGQTIGVDGTSCASPTFASVISLVNDRLIAAGKSPLGFLNPFLYSSAGKAALNDVTSGSNPGCSTNGFPAKAGWDPVTGLGTPNFAKLLTAVGL

SEQ ID NO: 50546 - protein, 366 aa, Meripilus giganteus
AIPASCASTITPACLQAIYGIPTTKATQSSNKLAVSGFIDQFANKADLKSFLAQFRKDISSSTTFSLQTLDGGENDQSPSEAGIEANLDIQYTVGLATGVPTTFISVGDDFQDGNLEGFLDIINFLLGESNPPQVLTTSYGQNENTISAKLANQLCNAYAQLGARGTSILFASGDGGVSGSQSAHCSNFVPTFPSGCPFMTSVGATQGVSPETAAAFSSGGFSNVFGIPSYQASAVSGYLSALGSTNSGKFNRSGRGFPDVSTQGVDFQIVKGGQTIGVDGTSCASPTFASVISLVNDRLIAAGKSPLGFLNPFLYSSAGKAALNDVTSGSNPGCSTNGFPAKAGWDPVTGLGTPNFAKLLTAVGL

SEQ ID NO: 50547 - protein, 366 aa, Meripilus giganteus
AIPASCASTITPACLQAIYGIPTTKATQSSNKLAVSGFIDQFANKADLKSFLAQFRKDISSSTTFSLQTLDGGENDQSPSEAGIEANLDIQYTVGLATGVPTTFISVGDDFQDGNLEGFLDIINFLLGESNPPQVLTTSYGQNENTISAKLANQLCNAYAQLGARGTSILFASGDGGVSGSQSAHCSNFVPTFPSGCPFMTSVGATQGVSPETAAAFSSGGFSNVFGIPSYQASAVSGYLSALGSTNSGKFNRSGRGFPDVSTQGVDFQIVSGGRTIGVDGTSCASPTFASVISLVNDRLIAAGKSPLGFLNPFLYSSAGKAALNDVTSGSNPGCSTNGFPAKAGWDPVTGLGTPNFAKLLTAVGL

SEQ ID NO: 50548 - protein, 366 aa, Meripilus giganteus
AIPASCASTITPACLQAIYGIPTTKATQSSNKLAVSGFIDQFANKADLKSFLAQFRKDISSSTTFSLQTLDGGENDQSPSEAGIEANLDIQYTVGLATGVPTTFISVGDDFQDGNLEGFLDIINFLLGESNPPQVLTTSYGQNENTISAKLANQLCNAYAQLGARGTSILFASGDGGVSGSQSAACSNFVPTFPSGCPFMTSVGATQGVSPETAAAFSSGGFSNVFGIPSYQASAVSGYLSALGSTNSGKFNRSGRGFPDVSTQGVDFQIVSGGQTIGVDGTSCASPTFASVISLVNDRLIAAGKSPLGFLNPFLYSSAGKAALNDVTSGSNPGCSTNGFPAKAGWDPVTGLGTPNFAKLLTAVGL

SEQ ID NO: 50549 - protein, 366 aa, Meripilus giganteus
AIPASCASTITPACLQAIYGIPTTKATQSSNKLAVSGFIDQFANKADLKSFLAQFRKDISSSTTFSLQTLDGGENDQSPSEAGIEANLDIQYTVGLATGVPTTFISVGDDFQDGNLEGFLDIINFLLGESNPPQVLTTSYQQNENTISAKLANQLCNAYAQLGARGTSILFASGDGGVSGSQSAHCSNFVPTFPSGCPFMTSVGATQGVSPETAAAFSSGGFSNVFGIPSYQASAVSGYLSALGSTNSGKFNRSGRGFPDVSTQGVDFQIVSGGQTIGVDGTSCASPTFASVISLVNDRLIAAGKSPLGFLNPFLYSSAGKAALNDVTSGSNPGCSTNGFPAKAGWDPVTGLGTPNFAKLLTAVGL

SEQ ID NO: 50550 - protein, 366 aa, Meripilus giganteus
AIPASCASTITPACLQAIYGIPTTKATQSSNKLAVSGFIDQFANKADLKSFLAQFRKDISSSTTFSLQTLDGGENDQSPSEAGIEANLDIQYTVGLATGVPTTFISVGDDFQDGNLEGFLDIINFLLGESNPPQVLTTSYGQNENTISAKLANQLCNAYAQLGARGTSILFASGDGGVSGSQSAHCSNFVPTFPSGCPFFTSVGATQGVSPETAAAFSSGGFSNVFGIPSYQASAVSGYLSALGSTNSGKFNRSGRGFPDVSTQGVDFQIVSGGQTIGVDGTSCASPTFASVISLVNDRLIAAGKSPLGFLNPFLYSSAGKAALNDVTSGSNPGCSTNGFPAKAGWDPVTGLGTPNFAKLLTAVGL

SEQ ID NO: 50551 - protein, 366 aa, Meripilus giganteus
AIPASCASTITPACLQAIYGIPTTKATQSSNKLAVSGFIDQFANKADLKSFLAQFRKDISSSTTFSLQTLDGGENDQSPSEAGIEANLDIQYTVGTATGVPTTFISVGDDFQDGNLEGFLDIINFLLGESNPPQVLTTSYGQNENTISAKLANQLCNAYAQLGARGTSILFASGDGGVSGSQSAHCSNFVPTFPSGCPFMTSVGATQGVSPETAAAFSSGGFSNVFGIPSYQASAVSGYLSALGSTNSGKFNRSGRGFPDVSTQGVDFQIVSGGQTIGVDGTSCASPTFASVISLVNDRLIAAGKSPLGFLNPFLYSSAGKAALNDVTSGSNPGCSTNGFPAKAGWDPVTGLGTPNFAKLLTAVGL

SEQ ID NO: 50552 - protein, 366 aa, Meripilus giganteus
AIPASCASTITPACLQAIYGIPTTKATQSSNKLAVSGFIDQFANKADLKSFLAQFRKDISSSTTFSLQTLDGGENDQSPSEAGIEANLDIQYTVGLATGVPTTFISVGDDFQDGNLEGFLDIINFLLGESIPPQVLTTSYGQNENTISAKLANQLCNAYAQLGARGTSILFASGDGGVSGSQSAHCSNFVPTFPSGCPFMTSVGATQGVSPETAAAFSSGGFSNVFGIPSYQASAVSGYLSALGSTNSGKFNRSGRGFPDVSTQGVDFQIVSGGQTIGVDGTSCASPTFASVISLVNDRLIAAGKSPLGFLNPFLYSSAGKAALNDVTSGSNPGCSTNGFPAKAGWDPVTGLGTPNFAKLLTAVGL

SEQ ID NO: 50553 - protein, 366 aa, Meripilus giganteus
AIPASCASTITPACLQAIYGIPTTKATQSSNKLAVSGFIDQFANKADLKSFLAQFRKDISSSTTFSLQTLDGGENDQSPSEAGIEANLDIQYTVGLATGVPTTFISVGDDFQDGNLEGFLDIINFLLGESNPPQVLTTSYGQNENTISAKLANQLCNAYAQLGARGTSILFASGDGGVSGSQSAHCSNFVPTFPSGCPFMTSVGATQGVSPETAAAFSSGGFSNVFGIPSYQASAVSGYLSALGSTNSGKFNRSGRGFPDVSTQGVDFQIVSGGQTIGVDGTSCASPTFASVISLVNDRLIAAGKSPLGFLNPFLYSSAGKAALNDVTSGSNPGCSTNGFIAKAGWDPVTGLGTPNFAKLLTAVGL

SEQ ID NO: 50554 - protein, 366 aa, Meripilus giganteus
AIPASCASTITPACLQAIYGIPTTKATQSSNKLAVSGFIDQFANKADLKSFLAQFRKDISSSTTFSLQTLDGGENDQSPSEAGIEANLDIQYTVGLATGVPTTFISVGDDFQDGNLEGFLDIINFLLGESNPPQVLTTSYGQNENTISAKLANQLCNAYAQLGARGTSILFASGDGGVSGSQSAHCSNFVPTFPSGCPFMTSVGATQGVSPETAAAFSSGGFSNVFGIPSYQASAVSGYLSALGSTNSGKFNRSGRGFPDVSTQGVDFQIVSGGQTIGVDGTSCASPTFASVISLVNDRLIAAGKSPLGFLNPFLYSSAGKAALNDVTTGSNPGCSTNGFPAKAGWDPVTGLGTPNFAKLLTAVGL

SEQ ID NO: 50555 - protein, 366 aa, Meripilus giganteus
AIPASCASTITPACLQAIYGIPTTKATQSSNKLAVSGFIDQFANKADLKSFLAQFRKDISSSTTFSLQTLDGGENDQSPSLAGIEANLDIQYTVGLATGVPTTFISVGDDFQDGNLEGFLDIINFLLGESNPPQVLTTSYGQNENTISAKLANQLCNAYAQLGARGTSILFASGDGGVSGSQSAHCSNFVPTFPSGCPFMTSVGATQGVSPETAAAFSSGGFSNVFGIPSYQASAVSGYLSALGSTNSGKFNRSGRGFPDVSTQGVDFQIVSGGQTIGVDGTSCASPTFASVISLVNDRLIAAGKSPLGFLNPFLYSSAGKAALNDVTSGSNPGCSTNGFPAKAGWDPVTGLGTPNFAKLLTAVGL

SEQ ID NO: 50556 - protein, 366 aa, Meripilus giganteus
AIPASCASTITPACLQAIYGIPTTKATQSSNKLAVSGFIDQFANKADLKSFLAQFRKDISSSTTFSLQTLDGGENDQSPSEAGIEANLDIQYTVGLATGVPTTFISVGDDFQDGNLEGFLDIINFLLGESNPPQVLTTSYGQNENTISAKLANQLCNAYAQLGARGTSILFASGDGGVSGSQSAHCSNFVPTFPSGCPFMTSVGATQGVSPETAAAFSSGGFSNVFGIPSYQASAVSGYLSALGSTNSGKFNRSGRGFPDVSTQGVFFQIVSGGQTIGVDGTSCASPTFASVISLVNDRLIAAGKSPLGFLNPFLYSSAGKAALNDVTSGSNPGCSTNGFPAKAGWDPVTGLGTPNFAKLLTAVGL

SEQ ID NO: 50557 - protein, 366 aa, Meripilus giganteus
AIPASCASTITPACLQAIYGIPTTKATQSSNKLAVSGFIDQFANKADLKSFLAQFRKDISSSTTFSLQTLDGGENDQSPSEAGIEANLDIQYTVGLATGVPTTFISVGDDFQDGNLEGFLDIINFLLGESNPPQVLTTSYGQNENTISAKLANQLCNAYAQLGARGTSILFASGDGGVSGSQSAHCSNFVPTFPSGCPFMTSVGATQGVSPETAAAFSSGGFSNVFGIPSYQASAVSGYLSALGSTNSGKFNRSGRGFPDVSTQGVDFQIVTGGQTIGVDGTSCASPTFASVISLVNDRLIAAGKSPLGFLNPFLYSSAGKAALNDVTSGSNPGCSTNGFPAKAGWDPVTGLGTPNFAKLLTAVGL

SEQ ID NO: 50558 - protein, 366 aa, Meripilus giganteus
AIPASCASTITPACLQAIYGIPTTKATQSSNKLAVSGFIDQFANKADLKSFLAQFRKDISSSTTFSLQTLDGGENDQSPSEAGIEANLDIQYTVGLATGVPTTFISVGDDFQDGNLEGFLDIINFLLGESNPPQVLTTSYGQNENTISAKLANQLCNAYAQLGARGTSILFASGDGGVSGSQSASCSNFVPTFPSGCPFMTSVGATQGVSPETAAAFSSGGFSNVFGIPSYQASAVSGYLSALGSTNSGKFNRSGRGFPDVSTQGVDFQIVSGGQTIGVDGTSCASPTFASVISLVNDRLIAAGKSPLGFLNPFLYSSAGKAALNDVTSGSNPGCSTNGFPAKAGWDPVTGLGTPNFAKLLTAVGL

SEQ ID NO: 50559 - protein, 366 aa, Meripilus giganteus
AIPASCASTITPACLQAIYGIPTTKATQSSNKLAVSGFIDQFANKADLKSFLAQFRKDISSSTTFSLQTLDGGENDQSPSEAGIEANLDIQYTVGLATGVPTTFISVGDDFQDGNLEGFLDIINFLLGESNPPQVLTTSYGQNENQISAKLANQLCNAYAQLGARGTSILFASGDGGVSGSQSAHCSNFVPTFPSGCPFMTSVGATQGVSPETAAAFSSGGFSNVFGIPSYQASAVSGYLSALGSTNSGKFNRSGRGFPDVSTQGVDFQIVSGGQTIGVDGTSCASPTFASVISLVNDRLIAAGKSPLGFLNPFLYSSAGKAALNDVTSGSNPGCSTNGFPAKAGWDPVTGLGTPNFAKLLTAVGL

SEQ ID NO: 50560 - protein, 366 aa, Meripilus giganteus
AIPASCASTITPACLQAIYGIPTTKATQSSNKLAVSGFIDQFANKADLKSFLAQFRKDISSSTTFSLQTLDGGENDQSPSEAGIEANLDIQYTVGLATGVPTTFISVGDDFQDGNLEGFLDIINFLLGESNPPQVLTTSYGQNENTISAKLANQLCNAYAQLGARGTSILFASGDGGVSGSQSAHCSNFVPTFPSGCPFMTSVGATQGVSPETAAAFSSGGFSNVFGIPSYQASAVSGYLSALGSTNSGKFNRSGRGFPDVSTQGVDFQIVSGGQTIGVDGTSCASPTFASVISLVNDRLIAAGKSPLGFLNPFLYSSAGKAALNDVTSGWNPGCSTNGFPAKAGWDPVTGLGTPNFAKLLTAVGL

SEQ ID NO: 50561 - protein, 366 aa, Meripilus giganteus
AIPASCASTITPACLQAIYGIPTTKATQSSNKLAVSGFIDQFANKADLKSFLAQFRKDISSSTTFSLQTLDGGENDQSPSEAGIEANLDIQYTVGLATGVPTTFISVGDDFQDGNLEGFLDIINFLLGESNPPQVLTTSYGQNENTISAKLANQLCNAYAQLGARGTSILFASGDGGVSGSQSAHCSNFVPTFPSGCPFMTSVGATQGVSPETAAAFSSGGFSNVFGIPSYQASAVSGYLSALGSTNSGKFNRSGRGFPDVSTQGVDFQIVSGGQTIGVDGTSCASPTFASVISLVNDRLIAAGKSPLGFLNPFLYSSAGKAALNDVTSGSNPGCSTNGFSAKAGWDPVTGLGTPNFAKLLTAVGL

SEQ ID NO: 50562 - protein, 366 aa, Meripilus giganteus
AIPASCASTITPACLQAIYGIPTTKATQSSNKLAVSGFIDQFANKADLKSFLAQFRKDISSSTTFSLQTLDGGENDQSPSEAGIEANLDIQYTVGLATGVPTTFISVGDDFQDGNLEGFLDIINFLLGESNPPQVLTTSYGQNENTISAKLANQLCNAYAQLGARGTSILFASGDGGVSGSQSAHCSNFVPTFPSGCPFMTSVGATQGVSPETAAAFSSGGFSNVFGIPSYQASAVSGYLSALGSTNSGKFNRSGRGFPDVSTQGVDFQIVSGGQTIGVDGTSCASPTFASVISLVNDRLIAAGKSPLGFLNPFLYSNAGKAALNDVTSGSNPGCSTNGFPAKAGWDPVTGLGTPNFAKLLTAVGL

SEQ ID NO: 50563 - protein, 366 aa, Meripilus giganteus
AIPASCASTITPACLQAIYGIPTTKATQSSNKLAVSGFIDQFANKADLKSFLAQFRKDISSSTTFSLQTLDGGENDQSPSEAGIEANLDIQYTVGLATGVPTTFISVGDDFQDGNLEGFLDIINFLLGESNPPQVLTTSYGQNENTISAKLANQLCNAYAQLGARGTSILFASGDGGVSGSQSAHCSNFVPTFPSGCPFMTSVGATQGVSPETAAAFSSGGFSNVFGIPSYQASAVSGYLSALGSTNSGKFNRSGRGFPDVSTQGVDFQIVSGGQTIGVDGTSCLSPTFASVISLVNDRLIAAGKSPLGFLNPFLYSSAGKAALNDVTSGSNPGCSTNGFPAKAGWDPVTGLGTPNFAKLLTAVGL

SEQ ID NO: 50564 - protein, 366 aa, Meripilus giganteus
AIPASCASTITPACLQAIYGIPTTKATQSSNKLAVSGFIDQFANKADLKSFLAQFRKDISSSTTFSLQTLDGGENDQSPSEAGIEANLDIQYTVGLATGVPTTFISVGDDFQDGNLEGFLDIINFLPGESNPPQVLTTSYGQNENTISAKLANQLCNAYAQLGARGTSILFASGDGGVSGSQSAHCSNFVPTFPSGCPFMTSVGATQGVSPETAAAFSSGGFSNVFGIPSYQASAVSGYLSALGSTNSGKFNRSGRGFPDVSTQGVDFQIVSGGQTIGVDGTSCASPTFASVISLVNDRLIAAGKSPLGFLNPFLYSSAGKAALNDVTSGSNPGCSTNGFPAKAGWDPVTGLGTPNFAKLLTAVGL

SEQ ID NO: 50565 - protein, 366 aa, Meripilus giganteus
AIPASCASTITPACLQAIYGIPTTKATQSSNKLAVSGFIDQFANKADLKSFLAQFRKDISSSTTFSLQTLDGGENDQSPSEAGIEANLDIQYTVGLATGVPTTFISVGDDFQDGLLEGFLDIINFLLGESNPPQVLTTSYGQNENTISAKLANQLCNAYAQLGARGTSILFASGDGGVSGSQSAHCSNFVPTFPSGCPFMTSVGATQGVSPETAAAFSSGGFSNVFGIPSYQASAVSGYLSALGSTNSGKFNRSGRGFPDVSTQGVDFQIVSGGQTIGVDGTSCASPTFASVISLVNDRLIAAGKSPLGFLNPFLYSSAGKAALNDVTSGSNPGCSTNGFPAKAGWDPVTGLGTPNFAKLLTAVGL

SEQ ID NO: 50566 - protein, 366 aa, Meripilus giganteus
AIPASCASTITPACLQAIYGIPTTKATQSSNKLAVSGFIGQFANKADLKSFLAQFRKDISSSTTFSLQTLDGGENDQSPSEAGIEANLDIQYTVGLATGVPTTFISVGDDFQDGNLEGFLDIINFLLGESNPPQVLTTSYGQNENTISAKLANQLCNAYAQLGARGTSILFASGDGGVSGSQSAHCSNFVPTFPSGCPFMTSVGATQGVSPETAAAFSSGGFSNVFGIPSYQASAVSGYLSALGSTNSGKFNRSGRGFPDVSTQGVDFQIVSGGQTIGVDGTSCASPTFASVISLVNDRLIAAGKSPLGFLNPFLYSSAGKAALNDVTSGSNPGCSTNGFPAKAGWDPVTGLGTPNFAKLLTAVGL

SEQ ID NO: 50567 - protein, 366 aa, Meripilus giganteus
AIPASCASTITPACLQAIYGIPTTKATQSSNKLAVSGFIDQFANKADLKSFLAQFRKDISSSTTFSLQTLDGGENDQSPSEAGIEANLDIQYTVGLATGVPTTFISVGDDFQDGNLEGFLDIINFLLGESNPPQVLTTSYGQNENTISAKLANQLCNAYAQLGARGTSILFASGDGGVSGSQSAHCSNFVPTFPSGCPFMTSVGATQGVSPETAAAFSSGGFSNVFGIPSYQASAVSGYLSALGSTNSGKFNRSGRGFPDVSTQGRDFQIVSGGQTIGVDGTSCASPTFASVISLVNDRLIAAGKSPLGFLNPFLYSSAGKAALNDVTSGSNPGCSTNGFPAKAGWDPVTGLGTPNFAKLLTAVGL

SEQ ID NO: 50568 - protein, 366 aa, Meripilus giganteus
AIPASCASTITPACLQAIYGIPTTKATQSSNKLAVSGFIDQFANKADLKSFLAQFRKDISSSTTFSLQTLDGGENDQSPSEAGIEANLDIQYTVGLATGVPTTFISVGDDFQDGNLEGFLDIINFLLYESNPPQVLTTSYGQNENTISAKLANQLCNAYAQLGARGTSILFASGDGGVSGSQSAHCSNFVPTFPSGCPFMTSVGATQGVSPETAAAFSSGGFSNVFGIPSYQASAVSGYLSALGSTNSGKFNRSGRGFPDVSTQGVDFQIVSGGQTIGVDGTSCASPTFASVISLVNDRLIAAGKSPLGFLNPFLYSSAGKAALNDVTSGSNPGCSTNGFPAKAGWDPVTGLGTPNFAKLLTAVGL

SEQ ID NO: 50569 - protein, 366 aa, Meripilus giganteus
AIPASCASTITPACLQAIYGIPTTKATQSSNKLAVSGFIDQFANKADLKSFLAQFRKDISSSTTFSLQTLDGGENDQSPSEMGIEANLDIQYTVGLATGVPTTFISVGDDFQDGNLEGFLDIINFLLGESNPPQVLTTSYGQNENTISAKLANQLCNAYAQLGARGTSILFASGDGGVSGSQSAHCSNFVPTFPSGCPFMTSVGATQGVSPETAAAFSSGGFSNVFGIPSYQASAVSGYLSALGSTNSGKFNRSGRGFPDVSTQGVDFQIVSGGQTIGVDGTSCASPTFASVISLVNDRLIAAGKSPLGFLNPFLYSSAGKAALNDVTSGSNPGCSTNGFPAKAGWDPVTGLGTPNFAKLLTAVGL

SEQ ID NO: 50570 - protein, 366 aa, Meripilus giganteus
AIPASCASTITPACLQAIYGIPTTKATQSSNKLAVSGFIDQFANKADLKSFLAQFRKDSSSSTTFSLQTLDGGENDQSPSEAGIEANLDIQYTVGLATGVPTTFISVGDDFQDGNLEGFLDIINFLLGESNPPQVLTTSYGQNENTISAKLANQLCNAYAQLGARGTSILFASGDGGVSGSQSAHCSNFVPTFPSGCPFMTSVGATQGVSPETAAAFSSGGFSNVFGIPSYQASAVSGYLSALGSTNSGKFNRSGRGFPDVSTQGVDFQIVSGGQTIGVDGTSCASPTFASVISLVNDRLIAAGKSPLGFLNPFLYSSAGKAALNDVTSGSNPGCSTNGFPAKAGWDPVTGLGTPNFAKLLTAVGL

SEQ ID NO: 50571 - protein, 366 aa, Meripilus giganteus
AIPASCASTITPACLQAIYGIPTTKATQSSNKLAVSGFIDQFANKADLKSFLAQFRKDISSSTTFSLQTLDGGENDQSPSEAGIEANLDIQYTVGLATGVPTTFISVGDDFQDGNLEGFLDIINFLLGESNPPQVLTTSYGQNENTISAKLANQLCNAYAQLGARGTSILFASGDGGVSGSQSAHCSNFVPTFPSGCPFMTSVGATQGVSPETAAAFSSGGFSNVFGIPSYQASAVSGYLSALGSTNSGKFNRSGRGFPDVSTQGVDFQIVQGGQTIGVDGTSCASPTFASVISLVNDRLIAAGKSPLGFLNPFLYSSAGKAALNDVTSGSNPGCSTNGFPAKAGWDPVTGLGTPNFAKLLTAVGL

SEQ ID NO: 50572 - protein, 366 aa, Meripilus giganteus
AIPASCASTITPACLQAIYGIPTTKATQSSNKLAVSGFIDQFANKADLKSFLAQFRKDISSSTTFSLQTLDGGENDQSPSEAGIEANLDIQYTVGLATGVPTTFISVGYDFQDGNLEGFLDIINFLLGESNPPQVLTTSYGQNENTISAKLANQLCNAYAQLGARGTSILFASGDGGVSGSQSAHCSNFVPTFPSGCPFMTSVGATQGVSPETAAAFSSGGFSNVFGIPSYQASAVSGYLSALGSTNSGKFNRSGRGFPDVSTQGVDFQIVSGGQTIGVDGTSCASPTFASVISLVNDRLIAAGKSPLGFLNPFLYSSAGKAALNDVTSGSNPGCSTNGFPAKAGWDPVTGLGTPNFAKLLTAVGL

SEQ ID NO: 50573 - protein, 366 aa, Meripilus giganteus
AIPASCASTITPACLQAIYGIPTTKATQSSNKLAVSGFIDQFANKADLKSFLAQFRKDISSSTTFSLQTLDGGENDQSPSEAGIEANLDIQYTVGLATGVPTTFISVGDDFQDGNLEGFLDIINFLLSESNPPQVLTTSYGQNENTISAKLANQLCNAYAQLGARGTSILFASGDGGVSGSQSAHCSNFVPTFPSGCPFMTSVGATQGVSPETAAAFSSGGFSNVFGIPSYQASAVSGYLSALGSTNSGKFNRSGRGFPDVSTQGVDFQIVSGGQTIGVDGTSCASPTFASVISLVNDRLIAAGKSPLGFLNPFLYSSAGKAALNDVTSGSNPGCSTNGFPAKAGWDPVTGLGTPNFAKLLTAVGL

SEQ ID NO: 50574 - protein, 366 aa, Meripilus giganteus
AIPASCASTITPACLQAIYGIPTTKATQSSNKLAVSGFIDQFANKADLKSFLAQFRKDISSSTTFSLQTLDGGENDQSPSEAGIEANLDIQYTVGLATGVPTTFISVGDDFQDGNLEGFLDIINFLLGESNPPQVLTTSYGQNENTISAKLANQLCNAYAQLGARGTSILFASGDGGVSGSQSAHCSNFVPTFPSGCPFMTSVGATQGVSPETAAAFSSGGFSNVFGIPSYQASAVSGYLSALGSTNSGKFNRSGRGFPDVSTQGVDFQIVSGGQTIGVDGTSCASPTFASVISLVNDRLIAAGKSPLGFLNPFLYSSAGKAALNDVTSGSNPGCSTNGFPAKAGWDPVTGLGTPNFAKLLTGVGL

SEQ ID NO: 50575 - protein, 366 aa, Meripilus giganteus
AIPASCASTITPACLQAIYGIPTTKATQSSNKLAVSGFIDQFANKADLKSFLAQFRKDISLSTTFSLQTLDGGENDQSPSEAGIEANLDIQYTVGLATGVPTTFISVGDDFQDGNLEGFLDIINFLLGESNPPQVLTTSYGQNENTISAKLANQLCNAYAQLGARGTSILFASGDGGVSGSQSAHCSNFVPTFPSGCPFMTSVGATQGVSPETAAAFSSGGFSNVFGIPSYQASAVSGYLSALGSTNSGKFNRSGRGFPDVSTQGVDFQIVSGGQTIGVDGTSCASPTFASVISLVNDRLIAAGKSPLGFLNPFLYSSAGKAALNDVTSGSNPGCSTNGFPAKAGWDPVTGLGTPNFAKLLTAVGL

SEQ ID NO: 50576 - protein, 366 aa, Meripilus giganteus
AIPASCASTITPACLQAIYGIPTTKATQSSNKLAVSGFIDQFANKADLKSFLAQFRKDISSSTTFSLQTLDGGENDQSPSEAGIEANLDIQYTVGLATGVPTTFISVGDDFQDGNLEGFLDIINFLLGESNPPQVLTTSYGQNENTISAKLANVLCNAYAQLGARGTSILFASGDGGVSGSQSAHCSNFVPTFPSGCPFMTSVGATQGVSPETAAAFSSGGFSNVFGIPSYQASAVSGYLSALGSTNSGKFNRSGRGFPDVSTQGVDFQIVSGGQTIGVDGTSCASPTFASVISLVNDRLIAAGKSPLGFLNPFLYSSAGKAALNDVTSGSNPGCSTNGFPAKAGWDPVTGLGTPNFAKLLTAVGL

SEQ ID NO: 50577 - protein, 366 aa, Meripilus giganteus
AIPASCASTITPACLQAIYGIPTTKATQSSNKLAVSGFIDQFANKADLKSFLAQFRKDISSSTTFSLQTLDGGENDQSPSEAGIEANLDIQYTVGLATGVRTTFISVGDDFQDGNLEGFLDIINFLLGESNPPQVLTTSYGQNENTISAKLANQLCNAYAQLGARGTSILFASGDGGVSGSQSAHCSNFVPTFPSGCPFMTSVGATQGVSPETAAAFSSGGFSNVFGIPSYQASAVSGYLSALGSTNSGKFNRSGRGFPDVSTQGVDFQIVSGGQTIGVDGTSCASPTFASVISLVNDRLIAAGKSPLGFLNPFLYSSAGKAALNDVTSGSNPGCSTNGFPAKAGWDPVTGLGTPNFAKLLTAVGL

SEQ ID NO: 50578 - protein, 366 aa, Meripilus giganteus
AIPASCASTITPACLQAIYGIPTTKATQSSNKLAVSGFIDQFANKADLKSFLAQFRKDISSSETFSLQTLDGGENDQSPSEAGIEANLDIQYTVGLATGVPTTFISVGDDFQDGNLEGFLDIINFLLGESNPPQVLTTSYGQNENTISAKLANQLCNAYAQLGARGTSILFASGDGGVSGSQSAHCSNFVPTFPSGCPFMTSVGATQGVSPETAAAFSSGGFSNVFGIPSYQASAVSGYLSALGSTNSGKFNRSGRGFPDVSTQGVDFQIVSGGQTIGVDGTSCASPTFASVISLVNDRLIAAGKSPLGFLNPFLYSSAGKAALNDVTSGSNPGCSTNGFPAKAGWDPVTGLGTPNFAKLLTAVGL

SEQ ID NO: 50579 - protein, 366 aa, Meripilus giganteus
AIPASCASTITPACLQAIYGIPTTKATQSSNKLAVSGFIDQFANKADLKSFLAQFRKDISSSTTFSLQTLDGGENDQSPSEAGIEANLDIQYTVGLATGVPTTFISVGDDFQDGNLEGFLDIINFLLGESNPPQVLTTSYGQNENTISAKLANQLCNAYAQLGARGTSILFASGDGGVSGSQSAHCSNFVPTFPSGCPFMTSVGATQGVSPETAAAFSSGGFSNVFGIPSYQASAVSGYLSALGSTNSGKFNRSGRGFPDVSTQGVDFQIVSGGQTIGVDGTSCASPTYASVISLVNDRLIAAGKSPLGFLNPFLYSSAGKAALNDVTSGSNPGCSTNGFPAKAGWDPVTGLGTPNFAKLLTAVGL

SEQ ID NO: 50580 - protein, 366 aa, Meripilus giganteus
AIPASCASTITPACLQAIYGIPTTKATQSSNKLAVSGFIDQFANKADLKSFLAQFRKDISSSTTFSLQTLDGGENDQSPSEAGIEANLDIQYTVGLATGVPTTFISVGDDFQDGNLEGFLDIINFLLGESNPPQVLTTSYGQNENTISAKLANQLCNAYAQLGARGTSILFASGDGGVSGSQSAHCSNFVPTFPSGCPFMTSVGATQGVSPETAAAFSSGGFSNVFGIPSYQASAVSGYLSALGSTNSGKFNRSGRGFPDVSTQGVDFQIVSGGQTIGVDGTSCASPTFASVISLVNDRLIAAGKSPLGFLNPFLYCSAGKAALNDVTSGSNPGCSTNGFPAKAGWDPVTGLGTPNFAKLLTAVGL

SEQ ID NO: 50581 - protein, 366 aa, Meripilus giganteus
AIPASCASTITPACLQAIYGIPTTKATQSSNKLAVSGFIDQFANKADLKSFLAQFRKDISSSTTFSLQTLDGGENDQSYSEAGIEANLDIQYTVGLATGVPTTFISVGDDFQDGNLEGFLDIINFLLGESNPPQVLTTSYGQNENTISAKLANQLCNAYAQLGARGTSILFASGDGGVSGSQSAHCSNFVPTFPSGCPFMTSVGATQGVSPETAAAFSSGGFSNVFGIPSYQASAVSGYLSALGSTNSGKFNRSGRGFPDVSTQGVDFQIVSGGQTIGVDGTSCASPTFASVISLVNDRLIAAGKSPLGFLNPFLYSSAGKAALNDVTSGSNPGCSTNGFPAKAGWDPVTGLGTPNFAKLLTAVGL

SEQ ID NO: 50582 - protein, 366 aa, Meripilus giganteus
AIPASCASTITPACLQAIYGIPTTKATQSSNKLAVSGFIDQFANKADLKSFLAQFRKDISSSTTFSLQTLDGGENDQSPSEAGIEANLDIQYTVGLATGVPTTFISVGDDFQDGKLEGFLDIINFLLGESNPPQVLTTSYGQNENTISAKLANQLCNAYAQLGARGTSILFASGDGGVSGSQSAHCSNFVPTFPSGCPFMTSVGATQGVSPETAAAFSSGGFSNVFGIPSYQASAVSGYLSALGSTNSGKFNRSGRGFPDVSTQGVDFQIVSGGQTIGVDGTSCASPTFASVISLVNDRLIAAGKSPLGFLNPFLYSSAGKAALNDVTSGSNPGCSTNGFPAKAGWDPVTGLGTPNFAKLLTAVGL

SEQ ID NO: 50583 - protein, 366 aa, Meripilus giganteus
AIPASCASTITPACLQAIYGIPTTKATQSSNKLAVSGFIDQFANKADLKSFLAQFRKDISSSTTFSLQTLDGGENDQSPSEAGIEANLDIQYTVGLATGVPTTFISVGDDFQDGNLEGFLDIINFLLGESNPPQVLTTSYGQNENTISAKLANQLCNAYAQLGARGTSILFASGDGGVSGSQSAHCSNFVPTFPSGCPFMTSVGATQGVSFETAAAFSSGGFSNVFGIPSYQASAVSGYLSALGSTNSGKFNRSGRGFPDVSTQGVDFQIVSGGQTIGVDGTSCASPTFASVISLVNDRLIAAGKSPLGFLNPFLYSSAGKAALNDVTSGSNPGCSTNGFPAKAGWDPVTGLGTPNFAKLLTAVGL

SEQ ID NO: 50584 - protein, 366 aa, Meripilus giganteus
AIPASCASTITPACLQAIYGIPTTKATQSSNKLAVSGFIDQFANKADLKSFLAQFRKDISPSTTFSLQTLDGGENDQSPSEAGIEANLDIQYTVGLATGVPTTFISVGDDFQDGNLEGFLDIINFLLGESNPPQVLTTSYGQNENTISAKLANQLCNAYAQLGARGTSILFASGDGGVSGSQSAHCSNFVPTFPSGCPFMTSVGATQGVSPETAAAFSSGGFSNVFGIPSYQASAVSGYLSALGSTNSGKFNRSGRGFPDVSTQGVDFQIVSGGQTIGVDGTSCASPTFASVISLVNDRLIAAGKSPLGFLNPFLYSSAGKAALNDVTSGSNPGCSTNGFPAKAGWDPVTGLGTPNFAKLLTAVGL

SEQ ID NO: 50585 - protein, 366 aa, Meripilus giganteus
AIPASCASTITPACLQAIYGIPTTKATQSSNKLAVSGFIDQFANKADLKSFLAQFRKDISSSTTFSLQTLDGGENDQSPSEAGIEANLDIQYTVGLATGVPTTFISVGDDFQDGNLEGFLDIINFLLGESNPPQVLTTSYGQNENTISAKLANQLCNAYAQLGARGTSILFASGDGGVSGSQSAHCSNFVPTFPSGCPFMTSVGATQGVSPETAAAFSMGGFSNVFGIPSYQASAVSGYLSALGSTNSGKFNRSGRGFPDVSTQGVDFQIVSGGQTIGVDGTSCASPTFASVISLVNDRLIAAGKSPLGFLNPFLYSSAGKAALNDVTSGSNPGCSTNGFPAKAGWDPVTGLGTPNFAKLLTAVGL

SEQ ID NO: 50586 - protein, 366 aa, Meripilus giganteus
AIPASCASTITPACLQAIYGIPTTKATQSSNKLAVSGFIDQFANKADLPSFLAQFRKDISSSTTFSLQTLDGGENDQSPSEAGIEANLDIQYTVGLATGVPTTFISVGDDFQDGNLEGFLDIINFLLGESNPPQVLTTSYGQNENTISAKLANQLCNAYAQLGARGTSILFASGDGGVSGSQSAHCSNFVPTFPSGCPFMTSVGATQGVSPETAAAFSSGGFSNVFGIPSYQASAVSGYLSALGSTNSGKFNRSGRGFPDVSTQGVDFQIVSGGQTIGVDGTSCASPTFASVISLVNDRLIAAGKSPLGFLNPFLYSSAGKAALNDVTSGSNPGCSTNGFPAKAGWDPVTGLGTPNFAKLLTAVGL

SEQ ID NO: 50587 - protein, 366 aa, Meripilus giganteus
AIPASCASTITPACLQAIYGIPTTKATQSSNKLAVSGFIDQFANKADLKSFLAQFRKDISSSTTFSLQTLDGGENDQSPSEAGIEANLDIQYTVGLATGVPTTFISVGDDFQDGNLEGFLDIINFLLGESNPPQVLTTSYGQNENIISAKLANQLCNAYAQLGARGTSILFASGDGGVSGSQSAHCSNFVPTFPSGCPFMTSVGATQGVSPETAAAFSSGGFSNVFGIPSYQASAVSGYLSALGSTNSGKFNRSGRGFPDVSTQGVDFQIVSGGQTIGVDGTSCASPTFASVISLVNDRLIAAGKSPLGFLNPFLYSSAGKAALNDVTSGSNPGCSTNGFPAKAGWDPVTGLGTPNFAKLLTAVGL

SEQ ID NO: 50588 - protein, 366 aa, Meripilus giganteus
AIPASCASTITPACLQAIYGIPTTKATQSSNKLAVSGFIDQFANKADLKSFLAQFRKDISSSTTFSLQTLDGGENDQSPSEAGIEANLDIQYTVGLATGVPTTFISVGDDFQDGNLEGFLDIINFLLGESNPPQVLTTSYGQNENTISAKLANQLCNAYAQLGARGTSILFASGDGGVSGSQSAHCSNFVPTFPSGCPFMTSVGATQGVSPETAAAFSSGGFSNVFGIPSYQASAVSGYLSALGSTNYGKFNRSGRGFPDVSTQGVDFQIVSGGQTIGVDGTSCASPTFASVISLVNDRLIAAGKSPLGFLNPFLYSSAGKAALNDVTSGSNPGCSTNGFPAKAGWDPVTGLGTPNFAKLLTAVGL

SEQ ID NO: 50589 - protein, 366 aa, Meripilus giganteus
AIPASCASTITPACLQAIYGIPTTKATQSSNKLAVSGFIDQFANKADLKSFLAQFRKDISSSTTFSLQTLDGGENDQSPSEAGIEANLDIQYTVGLATGVPTTFISVGDDFQDGNLEGFLDIINFLLGESNPPQVLTTSYGQNENTISAKLANQLCNAYAQLGARGTSILFASGDGGVSGSQSAHCSNFVPTFPSGCPFMTSVGATQGVSPETAAAFSSGGFSNVFGIPSYQASAVSGYLSALGSTNSGKFNRSGRGFPDVSTQGVDFQIVSGGQTIGVDGTSCASPTFASVISLVNDRLIAAGKSPLGFLNPFLYSSAGKAALNDVTSGSNPGCRTNGFPAKAGWDPVTGLGTPNFAKLLTAVGL

SEQ ID NO: 50590 - protein, 366 aa, Meripilus giganteus
AIPASCASTITPACLQAIYGIPTTKATQSSNKLAVSGFIDQFANKADLKSFLAQFRKDISSSTTFSLQTLDGGENDQSPSEAGIEANLDIQYTVGLATGVPTTFISVGDDFQDGNLEGFLDIINFLLGESNPPQVLTTSYGQNENTISAKLANQLCNAYAQLGARGTSILFASGDGGVSGSQSAHCSNFVPTFPSGCPFMTSVGATQGVSPETAAAFSSGGFSNVFGIPSYQASAVSGYLSALGSTNSGKFNRSGRGFPDVSTQGVDFQIVSGGQTIGVDGTSCASPTFASVISLVNDRLIAAGKSPLGFLNPFLYSSAGKAALNDVTSGSNPGCSTNGFPAKAGWDPVTGLGTPLFAKLLTAVGL

SEQ ID NO: 50591 - protein, 366 aa, Meripilus giganteus
AIPASCASTITPACLQAIYGIPTTKATQSSNKLAVSGFIDQFANKADLKSFLAQFRKDISSSTTFSLQTLDGGENDQSPSEAGIEANLDIQYTVGLATGVPTTFISVGDDFQDGNLEGFLDIINFLLGESNPPQVLTTSYGQNENTISAKLANQLCNAYAQLGARGTSILFASGDGGVSGSQSAHCSNFVPTFPSGCPFMTSVGATQGVSPETAAAFSSGGFSNVFGIPSYQASAVSGYLSELGSTNSGKFNRSGRGFPDVSTQGVDFQIVSGGQTIGVDGTSCASPTFASVISLVNDRLIAAGKSPLGFLNPFLYSSAGKAALNDVTSGSNPGCSTNGFPAKAGWDPVTGLGTPNFAKLLTAVGL

SEQ ID NO: 50592 - protein, 366 aa, Meripilus giganteus
AIPASCASTITPACLQAIYGIPTTKATQSSNKLAVSGFIDQFANKADLKSFLAQFRKDISSSTTFSLQTLDGGENDQSPSEAGIEANLDIQYTVGLATGVPTTFISVGDDFQDGNLEGFLDIINFLLGESNPPQVLTTSYGQNENTISAKLANTLCNAYAQLGARGTSILFASGDGGVSGSQSAHCSNFVPTFPSGCPFMTSVGATQGVSPETAAAFSSGGFSNVFGIPSYQASAVSGYLSALGSTNSGKFNRSGRGFPDVSTQGVDFQIVSGGQTIGVDGTSCASPTFASVISLVNDRLIAAGKSPLGFLNPFLYSSAGKAALNDVTSGSNPGCSTNGFPAKAGWDPVTGLGTPNFAKLLTAVGL

SEQ ID NO: 50593 - protein, 366 aa, Meripilus giganteus
AIPASCASTITPACLQAIYGIPTTKATQSSNKLAVSGFIDQFANKADLKSFLAQFRKDISSSTTFSLQTLDGGENAQSPSEAGIEANLDIQYTVGLATGVPTTFISVGDDFQDGNLEGFLDIINFLLGESNPPQVLTTSYGQNENTISAKLANQLCNAYAQLGARGTSILFASGDGGVSGSQSAHCSNFVPTFPSGCPFMTSVGATQGVSPETAAAFSSGGFSNVFGIPSYQASAVSGYLSALGSTNSGKFNRSGRGFPDVSTQGVDFQIVSGGQTIGVDGTSCASPTFASVISLVNDRLIAAGKSPLGFLNPFLYSSAGKAALNDVTSGSNPGCSTNGFPAKAGWDPVTGLGTPNFAKLLTAVGL

SEQ ID NO: 50594 - protein, 366 aa, Meripilus giganteus
AIPASCASTITPACLQAIYGIPTTKATQSSNKLAVSGFIDQFANKADLKSFLAQFRKDISSSTTFSLQTLDGGENDQSPSEAGIEANLDIQYTVGLATGVPTTFISVGDDFQDGNLEGFLDIINFLLGESNPPQVLTTSYGQNENTISAKLANQLCEAYAQLGARGTSILFASGDGGVSGSQSAHCSNFVPTFPSGCPFMTSVGATQGVSPETAAAFSSGGFSNVFGIPSYQASAVSGYLSALGSTNSGKFNRSGRGFPDVSTQGVDFQIVSGGQTIGVDGTSCASPTFASVISLVNDRLIAAGKSPLGFLNPFLYSSAGKAALNDVTSGSNPGCSTNGFPAKAGWDPVTGLGTPNFAKLLTAVGL

SEQ ID NO: 50595 - protein, 366 aa, Meripilus giganteus
AIPASCASTITPACLQAIYGIPTTKATQSSNKLAVSGFIDQFANKADLKSFLAQFRKDISSSTTFSLQTLDGGENDQSPSEAGIEANLDIQYTVGLATGVPTTFISVGDDFQDGNLEGFLDIINFLLGESNPPQVLTTSYGQNENTISAKLANQLCNAYAQLGARGTSILFASGDGGVSGSQSAHCSNFVPTFPSGCPFMTSVGATQGVSPETAAAFSSGGFSNVFGIPSYQASAVSGYLSALGSTNSGKFNRSGRGFPDVSTQGVDFQIVSGGQTIGVDGTSCASPTFASVISLVNDRLIAAKKSPLGFLNPFLYSSAGKAALNDVTSGSNPGCSTNGFPAKAGWDPVTGLGTPNFAKLLTAVGL

SEQ ID NO: 50596 - protein, 366 aa, Meripilus giganteus
AIPASCASTITPACLQAIYGIPTTKATQSSNKLAVSGFIDQFANKADLKSFLAQFRKDISSSTTFSLQTLDGGENDQSPSEAGIEANLDIQYTVGLATGVPLTFISVGDDFQDGNLEGFLDIINFLLGESNPPQVLTTSYGQNENTISAKLANQLCNAYAQLGARGTSILFASGDGGVSGSQSAHCSNFVPTFPSGCPFMTSVGATQGVSPETAAAFSSGGFSNVFGIPSYQASAVSGYLSALGSTNSGKFNRSGRGFPDVSTQGVDFQIVSGGQTIGVDGTSCASPTFASVISLVNDRLIAAGKSPLGFLNPFLYSSAGKAALNDVTSGSNPGCSTNGFPAKAGWDPVTGLGTPNFAKLLTAVGL

SEQ ID NO: 50597 - protein, 366 aa, Meripilus giganteus
AIPASCASTITPACLQAIYGIPTTKATQSSNKLAVSGFIDQFANKADLKSFLAQFRKDISSSTTFSLQTLDGGENDQSPSEAGIEANLDIQYTVGLATGVPTTFISVGDDFQDGNLEGFLDIINFLLGESNPPQVLTTSYGQNENTISAKLANQLCNAYAQLGARGTSILFASGDGGVSGSQSAHCSNFVPTFPSGCPFMTSVGATQGVSPETAAAFSSGGFSNVFGIPSYQASAVSGYLSALGSTNSGKFNRSGRGFPDVSTQGADFQIVSGGQTIGVDGTSCASPTFASVISLVNDRLIAAGKSPLGFLNPFLYSSAGKAALNDVTSGSNPGCSTNGFPAKAGWDPVTGLGTPNFAKLLTAVGL

SEQ ID NO: 50598 - protein, 366 aa, Meripilus giganteus
AIPASCASTITPACLQAIYGIPTTKATQSSNKLAVSGFIDQFANKADLKSFLAQFRKDISSSTTFSLQTLDGGENDQSPSEAGIEANLDIQYTVGLATGVPTTFISVGDDFQDGNLEGFLDIINFLLGESNPPQVLTTSYGQNENTISAKLANQLCNAYAQLGARGTSILFASGDGGVSGSQSAHCSNFVPTFPSGCPFMTSVGATHGVSPETAAAFSSGGFSNVFGIPSYQASAVSGYLSALGSTNSGKFNRSGRGFPDVSTQGVDFQIVSGGQTIGVDGTSCASPTFASVISLVNDRLIAAGKSPLGFLNPFLYSSAGKAALNDVTSGSNPGCSTNGFPAKAGWDPVTGLGTPNFAKLLTAVGL

SEQ ID NO: 50599 - protein, 366 aa, Meripilus giganteus
AIPASCASTITPACLQAIYGIPTTKATQSSNKLAVSGFIDQFANKADLKSFLAQFRKDISSSTTFSLQTLDGGENDQSPSEAGIEANLDIQYTVGLATGVPTTFISVGDDFQDGNLEGFLDIINFLLGESNPPQVLTTSYGQNENTISAKLANQLCNAYAQLGARGTSILFASGDGGVSGSQSAHCSNFVPTFPSGCPFMTSVGATQGVSPETAAAFSSGGFSNVFGIPSYQASAVSGYLSALGSTNSGKFNRSGRGFPDVSTQGVDFQIVSGGQTIGVDGTSCASPTFASVISLVNDRLIAAGKSPLGFLNPFLYSSAGKAALNDVTSGSNPGCSTNGFPAKAGWDPVTGLGTPNFAKLLTAFGL

SEQ ID NO: 50600 - protein, 366 aa, Meripilus giganteus
AIPASCASTITPACLQAIYGIPTTKATQSSNKLAVSGFIDQFANKADLKSFLAQFRKDISSSTTFSLQTLDGGENDQSPSEAGIEANLDIQYTVGLATGVPTTFISVGDDFQDGNLEGFLDIINFLLGESNPPQVLTTSYGQNENTISAKLANQLCNAYAQLGARGTSILFASGDGGVSGSQSAHCSNFVPTFPSGCPFMTSVGATQGVSPETAAAFSSGGFSNVFGIPSYQASAVSGYLSALGSTNSGKFNRSGRGFPDVSTQGVDFQIVIGGQTIGVDGTSCASPTFASVISLVNDRLIAAGKSPLGFLNPFLYSSAGKAALNDVTSGSNPGCSTNGFPAKAGWDPVTGLGTPNFAKLLTAVGL

SEQ ID NO: 50601 - protein, 366 aa, Meripilus giganteus
AIPASCASTITPACLQAIYGIPTTKATQSSNKLAVSGFIDQFANKADLKSFLAQFRKDISSSTTFSLQTLDGGENDQSPSEAGIEANLDIQYTVGLATGVPTTFISVGDDFQDGNLEGFLDIINFLLGESNPPQVLTTSYGQNENHISAKLANQLCNAYAQLGARGTSILFASGDGGVSGSQSAHCSNFVPTFPSGCPFMTSVGATQGVSPETAAAFSSGGFSNVFGIPSYQASAVSGYLSALGSTNSGKFNRSGRGFPDVSTQGVDFQIVSGGQTIGVDGTSCASPTFASVISLVNDRLIAAGKSPLGFLNPFLYSSAGKAALNDVTSGSNPGCSTNGFPAKAGWDPVTGLGTPNFAKLLTAVGL

SEQ ID NO: 50602 - protein, 366 aa, Meripilus giganteus
AIPASCASTITPACLQAIYGIPTTKATQSSNKLAVSGFIDQFANKADLKSFLAQFRKDISSSTTFSLQTLDGGENDQSPSEAGIEANLDIQYTVGLATGVPTTFISVGDDFQDGNLEGFLDIINFLLGESNPPQVLTTSYGQNENTISAKLANQLCNAYAQLGARGTSILFASGDGGVSGSQSAHCSNFVPTFPSGCPFMTSVGATQGVSPETAAAFSSGGFSNVFGIPSYQASAVSGYLSALGSTNSGKFNRSGRGFPDVSTQGVDFQIVSGGQTIPVDGTSCASPTFASVISLVNDRLIAAGKSPLGFLNPFLYSSAGKAALNDVTSGSNPGCSTNGFPAKAGWDPVTGLGTPNFAKLLTAVGL

SEQ ID NO: 50603 - protein, 366 aa, Meripilus giganteus
AIPASCASTITPACLQAIYGIPTTKATQSSNKLAVSGFIDQFANKADLKSFLAQFRKDISSSTTFSLQTLDGGENDQSPSEAGIEANLDIQYTVGLATGVPTTFISVGDDFQDGNLEGFLDIINFLLGESNPPQVLTTSYGQNENTISAKLANQLCNAYAQLGARGTSILFASGDGGVSGSQSAHCSNFVPTFPSGCPFMTSVGATQGVSPETAAAFSSGGFSNVFGIPSYQASAVSGYLSALGSTNSGKFNRSGRGFPDVSTQGVDFQIVSGGQTIGVDGTSCASPTFASVISLVNDRLIAAGKSPLGFLNPFLYSSAGKAALNDVTSGSNPGCSTNGFPAKAGWDPVTGLGTPNFAKLPTAVGL

SEQ ID NO: 50604 - protein, 366 aa, Meripilus giganteus
AIPASCASTITPACLQAIYGIPTTKATQSSNKLAVSGFIDQFANKADLKSFLAQFRKDISSSTTFSLQTLDGGENDQSPSEAGIEANLDIQYTVGLATGVPTTFISVGDDFQDGNLEGFLDIINFLLGESNPPQVLTTSYGQNENWISAKLANQLCNAYAQLGARGTSILFASGDGGVSGSQSAHCSNFVPTFPSGCPFMTSVGATQGVSPETAAAFSSGGFSNVFGIPSYQASAVSGYLSALGSTNSGKFNRSGRGFPDVSTQGVDFQIVSGGQTIGVDGTSCASPTFASVISLVNDRLIAAGKSPLGFLNPFLYSSAGKAALNDVTSGSNPGCSTNGFPAKAGWDPVTGLGTPNFAKLLTAVGL

SEQ ID NO: 50605 - protein, 366 aa, Meripilus giganteus
AIPASCASTITPACLQAIYGIPTTKATQSSNKLAVSGFIDQFANKADLKSFLAQFRKDISSSTTFSLQTLDGGENDQSPSEAGIEANLDIQYTVGLATGVPTTFISVGDDFQDGNLEGFLDIINFLLGESNPPQVLTTSYGQNENTISAKLANQLCNAYAQLGARGTSILFASGDGGVSGSQSAHCSNFVPTFPSGCPFMTSVGATQGVSPETAAAFSSGGFSNVFGIPSYQASAVSGYLSALGSTNSGKFFRSGRGFPDVSTQGVDFQIVSGGQTIGVDGTSCASPTFASVISLVNDRLIAAGKSPLGFLNPFLYSSAGKAALNDVTSGSNPGCSTNGFPAKAGWDPVTGLGTPNFAKLLTAVGL

SEQ ID NO: 50606 - protein, 366 aa, Meripilus giganteus
AIPASCASTITPACLQAIYGIPTTKATQSSNKLAVSGFIDQFANKADLKSFLAQFRKDISSSTTFSLQTLDGGENDQSPSEAGIEANLDIQYTVGLATGVPTTFISVGDDFQDGNLEGFLDIINFLLGESNPPQVLTTSYGQNENTISALLANQLCNAYAQLGARGTSILFASGDGGVSGSQSAHCSNFVPTFPSGCPFMTSVGATQGVSPETAAAFSSGGFSNVFGIPSYQASAVSGYLSALGSTNSGKFNRSGRGFPDVSTQGVDFQIVSGGQTIGVDGTSCASPTFASVISLVNDRLIAAGKSPLGFLNPFLYSSAGKAALNDVTSGSNPGCSTNGFPAKAGWDPVTGLGTPNFAKLLTAVGL

SEQ ID NO: 50607 - protein, 366 aa, Meripilus giganteus
AIPASCASTITPACLQAIYGIPTTKATQSSNKLAVSGFIDQFANKADLKSFLAQFRKDISSSTTFSLQTLDGGENDQSPSEAGIEANLDIQYTVGLATGVPTTFISVGDDFQDGNLEGFLDIINFLLGESNPPQVLTTSYGQNENTISAKLANGLCNAYAQLGARGTSILFASGDGGVSGSQSAHCSNFVPTFPSGCPFMTSVGATQGVSPETAAAFSSGGFSNVFGIPSYQASAVSGYLSALGSTNSGKFNRSGRGFPDVSTQGVDFQIVSGGQTIGVDGTSCASPTFASVISLVNDRLIAAGKSPLGFLNPFLYSSAGKAALNDVTSGSNPGCSTNGFPAKAGWDPVTGLGTPNFAKLLTAVGL

SEQ ID NO: 50608 - protein, 366 aa, Meripilus giganteus
AIPASCASTITPACLQAIYGIPTTKATQSSNKLAVSGFIDQFANKADLKSFLAQFRKDISSSTTFSLQTLDGGENDQSPSEAGIEANLDIQYTVGLATGVPTTFISVGDDFQDGNLEGFLDIINFLLGESNPPQVLTTSYGQNENTISAKLANQLCNAYAQLGARGTSILFASGDGGVSGSQFAHCSNFVPTFPSGCPFMTSVGATQGVSPETAAAFSSGGFSNVFGIPSYQASAVSGYLSALGSTNSGKFNRSGRGFPDVSTQGVDFQIVSGGQTIGVDGTSCASPTFASVISLVNDRLIAAGKSPLGFLNPFLYSSAGKAALNDVTSGSNPGCSTNGFPAKAGWDPVTGLGTPNFAKLLTAVGL

SEQ ID NO: 50609 - protein, 366 aa, Meripilus giganteus
AIPASCASTITPACLQAIYGIPTTKATQSSNKLAVSGFIDQFANKADLKSFLAQFRKDISSSTTFSLQTLDGGENDQSPSEAGIEANLDIQYTVGLATGVPTTFISVGDDFQDGNLEGFLDIINFLLGESNPPAVLTTSYGQNENTISAKLANQLCNAYAQLGARGTSILFASGDGGVSGSQSAHCSNFVPTFPSGCPFMTSVGATQGVSPETAAAFSSGGFSNVFGIPSYQASAVSGYLSALGSTNSGKFNRSGRGFPDVSTQGVDFQIVSGGQTIGVDGTSCASPTFASVISLVNDRLIAAGKSPLGFLNPFLYSSAGKAALNDVTSGSNPGCSTNGFPAKAGWDPVTGLGTPNFAKLLTAVGL

SEQ ID NO: 50610 - protein, 366 aa, Meripilus giganteus
AIPASCASTITPACLQAIYGIPTTKATQSSNKLAVSGFIDQFANKADLKSFLAQFRKDISSSTTFSLQTLDGGENDQSPSEAGIEANLDIQYTVGLATGVPTTFISVGDDFQDGNLEGFLDIINFLLGESNPPQVLTTSYGQNENTISAKLANQLCNAYAQLGARGTSILFASGDGGVSGSQSAHCSNFVPTFPSGCPFMTSVGATQGVSPETAAAFSSGGFSNVFGIPSYQASAVSGYLSALGSTNSGKFNRSGRGFPDVSTQGYDFQIVSGGQTIGVDGTSCASPTFASVISLVNDRLIAAGKSPLGFLNPFLYSSAGKAALNDVTSGSNPGCSTNGFPAKAGWDPVTGLGTPNFAKLLTAVGL

SEQ ID NO: 50611 - protein, 366 aa, Meripilus giganteus
AIPASCASTITPACLQAIYGIPTTKATQSSNKLAVSGFIDQFANKADLKSFLAQFRKDISSSTTFSLQTLDGGENDQSPSEAGIEANLDIQYTVGLATGVPTTFISVGDDFQDGNLEGFLDIINFLLGESNPPQVLTTSYGQNENTISAKLANQLCNAYAQLGARGTSILFASGDGGVSGSQSAHCSNFVPTFPSGCPFMTSVGATQGVSPETAAAFSSGGFSNVFGIPSYQASAVSGYLSALGSTNSGKFNRSGRGFPDVSTQGVDFQIVSGGQTIGVDGTSCASPTFASVISLVNDRLIAAGKSPLGFLNPFLYSSAGKAALNDVTSGSNPGCSTNGFPASAGWDPVTGLGTPNFAKLLTAVGL

SEQ ID NO: 50612 - protein, 366 aa, Meripilus giganteus
AIPASCASTITPACLQAIYGIPTTKATQSSNKLAVSGFIDQFANKADLKSFLAQFRKDISSSTTFSLVTLDGGENDQSPSEAGIEANLDIQYTVGLATGVPTTFISVGDDFQDGNLEGFLDIINFLLGESNPPQVLTTSYGQNENTISAKLANQLCNAYAQLGARGTSILFASGDGGVSGSQSAHCSNFVPTFPSGCPFMTSVGATQGVSPETAAAFSSGGFSNVFGIPSYQASAVSGYLSALGSTNSGKFNRSGRGFPDVSTQGVDFQIVSGGQTIGVDGTSCASPTFASVISLVNDRLIAAGKSPLGFLNPFLYSSAGKAALNDVTSGSNPGCSTNGFPAKAGWDPVTGLGTPNFAKLLTAVGL

SEQ ID NO: 50613 - protein, 366 aa, Meripilus giganteus
AIPASCASTITPACLQAIYGIPTTKATQSSNKLAVSGFIDQFANKADLKSFLAQFRKDISSSTTFSLQTLDGGENDQSPSEAGIEANLDIQYTVGLATGVPTTFISVGDDFQDGNLEGFLDIINFLLGESNPPQVLTTSYGQNENTISAKLANQLCNAYAQLGARGTSILFASGDGGVSGSQSAHCSNFVPTFPSGCPFMTSVGATQGVSPETAAAFSSGGFSNVFGIPSYQASAVSGYLSALGSTNSGKFNRSGRGFPDVSTQGVDFQIVSGGQTIGVDGTSCASPTFASVISLVNDRLIAAGKSPLGFLNPFLYSSAGKAALNDVTSGSNPGCSTNGFPAKAGWDPVTGLGTPNFAKLLTVVGL

SEQ ID NO: 50614 - protein, 366 aa, Meripilus giganteus
AIPASCASTITPACLQAIYGIPTTKATQSSNKLAVSGFIDQFANKADLKSFLAQFRKDISSSTTFSLQTLDGGENDQSPSEAGIEANLDIQYTVGLATGVPTTFISVGDDFQDGNLEGFLDIINFLLGESNPPQVLTTSYGQNENTIGAKLANQLCNAYAQLGARGTSILFASGDGGVSGSQSAHCSNFVPTFPSGCPFMTSVGATQGVSPETAAAFSSGGFSNVFGIPSYQASAVSGYLSALGSTNSGKFNRSGRGFPDVSTQGVDFQIVSGGQTIGVDGTSCASPTFASVISLVNDRLIAAGKSPLGFLNPFLYSSAGKAALNDVTSGSNPGCSTNGFPAKAGWDPVTGLGTPNFAKLLTAVGL

SEQ ID NO: 50615 - protein, 366 aa, Meripilus giganteus
AIPASCASTITPACLQAIYGIPTTKATQSSNKLAVSGFIDQFANKADLKSFLAQFRKDISSSTTFSLQTLDGGENDQSPSEAGIEANLDIQYTVGLATGVPTTFISVGDDFQDGNLEGFLDIINFLLGESNPPQVLTTSYGQNENTISAKLANQLCNAYAQLGARGTSILFASGDGGVSGSQSAHCSNFVPTFPSGCPFMTSVGATQGVSPETAAAFSSGGFSNVFGIPSYQASAVSGYLSALGSTNSGKFNRSGRGFPDVSTQGVDFQIVSGGQTIGVDGTSCASPTFASVISLVNDRLIAAGKSPLGFLNPFLYSSAGKAALNDVTSGSNPGCSTQGFPAKAGWDPVTGLGTPNFAKLLTAVGL

SEQ ID NO: 50616 - protein, 366 aa, Meripilus giganteus
AIPASCASTITPACLQAIYGIPTTKATQSSNKLAVSGFIDQFANKADLKSFLAQFRKDISSSTTFSLQTLDGGENDQSPSEAGIEANLDIQYTVGLATGVPTTFISVGDDFQDGNLYGFLDIINFLLGESNPPQVLTTSYGQNENTISAKLANQLCNAYAQLGARGTSILFASGDGGVSGSQSAHCSNFVPTFPSGCPFMTSVGATQGVSPETAAAFSSGGFSNVFGIPSYQASAVSGYLSALGSTNSGKFNRSGRGFPDVSTQGVDFQIVSGGQTIGVDGTSCASPTFASVISLVNDRLIAAGKSPLGFLNPFLYSSAGKAALNDVTSGSNPGCSTNGFPAKAGWDPVTGLGTPNFAKLLTAVGL

SEQ ID NO: 50617 - protein, 366 aa, Meripilus giganteus
AIPASCASTITPACLQAIYGIPTTKATQSSNKLAVSGFIDQCANKADLKSFLAQFRKDISSSTTFSLQTLDGGENDQSPSEAGIEANLDIQYTVGLATGVPTTFISVGDDFQDGNLEGFLDIINFLLGESNPPQVLTTSYGQNENTISAKLANQLCNAYAQLGARGTSILFASGDGGVSGSQSAHCSNFVPTFPSGCPFMTSVGATQGVSPETAAAFSSGGFSNVFGIPSYQASAVSGYLSALGSTNSGKFNRSGRGFPDVSTQGVDFQIVSGGQTIGVDGTSCASPTFASVISLVNDRLIAAGKSPLGFLNPFLYSSAGKAALNDVTSGSNPGCSTNGFPAKAGWDPVTGLGTPNFAKLLTAVGL

SEQ ID NO: 50618 - protein, 366 aa, Meripilus giganteus
AIPASCASTITPACLQAIYGIPTTKATQSSNKLAVSGFIDQFANKADLKSFLAQFRKDISSSTTFSLQTLDGGENDQSPSEAGIEANLDIQYTVGLATGVPTTFISVGDDFQDGNLEGFLDIINFLLGESNPPQVLTTSYGQNENTISAKLANQLCNAYAQLGARGTSILFASGDGGVSGSQSAHCSNFVPTFPSGCPFMTSVGATQGVSPETAAAFSSGGFSNVFGIPSYQASAVSGYLSALGSTNSGKFNRSGRGFPDVSTQGVDFQIVSGGQTIGVDGTSCASPTFASVISLVNDRLIAAGKSPLGFLNPFLYSSAGKAALNDVTSGSNPGCSTNGFPAKAGWDPVTGLGTPNFFKLLTAVGL

SEQ ID NO: 50619 - protein, 366 aa, Meripilus giganteus
AIPASCASTITPACLQAIYGIPTTKATQSSNKLAVSGFIDQFANKADLKSFLAQFRKDISSSTTFSLQTLDGGENDQSPSEAGIEANLDIQYTVGLATGVPTTFISVGDDFQDLNLEGFLDIINFLLGESNPPQVLTTSYGQNENTISAKLANQLCNAYAQLGARGTSILFASGDGGVSGSQSAHCSNFVPTFPSGCPFMTSVGATQGVSPETAAAFSSGGFSNVFGIPSYQASAVSGYLSALGSTNSGKFNRSGRGFPDVSTQGVDFQIVSGGQTIGVDGTSCASPTFASVISLVNDRLIAAGKSPLGFLNPFLYSSAGKAALNDVTSGSNPGCSTNGFPAKAGWDPVTGLGTPNFAKLLTAVGL

SEQ ID NO: 50620 - protein, 366 aa, Meripilus giganteus
AIPASCASTITPACLQAIYGIPTTKATQSSNKLAVSGFIDQFANKADLKSFLAQFRKDISSSTTFSLQTLDGGENDQSPSEAGIEANLDIQYTVGLATGVPTTFISVGDDFQDGNLEGFLDIIVFLLGESNPPQVLTTSYGQNENTISAKLANQLCNAYAQLGARGTSILFASGDGGVSGSQSAHCSNFVPTFPSGCPFMTSVGATQGVSPETAAAFSSGGFSNVFGIPSYQASAVSGYLSALGSTNSGKFNRSGRGFPDVSTQGVDFQIVSGGQTIGVDGTSCASPTFASVISLVNDRLIAAGKSPLGFLNPFLYSSAGKAALNDVTSGSNPGCSTNGFPAKAGWDPVTGLGTPNFAKLLTAVGL

SEQ ID NO: 50621 - protein, 365 aa, Meripilus giganteus
AIPASCASTITPACLQAIYGIPTTKATQSSNKLAVSGFIDQFANKADLKSFLAQFRKDISSSTTFSLQTLDGGENDQSPSEAGIEANLDIQYTVGLATGVPTTFISVGDDFQDGNLEGFLDIINFLLGESNPPQVLTTSYGQNENTISAKLANQLCNAYAQLGARGTSILFASGDGGVSGSQSAHCSNFVPTFPSGCPFMTSVGATQGLPETAAAFSSGGFSNVFGIPSYQASAVSGYLSALGSTNSGKFNRSGRGFPDVSTQGVDFQIVSGGQTIGVDGTSCASPTFASVISLVNDRLIAAGKSPLGFLNPFLYSSAGKAALNDVTSGSNPGCSTNGFPAKAGWDPVTGLGTPNFAKLLTAVGL

SEQ ID NO: 50622 - protein, 188 aa, Nocardiopsis sp.
ADIIGGLAYTMGGRCSVGFAATNAAGQPGFVTAGHCGRVGTQVTIGXGRGVFEQSVFPGNDAAFVRGTSNFTLTNLVSRYNTGGYATVAGHNQAPIGSSVCRSGSTTGWHCGTIQARGQSVSYPEGTVTNMTRTTVCAEPGDSGGSYISGTQAQGVTSGGSGNCRTGGTTFYQEVTPMVNSWGVRLRT

SEQ ID NO: 50623 - protein, 188 aa, Nocardiopsis sp.
ADIIGGLAYTMGGRCSVGFAATNAAGQPGFVTAGHCGRVGTQVTIGNGRGVFEQSVFPGNDAAFVRGTSNFTPTNLVSRYNTGGYATVAGHNQAPIGSSVCRSGSTTGWHCGTIQARGQSVSYPEGTVTNMTRTTVCAEPGDSGGSYISGTQAQGVTSGGSGNCRTGGTTFYQEVTPMVNSWGVRLRT

SEQ ID NO: 50624 - protein, 188 aa, Nocardiopsis sp.
ADIIGGLAYTMGGRCSVGFAATNAAGQPGFVTAGHCGRVGTQVTIGNDRGVFEQSVFPGNDAAFVRGTSNFTLTNLVSRYNTGGYATVAGHNQAPIGSSVCRSGSTTGWHCGTIQARGQSVSYPEGTVTNMTRTTVCAEPGDSGGSYISGTQAQGVTSGGSGNCRTGGTTFYQEVTPMVNSWGVRLRT

SEQ ID NO: 50625 - protein, 188 aa, Nocardiopsis sp.
ADIIGGLAYTMXGRCSVGFAATNAAGQPGFVTAGHCGRVGTQVTIGNGRGVFEQSVFPGNDAAFVRGTSNFTLTNLVSRYNTGGYATVAGHNQAPIGSSVCRSGSTTGWHCGTIQARGQSVSYPEGTVTNMTRTTVCAEPGDSGGSYISGTQAQGVTSGGSGNCRTGGTTFYQEVTPMVNSWGVRLRT

SEQ ID NO: 50626 - protein, 188 aa, Nocardiopsis sp.
ADIIGGLAYTMGGRCSVGFAATNAAGQPGFVTAGHCGRVGTQVTIGNGRGVFEQSVFPGNDAAFVRGTSNFTLTNLVSRYNTGGYATVAGHNQAPIGSSVCRSGSTTGWHCGTIQARGQSVSYPEGTVTNMTRTTVCAEPGDSGGSYISGIQAQGVTSGGSGNCRTGGTTFYQEVTPMVNSWGVRLRT

SEQ ID NO: 50627 - protein, 188 aa, Nocardiopsis sp.
ADIIGGLAYTMGGRCSVGFAATNAAGQPGFVTAGHCGRVGTQVTIGNGRGVFEQSVFPGNDAAFVRGTSNFTLTNLVSRYNTGGYATVAGHNQAPIGSSVCRSGSTTGWHCGTIQARGQSVSYPEGTVTNVTRTTVCAEPGDSGGSYISGTQAQGVTSGGSGNCRTGGTTFYQEVTPMVNSWGVRLRT

SEQ ID NO: 50628 - protein, 188 aa, Nocardiopsis sp.
ADIIGGLAYTMGGRCSVGFAATNAAGQPGFVTAAHCGRVGTQVTIGNGRGVFEQSVFPGNDAAFVRGTSNFTLTNLVSRYNTGGYATVAGHNQAPIGSSVCRSGSTTGWHCGTIQARGQSVSYPEGTVTNMTRTTVCAEPGDSGGSYISGTQAQGVTSGGSGNCRTGGTTFYQEVTPMVNSWGVRLRT

SEQ ID NO: 50629 - protein, 188 aa, Nocardiopsis sp.
ADIIGGLAYTMGGRCSVGFAATNAAGQPGFVTAGHCGRVGTQVTIGNGRGVFEQSVFPGNDAAFVRGTSNFTLTNLVSRYNTGGYATVAGHNQAPIGSSVCRSGSTTGWHCGTIQARGQSVSYPEGTVTNMTRTTVCAEPGDSGGSYISGTQAQGVTSGGSGNCXTGGTTFYQEVTPMVNSWGVRLRT

SEQ ID NO: 50630 - protein, 188 aa, Nocardiopsis sp.
ADVIGGLAYTMGGRCSVGFAATNAAGQPGFVTAGHCGRVGTQVTIGNGRGVFEQSVFPGNDAAFVRGTSNFTLTNLVSRYNTGGYATVAGHNQAPIGSSVCRSGSTTGWHCGTIQARGQSVSYPEGTVTNMTRTTVCAEPGDSGGSYISGTQAQGVTSGGSGNCRTGGTTFYQEVTPMVNSWGVRLRT

SEQ ID NO: 50631 - protein, 188 aa, Nocardiopsis sp.
ADIIGGLAYTMGGRCSVGFAATNAAGQPGFVTAGHCGRVGTQVTIGNGRGVFEQSVFPGNDAAFVRGXSNFTLTNLVSRYNTGGYATVAGHNQAPIGSSVCRSGSTTGWHCGTIQARGQSVSYPEGTVTNMTRTTVCAEPGDSGGSYISGTQAQGVTSGGSGNCRTGGTTFYQEVTPMVNSWGVRLRT

SEQ ID NO: 50632 - protein, 188 aa, Nocardiopsis sp. NRRL 18262
ADIIGGLAYTMGGRCSVGFAATNAAGQPGFVTAGHCGRVGTQVTIGDGRGVFEQSVFPGNDAAFVRGTSNFTLTNLVSRYNTGGYATVAGHNQAPIGSSVCRSGSTTGWHCGTIQARGQSVSYPEGTVTNMTRTTVCAEPGDSGGSYISGTQAQGVTSGGSGNCRTGGTTFYQEVTPMVNSWGVRLRT

SEQ ID NO: 50633 - protein, 188 aa, Nocardiopsis sp. NRRL 18262
ADIIGGLAYTMGGRCSVGFAATNAAGQPGFVTAGHCGRVGTQVTIGNGRGVFERSVFPGNDAAFVRGTSNFTLTNLVSRYNTGGYATVAGHNQAPIGSSVCRSGSTTGWHCGTIQARGQSVSYPEGTVTNMTRTTVCAEPGDSGGSYISGTQAQGVTSGGSGNCRTGGTTFYQEVTPMVNSWGVRLRT

SEQ ID NO: 50634 - protein, 188 aa, Nocardiopsis sp.
ADIIGGLAYTMGGRCSVGFAATNAAGQPGFVTAGHCGRVGTQVTIGNGRGVFEQSVFPGNDAAFVRGTSNFTLTNLVSRYNTGGYATVAGHNQAPIGSSVCRSGSTTGWHCGTIQARGQSVSYPEGTVTNMTRTTVCAEPGDSGGSYISGTQAQGVTSGGSGNCSTGGTTFYQEVTPMVNSWGVRLRT

SEQ ID NO: 50635 - protein, 188 aa, Nocardiopsis sp.
ADIIGGLAYTMGGRCSVGFAATNAAGQPGFVTAGHCGRVGTQVTIGNGRGVFEQSVFPGNDAAFVRGTTNFTLTNLVSRYNTGGYATVAGHNQAPIGSSVCRSGSTTGWHCGTIQARGQSVSYPEGTVTNMTRTTVCAEPGDSGGSYISGTQAQGVTSGGSGNCRTGGTTFYQEVTPMVNSWGVRLRT

SEQ ID NO: 50636 - protein, 188 aa, Nocardiopsis sp.
ADIIGGLAYTMGGRCSVGFAATNAAGQPGFVTAGHCGRVGTQVTIGNGRGVFEQSVFPGNDAAFVRGTSNFTLTNLVSRYNTGGYATVAGHNQAPIGSPVCRSGSTTGWHCGTIQARGQSVSYPEGTVTNMTRTTVCAEPGDSGGSYISGTQAQGVTSGGSGNCRTGGTTFYQEVTPMVNSWGVRLRT

SEQ ID NO: 50637 - protein, 188 aa, Nocardiopsis sp.
ADIIGGLAYTMGGRCSVGFAATNAAGQPGFVTAGHCGRVGTQVTIGNGRGVFEQSVFPGNDAAFVRGTSNFTLTNLVSRYNTGGYATVAGHNQAPIGSSVCRSGSTTGWHCGTIQARGQSVSYLEGTVTNMTRTTVCAEPGDSGGSYISGTQAQGVTSGGSGNCRTGGTTFYQEVTPMVNSWGVRLRT

SEQ ID NO: 50638 - protein, 188 aa, Nocardiopsis sp.
ADIIGGLAYTMGGRCSVGFAATNAAGQPGFVTAGHCGRVGTQVTIGNGRGVFKQSVFPGNDAAFVRGTSNFTLTNLVSRYNTGGYATVAGHNQAPIGSSVCRSGSTTGWHCGTIQARGQSVSYPEGTVTNMTRTTVCAEPGDSGGSYISGTQAQGVTSGGSGNCRTGGTTFYQEVTPMVNSWGVRLRT

SEQ ID NO: 50639 - protein, 188 aa, Nocardiopsis sp.
ADIIGGLAYTMGGRCSVGFAATNAAGQPGFVTAGHCGRVGTQVTIGNGRGVFEQSVFPGNDAAFVRGTSNFTLTNLVSRYNTGGYATVAGHNQAPIGSKVCRSGSTTGWHCGTIQARGQSVSYPEGTVTNMTRTTVCAEPGDSGGSYISGTQAQGVTSGGSGNCRTGGTTFYQEVTPMVNSWGVRLRT

SEQ ID NO: 50640 - protein, 188 aa, Nocardiopsis sp.
ADIIGGLAYTMDGRCSVGFAATNAAGQPGFVTAGHCGRVGTQVTIGNGRGVFEQSVFPGNDAAFVRGTSNFTLTNLVSRYNTGGYATVAGHNQAPIGSSVCRSGSTTGWHCGTIQARGQSVSYPEGTVTNMTRTTVCAEPGDSGGSYISGTQAQGVTSGGSGNCRTGGTTFYQEVTPMVNSWGVRLRT

SEQ ID NO: 50641 - protein, 188 aa, Nocardiopsis sp.
ADIIGGLAYTMGGRCSVGFAATNAAGQPGFVTAGHCGRVGAQVTIGNGRGVFEQSVFPGNDAAFVRGTSNFTLTNLVSRYNTGGYATVAGHNQAPIGSSVCRSGSTTGWHCGTIQARGQSVSYPEGTVTNMTRTTVCAEPGDSGGSYISGTQAQGVTSGGSGNCRTGGTTFYQEVTPMVNSWGVRLRT

SEQ ID NO: 50642 - protein, 188 aa, Nocardiopsis sp.
ADIIGGLAYTMGGRCSVGFAATNAAGQPGFVTAGHCGTVGTQVTIGNGRGVFEQSVFPGNDAAFVRGTSNFTLTNLVSRYNTGGYATVAGHNQAPIGSSVCRSGSTTGWHCGTIQARGQSVSYPEGTVTNMTRTTVCAEPGDSGGSYISGTQAQGVTSGGSGNCRTGGTTFYQEVTPMVNSWGVRLRT

SEQ ID NO: 50643 - protein, 188 aa, Nocardiopsis sp.
ADIIGGLAYTMGGRCSVGFAATNAAGQPGFVTAGHCGRVGTQVTIGNGRGVFEXSVFPGNDAAFVRGTSNFTLTNLVSRYNTGGYATVAGHNQAPIGSSVCRSGSTTGWHCGTIQARGQSVSYPEGTVTNMTRTTVCAEPGDSGGSYISGTQAQGVTSGGSGNCRTGGTTFYQEVTPMVNSWGVRLRT

SEQ ID NO: 50644 - protein, 188 aa, Nocardiopsis sp.
ADIIGGLAYTIGGRCSVGFAATNAAGQPGFVTAGHCGRVGTQVTIGNGRGVFEQSVFPGNDAAFVRGTSNFTLTNLVSRYNTGGYATVAGHNQAPIGSSVCRSGSTTGWHCGTIQARGQSVSYPEGTVTNMTRTTVCAEPGDSGGSYISGTQAQGVTSGGSGNCRTGGTTFYQEVTPMVNSWGVRLRT

SEQ ID NO: 50645 - protein, 188 aa, Nocardiopsis sp. NRRL 18262
ADIIGGLAYTMGGRCSVGFAATNAAGQPGFVTAGHCGRVGTQVTIGNGRGVFEQSVFPGNDAAFVRGTSNFTLTNLVSRYNTGGYAAVAGHNQAPIGSSVCRSGSTTGWHCGTIQARGQSVSYPEGTVTNMTRTTVCAEPGDSGGSYISGTQAQGVTSGGSGNCRTGGTTFYQEVTPMVNSWGVRLRT

SEQ ID NO: 50646 - protein, 188 aa, Nocardiopsis sp.
ADIIGGLAYTMGGRCSVGFAATNAAGQPGFVTAGHCGRVGTQVTIGNGRGVFEQSVFPGNDAAFVRGTSNFTLTNLVSRYNTGGYATVAGHNQAPIGSSVCRSGSTTGWHCGTIQARGQSVSYPEGTVTNMTRTTVCAEPGDSGGSYISGKQAQGVTSGGSGNCRTGGTTFYQEVTPMVNSWGVRLRT

SEQ ID NO: 50647 - protein, 188 aa, Nocardiopsis sp.
ADIIGGLAYTMGGRCSVGFAATNAAGQPGFVTAGHCGRVGTQVKIGNGRGVFEQSVFPGNDAAFVRGTSNFTLTNLVSRYNTGGYATVAGHNQAPIGSSVCRSGSTTGWHCGTIQARGQSVSYPEGTVTNMTRTTVCAEPGDSGGSYISGTQAQGVTSGGSGNCRTGGTTFYQEVTPMVNSWGVRLRT

SEQ ID NO: 50648 - protein, 188 aa, Nocardiopsis sp.
ADIIGGLAYTMGGRCSVGFAATNAAGQPGFVTAGHCGRVGTQVTIGNGRGVFEQSVFPGNDAAFVRGTSNFTLTNLVSRYNTGGYATVAGHNQAPIGSSVCRSGSTTGWHCGTIQARGQSVSYPDGTVTNMTRTTVCAEPGDSGGSYISGTQAQGVTSGGSGNCRTGGTTFYQEVTPMVNSWGVRLRT

SEQ ID NO: 50649 - protein, 188 aa, Nocardiopsis sp.
ADIIGGLAYTMGGRCSVGFAATNAAGQPGFVTAGHCGRVGTQVTIGNGRGVFEQSVFPGNDAAFVRGTSNFTLTNLVSRYNTGGYATVAGHNQAPIGSSVCRSGSTTGWHCGTIQARGQSVSYPEGTVTNMTRTTVCAEPGDSGGSYISGTQAQGVTSGGSGNCRAGGTTFYQEVTPMVNSWGVRLRT

SEQ ID NO: 50650 - protein, 188 aa, Nocardiopsis sp.
ADIIGGLAYTMGGRCSVGFAATDAAGQPGFVTAGHCGRVGTQVTIGNGRGVFEQSVFPGNDAAFVRGTSNFTLTNLVSRYNTGGYATVAGHNQAPIGSSVCRSGSTTGWHCGTIQARGQSVSYPEGTVTNMTRTTVCAEPGDSGGSYISGTQAQGVTSGGSGNCRTGGTTFYQEVTPMVNSWGVRLRT

SEQ ID NO: 50651 - protein, 188 aa, Nocardiopsis sp.
ADIIGGLAYTMGGICSVGFAATNAAGQPGFVTAGHCGRVGTQVTIGNGRGVFEQSVFPGNDAAFVRGTSNFTLTNLVSRYNTGGYATVAGHNQAPIGSSVCRSGSTTGWHCGTIQARGQSVSYPEGTVTNMTRTTVCAEPGDSGGSYISGTQAQGVTSGGSGNCRTGGTTFYQEVTPMVNSWGVRLRT

SEQ ID NO: 50652 - protein, 188 aa, Nocardiopsis sp.
ADIIGGLAYTMGGRCSVGFAATNAAGQPGFVTAGHCGRVGTQVTIGNGRGVFEQSVFPGNDAAFVRGTSNFTLTNLVSRYNTGGYATAAGHNQAPIGSSVCRSGSTTGWHCGTIQARGQSVSYPEGTVTNMTRTTVCAEPGDSGGSYISGTQAQGVTSGGSGNCRTGGTTFYQEVTPMVNSWGVRLRT

SEQ ID NO: 50653 - protein, 188 aa, Nocardiopsis sp. NRRL 18262
ADIIGGLAYTMGGRCSVGFAATNAAGQPGFVTAGHCGRVGTQVTIGNGRGVFEQSVFPGNDAAFVRGTSNFTLTNLVSRYNTGGYATVAGHNQAPIGSSVCRSGSTTGWHCGTIQARGQSVSYPEGRVTNMTRTTVCAEPGDSGGSYISGTQAQGVTSGGSGNCRTGGTTFYQEVTPMVNSWGVRLRT

SEQ ID NO: 50654 - protein, 188 aa, Nocardiopsis sp.
ADIIGGLAYTMGGRCSVGFAAANAAGQPGFVTAGHCGRVGTQVTIGNGRGVFEQSVFPGNDAAFVRGTSNFTLTNLVSRYNTGGYATVAGHNQAPIGSSVCRSGSTTGWHCGTIQARGQSVSYPEGTVTNMTRTTVCAEPGDSGGSYISGTQAQGVTSGGSGNCRTGGTTFYQEVTPMVNSWGVRLRT

SEQ ID NO: 50655 - protein, 188 aa, Nocardiopsis sp.
ADIIGGLAYTMGGRCSVGFAATNAAGQPGFVTAGHCGRVGTQVTIGNGRGVFEQSVFPGNDAAFVRGTSNFTLTNLVSRYNTGGYATVAGHKQAPIGSSVCRSGSTTGWHCGTIQARGQSVSYPEGTVTNMTRTTVCAEPGDSGGSYISGTQAQGVTSGGSGNCRTGGTTFYQEVTPMVNSWGVRLRT

SEQ ID NO: 50656 - protein, 366 aa, Meripilus giganteus
AIPASCASTITPACLQAIYGIPTTKATQSSNKLAVSGFIDQFANKADLKSFLAQFRKDISSSTTFSLQTLDGGENDQSPSEAGIEANLDIQYTVGLATGVPTTFISVGDDFQDGNLEGFLDIINFLLGESNPPQVLTTSYGRNENTISAKLANQLCNAYAQLGARGTSILFASGDGGVSGSQPAHCSNFVPTFPSGCPFMTSVGATQGVSPETAAAFSSGGFSNVFGIPSYQASAVSGYLSALGSTNSGKFNRSGRGFPDVSTQGVDFQIVSGGQTIGVDGTSCASPTFASVISLVNDRLIAAGKSPLGFLNPFLYSSAGKAALNDVTSGSNPGCSTNGFPAKAGWDPVTGLGTPNFAKLLTAVGL

SEQ ID NO: 50657 - protein, 366 aa, Meripilus giganteus
AIPASCASTITPACLQAIYGIPTTKATQSSNKLAVSGFIDQFANKADLKSFLAQFRKDISSSTTFSLQTLDGGENDQSPSEAGIEANLDIQYTVGLATGVPTTFISVGDDFQDGNLEGFLDIINFLLGESNPPQVLTTSYGQNENTISAKLANQLCNAYAQLGARGTSILFASGDGGVSGSQPAHCSNFVPTFPSGCPFMTSVGATQGVSPETAAAFSSGGFSNVFGIPSYQASAVSGYLSALGSTNSGKFNRSGRGFPDVSTQGVDFQIVSGGQTIGVDGTSCASPTFASVISLVNDRLIAAGKSPLGFLNPFLYSSAGKAALNDVTSGSNPGCSTNGFPAKAGWDPVTGLGTPNFAKLLAAVGL

SEQ ID NO: 50658 - protein, 366 aa, Meripilus giganteus
AIPASCASTITPACLQAIYGIPTTKATQSSNKLAVSGFIDQFANKADLKSFLAQFRKDISSSTTFSLQTLDGGENDQSPSEAGIEANLDIQYTVGLATGVPTTFISVGDDFQDGNLEGFLDIINFLLGESNPPQVLTTSYGQNENWISAKLANQLCNAYAQLGARGTSILFASGDGGVSGSQPAHCSNFVPTFPSGCPFMTSVGATQGVSPETAAAFSSGGFSNVFGIPSYQASAVSGYLSALGSTNSGKFNRSGRGFPDVSTQGVDFQIVSGGQTIGVDGTSCASPTFASVISLVNDRLIAAGKSPLGFLNPFLYSSAGKAALNDVTSGSNPGCSTNGFPAKAGWDPVTGLGTPNFAKLLTAVGL

SEQ ID NO: 50659 - protein, 366 aa, Meripilus giganteus
AIPASCASTITPACLQAIYGIPTTKATQSSNKLAVSGFIDQFANKADLKSFLAQFRKDISSSTTFSLQTLDGGENDQSPSEAGIEANLDIQYTVGLATGVPTTFISVGDDFQDGNLEGFLDIINFLLGESNPPQVLTTSYGQNENTISAKLANQLCNAYAQLGARGTSILFASGDGGVSGSQPAHCSNFVPTFPSGCPFMTSVGATQGVSPETAAAFSSGGFSNVFGIPSYQASAVSGYLSALGSTNSGKFNRSGRGFPDVSTQGVDFQIVSGGQTIGVDGTSCASPTFASVIALVNDRLIAAGKSPLGFLNPFLYSSAGKAALNDVTSGSNPGCSTNGFPAKAGWDPVTGLGTPNFAKLLTAVGL

SEQ ID NO: 50660 - protein, 366 aa, Meripilus giganteus
AIPASCASTITPACLQAIYGIPTTKATQSSNKLAVSGFIDQFANKADLKSFLAQFRKDISSSTTFSLQTLDGGENDQSPSRAGIEANLDIQYTVGLATGVPTTFISVGDDFQDGNLEGFLDIINFLLGESNPPQVLTTSYGQNENTISAKLANQLCNAYAQLGARGTSILFASGDGGVSGSQSAHCSNFVPTFPSGCPFMTSVGATQGLSPETAAAFSSGGFSNVFGIPSYQASAVSGYLSALGSTNSGKFNRSGRGFPDVSTQGVDFQIVSGGQTIGVDGTSCASPTFASVISLVNDRLIAAGKSPLGFLNPFLYSSAGKAALNDVTSGSNPGCSTNGFPAKAGWDPVTGLGTPNFAKLLTAVGL

SEQ ID NO: 50661 - protein, 366 aa, Meripilus giganteus
AIPASCASTITPACLQAIYGIPTTKATQSSNKLAVSGFIDQFANKADLKSFLAQFRKDISSSTTFSLQTLDGGENDQSPSEAGIEANLDIQYTVGLATGVPTTFISVGDDFQDGNLEGFLDIINFLLGESNPPQVLTTSYGQNENTISAKLANQLCNAYAQLGARGTSILFASGDGGVSGSQPAHCSNFVPTFPSGCPFMTSVGATRGVSPETAAAFSSGGFSNVFGIPSYQASAVSGYLSALGSTNSGKFNRSGRGFPDVSTQGVDFQIVSGGQTIGVDGTSCASPTFASVISLVNDRLIAAGKSPLGFLNPFLYSSAGKAALNDVTSGSNPGCSTNGFPAKAGWDPVTGLGTPNFAKLLTAVGL

SEQ ID NO: 50662 - protein, 366 aa, Meripilus giganteus
AIPASCASTITPACLQAIYGIPTTKATQSSNKLAVSGFIDQFANKADLKSFLAQFRKDISSSTTFSLQTLDGGENDQSPSEAGIEANLDIQYTVGLATGVPTTFISVGDDFQDGNLEGFLDIINFLLGESNPPQVLTTSYGQNENTISAKLANQLCNAYAQLGARGTSILFASGDGGVSGSQPAHCSNFVPTFPSGCPFMTSVGATQGVSPETAAAFSSGGFSNVFGIPSYQASAVSGYLSALGSTNSGKFNRSGRGFPDVSTQGVDFQIVRGGQTIGVDGTSCASPTFASVISLVNDRLIAAGKSPLGFLNPFLYSSAGKAALNDVTSGSNPGCSTNGFPAKAGWDPVTGLGTPNFAKLLTAVGL

SEQ ID NO: 50663 - protein, 366 aa, Meripilus giganteus
AIPASCASTITPACLQAIYGIPTTKATQSSNKLAVSGFIDQFANKADLKSFLAQFRKDISSSTTFSLQTLDGGENDQSPSEAGIEANLDIQYTVGLATGVPTTFISVGDDFQDGNLEGFLDIINFLLGESNPPQVLTTSYGQNENAISAKLANQLCNAYAQLGARGTSILFASGDGGVSGSQPAHCSNFVPTFPSGCPFMTSVGATQGVSPETAAAFSSGGFSNVFGIPSYQASAVSGYLSALGSTNSGKFNRSGRGFPDVSTQGVDFQIVSGGQTIGVDGTSCASPTFASVISLVNDRLIAAGKSPLGFLNPFLYSSAGKAALNDVTSGSNPGCSTNGFPAKAGWDPVTGLGTPNFAKLLTAVGL

SEQ ID NO: 50664 - protein, 366 aa, Meripilus giganteus
AIPASCASTITPACLQAIYGIPTTKATQSSNKLAVSGFIDQFANKADLKSFLAQFRKDISSSTTFSLQTLDGGENDQSPSEAGIEANLDIQYTVGLATGVPTTFISVGDDFQDGNLEGFLDIINFLLGESNPPQVLTTSYGQNENTISAKLANQLCNAYAQLGARGTSILFASGDGGVSGSQPAHCSNFVPTFPSGCPFMTSVGATQGVSPETAAAFSSGGFSNVFGIPSYQASAVSGYLSALGSTNSGKFNRSGRGFPDVSTQGVNFQIVSGGQTIGVDGTSCASPTFASVISLVNDRLIAAGKSPLGFLNPFLYSSAGKAALNDVTSGSNPGCSTNGFPAKAGWDPVTGLGTPNFAKLLTAVGL

SEQ ID NO: 50665 - protein, 366 aa, Meripilus giganteus
AIPASCASTITPACLQAIYGIPTTKATQSSNKLAVSGFIDQFANKADLKSFLAQFRKDISSSTTFSLQTLDGGENDQSPSKAGIEANLDIQYTVGLATGVPTTFISVGDDFQDGNLEGFLDIINFLLGESNPPQVLTTSYGQNENTISAKLANQLCNAYAQLGARGTSILFASGDGGVSGSQPAHCSNFVPTFPSGCPFMTSVGATQGVSPETAAAFSSGGFSNVFGIPSYQASAVSGYLSALGSTNSGKFNRSGRGFPDVSTQGVDFQIVSGGQTIGVDGTSCASPTFASVISLVNDRLIAAGKSPLGFLNPFLYSSAGKAALNDVTSGSNPGCSTNGFPAKAGWDPVTGLGTPNFAKLLTAVGL

SEQ ID NO: 50666 - protein, 366 aa, Meripilus giganteus
AIPASCASTITPACLQAIYGIPTTKATQSSNKLAVSGFIDQFANKADLKSFLAQFRKDISSSTTFSLQTLDGGENDQSPSEAGIEANLDIQYTVGLATGVPTTFISVGDDFQDGLLEGFLDIINFLLGESNPPQVLTTSYGQNENTISAKLANQLCNAYAQLGARGTSILFASGDGGVSGSRSAHCSNFVPTFPSGCPFMTSVGATQGVSPETAAAFSSGGFSNVFGIPSYQASAVSGYLSALGSTNSGKFNRSGRGFPDVSTQGVDFQIVSGGQTIGVDGTSCASPTFASVISLVNDRLIAAGKSPLGFLNPFLYSSAGKAALNDVTSGSNPGCSTNGFPAKAGWDPVTGLGTPNFAKLLTAVGL

SEQ ID NO: 50667 - protein, 366 aa, Meripilus giganteus
AIPASCASTITPACLQAIYGIPTTKATQSSNKLAVSGFIDQFANKADLKSFLAQFRKDISSSTTFSLQTLDGGWNDQSPSEAGIEANLDIQYTVGLATGVPTTFISVGDDFQDGNLEGFLDIINFLLGESNPPQVLTTSYGQNENTISAKLANQLCNAYAQLGARGTSILFASGDGGVSGSQPAHCSNFVPTFPSGCPFMTSVGATQGVSPETAAAFSSGGFSNVFGIPSYQASAVSGYLSALGSTNSGKFNRSGRGFPDVSTQGVDFQIVSGGQTIGVDGTSCASPTFASVISLVNDRLIAAGKSPLGFLNPFLYSSAGKAALNDVTSGSNPGCSTNGFPAKAGWDPVTGLGTPNFAKLLTAVGL

SEQ ID NO: 50668 - protein, 366 aa, Meripilus giganteus
AIPASCASTITPACLQAIYGIPTTKATQSSNKLAVSGFIDQFANKADLKSFLAQFRKDISSSTTFSLQTLDGGENDQSPSEAGIEANLDIQYTVGLATGVPTTFISVGDDFQDGNLEGFLDIINFLLGESNPPQVLTTSYGWNENTISAKLANQLCNAYAQLGARGTSILFASGDGGVSGSQPAHCSNFVPTFPSGCPFMTSVGATQGVSPETAAAFSSGGFSNVFGIPSYQASAVSGYLSALGSTNSGKFNRSGRGFPDVSTQGVDFQIVSGGQTIGVDGTSCASPTFASVISLVNDRLIAAGKSPLGFLNPFLYSSAGKAALNDVTSGSNPGCSTNGFPAKAGWDPVTGLGTPNFAKLLTAVGL

SEQ ID NO: 50669 - protein, 366 aa, Meripilus giganteus
AIPASCASTITPACLQAIYGIPTTKATQSSNKLAVSGFIDQFANKADLKSFLAQFRKDISSSTTFSLQTLDGGENDQSPSEAGIEANLDIQYTVGLATGVPTTFISVGDDFQDGNLEGFLDIINFLLGESNPPQVLTTSYGQNENTISAKLANQLCNAYAQLGARGTSILFASGDGGVSGSQPAHCSNFVPTFPSGCPFMTSVGATQGVSPETAAAFSSGGFSNVFGIPSYQASAVSGYLSALGSTNSGKFNRSGRGFPDVSTQGVDFQIVVGGQTIGVDGTSCASPTFASVISLVNDRLIAAGKSPLGFLNPFLYSSAGKAALNDVTSGSNPGCSTNGFPAKAGWDPVTGLGTPNFAKLLTAVGL

SEQ ID NO: 50670 - protein, 366 aa, Meripilus giganteus
AIPASCASTITPACLQAIYGIPTTKATQSSNKLAVSGFIDQFANKADLKSFLAQFRKDISSSTTFSLQTLDGGENDQSPSEAGIEANLDIQYTVGLATGVPTTFISVGDDFQDGNLEGFLDIINFLLGESNPPQVLTTSYGQNENTISAKLANQLCNAYAQLGARGTSILFASGDGGVSGSQPAHCSNFVPTFPSGCPFMTSVGATQGVSPETAAAFSSGGFSNVFGRPSYQASAVSGYLSALGSTNSGKFNRSGRGFPDVSTQGVDFQIVSGGQTIGVDGTSCASPTFASVISLVNDRLIAAGKSPLGFLNPFLYSSAGKAALNDVTSGSNPGCSTNGFPAKAGWDPVTGLGTPNFAKLLTAVGL

SEQ ID NO: 50671 - protein, 366 aa, Meripilus giganteus
AIPASCASTITPACLQAIYGIPTTKATQSSNKLAVSGFIDQFANKADLKSFLAQFRKDISSSTTFSLQTLDGGENDQSPSEAGIEANLDIQYTVGLATGVPTTFISVGNNFQDGNLEGFLDIINFLLGESNPPQVLTTSYGQNENTISAKLANQLCNAYAQLGARGTSILFASGDGGVSGSQSAHCSNFVPTFPSGCPFMTSVGATQGVSPETAAAFSSGGFSNVFGIPSYQASAVSGYLSALGSTNSGKFNRSGRGFPDVSTQGVDFQIVSGGQTIGVDGTSCASPTFASVISLVNDRLIAAGKSPLGFLNPFLYSSAGKAALNDVTSGSNPGCSTNGFPAKAGWDPVTGLGTPNFAKLLTAVGL

SEQ ID NO: 50672 - protein, 366 aa, Meripilus giganteus
AIPASCASTITPACLQAIYGIPTTKATQSSNKLAVSGFIDQFANKADLKSFLAQFRKDISSSTTFSLQTLDGGENDQSPSEAGIEANLDIQYTVGLATGVPTTFISVGDDFQDGNLEGFLDIINFLLGESNPPQVLTTSYGQNENWISAKLANQLCNAYAQLGARGTSILFASGDGGVSGSQSAHCSNFVPTFPSGCPFMTSVGATQGVSPETAAAFSSGGFSNVFGIPSYQASAVSGYLSALGSTNSGKFNRSGRGFPDVSTQGVDFQIVSGGQTIGVNGTSCASPTFASVISLVNDRLIAAGKSPLGFLNPFLYSSAGKAALNDVTSGSNPGCSTNGFPAKAGWDPVTGLGTPNFAKLLTAVGL

SEQ ID NO: 50673 - protein, 366 aa, Meripilus giganteus
AIPASCASTITPACLQAIYGIPTTKATQSSNKLAVSGFIDQFANKADLKSFLAQFRKDISSSTTFSLQTLDGGENDQSPSEAGIEANLDIQYTVGLATGVPTTFISVGDDFQDGNLEGFLDIINFLLGESNPPQVLTTSYGQNENTISAKLANQLCNAYAQLGARGTSILFASGDGGVSGSQPAHCSNFVPTFPSGCPFMTSVGATQGVSPETAAAFSSGGFSNVFGIPSYQASAVSGYLSALGSTNSGKFNRSGRGFPDVSTQGVDFQIVSGGQTIGVDGTSCASPTFASVISLVNDRLIAAGKSPLGFLNPFLYSSAGGAALNDVTSGSNPGCSTNGFPAKAGWDPVTGLGTPNFAKLLTAVGL

SEQ ID NO: 50674 - protein, 366 aa, Meripilus giganteus
AIPASCASTITPACLQAIYGIPTTKATQSSNKLAVSGFIDQFANKADLKSFLAQFRKDISSSTTFSLQTLDGGENDQSPSEAGIEANLDIQYTVGLATGVPTTFISVGDDFQDGLLEGFLDIINFLLGESNPPQVLTTSYGQNENTISAKLANQLCNAYAQLGARGTSILFASGDGGVSGSGSAHCSNFVPTFPSGCPFMTSVGATQGVSPETAAAFSSGGFSNVFGIPSYQASAVSGYLSALGSTNSGKFNRSGRGFPDVSTQGVDFQIVSGGQTIGVDGTSCASPTFASVISLVNDRLIAAGKSPLGFLNPFLYSSAGKAALNDVTSGSNPGCSTNGFPAKAGWDPVTGLGTPNFAKLLTAVGL

SEQ ID NO: 50675 - protein, 366 aa, Meripilus giganteus
AIPASCASTITPACLQAIYGIPTTKATQSSNKLAVSGFIDQFANKADLKSFLAQFRKDISSSTTFSLQTLDGGENDQSPSRAGIEANLDIQYTVGLATGVPTTFISVGDDFQDGNLEGFLDIINFLLGESNPPQVLTTSYGQNENTISAKLANQLCNAYAQLGARGTSILFASGDGGVSGSQPAHCSNFVPTFPSGCPFMTSVGATQGVSPETAAAFSSGGFSNVFGIPSYQASAVSGYLSALGSTNSGKFNRSGRGFPDVSTQGVDFQIVSGGQTIGVDGTSCASPTFASVISLVNDRLIAAGKSPLGFLNPFLYSSAGKAALNDVTSGSNPGCSTNGFPAKAGWDPVTGLGTPNFAKLLTAVGL

SEQ ID NO: 50676 - protein, 366 aa, Meripilus giganteus
AIPASCASTITPACLQAIYGIPTTKATQSSNKLAVSGFIDQFANKADLKSFLAQFRKDISSSTTFSLQTLDGGENDQSPSEAGIEANLDIQYTVGLATGVPTTFISVGDDFQDGNLEGFLDIINFLLGESNPPQVLTTSYGQNENYISAKLANQLCNAYAQLGARGTSILFASGDGGVSGSQPAHCSNFVPTFPSGCPFMTSVGATQGVSPETAAAFSSGGFSNVFGIPSYQASAVSGYLSALGSTNSGKFNRSGRGFPDVSTQGVDFQIVSGGQTIGVDGTSCASPTFASVISLVNDRLIAAGKSPLGFLNPFLYSSAGKAALNDVTSGSNPGCSTNGFPAKAGWDPVTGLGTPNFAKLLTAVGL

SEQ ID NO: 50677 - protein, 366 aa, Meripilus giganteus
AIPASCASTITPACLQAIYGIPTTKATQSSNKLAVSGFIDQFANKADLKSFLAQFRKDISSSTTFSLQTLDGGENDQSPSRAGIEANLDIQYTVGLATGVPTTFISVGDDFQDGNLEGFLDIINFLLGESNPPQVLTTSYGQNENWISAKLANQLCNAYAQLGARGTSILFASGDGGVSGSQSAHCSNFVPTFPSGCPFMTSVGATQGVSPETAAAFSSGGFSNVFGIPSYQASAVSGYLSALGSTNSGKFNRSGRGFPDVSTQGVDFQIVSGGQTIGVDGTSCASPTFASVISLVNDRLIAAGKSPLGFLNPFLYSSAGKAALNDVTSGSNPGCSTNGFPAKAGWDPVTGLGTPNFAKLLTAVGL

SEQ ID NO: 50678 - protein, 366 aa, Meripilus giganteus
AIPASCASTITPACLQAIYGIPTTKATQSSNKLAVSGFIDQFANKADLKSFLAQFRKDISSSTTFSLQTLDGGENDQSPSEAGIEANLDIQYTVGLATGVPTTFISVGDDFQDGNLEGFLDIINFLLGESNPPQVLTTSYGQNENTISAKLANVLCNAYAQLGARGTSILFASGDGGVSGSQPAHCSNFVPTFPSGCPFMTSVGATQGVSPETAAAFSSGGFSNVFGIPSYQASAVSGYLSALGSTNSGKFNRSGRGFPDVSTQGVDFQIVSGGQTIGVDGTSCASPTFASVISLVNDRLIAAGKSPLGFLNPFLYSSAGKAALNDVTSGSNPGCSTNGFPAKAGWDPVTGLGTPNFAKLLTAVGL

SEQ ID NO: 50679 - protein, 366 aa, Meripilus giganteus
AIPASCASTITPACLQAIYGIPTTKATQSSNKLAVSGFIDQFANKADLKSFLAQFRKDISSSTTFSLQTLDGGENDQSPSEAGIEANLDIQYTVGLATGVPTTFISVGDDFQDGNLEGFLDIINFLLGESNPPQVLTTSYGQNENTISAKLANQLCNAYAQLGARGTSILFASGDGGVSGSQLAHCSNFVPTFPSGCPFMTSVGATQGLSPETAAAFSSGGFSNVFGIPSYQASAVSGYLSALGSTNSGKFNRSGRGFPDVSTQGVDFQIVSGGQTIGVDGTSCASPTFASVISLVNDRLIAAGKSPLGFLNPFLYSSAGKAALNDVTSGSNPGCSTNGFPAKAGWDPVTGLGTPNFAKLLTAVGL

SEQ ID NO: 50680 - protein, 366 aa, Meripilus giganteus
AIPASCASTITPACLQAIYGIPTTKATQSSNKLAVSGFIDQFANKADLKSFLAQFRKDISSSTTFSLQTLDGGENDQSPSAAGIEANLDIQYTVGLATGVPTTFISVGDDFQDGNLEGFLDIINFLLGESNPPQVLTTSYGQNENTISAKLANQLCNAYAQLGARGTSILFASGDGGVSGSQPAHCSNFVPTFPSGCPFMTSVGATQGVSPETAAAFSSGGFSNVFGIPSYQASAVSGYLSALGSTNSGKFNRSGRGFPDVSTQGVDFQIVSGGQTIGVDGTSCASPTFASVISLVNDRLIAAGKSPLGFLNPFLYSSAGKAALNDVTSGSNPGCSTNGFPAKAGWDPVTGLGTPNFAKLLTAVGL

SEQ ID NO: 50681 - protein, 365 aa, Meripilus giganteus
AIPASCASTITPACLQAIYGIPTTKATQSSNKLAVSGFIDQFANKADLKSFLAQFRKDISSSTTFSLQTLDGGENDQSPSRAGIEANLDIQYTVGLATGVPTTFISVGDDFQDGNLEGFLDIINFLLGESNPPQVLTTSYGQNENTISAKLANQLCNAYAQLGARGTSILFASGDGGVSGSQSAHCSNFVPTFPSGCPFMTSVGATQGLPETAAAFSSGGFSNVFGIPSYQASAVSGYLSALGSTNSGKFNRSGRGFPDVSTQGVDFQIVSGGQTIGVDGTSCASPTFASVISLVNDRLIAAGKSPLGFLNPFLYSSAGKAALNDVTSGSNPGCSTNGFPAKAGWDPVTGLGTPNFAKLLTAVGL

SEQ ID NO: 50682 - protein, 365 aa, Meripilus giganteus
AIPASCASTITPACLQAIYGIPTTKATQSSNKLAVSGFIDQFANKADLKSFLAQFRKDISSSTTFSLQTLDGGENDQSPSEAGIEANLDIQYTVGLATGVPTTFISVGPDFQDGNLEGFLDIINFLLGESNPPQVLTTSYGQNENTISAKLANQLCNAYAQLGARGTSILFASGDGGVSGSQSAHCSNFVPTFPSGCPFMTSVGATQGLPETAAAFSSGGFSNVFGIPSYQASAVSGYLSALGSTNSGKFNRSGRGFPDVSTQGVDFQIVSGGQTIGVDGTSCASPTFASVISLVNDRLIAAGKSPLGFLNPFLYSSAGKAALNDVTSGSNPGCSTNGFPAKAGWDPVTGLGTPNFAKLLTAVGL

SEQ ID NO: 50683 - protein, 365 aa, Meripilus giganteus
AIPASCASTITPACLQAIYGIPTTKATQSSNKLAVSGFIDQFANKADLKSFLAQFRRDISSSTTFSLQTLDGGENDQSPSEAGIEANLDIQYTVGLATGVPTTFISVGDDFQDGNLEGFLDIINFLLGESNPPQVLTTSYGQNENTISAKLANQLCNAYAQLGARGTSILFASGDGGVSGSQPAHCSNFVPTFPSGCPFMTSVGATQGVPETAAAFSSGGFSNVFGIPSYQASAVSGYLSALGSTNSGKFNRSGRGFPDVSTQGVDFQIVSGGQTIGVDGTSCASPTFASVISLVNDRLIAAGKSPLGFLNPFLYSSAGKAALNDVTSGSNPGCSTNGFPAKAGWDPVTGLGTPNFAKLLTAVGL

SEQ ID NO: 50684 - protein, 365 aa, Meripilus giganteus
AIPASCASTITPACLQAIYGIPTTKATQSSNKLAVSGFIDQFANKADLKSFLAQFRKDISSSTTFSLQTLDGGENDQSPSEAGIEANLDIQYTVGLATGVPTTFISVGDDFQDGDLEGFLDIINFLLGESNPPQVLTTSYGQNENTISAKLANQLCNAYAQLGARGTSILFASGDGGVSGSQSAHCSNFVPTFPSGCPFMTSVGATQGLPETAAAFSSGGFSNVFGIPSYQASAVSGYLSALGSTNSGKFNRSGRGFPDVSTQGVDFQIVSGGQTIGVDGTSCASPTFASVISLVNDRLIAAGKSPLGFLNPFLYSSAGKAALNDVTSGSNPGCSTNGFPAKAGWDPVTGLGTPNFAKLLTAVGL

SEQ ID NO: 50685 - protein, 365 aa, Meripilus giganteus
AIPASCASTITPACLQAIYGIPTTKATQSSNKLAVSGFIDQFANKADLKSFLAQFRKDISSSTTFSLQTLDGGENDQSPSRAGIEANLDIQYTVGLATGVPTTFISVGDDFQDGNLEGFLDIINFLLGESNPPQVLTTSYGQNENTISAKLANQLCNAYAQLGARGTSILFASGDGGVSGSQSAHCSNFVPTFPSGCPFMTSVGATQGLSPETAAAFSSGGFSNVFGIPSYQASAVSGYLSALGSTNSGKFNRSGRGFPDVSTQGVDFQIVSGGQTIGVDGTSCASPTFASVISLVNDRLIAAGKSPLGFLNPFLYSAGKAALNDVTSGSNPGCSTNGFPAKAGWDPVTGLGTPNFAKLLTAVGL

SEQ ID NO: 50686 - protein, 366 aa, Meripilus giganteus
AIPASCASTITPACLQAIYGIPTTKATQSSNKLAVSGFIDQFANKADLKSFLAQFRKDISSSTTFSLQTLDGGENDQSPSEAGIEANLDIQYTVGLATGVPTTFISVGDDFQDGNLEGFLDIINFLLGESNPPQVLTTSYGWNENWISAKLANQLCNAYAQLGARGTSILFASGDGGVSGSQPAHCSNFVPTFPSGCPFMTSVGATQGVSPETAAAFSSGGFSNVFGIPSYQASAVSGYLSALGSTNSGKFNRSGRGFPDVSTQGVDFQIVSGGQTIGVDGTSCASPTFASVISLVNDRLIAAGKSPLGFLNPFLYSSAGKAALNDVTSGSNPGCSTNGFPAKAGWDPVTGLGTPNFAKLLTAVGL

SEQ ID NO: 50687 - protein, 366 aa, Meripilus giganteus
AIPASCASTITPACLQAIYGIPTTKATQSSNKLAVSGFIDQFANKADLKSFLAQFRKDISSSTTFSLQTLDGGENDQSPSEAGCEANLDIQYTVGLATGVPTTFISVGDDFQDGNLEGFLDIINFLLGESNPPQVLTTSYGQNENTISAKLANQLCNAYAQLGARGTSILFASGDGGVSGSQPAHCSNFVPTFPSGCPFMTSVGATQGVSPETAAAFSSGGFSNVFGIPSYQASAVSGYLSALGSTNSGKFNRSGRGFPDVSTQGVDFQIVCGGQTIGVDGTSCASPTFASVISLVNDRLIAAGKSPLGFLNPFLYSSAGKAALNDVTSGSNPGCSTNGFPAKAGWDPVTGLGTPNFAKLLTAVGL

SEQ ID NO: 50688 - protein, 366 aa, Meripilus giganteus
AIPASCASTITPACLQAIYGIPTTKATQSSNKLAVSGFIDQFANKADLKCFLAQFRKDISSSTTFSLQTLDGGENDQSPSEAGIEANLDIQYTVGLATGVPTTFISVGDDFQDGNLEGFLDIINFLLGESNPPQVLTTSYGQNENTISAKLANQLCNAYAQLGARGTSILFASGDGGVSGSQPAHCSNFVPTFPSGCPFMTSVGATQGVSPETAAAFSSGGFSNVFGIPSYQASAVSGYLSALGSTNSGKFNRSGRGFPDVSTQGVDFQICSGGQTIGVDGTSCASPTFASVISLVNDRLIAAGKSPLGFLNPFLYSSAGKAALNDVTSGSNPGCSTNGFPAKAGWDPVTGLGTPNFAKLLTAVGL

SEQ ID NO: 50689 - protein, 366 aa, Meripilus giganteus
AIPASCASTITPACLQAIYGIPTTKATQSSNKLAVSGFIDQFANKADLKSFLAQFRKDISSSTTFSLQTLDGGENDQSPSEAGIEANLDIQYTVGLATGVPTTFISVGDDFQDGNLEGFLDIINFLLGESNPPQVLTTSYGQNENWISAKLANQLCNAYAQLGARGTSILFASGDGGVSGSQPAHCSNFVPTFPSGCPFMTSVGATQGVSPETAAAFSSGGFSNVFGIPSYQASAVSGYLSALGSTNSGKFNRSGRGFPDVSTQGVDFQIVSGGQTIGVNGTSCASPTFASVISLVNDRLIAAGKSPLGFLNPFLYSSAGKAALNDVTSGSNPGCSTNGFPAKAGWDPVTGLGTPNFAKLLTAVGL

SEQ ID NO: 50690 - protein, 366 aa, Meripilus giganteus
AIPASCASTITPACLQAIYGIPTTKATQSSNKLAVSGFIDQFANKADLKSFLAQFRKDISSSTTFSLQTLDGGENDQSPSRAGIEANLDIQYTVGLATGVPTTFISVGDDFQDGNLEGFLDIINFLLGESNPPQVLTTSYGWNENTISAKLANQLCNAYAQLGARGTSILFASGDGGVSGSQPAHCSNFVPTFPSGCPFMTSVGATQGVSPETAAAFSSGGFSNVFGIPSYQASAVSGYLSALGSTNSGKFNRSGRGFPDVSTQGVDFQIVSGGQTIGVDGTSCASPTFASVISLVNDRLIAAGKSPLGFLNPFLYSSAGKAALNDVTSGSNPGCSTNGFPAKAGWDPVTGLGTPNFAKLLTAVGL

SEQ ID NO: 50691 - protein, 366 aa, Meripilus giganteus
AIPASCASTITPACLQAIYGIPTTKATQSSNKLAVSGFIDQFANKADLKSFLAQFRKDISSSTTFSLQTLDGGENDQSPSEAGIEANLDIQYTVGLATGVPTTFISVGDDFQDGNLEGFLDIINFLLGESNPPQVLTTSYGQNENTISAKLANQLCNAYAQLGARGTSILFASGDGGVSGSQSAHCSNFVPTFPSGCPFMTSVGATQGVSPETAAAFSSGGFSNVFGIPSYQASAVSGYLSALGSTNSGKFNRSGRGFPDVSTQGVDFQIVSGGQTIGVDGTSCASPTFASVISLVNDRLIAAGKSPLGFLNPFLYSNAGASALNDVTSGSNPGCSTNGFPAKAGWDPVTGLGTPNFAKLLTAVGL

SEQ ID NO: 50692 - protein, 366 aa, Meripilus giganteus
AIPASCASTITPACLQAIYGIPTTKATQSSNKLAVSGFIDQFANKADLKSFLAQFRKDISSSTTFSLQTLDGGENDQSPSEAGIEANLDIQYTVGLATGVPTTFISVGDDFQDGNLEGFLDIIWFLLGESNPPQVLTTSYGRNENTISAKLANQLCNAYAQLGARGTSILFASGDGGVSGSQPAHCSNFVPTFPSGCPFMTSVGATQGVSPETAAAFSSGGFSNVFGIPSYQASAVSGYLSALGSTNSGKFNRSGRGFPDVSTQGVDFQIVSGGQTIGVDGTSCASPTFASVISLVNDRLIAAGKSPLGFLNPFLYSSAGKAALNDVTSGSNPGCSTNGFPAKAGWDPVTGLGTPNFAKLLTAVGL

SEQ ID NO: 50693 - protein, 366 aa, Meripilus giganteus
AIPASCASTITPACLQAIYGIPTTKATQSSNKLAVSGFIDQFANKADLKSFLAQFRKDISSSTTFSLQTLDGGENDQSPSEAGIEANLDIQYTVGLATGVPTTFISVGPDFQDGNLEGFLDIINFLLGESNPPQVLTTSYGQNENTISAKLANQLCNAYAQLGARGTSILFASGDGGVSGSQPAHCSNFVPTFPSGCPFMTSVGATQGLSPETAAAFSSGGFSNVFGIPSYQASAVSGYLSALGSTNSGKFNRSGRGFPDVSTQGVDFQIVSGGQTIGVDGTSCASPTFASVISLVNDRLIAAGKSPLGFLNPFLYSSAGKAALNDVTSGSNPGCSTNGFPAKAGWDPVTGLGTPNFAKLLTAVGL

SEQ ID NO: 50694 - protein, 366 aa, Meripilus giganteus
AIPASCASTITPACLQAIYGIPTTKATQSSNKLAVSGFMDQFANKADLKSFLAQFRKDISSSTTFSLQTLDGGENDQSPSEAGIEANLDIQYTVGLATGVPTTFISVGDDFQDGNLEGFLDIINFLLGESNPPQVLTTSYGRNENTISAKLANQLCNAYAQLGARGTSILFASGDGGVSGSQPAHCSNFVPTFPSGCPFMTSVGATQGVSPETAAAFSSGGFSNVFGIPSYQASAVSGYLSALGSTNSGKFNRSGRGFPDVSTQGVDFQIVSGGQTIGVDGTSCASPTFASVISLVNDRLIAAGKSPLGFLNPFLYSSAGKAALNDVTSGSNPGCSTNGFPAKAGWDPVTGLGTPNFAKLLTAVGL

SEQ ID NO: 50695 - protein, 366 aa, Meripilus giganteus
AIPASCASTITPACLQAIYGIPTTKATQSSNKLAVSGFLDQFANKADLKSFLAQFRKDISSSTTFTLQTLDGGENDQSPSEAGIEANLDIQYTVGLATGVPVTFISVGDDFQDGNLEGFLDIINFLLGESNPPQVLTTSYGQNENTISAKLANQLCNAYAQLGARGTSILFASGDGGVSGSQSAHCSNFVPTFPSGCPFMTSVGATQGVSPETAAAFSSGGFSNVFGIPSYQASAVSGYLSALGSTNSGKFNRSGRGFPDVSTQGVDFQIVSGGQTIGVDGTSCASPTFASVISLVNDRLIAAGKSPLGFLNPFLYSSAGKAALNDVTSGSNPGCSTNGFPAKAGWDPVTGLGTPNFAKLLTAVGL

SEQ ID NO: 50696 - protein, 366 aa, Meripilus giganteus
AIPASCASTITPACLQAIYGIPTTKATQSSNKLAVSGFRDQFANKADLKSFLAQFRKDISSSTTFSLQTLDGGENDQSPSEAGIEANLDIQYTVGLATGVPTTFISVGDDFQDGNLEGFLDIINFLLGESNPPQVLTTSYGRNENTISAKLANQLCNAYAQLGARGTSILFASGDGGVSGSQPAHCSNFVPTFPSGCPFMTSVGATQGVSPETAAAFSSGGFSNVFGIPSYQASAVSGYLSALGSTNSGKFNRSGRGFPDVSTQGVDFQIVSGGQTIGVDGTSCASPTFASVISLVNDRLIAAGKSPLGFLNPFLYSSAGKAALNDVTSGSNPGCSTNGFPAKAGWDPVTGLGTPNFAKLLTAVGL

SEQ ID NO: 50697 - protein, 366 aa, Meripilus giganteus
AIPASCASTITPACLQAIYGIPTTKATQSSNKLAVSGFIDQFANKADLKSFLAQFRKDISSSTTFSLQTLDGGENDQSPSEAGIEANLDIQYTVGLATGVPTTFISVGDDFQDGLLEGFLDIINFLLGESNPPQVLTTSYGQNENTISAKLANQLCNAYAQLGARGTSILFASGDGGVSGSQLAHCLNFVPTFPSGCPFMTSVGATQGVSPETAAAFSSGGFSNVFGIPSYQASAVSGYLSALGSTNSGKFNRSGRGFPDVSTQGVDFQIVSGGQTIGVDGTSCASPTFASVISLVNDRLIAAGKSPLGFLNPFLYSSAGKAALNDVTSGSNPGCSTNGFPAKAGWDPVTGLGTPNFAKLLTAVGL

SEQ ID NO: 50698 - protein, 366 aa, Meripilus giganteus
AIPASCASTITPACLQAIYGIPTTKATQSSNKLAVSGFIDQFANKADLKSFLAQFRKDIDSSTTFSLQTLDGGENDQSPSEAGIEANLDIQYTVGLATGVPTTFISVGDDFQDGNLEGFLDIINFLLGESNPPQVLTTSYGRNENTISAKLANQLCNAYAQLGARGTSILFASGDGGVSGSQPAHCSNFVPTFPSGCPFMTSVGATQGVSPETAAAFSSGGFSNVFGIPSYQASAVSGYLSALGSTNSGKFNRSGRGFPDVSTQGVDFQIVSGGQTIGVDGTSCASPTFASVISLVNDRLIAAGKSPLGFLNPFLYSSAGKAALNDVTSGSNPGCSTNGFPAKAGWDPVTGLGTPNFAKLLTAVGL

SEQ ID NO: 50699 - protein, 366 aa, Meripilus giganteus
AIPASCASTITPACLQAIYGIPTTKATQSSNKLAVSGFIDQFANKADLKSFLAQFRKDISSSTTFSLQTLDGGENDQSPSEAGIEANLDIQYTVGLATGVPTTFISVGDDFQDGNLEGFLDIIQFLLGESNPPQVLTTSYGRNENTISAKLANQLCNAYAQLGARGTSILFASGDGGVSGSQPAHCSNFVPTFPSGCPFMTSVGATQGVSPETAAAFSSGGFSNVFGIPSYQASAVSGYLSALGSTNSGKFNRSGRGFPDVSTQGVDFQIVSGGQTIGVDGTSCASPTFASVISLVNDRLIAAGKSPLGFLNPFLYSSAGKAALNDVTSGSNPGCSTNGFPAKAGWDPVTGLGTPNFAKLLTAVGL

SEQ ID NO: 50700 - protein, 366 aa, Meripilus giganteus
AIPASCASTITPACLQAIYGIPTTKATQSSNKLAVSGFIDQFANKADLKSFLAQFRKDISSSTTFSLQTLDGGENDQSPSEAGIEANLDIQYTVGLATGVPTTFISVGDDFQDGNLEGFLDIINFLLGESNPPQVLTTSYGWNENWISAKLANQLCNAYAQLGARGTSILFASGDGGVSGSRSAHCSNFVPTFPSGCPFMTSVGATQGVSPETAAAFSSGGFSNVFGIPSYQASAVSGYLSALGSTNSGKFNRSGRGFPDVSTQGVDFQIVSGGQTIGVDGTSCASPTFASVISLVNDRLIAAGKSPLGFLNPFLYSSAGKAALNDVTSGSNPGCSTNGFPAKAGWDPVTGLGTPNFAKLLTAVGL

SEQ ID NO: 50701 - protein, 366 aa, Meripilus giganteus
AIPASCASTITPACLQAIYGIPTTKATQSSNKLAVSGFLDQFANKADLKSFLAQFRKDISSSTTFSLQTLDGGENDQSPSEAGIEANLDIQYTVGLATGVPTTFISVGDDFQDGNLEGFLDIINFLLGESNPPQVLTTSYGRNENTISAKLANQLCNAYAQLGARGTSILFASGDGGVSGSQPAHCSNFVPTFPSGCPFMTSVGATQGVSPETAAAFSSGGFSNVFGIPSYQASAVSGYLSALGSTNSGKFNRSGRGFPDVSTQGVDFQIVSGGQTIGVDGTSCASPTFASVISLVNDRLIAAGKSPLGFLNPFLYSSAGKAALNDVTSGSNPGCSTNGFPAKAGWDPVTGLGTPNFAKLLTAVGL

SEQ ID NO: 50702 - protein, 366 aa, Meripilus giganteus
AIPASCASTITPACLQAIYGIPTTKATQSSNKLAVSGFIDQFANKADLKSFLAQFRKDISSSTTFSLQTLDGGENDQSPSEAGIEANLDIQYTVGLATGVPTTFISVGDDFQDGNLEGFLDIILFLLGESNPPQVLTTSYGRNENTISAKLANQLCNAYAQLGARGTSILFASGDGGVSGSQPAHCSNFVPTFPSGCPFMTSVGATQGVSPETAAAFSSGGFSNVFGIPSYQASAVSGYLSALGSTNSGKFNRSGRGFPDVSTQGVDFQIVSGGQTIGVDGTSCASPTFASVISLVNDRLIAAGKSPLGFLNPFLYSSAGKAALNDVTSGSNPGCSTNGFPAKAGWDPVTGLGTPNFAKLLTAVGL

SEQ ID NO: 50703 - protein, 366 aa, Meripilus giganteus
AIPASCASTITPACLQAIYGIPTTKATQSSNKLAVSGFIDQFANKADLKSFLAQFRKDISSSTTFSLQTLDGGENDQSPSRAGIEANLDIQYTVGLATGVPTTFISVGDDFQDGNLEGFLDIINFLLGESNPPQVLTTSYGRNENTISAKLANQLCNAYAQLGARGTSILFASGDGGVSGSQPAHCSNFVPTFPSGCPFMTSVGATQGVSPETAAAFSSGGFSNVFGIPSYQASAVSGYLSALGSTNSGKFNRSGRGFPDVSTQGVDFQIVSGGQTIGVDGTSCASPTFASVISLVNDRLIAAGKSPLGFLNPFLYSSAGKAALNDVTSGSNPGCSTNGFPAKAGWDPVTGLGTPNFAKLLTAVGL

SEQ ID NO: 50704 - protein, 366 aa, Meripilus giganteus
AIPASCASTITPACLQAIYGIPTTKATQSSNKLAVSGFIDQFANKADLKSFLAQFRKDISSSTTFSLQTLDGGENDQSPSEAGIEANLDIQYTVGLATGVPTTFISVGDDFQDGNLDGFLDIINFLLGESNPPQVLTTSYGRNENTISAKLANQLCNAYAQLGARGTSILFASGDGGVSGSQPAHCSNFVPTFPSGCPFMTSVGATQGVSPETAAAFSSGGFSNVFGIPSYQASAVSGYLSALGSTNSGKFNRSGRGFPDVSTQGVDFQIVSGGQTIGVDGTSCASPTFASVISLVNDRLIAAGKSPLGFLNPFLYSSAGKAALNDVTSGSNPGCSTNGFPAKAGWDPVTGLGTPNFAKLLTAVGL

SEQ ID NO: 50705 - protein, 366 aa, Meripilus giganteus
AIPASCASTITPACLQAIYGIPTTKATQSSNKLAVSGFCDQFANKADLKSFLAQFRKDISSSTTFSLQTLDGGENDQSPSEAGIEANLDIQYTVGLATGVPTTFISVGDDFQDGNLEGFLDIINFLLGESNPPQVLTTSYGRNENTISAKLANQLCNAYAQLGARGTSILFASGDGGVSGSQPAHCSNFVPTFPSGCPFMTSVGATQGVSPETAAAFSSGGFSNVFGIPSYQASAVSGYLSALGSTNSGKFNRSGRGFPDVSTQGVDFQIVSGGQTIGVDGTSCASPTFASVISLVNDRLIAAGKSPLGFLNPFLYSSAGKAALNDVTSGSNPGCSTNGFPAKAGWDPVTGLGTPNFAKLLTAVGL

SEQ ID NO: 50706 - protein, 366 aa, Meripilus giganteus
AIPASCASTITPACLQAIYGIPTTKATQSSNKLAVSGFIDQFANKADLKSFLAQFRKDISSSTTFSLQTLDGGENDQSPSEAGIEANLDIQYTVGLATGVPTTFISVGDDFQDGNLEGFLDIINFLLGESNPPQVLTTSYGQNENTISAKLANQLCNAYAQLGARGTSILFASGDGGVSGSQPAHCSNFVPTFPSGCPFMTSVGATQGVSPETAAAFSSGGFSNVFGIPSYQASAVSGYLSALGSTNSGKFNRSGRGFPDVSTQGVDFQIVSGGQTIGVDGTSCASPTFASVISLVNDRLIAAGKSPLGFLNPFLYSSACKAALNDVTSGSNPGCSTNGFPAKAGWDPVTGLGTPNFAKLLTCVGL

SEQ ID NO: 50707 - protein, 365 aa, Meripilus giganteus
AIPASCASTITPACLQAIYGIPTTKATQSSNKLAVSGFIDQFANKADLKSFLAQFRKDISSSTTFSLQTLDGGENDQSPSEAGIEANLDIQYTVGLATGVPTTFISVGDDFQDGNLEGFLDIINFLLGESNPPQVLTTSYGQNENTISAKLANQLCNAYAQLGARGTSILFASGDGGVSGSQPAHCSNFVPTFPSGCPFMTSVGATQGVPETAAAFSSGGFSNVFGIPSYQASAVSGYLSALGSTNSGKFNRSGRGFPDVSTQGVDFQIVSGGQTIGVDGTSCASPTFASVISLVNDRLIAAGKSPLGFLNPFLYSSAGKAALNDVCSGSNPGCSTNGFPACAGWDPVTGLGTPNFAKLLTAVGL

SEQ ID NO: 50708 - protein, 365 aa, Meripilus giganteus
AIPASCASTITPACLQAIYGIPTTKATQSSNKLAVSGFIDQFANKADLKSFLAQFRKDISSSTTFSLQTLDGGENDQSPSEAGIEANLDIQYTVGLATGVPTTFISVGDDFQDGNLEGFLDIINFLLGESNPPQVLTTSYGQNENWISAKLANQLCNAYAQLGARGTSILFASGDGGVSGSQPAHCSNFVPTFPSGCPFMTSVGATQGVPETAAAFSSGGFSNVFGIPSYQASAVSGYLSALGSTNSGKFNRSGRGFPDVSTQGVDFQIVSGGQTIGVNGTSCASPTFASVISLVNDRLIAAGKSPLGFLNPFLYSSAGKAALNDVTSGSNPGCSTNGFPAKAGWDPVTGLGTPNFAKLLTAVGL

SEQ ID NO: 50709 - protein, 365 aa, Meripilus giganteus
AIPASCASTITPACLQAIYGIPTTKATQSSNKLAVSGFIDQFANKADLKSFLAQFRKDISSSTTFSLQTLDGGENDQSPSEAGIEANLDIQYTVGLATGVPTTFISVGDDFQDGDLEGFLDIINFLLGESNPPQVLTTSYGQNENTISAKLANQLCNAYAQLGARGTSILFASGDGGVSGSQPAHCSNFVPTFPSGCPFMTSVGATQGLPETAAAFSSGGFSNVFGIPSYQASAVSGYLSALGSTNSGKFNRSGRGFPDVSTQGVDFQIVSGGQTIGVDGTSCASPTFASVISLVNDRLIAAGKSPLGFLNPFLYSSAGKAALNDVTSGSNPGCSTNGFPAKAGWDPVTGLGTPNFAKLLTAVGL

SEQ ID NO: 50710 - protein, 365 aa, Meripilus giganteus
AIPASCASTITPACLQAIYGIPTTKATQSSNKLAVSGFIDQFANKADLKSFLAQFRKDISSSTTFSLQTLDGGENDQSPSRAGIEANLDIQYTVGLATGVPTTFISVGDDFQDGNLEGFLDIINFLLGESNPPQVLTTSYGQNENTISAKLANQLCNAYAQLGARGTSILFASGDGGVSGSQPAHCSNFVPTFPSGCPFMTSVGATQGLPETAAAFSSGGFSNVFGIPSYQASAVSGYLSALGSTNSGKFNRSGRGFPDVSTQGVDFQIVSGGQTIGVDGTSCASPTFASVISLVNDRLIAAGKSPLGFLNPFLYSSAGKAALNDVTSGSNPGCSTNGFPAKAGWDPVTGLGTPNFAKLLTAVGL

SEQ ID NO: 50711 - protein, 364 aa, Meripilus giganteus
AIPASCASTITPACLQAIYGIPTTKATQSSNKLAVSGFIDQFANKADLKSFLAQFRKDISSSTTFSLQTLDGGENDQSPSEAGIEANLDIQYTVGLATGVPTTFISVGDDFQDGLLEGFLDIINFLLGESNPPQVLTTSYGQNENTISAKLANQLCNAYAQLGARGTSILFASGDGGVSGSQLAHCLNFVPTFPSGCPFMTSVGATQGVSPETAAAFSSGGFSNVFGIPSYQASAVSGYLSALGSTNSGKFNRSGRGFPDVSTQGVDFQIVSGGQTIGVDGTSCASPTFASVISLVNDRLIAAGKSPLGFLNPFLYAGKAALNDVTSGSNPGCSTNGFPAKAGWDPVTGLGTPNFAKLLTAVGL

SEQ ID NO: 50712 - protein, 188 aa, Nocardiopsis sp.
ADIIGGLAYTMGGRCSVGFAATNAAGQPGFVTAGHCGRVGTQVTIGHDRGVFEQSVFPGNDAAFVRGTSNFTLTNLVSRYNTGGYATVAGHNQAPIGSSVCRSGSTTGWHCGTIQARGQSVSYPEGTVTNMTRTTVCAEPGDSGGSYISGTQAQGVTSGGSGNCRTGGTTFYQEVTPMVNSWGVRLRT

SEQ ID NO: 50713 - protein, 188 aa, Nocardiopsis sp.
ADIIGGLAYTMGGRCSVGFAATNAAGQPGFVTAGHCGRVGTQVTIGNGRGVFEQSVFPGNDAAFVRGTTNFTLTNLVSRYNTGGYATVAGHNQAPIGSSVCRSGSTTGWHCGTIQARGQSVSYPDGTVTNMTRTTVCAEPGDSGGSYISGTQAQGVTSGGSGNCRTGGTTFYQEVTPMVNSWGVRLRT

SEQ ID NO: 50714 - protein, 188 aa, Nocardiopsis sp.
ADIIGGLAYTMGGRCSVGFAATNAAGQPGFVTAGHCGRVGTQVKIGNGRGVFEQSVFPGNDAAFVRGTSNFTLTNLVSRYNTGGYATVAGHNQAPIGSPVCRSGSTTGWHCGTIQARGQSVSYPEGTVTNMTRTTVCAEPGDSGGSYISGTQAQGVTSGGSGNCRTGGTTFYQEVTPMVNSWGVRLRT

SEQ ID NO: 50715 - protein, 188 aa, Nocardiopsis prasina
ADIIGGLAYTMGGRCSVGFAATNAAGQPGFVTAGHCGRVGTQVTIGNGRGVFEQSIFPGNDAAFVRGTSNFTLTNLVSRYNTGGYATVAGHNQAPIGSSVCRSGSTTGWHCGTIQARGQSVSYPEGTVTNMTRTTVCAEPGDSGGSYISGNQAQGVTSGGSGNCRTGGTTFYQEVTPMVNSWGVRLRT

SEQ ID NO: 50716 - protein, 366 aa, Meripilus giganteus
AIPASCASTITPACLQAIYGIPTTKATQSSNKLAVSGFIDQFANKADLKSFLAQFRKDISSSTTFSLQTLDGGENDQSPSEAGIEANLDIQYTVGLATGVPTTFISVGDDFQDGNLEGFLDIINFLLGESNPPQVLTTSYGRNEEEISAKLANQLCNAYAQLGARGTSILFASGDGGVSGSQPAHCSNFVPTFPSGCPFMTSVGATQGVSPETAAAFSSGGFSNVFGIPSYQASAVSGYLSALGSTNSGKFNRSGRGFPDVSTQGVDFQIVSGGQTIGVDGTSCASPTFASVISLVNDRLIAAGKSPLGFLNPFLYSSAGKAALNDVTSGSNPGCSTNGFPAKAGWDPVTGLGTPNFAKLLTAVGL

SEQ ID NO: 50717 - protein, 366 aa, Meripilus giganteus
AIPASCASTITPACLQAIYGIPTTKATQSSNKLAVSGFIDQFANKADLKSFLAQFRKDISSSTTFSLQTLDGGENDQSPSEAGIEANLDIQYTVGLATGVPTTFISVGDDFQDGNLEGFLDIINFLLGESNPPQVLTTSYGRNEADISAKLANQLCNAYAQLGARGTSILFASGDGGVSGSQPAHCSNFVPTFPSGCPFMTSVGATQGVSPETAAAFSSGGFSNVFGIPSYQASAVSGYLSALGSTNSGKFNRSGRGFPDVSTQGVDFQIVSGGQTIGVDGTSCASPTFASVISLVNDRLIAAGKSPLGFLNPFLYSSAGKAALNDVTSGSNPGCSTNGFPAKAGWDPVTGLGTPNFAKLLTAVGL

SEQ ID NO: 50718 - protein, 366 aa, Meripilus giganteus
AIPASCASTITPACLQAIYGIPTTKATQSSNKLAVSGFIDQFANKADLKSFLAQFRKDISSSTTFSLQTLDGGENDQSPSEAGIEANLDIQYTVGLATGVPTTFISVGDDFQDGNLEGFLDIINFLLGESNPPQVLTTSYGRNEVEISAKLANQLCNAYAQLGARGTSILFASGDGGVSGSQPAHCSNFVPTFPSGCPFMTSVGATQGVSPETAAAFSSGGFSNVFGIPSYQASAVSGYLSALGSTNSGKFNRSGRGFPDVSTQGVDFQIVSGGQTIGVDGTSCASPTFASVISLVNDRLIAAGKSPLGFLNPFLYSSAGKAALNDVTSGSNPGCSTNGFPAKAGWDPVTGLGTPNFAKLLTAVGL

SEQ ID NO: 50719 - protein, 366 aa, Meripilus giganteus
AIPASCASTITPACLQAIYGIPTTKATQSSNKLAVSGFIDQFANKADLKSFLAQFRKDISSSTTFSLQTLDGGENDQSPSEAGIEANLDIQYTVGLATGVPTTFISVGDDFQDGNLEGFLDIINFLLGESNPPQVLTTSYGRNEQDISAKLANQLCNAYAQLGARGTSILFASGDGGVSGSQPAHCSNFVPTFPSGCPFMTSVGATQGVSPETAAAFSSGGFSNVFGIPSYQASAVSGYLSALGSTNSGKFNRSGRGFPDVSTQGVDFQIVSGGQTIGVDGTSCASPTFASVISLVNDRLIAAGKSPLGFLNPFLYSSAGKAALNDVTSGSNPGCSTNGFPAKAGWDPVTGLGTPNFAKLLTAVGL

SEQ ID NO: 50720 - protein, 366 aa, Meripilus giganteus
AIPASCASTITPACLQAIYGIPTTKATQSSNKLAVSGFIDQFANKADLKSFLAQFRKDISSSTTFSLQTLDGGENDQSPSEAGIEANLDIQYTVGLATGVPTTFISVGDDFQDGNLEGFLDIINFLLGESNPPQVLTTSYGWNENWISAKLANQLCNAYAQLGARGTSILFASGDGGVSGSQPAHCSNFVPTFPSGCPFMTSVGATQGVSPETAAAFSSGGFSNVFGIPSYQASAVSGYLSALGSTNSGKFNRSGRGFPDVSTQGVDFQIVSGGQTIGVNGTSCASPTFASVISLVNDRLIAAGKSPLGFLNPFLYSSAGKAALNDVTSGSNPGCSTNGFPAKAGWDPVTGLGTPNFAKLLTAVGL

SEQ ID NO: 50721 - protein, 366 aa, Meripilus giganteus
AIPASCASTITPACLQAIYGIPTTKATQSSNKLAVSGFIDQFANKADLKSFLAQFRKDISSSTTFSLQTLDGGENDQSPSEAGIEANLDIQYTVGLATGVPTTFISVGDDFQDGNLEGFLDIINFLLGESNPPQVLTTSYGRNEDEISAKLANQLCNAYAQLGARGTSILFASGDGGVSGSQPAHCSNFVPTFPSGCPFMTSVGATQGVSPETAAAFSSGGFSNVFGIPSYQASAVSGYLSALGSTNSGKFNRSGRGFPDVSTQGVDFQIVSGGQTIGVDGTSCASPTFASVISLVNDRLIAAGKSPLGFLNPFLYSSAGKAALNDVTSGSNPGCSTNGFPAKAGWDPVTGLGTPNFAKLLTAVGL

SEQ ID NO: 50722 - protein, 366 aa, Meripilus giganteus
AIPASCASTITPACLQAIYGIPTTKATQSSNKLAVSGFIDQFANKADLKSFLAQFRKDISSSTTFSLQTLDGGENDQSPSEAGIEANLDIQYTVGLATGVPTTFISVGDDFQDGLLEGFLDIINFLLGESNPPQVLTTSYGQNENTISAKLANQLCNAYAQLGARGTSILFASGDGGVSGSQLAHCLNFVPTFPSGCPFMTSVGATQGWSPETAAAFSSGGFSNVFGIPSYQASAVSGYLSALGSTNSGKFNRSGRGFPDVSTQGVDFQIVSGGQTIGVDGTSCASPTFASVISLVNDRLIAAGKSPLGFLNPFLYSSAGKAALNDVTSGSNPGCSTNGFPAKAGWDPVTGLGTPNFAKLLTAVGL

SEQ ID NO: 50723 - protein, 366 aa, Meripilus giganteus
AIPASCASTITPACLQAIYGIPTTKATQSSNKLAVSGFIDQFANKADLKSFLAQFRKDISSSTTFSLQTLDGGENDQSPSEAGIEANLDIQYTVGLATGVPTTFISVGDDFQDGLLEGFLDIINFLLGESNPPQVLTTSYGQNENTISAKLANQLCNAYAQLGARGTSILFASGDGGVSGSQLAHCLNFVPTFPSGCPFMTSVGATQGVSPETAAAFSSGGFSNVFGIPSYQASAVSGYLSALGSTNSGKFNRSGRGFPDVSTQGVDFQIVSGGQTIGVDGTSCASPTFASVISLVNDRLIAAGKSPLGFLNPFLYSSAGKAALNDVTSGSNPGCSTNGFPAKAGWDAVTGLGTPNFAKLLTAVGL

SEQ ID NO: 50724 - protein, 366 aa, Meripilus giganteus
AIPASCASTITPACLQAIYGIPTTKATQSSNKLAVSGFIDQFANKADLKSFLAQFRKDISSSTTFSLQTLDGGENDQSPSEAGIEANLDIQYTVGLATGVPTTFISVGDDFQDGNLEGFLDIINFLLGESNPPQVLTTSYGQNENTISAKLANQLCNAYAQLGARGTSILFASGDGGVSGSQSAHCSNFVPTFPSGCPFMTSVGATQGVSPETAAAFSSGGFSNVFGIPSYQASAVSGYLSALGSTNSGKFNRSGRGFPDVSTQGVNFQIVYGGKTIGVSGTSCASPTFASVISLVNDRLIAAGKSPLGFLNPFLYSSAGKAALNDVTSGSNPGCSTNGFPAKAGWDPVTGLGTPNFAKLLTAVGL

SEQ ID NO: 50725 - protein, 366 aa, Meripilus giganteus
AIPASCASTITPACLQAIYGIPTTKATQSSNKLAVSGFIDQFANKADLKSFLAQFRKDISSSTTFSLQTLDGGENDQSPSEAGIEANLDIQYTVGLATGVPTTFISVGDDFQDGNLEGFLDIINFLLGESNPPQVLTTSYGRNEKEISAKLANQLCNAYAQLGARGTSILFASGDGGVSGSQPAHCSNFVPTFPSGCPFMTSVGATQGVSPETAAAFSSGGFSNVFGIPSYQASAVSGYLSALGSTNSGKFNRSGRGFPDVSTQGVDFQIVSGGQTIGVDGTSCASPTFASVISLVNDRLIAAGKSPLGFLNPFLYSSAGKAALNDVTSGSNPGCSTNGFPAKAGWDPVTGLGTPNFAKLLTAVGL

SEQ ID NO: 50726 - protein, 365 aa, Meripilus giganteus
AIPASCASTITPACLQAIYGIPTTKATQSSNKLAVSGFIDQFANKADLKSFLAQFRKDISSSTTFSLQTLDGGENDQSPSEAGIEANLDIQYTVGLATGVPTTFISVGDDFQDGLLEGFLDIINFLLGESNPPQVLTTSYGQNENTISAKLANQLCNAYAQLGARGTSILFASGDGGVSGSQLAHCLNFVPTFPSGCPFMTSVGATQGLPETAAAFSSGGFSNVFGIPSYQASAVSGYLSALGSTNSGKFNRSGRGFPDVSTQGVDFQIVSGGQTIGVDGTSCASPTFASVISLVNDRLIAAGKSPLGFLNPFLYSSAGKAALNDVTSGSNPGCSTNGFPAKAGWDPVTGLGTPNFAKLLTAVGL

SEQ ID NO: 50727 - protein, 365 aa, Meripilus giganteus
AIPASCASTITPACLQAIYGIPTTKATQSSNKLAVSGFIDQFANKADLKSFLAQFRKDISSSTTFSLQTLDGGENDQSPSEAGIEANLDIQYTVGLATGVPTTFISVGDDFQDGNLEGFLDIINFLLGESNPPQVLTTSYGRNEGEISAKLANQLCNAYAQLGARGTSILFASGDGGVSGSQPAHCSNFVPTFPSGCPFMTSVGATQGVPETAAAFSSGGFSNVFGIPSYQASAVSGYLSALGSTNSGKFNRSGRGFPDVSTQGVDFQIVSGGQTIGVDGTSCASPTFASVISLVNDRLIAAGKSPLGFLNPFLYSSAGKAALNDVTSGSNPGCSTNGFPAKAGWDPVTGLGTPNFAKLLTAVGL

SEQ ID NO: 50728 - protein, 365 aa, Meripilus giganteus
AIPASCASTITPACLQAIYGIPTTKATQSSNKLAVSGFIDQFANKADLKSFLAQFRKDISSSTTFSLQTLDGGENDQSPSEAGIEANLDIQYTVGLATGVPTTFISVGDDFQDGLLEGFLDIINFLLGESNPPQVLTTSYGQNENTISAKLANQLCNAYAQLGARGTSILFASGDGGVSGSQLAHCLNFVPTFPSGCPFMTSVGATQGVPETAAAFSSGGFSNVFGIPSYQASAVSGYLSALGSTNSGKFNRSGRGFPDVSTQGVDFQIVSGGQTIGVDGTSCASPTFASVISLVNDRLIAAGKSPLGFLNPFLYGSAGKAALNDVTSGSNPGCSTNGFPAKAGWDPVTGLGTPNFAKLLTAVGL

SEQ ID NO: 50729 - protein, 365 aa, Meripilus giganteus
AIPASCASTITPACLQAIYGIPTTKATQSSNKLAVSGFIDQFANKADLKSFLAQFRKDISSSTTFSLQTLDGGENDQSPSEAGIEANLDIQYTVGLATGVPTTFISVGDDFQDGLLEGFLDIINFLLGESNPPQVLTTSYGQNENTISAKLANQLCNAYAQLGARGTSILFASGDGGVSGSQLAHCLNFVPTFPSGCPFMTSVGATQGVSPETAAAFSSGGFSNVFGIPSYQASAVSGYLSALGSTNSGKFNRSGRGFPDVSTQGVDFQIVSGGQTIGVDGTSCASPTFASVISLVNDRLIAAGKSPLGFLNPFLYLAGKAALNDVTSGSNPGCSTNGFPAKAGWDPVTGLGTPNFAKLLTAVGL

SEQ ID NO: 50730 - protein, 188 aa, Nocardiopsis sp.
ADIIGGLAYTMGGRCSVGFAATNAAGQPGFVTAGHCGRVGAQVTIGNGRGVFEQSVFPGNDAAFVRGRSNFTLTNLVSRYNTGGYATAAGHNQAPIGSSVCRSGSTTGWHCGTIQARGQSVSYPEGTVTNMTRTTVCAEPGDSGGSYISGTQAQGVTSGGSGNCRTGGTTFYQEVTPMVNSWGVRLRT

SEQ ID NO: 50731 - protein, 188 aa, Nocardiopsis sp.
ADIIGGLAYTMGGRCSVGFAATNAAGQPGFVTAAHCGRVGTQVTIGNGRGVFEQSVFPGNDAAFVRGASNFTLTNLVSRYNTGGYATVAGHNQAPIGSSVCRSGSTTGWHCGTIQARGQSVSYPEGTVTNMTRTTVCAEPGDSGGSYISGTQAQGVTSGGSGNCTTGGTTFYQEVTPMVNSWGVRLRT

SEQ ID NO: 50732 - protein, 188 aa, Nocardiopsis sp.
ADIIGGLAYTMGGRCSVGFAATNAAGQPGFVTAGHCGTVGTQVTIGNGRGVFKQSVFPGNDAAFVRGTSNFTPTNLVSRYNTGGYATVAGHNQAPIGSSVCRSGSTTGWHCGTIQARGQSVSYPEGTVTNMTRTTVCAEPGDSGGSYISGTQAQGVTSGGSGNCRTGGTTFYQEVTPMVNSWGVRLRT

SEQ ID NO: 50733 - protein, 188 aa, Nocardiopsis sp.
ADIIGGLAYTMGGICSVGFAATNAAGQPGFVTAGHCGTVGTQVTIGNGRGVFEQSVFPGNDAAFVRGTSNFTLTNLVSRYNTGGYATVAGHNQAPIGSSVCRSGSTTGWHCGTIQARGQSVSYPEGTVTNMTRTTVCAEPGDSGGSYISGIQAQGVTSGGSGNCRTGGTTFYQEVTPMVNSWGVRLRT

SEQ ID NO: 50734 - protein, 366 aa, Meripilus giganteus
AIPASCASTITPACLQAIYGIPTTKATQSSNKLAVSGFLDQFANKADLKSFLAQFRKDISSSTTFTLQTLDGGENDQSPSEAGIEANLDIQYTVGLATGVPVTFISVGDDFQDGNLEGFLDIINFLLGESNPPQVLTTSYGQNENTISAKLANQLCNAYAQLGARGTSILFASGDGGVSGSQSAHCSNFVPTFPSGCPFMTSVGATQGVSPETAAAFSSGGFSNVFGIPSYQASAVSGYLSALGSTNSGKFNRSGRGFPDVSTQGVNFQIVYGGQTIGVSGTSCASPTFASVISLVNDRLIAAGKSPLGFLNPFLYSSAGKAALNDVTSGSNPGCSTNGFPAKAGWDPVTGLGTPNFAKLLTAVGL

SEQ ID NO: 50735 - protein, 188 aa, Nocardiopsis prasina
ADIIGGLAYTMGGRCSVGFAATNAAGQPGFVTAGHCGRVGTQVSIGNGQGVFEQSIFPGNDAAFVRGTSNFTLTNLVSRYNTGGYATVAGHNQAPIGSSVCRSGSTTGWHCGTIQARGQSVSYPEGTVTNMTRTTVCAEPGDSGGSYISGNQAQGVTSGGSGNCRTGGTTFYQEVTPMVNSWGVRLRT

SEQ ID NO: 50736 - protein, 366 aa, Meripilus giganteus
AIPASCASTITPACLQAIYGIPTTKATQSSNKLAVSGFLDQFANKADLKSFLAQFRPDMSSSTTFTLQTLDGGENDQSPSEAGIEANLDIQYTVGLATGVPVTFISVGDDHQDGKLEGFLDIINFLLGESNPPQVLTTSYGQNENTISAKLANQLCNAYAQLGARGTSILFASGDGGVSGSQSAHCSNFVPTFPSGCPFMTSVGATQGVSPETAAAFSSGGFSNVFGIPSYQASAVSGYLSALGSTNSGKFNRSGRGFPDVSTQGVDFQIVSGGQTIGVSGTSCASPTFASVISLVNDRLIAAGKSPLGFLNPFLYSSAGKAALNDVTSGSNPGCSTNGFPAKAGWDPVTGLGTPNFAKLLTAVGL

SEQ ID NO: 50737 - protein, 366 aa, Meripilus giganteus
AIPASCASTITPACLQAIYGIPTTKATQSSNKLAVSGFLDQFANKADLKSFLAQFRPDMSSSTTFTLQTLDGGENDQSPSEAGIEANLDIQYTVGLATGVPVTFISVGDDHQDGKLEGFLDIINFLLGESNPPQVLTTSYGQNENTISAKLANQLCNAYAQLGARGTSILFASGDGGVSGSQSAHCSNFVPTFPSGCPFMTSVGATQGVSPETAAAFSSGGFSNVFGIPSYQASAVSGYLSALGSTNSGKFNRSGRGFPDVSTQGVNFQIVYGGQTIGVDGTSCASPTFASVISLVNDRLIAAGKSPLGFLNPFLYSSAGKAALNDVTSGSNPGCSTNGFPAKAGWDPVTGLGTPNFAKLLTAVGL

SEQ ID NO: 50738 - protein, 188 aa, Nocardiopsis sp.
ADIIGGLAYTMNGRCSVGFAAADAAGQPGFVTAGHCGRVGTQVTIGTGRGVFEQSVFPGNDAAFVRGTSNFTLTNLVSRYNTGGYATVAGHNQAPIGSSVCRSGSTTGWHCGTIQARGQSVSYPEGTVTNMTRTTVCAEPGDSGGSYISGTQAQGVTSGGSGNCHTGGTTFYQEVTPMVNSWGVRLRT

SEQ ID NO: 50739 - protein, 187 aa, Nocardiopsis sp.
DIIGGLAYTMGGRCSVGFAATNAAGQPGFVTAGHCGRVGTQVTIGSGRGVFELSVFPGNDAAFVRGSSNFTLTNLVSRYNTGGYATVAGHNQAPIGSSVCRSGSTTGWHCGTIQARGQSVSYPEGTVTNMTRTTVCAEPGDSGGSYISGTQAQGVTSGGSGNCGAGGTTFYQEVTPMVNSWGVRLRT

SEQ ID NO: 50740 - protein, 547 aa, Trametes sp. AH28-2
TPTGRNLKLHEAREDIPTGYSLRGAASPDTTLKLRLALVQNNFAELEDKLYDVSTPSSANYGNHLSKEEVEQYIAPAPESVKAVNAWLTENGLDAHTISPAGDWLAFEVPVSKANELFDADFSVFTHDESGLEAIRTLAYSIPAELQGHLDLVHPTVTFPNPNAHLPVVRSTKPIQNLTGRAIPASCASTITPACLQAIYGIPTTKATQSSNKLAVSGFIDQFANSADLKSFLSTFRKDISSSTTFALQTLDGGQNNQSPSQAGIEANLDIQYTVGLATGVPVTFISVGDNFQDGDLEGFLDIINFLLSESNPPQVLTTSYGQNENTISAKLANQLCNAYAQLGARGTSILFASGDGGVAGSQSSSCRNFVPTFPSGCPFMTSVGATQGVSPETAADFSSGGFSNVFGIPSYQTSAVSGYLSALGNTNSGKFNRSGRGFPDVATQGVNFQIVSGGDTGGVDGTSCASPTFASVISLINDRLIAAGKSPLGFLNPFLYSAAGKAALNDVTSGSNPGCNTNGFPAKAGWDPVTGLGTPNFAKLLTAVGL

SEQ ID NO: 50741 - protein, 188 aa, Nocardiopsis sp. NRRL 18262
ADIIGGLAYTMGGRCSVGFAATNSAGQPGFVTAGHCGTVGTQVSIGNGRGVFERSVFPGNDAAFVRGTSNFTLTNLVSRYNSGGYATVSGSSAAPIGSSVCRSGSTTGWHCGTIQARGQSVSYPQGTVTNMTRTSVCAEPGDSGGSFISGTQAQGVTSGGSGNCRTGGTTYYQEVNPMINSWGVRLRT

SEQ ID NO: 50742 - protein, 188 aa, unidentified
ADIIGGLAYYMGGRCSVGFAATNASGQPGFVTAGHCGRVGTQVTIGNGRGVFERSVFPGNDAAFVRGTSNFTLTNLVSRYNSGGYATVSGSSVAPIGSSVCRSGSTTGWRCGTIQARGQTVTYPQGTIYNMTRTSACAEPGDSGGSFISGTQAQGVTSGGSGNCSWGGTTFYQEVNPMLNSWNLRLRT

SEQ ID NO: 50743 - protein, 188 aa, Nocardiopsis
ADIIGGLAYTMGGRCSVGFAATNASGQPGFVTAGHCGSVGTQVSIGNGRGVFERSVFPGNDAAFVRGTSNFTLTNLVSRYNSGGYATVSGSSTAPIGSQVCRSGSTTGWYCGTIQARNQTVSYPQGTVHSLTRTSVCAEPGDSAGSFISGTQAQGVTSGGSGNCRTGGTTFYQEVNPMLNSWNLRLRT

SEQ ID NO: 50744 - protein, 565 aa, Trametes sp.
MVATGLLVASLFTLVLGTPTARNLKLHESREEIPAGFSLSGAASPDTTLKLRLALVQSNFAELEDKLYDVSTPSSANYGQHLSKEEVEQLVAPSAESVNAVNAWLTENGLTAQTISPAGDWLAFEVPVSKANELFDADFSVFTHDESGLKAVRTLAYSIPAELQGHLDLVHPTITFPNPNSHLPVVRSPVKPVQNLTSRAVPASCASTITPACLQALYGIPTTKATQSSNKLAVSGFIDQFANSADLKTFLGKFRTDISSSTTFTLQTLDGGSNSQSSSQAGVEANLDIQYTVGLASAVPTIFISVGDDFQDGDLEGFLDIINFLLNESAPPQVLTTSYGQNENTISAKLANQLCNAYAQLGARGTSILFASGDGGVSGSQSSSCSKFVPTFPSGCPFMTSVGATQGINPETAADFSSGGFSNVFARPSYQSTAVSSYLTALGSTNSGKFNTSGRAFPDIATQGVDFEIVVSGRTEGVDGTSCASPTLAAIISLLNDRLIAAGKSPLGFLNPFLYSAAGTAALTDITSGSNPGCNTNGFPAKAGWDPVTGLGTPNFAKLLTAVGL

SEQ ID NO: 50745 - protein, 548 aa, Trametes cf. versicolor
TPTARNLKLHESREEIPAGFSLSGAASPDTTLKLRLALVQSNFAELEDKLYDVSTPSSANYGQHLSKEEVEQLVAPSAESVNAVNAWLTENGLTAQTISPAGDWLAFEVPVSKANELFDADFSVFTHDESGLKAVRTLAYSIPAELQGHLDLVHPTITFPNPNSHLPVVRSPVKPVQNLTSRAVPASCASTITPACLQALYGIPTTKATQSSNKLAVSGFIDQFANSADLKTFLGKFRTDISSSTTFTLQTLDGGSNSQSSSQAGVEANLDIQYTVGLASAVPTIFISVGDDFQDGDLEGFLDIINFLLNESAPPQVLTTSYGQNENTISAKLANQLCNAYAQLGARGTSILFASGDGGVSGSQSSSCSKFVPTFPSGCPFMTSVGATQGINPETAADFSSGGFSNVFARPSYQSTAVSSYLTALGSTNSGKFNTSGRAFPDIATQGVDFEIVVSGRTEGVDGTSCASPTLAAIISLLNDRLIAAGKSPLGFLNPFLYSAAGTAALTDITSGSNPGCNTNGFPAKAGWDPVTGLGTPNFAKLLTAVGL

SEQ ID NO: 50746 - protein, 366 aa, Trametes sp.
AVPASCASTITPACLQALYGIPTTKATQSSNKLAVSGFIDQFANSADLKTFLGKFRTDISSSTTFTLQTLDGGSNSQSSSQAGVEANLDIQYTVGLASAVPTIFISVGDDFQDGDLEGFLDIINFLLNESAPPQVLTTSYGQNENTISAKLANQLCNAYAQLGARGTSILFASGDGGVSGSQSSSCSKFVPTFPSGCPFMTSVGATQGINPETAADFSSGGFSNVFARPSYQSTAVSSYLTALGSTNSGKFNTSGRAFPDIATQGVDFEIVVSGRTEGVDGTSCASPTLAAIISLLNDRLIAAGKSPLGFLNPFLYSAAGTAALTDITSGSNPGCNTNGFPAKAGWDPVTGLGTPNFAKLLTAVGL

SEQ ID NO: 50747 - protein, 188 aa, Synthetic construct
ADIIGGLAYYMGGRCSVGFAATNASGQPGFVTAGHCGTVGTPVSIGNGKGVFERSIFPGNDSAFVRGTSNFTLTNLVSRYNSGGYATVAGHNQAPIGSAVCRSGSTTGWHCGTIQARNQTVRYPQGTVYSLTRTTVCAEPGDSGGSYISGTQAQGVTSGGSGNCSAGGTTYYQEVNPMLSSWGLTLRT

SEQ ID NO: 50748 - protein, 188 aa, Nocardiopsis alkaliphila
ADIIGGLAYTMGGRCSVGFAATNSSGQPGFVTAGHCGSVGTGVTIGNGRGVFERSIFPGNDAAFVRGTSNFTLTNLVSRYNSGGYATVSGSSAAPIGSQVCRSGSTTGWHCGTIQARNQTVRYPQGTVQALTRTSVCAEPGDSGGSFISGSQAQGVTSGGSGNCRTGGTTYYQEVNPMLNSWGLRLRT

SEQ ID NO: 50749 - protein, 565 aa, Trametes versicolor
MVATSLLVASLFTLVLGTPTARNLKLHESREEIPAGFSLSGAASPDTTLKLRLALVQSNFAELEDKLYDVSTPSSANYGQHLSKEEVEQLVAPSAASVAAVNAWLTENGLTAQTISPAGDWLAFEVPVSQANELFDADFSVFTHDESGLQAVRTLAYSIPAELQGHLDLVHPTITFPNPNSHLPVVRSPVKPIQNLTSRAVPASCASTITPACLQALYGIPTTKATQSSNKLAVSGFIDQFANSADLKTFLGKFRTDISSSTTFTLQTLDGGSNSQSSSQAGVEANLDVQYAIGIATGVPTTFISVGDDFQDGDLEGFLDIINFLLNESAPPQVLTTSYGQNENTISAKLANQLCNAYAQLGARGTSILFASGDGGVAGSQTSSCTKFLPTFPSGCPFMTSVGATQGINPETAADFSSGGFSNVFARPSYQSTAVSSYLTALGSTNSGKFNTSGRAFPDIATQGVDFEIVVGGRTEGVDGTSCASPTLAAIISLLNDRLIAAGKSPLGFLNPFLYSAAGAAALTDITSGSNPGCGTNGFPAKAGWDPVTGLGTPNFAKLLTAVGL

SEQ ID NO: 50750 - protein, 366 aa, Trametes versicolor
AVPASCASTITPACLQALYGIPTTKATQSSNKLAVSGFIDQFANSADLKTFLGKFRTDISSSTTFTLQTLDGGSNSQSSSQAGVEANLDVQYAIGIATGVPTTFISVGDDFQDGDLEGFLDIINFLLNESAPPQVLTTSYGQNENTISAKLANQLCNAYAQLGARGTSILFASGDGGVAGSQTSSCTKFLPTFPSGCPFMTSVGATQGINPETAADFSSGGFSNVFARPSYQSTAVSSYLTALGSTNSGKFNTSGRAFPDIATQGVDFEIVVGGRTEGVDGTSCASPTLAAIISLLNDRLIAAGKSPLGFLNPFLYSAAGAAALTDITSGSNPGCGTNGFPAKAGWDPVTGLGTPNFAKLLTAVGL

SEQ ID NO: 50751 - protein, 364 aa, Lenzites betulinus
IPASCASTITPACLQDIYGIPTTKATQSSNKLAVSGFIDQFANSADLATFLKKFRTDISSTTTFALQTLDGGSNSQSGSQAGVEANLDIQYTVGLASGVPVTFISVGDNFQDGDLEGFLDIINFLLAESAPPQVLTTSYGQNENTISVKLANQLCNAYAQLGARGTSILFASGDGGVSGSQSSSCSKFVPTFPSGCPFMTSVGATQGVNPETAADFSSGGFSNYFGIPSYQATAVKTYLTALGTTNSGKFNTSGRAFPDVSTQGVDFEIVVDGRTEGVDGTSCASPTFAAIISLVNDKLIAAGKSPLGFLNPFLYSTGASAFTDITSGSNPGCNTKGFPAKAGWDPVTGLGTPNFAKLLAAAGV

SEQ ID NO: 50752 - protein, 188 aa, Nocardiopsis alba
ADIIGGLAYTMGGRCSVGFAATNASGQPGFVTAGHCGTVGTPVSIGNGQGVFERSVFPGNDSAFVRGTSNFTLTNLVSRYNTGGYATVSGSSQAAIGSQICRSGSTTGWHCGTVQARGQTVSYPQGTVQNLTRTNVCAEPGDSGGSFISGSQAQGVTSGGSGNCSFGGTTYYQEVNPMLSSWGLTLRT

SEQ ID NO: 50753 - protein, 547 aa, Lenzites betulinus
PMGRNLKVHEAREEIPDGFSLQGSAAPDTTLKLRIALVQSNFAELEQKLYDVSTPSSPNYGAHLSKEEVEQLVAPSADSVDAVNAWLKENDLSAQTISPAGDWLAFEVPVSKANELFDADFSVFTHDQTGLEAIRTMSYSIPAELQGHLDLVHPTVTFPNPYSHLPVVRSPIKASQNLTSRATIPASCASTITPACLQDIYGIPTTKATQSSNKLAVSGFIDQFANSADLATFLKKFRTDISSTTTFALQTLDGGSNSQSGSQAGVEANLDIQYTVGLASGVPVTFISVGDNFQDGDLEGFLDIINFLLAESAPPQVLTTSYGQNENTISVKLANQLCNAYAQLGARGTSILFASGDGGVSGSQSSSCSKFVPTFPSGCPFMTSVGATQGVNPETAADFSSGGFSNYFGIPSYQATAVKTYLTALGTTNSGKFNTSGRAFPDVSTQGVDFEIVVDGRTEGVDGTSCASPTFAAIISLVNDKLIAAGKSPLGFLNPFLYSTGASAFTDITSGSNPGCNTKGFPAKAGWDPVTGLGTPNFAKLLAAAGV

SEQ ID NO: 50754 - protein, 565 aa, Lenzites betulinus
MVATSLFVAALITLAVGKPMGRNLKVHEAREEIPDGFSLQGSAAPDTTLKLRIALVQSNFAELEQKLYDVSTPSSPNYGAHLSKEEVEQLVAPSADSVDAVNAWLKENDLSAQTISPAGDWLAFEVPVSKANELFDADFSVFTHDQTGLEAIRTMSYSIPAELQGHLDLVHPTVTFPNPYSHLPVVRSPIKASQNLTSRATIPASCASTITPACLQDIYGIPTTKATQSSNKLAVSGFIDQFANSADLATFLKKFRTDISSTTTFALQTLDGGSNSQSGSQAGVEANLDIQYTVGLASGVPVTFISVGDNFQDGDLEGFLDIINFLLAESAPPQVLTTSYGQNENTISVKLANQLCNAYAQLGARGTSILFASGDGGVSGSQSSSCSKFVPTFPSGCPFMTSVGATQGVNPETAADFSSGGFSNYFGIPSYQATAVKTYLTALGTTNSGKFNTSGRAFPDVSTQGVDFEIVVDGRTEGVDGTSCASPTFAAIISLVNDKLIAAGKSPLGFLNPFLYSTGASAFTDITSGSNPGCNTKGFPAKAGWDPVTGLGTPNFAKLLAAAGV

SEQ ID NO: 50755 - protein, 188 aa, Nocardiopsis sp.
ANIIGGLAYTMGGRCSVGFAATNSAGQPGFVTAGHCGTVGTAVTIGDGRGVFERSVFPGNDAAFVRGTSNFTLTNLVSRYNSGGHQAVTGTSQAPAGSAVCRSGSTTGWHCGTIQARNQTVRYPQGTVNALTRTNVCAEPGDSGGSFISGSQAQGVTSGGSGNCSFGGTTYYQEVAPMINSWGVRIRT

SEQ ID NO: 50756 - protein, 188 aa, Nocardiopsis dassonvillei
ADIIGGLAYYMGGRCSVGFAATNSAGQPGFVTAGHCGTVGTGVTIGNGTGTFQNSVFPGNDAAFVRGTSNFTLTNLVSRYNSGGYQSVTGTSQAPAGSAVCRSGSTTGWHCGTIQARNQTVRYPQGTVYSLTRTNVCAEPGDSGGSFISGSQAQGVTSGGSGNCSVGGTTYYQEVTPMINSWGVRIRT

SEQ ID NO: 50757 - protein, 188 aa, Nocardiopsis lucentensis
ANIIGGLAYYMSSGGRCSVGFPATNSSGQPGFVTAGHCGTVGTGVTIGNGRGTFERSVFPGNDAAFVRGTSNFTLYNLVYRYSGYQTVTGSNAAPIGSSICRSGSTTGWHCGTIQARNQTVRYPQGTVYYLTRTNVCAEPGDSGGSFISGTQAQGMTSGGSGNCSSGGTTFYQEVDPVESAWGVRLRT

SEQ ID NO: 50758 - protein, 365 aa, Dichomitus squalens
AIPSSCSSTITPACLQAIYNIPTTAATESSNQLGVTGFIDQYANKKDLKTFLKKYRTDISSSTTFTLQTLDGGSNSQTGSKAGVEANLDIQYTVGVATGVPTTFISVGDDFQDGDLEGFLDVINALLDEDAPPSVLTTSYGQDESTISRALAVKLCNAYAQLGARGVSILFASGDGGVSGSQSASCSKFVPTFPSGCPYMTSVGATQGVNPETAADFSSGGFSNYWGVPDYQSDAVSTYLSALGKTNSGKYNASGRGFPDVSTQGVSFEVVVDGSVEAVDGTSCASPTFASIISLVNDKLVAAGKSPLGFLNPFLYSDGVAALNDITSGSNPGCNTNGFPAKKGWDPVTGLGTPDFKKLLTAVGL

SEQ ID NO: 50759 - protein, 364 aa, Polyporus arcularius
IPSSCARTITPACLQAIYNIPSTPATESSNKLAVTGFIEQFANKADLKTFLTRFRTDISSSTSFTLQTLDGGSNPQSSSEAGVEANLDIQYTVGVATGVPTVFISVGEDFQDGDLEGFLDVVNSLLDEDTPPFVMTTSYGQNENTISRNLANNLCNAYAQLGARGVSILFASGDGGVAGSQSASCSKFVPTFPSGCPFMTSVGATQGFSPETAADFSSGGFSNYFAIPDYQTSAVSGYIKALGNTNSGKYNATGRGFPDIATQGVNFEVVVGGQSGTVEGTSCSSPTLASIISLLNDRLIAAGKSPLGFLNPFLYSTGTSALNDITSGSNPGCNTNGFPAKAGWDPVTGLGTPDFNKLLSAVGL

SEQ ID NO: 50760 - protein, 568 aa, Grifola frondosa
MITSSFLVVSLFTLALSKPMSRSMKVHETREGIPDGFALAGSPSSDTSLNLRIALVQNDPAGLETALYDVNTPSSANYGNHLSKAEVEKFVAPEPESVDAVNAWLEENGLTATTISPAGDWLAFEVPVSKANELFDADFSVYTHTDTGLEAIRTLSYSIPAELQGHLDLVHPTITFPNPYSRLPVVASSIKTAAPTSDNLTSLAVPSSCASTITPACLQALYGIPTTPATQSSNKLAVSGYIEQFANQADLKTFLTKFRTDISSSTTFTTQTLDGGENPQNGNEAGVEADLDVQYTVGLATDVPTVFISVGDNFQDGALEGFLDIINFLLDESTPPQVLTTSYGQNENTISRNLANNLCNAYAQLGARGTSILFASGDGGVSGSQSDSCSKFVPTFPSGCPFMTSVGATTGINPETAADFSSGGFSNYFGTPSYQASAHSAYLQALGSTNAGKFNTSGRGFPDVSTQGENFQIVVDGQTGTVDGTSCASPTFASVVSLLNDRLIAAGKSPLGFLNPFLYSTGASAFNSITSGSNPGCNTNGFPAKTGWSPVTGLGTPNFAKLLTAVGL

SEQ ID NO: 50761 - protein, 548 aa, Polyporus arcularius
PMARSMKLHESREGIPEGFSLRGAAQPEQTIKLRLALVQSNFAELERKLMDVSTPSSANYGKHLSKAEVQQLVAPTQDSVDAVKSWLKENDISAKTISATGDWLSFEVPVSKANELFDADFSIYTHDETGTEAVRTLSYSIPAELQGHLDLVHPTVTFPNPRGLPPVFTAPIKAEAQNLTSRATIPSSCARTITPACLQAIYNIPSTPATESSNKLAVTGFIEQFANKADLKTFLTRFRTDISSSTSFTLQTLDGGSNPQSSSEAGVEANLDIQYTVGVATGVPTVFISVGEDFQDGDLEGFLDVVNSLLDEDTPPFVMTTSYGQNENTISRNLANNLCNAYAQLGARGVSILFASGDGGVAGSQSASCSKFVPTFPSGCPFMTSVGATQGFSPETAADFSSGGFSNYFAIPDYQTSAVSGYIKALGNTNSGKYNATGRGFPDIATQGVNFEVVVGGQSGTVEGTSCSSPTLASIISLLNDRLIAAGKSPLGFLNPFLYSTGTSALNDITSGSNPGCNTNGFPAKAGWDPVTGLGTPDFNKLLSAVGL

SEQ ID NO: 50762 - protein, 567 aa, Polyporus arcularius
MVATRGLFFVSLFALALGKPMARSMKLHESREGIPEGFSLRGAAQPEQTIKLRLALVQSNFAELERKLMDVSTPSSANYGKHLSKAEVQQLVAPTQDSVDAVKSWLKENDISAKTISATGDWLSFEVPVSKANELFDADFSIYTHDETGTEAVRTLSYSIPAELQGHLDLVHPTVTFPNPRGLPPVFTAPIKAEAQNLTSRATIPSSCARTITPACLQAIYNIPSTPATESSNKLAVTGFIEQFANKADLKTFLTRFRTDISSSTSFTLQTLDGGSNPQSSSEAGVEANLDIQYTVGVATGVPTVFISVGEDFQDGDLEGFLDVVNSLLDEDTPPFVMTTSYGQNENTISRNLANNLCNAYAQLGARGVSILFASGDGGVAGSQSASCSKFVPTFPSGCPFMTSVGATQGFSPETAADFSSGGFSNYFAIPDYQTSAVSGYIKALGNTNSGKYNATGRGFPDIATQGVNFEVVVGGQSGTVEGTSCSSPTLASIISLLNDRLIAAGKSPLGFLNPFLYSTGTSALNDITSGSNPGCNTNGFPAKAGWDPVTGLGTPDFNKLLSAVGL

SEQ ID NO: 50763 - protein, 365 aa, Neolentinus lepideus
SVPSSCGSTITPTCLQDLYGIPTTAATQSSNKLAVSGFIDQYANKADLKSFLTTYRKDISSSTTFTLETIDGGENPQDGSDAGVEANLDTQYTVGLATGVPTYFISVGDDYQDGDLEGFLDIVNYLLSMDQPQQVLTTSYGQNENTMSRSLANNLCNAYMQLGARGTSILFASGDGGVSGSQSGSCGSKFVPTFPSGCPYLTSVGATTGINPEVAASFSSGGFSNYWGVPSYQQSVVSSYISGLGSTNKGKYNSSGRGFPDVSAQGENVEIVVDGSTEGVDGTSCSSPIFASIVSLLNDELIAAGKSPLGFLNPFLYSDGASAFNDITSGDNPGCNTNGFSAKSGWDPVTGLGTPNYAKLRTAVG

SEQ ID NO: 50764 - protein, 549 aa, Dichomitus squalens
PTARNLKLHESRPSAPNGFSLVGSADSNRTLKLRLALAESNFSELERKLYDVSTPKSANYGKHLSKAEVQQLVAPGQDSIDAVNAWLKENDITAKTISSTGEWISFEVPVSKANDLFDADFSVFKHDDTGVEAIRTLSYSIPAELQGHLDLVHPTVTFPNPYSHLPVFQSPVKKTAEIQNFTAGAIPSSCSSTITPACLQAIYNIPTTAATESSNQLGVTGFIDQYANKKDLKTFLKKYRTDISSSTTFTLQTLDGGSNSQTGSKAGVEANLDIQYTVGVATGVPTTFISVGDDFQDGDLEGFLDVINALLDEDAPPSVLTTSYGQDESTISRALAVKLCNAYAQLGARGVSILFASGDGGVSGSQSASCSKFVPTFPSGCPYMTSVGATQGVNPETAADFSSGGFSNYWGVPDYQSDAVSTYLSALGKTNSGKYNASGRGFPDVSTQGVSFEVVVDGSVEAVDGTSCASPTFASIISLVNDKLVAAGKSPLGFLNPFLYSDGVAALNDITSGSNPGCNTNGFPAKKGWDPVTGLGTPDFKKLLTAVGL

SEQ ID NO: 50765 - protein, 190 aa, Nocardiopsis kunsanensis
ANIVGGDAYTIGGSSRCSVGFPASDSYGQPGFVTAGHCGTTGSSVSIGNGSGVFSQSVFPGNDAAFVRGTSNFSLTNLVNRYNSGSDVAVSGSTQAPIGSQVCRSGSTTGWHCGTIQARGQTVSYPQGTVRDLTRTSVCAEPGDSGGSFISGSQAQGVTSGGSGNCSWGGTTYYQEVNPMLNSWNLNLST

SEQ ID NO: 50766 - protein, 567 aa, Dichomitus squalens
MVASGLFLASLIALALGKPTARNLKLHESRPSAPNGFSLVGSADSNRTLKLRLALAESNFSELERKLYDVSTPKSANYGKHLSKAEVQQLVAPGQDSIDAVNAWLKENDITAKTISSTGEWISFEVPVSKANDLFDADFSVFKHDDTGVEAIRTLSYSIPAELQGHLDLVHPTVTFPNPYSHLPVFQSPVKKTAEIQNFTAGAIPSSCSSTITPACLQAIYNIPTTAATESSNQLGVTGFIDQYANKKDLKTFLKKYRTDISSSTTFTLQTLDGGSNSQTGSKAGVEANLDIQYTVGVATGVPTTFISVGDDFQDGDLEGFLDVINALLDEDAPPSVLTTSYGQDESTISRALAVKLCNAYAQLGARGVSILFASGDGGVSGSQSASCSKFVPTFPSGCPYMTSVGATQGVNPETAADFSSGGFSNYWGVPDYQSDAVSTYLSALGKTNSGKYNASGRGFPDVSTQGVSFEVVVDGSVEAVDGTSCASPTFASIISLVNDKLVAAGKSPLGFLNPFLYSDGVAALNDITSGSNPGCNTNGFPAKKGWDPVTGLGTPDFKKLLTAVGL

SEQ ID NO: 50767 - protein, 567 aa, Dichomitus squalens
MVASGLFLASLIALALGKPTARNLKLHESRPSAPNGFSLVGSADSNRTLKLRLALAESNFSELERKLYDVSTPKSANYGKHLSKAEVQQLVAPGQDSIDAVNSWLKENDITAKTISSTGEWISFEVPVSKANDLFDADFSVFKHDDTGVEAIRTLSYSIPAELQGHLDLVHPTVTFPNPYSHLPVFQSPVKKTAEIQNFTAGAIPSSCSSTITPACLQAIYNIPTTAATESSNQLGVTGFIDQYANKKDLKTFLKKYRTDISSSTTFTLQTLDGGSNSQTGSKAGVEANLDIQYTVGVATGVPTTFISVGDDFQDGDLEGFLDVINALLDEDAPPSVLTTSYGQDESTISRALAVKLCNAYAQLGARGVSILFASGDGGVSGSQSASCSKFVPTFPSGCPYMTSVGATQGVNPETAADFSSGGFSNYWGVPDYQSDAVSTYLSALGKTNSGKYNASGRGFPDVSTQGVSFEVVVDGSVEAVDGTSCASPTFASIISLVNDKLVAAGKSPLGFLNPFLYSDGVAALNDITSGSNPGCNTNGFPAKKGWDPVTGLGTPDFKKLLTAVGL

SEQ ID NO: 50768 - protein, 363 aa, Ganoderma lucidum
AVPSSCSSRITPACLQALYNIPSDPATQPSNKLAVTGYIEQYANQDDLAVFLKEYRADMSSNTTFTLQTLDGGVNSQTDEAGIEANLDVQYTVGIATGVPTVFISVGDQYQDGNLEGFLDVVNFLLDEDTPPYVMTTSYGQDEHTMSRKLAQNLCNAYAQLGARGVSILFASGDGGVAGSRSSSCSKFVPTFPSGCPYMTSVGATQGVPETAADFSSGGFSNYFGIPDYQASAVSGYLSALGHTNKGKYNASGRGFPDVSTQGVNFEVMVDGALEGVSGTSAASPTFAAVVALLNDRLIAAGKSPLGFLNPFLYSKGVSALNDITSGSNPGCRTNGFPAKEGWDPVTGLGTPDFQKLASAAGL

SEQ ID NO: 50769 - protein, 552 aa, Cinereomyces lindbladii
PTARNLLVHESLDGVPTGFQLVGPASPDTVLSMRIALVQSDPAGLEAALYDVSTPSSASYGNHLSKAEVEKFVSPTSESVQAVNAWLTENDLTATQLSPAGDWLGFEVPVSKAEDLFGTQFSVFTHEATGMQTVRTLSYSIPSELQGHLDLVFPTINFPDPNANLPVFRHASKKREVTTLNANLTSDAVPSSCADTITPACLQALYGIPTTPATSSTNQLGVSGFIDQFANQADLKTFLQNFRTDISSSTTFSLETLDGGSNSQNRGDAGVEANLDTQYTVGLATDVPTVFISVGEDNQDGSLGGFLDIINFLLDQDSPPQVLTTSYGQNENTVSRAVANNLCNAYAQLGARGTSILFASGDGGVSGSQSASCRTFVPTFPSGCPFMTSVGATTGINPETAATFSAGGFSNYFGTPSYQASAVSSYLAALGSTNSGKFNTSGRGYPDVSTQGENFEIVVSGEEEGVDGTSCASPTFASIISLVNDRLIAAGKPPLGFLNPFLYSTGASAFTDITTGDNPGCNTNGFPAKSGWDPVTGLGTPNFSKLLTAVGL

SEQ ID NO: 50770 - protein, 545 aa, Neolentinus lepideus
PAPRNLVLHESRDGVPEGFVKSSTASPDTTLKLRIALVQGDMASLEKALYDVSVPSSPLYGQHLSKQEVEEYVKPTQESVDAVNQWLSSEGITANTISPAGDWLQFSVPVSKANEMFDADFSVFTHTESGQQAIRTLSYSIPKELVGHLDLVHPTITFPNPYSHLPVVSSPAPRNLTIDASVPSSCGSTITPTCLQDLYGIPTTAATQSSNKLAVSGFIDQYANKADLKSFLTTYRKDISSSTTFTLETIDGGENPQDGSDAGVEANLDTQYTVGLATGVPTYFISVGDDYQDGDLEGFLDIVNYLLSMDQPQQVLTTSYGQNENTMSRSLANNLCNAYMQLGARGTSILFASGDGGVSGSQSGSCGSKFVPTFPSGCPYLTSVGATTGINPEVAASFSSGGFSNYWGVPSYQQSVVSSYISGLGSTNKGKYNSSGRGFPDVSAQGENVEIVVDGSTEGVDGTSCSSPIFASIVSLLNDELIAAGKSPLGFLNPFLYSDGASAFNDITSGDNPGCNTNGFSAKSGWDPVTGLGTPNYAKLRTAVG

SEQ ID NO: 50771 - protein, 564 aa, Neolentinus lepideus
MVALSTALLASLVALACAGPAPRNLVLHESRDGVPEGFVKSSTASPDTTLKLRIALVQGDMASLEKALYDVSVPSSPLYGQHLSKQEVEEYVKPTQESVDAVNQWLSSEGITANTISPAGDWLQFSVPVSKANEMFDADFSVFTHTESGQQAIRTLSYSIPKELVGHLDLVHPTITFPNPYSHLPVVSSPAPRNLTIDASVPSSCGSTITPTCLQDLYGIPTTAATQSSNKLAVSGFIDQYANKADLKSFLTTYRKDISSSTTFTLETIDGGENPQDGSDAGVEANLDTQYTVGLATGVPTYFISVGDDYQDGDLEGFLDIVNYLLSMDQPQQVLTTSYGQNENTMSRSLANNLCNAYMQLGARGTSILFASGDGGVSGSQSGSCGSKFVPTFPSGCPYLTSVGATTGINPEVAASFSSGGFSNYWGVPSYQQSVVSSYISGLGSTNKGKYNSSGRGFPDVSAQGENVEIVVDGSTEGVDGTSCSSPIFASIVSLLNDELIAAGKSPLGFLNPFLYSDGASAFNDITSGDNPGCNTNGFSAKSGWDPVTGLGTPNYAKLRTAVG

SEQ ID NO: 50772 - protein, 546 aa, Ganoderma lucidum
TTRNLKLHETRQGAPSGFSHTGSADPNQTLKLRLALVQGNTAELERKLYDVSTPSSANYGKHLSKEEVRQLVAPAQGSVDAVNAWLRENGITAKSTSAAGDWLSFEVPVSKANELFDADFSVFKHDDTGVKAVRTLSYSIPAELQGHLDLVHPTVTFPNPNGHMPVFQAPVKDTDAVQNFSARAVPSSCSNTITPACLQALYNIPSDAATQSSNKLAVTGFIEQYANQVDLAVFLKQYRADISSNTTFALQTLDGGSNSQTNVPGVEANLDIQYTVGIATGVPTVFISVGDQYQDGDLEGFLDVINFLLDEDTPPYVVTTSYGQDEHTISRKLAQNLCNAYAQLGARGVSILFASGDGGVAGSRSNSCSKFVPTFPSGCPYMTSVGATQGVPETAADFSSGGFSNYFGTPDYQASAVKSYLSTLGSTNRGKFNASGRGFPDVATQGVNFEVIVDGEVEGVSGTSAASPMFAAIVALLNDKLIAAGKSPLGFLNPFLYSKGVEALNDITTGSNPGCGTIGFPAKEGWDPVTGLGTPDFQKLASAAGL

SEQ ID NO: 50773 - protein, 544 aa, Ganoderma lucidum
RNLKLHETSQGAPSGFSLTGSADPDQTLKLRLALVQGNVAELERRLYDVSTPSSPNYGKHLSKSEVQQLVAPAQDSIDAINAWLKENGISAKTTSATGDWLSFEVPVSKANELFDADFSVYKHHDTGMEVVRTLSYSIPAELQAHLDLVHPTVTFPNPKGHPPVFQAPAMITNDVQNFSAGAVPSSCSSRITPACLQALYNIPSDPATQPSNKLAVTGYIEQYANQDDLAVFLKEYRADMSSNTTFTLQTLDGGVNSQTDEAGIEANLDVQYTVGIATGVPTVFISVGDQYQDGNLEGFLDVVNFLLDEDTPPYVMTTSYGQDEHTMSRKLAQNLCNAYAQLGARGVSILFASGDGGVAGSRSSSCSKFVPTFPSGCPYMTSVGATQGVPETAADFSSGGFSNYFGIPDYQASAVSGYLSALGHTNKGKYNASGRGFPDVSTQGVNFEVMVDGALEGVSGTSAASPTFAAVVALLNDRLIAAGKSPLGFLNPFLYSKGVSALNDITSGSNPGCRTNGFPAKEGWDPVTGLGTPDFQKLASAAGL

SEQ ID NO: 50774 - protein, 565 aa, Ganoderma lucidum
MVASGLLLASLVTLALGKTATRNLKLHETSQGAPSGFSLTGSADPDQTLKLRLALVQGNVAELERRLYDVSTPSSPNYGKHLSKSEVQQLVAPAQDSIDAINAWLKENGISAKTTSATGDWLSFEVPVSKANELFDADFSVYKHHDTGMEVVRTLSYSIPAELQAHLDLVHPTVTFPNPKGHPPVFQAPAMITNDVQNFSAGAVPSSCSSRITPACLQALYNIPSDPATQPSNKLAVTGYIEQYANQDDLAVFLKEYRADMSSNTTFTLQTLDGGVNSQTDEAGIEANLDVQYTVGIATGVPTVFISVGDQYQDGNLEGFLDVVNFLLDEDTPPYVMTTSYGQDEHTMSRKLAQNLCNAYAQLGARGVSILFASGDGGVAGSRSSSCSKFVPTFPSGCPYMTSVGATQGVPETAADFSSGGFSNYFGIPDYQASAVSGYLSALGHTNKGKYNASGRGFPDVSTQGVNFEVMVDGALEGVSGTSAASPTFAAVVALLNDRLIAAGKSPLGFLNPFLYSKGVSALNDITSGSNPGCRTNGFPAKEGWDPVTGLGTPDFQKLASAAGL

SEQ ID NO: 50775 - protein, 191 aa, Nocardiopsis prasina
ADIVGGDAYYMGGGRCSVGFAATDSAGNDGFVTAGHCGTVGTSADSEDGSGSGVFEESIFPGNDAAFVRSTSNWTVTNLVNMYSSGGTQSVGGSTQAPVGAAVCRSGSTTGWHCGTIEARGQSVSYPEGTVNDMTRTNVCAEPGDSGGSFISDDQAQGMTSGGSGNCTSGGTTYYQEVGPALSTWNLSLVT

SEQ ID NO: 50776 - protein, 540 aa, Ganoderma lucidum
PTARNLRLHETRQGAPSGFSLTGSADPNQTVRLRLALVQGNTGELERKLYDVSTPSSANYGKHLSKAEVQQLVAPAQGSIDAVNAWLKENDITAKTISATGDWLSFEVPVNKANELFDADFSVFKHDDTGMEAVRTLSYSIPAELQGHLDLVHPTVTFPNPKGNLPLFQTPIKSKRDVPADCSNNITPACLQALYNIPSDAATQSSNTLAVTGYIEQYANQQDLTSFLGQFRPDISSNTTFALQTIDGGSNSQNGSDAGGEANLDIQYTVGLATGVPTVFISVGEQYQDGDLGGLLDVINFVLAEDAPPNVITTSYGQNENTISLKLAQNLCNAYAQLGARGVSILFASGDGGVAGSQSDNCTQFVPTFPSGCPYMTSVGATQGVPETAADFSTGGFSNLFSVPDYQAAAVQSYLSALGGTYQGLFNASGRAFPDVSTQGVNFETVVDGSVSGASGTSAASPTFAAIVALLNDRLVAAGKSPLGFLNPFLYSTGASALNDIATGSNPGCGTNGFSAQKGWDPVTGLGTPDFQKLAAAAGL

SEQ ID NO: 50777 - protein, 191 aa, Nocardiopsis prasina
ADIVGGDAYYMGGGRCSVGFAVTDSSGNDGFVTAGHCGTVGTSADSEDGSGSGVFEESIFPGNDAAFVSSTSNWTVTNLVNMYSSGGTQSVGGSSQAPVGAAVCRSGSTTGWHCGSIEARGQSVSYPEGTVTDMTRTDVCAEPGDSGGSFIADDQAQGMTSGGSGNCSSGGTTYYQEVGPALSTWNLSLVT

SEQ ID NO: 50778 - protein, 221 aa, Bacillus licheniformis
SVIGSDDRTRVTNTTAYPYRAIVHISSSIGSCTGWMIGPKTVATAGHCIYDTSSGSFAGTATVSPGRNGTSYPYGSVKSTRYFIPSGWRSGNTNYDYGAIELSEPIGNTVGYFGYSYTTSSLVGTTVTISGYPGDKTAGTQWQHSGPIAISETYKLQYAMDTYGGQSGSPVFEQSSSRTNCSGPCSLAVHTGVYGGSSYNRGTRITKEVFDNLTNWKNSAQ

SEQ ID NO: 50779 - protein, 286 aa, Bacillus amyloliquefaciens
APSPHTPVSSDPSYKAETSVTYDPNIKSDQYGLYSKAFTGTGKVNETKEKAEKKSPAKAPYSIKSVIGSDDRTRVTNTTAYPYRAIVHISSSIGSCTGWMIGPKTVATAGHCIYDTSSGSFAGTATVSPGRNGTSYPYGSVKSTRYFIPSGWRSGNTNYDYGAIELSEPIGNTVGYFGYSYTTSSLVGTTVTISGYPGDKTAGTQWQHSGPIAISETYKLQYAMDTYGGQSGSPVFEQSSSRTNCSGPCSLAVHTNGVYGGSSYNRGTRITKEVFDNLTNWKNSAQ

SEQ ID NO: 50780 - protein, 222 aa, unidentified
SVIGSDDRTRVTNTTAYPYRAIVHISSSIGSCTGWMIGPKTVATAGHCIYDTSSGSFAGTATVSPGRNGTSYPYGSVKSTRYFIPSGWRSGNTNYDYGAIELSEPIGNTVGYFGYSYTTSSLVGTTVTISGYPGDKTAGTQWQHSGPIAISETYKLQYAMDTYGGQSGSPVFEQSSSRTNCSGPCSLAVHTNGVYGGSSYNRGTRITKEVFDNLTNWKNSAQ

SEQ ID NO: 50781 - protein, 316 aa, Synthetic construct; identical to SEQ ID NO: 82

SEQ ID NO: 50782 - protein, 315 aa, Synthetic construct
VSKKSVKRGLITGLIGISIYSLGMHPAQAAPSPHTPVSSDPSYKAETSVTYDPNIKSDQYGLYSKAFTGTGKVNETKEKAEKKSPAKAPYSIKSVIGSDDRTRVTNTTAYPYRAIVHISSSIGSCTGWMIGPKTVATAGHCIYDTSSGSFAGTATVSPGRNGTSYPYGSVKSTRYFIPSGWRSGNTNYDYGAIELSEPIGNTVGYFGYSYTTSSLVGTTVTISGYPGDKTAGTQWQHSGPIAISETYKLQYAMDTYGGQSGSPVFEQSSSRTNCSGPCSLAVHTNGVYGGSSYNRGTRITKEVFDNLTNWKNSAQ

SEQ ID NO: 50783 - protein, 316 aa, Bacillus licheniformis
MVSKKSVKRGLITGLIGISIYSLGMHPAQAAPSPHTPVSSDPSYKAETSVTYDPNIKSDQYGLYSKAFTGTGKVNETKEKAEKKSPAKAPYSIKSVIGSDDRTRVTNTTAYPYRAIVHISSSIGSCTGWMIGPKTVATAGHCIYDTSSGSFAGTATVSPGRNGTSYPYGSVKSTRYFIPSGWRSGNTNYDYGAIELSEPIGNTVGYFGYSYTTSSLVGTTVTISGYPGDKTAGTQWQHSGPIAISETYKLQYAMDTYGGQSGSPVFEQSSSRTNCSGPCSLAVHTNGVYGGSSYNRGTRITKEVFDNLTNWKNSAQ

SEQ ID NO: 50784 - protein, 316 aa, Bacillus licheniformis
LVSKKSVKRGLITGLIGISIYSLGMHPAQAAPSPHTPVSSDPSYKAETSVTYDPHIKSDQYGLYSKAFTGTGKVNETKEKAEKKSPAKAPYSIKSVIGSDDRTRVTNTTAYPYRAIVHISSSIGSCTGWMIGPKTVATAGHCIYDTSSGSFAGTATVSPGRNGTSYPYGSVKSTRYFIPSGWRSGNTNYDYGAIELSEPIGNTVGYFGYSYTTSSLVGTTVTISGYPGDKTAGTQWQHSGPIAISETYKLQYAMDTYGGQSGSPVFEQSSSRTNCSGPCSLAVHTNGVYGGSSYNRGTRITKEVFDNLTNWKNSAQ

SEQ ID NO: 50785 - protein, 315 aa, Bacillus licheniformis
MVSKKSVKRGLITGLIGISIYSLGMHPAQAAPSPHTPVSSDPSYKAETSVTYDPNIKSDQYGLYSKAFTGTGKVNETKEKAEKKSPAKAPYSIKSVIGSDDRTRVTNTTAYPYRAIVHISSIGSCTGWMIGPKTVATAGHCIYDTSSGSFAGTATVSPGRNGTSYPYGSVKSTRYFIPSGWRSGNTNYDYGAIELSEPIGNTVGYFGYSYTTSSLVGTTVTISGYPGDKTAGTQWQHSGPIAISETYKLQYAMDTYGGQSGSPVFEQSSSRTNCSGPCSLAVHTNGVYGGSSYNRGTRITKEVFDNLTNWKNSAQ

SEQ ID NO: 50786 - protein, 222 aa, Bacillus licheniformis
SVIGSDDRTRVTNTTAYPYRAIVHISSSIGSCTGWMIGPKTVATAGHCIYDTSSGSFAGTATVSPGRNGTSYPYGSVKSTRYFIPSGWRSGNTNYDYGAIELSEPIGNTVGYFGYSYTTSSLVGTTVTISGYPGDKTAGTQWQHSGPIAISETYKLQYAMDTYGGQSGSPVFEQSSSRTNCSGPCSLAVHGNGVYGGSSYNRGTRITKEVFDNLTNWKNSAQ

SEQ ID NO: 50787 - protein, 222 aa, Bacillus licheniformis
SVIGSDDRTRVTNTTAYPYRAIVHISSSIGSCTGWMIGPKTVATAGHCIYDTSSGSFAGTATVSPGRNGTSYPYGSVKSTRYFIPSGWRSGNTNYDYGAIELSEPIGNTVGYFGYSYTTSSLVGTTVTISGYPGDKTAGTQWQHSGPIAISRTYKLQYAMDTYGGQSGSPVFEQSSSRTNCSGPCSLAVHTNGVYGGSSYNRGTRITKEVFDNLTNWKNSAQ

SEQ ID NO: 50788 - protein, 222 aa, Bacillus licheniformis
SVIGSDDRTRVTNTTAYPYRAIVHISSSIGSCTGWMIGPKTVATAGHCIYDTSSGSFAGTATVSPGRNGTSYPYGSVKSTRYFIPSGWRSGNTNYDYGAIELSEPIGNTVGYFGYSYTTSSLVGTTVTISGYPGDKTAGTQWQHSGPIAISETYKLQYAMDTYGGQSGSPVFEQSSSRTNCSGPCSLAIHTNGVYGGSSYNRGTRITKEVFDNLTNWKNSAQ

SEQ ID NO: 50789 - protein, 222 aa, Bacillus licheniformis
SVIGSDDRTRVTNTTAYPYRAIVHISSSIGSCTGWMIGPKTVATAGHCIYDTSSGSFAGTATVSPGRNGTSYPYGSVKSTRYFIPSGWRSGNTNYDYGAIELSEPIGNTVGYFGYSYTTSSLVGTTVTISGYPGDKTAGTQWQHSGPIAISETYKLQYAMDTYGGQSGSPVFEQSSSRTNCSGPCSLAVMTNGVYGGSSYNRGTRITKEVFDNLTNWKNSAQ

SEQ ID NO: 50790 - protein, 222 aa, Bacillus licheniformis
SVIGSDDRTRVTNTTAYPYRAIVHISSSIGSCTGWMIGPKTVATAGHCIYDTSSGSFAGTATVSPGRNGTSYPYGSVKSTRYFIPSGWRSGNTNYDYGAIELSEPIGNTVGYFGYSYTTSSLVGTTVTISGYPGDKTAGTQWQHSGPIAISETYKLQFAMDTYGGQSGSPVFEQSSSRTNCSGPCSLAVHTNGVYGGSSYNRGTRITKEVFDNLTNWKNSAQ

SEQ ID NO: 50791 - protein, 222 aa, Bacillus licheniformis
SVIGSDDRTRVTNTTAYPYRAIVHISSSIGSCTGWMIGPKTVATAGHCIYDTSSGSFAGTATVSPGRNRTSYPYGSVKSTRYFIPSGWRSGNTNYDYGAIELSEPIGNTVGYFGYSYTTSSLVGTTVTISGYPGDKTAGTQWQHSGPIAISETYKLQYAMDTYGGQSGSPVFEQSSSRTNCSGPCSLAVHTNGVYGGSSYNRGTRITKEVFDNLTNWKNSAQ

SEQ ID NO: 50792 - protein, 222 aa, Bacillus licheniformis
SVIGSDDRTRVTNTTAYPYRAIVHISSSIGSCTGWMIGPKTVATAGHCIYDTSSGSFAGTATVSPGRNGTSYPYGSVKSTRYFIPSGWRSGNTNYDYGAIELSEPIGNTVGYFGYSYTTSSLVGTTVTISGYPGDKTAGTQWQHSGPIAISETYKLQYAMDTYGGQSGSPVFEQSSSRTNCSGPCSLAVHVNGVYGGSSYNRGTRITKEVFDNLTNWKNSAQ

SEQ ID NO: 50793 - protein, 222 aa, Bacillus licheniformis
SVIGSDDRTRVTNTTAYPYRAIVHISSSIGSCTGWMIGPKTVATAGHCIYDTSSGSFAGTATVSPGRNGTSYPYGSVKSTRYFIPSGWRSGNTNYDYGAIELSEPIGNTVGYFGYSYTTSSLVGTTVTISGYPGAKTAGTQWQHSGPIAISETYKLQYAMDTYGGQSGSPVFEQSSSRTNCSGPCSLAVHTNGVYGGSSYNRGTRITKEVFDNLTNWKNSAQ

SEQ ID NO: 50794 - protein, 222 aa, Bacillus licheniformis
SVIGSDDRTRVTNTTAYPYRAIVHISSSIGSCTGWMIGPKTVATAGHCIYDTSSGSFAGTATVSPGRNGTSYPYGSVKSTRYFIPSGWRSGNTNYDYGAIELSEPIGNTVGYFGYSYTTSSLVGTTVTISGYPGDKTAGTQWQHSGPIAISETYKLQYAMDTYGGQSGSPVFEQSSSRTNCSGPCSLAVHTNGVYGGSSYNRGTRITKEVFANLTNWKNSAQ

SEQ ID NO: 50795 - protein, 222 aa, Bacillus licheniformis
SVIGSDDRTRVTNTTAYPYRAIVHISSSIGSCTGWMIGPKTVATAGHCIYDTSSGSFAGTATVSPGRNGTSYPYGSVKSTRYFIPSGWRSGNTNYDYGAIELSEPIGNTVGYFGYSYTTSSLVGTTVTISGYPGDKTAGTQWQHSGPIAISETYKLQYAMDTYGGQAGSPVFEQSSSRTNCSGPCSLAVHTNGVYGGSSYNRGTRITKEVFDNLTNWKNSAQ

SEQ ID NO: 50796 - protein, 222 aa, Bacillus licheniformis
SVIGSDDRTRVTNTTAYPYRAIVHISSSIGSATGWMIGPKTVATAGHCIYDTSSGSFAGTATVSPGRNGTSYPYGSVKSTRYFIPSGWRSGNTNYDYGAIELSEPIGNTVGYFGYSYTTSSLVGTTVTISGYPGDKTAGTQWQHSGPIAISETYKLQYAMDTYGGQSGSPVFEQSSSRTNCSGPCSLAVHTNGVYGGSSYNRGTRITKEVFDNLTNWKNSAQ

SEQ ID NO: 50797 - protein, 222 aa, Bacillus licheniformis
SVIGSDDRTRVTNTTAYPYRAIVHISSSIGSCTGWMIGPKTVATAGHCIYDTSSGSFAGTATVSPGRNGTSYPYGSVKSTRYFIPSGWRSGNTNFDYGAIELSEPIGNTVGYFGYSYTTSSLVGTTVTISGYPGDKTAGTQWQHSGPIAISETYKLQYAMDTYGGQSGSPVFEQSSSRTNCSGPCSLAVHTNGVYGGSSYNRGTRITKEVFDNLTNWKNSAQ

SEQ ID NO: 50798 - protein, 222 aa, Bacillus licheniformis
SVIGSDDRTRVTNTTAYPYRAIVHISSSIGSCTGWMIGPKTVATAGHCIYDTSSGSFAGTATVSPGRNGTSYPYGSVKSTRYFIPSGWRSGNTNYDYGAIELSEPIGNTVGYFGYSYTTSSLVGTTVTISGYPGDKTAGTQWQHSGPIAISETYKLQYAADTYGGQSGSPVFEQSSSRTNCSGPCSLAVHTNGVYGGSSYNRGTRITKEVFDNLTNWKNSAQ

SEQ ID NO: 50799 - protein, 222 aa, Bacillus licheniformis
SVIGSDDRTRVTNTTAYPYRAIVHISSSIGSCTGWMIGPKTVATAGHCIYDTSSGSFAGTATVSPGRNGTSYPYGSVKSTRYFIPSGWRSGNTNYDYGAIELSEPIGNTVGYFGYSYTTSSLVGTTVTISGYPGDKTAGTQWQHSGPIAISETYKLQYAMDTYGGQSGSPVFERSSSRTNCSGPCSLAVHTNGVYGGSSYNRGTRITKEVFDNLTNWKNSAQ

SEQ ID NO: 50800 - protein, 222 aa, Bacillus licheniformis
SVIGSDDRTRVTNTTAYPYRAIVHISSSIGSCTGWMIGPKTVATAGHCIYDTSSGSFAGTATVSPGRNGTSYPYGSVKSTRYFIPSGWRSGNTNYDYGAIELSEPIGNTVGYFGYSYTTSSLVGTTVTISGYPGDKTAGTQWQHSGPIAISETYKLQYAMDSYGGQSGSPVFEQSSSRTNCSGPCSLAVHTNGVYGGSSYNRGTRITKEVFDNLTNWKNSAQ

SEQ ID NO: 50801 - protein, 222 aa, Bacillus licheniformis
SVIGSDDRTRVTNTTAYPYRAIVHISSSIGSCTGWMIGPKTVATAGHCIYDTSSGSFAGTATVSPGRNGTSYPYGSVKSTRYFIPSGWRSGNTNYDYGAIELSRPIGNTVGYFGYSYTTSSLVGTTVTISGYPGDKTAGTQWQHSGPIAISETYKLQYAMDTYGGQSGSPVFEQSSSRTNCSGPCSLAVHTNGVYGGSSYNRGTRITKEVFDNLTNWKNSAQ

SEQ ID NO: 50802 - protein, 222 aa, Bacillus licheniformis
SVIGSDDRTRVTNTTAYPYRAIVHISSSIGSCTGWMIGPKTVATAGHCIYDTSSGSFAGTATVSPGRNGTSYPYGSVKSTRYFIPSGWRSGNTNYDYGAIELSEPIGNTVGYFGYSYTTSSLVGTTVTISGYPGDKTAGTQWQHSGPIAISETYKLQYAMDTYGGQSGSPVFEQSSSRTNCSGPCSLAVRTNGVYGGSSYNRGTRITKEVFDNLTNWKNSAQ

SEQ ID NO: 50803 - protein, 222 aa, Bacillus licheniformis
SVIGSDDRTRVTNTTAYPYRAIVHISSSIGSCTGWMIGPKTVATAGHCIYDTSSGSFAGTATVSPGRNGTSYPYGSVKSTRYFIPSGWRSGNTNYDYGAIELSEPIGNTVGYFGYSYTTSSLVGTTVTISGYPGDKTAGTQWQHSGPIAISETYKLQYAMDTYGGQSGSPVFEQSSSRTNASGPCSLAVHTNGVYGGSSYNRGTRITKEVFDNLTNWKNSAQ

SEQ ID NO: 50804 - protein, 222 aa, Bacillus licheniformis
SVIGSDDRTRVTNTTAYPYRAIVHISSSIGSCTGWMIGPKTVATAGHCIYDTSSGSFAGTATVSPGRNGTSYPYGSVKSTRYFIPSGWRSGNTNYDYGAIELSAPIGNTVGYFGYSYTTSSLVGTTVTISGYPGDKTAGTQWQHSGPIAISETYKLQYAMDTYGGQSGSPVFEQSSSRTNCSGPCSLAVHTNGVYGGSSYNRGTRITKEVFDNLTNWKNSAQ

SEQ ID NO: 50805 - protein, 222 aa, Bacillus licheniformis
SVIGSDARTRVTNTTAYPYRAIVHISSSIGSCTGWMIGPKTVATAGHCIYDTSSGSFAGTATVSPGRNGTSYPYGSVKSTRYFIPSGWRSGNTNYDYGAIELSEPIGNTVGYFGYSYTTSSLVGTTVTISGYPGDKTAGTQWQHSGPIAISETYKLQYAMDTYGGQSGSPVFEQSSSRTNCSGPCSLAVHTNGVYGGSSYNRGTRITKEVFDNLTNWKNSAQ

SEQ ID NO: 50806 - protein, 222 aa, Bacillus licheniformis
SVIGSADRTRVTNTTAYPYRAIVHISSSIGSCTGWMIGPKTVATAGHCIYDTSSGSFAGTATVSPGRNGTSYPYGSVKSTRYFIPSGWRSGNTNYDYGAIELSEPIGNTVGYFGYSYTTSSLVGTTVTISGYPGDKTAGTQWQHSGPIAISETYKLQYAMDTYGGQSGSPVFEQSSSRTNCSGPCSLAVHTNGVYGGSSYNRGTRITKEVFDNLTNWKNSAQ

SEQ ID NO: 50807 - protein, 222 aa, Bacillus licheniformis
SVIGSDDRTRVTNTTAYPYRAIVHISSSIGSCTGWMIGPKTVATAGHCIYDTSSGSFAGTATVSPGRNGTSYPYGSVKSTRYFIPSGWRSGNTNYDYGAIELSEPIGNTVGYFGYSYTTSSLVGTTVTISGYPGDKTAGTQWQHSGPIAISATYKLQYAMDTYGGQSGSPVFEQSSSRTNCSGPCSLAVHTNGVYGGSSYNRGTRITKEVFDNLTNWKNSAQ

SEQ ID NO: 50808 - protein, 222 aa, Bacillus licheniformis
SVIGSDDRTRVTNTTAYPYRAIVHISSSIGSCTGWMIGPKTVATAGHCIYDTSSGSFAGTATVSPGRNGTSYPYGSVKSTRYFIPSGWRSGNTNYDYGAIELSEPIGNTVGYFGYSYTTSSLVGTTVTISGYPGDKTAGTQWQHSGPIAISETYKLQYAMDTYGGQSGSPVFAQSSSRTNCSGPCSLAVHTNGVYGGSSYNRGTRITKEVFDNLTNWKNSAQ

SEQ ID NO: 50809 - protein, 222 aa, Bacillus licheniformis
SVIGSDDRTRVTNTTAYPYRAIVHISSSIGSCTGWMIGPKTVATAGHCIYDTSSGSFAGTATVSPGRNGTSYPYGSVKSTRYFIPSGWRSGNTNYDYGAIELSEPIGNTVGYFGYSYTTSSLVGTTVTISGYPGDKTAGTQWQHSGPIAISETYKLQYAMDTYGGQSGSPVFEQSSSRTNCSGPCSLAVHTNGVYGGSSYNRGTRITKAVFDNLTNWKNSAQ

SEQ ID NO: 50810 - protein, 222 aa, Bacillus licheniformis
SVIGSDDRTRVTNTTAYPYRAIVHISSSIGSCTGWMIGPKTVATAGHAIYDTSSGSFAGTATVSPGRNGTSYPYGSVKSTRYFIPSGWRSGNTNYDYGAIELSEPIGNTVGYFGYSYTTSSLVGTTVTISGYPGDKTAGTQWQHSGPIAISETYKLQYAMDTYGGQSGSPVFEQSSSRTNCSGPCSLAVHTNGVYGGSSYNRGTRITKEVFDNLTNWKNSAQ

SEQ ID NO: 50811 - protein, 222 aa, Bacillus licheniformis
SVIGSDDRTRVTNTTAYPYRAIVHISSSIGSCTGWMIGPKTVATAGHCIYDTSSGSFAGTATVSPGRNGTSYPYGSVKSTRFFIPSGWRSGNTNYDYGAIELSEPIGNTVGYFGYSYTTSSLVGTTVTISGYPGDKTAGTQWQHSGPIAISETYKLQYAMDTYGGQSGSPVFEQSSSRTNCSGPCSLAVHTNGVYGGSSYNRGTRITKEVFDNLTNWKNSAQ

SEQ ID NO: 50812 - protein, 222 aa, Bacillus licheniformis
SVIGSDDRTRVTNTTAYPYRAIVHISSSIGSCTGWMIGPKTVATAGHCIYDTSSGSFAGTATVSPGRNGTSYPYGSVKSTRYFIPSGWRSGNTNYDYGAIELSEPIGNRVGYFGYSYTTSSLVGTTVTISGYPGDKTAGTQWQHSGPIAISETYKLQYAMDTYGGQSGSPVFEQSSSRTNCSGPCSLAVHTNGVYGGSSYNRGTRITKEVFDNLTNWKNSAQ

SEQ ID NO: 50813 - protein, 222 aa, Bacillus licheniformis
SVIGSDDRTRVTNTTAYPYRAIVHISSSIGSCTGWMIGPKTVATAGHCIYDTSSGSFAGTATVSPGRNGTSYPYGSVKSTRYFIPSGWRSGNTNYDYGAIELSEPIGNTVGYFGYSYTTSSLVGTTVTISGYPGDKTAGTQWQHSGPIAISETYKLQYAMDTYGGQSGSPVFEQSSSRTNCSGPCSLAVHSNGVYGGSSYNRGTRITKEVFDNLTNWKNSAQ

SEQ ID NO: 50814 - protein, 222 aa, Bacillus licheniformis
SVIGSDDRTRVTNTTAYPYRAIVHISSSIGSCTGWMIGPKTVATAGHCIYDTSSGSFAGTATVSPGRNGTSYPYGSVKSTRYFIPSGWRSGNTNYDYGAIELSEPIGNTVGYFGYSYTTSSLVGTTVTISGYPGDKTAGTQWQHSGPIAISETYKLRYAMDTYGGQSGSPVFEQSSSRTNCSGPCSLAVHTNGVYGGSSYNRGTRITKEVFDNLTNWKNSAQ

SEQ ID NO: 50815 - protein, 222 aa, Bacillus licheniformis
SVIGSDDRTRVTNTTAYPYRAIVHISSSIGSCTGWMIGPKTVATAGHCIYDTSSGSFAGTATVSPGRNGTSYPYGSVKSTRYFIPSGWRSGNTNYDYGAIELSEPIGNTVGYFGYSYTTSSLVGTTVKISGYPGDKTAGTQWQHSGPIAISETYKLQYAMDTYGGQSGSPVFEQSSSRTNCSGPCSLAVHTNGVYGGSSYNRGTRITKEVFDNLTNWKNSAQ

SEQ ID NO: 50816 - protein, 222 aa, Bacillus licheniformis
SVIGSDDRTRVTNTTAYPYRAIVHISSSIGSCTGWMIGPKTVATAGHCIYDTSSGSFAGTATVSPGRNGTSYPYGSVKSTRYFIPSGWRSGNTNYDYGAIELSEPIGNTVGYFGYSYTTSSLVGTTVTISGYPGDKTAGTQWQHSGPIAISETYKLQYAMDTYGGQSGSPVFEQSSSRTNCSGPCSLAVPTNGVYGGSSYNRGTRITKEVFDNLTNWKNSAQ

SEQ ID NO: 50817 - protein, 222 aa, Bacillus licheniformis
SVIGSDDRTRVTNTTAYPYRAIVHISSSIGSCTGWMIGPKTVATAGHCIYKTSSGSFAGTATVSPGRNGTSYPYGSVKSTRYFIPSGWRSGNTNYDYGAIELSEPIGNTVGYFGYSYTTSSLVGTTVTISGYPGDKTAGTQWQHSGPIAISETYKLQYAMDTYGGQSGSPVFEQSSSRTNCSGPCSLAVHTNGVYGGSSYNRGTRITKEVFDNLTNWKNSAQ

SEQ ID NO: 50818 - protein, 222 aa, Bacillus licheniformis
SVIGSDDRTRVTNTTAYPYRAIVHISSSIGSCTGWMIGPKTVATAGHCIYDTSSGSFAGTATVSPGRNGTSYPYGSVKSTRYFIPSGWRSGNTNYDYGAIELSEPIGNTVGYFGYSYTTSSLVGTTVTISGYPGDKTAGTQWQHSGPIAISETYKLQYAMDTYGGQSGSPVFEQSSSRTNCSGPCSLAVATNGVYGGSSYNRGTRITKEVFDNLTNWKNSAQ

SEQ ID NO: 50819 - protein, 222 aa, Bacillus licheniformis
SVIGSDDRRRVTNTTAYPYRAIVHISSSIGSCTGWMIGPKTVATAGHCIYDTSSGSFAGTATVSPGRNGTSYPYGSVKSTRYFIPSGWRSGNTNYDYGAIELSEPIGNTVGYFGYSYTTSSLVGTTVTISGYPGDKTAGTQWQHSGPIAISETYKLQYAMDTYGGQSGSPVFEQSSSRTNCSGPCSLAVHTNGVYGGSSYNRGTRITKEVFDNLTNWKNSAQ

SEQ ID NO: 50820 - protein, 222 aa, Bacillus licheniformis
SVIGSDDRTRVTNTTAYPYRAIVHISSSPGSCTGWMIGPKTVATAGHCIYDTSSGSFAGTATVSPGRNGTSYPYGSVKSTRYFIPSGWRSGNTNYDYGAIELSEPIGNTVGYFGYSYTTSSLVGTTVTISGYPGDKTAGTQWQHSGPIAISETYKLQYAMDTYGGQSGSPVFEQSSSRTNCSGPCSLAVHTNGVYGGSSYNRGTRITKEVFDNLTNWKNSAQ

SEQ ID NO: 50821 - protein, 222 aa, Bacillus licheniformis
SVIGSDDRTRVTNTTAYPYRAIVHISSSIGSCTGWMIGPKTVATAGHCIYDTSSGSFAGTATVSPGRNGTSYPYGSVKSTRYFIPSGWRSGNTNYDYGAIELSEPIGNTVGYFGYSYTTSSLVGTTVTISGYPGDKTAGTQWQHSGPIAISETYKLQYAMDTYGGQSGSPVFEQSSSRTNCSGPCSLAVHTNGVYGGSSYNRGTRIRKEVFDNLTNWKNSAQ

SEQ ID NO: 50822 - protein, 222 aa, Bacillus licheniformis
SVIGSDDRTRVTNTTAYPYRAIVHISSSIGSCTGWAIGPKTVATAGHCIYDTSSGSFAGTATVSPGRNGTSYPYGSVKSTRYFIPSGWRSGNTNYDYGAIELSEPIGNTVGYFGYSYTTSSLVGTTVTISGYPGDKTAGTQWQHSGPIAISETYKLQYAMDTYGGQSGSPVFEQSSSRTNCSGPCSLAVHTNGVYGGSSYNRGTRITKEVFDNLTNWKNSAQ

SEQ ID NO: 50823 - protein, 222 aa, Bacillus licheniformis
SVIGSDDRTRVTNTTAYPYRAIVHISSSIGSCTGWMIGPKTVATAGHCIYDTSSGSFAGTATVSPGRNGTSYPYGSVKSTRYFIPSGWRSGNTNYDYGAIELSEPIGNTVGYFGYSYTTSSLVGTTVTISGYPGDKTAGTQWQHSGPIAISETYKLQYAMDMYGGQSGSPVFEQSSSRTNCSGPCSLAVHTNGVYGGSSYNRGTRITKEVFDNLTNWKNSAQ

SEQ ID NO: 50824 - protein, 222 aa, Bacillus licheniformis
SVIGSDDRTRVTNTTAYPYRAIVHISSSIGSCTGWSIGPKTVATAGHCIYDTSSGSFAGTATVSPGRNGTSYPYGSVKSTRYFIPSGWRSGNTNYDYGAIELSEPIGNTVGYFGYSYTTSSLVGTTVTISGYPGDKTAGTQWQHSGPIAISETYKLQYAMDTYGGQSGSPVFEQSSSRTNCSGPCSLAVHTNGVYGGSSYNRGTRITKEVFDNLTNWKNSAQ

SEQ ID NO: 50825 - protein, 222 aa, Bacillus licheniformis
SVIGSDDRTRVTNTTAYPYRAIVHISSSIGSCTGWMIGPKTVATAGHCIYDTSSGSFAGTATVSPGRNGTSYPYGSVKSTRYFIPSGWRSGNTNYAYGAIELSEPIGNTVGYFGYSYTTSSLVGTTVTISGYPGDKTAGTQWQHSGPIAISETYKLQYAMDTYGGQSGSPVFEQSSSRTNCSGPCSLAVHTNGVYGGSSYNRGTRITKEVFDNLTNWKNSAQ

SEQ ID NO: 50826 - protein, 222 aa, Bacillus licheniformis
SVIGSDDRTRVTNTTAYPYRAIVHISSSIGSCTGWMIGPKTVATAGHCIYDTSSGSFAGTATVSPGRNGTSYPYGSVKSTRYFIPSGWRSGNTNYDYGAIELSKPIGNTVGYFGYSYTTSSLVGTTVTISGYPGDKTAGTQWQHSGPIAISETYKLQYAMDTYGGQSGSPVFEQSSSRTNCSGPCSLAVHTNGVYGGSSYNRGTRITKEVFDNLTNWKNSAQ

SEQ ID NO: 50827 - protein, 222 aa, Bacillus licheniformis
SVIGSDDRTRVTNTTAYPYRAIVHISSSIGSCTGWMIGPKTVATAGHCIYDTSSGSFAGTATVSPGRNGTSYPYGSVKSTRYFIPSGWRSGNTNYDYGAIELSEPIGNTVGYFGYSYTTSSLVGTTVTISGYPGDKTAGTQWQHSGPIAISVTYKLQYAMDTYGGQSGSPVFEQSSSRTNCSGPCSLAVHTNGVYGGSSYNRGTRITKEVFDNLTNWKNSAQ

SEQ ID NO: 50828 - protein, 222 aa, Bacillus licheniformis
SVIGSDDRTRVTNTTAYPYRAIVHISSSIGSCTGWMIGPKTVATAGHCIYDTSSGSFAGTATVSPGRNGTSYPYGSVKSKRYFIPSGWRSGNTNYDYGAIELSEPIGNTVGYFGYSYTTSSLVGTTVTISGYPGDKTAGTQWQHSGPIAISETYKLQYAMDTYGGQSGSPVFEQSSSRTNCSGPCSLAVHTNGVYGGSSYNRGTRITKEVFDNLTNWKNSAQ

SEQ ID NO: 50829 - protein, 222 aa, Bacillus licheniformis
SVIGSDDRTRVTNTTAYPYRAIVHISSSIGSCTGWMIGPKTVATAGHCIYDTSSGSFAGTATVSPGRNGTSYPYGSVKSTRYFIPSGWRSGNTNYDYGAIELSEPIGNTVGYFGYSYTTSSLVGTTVTISGYPGDKTAGTQWQHSGPIAISETYKLQYAMDTYGGQSGSPVFEQSSSRTNCSGPCSLAVHTNGVFGGSSYNRGTRITKEVFDNLTNWKNSAQ

SEQ ID NO: 50830 - protein, 222 aa, Bacillus licheniformis
SVIGSDDRTRVTNTTAYPYRAIVHISSSIGSCTGWMIGPKTVATAGHCIYDTSSGSFAGTATVSPGRNGTSYPYGSVKSTRYFIPSGWRSGNTNYDYGAIALSEPIGNTVGYFGYSYTTSSLVGTTVTISGYPGDKTAGTQWQHSGPIAISETYKLQYAMDTYGGQSGSPVFEQSSSRTNCSGPCSLAVHTNGVYGGSSYNRGTRITKEVFDNLTNWKNSAQ

SEQ ID NO: 50831 - protein, 222 aa, Bacillus licheniformis
SVIGSDDRTRVTNTTAYPYRAIVHISSSIGSCTGWMIGPKTVATAGHCIYDTSSGSFAGTATVSPGRNGTSYPYGSVKSTRYFIPSGWRSGNTNYDYGAIELSEPIGNTVGYFGYSYTTSSLVGTTVTISGYPGDKTAGTQWQHSGPIAISETYKLQYAMDTYGGQSGSPVFEQSSSRTNCSGPCSLAVHTNGVYGGSSYNRGTRITKKVFDNLTNWKNSAQ

SEQ ID NO: 50832 - protein, 222 aa, Bacillus licheniformis
SVIGSDDRTRVTNTRAYPYRAIVHISSSIGSCTGWMIGPKTVATAGHCIYDTSSGSFAGTATVSPGRNGTSYPYGSVKSTRYFIPSGWRSGNTNYDYGAIELSEPIGNTVGYFGYSYTTSSLVGTTVTISGYPGDKTAGTQWQHSGPIAISETYKLQYAMDTYGGQSGSPVFEQSSSRTNCSGPCSLAVHTNGVYGGSSYNRGTRITKEVFDNLTNWKNSAQ

SEQ ID NO: 50833 - protein, 222 aa, Bacillus licheniformis
SVIGSDDRTRVTNTTAYPYRAIVHISSSIGSCTGWMIGPKTVATAGHCIYDTSSGSFAGTATVSPGRNGTSYPYGSVKSTRYFIPSGWRSGNTNYDYGAIELSEPIGNTVGYFGYSYTTSSLVGTTVTISGYPGDKTAGTQWQHSGPIAISETYKLQYAMDTYGGQSGSPVFKQSSSRTNCSGPCSLAVHTNGVYGGSSYNRGTRITKEVFDNLTNWKNSAQ

SEQ ID NO: 50834 - protein, 222 aa, Bacillus licheniformis
SVIGSDDRTRVTNTTAYPYRAIVHISSSIGSCTGWMIGPKTVATAGHCIYDTSSGSFAGTATVSPGRNGTSYPYGSVKSTRYFIPSGWRSGNTNYDYGAIELSEPIGNTVGYFGYRYTTSSLVGTTVTISGYPGDKTAGTQWQHSGPIAISETYKLQYAMDTYGGQSGSPVFEQSSSRTNCSGPCSLAVHTNGVYGGSSYNRGTRITKEVFDNLTNWKNSAQ

SEQ ID NO: 50835 - protein, 222 aa, Bacillus licheniformis
SVIGSDDRTRVTNTTAYPYRAIVHISSSIGSCTGWMIGPKTVATAGHCIYDTSSGSFAGTATVSPGRNGTSYPYGSVKSTRYFIPSGWRSGNTNYDYGAIELSEPIGNTVGYFGYSYTTSSLVGTTVTISGYPGDKTAGTQWQHSGPIAISGTYKLQYAMDTYGGQSGSPVFEQSSSRTNCSGPCSLAVHTNGVYGGSSYNRGTRITKEVFDNLTNWKNSAQ

SEQ ID NO: 50836 - protein, 222 aa, Bacillus licheniformis
SVIGSDDRTRVTNTTAYPYRAIVHISSSIGSCTGWMIGPKTVATAGHCIYDTSSGSFAGTATVSPGRNGTSYPYGSVKSTRYFIPSGWRSGNTNYDYGAIELSEPIGNTVGYFGYSYTTSSLVGTTVTISGYPGDKTAGTQWQHSGPIAISETYKLQYAMDTYGGQSGSPVFEQSSSRTNCSGPCSLAVHTNGVYGGSSYNRGTRITKEVFRNLTNWKNSAQ

SEQ ID NO: 50837 - protein, 222 aa, Bacillus licheniformis
SVIGSDDRTRVTNTTAYPYRAIVHISSSIGSCTGWMIGPKTVATAGHCIYDTSSGSFAGTATVSPGRNGTSYPYGSVKSTRYFIPSGWRSGNTNYDYGAIELSEPIGNTVGYFGYSYTTSSLVGTTVTISGYPGDKTAGTQWQHSGPIAISETYKLQYAMDTYGGQSGSPVFEQSSSRTNCSGPCSLALHTNGVYGGSSYNRGTRITKEVFDNLTNWKNSAQ

SEQ ID NO: 50838 - protein, 222 aa, Bacillus licheniformis
SVIGSDDRTRVTNTTAYPYRAIVHISSSIGSCTGWMIGPKTVATAGHCIYDTSSGSFAGTATVSPGRNGTSYPYGSVKSTRYFIPSGWRSGNTNYDYGAIELSEPIGNTVGYFGYSYTTSSLVGTTVTISGYPGDKTAGTQWQHSGPIAISETYKLQYAMDTYGGQSGSPVFEQSSSRTNCSGPCSLAVHINGVYGGSSYNRGTRITKEVFDNLTNWKNSAQ

SEQ ID NO: 50839 - protein, 222 aa, Bacillus licheniformis
SVIGSDDRTRVTNTTAYPYRAIVHISSSIGSCTGWMIGPKTVATAGACIYDTSSGSFAGTATVSPGRNGTSYPYGSVKSTRYFIPSGWRSGNTNYDYGAIELSEPIGNTVGYFGYSYTTSSLVGTTVTISGYPGDKTAGTQWQHSGPIAISETYKLQYAMDTYGGQSGSPVFEQSSSRTNCSGPCSLAVHTNGVYGGSSYNRGTRITKEVFDNLTNWKNSAQ

SEQ ID NO: 50840 - protein, 222 aa, Bacillus licheniformis
SVIGSDDRTRVTNTTAYPYRAIVHISSSIGSCTGWMIGPKTVATAGHCIYDTSSGSFAGTATVSPGRNGTSYPYGSVKSTRYFIPSGWRSGNTNYDYGAIELSEPIGNTVGYFGYSYTTSSLVGTTVTISGYPGDKTAGTQWQHSGPIAISETYKLQYAMDRYGGQSGSPVFEQSSSRTNCSGPCSLAVHTNGVYGGSSYNRGTRITKEVFDNLTNWKNSAQ

SEQ ID NO: 50841 - protein, 222 aa, Bacillus licheniformis
SVIGSDDRTRVTNTTAYPYRAIVHISSSAGSCTGWMIGPKTVATAGHCIYDTSSGSFAGTATVSPGRNGTSYPYGSVKSTRYFIPSGWRSGNTNYDYGAIELSEPIGNTVGYFGYSYTTSSLVGTTVTISGYPGDKTAGTQWQHSGPIAISETYKLQYAMDTYGGQSGSPVFEQSSSRTNCSGPCSLAVHTNGVYGGSSYNRGTRITKEVFDNLTNWKNSAQ

SEQ ID NO: 50842 - protein, 222 aa, Bacillus licheniformis
SVIGSDDRTRVTNTTAYPYRAIVHISSSIGSCTGWMIGPKTVATAGHCIYDTSSGSFAGTATVSPGRNGTSYPYGHVKSTRYFIPSGWRSGNTNYDYGAIELSEPIGNTVGYFGYSYTTSSLVGTTVTISGYPGDKTAGTQWQHSGPIAISETYKLQYAMDTYGGQSGSPVFEQSSSRTNCSGPCSLAVHTNGVYGGSSYNRGTRITKEVFDNLTNWKNSAQ

SEQ ID NO: 50843 - protein, 222 aa, Bacillus licheniformis
SVIGSDDRTRVTNTTAYPYRAIVHISSSIGSCTGWMIGPKTVATAGHCIYDTSSGSFAGTATVSPGRNGTSYPYGSVKSTRYFIPSGWRSGNTNYDYGAIELSEPIGNTVGYFGYSYTTSSLVGTTVTISGYPGDKTAGTQWQHSGPIAISETYKLQYAMDTYGGQSGSPVFEQSSSRTNCSGPCSLAVTTNGVYGGSSYNRGTRITKEVFDNLTNWKNSAQ

SEQ ID NO: 50844 - protein, 222 aa, Bacillus licheniformis
SVIGSDDRTRVTNTTAYPYRAIVHISSSIGSCTGWMIGPKTVATAGHCIYDTSSGSFAGTATVSPGRNGTSYPYGSVKSTRYFIPSGWRSGNTNYDYGAIELSEPIGNTVGYFGYSYTTSSLVGTTVTISGYPGDKTAGTQWQHSGPIAISETYKLQYAMDTYGGQSGSPVFRQSSSRTNCSGPCSLAVHTNGVYGGSSYNRGTRITKEVFDNLTNWKNSAQ

SEQ ID NO: 50845 - protein, 222 aa, Bacillus licheniformis
SVIGSDDRTRVTNTTAYPYRAIVHISSSIGSCTGWMIGPKTVATAGHCIYDTSSGSFAGTATVSPGRNGTSYPYGSVKSTRYFIPSGWRSGNTNYDYGAIELSEPIGNTVGYFGYSYTTSSLVGTTVTISGYPGDKTAGTQWQHSGPIAISKTYKLQYAMDTYGGQSGSPVFEQSSSRTNCSGPCSLAVHTNGVYGGSSYNRGTRITKEVFDNLTNWKNSAQ

SEQ ID NO: 50846 - protein, 222 aa, Bacillus licheniformis
SVIGSDDRTRVTNTTAYPYRAIVHISSSIGSCTGWMIGPKTVATAGHCIYATSSGSFAGTATVSPGRNGTSYPYGSVKSTRYFIPSGWRSGNTNYDYGAIELSEPIGNTVGYFGYSYTTSSLVGTTVTISGYPGDKTAGTQWQHSGPIAISETYKLQYAMDTYGGQSGSPVFEQSSSRTNCSGPCSLAVHTNGVYGGSSYNRGTRITKEVFDNLTNWKNSAQ

SEQ ID NO: 50847 - protein, 222 aa, Bacillus licheniformis
SVIGSDDRTRVTNTTAYPYRAIVHISSSTGSCTGWMIGPKTVATAGHCIYDTSSGSFAGTATVSPGRNGTSYPYGSVKSTRYFIPSGWRSGNTNYDYGAIELSEPIGNTVGYFGYSYTTSSLVGTTVTISGYPGDKTAGTQWQHSGPIAISETYKLQYAMDTYGGQSGSPVFEQSSSRTNCSGPCSLAVHTNGVYGGSSYNRGTRITKEVFDNLTNWKNSAQ

SEQ ID NO: 50848 - protein, 222 aa, Bacillus licheniformis
SVIGSDDRTRVTNTTAYPYRAIVHISSSIGSCTGWMIGPKTVATAGHCIYRTSSGSFAGTATVSPGRNGTSYPYGSVKSTRYFIPSGWRSGNTNYDYGAIELSEPIGNTVGYFGYSYTTSSLVGTTVTISGYPGDKTAGTQWQHSGPIAISETYKLQYAMDTYGGQSGSPVFEQSSSRTNCSGPCSLAVHTNGVYGGSSYNRGTRITKEVFDNLTNWKNSAQ

SEQ ID NO: 50849 - protein, 222 aa, Bacillus licheniformis
SVIGSDDRTRVTNTTAYPYRAIVHISSSIGSCTGWMIGPKTVATAGHCIYDTSSGSFAGTATVSPGRNGTSYPYGSVKSTRYFIPSGWRSGNTNYDYGAIELSEPIGNTVGYFGYSYTTSSLVGTTVTISGYPGDKTAGTQWQHSGPIAISETYKLQYAMDTYGGQSGSPVFEQSSSRTNCSGPCSLAVHTNGVYGGSSYNRGTRITKEVFKNLTNWKNSAQ

SEQ ID NO: 50850 - protein, 222 aa, Bacillus licheniformis
SVIGSDDRTRVTNTTAYPYRAIVHISSSIGSCTGWMIGPKTVATAGHCIYDTSSGSFAGTATVSPGRNGTSYPYGSVKSTRYFIPSGWRSGNTNYDYGAIELSEPIGNTVGYFGYSYTTSSLVGTTVTISGYPGDKTAGTQWQHSGPIAISETYKLQYAMDAYGGQSGSPVFEQSSSRTNCSGPCSLAVHTNGVYGGSSYNRGTRITKEVFDNLTNWKNSAQ

SEQ ID NO: 50851 - protein, 222 aa, Bacillus licheniformis
SVIGSDDRTRVTNTTAYPFRAIVHISSSIGSCTGWMIGPKTVATAGHCIYDTSSGSFAGTATVSPGRNGTSYPYGSVKSTRYFIPSGWRSGNTNYDYGAIELSEPIGNTVGYFGYSYTTSSLVGTTVTISGYPGDKTAGTQWQHSGPIAISETYKLQYAMDTYGGQSGSPVFEQSSSRTNCSGPCSLAVHTNGVYGGSSYNRGTRITKEVFDNLTNWKNSAQ

SEQ ID NO: 50852 - protein, 222 aa, Bacillus licheniformis
SVIGSDDRTRVTNTTAYPYRAIVHISSRIGSCTGWMIGPKTVATAGHCIYDTSSGSFAGTATVSPGRNGTSYPYGSVKSTRYFIPSGWRSGNTNYDYGAIELSEPIGNTVGYFGYSYTTSSLVGTTVTISGYPGDKTAGTQWQHSGPIAISETYKLQYAMDTYGGQSGSPVFEQSSSRTNCSGPCSLAVHTNGVYGGSSYNRGTRITKEVFDNLTNWKNSAQ

SEQ ID NO: 50853 - protein, 222 aa, Bacillus licheniformis
SVIGSDDRTRVTNTTAYPYRAIVHISSSIGSCTGWMIGPKTVATAGHCIYDTSSRSFAGTATVSPGRNGTSYPYGSVKSTRYFIPSGWRSGNTNYDYGAIELSEPIGNTVGYFGYSYTTSSLVGTTVTISGYPGDKTAGTQWQHSGPIAISETYKLQYAMDTYGGQSGSPVFEQSSSRTNCSGPCSLAVHTNGVYGGSSYNRGTRITKEVFDNLTNWKNSAQ

SEQ ID NO: 50854 - protein, 222 aa, Bacillus licheniformis
SVIGSDDRTRVTNTTAYPYRAIVHISSSIGSCTGWMIGPKTVATAGHCIYDTSSGSFAGTATVSPGRNGTSYPYGSVKSTRYFIPSGWRSGNTNYDYGAIELSEPIGNTVGYFGYSYTTSSLVGTTVTISGFPGDKTAGTQWQHSGPIAISETYKLQYAMDTYGGQSGSPVFEQSSSRTNCSGPCSLAVHTNGVYGGSSYNRGTRITKEVFDNLTNWKNSAQ

SEQ ID NO: 50855 - protein, 222 aa, Bacillus licheniformis
SVIGSDDRTRVTNTTAYPYRAIVHISSSIGSCTGWMIGPKTVATAGHCIYDTSSGSFAGTATVSPGRNGTSYPYGSVKSTRYFIPSGWRSGNTNYDYGAIELSEPIGNTVGYFGYSYTTSSLVGTTVTISGYPGDKTAGTQWQHSGPIAISETYKLQYAMDTYGGQSGSPVFEQSSSRTNCSGPCSLAVKTNGVYGGSSYNRGTRITKEVFDNLTNWKNSAQ

SEQ ID NO: 50856 - protein, 222 aa, Bacillus licheniformis
SVIGSDDRTRVTNTTAYPYRAIVHISSSIGSCTGWMIGPKTVATAGHCIYDTSSGSFAGTATVSPGRNGTSYPYGSVKSTRYFIPSGWRSGNTNYDYGAIELSEPIGNTVGYFGYSYTTSSLVGTTVTISGYPGDKTAGTQWQHSGPIAISETYKLQYAMATYGGQSGSPVFEQSSSRTNCSGPCSLAVHTNGVYGGSSYNRGTRITKEVFDNLTNWKNSAQ

SEQ ID NO: 50857 - protein, 222 aa, Bacillus licheniformis
SVIGSDDRTRVTNTTAYPYRAIVHISSSIGSCTGWMIGPKTVATAGHCIFDTSSGSFAGTATVSPGRNGTSYPYGSVKSTRYFIPSGWRSGNTNYDYGAIELSEPIGNTVGYFGYSYTTSSLVGTTVTISGYPGDKTAGTQWQHSGPIAISETYKLQYAMDTYGGQSGSPVFEQSSSRTNCSGPCSLAVHTNGVYGGSSYNRGTRITKEVFDNLTNWKNSAQ

SEQ ID NO: 50858 - protein, 222 aa, Bacillus licheniformis
SVIGSDDRTRVTNTTAYPYRAIVHISSSIGSCTGWMIGPKTVATAGHCIYDTSSGSFAGTATVSPGRNGTSYPYGSVKSTRYFIPSGWRSGNTNYDYGAIELSEPIGNTVGYFGYSYTTSSLVGTTVTISGYPGDKTAGTQWQHSGPIAISETYKLQYAMDTYGGQSGSPVFEQSSSRTNCSGPCSLAVSTNGVYGGSSYNRGTRITKEVFDNLTNWKNSAQ

SEQ ID NO: 50859 - protein, 222 aa, Bacillus licheniformis
SVIGSDDRTRVTNTTAYPYRAIVHISSSIGSCTGWMIGPKTVATAGHCIYDTSSGSFAGTATVSPGRNGTSYPYGSVKSTRYFIPSGWRSGNTNYDYGAIELSEPIGNTVGYFGYSYTTSSLVGTTVTISGYPGDKTAGTQWQHSGPIAISETYKLQYASDTYGGQSGSPVFEQSSSRTNCSGPCSLAVHTNGVYGGSSYNRGTRITKEVFDNLTNWKNSAQ

SEQ ID NO: 50860 - protein, 222 aa, Bacillus licheniformis
SVIGSDDRTRVTNTTAYPYRAIVHISSSIGSCTGWMIGPKTVATAGHCIYDTSSGSFAGTATVSPGRNGTSYPYGSVKSTRYFIPSGWRSGNTNYDYGAIELSEPIGNTVGYFGYSYTTSSLVGTTVTISGYPGDKTAGTQWQHSGPIAISETYKLQYAMDTYGGQSGSPVFEQSSSRTNCSGPCSLAVHTNGVYGGSSYNRGTRITKRVFDNLTNWKNSAQ

SEQ ID NO: 50861 - protein, 222 aa, Bacillus licheniformis
SVIGSDDRTRVTNTTAYPYRAIVHISSSIGSCTGWMIGPKTVATAGHCIYDTSSGSFAGTATVSPGRNGTSYPYGSVKSTRYFIPSGWRSGNTNYDYGAIELSEPIGNTVGYFGYSYTTSSLVGTTVTISGYPGDKTAGTQWQHSGPIAISETYKLQYAMDTYGGQSGSPVFEQSSSRTNCSGPASLAVHTNGVYGGSSYNRGTRITKEVFDNLTNWKNSAQ

SEQ ID NO: 50862 - protein, 222 aa, Bacillus licheniformis
SVIGSDDRTRVTNTTAYPYRAIVHISSSSGSCTGWMIGPKTVATAGHCIYDTSSGSFAGTATVSPGRNGTSYPYGSVKSTRYFIPSGWRSGNTNYDYGAIELSEPIGNTVGYFGYSYTTSSLVGTTVTISGYPGDKTAGTQWQHSGPIAISETYKLQYAMDTYGGQSGSPVFEQSSSRTNCSGPCSLAVHTNGVYGGSSYNRGTRITKEVFDNLTNWKNSAQ

SEQ ID NO: 50863 - protein, 222 aa, Bacillus licheniformis
SVIGSDDRTRVTNTTAYPYRAIVHISSSIGSCTGWMIGPKTVATAGHCIYDTSSGSFAGTATVSPGRNGTSYPYGSVKSTRYFIPSGWRSGNTNYDYGAIELSEPIGNTVGYFGYSYTTSSLVGTTVTISGYPGDKTAGTQWQHSGPIAISETYKLQYAMDKYGGQSGSPVFEQSSSRTNCSGPCSLAVHTNGVYGGSSYNRGTRITKEVFDNLTNWKNSAQ

SEQ ID NO: 50864 - protein, 316 aa, Bacillus licheniformis
LVSKKSVKRGLITGLIGISIYSLGMHPAQAAPSPHTPVSSDPSYKAETSVTYDPHIKSDQYGLYSKAFTGTGKVNETKEKAEKKSPAKAPYSIKSVIGSDDRTRVTNTTAYPYRAIVHISSSIASCTGWMIGPKTVATAGHCIYDTSSGSFAGTATVSPGRNGTSYPYGSVKSTRYFIPSGWRSGNTNYDYGAIELSEPIGNTVGYFGYSYTTSSLVGTTVTISGYPGDKTAGTQWQHSGPIAISETYKLQYAMDTYGGQSGSPVFEQSSSRTNCSGPCSLAVHTNGVYGGSSYNRGTRITKEVFDNLTNWKNSAQ

SEQ ID NO: 50865 - protein, 316 aa, Bacillus licheniformis
LVSKKSVKRGLITGLIGISIYSLGMHPAQAAPSPHTPVSSDPSYKAETSVTYDPHIKSDQYGLYSKAFTGTGKVNETKEKAEKKSPAKAPYSIKSVIGSDQRTRVTNTTAYPYRAIVHISSSIGSCTGWMIGPKTVATAGHCIYDTSSGSFAGTATVSPGRNGTSYPYGSVKSTRYFIPSGWRSGNTNYDYGAIELSEPIGNTVGYFGYSYTTSSLVGTTVTISGYPGDKTAGTQWQHSGPIAISETYKLQYAMDTYGGQSGSPVFEQSSSRTNCSGPCSLAVHTNGVYGGSSYNRGTRITKEVFDNLTNWKNSAQ

SEQ ID NO: 50866 - protein, 316 aa, Bacillus licheniformis
LVSKKSVKRGLITGLIGISIYSLGMHPAQAAPSPHTPVSSDPSYKAETSVTYDPHIKSDQYGLYSKAFTGTGKVNETKEKAEKKSPAKAPYSIKSVIGSDDRTRVTNTTAYPYRAIVHISSSIGSCTGWMIGPKTVATAGHCIYDTSSGSFAGTATVSPGRNGTSYPYGSVKSTRYFIPSGWRSGNTNYDYGAIELSEPIGNTVGYFGYSYTTSSLVGTTVTISGYPGDKTAGTQWQRSGPIAISETYKLQYAMDTYGGQSGSPVFEQSSSRTNCSGPCSLAVHTNGVYGGSSYNRGTRITKEVFDNLTNWKNSAQ

SEQ ID NO: 50867 - protein, 316 aa, Bacillus licheniformis
LVSKKSVKRGLITGLIGISIYSLGMHPAQAAPSPHTPVSSDPSYKAETSVTYDPHIKSDQYGLYSKAFTGTGKVNETKEKAEKKSPAKAPYSIKSVIGSDERTRVTNTTAYPYRAIVHISSSIGSCTGWMIGPKTVATAGHCIYDTSSGSFAGTATVSPGRNGTSYPYGSVKSTRYFIPSGWRSGNTNYDYGAIELSEPIGNTVGYFGYSYTTSSLVGTTVTISGYPGDKTAGTQWQHSGPIAISETYKLQYAMDTYGGQSGSPVFEQSSSRTNCSGPCSLAVHTNGVYGGSSYNRGTRITKEVFDNLTNWKNSAQ

SEQ ID NO: 50868 - protein, 316 aa, Bacillus licheniformis
LVSKKSVKRGLITGLIGISIYSLGMHPAQAAPSPHTPVSSDPSYKAETSVTYDPHIKSDQYGLYSKAFTGTGKVNETKEKAEKKSPAKAPYSIKSVIGSDDRTRVTNTTAYPYRAIVHISSSIGSCTGWMIGPKTVATAGHCIYDTSSGSFAGTATVSPGRNGTSYPYGSVKSTRYFIPSGWRSANTNYDYGAIELSEPIGNTVGYFGYSYTTSSLVGTTVTISGYPGDKTAGTQWQHSGPIAISETYKLQYAMDTYGGQSGSPVFEQSSSRTNCSGPCSLAVHTNGVYGGSSYNRGTRITKEVFDNLTNWKNSAQ

SEQ ID NO: 50869 - protein, 222 aa, Bacillus licheniformis
SVIGSDDRTRVTNTTAYPYRAIVHISSSIGSCTGWMIGPKTVATAGHCIYDTSSGSFAGTASVSPGRNGTSYPYGSVKSTRYFIPSGWRSGNTNYDYGAIELSEPIGNTVGYFGYSYTTSSLVGTTVTISGYPGDKTAGTQWQHSGPIAISKTYKLQYAMDTYGGQSGSPVFEQSSSRTNCSGPCSLAVHTNGVYGGSSYNRGTRITKEVFDNLTNWKNSAQ

SEQ ID NO: 50870 - protein, 222 aa, Bacillus licheniformis
SVIGSDDRTRVTNTTAYPYRAIVHISSSSGSCTGWMIGPKTVATAGHCIYDTSSGSFAGTATVSPGRNGTSYPYGSVKSTRYFIPSGWRSGNTNYDYGAIELSEPIGNTVGYFGYSYTTSSLVGTTVTISGYPGDKTAGTQWQHSGPIAISATYKLQYAMDTYGGQSGSPVFEQSSSRTNCSGPCSLAVHTNGVYGGSSYNRGTRITKEVFDNLTNWKNSAQ

SEQ ID NO: 50871 - protein, 222 aa, Bacillus licheniformis
SVIGSDDRTRVTNTTAYPYRAIVHISSSIGSCTGWMIGPKTVATAGHCIYDTSSGSFAGTATVSPGRNGTSYPYGSVKSKRYFIPSGWRSGNTNYDYGAIELSEPIGNTVGYFGYSYTTSSLVGTTVTISGYPGDKTAGTQWQHSGPIAISETYKLRYAMDTYGGQSGSPVFEQSSSRTNCSGPCSLAVHTNGVYGGSSYNRGTRITKEVFDNLTNWKNSAQ

SEQ ID NO: 50872 - protein, 222 aa, Bacillus licheniformis
SVIGSDDRTRVTNTTAYPYRAIVHISSSIGSCTGWMIGPKTVATAGHCIYDTSSGSFAGTATVSPGRNGTSYPYGSVKSTRYFIPSGWRSGNTNYDYGAIELSEPIGNTVGYFGYSYTTSSLVGTTVTISGYPGDKTAGTQWQHSGPIAISETKKLRYAMDTYGGQSGSPVFEQSSSRTNCSGPCSLAVHTNGVYGGSSYNRGTRITKEVFDNLTNWKNSAQ

SEQ ID NO: 50873 - protein, 222 aa, Bacillus licheniformis
SVIGSDDRTRVTNTTAYPYRAIVHISSSIGSCTGWMIGPKTVATAGHCIYDTSSGSFAGTATVSPGRNGTSYPYGSVKSTRYFIPSGWRSGNTNFDYGAIELSEPIGNTVGYFGYSYTTSSLVGTTVTISGYPGDKTAGTQWQHSGPIAISETYKLQYAMDTYGGQSGSPVFEQSSSRTNCSGPCSLAVHTNGVYGGSSYNRGTRITKKVFDNLTNWKNSAQ

SEQ ID NO: 50874 - protein, 222 aa, Bacillus licheniformis
SVIGSDDRTRVTNTTAYPYRAIVHISSSIGSCTGWMIGPKTVATAGHCIYDTSSGSFAGTASVSPGRNGTSYPYGSVKSTRYFIPSGWRSGNTNYDYGAIELSEPIGNTVGYFGYSYTTSSLVGTTVTISGYPGDKTAGTQWQHSGPIAISGTYKLQYAMDTYGGQSGSPVFEQSSSRTNCSGPCSLAVHTNGVYGGSSYNRGTRITKEVFDNLTNWKNSAQ

SEQ ID NO: 50875 - protein, 222 aa, Bacillus licheniformis
SVIGSDDRTRVTNTTAYPYRAIVHISSSIGSCTGWMIGPKTVATAGHCIYDTSSGSFAGTATVSPGRNGTSYPYGSVKSTRYFIPSGWRSGNTNYDYGAIELSEPIGNTVGYFGYSYTTSSLVGTTVTISGYPGDKTAGTQWQHSGPIAISGTYKLQYAMDTYRGQSGSPVFEQSSSRTNCSGPCSLAVHTNGVYGGSSYNRGTRITKEVFDNLTNWKNSAQ

SEQ ID NO: 50876 - protein, 222 aa, Bacillus licheniformis
SVIGSDDRTRVTNTTAYPYRAIVHISSSTGSCTGWMIGPKTVATAGHCIYDTSSGSFAGTATVSPGRNGTSYPYGSVKSTRYFIPSGWRSGNTNYDYGAIELSEPIGNTVGYFGYSYTTSSLVGTTVTISGYPGDKTAGTQWQHSGPIAISATYKLQYAMDTYGGQSGSPVFEQSSSRTNCSGPCSLAVHTNGVYGGSSYNRGTRITKEVFDNLTNWKNSAQ

SEQ ID NO: 50877 - protein, 222 aa, Bacillus licheniformis
SVIGSDDRTRVTNTTAYPYRAIVHISSRIGSCTGWMIGPKTVATAGHCIYDTSSGSFAGTATVSPGRNGTSYPYGSVKSKRYFIPSGWRSGNTNYDYGAIELSEPIGNTVGYFGYSYTTSSLVGTTVTISGYPGDKTAGTQWQHSGPIAISETYKLQYAMDTYGGQSGSPVFEQSSSRTNCSGPCSLAVHTNGVYGGSSYNRGTRITKEVFDNLTNWKNSAQ

SEQ ID NO: 50878 - protein, 222 aa, Bacillus licheniformis
SVIGSDDRTRVTNTTAYPYRAIVHISSSIGSCTGWTIGPKTVATAGHCIYDTSSGSFAGTATVSPGRNGTSYPYGSVKSTRYFIPSGWRSGNTNYDYGAIELSEPIGNTVGYFGYSYTTSSLVGTTVTISGYPGDKTAGTQWQHSGPIAISETYKLQYASDTYGGQSGSPVFEQSSSRTNCSGPCSLAVHTNGVYGGSSYNRGTRITKEVFDNLTNWKNSAQ

SEQ ID NO: 50879 - protein, 222 aa, Bacillus licheniformis
SVIGSDDRTRVTNTTAYPYRAIVHISSSIGSCTGWMIGPKTVATAGHCIYDTSSGSFAGTATVSPGRNGTSYPYGSVKSTRYFIPSGWRSGNTNYDYGAIELSEPIGNTVGYFGYSYTTSSLVGTTVTISGYPGDKTAGTQWQHSGPIAISGTYKLQYAMDTYGGQSGSPVFEQSSSRTNCSGPCSLAVHTNGVYGGSSYNRGTRITKEVFNNLTNWKNSAQ

SEQ ID NO: 50880 - protein, 222 aa, Bacillus licheniformis
SVIGSDDRTRVTNTTAYPYRAIVHISSRIGSCTGWMIGPKTVATAGHCIYDTSSGSFAGTATVSPGRNGTSYPYGSVKSTRYFIPSGWRSGNTNYDYGAIELSEPIGNTVGYFGYSYTTSSLVGTTVTISGYPGDKTAGTQWQHSGPIAISVTYKLQYAMDTYGGQSGSPVFEQSSSRTNCSGPCSLAVHTNGVYGGSSYNRGTRITKEVFDNLTNWKNSAQ

SEQ ID NO: 50881 - protein, 222 aa, Bacillus licheniformis
SVIGSDDRTRVTNTTAYPYRAIVHISSSIGSCTGWMIGPKTVATAGHCIYDTSSGSFAGTATVSPGRNGTSYPYGSVKSTRYFIPSGWRSGNTKYDYGAIELSEPIGNTVGYFGYSYTTSSLVGTTVTISGYPGDKTAGTQWQHSGPIAISATYKLQYAMDTYGGQSGSPVFEQSSSRTNCSGPCSLAVHTNGVYGGSSYNRGTRITKEVFDNLTNWKNSAQ

SEQ ID NO: 50882 - protein, 222 aa, Bacillus licheniformis
SVIGSDDRTRVTNTTAYPYRAIVHISSSIGSCTGWMIGPKTVATAGHCIYDTSSGSFAGTATVSPGRNGTSYPYGSVKSTRYFIPSGWRSGNTNYDYGAIELSEPIGNTVGYFGYSYTTSSLVGTTVTISGYPGDKTAGTQWQHSGPIAISATYKLQYAMDTYGGQSGSPVFEQSSSRTNCSGPCSLAIHTNGVYGGSSYNRGTRITKEVFDNLTNWKNSAQ

SEQ ID NO: 50883 - protein, 222 aa, Bacillus licheniformis
SVIGSDDRTRVTNTTAYPYRAIVHISSSIGSCTGWMIGPKTVATAGHCIYDTSSGSFAGTATVSPGRNGTSYPYGSVKSTRYFIPSGWRSGNTNYDYGAIELSEPIGNTVGYFGYSYTTSSLVGTTVTISGYPGDKTAGTQWQHSGPIAISATYKLQYAMDTYGGQSGSPVFEQSSSRTNCSGPCSLAVHTNGVYGGSSYNRGTRITKAVFDNLTNWKNSAQ

SEQ ID NO: 50884 - protein, 222 aa, Bacillus licheniformis
SVIGSDDRTRVTNTTAYPYRAIVHISSSIGSCTGWIIGPKTVATAGHCIYDTSSGSFAGTATVSPGRNGTSYPYGSVKSTRYFIPSGWRSGNTNYDYGAIELSEPIGNTVGYFGYSYTTSSLVGTTVTISGYPGDKTAGTQWQHSGPIAISETYKLQYASDTYGGQSGSPVFEQSSSRTNCSGPCSLAVHTNGVYGGSSYNRGTRITKEVFDNLTNWKNSAQ

SEQ ID NO: 50885 - protein, 222 aa, Bacillus licheniformis
SVIGSDDRTRVTNTTAYPYRAIVHISSSIGSCTGWMIGPKTVATAGHCIYATSSGSFAGTATVSPGRNGTSYPYGSVKSTRYFIPSGWRSGNTNYDYGAIELSEPIGNTVGYFGYSYTTSSLVGTTVTISGYPGDKTAGTQWQHSGPIAISATYKLQYAMDTYGGQSGSPVFEQSSSRTNCSGPCSLAVHTNGVYGGSSYNRGTRITKEVFDNLTNWKNSAQ

SEQ ID NO: 50886 - protein, 222 aa, Bacillus licheniformis
SVIGSDDRTRVTNTTAYPYRAIVHISSSIGSCTGWMIGPKTVATAGHCIYDTSSGSFAGTATVSPGRNGTSYPYGSVKSTRYFIPSGWRSGNTNYDYGAIELSEPIGNTVGYFGYSYTTSSLVGTTVTISGYPGDKTAGTQWQHSGPIATSGTYKLQYAMDTYGGQSGSPVFEQSSSRTNCSGPCSLAVHTNGVYGGSSYNRGTRITKEVFDNLTNWKNSAQ

SEQ ID NO: 50887 - protein, 222 aa, Bacillus licheniformis
SVIGSDDRTRVTNTTAYPYRAIVHISSSIGSCTGWMIGPKTVATAGHCIYDTSSGSFAGTATVSPGRNRTSYPYGSVKSTRYFIPSGWRSGNTNYDYGAIELSEPIGNTVGYFGYSYTTSSLVGTTVTISGYPGDKTAGTQWQHSGPIAISGTYKLQYAMDTYGGQSGSPVFEQSSSRTNCSGPCSLAVHTNGVYGGSSYNRGTRITKEVFDNLTNWKNSAQ

SEQ ID NO: 50888 - protein, 222 aa, Bacillus licheniformis
SVIGSDDRTRVTNTTAYPYRAIVHISSSIGSCTGWMIGPKTVATAGHCIYDTSSGSFAGTATVSPGRNGTSYPYGSVKSTRYFIPSGWRKGNTNYDYGAIELSEPIGNTVGYFGYSYTTSSLVGTTVTISGYPGDKTAGTQWQHSGPIAISGTYKLQYAMDTYGGQSGSPVFEQSSSRTNCSGPCSLAVHTNGVYGGSSYNRGTRITKEVFDNLTNWKNSAQ

SEQ ID NO: 50889 - protein, 222 aa, Bacillus licheniformis
SVIGSDDRTRVTNTTAYPYRAIVHISSSIGSCTGWMIGPKTVATAGHCIYDTSSGSFAGTATVSPGRNGTSYPYGSVKSTRYFIPSGWRSGNTNYDYGAIELSEPIGNTVGYFGYSYTTSSLVGTTVTISGYPGDKTAGTQWQHSGPIAISGTYKLQYAMDTYGGQSGSPVFEQSSSRTNCSGPCSLAVHTNGVYGGSPYNRGTRITKEVFDNLTNWKNSAQ

SEQ ID NO: 50890 - protein, 222 aa, Bacillus licheniformis
SVIGSDDRTRVTNTTAYPYRAIVHISSSIGSCTGWMIGPKTVATAGHCIYDTSSGSFAGTATVSPGRNGTSYPYGSVKSTRYFIPSGWRSGNTNYDYGAIELSEPIGNTVGYFGYSYTTSSLVGTTVTISGYPGDKTAGTQWQHSGPIAISATYKLQYAMDTYGGQSGSPVFEQSSSRTNCSGPCSLAVHTNGVYGGSSYNRGTRITKEVFANLTNWKNSAQ

SEQ ID NO: 50891 - protein, 222 aa, Bacillus licheniformis
SVIGSDDRTRVTNTTAYPYRAIVHISSSAGSCTGWMIGPKTVATAGHCIYDTSSGSFAGTATVSPGRNGTSYPYGSVKSTRYFIPSGWRSGNTNYDYGAIELSEPIGNTVGYFGYSYTTSSLVGTTVTISGYPGDKTAGTQWQHSGPIAISATYKLQYAMDTYGGQSGSPVFEQSSSRTNCSGPCSLAVHTNGVYGGSSYNRGTRITKEVFDNLTNWKNSAQ

SEQ ID NO: 50892 - protein, 222 aa, Bacillus licheniformis
SVIGSDDRTRVTNTTAYPYRAIVHISSSIGSCTGWAIGPKTVATAGHCIYDTSSGSFAGTATVSPGRNGTSYPYGSVKSTRYFIPSGWRSGNTNYDYGAIELSEPIGNTVGYFGYSYTTSSLVGTTVTISGYPGDKTAGTQWQHSGPIAISETYKLQYASDTYGGQSGSPVFEQSSSRTNCSGPCSLAVHTNGVYGGSSYNRGTRITKEVFDNLTNWKNSAQ

SEQ ID NO: 50893 - protein, 222 aa, Bacillus licheniformis
SVIGSDDRTRVTNTTAYPYRAIVHISSSIGSCTGWMIGPKTVATAGHCIYDTSSGSFAGTATVSPGRNGTSYPYGSVKSTRYFIPSGWRSGNTNYDYGAIELSAPIGNTVGYFGYSYTTSSLVGTTVTISGYPGDKTAGTQWQHSGPIAISATYKLQYAMDTYGGQSGSPVFEQSSSRTNCSGPCSLAVHTNGVYGGSSYNRGTRITKEVFDNLTNWKNSAQ

SEQ ID NO: 50894 - protein, 222 aa, Bacillus licheniformis
SVIGSDDRTRVTNTTAYPYRAIVHISSSIGSCTGWLIGPKTVATAGHCIYDTSSGSFAGTATVSPGRNGTSYPYGSVKSTRYFIPSGWRSGNTNYDYGAIELSEPIGNTVGYFGYSYTTSSLVGTTVTISGYPGDKTAGTQWQHSGPIAISETYKLQYASDTYGGQSGSPVFEQSSSRTNCSGPCSLAVHTNGVYGGSSYNRGTRITKEVFDNLTNWKNSAQ

SEQ ID NO: 50895 - protein, 222 aa, Bacillus licheniformis
SVIGSDDRTRVTNTTAYPYRAIVHISSSIGSCTGWMIGPKTVATAGHCIYDTSSGSFAGTATVSPGRNGTSYPYGSVKSTRYFIPSGWRSGNTNYDYGAIELSEPIGNTVGYFGYSYTTSSLVGTTVTISGYPGDKTAGTQWQHSGPIAISVTYKLQYAMDTYGGQSGSPVFEQSSSRTNCSGPCSLAVHTNGVYGGSSHNRGTRITKEVFDNLTNWKNSAQ

SEQ ID NO: 50896 - protein, 222 aa, Bacillus licheniformis
SVIGSDDRTRVTNTTAYPYRAIVHISSRIGSCTGWMIGPKTVATAGHCIYDTSSGSFAGTATVSPGRNGTSYPYGSVKSTRYFIPSGWRSGNTNYDYGAIELSEPIGNTVGYFGYSYTTSSLVGTTVTISGYPGDKTAGTQWQHSGPIAISETYKLRYAMDTYGGQSGSPVFEQSSSRTNCSGPCSLAVHTNGVYGGSSYNRGTRITKEVFDNLTNWKNSAQ

SEQ ID NO: 50897 - protein, 222 aa, Bacillus licheniformis
SVIGSDDRTRVTNTTAYPYRAIVHISSSIGSCTGWMIGPKTVATAGHCIYDTSSGSFAGTATVSPGRNGTSYPYGSVKSTRYFIPSGWRSGNTNYDYGAIELSEPIGNTVGYFGYSYTTSSLVGTTVTISGYPGDKTAGTQWQHSGPIAISETFKLRYAMDTYGGQSGSPVFEQSSSRTNCSGPCSLAVHTNGVYGGSSYNRGTRITKEVFDNLTNWKNSAQ

SEQ ID NO: 50898 - protein, 222 aa, Bacillus licheniformis
SVIGSDDRTRVTNTTAYPYRAIVHISSSIGSCTGWMIGPKTVATAGHCIYDTSSGSFAGTATVSPGRNGTSYPYGSVKSTRYFIPSGWRSGNTNYDYGAIELSEPIGNTVGYFGYSYTTSSLVGTTVTISGYPGDKTAGTQWQHSGPIAISATYKLQYAMDTYGGQSGSPVFAQSSSRTNCSGPCSLAVHTNGVYGGSSYNRGTRITKEVFDNLTNWKNSAQ

SEQ ID NO: 50899 - protein, 222 aa, Bacillus licheniformis
SVIGSDDRTRVTNTTAYPYRAIVHISSSIGSCTGWMIGPKTVATAGHCIYDTSSGSFAGTATVSPGRNGTSYPYGSVKSTRYFIPSGWRSGNTNYDYGAIELSEPIGNTVGYFGYSYTTSSLVGTTVTISGYPGDKTAGTQWQHSGPIAISETYKLQYAMDTYGGQSGSPVFEQSSSRTNCSGPCSLAVHRNGVYCGSSYNRGTRITKEVFDNLTNWKNSAQ

SEQ ID NO: 50900 - protein, 222 aa, Bacillus licheniformis
SVIGSDDRTRVTNTTAYPYRAIVHISSSIGSCTGWMIGPKTVATAGHCIYDTSSGSFAGTATVSPGRNGTSYPYGSVKSTRYFIPSGWRSGNTNYDYGAIELSAPIGNTVGYFGYSYTTSSLVGTTVTISGYPGDKTAGTQWQHSGPIAISGTYKLQYAMDTYGGQSGSPVFEQSSSRTNCSGPCSLAVHTNGVYGGSSYNRGTRITKEVFDNLTNWKNSAQ

SEQ ID NO: 50901 - protein, 222 aa, Bacillus licheniformis
SVIGSDDRTRVTNTTAYPYRAIVHISSSIGSCTGWMIGPKTVATAGHCIYDTSSGSFAGTATVSPGRNRTSYPYGTVKSTRYFIPSGWRSGNTNYDYGAIELSEPIGNTVGYFGYSYTTSSLVGTTVTISGYPGDKTAGTQWQHSGPIAISETYKLQYAMDTYGGQSGSPVFEQSSSRTNCSGPCSLAVHTNGVYGGSSYNRGTRITKEVFDNLTNWKNSAQ

SEQ ID NO: 50902 - protein, 222 aa, Bacillus licheniformis
SVIGSDDRTRVTNTTAYPYRAIVHISSSIGSCTGWMIGPKTVATAGHCIYDTSSGSFAGTATVSPGRNRTSYPYGSVKSTRYFIPSGWRSGNTNYDYGAIELSEPIGNTVGYFGYSYTTSSLVGTTVTISGYPGDKTAGTQWQHSGPIAISVTYKLQYAMDTYGGQSGSPVFEQSSSRTNCSGPCSLAVHTNGVYGGSSYNRGTRITKEVFDNLTNWKNSAQ

SEQ ID NO: 50903 - protein, 222 aa, Bacillus licheniformis
SVIGSDDRTRVTNTTAYPYRAIVHISSSIGSCTGWVIGPKTVATAGHCIYDTSSGSFAGTATVSPGRNGTSYPYGSVKSTRYFIPSGWRSGNTNYDYGAIELSEPIGNTVGYFGYSYTTSSLVGTTVTISGYPGDKTAGTQWQHSGPIAISETYKLQYASDTYGGQSGSPVFEQSSSRTNCSGPCSLAVHTNGVYGGSSYNRGTRITKEVFDNLTNWKNSAQ

SEQ ID NO: 50904 - protein, 222 aa, Bacillus licheniformis
SVIGSDDRTRVTNTTAYPYRAIVHISSSIGSCTGWMIGPKTVATAGHCIYDTSSGSFARTATVSPGRNGTSYPYGSVKSTRYFIPSGWRSGNTNYDYGAIELSEPIGNTVGYFGYSYTTSSLVGTTVTISGYPGDKTAGTQWQHSGPIATSETYKLQYAMDTYGGQSGSPVFEQSSSRTNCSGPCSLAVHTNGVYGGSSYNRGTRITKEVFDNLTNWKNSAQ

SEQ ID NO: 50905 - protein, 222 aa, Bacillus licheniformis
SVIGSDDRTRVTNTTAYPYRAIVHISSSIGSCTGWMIGPKTVATAGHCIYDTSSGSFAGTATVSPGRNRTSYPYGSVKSTRYFIPSGWRSGNTNYDYGAIELSEPIGNTVGYFGYSYTTSSLVGTTVTISGYPGDKTAGTQWQHSGPIAISATYKLQYAMDTYGGQSGSPVFEQSSSRTNCSGPCSLAVHTNGVYGGSSYNRGTRITKEVFDNLTNWKNSAQ

SEQ ID NO: 50906 - protein, 222 aa, Bacillus licheniformis
SVIGSDDRTRVTNTTAYPYRAIVHISSSIGSCTGWMIGPKTVATAGHCIYDTSSGSFAGTATVSPGRNGTSYPYGSVKSTRYFIPSGWRSGNTNYDYGAIELSEPIGNTVGYFGYSYTTSSLVGTTVTISGYPGDKTAGTQWQHSGPIAISATYKLQYAMDTYGGQSGSPVFEQSSSRTNCSGPCSLALHTNGVYGGSSYNRGTRITKEVFDNLTNWKNSAQ

SEQ ID NO: 50907 - protein, 222 aa, Bacillus licheniformis
SVIGSDDRTRVTNTTAYPYRAIVHISSSIGSCTGWMIGPKTVATAGHCIYDTSSGSFAGTATVSPGRNGTSYPYGSVKSTRFFIPSGWRSGNTNFDYGAIELSEPIGNTVGYFGYSYTTSSLVGTTVTISGYPGDKTAGTQWQHSGPIAISETYKLQYAMDTYGGQSGSPVFEQSSSRTNCSGPCSLAVHTNGVYGGSSYNRGTRITKEVFDNLTNWKNSAQ

SEQ ID NO: 50908 - protein, 316 aa, Bacillus licheniformis
LVSKKSVKRGLITGLIGISIYSLGMHPAQAAPSPHTPVSSDPSYKAETSVTYDPHIKSDQYGLYSKAFTGTGKVNETKEKAEKKSPAKAPYSIKSVIGSDDRTRVTNTTAYPYRAIVHISSSIGSCTGWMIGPKTVATAGHCIYDTSSGSFAGTATVSPGRNGTSYPYGSVKSTRYFIPSGWRSGNTNYDYGAIELSEPIGNTVGYFGYSYTTSSLVGTTVCISGYPGDKTAGTQWQHCGPIAISETYKLQYAMDTYGGQSGSPVFEQSSSRTNCSGPCSLAVHTNGVYGGSSYNRGTRITKEVFDNLTNWKNSAQ

SEQ ID NO: 50909 - protein, 316 aa, Bacillus licheniformis
LVSKKSVKRGLITGLIGISIYSLGMHPAQAAPSPHTPVSSDPSYKAETSVTYDPHIKSDQYGLYSKAFTGTGKVNETKEKAEKKSPAKAPYSIKSVIGSDDRTRVTNTTAYPYRAIVHISSSIASCTGWMIGPKTVATAGHCIYDTSSGSFAGTATVSPGRNGTSYPYGSVKSTRYFIPSGWRSANTNYDYGAIELSEPIGNTVGYFGYSYTTSSLVGTTVTISGYPGDKTAGTQWQHSGPIAISETYKLQYAMDTYGGQSGSPVFEQSSSRTNCSGPCSLAVHTNGVYGGSSYNRGTRITKEVFDNLTNWKNSAQ

SEQ ID NO: 50910 - protein, 222 aa, Bacillus licheniformis
SVIGSDDRTRVTNTTAYPYRAIVHISSSIGSCTGWMIGPKTVATAGHCIYDTSSGSFAGTATVSPGRNGTSYPYGSVKSTRYFIPSGWRSGNTNYDYGAIELSEPIGNTVGYFGYSYTTSSLVGTTVTISGYPGDKTAGTQWQHSGPIAISRTFKLSYAMDTYGGQSGSPVFEQSSSRTNCSGPCSLAVHTNGVYGGSSYNRGTRITKEVFDNLTNWKNSAQ

SEQ ID NO: 50911 - protein, 222 aa, Bacillus licheniformis
SVIGSDDRTRVTNTTAYPYRAIVHISSSIGSCTGWMIGPKTVATAGHCIYDTSSGSFAGTATVSPGRNGTSYPYGSVKSTRYFIPSGWRSGNTNYDYGAIELSAPIGNTVGYFGYSYTTSSLVGTTVTISGYPGDKTAGTQWQHSGPIAISATYKLQYAMDTYGGQSGSPVFEQSSSRTNCSGPCSLAVHTNGVYGGSSYNRGTRITKAVFDNLTNWKNSAQ

SEQ ID NO: 50912 - protein, 222 aa, Bacillus licheniformis
SVIGSDDRTRVTNTTAYPYRAIVHISSSIGSCTGWMIGPKTVATAGHCIYDTSSGSFAGTATVSPGRNGTSYPYGSVKSTRYFIPSGWRSGNTNYDYGAIELSAPIGNTVGYFGYSYTTSSLVGTTVTISGYPGDKTAGTQWQHSGPIAISATYKLQYAMDTYGGQSGSPVFEQSSSRTNCSGPCSLAIHTNGVYGGSSYNRGTRITKEVFDNLTNWKNSAQ

SEQ ID NO: 50913 - protein, 222 aa, Bacillus licheniformis
SVIGSDDRTRVTNTTAYPYRAIVHISSSIGSCTGWMIGPKTVATAGHCIYDTTSGSFAGTATVSPGRNGTSYPYGSVKSTRYFIPSGWRSGNTNYDYGAIELSEPIGNTVGYFGYSYTTSSLVGTTVTISGYPGDKTAGTQWQHSGPIAISETYKLQYAMDTYGGQSGSPVFEQSSSRTNCSGPCSLAVHTNGVYGGSSFNRGTRITKKVFDNLTNWKNSAQ

SEQ ID NO: 50914 - protein, 222 aa, Bacillus licheniformis
SVIGSDDRTRVTNTTAYPYRAIVHISSSIGSCTGWMIGPKTVATAGHCIYDTSSGSFAGTATVSPGRNGTSYPYGSVKSTRYFIPSGWRSGNTNYDYGAIELSEPIGNTVGYFGYSYTTSSLVGTTVTISGYPGDKTAGTQWQHSGPIAISGTYKLQYAMDTYGGQSGSPVFIVSSSRTNCSGPCSLAVHTNGVYGGSSYNRGTRITKEVFDNLTNWKNSAQ

SEQ ID NO: 50915 - protein, 222 aa, Bacillus licheniformis
SVIGSDDRTRVTNTTAYPYRAIVHISSSIGSCTGWMIGPKTVATAGHCIYDTSSGSFAGTATVSPGRNGTSYPYGSVKSTRYFIPSGWRSGNTNYDYGAIELSAPIGNTVGYFGYSYTTSSLVGTTVTISGYPGDKTAGTQWQHSGPIAISATYKLQYAMDTYGGQSGSPVFEQSSSRTNCSGPCSLALHTNGVYGGSSYNRGTRITKEVFDNLTNWKNSAQ

SEQ ID NO: 50916 - protein, 222 aa, Bacillus licheniformis
SVIGSDDRTRVTNTTAYPYRAIVHISSSIGSCTGWMIGPKTVATAGHCIYDTSSGSFAGTATVSPGRNGTSYPYGSVKSTRYFIPSGWRSGNTNYDYGAIELSEPIGNTVGYFGYSYTTSSLVGTTVTISGYPGDKTAGTQWQHSGPIAISRTLKLYYAMDTYGGQSGSPVFEQSSSRTNCSGPCSLAVHTNGVYGGSSYNRGTRITKEVFDNLTNWKNSAQ

SEQ ID NO: 50917 - protein, 222 aa, Bacillus licheniformis
SVIGSDDRTRVTNTTAYPYRAIVHISSSIGSCTGWMIGPKTVATAGHCIYDTSSGSFAGTATVSPGRNGTSYPYGSVKSTRYFIPSGWRSGNTNFDYGAIELSEPIGNTVGYFGYSYTTSSLVGTTVTISGYPGDKTAGTQWQHSGPIAISRTSKLQYAMDTYGGQSGSPVFEQSSSRTNCSGPCSLAVHTNGVYGGSSYNRGTRITKEVFDNLTNWKNSAQ

SEQ ID NO: 50918 - protein, 222 aa, Bacillus licheniformis
SVIGSDDRTRVTNTTAYPYRAIVHISSSIGSCTGWMIGPKTVATAGHCIYDTSSGSFAGTATVSPGRNLTAYPYGSVKSTRYFIPSGWRSGNTNYDYGAIELSEPIGNTVGYFGYSYTTSSLVGTTVTISGYPGDKTAGTQWQHSGPIAISATYKLQYAMDTYGGQSGSPVFEQSSSRTNCSGPCSLAVHTNGVYGGSSYNRGTRITKEVFDNLTNWKNSAQ

SEQ ID NO: 50919 - protein, 222 aa, Bacillus licheniformis
SVIGSDDRTRVTNTTAYPYRAIVHISSSIGSCTGWMIGPKTVATAGHCIYDTSSGSFAGTATVSPGRNGTSYPYGSVKSTRYFIPSGWRSGNTNYDYGAIELSEPIGNTVGYFGYSYTTSSLVGTTVTISGYPGDKTAGTQWQHSGPIAISSTFKLLYAMDTYGGQSGSPVFEQSSSRTNCSGPCSLAVHTNGVYGGSSYNRGTRITKEVFDNLTNWKNSAQ

SEQ ID NO: 50920 - protein, 222 aa, Bacillus licheniformis
SVIGSDDRTRVTNTTAYPYRAIVHISSSIGSCTGWMIGPKTVATAGHCIYDTSSGSFAGTATVSPGRNGISYPYGSVKSTRYFIPSGWRSGNTNYDYGAIELSEPIGNTVGYFGYSYTTSSLVGTTVTISGYPGDKTAGTQWQHSGPIAISGTYKLQYAMDTYGGQSGSPVFEQSSSRSNCSGPCSLAVHTNGVYGGSSYNRGTRITKEVFDNLTNWKNSAQ

SEQ ID NO: 50921 - protein, 222 aa, Bacillus licheniformis
SVIGSDDRTRVTNTTAYPYRAIVHISSSIGSCTGWMIGPKTVATAGHCIYDTSSGSFAGTATVSPGRNGTSYPYGSVKSTRYFIPSGWRSGNTNYDYGAIELSEPIGNTVGYFGYSYTTSSLVGTTVTISGYPGDKTAGTQWQHSGPIAISATYKLRYAMDTYGGQSGSPVFEQSSSRTNCSGPCSLAVHTNGVYGGSSYNRGTRITKAVFDNLTNWKNSAQ

SEQ ID NO: 50922 - protein, 222 aa, Bacillus licheniformis
SVIGSDDRTRVTNTTAYPYRAIVHISSSIGSCTGWMIGPKTVATAGHCIYDTSSGSFAGTATVSPGRNGTSYPYGSVKSTRYFIPSGWRSGNTNYDYGAIELSEPIGNTVGYFGYSYTTSSLVGTTVTISGYPGDKTAGTQWQHSGPIAISRTAKLLYAMDTYGGQSGSPVFEQSSSRTNCSGPCSLAVHTNGVYGGSSYNRGTRITKEVFDNLTNWKNSAQ

SEQ ID NO: 50923 - protein, 222 aa, Bacillus licheniformis
SVIGSDDRTRVTNTTAYPYRAIVHISSSIGSCTGWMVGPKTVATAGHCIYDTSSGSFAGTATVSPGRNGTSYPYGSVKSTRYFIPSGWRSGNTNYDYGAIELSEPIGNTVGYFGYSYTTSSLVGTTVTISGYPGDKTAGTQWRHSGPIAISATYKLQYAMDTYGGQSGSPVFEQSSSRTNCSGPCSLAVHTNGVYGGSSYNRGTRITKEVFDNLTNWKNSAQ

SEQ ID NO: 50924 - protein, 222 aa, Bacillus licheniformis
SVIGSDDRTRVTNTTAYPYRAIVHISSSIGSCTGWMIGPKTVATAGHCIYDTSSGSFAGTATVSPGRNGTSYPYGSVKSTRYFIPSGWRSGNTNYDYGAIALSEPIGNTVGYFGYSYTTSSLVGTTVTISGYPGDKTAGTQWQHSGPIAISETYKLQYAMDTYGGQSGSPVFAQSSSRTNCSGPCSLAVHTNGVYGGSSYNRGTRITKAVFDNLTNWKNSAQ

SEQ ID NO: 50925 - protein, 222 aa, Bacillus licheniformis
SVIGSDDRTRVTNTTAYPYRAIVHISSSIGSCTGWMIGPKTVATAGHCIYDTSSGSFAGTATVSPGRNGTSYPYGSVKSTRYFIPSGWRSGNTNYDYGAIELSEPIGNTVGYFGYSYTTSSLVGTTVTISGYPGDKTAGTQWQHSGPIAISATYKLQYAMDTYGGQSGSPVFQPSSSRTNCSGPCSLAVHTNGVYGGSSYNRGTRITKEVFDNLTNWKNSAQ

SEQ ID NO: 50926 - protein, 222 aa, Bacillus licheniformis
SVIGSDDRTRVTNTTAYPYRAIVHISSSIGSCTGWMIGPKTVATAGHCIYDTSSGSFAGTATVSPGRNGTSYPYGSVKSTRYFIPSGWRSGNTNYDYGAIALSEPIGNTVGYFGYSYTTSSLVGTTVTISGYPGDKTAGTQWQHSGPIAISGTYKLQYAMDTYGGQSGSPVFAQSSSRTNCSGPCSLAVHTNGVYGGSSYNRGTRITKEVFDNLTNWKNSAQ

SEQ ID NO: 50927 - protein, 222 aa, Bacillus licheniformis
SVIGSDDRTRVTNTTAYPYRAIVHISSSIGSCTGWMIGPKTVATAGHCIYDTSSGSFAGTATVSPGRNGTSYPYGSVKSTRYFIPSGWRSGNTNYDYGAIELSEPIGNTVGYFGYSYTTSSLVGTTVTISGYPGDKTAGTQWQHSGPIAISKTYKLQYSMDTYGGQSGSPVFDQSSSRTNCSGPCSLAVHTNGVYGGSSYNRGTRITKEVFDNLTNWKNSAQ

SEQ ID NO: 50928 - protein, 222 aa, Bacillus licheniformis
SVIGSDDRTRVTNTTAYPYRAIVHISSRIGSCTGWMIGPKTVATAGHCIYDTSSGSFAGTATVSPGRNGTSYPYGSVKSKRYFIPSGWRSGNTNYDYGAIELSEPIGNTVGYFGYSYTTSSLVGTTVTISGYPGDKTAGTQWQHSGPIAISETYKLRYAMDTYGGQSGSPVFEQSSSRTNCSGPCSLAVHTNGVYGGSSYNRGTRITKEVFDNLTNWKNSAQ

SEQ ID NO: 50929 - protein, 222 aa, Bacillus licheniformis
SVIGSDDRTRVTNTTAYPYRAIVHISSSAGSCTGWMIGPKTVATAGHCIYDTSSGSFAGTATVSPGRNGTSYPYGSVKSTRYFIPSGWRSGNTNYDYGAIELSEPIGNTVGYFGYSYTTSSLVGTTVTISGYPGDKTAGTQWQHSGPIAISATYKLQYAMDTYGGQSGSPVFEQSSSRTNCSGPCSLAVHTNGVYGGSSYNRGTRITKAVFDNLTNWKNSAQ

SEQ ID NO: 50930 - protein, 222 aa, Bacillus licheniformis
SVIGSDDRTRVTNTTAYPYRAIVHISSSIGSCTGWMIGPKTVATAGHCIYDTSSGSFAGTATVSPGRNGTSYPYGSVKSKRYFIPSGWRSGNTNYDYGAIELSEPIGNTVGYFGYSYTTSSLVGTTVTISGYPGDKTAGTQWQHSGPIAISATYKLQYAMDTYGGQSGSPVFEQSSSRTNCSGPCSLAVHTNGVYGGSSYNRGTRITKAVFDNLTNWKNSAQ

SEQ ID NO: 50931 - protein, 222 aa, Bacillus licheniformis
SVIGSDDRTRVTNTTAYPYRAIVHISSSIGSCTGWMIGPKTVATAGHCIYDTSSGSFAGTATVSPGRNGTSYPYGSVKSTRYFIPSGWRSGNTNYDYGAIELSEPIGNTVGYFGYSYTTSSLVGTTVTISGYPGDKTAGTQWQHPGPIAISGTYKLRYAMDTYGGQSGSPVFEQSSSRTNCSGPCSLAVHTNGVYGGSSYNRGTRITKEVFDNLTNWKNSAQ

SEQ ID NO: 50932 - protein, 222 aa, Bacillus licheniformis
SVIGSDDRTRVTNTTAYPYRAIVHISSSIGSCTGWMIGPKTVATAGHCIYDTSSGSFAGTATVSPGRNGTSYPYGSVKSTRYFIPSGWRSGNTNYDYGAIEVSRPIGNTVGYFGYSYTTSSLVGTTVTISGYPGDKTAGTQWQHSGPIAISATYKLQYAMDTYGGQSGSPVFEQSSSRTNCSGPCSLAVHTNGVYGGSSYNRGTRITKEVFDNLTNWKNSAQ

SEQ ID NO: 50933 - protein, 222 aa, Bacillus licheniformis
SVIGSDDRTRVTNTTAYPYRAIVHISSSIGSCTGWMIGPKTVATAGHCIYDTSRGSFAGTATVSPGRNGTSYPYGSVKSTRYFIPSGWRSGNTNYDYGAIELSEPIGNTVGYFGYSYTTSSLVGTTVTISGYPGDKTAGTQWQHSGPIAISGTFKLQYAMDTYGGQSGSPVFEQSSSRTNCSGPCSLAVHTNGVYGGSSYNRGTRITKEVFDNLTNWKNSAQ

SEQ ID NO: 50934 - protein, 222 aa, Bacillus licheniformis
SVIGSDDRTRVTNTTAYPYRAIVQISSSIGSCTGWMIGPKTVATAGHCIYDTSSGSFAGTATVSPGRNGTSYPYGSVKSTRYFIPSGWRSGNTNYDYGAIELSEPIGNTVGYFGYSYTTSSLVGTTVTISGYPGDKTAGTQWQHSGPIAISGTYKLQYAMDTYGGQSGSPVFGQSSSRTNCSGPCSLAVHTNGVYGGSSYNRGTRITKEVFDNLTNWKNSAQ

SEQ ID NO: 50935 - protein, 222 aa, Bacillus licheniformis
SVIGSDDRTRVTNTTAYPYRAIVHISSSIGSCTGWMIGPKTVATAGHCIYDTSSGSFAGTATVSPGRNGTSYPYGSVKSTRYFIPSGWRSGNTNYDYGAIELSEPIGNTVGYFGYSYTTSSLVGTTVTISGYPGDKTAGTQWQHSGPIAISGTYKLQYAMDTYGGQSGSPVFEQSSSRTSCSGPCSLAVHSNGVYGGSSYNRGTRITKEVFDNLTNWKNSAQ

SEQ ID NO: 50936 - protein, 222 aa, Bacillus licheniformis
SVIGSDDRTRVTNTTAYPYRAIVHISSRIGSCTGWMIGPKTVATAGHCIYDTSSGSFAGTATVSPGRNGTSYPYGSVKSTRYFIPSGWRSGNTNYDYGAIELSEPIGNTVGYFGYSYTTSSLVGTTVTISGYPGDKTAGTQWQHSGPIAISATYKLQYAMDTYGGQSGSPVFEQSSSRTNCSGPCSLAVHTNGVYGGSSYNRGTRITKAVFDNLTNWKNSAQ

SEQ ID NO: 50937 - protein, 222 aa, Bacillus licheniformis
SVIGSDDRTRVTNTTAYPYRAIVHISSSIGSCTGWMIGPKTVATAGHCIYDTSSGSFAGTASVSPGRNGTSYPYGSVKSTRYFIPSGWRSGNTNYDYGAIELSEPIGNTVGYFGYSYTTSSLVGTTVTISGYPGDKTAGTQWQHSGPIAISGTYKLQYAMDTYGGQSGSPVFEQSSSRTNCSGPCSLAVHTNGVYGGSSYNRGTRITKQVFDNLTNWKNSAQ

SEQ ID NO: 50938 - protein, 222 aa, Bacillus licheniformis
SVIGSDDRTRVTNTTAYPYRAIVHISSSIGSCTGWMIGPKTVATAGHCIYDTSSGSFAGTATVSPGRNGTSYPYGSVKSTRYFIPSGWRSGNTNYDYGAIELSEPIGNTVGYFGYSYTTSSLVGTTVTISGYPGDKTAGTQWQHSGPIAISRTSKLSYAMDTYGGQSGSPVFEQSSSRTNCSGPCSLAVHTNGVYGGSSYNRGTRITKEVFDNLTNWKNSAQ

SEQ ID NO: 50939 - protein, 222 aa, Bacillus licheniformis
SVIGSDDRTRVTNTTAYPYRAIVHISSSIGSCTGWMIGPKTVATAGHCIYDTSSGSFAGTATVSPGRNGTSYPYGSVKSTRYFIPSGWRSGNTNYDYGAIELSKPIGNTVGYFGYSYTTSSLVGTTVTISGYPGDKTAGTQWQHSGPIAISETYKLQYAMDTYGGQSGSPVFERSSSRTNCSGPCALAVHTNGVYGGSSYNRGTRITKEVFDNLTNWKNSAQ

SEQ ID NO: 50940 - protein, 222 aa, Bacillus licheniformis
SVIGSDDRTRVTNTTAYPYRAIVHISSSIGSCTGWMIGPKTVATAGHCIYDTSSGSFAGTASVSPGRNGTSYPYGSVKSTRYFIPSGWRSGNTNYDYGAIELSEPIGNTVGYFGYSYTTSSLVGTTVTISGYPGDKTAGTQWQHSGPIAISGTYKLQYAMDTYGGQSGSPVFERSSSRSNCSGPCSLAVHTNGVYGGSSYNRGTRITKEVFDNLTNWKNSAQ

SEQ ID NO: 50941 - protein, 222 aa, Bacillus licheniformis
SVIGSDDRTRVTNTTAYPYRAIVHISSSIGSCTGWMIGPKTVATAGHCIYDTSSGSFAGTATVSPGRNGTSYPYGSVKSTRYFIPSGWRSGNTNFDYGAIELSEPIGNTVGYFGYSYTTSSLVGTTVTISGYPGDKTAGTQWQHSGPIAISRTSKLSYAMDTYGGQSGSPVFEQSSSRTNCSGPCSLAVHTNGVYGGSSYNRGTRITKEVFDNLTNWKNSAQ

SEQ ID NO: 50942 - protein, 222 aa, Bacillus licheniformis
SVIGPDDRTRVTNTTAYPYRAIVHISSSIGSCTGWMIGPKTVATAGHCIYDTSSGSFAGTATVSPGRNGTSYPYGSVKSTRYFIPSGWRSGNTNFDYGAIELSEPIGNTVGYFGYSYTTSSLVGTTVTISGYPGDKTAGTQWQHSGPIAISNTLKLQYAMDTYGGQSGSPVFEQSSSRTNCSGPCSLAVHTNGVYGGSSYNRGTRITKEVFDNLTNWKNSAQ

SEQ ID NO: 50943 - protein, 222 aa, Bacillus licheniformis
SVIGSDDRTRVTNTTAYPYRAIVHISSSIGSCTGWMIGPKTVATAGHCIYDTSSGSFAGTATVSPGRNGTSYPYGSVKSTRYFIPSGWRSGNTNFDYGAIELSEPIGNTVGYFGYSYTTSSLVGTTVTISGYPGDKTAGTQWQHSGPIAISRTSKLFYAMDTYGGQSGSPVFEQSSSRTNCSGPCSLAVHTNGVYGGSSYNRGTRITKEVFDNLTNWKNSAQ

SEQ ID NO: 50944 - protein, 222 aa, Bacillus licheniformis
SVIGSDDRTRVTNTTAYPYRAIVHISSRIGSCTGWMIGPKTVATAGHCIYDTSSGSFAGTATVSPGRNGTSYPYGSVKSTRYFIPSGWRSGNTNYDYGAIELSEPIGNTVGYFGYSYTTSSLVGTTVTISGYPGDKTAGTQWQHSGPIAISRTFKLAYAMDTYGGQSGSPVFEQSSSRTNCSGPCSLAVHTNGVYGGSSYNRGTRITKEVFDNLTNWKNSAQ

SEQ ID NO: 50945 - protein, 222 aa, Bacillus licheniformis
SVIGSDDRTRVTNTTAYPYRAIVHISSSIGSCTGWMIGPKTVATAGHCIYDTSSGSFAGTATVSPGRNGTSYPYGSVKSTRYFIPSGWRSGNTNYDYGAIELSEPIGNTVGYFGYSYTTSSLVGTTVTISGYPGDKTAGTQWQHSGPIAISATYKLQYAMDTYGGQSGSPVYQESSSRTNCSGPCSLAVHTNGVYGGSSYNRGTRITKEVFDNLTNWKNSAQ

SEQ ID NO: 50946 - protein, 222 aa, Bacillus licheniformis
SVIGSDDRTRVTNTTAYPYRAIVHISSSIGSCTGWMIGPKTVATAGHCIYDTSSGSFAGTATVSPGRNGTSYPYGSVKSTRYFIPSGWRSGNTNFDYGAIELSEPIGNTVGYFGYSYTTSSLVGTTVTISGYPGDKTAGTQWQHSGPIAISRTTKLHYAMDTYGGQSGSPVFEQSSSRTNCSGPCSLAVHTNGVYGGSSYNRGTRITKEVFDNLTNWKNSAQ

SEQ ID NO: 50947 - protein, 222 aa, Bacillus licheniformis
SVIGSDDRTRVTNTTAYPYRAIVHISSSIGSCTGWMIGPKTVATAGHCIYNTSSGSFAGTATVSPGRNGTSYPYGSIKSTRYFIPSGWRSGNTNYDYGAIELSEPIGNTVGYFGYSYTTSSLVGTTVTISGYPGDKRAGTQWQRSGPIAISETYKLQYAMDTYGGQSGSPVFEQSSSRTNCSGPCSLAVHTNGVYGGSSYNRGTRITKEVFDNLTNWKNSAQ

SEQ ID NO: 50948 - protein, 222 aa, Bacillus licheniformis
SVIGSDDRTRVTNTTAYPYRAIVHISSSIGSCTGWMIGPKTVATAGHCIYDTSSGSFAGTATVSPGRNGTSYPYGSVKSTRYFIPSGWRSGNTNYDYGAIALSEPIGNTVGYFGYSYTTSSLVGTTVTISGYPGDKTAGTQWQHSGPIAISATYKLQYAMDTYGGQSGSPVFAQSSSRTNCSGPCSLAVHTNGVYGGSSYNRGTRITKAVFDNLTNWKNSAQ

SEQ ID NO: 50949 - protein, 222 aa, Bacillus licheniformis
SVIGSDDRTRVTNTTAYPYRAIVHISSSIGSCTGWMIGPKTVATAAHCIFSTSSGSFAGTATVSPGRNGTSYPYGSVKSTRYFIPSGWRSGNTNYDYGAIELSEPIGNTVGYFGYSYTTSSLVGTTVTISGYPGDKTAGTQWQHSGPIAISGTYKLQYAMDTYGGQSGSPVFEQSSSRTNCSGPCSLAVHTNGVYGGSSYNRGTRITKEVFDNLTNWKNSAQ

SEQ ID NO: 50950 - protein, 222 aa, Bacillus licheniformis
SVIGSDDRTRVTNTTAYPYRAIVHISSSIGSCTGWMIGPKTVATAGHCIYDTSSGSFAGTATVSPGRNRTSYPYGSVKSTRYFIPSGWRSGNTNYDYGAIALSEPIGNTVGYFGYSYTTSSLVGTTVTISGYPGDKTAGTQWQHSGPIAISATYKLQYAMDTYGGQSGSPVFAQSSSRTNCSGPCSLAVHTNGVYGGSSYNRGTRITKEVFDNLTNWKNSAQ

SEQ ID NO: 50951 - protein, 222 aa, Bacillus licheniformis
SVIGSDDRTRVTNTTAYPYRAIVHISSSIGSCTGWMIGPKTVATAGHCIYDTSSGSFAGTATVSPGRNGTSYPYGSVKSTRYFIPSGWRSGNTNFDYGAIELSEPIGNTVGYFGYSYTTSSLVGTTVTVSGYPGDKTAGTQWQHSGPIAISRTTKLLYAMDTYGGQSGSPVFEQSSSRTNCSGPCSLAVHTNGVYGGSSYNRGTRITKEVFDNLTNWKNSAQ

SEQ ID NO: 50952 - protein, 317 aa, Bacillus licheniformis
KKSVTRVLMAGLIGISIYSMGIDSAQAASSPHTPVSSDPSYKPDSSASYDPAIKTNKNGAYSKAFEGTGKLDAPLYQEKSKPTKKSPAGPRYSPKSVIGSDERTRVTNTTAYPYRAIVHISSSIGSCTGSLIGPKTVATAGHCIYDTASGSFAGTATVSPGRNGSTYPYGSVTSTRYFIPSGYRSGNSNYDYGAIELSQPIGNTVGYFGYSYTTSSLVGSSVTIIGYPGDKTSGTQWQMSGNIAVSETYKLQYAIDTYGGQSGSPVYEASSSRTNCSGPCSLAVHTNGVYGGSSYNRGTRITKEVFDNLTNWKNSAQ

SEQ ID NO: 50953 - protein, 314 aa, Bacillus licheniformis
MAKNGVSRVFIAGLIGISIFSSGIYSAQAASSPHTPVSSDPSYKPGSTYDPNIKIDNNGAYSKAFEGTGTPGGSVQAKPKKESPAGPPYSPKSVIGSDERTRVTDTTAFPYRAIVHISSSIGSCTGWLIGPKTVATAGHCVYDTASRSFAGTATVSPGRNGSAYPYGSVTSTRYFIPSGWQSGNSNYDYAAIELSQPIGNTVGYFGYSYTASSLAGAGVTISGYPGDKTTGTQWQMSGTIAVSETYKLQYAIDTYGGQSGSPVYEKSSSRTNCSGPCSLAVHTNGVYGGSSYNRGTRITKEVFDNFTSWKNSAQ

SEQ ID NO: 50954 - protein, 274 aa, Bacillus licheniformis; identical to SEQ ID NO: 83

SEQ ID NO: 50955 - protein, 275 aa, Bacillus licheniformis
AQTVPYGIPLIKADKVQAQGFKGANVKVAVLDTGIQASHPDLNVVGGASFVAGEAYNTDGNGHGTHVAGTVAALDNTTGVLGVAPSVSLYAVKVLNSSGSGSYSGIVSGIEWATTNGMDVINMSLGGASGSTAMKQAVDNAYARGVVVVAAAGNSGSSGNTNTIGYPAKYDSVIAVGAVDSNSNRASFSSVGAELEVMAPGAGGVYSTYPTNTYATLNGTSMASPHVAGAAALILSKHPNLSASQVRNRLSSTATYLGSSFYYGKGLINVEAAAQ

SEQ ID NO: 50956 - protein, 254 aa, Bacillus licheniformis
FKGANVKVAVLDTGIQASHPDLNVVGGASFVAGEAYNTDGNGHGTHVAGTVAALDNTTGVLGVAPSVSLYAVKVLNSSGSGSYSGIVSGIEWATTNGMDVINMSLGGASGSTAMKQAVDNAYARGVVVVAAAGNSGSSGNTNTIGYPAKYDSVIAVGAVDSNSNRASFSSVGAELEVMAPGAGVYSTYPTNTYATLNGTSMASPHVAGAAALILSKHPNLSASQVRNRLSSTATYLGSSFYYGKGLINVEAAAQ

SEQ ID NO: 50957 - protein, 269 aa, Unidentified; identical to SEQ ID NO: 84

SEQ ID NO: 50958 - protein, 382 aa, unidentified; identical to SEQ ID NO: 85

SEQ ID NO: 50959 - protein, 273 aa, Bacillus licheniformis
QTVPYGIPLIKADKVQAQGFKGANVKVAVLDTGIQASHPDLNVVGGASFVAGEAYNTDGNGHGTHVAGTVAALDNTTGVLGVAPSVSLYAVKVLNSSGSGSYSGIVSGIEWATTNGMDVINMSLGGASGSTAMKQAVDNAYARGVVVVAAAGNSGSSGNTNTIGYPAKYDSVIAVGAVDSNSNRASFSSVGAELEVMAPGAGVYSTYPTNTYATLNGTSMASPHVAGAAALILSKHPNLSASQVRNRLSSTATYLGSSFYYGKGLINVEAAAQ

SEQ ID NO: 50960 - protein, 269 aa, Bacillus licheniformis
AQTVPYGIPLIKADKVQAQGFKGANVKVAVLDTGIQASHPDLNVVGGASFVAGEAYNTDGNGHGTHVAGTVAALDNTTGVLGVAPSVSLYAVKVLNSSGSGSYSGIVSGIEWATTNGMDVINMSLGGASGSTAMKQAVDNAYARGVVVVAAAGNSGSSGNTNTIGYPAKYDSVIAVGAVDSNSNRASFSSVGAELEVMAPGAGVYSTYPTNTYATLNGTSMASPHVAGAAALILSKHPNLSASQVRNRLSSTATYLGSSFYYGKGLINV

SEQ ID NO: 50961 - protein, 269 aa, Bacillus licheniformis
YGIPLIKADKVQAQGFKGANVKVAVLDTGIQASHPDLNVVGGASFVAGEAYNTDGNGHGTHVAGTVAALDNTTGVLGVAPSVSLYAVKVLNSSGSGSYSGIVSGIEWATTNGMDVINMSLGGASGSTAMKQAVDNAYARGVVVVAAAGNSGSSGNTNTIGYPAKYDSVIAVGAVDSNSNRASFSSVGAELEVMAPGAGVYSTYPTNTYATLNGTSMASPHVAGAAALILSKHPNLSASQVRNRLSSTATYLGSSFYYGKGLINVEAAAQ

SEQ ID NO: 50962 - protein, 298 aa, Unidentified
AEEAKEKYLIGFNEQEAVSEFVEQVEANDEVAILSEEEEVEIELLHEFETIPVLSVELSPEDVDALELDPAISYIEEDAEVTTMAQSVPWGISRVQAPAAHNRGLTGSGVKVAVLDTGISTHPDLNIRGGASFVPGEPSTQDGNGHGTHVAGTIAALNNSIGVLGVAPSAELYAVKVLGASGSGSVSSIAQGLEWAGNNGMHVANLSLGSPSPSATLEQAVNSATSRGVLVVAASGNSGAGSISYPARYANAMAVGATDQNNNRASFSQYGAGLDIVAPGVNVQSTYPGSTYASLNGT

SEQ ID NO: 50963 - protein, 214 aa, Unidentified
AQSVPWGISRVQAPAAHNRGLTGSGVKVAVLDTGISTHPDLNIRGGASFVPGEPSTQDGNGHGTHVAGTIAALNNSIGVLGVAPSAELYAVKVLGASGSGSVSSIAQGLEWAGNNGMHVANLSLGSPSPSATLEQAVNSATSRGVLVVAASGNSGAGSISYPARYANAMAVGATDQNNNRASFSQYGAGLDIVAPGVNVQSTYPGSTYASLNGT

SEQ ID NO: 50964 - protein, 211 aa, Bacillus licheniformis
AQTVPYGIPLIKADKVQAQGFKGANVKVAVLDTGIQASHPDLNVVGGASFVAGEAYNTDGNGHGTHVAGTVAALDNTTGVLGVAPSVSLYAVKVLNSSGSGSYSGIVSGIEWATTNGMDVINMSLGGASGSTAMKQAVDNAYARGVVVVAAAGNSGSSGNTNTIGYPAKYDSVIAVGAVDSNSNRASFSSVGAELEVMAPGAGVYSTYPTN

SEQ ID NO: 50965 - protein, 206 aa, Bacillus licheniformis
AQSVPWGISRVQAPAAHNRGLTGSGVKVAVLDTGISTHPDLNIRGGASFVPGEPSTQDGNGHGTHVAGTIAALNNSIGVLGVAPSAELYAVKVLGASGSGSVSSIAQGLEWAGNNGMHVANLSLGSPSPSATLEQAVNSATSRGVLVVAASGNSGAGSISYPARYANAMAVGATDQNNNRASFSQYGAGLDIVAPGVNVQSTYPGS

SEQ ID NO: 50966 - protein, 205 aa, Unidentified
AQSVPWGISRVQAPAAHNRGLTGSGVKVAVLDTGISTHPDLNIRGGASFVPGEPSTQDGNGHGTHVAGTIAALNNSIGVLGVAPSAELYAVKVLGASGSGSVSSIAQGLEWAGNNGMHVANLSLGSPSPSATLEQAVNSATSRGVLVVAASGNSGAGSISYPARYANAMAVGATDQNNNRASFSQYGAGLDIVAPGVNVQSTYPG

SEQ ID NO: 50967 - protein, 290 aa, Unidentified
AEEAKEKYLIGFNEQEAVSEFVEQVEANDEVAILSEEEEVEIELLHEFETIPVLSVELSPEDVDALELDPAISYIEEDAEVTTMAQSVPWGISRVQAPAAHNRGLTGSGVKVAVLDTGISTHPDLNIRGGASFVPGEPSTQDGNGHGTHVAGTIAALNNSIGVLGVAPSAELYAVKVLGASGSGSVSSIAQGLEWAGNNGMHVANLSLGSPSPSATLEQAVNSATSRGVLVVAASGNSGAGSISYPARYANAMAVGATDQNNNRASFSQYGAGLDIVAPGVNVQSTYPGS

SEQ ID NO: 50968 - protein, 289 aa, Unidentified
AEEAKEKYLIGFNEQEAVSEFVEQVEANDEVAILSEEEEVEIELLHEFETIPVLSVELSPEDVDALELDPAISYIEEDAEVTTMAQSVPWGISRVQAPAAHNRGLTGSGVKVAVLDTGISTHPDLNIRGGASFVPGEPSTQDGNGHGTHVAGTIAALNNSIGVLGVAPSAELYAVKVLGASGSGSVSSIAQGLEWAGNNGMHVANLSLGSPSPSATLEQAVNSATSRGVLVVAASGNSGAGSISYPARYANAMAVGATDQNNNRASFSQYGAGLDIVAPGVNVQSTYPG

SEQ ID NO: 50969 - protein, 265 aa, Bacillus licheniformis
AEEAKEKYLIGFNEQEAVSEFVEQVEANDEVAILSEEEEVEIELLHEFETIPVLSVELSPEDVDALELDPAISYIEEDAEVTTMAQSVPWGISRVQAPAAHNRGLTGSGVKVAVLDTGISTHPDLNIRGGASFVPGEPSTQDGNGHGTHVAGTIAALNNSIGVLGVAPSAELYAVKVLGASGSGSVSSIAQGLEWAGNNGMHVANLSLGSPSPSATLEQAVNSATSRGVLVVAASGNSGAGSISYPARYANAMAVGATDQNNNRA

SEQ ID NO: 50970 - protein, 241 aa, Bacillus licheniformis
AEEAKEKYLIGFNEQEAVSEFVEQVEANDEVAILSEEEEVEIELLHEFETIPVLSVELSPEDVDALELDPAISYIEEDAEVTTMAQSVPWGISRVQAPAAHNRGLTGSGVKVAVLDTGISTHPDLNIRGGASFVPGEPSTQDGNGHGTHVAGTIAALNNSIGVLGVAPSAELYAVKVLGASGSGSVSSIAQGLEWAGNNGMHVANLSLGSPSPSATLEQAVNSATSRGVLVVAASGNSGAG

SEQ ID NO: 50971 - protein, 181 aa, Bacillus licheniformis
AQSVPWGISRVQAPAAHNRGLTGSGVKVAVLDTGISTHPDLNIRGGASFVPGEPSTQDGNGHGTHVAGTIAALNNSIGVLGVAPSAELYAVKVLGASGSGSVSSIAQGLEWAGNNGMHVANLSLGSPSPSATLEQAVNSATSRGVLVVAASGNSGAGSISYPARYANAMAVGATDQNNNRA

SEQ ID NO: 50972 - protein, 157 aa, Saccharomyces cerevisiae
AQSVPWGISRVQAPAAHNRGLTGSGVKVAVLDTGISTHPDLNIRGGASFVPGEPSTQDGNGHGTHVAGTIAALNNSIGVLGVAPSAELYAVKVLGASGSGSVSSIAQGLEWAGNNGMHVANLSLGSPSPSATLEQAVNSATSRGVLVVAASGNSGAG

SEQ ID NO: 50973 - protein, 153 aa, Unidentified
AQSVPWGISRVQAPAAHNRGLTGSGVKVAVLDTGISTHPDLNIRGGASFVPGEPSTQDGNGHGTHVAGTIAALNNSIGVLGVAPSAELYAVKVLGASGSGSVSSIAQGLEWAGNNGMHVANLSLGSPSPSATLEQAVNSATSRGVLVVAASGN

SEQ ID NO: 50974 - protein, 211 aa, Unidentified
AEEAKEKYLIGFNEQEAVSEFVEQVEANDEVAILSEEEEVEIELLHEFETIPVLSVELSPEDVDALELDPAISYIEEDAEVTTMAQSVPWGISRVQAPAAHNRGLTGSGVKVAVLDTGISTHPDLNIRGGASFVPGEPSTQDGNGHGTHVAGTIAALNNSIGVLGVAPSAELYAVKVLGASGSGSVSSIAQGLEWAGNNGMHVANLSLGSP

SEQ ID NO: 50975 - protein, 382 aa, Unidentified
MMRKKSFWLGMLTAFMLVFTMAFSDSASAAEEAKEKYLIGFNEQEAVSEFVEQVEANDEVAILSEEEEVEIELLHEFETIPVLSVELSPEDVDALELDPAISYIEEDAEVTTMAQSVPWGISRVQAPAAHNRGLTGSGVKVAVLDTGISTHPDLNIRGGASFVPGEPSTQDGNGHGTHVAGTIAALNNSIGVLGVAPSAELYAVKVLGASGSGSVSSIAQGLEWAGNNGMHVANLSLGSPSPSATLEQAVNSATSRGVLVVAASGNSGAGSISYPARYANAMAVGATDQNNNRASFSQYGAGLDIVAPGVNVQSTYPGSTYASLNGTSMATPHVAGAAALVKQKNPSWSNVQIRNHLKNTATSLGSTNLYGSGLVNAEAATR

SEQ ID NO: 50976 - protein, 353 aa, Bacillus clausii
AEEAKEKYLIGFNEQEAVSEFVEQVEANDEVAILSEEEEVEIELLHEFETIPVLSVELSPEDVDALELDPAISYIEEDAEVTTMAQSVPWGISRVQAPAAHNRGLTGSGVKVAVLDTGISTHPDLNIRGGASFVPGEPSTQDGNGHGTHVAGTIAALNNSIGVLGVAPSAELYAVKVLGASGSGSVSSIAQGLEWAGNNGMHVANLSLGSPSPSATLEQAVNSATSRGVLVVAASGNSGAGSISYPARYANAMAVGATDQNNNRASFSQYGAGLDIVAPGVNVQSTYPGSTYASLNGTSMATPHVAGAAALVKQKNPSWSNVQIRNHLKNTATSLGSTNLYGSGLVNAEAATR

SEQ ID NO: 50977 - protein, 335 aa, Unidentified
SEFVEQVEANDEVAILSEEEEVEIELLHEFETIPVLSVELSPEDVDALELDPAISYIEEDAEVTTMAQSVPWGISRVQAPAAHNRGLTGSGVKVAVLDTGISTHPDLNIRGGASFVPGEPSTQDGNGHGTHVAGTIAALNNSIGVLGVAPSAELYAVKVLGASGSGSVSSIAQGLEWAGNNGMHVANLSLGSPSPSATLEQAVNSATSRGVLVVAASGNSGAGSISYPARYANAMAVGATDQNNNRASFSQYGAGLDIVAPGVNVQSTYPGSTYASLNGTSMATPHVAGAAALVKQKNPSWSNVQIRNHLKNTATSLGSTNLYGSGLVNAEAATR

SEQ ID NO: 50978 - protein, 304 aa, Unidentified
TIPVLSVELSPEDVDALELDPAISYIEEDAEVTTMAQSVPWGISRVQAPAAHNRGLTGSGVKVAVLDTGISTHPDLNIRGGASFVPGEPSTQDGNGHGTHVAGTIAALNNSIGVLGVAPSAELYAVKVLGASGSGSVSSIAQGLEWAGNNGMHVANLSLGSPSPSATLEQAVNSATSRGVLVVAASGNSGAGSISYPARYANAMAVGATDQNNNRASFSQYGAGLDIVAPGVNVQSTYPGSTYASLNGTSMATPHVAGAAALVKQKNPSWSNVQIRNHLKNTATSLGSTNLYGSGLVNAEAATR

SEQ ID NO: 50979 - protein, 301 aa, Unidentified
AEEAKEKYLIGFNEQEAVSEFVEQVEANDEVAILSEEEEVEIELLHEFETIPVLSVELSPEDVDALELDPAISYIEEDAEVTTMAQSVPWGISRVQAPAAHNRGLTGSGVKVAVLDTGISTHPDLNIRGGASFVPGEPSTQDGNGHGTHVAGTIAALNNSIGVLGVAPSAELYAVKVLGASGSGSVSSIAQGLEWAGNNGMHVANLSLGSPSPSATLEQAVNSATSRGVLVVAASGNSGAGSISYPARYANAMAVGATDQNNNRASFSQYGAGLDIVAPGVNVQSTYPGSTYASLNGTSMA

SEQ ID NO: 50980 - protein, 293 aa, Unidentified
AEEAKEKYLIGFNEQEAVSEFVEQVEANDEVAILSEEEEVEIELLHEFETIPVLSVELSPEDVDALELDPAISYIEEDAEVTTMAQSVPWGISRVQAPAAHNRGLTGSGVKVAVLDTGISTHPDLNIRGGASFVPGEPSTQDGNGHGTHVAGTIAALNNSIGVLGVAPSAELYAVKVLGASGSGSVSSIAQGLEWAGNNGMHVANLSLGSPSPSATLEQAVNSATSRGVLVVAASGNSGAGSISYPARYANAMAVGATDQNNNRASFSQYGAGLDIVAPGVNVQSTYPGCLTY

SEQ ID NO: 50981 - protein, 290 aa, Unidentified
AEEAKEKYLIGFNEQEAVSEFVEQVEANDEVAILSEEEEVEIELLHEFETIPVLSVELSPEDVDALELDPAISYIEEDAEVTTMAQSVPWGISRVQAPAAHNRGLTGSGVKVAVLDTGISTHPDLNIRGGASFVPGEPSTQDGNGHGTHVAGTIAALNNSIGVLGVAPSAELYAVKVLGASGSGSVSSIAQGLEWAGNNGMHVANLSLGSPSPSATLEQAVNSATSRGVLVVAASGNSGAGSISYPARYANAMAVGATDQNNNRASFSQYGAGLDIVAPGVNVQSTYPGA

SEQ ID NO: 50982 - protein, 281 aa, Unidentified
SYIEEDAEVTTMAQSVPWGISRVQAPAAHNRGLTGSGVKVAVLDTGISTHPDLNIRGGASFVPGEPSTQDGNGHGTHVAGTIAALNNSIGVLGVAPSAELYAVKVLGASGSGSVSSIAQGLEWAGNNGMHVANLSLGSPSPSATLEQAVNSATSRGVLVVAASGNSGAGSISYPARYANAMAVGATDQNNNRASFSQYGAGLDIVAPGVNVQSTYPGSTYASLNGTSMATPHVAGAAALVKQKNPSWSNVQIRNHLKNTATSLGSTNLYGSGLVNAEAATR

SEQ ID NO: 50983 - protein, 274 aa, Bacillus licheniformis
AQTVPYGIPLIKADKVQAQGFKGANVKVAVLDTGIQASHPDLNVVGGASFVAGEAYNTDGNGHGTHVAGTVAALDNTTGVLGVAPSVSLYAVKVLNSSGSGSYSGIVSGIEWATTNGMDVINMSLGGASGSTAMKQAVDNAYARGVVVVAAAGNSGSSGNTNTIGYPAKYDSVIAVGAVDSNSNRASFSSVGAELEVMAPGAGVYSTYPTNTYATLNGTSMASPHVAGAAALILSKHPNLSASQVRNLLSSTATYLGSSFYYGKGLINVEAAAQ

SEQ ID NO: 50984 - protein, 274 aa, Bacillus licheniformis
AQTVPYGIPLIKADKVQAQGFKGANVKVAVLDTGIQASHPDLNVVGGASFVAGEAYNTDGNGHGTHVAGTVAALDNTTGVLGVAPSVSLYAVKVLNSSGSNSYSGIVSGIEWATTNGMDVINMSLGGASGSTAMKQAVDNAYARGVVVVAAAGNSGSSGNTNTIGYPAKYDSVIAVGAVDSNSNRASFSSVGAELEVMAPGAGVYSTYPTNTYATLNGTSMASPHVAGAAALILSKHPNLSASQVRNRLSSTATYLGSSFYYGKGLINVEAAAQ

SEQ ID NO: 50985 - protein, 274 aa, Bacillus licheniformis
AQTVPYGIPLIKADKVQAQGFKGANVKVAVLDTGIQASHPDLNVVGGASFVAGEAYNTDGNGHGTHVAGTVAALDNTTGVLGVAPSDSLYAVKVLNSSGSGSYSGIVSGIEWATTNGMDVINMSLGGASGSTAMKQAVDNAYARGVVVVAAAGNSGSSGNTNTIGYPAKYDSVIAVGAVDSNSNRASFSSVGAELEVMAPGAGVYSTYPTNTYATLNGTSMASPHVAGAAALILSKHPNLSASQVRNRLSSTATYLGSSFYYGKGLINVEAAAQ

SEQ ID NO: 50986 - protein, 274 aa, Bacillus licheniformis
AQTVPYGIPLIKADKVQAQGFKGANVKVAVLDTGIQASHPDLNVVGGASFVAGEAYNTDGNGHGTHVAGTVAALDNTTGVLGVAPSVSLYAVKVLNSSGSGSYSGIVSGIEWATTNGMDVINMSLGGKSGSTAMKQAVDNAYARGVVVVAAAGNSGSSGNTNTIGYPAKYDSVIAVGAVDSNSNRASFSSVGAELEVMAPGAGVYSTYPTNTYATLNGTSMASPHVAGAAALILSKHPNLSASQVRNRLSSTATYLGSSFYYGKGLINVEAAAQ

SEQ ID NO: 50987 - protein, 274 aa, Bacillus licheniformis
AQTVPYGIPLIKADKVQAQGFKGANVKVAVLDTGIQASHPDLNVVGGASFVAGEAYNTDGNGHGTHVAGTVAALDNTTGVLGVAPSVSLYAVKVLNSSGSGSYSGIVSGIEWATTHGMDVINMSLGGASGSTAMKQAVDNAYARGVVVVAAAGNSGSSGNTNTIGYPAKYDSVIAVGAVDSNSNRASFSSVGAELEVMAPGAGVYSTYPTNTYATLNGTSMASPHVAGAAALILSKHPNLSASQVRNRLSSTATYLGSSFYYGKGLINVEAAAQ

SEQ ID NO: 50988 - protein, 274 aa, Bacillus licheniformis
AQTVPYGIPLIKADKVQAQGFKGANVKVAVLDTGIQASHPDLNVVGGASFVAGEAYNTDGNGHGTHVAGTVAALDNTTGVLGVAPSVSLYAVKVLNSSGSGSYSGIVSGIEWATTIGMDVINMSLGGASGSTAMKQAVDNAYARGVVVVAAAGNSGSSGNTNTIGYPAKYDSVIAVGAVDSNSNRASFSSVGAELEVMAPGAGVYSTYPTNTYATLNGTSMASPHVAGAAALILSKHPNLSASQVRNRLSSTATYLGSSFYYGKGLINVEAAAQ

SEQ ID NO: 50989 - protein, 274 aa, Bacillus licheniformis
AQTVPYGIPLIKADKVQAQGFKGANVKVAVLDTGIQAFHPDLNVVGGASFVAGEAYNTDGNGHGTHVAGTVAALDNTTGVLGVAPSVSLYAVKVLNSSGSGSYSGIVSGIEWATTNGMDVINMSLGGASGSTAMKQAVDNAYARGVVVVAAAGNSGSSGNTNTIGYPAKYDSVIAVGAVDSNSNRASFSSVGAELEVMAPGAGVYSTYPTNTYATLNGTSMASPHVAGAAALILSKHPNLSASQVRNRLSSTATYLGSSFYYGKGLINVEAAAQ

SEQ ID NO: 50990 - protein, 274 aa, Bacillus licheniformis
AQTVPYGIPLIKADKVQAQGFKGANVKVAVLDTGIQASHPDLNVVGGASFVAGEAYNFDGNGHGTHVAGTVAALDNTTGVLGVAPSVSLYAVKVLNSSGSGSYSGIVSGIEWATTNGMDVINMSLGGASGSTAMKQAVDNAYARGVVVVAAAGNSGSSGNTNTIGYPAKYDSVIAVGAVDSNSNRASFSSVGAELEVMAPGAGVYSTYPTNTYATLNGTSMASPHVAGAAALILSKHPNLSASQVRNRLSSTATYLGSSFYYGKGLINVEAAAQ

SEQ ID NO: 50991 - protein, 274 aa, Bacillus licheniformis
AQTVPYGIPLIKADKVQAQGFKGANVKVAVLDTGIQASHPDLNVVGGASFVAGEAYNTDGNGHGTHVAGTVAALDNTTGVLGVAPSVSLYAVKVLNSSGSGSYSGIVSGIEWATTNGMDVINMSLGGAHGSTAMKQAVDNAYARGVVVVAAAGNSGSSGNTNTIGYPAKYDSVIAVGAVDSNSNRASFSSVGAELEVMAPGAGVYSTYPTNTYATLNGTSMASPHVAGAAALILSKHPNLSASQVRNRLSSTATYLGSSFYYGKGLINVEAAAQ

SEQ ID NO: 50992 - protein, 274 aa, Bacillus licheniformis
AQTVPYGIPLIKADKVQAQGFKGANVKVAVLDTGIQASHPDLNVVGGASFVAGEAYNKDGNGHGTHVAGTVAALDNTTGVLGVAPSVSLYAVKVLNSSGSGSYSGIVSGIEWATTNGMDVINMSLGGASGSTAMKQAVDNAYARGVVVVAAAGNSGSSGNTNTIGYPAKYDSVIAVGAVDSNSNRASFSSVGAELEVMAPGAGVYSTYPTNTYATLNGTSMASPHVAGAAALILSKHPNLSASQVRNRLSSTATYLGSSFYYGKGLINVEAAAQ

SEQ ID NO: 50993 - protein, 274 aa, Bacillus subtilis
AQTVPYGIPLIKADKVQAQGFKGANVKVAVLDTGIQASHPDLNVVGGASFVAGEAYNTDGNGHGTHVAGTVAALDNCTGVLGVAPSVSLYAVKVLNSSGSGSYSGIVSGIEWATTNGMDVINMSLGGASGSTAMKQAVDNAYARGVVVVAAAGNSGSSGNTNTIGYPAKYDSVIAVGAVDSNSNRASFSSVGAELEVMAPGAGVYSTYPTNTYATLNGTSMASPHVAGAAALILSKHPNLSASQVRNRLSSTATYLGSSFYYGKGLINVEAAAQ

SEQ ID NO: 50994 - protein, 274 aa, Bacillus licheniformis
AQTVPYGIPLIKADKVQAQGFKGANVKVAVLDTGIQASHPDLNVVGGASFVAGEAYNTDGNGHGTHVAGTVAALDNTTGVLGVAPSVSLYAVKVLNSSGSGSYSGIVSGIEWATTNGMDVINMSLGGAPGSTAMKQAVDNAYARGVVVVAAAGNSGSSGNTNTIGYPAKYDSVIAVGAVDSNSNRASFSSVGAELEVMAPGAGVYSTYPTNTYATLNGTSMASPHVAGAAALILSKHPNLSASQVRNRLSSTATYLGSSFYYGKGLINVEAAAQ

SEQ ID NO: 50995 - protein, 274 aa, Bacillus licheniformis
AQTVPYGIPLIKADKVQAQGFKGANVKVAVLDTGIQASHPDLNVVGGASFVAGEAYNTDGNGHGTHVAGTVAALDNTTGVLGVAPSVSLYAVKVLNSSGSGSYSGIVSGIEWATTPGMDVINMSLGGASGSTAMKQAVDNAYARGVVVVAAAGNSGSSGNTNTIGYPAKYDSVIAVGAVDSNSNRASFSSVGAELEVMAPGAGVYSTYPTNTYATLNGTSMASPHVAGAAALILSKHPNLSASQVRNRLSSTATYLGSSFYYGKGLINVEAAAQ

SEQ ID NO: 50996 - protein, 274 aa, Bacillus licheniformis
AQTVPYGIPLIKADKVQAQGFKGANVKVAVLDTGIQASHPDLNVVGGASFVAGEAYNTDGNGHGTHVAGTVAALDNTTGVLGVAPSVSLYAVKVLNSSGSGSYSGIVSGIEWATTNGMDVINMSLGGVSGSTAMKQAVDNAYARGVVVVAAAGNSGSSGNTNTIGYPAKYDSVIAVGAVDSNSNRASFSSVGAELEVMAPGAGVYSTYPTNTYATLNGTSMASPHVAGAAALILSKHPNLSASQVRNRLSSTATYLGSSFYYGKGLINVEAAAQ

SEQ ID NO: 50997 - protein, 274 aa, Bacillus licheniformis
AQTVPYGIPLIKADKVQAQGFKGANVKVAVLDTGIQASHPDLNVVGGASFVAGEAYNTDGNGHGTHVAGTVAALDNTTGVLGVAPSVSLYAVKVLNSSGSGSYSGIVSGIEWATTVGMDVINMSLGGASGSTAMKQAVDNAYARGVVVVAAAGNSGSSGNTNTIGYPAKYDSVIAVGAVDSNSNRASFSSVGAELEVMAPGAGVYSTYPTNTYATLNGTSMASPHVAGAAALILSKHPNLSASQVRNRLSSTATYLGSSFYYGKGLINVEAAAQ

SEQ ID NO: 50998 - protein, 274 aa, Bacillus licheniformis
AQTVPYGIPLIKADKVQAQGFKGANVKVAVLDTGIQASHPDLNVVGGASFVAGEAYNTDGNGHGTHVAGTVAALDNTTGVLGVAPSVSLYAVKVLNSSGSGSYSGIVSGIEWATTNGMDVINMSLGGASGSTAMKQAVDNAYARGVVVVAAAGNSGSSGNTNTIGYPAKYDSVIAVGAVDSNSNRASFSSVGAELEVMAPGAGVYSTYPTNTYATLNGTSMASPHVAGAAALILSKHPNLSASQVRNCLSSTATYLGSSFYYGKGLINVEAAAQ

SEQ ID NO: 50999 - protein, 274 aa, Bacillus licheniformis
AQTVPYGIPLIKADKVQAQGFKGANVKVAVLDTGIQASHPDLNVVGGASFVAGEAYNTDGNGHGTHVAGTVAALDNTTGVLGVAPSVSLYAVKVLNSSGSGSYSGIVSGIEWATTNGMDVINMSLGGAYGSTAMKQAVDNAYARGVVVVAAAGNSGSSGNTNTIGYPAKYDSVIAVGAVDSNSNRASFSSVGAELEVMAPGAGVYSTYPTNTYATLNGTSMASPHVAGAAALILSKHPNLSASQVRNRLSSTATYLGSSFYYGKGLINVEAAAQ

SEQ ID NO: 51000 - protein, 274 aa, Bacillus licheniformis
AQTVPYGIPLIKADKVQAQGFKGANVKVAVLDTGIQASHPDLNVVGGASFVAGEAYNTDGNGHGTHVAGTVAALDNTTGVLGVAPSVSLYAVKVLNSSGSGSYSGIVSGIEWATTNGMDVINMSLGGASGSTAMKQAVDNAYARGVVVVAAAGNSGSSGNTNTIGYPAKYDSVIAVGAVDSNSNRASFSSVGAELEVMAPGAGVYSTYPTNTYATLNGTSMASPHVAGAAALILSKHPNLSASQVRNDLSSTATYLGSSFYYGKGLINVEAAAQ

SEQ ID NO: 51001 - protein, 274 aa, Bacillus licheniformis
AQTVPYGIPLIKADKVQAQGFKGANVKVAVLDTGIQASHPDLNVVGGASFVAGEAYNTDGNGHGTHVAGTVAALDNTTGVLGVAPSVSLYAVKVLNSSGSGSYSGIVSGIEWATTNGMDVINMSLGGWSGSTAMKQAVDNAYARGVVVVAAAGNSGSSGNTNTIGYPAKYDSVIAVGAVDSNSNRASFSSVGAELEVMAPGAGVYSTYPTNTYATLNGTSMASPHVAGAAALILSKHPNLSASQVRNRLSSTATYLGSSFYYGKGLINVEAAAQ

SEQ ID NO: 51002 - protein, 274 aa, Bacillus licheniformis
AQTVPYGIPLIKADKVQAQGFKGANVKVAVLDTGIQASHPDLNVVGGHSFVAGEAYNTDGNGHGTHVAGTVAALDNTTGVLGVAPSVSLYAVKVLNSSGSGSYSGIVSGIEWATTNGMDVINMSLGGASGSTAMKQAVDNAYARGVVVVAAAGNSGSSGNTNTIGYPAKYDSVIAVGAVDSNSNRASFSSVGAELEVMAPGAGVYSTYPTNTYATLNGTSMASPHVAGAAALILSKHPNLSASQVRNRLSSTATYLGSSFYYGKGLINVEAAAQ

SEQ ID NO: 51003 - protein, 274 aa, Bacillus licheniformis
AQTVPYGIPLIKADKVQAQGFKGANVKVAVLDTGIQASHPDLNVVGGASFVAGEAYNTDGNGHGTHVAGTVAALDNTTGVLQVAPSVSLYAVKVLNSSGSGSYSGIVSGIEWATTNGMDVINMSLGGASGSTAMKQAVDNAYARGVVVVAAAGNSGSSGNTNTIGYPAKYDSVIAVGAVDSNSNRASFSSVGAELEVMAPGAGVYSTYPTNTYATLNGTSMASPHVAGAAALILSKHPNLSASQVRNRLSSTATYLGSSFYYGKGLINVEAAAQ

SEQ ID NO: 51004 - protein, 274 aa, Bacillus licheniformis
AQTVPYGIPLIKADKVQAQGFKGANVKVAVLDTGIQASHPDLNVVGGASFVAGEAYNTDGNGHGTHVAGTVAALDNTTGVLGVAPSVSLYAVKVLNSSGSGSYSGIVSGIEWATTNGMDVINMSLGGASGSTAMKQAVDNAYARGVVVVAAAGNSGSSGNTNTIGYPAKYDSVIAVGAVDSNSNRASFSSVGAELEVMAPGAGVYSTYPTSTYATLNGTSMASPHVAGAAALILSKHPNLSASQVRNRLSSTATYLGSSFYYGKGLINVEAAAQ

SEQ ID NO: 51005 - protein, 274 aa, Bacillus licheniformis
AQTVPYGIPLIKADKVQAQGFKGANVKVAVLDTGIQASHLDLNVVGGASFVAGEAYNTDGNGHGTHVAGTVAALDNTTGVLGVAPSVSLYAVKVLNSSGSGSYSGIVSGIEWATTNGMDVINMSLGGASGSTAMKQAVDNAYARGVVVVAAAGNSGSSGNTNTIGYPAKYDSVIAVGAVDSNSNRASFSSVGAELEVMAPGAGVYSTYPTNTYATLNGTSMASPHVAGAAALILSKHPNLSASQVRNRLSSTATYLGSSFYYGKGLINVEAAAQ

SEQ ID NO: 51006 - protein, 274 aa, Bacillus licheniformis
AQTVPYGIPLIKADKVQAQGFKGANVKVAVLDTGIQASHPDLNVVGGASFVAGEAYNTDGNGHGTHVAGTVAALDNTTGVLGVAPSVSLYAVKVLNSSGSGSYSGIVSGIEWATTNGMDVINMSLGGASESTAMKQAVDNAYARGVVVVAAAGNSGSSGNTNTIGYPAKYDSVIAVGAVDSNSNRASFSSVGAELEVMAPGAGVYSTYPTNTYATLNGTSMASPHVAGAAALILSKHPNLSASQVRNRLSSTATYLGSSFYYGKGLINVEAAAQ

SEQ ID NO: 51007 - protein, 274 aa, Bacillus licheniformis
AQTVPYGIPLIKADKVQAQGFKGANVKVAVLDTGIQASHPDLNVVGGASFVAGEAYNTDGNGHGTHVAGTVAALDNTTGVLGVAPSVSDYAVKVLNSSGSGSYSGIVSGIEWATTNGMDVINMSLGGASGSTAMKQAVDNAYARGVVVVAAAGNSGSSGNTNTIGYPAKYDSVIAVGAVDSNSNRASFSSVGAELEVMAPGAGVYSTYPTNTYATLNGTSMASPHVAGAAALILSKHPNLSASQVRNRLSSTATYLGSSFYYGKGLINVEAAAQ

SEQ ID NO: 51008 - protein, 274 aa, Bacillus licheniformis
AQTVPYGIPLIKADKVQAQGFKGANVKVAVLDTGIQASHPDLNVVGGASFVAGEAYNMDGNGHGTHVAGTVAALDNTTGVLGVAPSVSLYAVKVLNSSGSGSYSGIVSGIEWATTNGMDVINMSLGGASGSTAMKQAVDNAYARGVVVVAAAGNSGSSGNTNTIGYPAKYDSVIAVGAVDSNSNRASFSSVGAELEVMAPGAGVYSTYPTNTYATLNGTSMASPHVAGAAALILSKHPNLSASQVRNRLSSTATYLGSSFYYGKGLINVEAAAQ

SEQ ID NO: 51009 - protein, 274 aa, Bacillus licheniformis
AQTVPYGIPLIKADKVQAQGFKGANVKVAVLDTGIQASHPDLNVVGGASFVAGEAYNTDGNGHGTHVAGTVAALDNTTGVLGVAPSVSLYAVKVLNSSGSGSYSGIVSGMEWATTNGMDVINMSLGGASGSTAMKQAVDNAYARGVVVVAAAGNSGSSGNTNTIGYPAKYDSVIAVGAVDSNSNRASFSSVGAELEVMAPGAGVYSTYPTNTYATLNGTSMASPHVAGAAALILSKHPNLSASQVRNRLSSTATYLGSSFYYGKGLINVEAAAQ

SEQ ID NO: 51010 - protein, 274 aa, Bacillus licheniformis
AQTVPYGIPLIKADKVQAQGFKGANVKVAVLDTGIQASHPDLNVVGGASFVAGEAYNGDGNGHGTHVAGTVAALDNTTGVLGVAPSVSLYAVKVLNSSGSGSYSGIVSGIEWATTNGMDVINMSLGGASGSTAMKQAVDNAYARGVVVVAAAGNSGSSGNTNTIGYPAKYDSVIAVGAVDSNSNRASFSSVGAELEVMAPGAGVYSTYPTNTYATLNGTSMASPHVAGAAALILSKHPNLSASQVRNRLSSTATYLGSSFYYGKGLINVEAAAQ

SEQ ID NO: 51011 - protein, 274 aa, Bacillus licheniformis
AQTVPYGIPLIKADKVQAQGFKGANVKVAVLDTGIQASHPDLNVVGGASFVAGEAYNTDGNGHGTHVAGTVAALDNTTGVLGVAPSVSLYAVKVLNSSGSGSYSGIVSGIEWATTNGMDVINMSLGGASGSTAMKQAVDNAYARGVVVVAAAGNSGSSGCTNTIGYPAKYDSVIAVGAVDSNSNRASFSSVGAELEVMAPGAGVYSTYPTNTYATLNGTSMASPHVAGAAALILSKHPNLSASQVRNRLSSTATYLGSSFYYGKGLINVEAAAQ

SEQ ID NO: 51012 - protein, 274 aa, Bacillus licheniformis
AQTVPYGIPLIKADKVQAQGFKGANVKVAVLDTGIQASHGDLNVVGGASFVAGEAYNTDGNGHGTHVAGTVAALDNTTGVLGVAPSVSLYAVKVLNSSGSGSYSGIVSGIEWATTNGMDVINMSLGGASGSTAMKQAVDNAYARGVVVVAAAGNSGSSGNTNTIGYPAKYDSVIAVGAVDSNSNRASFSSVGAELEVMAPGAGVYSTYPTNTYATLNGTSMASPHVAGAAALILSKHPNLSASQVRNRLSSTATYLGSSFYYGKGLINVEAAAQ

SEQ ID NO: 51013 - protein, 274 aa, Bacillus mojavensis
AQTVPYGIPLIKADKVQAQGFKGANVKVAVLDTGIQASHPDLNVVGGASFVAGEAYNTDGNGHGTHVAGTVAALDNTTGVLGVAPSVSLYAVKVLNSSGSGDYSGIVSGIEWATTNGMDVINMSLGGASGSTAMKQAVDNAYARGVVVVAAAGNSGSSGNTNTIGYPAKYDSVIAVGAVDSNSNRASFSSVGAELEVMAPGAGVYSTYPTNTYATLNGTSMASPHVAGAAALILSKHPNLSASQVRNRLSSTATYLGSSFYYGKGLINVEAAAQ

SEQ ID NO: 51014 - protein, 274 aa, Bacillus licheniformis
AQTVPYGIPLIKADKVQAQGFKGANVKVAVLDTGIQASHPDLNVVGGASFVAGEAYNTDGNGHGTHVAGTVAALDNTTGVLGVAPSVSGYAVKVLNSSGSGSYSGIVSGIEWATTNGMDVINMSLGGASGSTAMKQAVDNAYARGVVVVAAAGNSGSSGNTNTIGYPAKYDSVIAVGAVDSNSNRASFSSVGAELEVMAPGAGVYSTYPTNTYATLNGTSMASPHVAGAAALILSKHPNLSASQVRNRLSSTATYLGSSFYYGKGLINVEAAAQ

SEQ ID NO: 51015 - protein, 274 aa, Bacillus licheniformis
AQTVPYGIPLIKADKVQAQGFKGANVKVAVLDTGIQASHPDLNVVGGASFVAGEAYNTDGNGHGTHVAGTVAALDNTTGVLIVAPSVSLYAVKVLNSSGSGSYSGIVSGIEWATTNGMDVINMSLGGASGSTAMKQAVDNAYARGVVVVAAAGNSGSSGNTNTIGYPAKYDSVIAVGAVDSNSNRASFSSVGAELEVMAPGAGVYSTYPTNTYATLNGTSMASPHVAGAAALILSKHPNLSASQVRNRLSSTATYLGSSFYYGKGLINVEAAAQ

SEQ ID NO: 51016 - protein, 274 aa, Bacillus licheniformis
AQTVPYGIPLIKADKVQAQGFKGANVKVAVLDTGIQASHPDLNVVGGASFVAGEAYNTDGNGHGTHVAGTVAALDNTTGVLGVAPSVSLYAVKVLNSSGSGSYSGIVSGIEWATTNGMDVINMSLGGISGSTAMKQAVDNAYARGVVVVAAAGNSGSSGNTNTIGYPAKYDSVIAVGAVDSNSNRASFSSVGAELEVMAPGAGVYSTYPTNTYATLNGTSMASPHVAGAAALILSKHPNLSASQVRNRLSSTATYLGSSFYYGKGLINVEAAAQ

SEQ ID NO: 51017 - protein, 274 aa, Bacillus licheniformis
AQTVPYGIPLIKADKVQAQGFKGANVKVAVLDTGIQASHPDLNVVGGASFVAGEAYNTDGNGHGTHVAGTVAALDNTTGVLGVAPSVSLYAVKVLNSSGSGSYSGIVSGIEWATTDGMDVINMSLGGASGSTAMKQAVDNAYARGVVVVAAAGNSGSSGNTNTIGYPAKYDSVIAVGAVDSNSNRASFSSVGAELEVMAPGAGVYSTYPTNTYATLNGTSMASPHVAGAAALILSKHPNLSASQVRNRLSSTATYLGSSFYYGKGLINVEAAAQ

SEQ ID NO: 51018 - protein, 274 aa, Bacillus licheniformis
AQTVPYGIPLIKADKVQAQGFKGANVKVAVLDTGIQASHPDLNVVGGASFVAGEAYNTDGNGHGTHVAGTVAALDNTTGVLFVAPSVSLYAVKVLNSSGSGSYSGIVSGIEWATTNGMDVINMSLGGASGSTAMKQAVDNAYARGVVVVAAAGNSGSSGNTNTIGYPAKYDSVIAVGAVDSNSNRASFSSVGAELEVMAPGAGVYSTYPTNTYATLNGTSMASPHVAGAAALILSKHPNLSASQVRNRLSSTATYLGSSFYYGKGLINVEAAAQ

SEQ ID NO: 51019 - protein, 274 aa, Bacillus licheniformis
AQTVPYGIPLIKADKVQAQGFKGANVKVAVLDTGIQASHPDLNVVGGASFVAGEAYNTDGNGHGTHVAGTVAALDNTTGVLGVAPSVSLYAVKVLNSSGSGSYSGIVSGIEWATTNGMDVINMSLGGASGSTAMKQAVDNAYARGVVVVAAAGNSGSSGNTNTIGYPAKYDSVIAVGAVDSNSNRASFSSVGAELEVMAPGAGVYSTYPTNTYATLNGTSMASPHVAGAAALILSKHPNLSASQVRNRLSSTATYLGSSFYYGKGLINVEGAAQ

SEQ ID NO: 51020 - protein, 274 aa, Bacillus licheniformis
AQTVPYGIPLIKADKVQAQGFKGANVKVAVLDTGIQASHPDLNVVGGASFVAGEAYNTDGNGHGTHVAGTVAALDNTTGVLGVAPSVSLYAVKVLNSSGSRSYSGIVSGIEWATTNGMDVINMSLGGASGSTAMKQAVDNAYARGVVVVAAAGNSGSSGNTNTIGYPAKYDSVIAVGAVDSNSNRASFSSVGAELEVMAPGAGVYSTYPTNTYATLNGTSMASPHVAGAAALILSKHPNLSASQVRNRLSSTATYLGSSFYYGKGLINVEAAAQ

SEQ ID NO: 51021 - protein, 274 aa, Bacillus licheniformis
AQTVPYGIPLIKADKVQAQGFKGANVKVAVLDTGIQASHPDLNVVGGASFVAGEAYNTDGNGHGTHVAGTVAALDHTTGVLGVAPSVSLYAVKVLNSSGSGSYSGIVSGIEWATTNGMDVINMSLGGASGSTAMKQAVDNAYARGVVVVAAAGNSGSSGNTNTIGYPAKYDSVIAVGAVDSNSNRASFSSVGAELEVMAPGAGVYSTYPTNTYATLNGTSMASPHVAGAAALILSKHPNLSASQVRNRLSSTATYLGSSFYYGKGLINVEAAAQ

SEQ ID NO: 51022 - protein, 274 aa, Bacillus licheniformis
AQTVPYGIPLIKADKVQAQGFKGANVKVAVLDTGIQASHPDLNVVGGASFVAGEAYNTDGNGHGTHVAGTVAALDNTTGVLGVAPSVSLYAVKVLNSSGSGSYSGIVSGIEWATTNGMDVINMSLGGASGSTAMKQAVDNAYARGVVVVAAAGNSGSSGNTNTIGYPAKYDSVIAVGAVDSNSNRASFSSVGAELEVMAPGAGVYSTYPTNTYATLNGTSMASPHVAGAAALILSKHPNLSASQVRNYLSSTATYLGSSFYYGKGLINVEAAAQ

SEQ ID NO: 51023 - protein, 274 aa, Bacillus licheniformis
AQTVPYGIPLIKADKVQAQGFKGANVKVAVLDTGIQASHPDLNVVGGASFVAGEAYNTDGNGHGTHVAGTVAALDNTTGVLGVAPSVSLYAVKVLNSSGSGSYSGIVSGIEWATTNGMDVINMSLGGASNSTAMKQAVDNAYARGVVVVAAAGNSGSSGNTNTIGYPAKYDSVIAVGAVDSNSNRASFSSVGAELEVMAPGAGVYSTYPTNTYATLNGTSMASPHVAGAAALILSKHPNLSASQVRNRLSSTATYLGSSFYYGKGLINVEAAAQ

SEQ ID NO: 51024 - protein, 274 aa, Bacillus licheniformis
AQTVPYGIPLIKADKVQAQGFKGANVKVAVLDTGIQASHPDLNVVGGASFVAGEAYNTDGNGHGTHVAGTVAALDNTTGVLGVAPSVSLYAVKVLNSSGSGSYSGIVSGIEWATTNGMDVINMSLGGAKGSTAMKQAVDNAYARGVVVVAAAGNSGSSGNTNTIGYPAKYDSVIAVGAVDSNSNRASFSSVGAELEVMAPGAGVYSTYPTNTYATLNGTSMASPHVAGAAALILSKHPNLSASQVRNRLSSTATYLGSSFYYGKGLINVEAAAQ

SEQ ID NO: 51025 - protein, 274 aa, Bacillus licheniformis
AQTVPYGIPLIKADKVQAQGFKGANVKVAVLDTGIQASHPDLNVVGGASFVAGEAYNTDGNGHGTHVAGTVAALDNTTGVLGVAPSVSVYAVKVLNSSGSGSYSGIVSGIEWATTNGMDVINMSLGGASGSTAMKQAVDNAYARGVVVVAAAGNSGSSGNTNTIGYPAKYDSVIAVGAVDSNSNRASFSSVGAELEVMAPGAGVYSTYPTNTYATLNGTSMASPHVAGAAALILSKHPNLSASQVRNRLSSTATYLGSSFYYGKGLINVEAAAQ

SEQ ID NO: 51026 - protein, 274 aa, Bacillus licheniformis
AQTVPYGIPLIKADKVQAQGFKGANVKVAVLDTGIQASHPDLNVVGGVSFVAGEAYNTDGNGHGTHVAGTVAALDNTTGVLGVAPSVSLYAVKVLNSSGSGSYSGIVSGIEWATTNGMDVINMSLGGASGSTAMKQAVDNAYARGVVVVAAAGNSGSSGNTNTIGYPAKYDSVIAVGAVDSNSNRASFSSVGAELEVMAPGAGVYSTYPTNTYATLNGTSMASPHVAGAAALILSKHPNLSASQVRNRLSSTATYLGSSFYYGKGLINVEAAAQ

SEQ ID NO: 51027 - protein, 274 aa, Bacillus licheniformis
AQTVPYGIPLIKADKVQAQGFKGANVKVAVLDTGIQASHPDLNVVGGASFVAGEAYNTDGNGHGTHVAGTVAALDNTTGVLGVAPSVSLYAVKVLNSSGSGSYSGIVSGIEWATTNGMDVINMSLGGASGSTAMKQAVDNAYARGVVVVAAAGNSGSSGNTNTIGYPAKYDSVIAVGAVDSNSNRASFSSVGAELEVMAPGAGVYSTYPTNTYATLNGTSMASPHVAGAAALILSKHPNLSASQVRNMLSSTATYLGSSFYYGKGLINVEAAAQ

SEQ ID NO: 51028 - protein, 274 aa, Bacillus licheniformis
AQTVPYGIPLIKADKVQAQGFKGANVKVAVLDTGIQASHPDLNVVGGASFVAGEAYNTDGNGHGTHVAGTVAALDNTTGVLGVAPSVSLYAVKVLNSSGSGSYSGIVSGIEWATTNGMDVINMSLGSASGSTAMKQAVDNAYARGVVVVAAAGNSGSSGNTNTIGYPAKYDSVIAVGAVDSNSNRASFSSVGAELEVMAPGAGVYSTYPTNTYATLNGTSMASPHVAGAAALILSKHPNLSASQVRNRLSSTATYLGSSFYYGKGLINVEAAAQ

SEQ ID NO: 51029 - protein, 274 aa, Bacillus licheniformis
AQTVPYGIPLIKADKVQAQGFKGANVKVAVLDTGIQASHPDLNVVGGMSFVAGEAYNTDGNGHGTHVAGTVAALDNTTGVLGVAPSVSLYAVKVLNSSGSGSYSGIVSGIEWATTNGMDVINMSLGGASGSTAMKQAVDNAYARGVVVVAAAGNSGSSGNTNTIGYPAKYDSVIAVGAVDSNSNRASFSSVGAELEVMAPGAGVYSTYPTNTYATLNGTSMASPHVAGAAALILSKHPNLSASQVRNRLSSTATYLGSSFYYGKGLINVEAAAQ

SEQ ID NO: 51030 - protein, 274 aa, Bacillus licheniformis
AQTVPYGIPLIKADKVQAQGFKGANVKVAVLDTGIQAMHPDLNVVGGASFVAGEAYNTDGNGHGTHVAGTVAALDNTTGVLGVAPSVSLYAVKVLNSSGSGSYSGIVSGIEWATTNGMDVINMSLGGASGSTAMKQAVDNAYARGVVVVAAAGNSGSSGNTNTIGYPAKYDSVIAVGAVDSNSNRASFSSVGAELEVMAPGAGVYSTYPTNTYATLNGTSMASPHVAGAAALILSKHPNLSASQVRNRLSSTATYLGSSFYYGKGLINVEAAAQ

SEQ ID NO: 51031 - protein, 274 aa, Bacillus licheniformis
AQTVPYGIPLIKADKVQAQGFKGANVKVAVLDTGIQASHPDLNVVGGASFVAGEAYNTDGNGHGTHVSGTVAALDNTTGVLGVAPSVSLYAVKVLNSSGSGSYSGIVSGIEWATTNGMDVINMSLGGASGSTAMKQAVDNAYARGVVVVAAAGNSGSSGNTNTIGYPAKYDSVIAVGAVDSNSNRASFSSVGAELEVMAPGAGVYSTYPTNTYATLNGTSMASPHVAGAAALILSKHPNLSASQVRNRLSSTATYLGSSFYYGKGLINVEAAAQ

SEQ ID NO: 51032 - protein, 274 aa, Bacillus licheniformis
AQTVPYGIPLIKADKVQAQGFKGANVKVAVLDTGIQASHPDLNVVGGCSFVAGEAYNTDGNGHGTHVAGTVAALDNTTGVLGVAPSVSLYAVKVLNSSGSGSYSGIVSGIEWATTNGMDVINMSLGGASGSTAMKQAVDNAYARGVVVVAAAGNSGSSGNTNTIGYPAKYDSVIAVGAVDSNSNRASFSSVGAELEVMAPGAGVYSTYPTNTYATLNGTSMASPHVAGAAALILSKHPNLSASQVRNRLSSTATYLGSSFYYGKGLINVEAAAQ

SEQ ID NO: 51033 - protein, 274 aa, Bacillus licheniformis
AQTVPYGIPLIKADKVQAQGFKGANVKVAVLDTGIQASHPDLNVVGGASFVAGEAYNTDGNGHGTHVAGTVAALDNTTGVLGVAPSVSLYAVKVLNSSGSGSYSGIVSGIEWATTAGMDVINMSLGGASGSTAMKQAVDNAYARGVVVVAAAGNSGSSGNTNTIGYPAKYDSVIAVGAVDSNSNRASFSSVGAELEVMAPGAGVYSTYPTNTYATLNGTSMASPHVAGAAALILSKHPNLSASQVRNRLSSTATYLGSSFYYGKGLINVEAAAQ

SEQ ID NO: 51034 - protein, 274 aa, Bacillus licheniformis
AQTVPYGIPLIKADKVQAQGFKGANVKVAVLDTGIQASHPDLNVVGGASFVAGEAYNTDGNGHGTHVAGTVAALDNTTGVLGVAPSVSLYAVKVLNSSGSGSYSGIVSGIEWATTNGMDVINMSLGGASGSTAMKQAVDNAYARGVVVVAAAGNSGSSGNTNTIGYPAKYDSVIAVGAVDSNSNRASFSSVGAELEVMAPGAGVYSTYPTNTYATLNGTSMASPHVAGAAALILSKHPNLSASQVRNQLSSTATYLGSSFYYGKGLINVEAAAQ

SEQ ID NO: 51035 - protein, 274 aa, Bacillus licheniformis
AQTVPYGIPLIKADKVQAQGFKGANVKVAVLDTGIQASHPDLNVVGGASFVAGEAYNTDGNGHGTHVAGTVAALDKTTGVLGVAPSVSLYAVKVLNSSGSGSYSGIVSGIEWATTNGMDVINMSLGGASGSTAMKQAVDNAYARGVVVVAAAGNSGSSGNTNTIGYPAKYDSVIAVGAVDSNSNRASFSSVGAELEVMAPGAGVYSTYPTNTYATLNGTSMASPHVAGAAALILSKHPNLSASQVRNRLSSTATYLGSSFYYGKGLINVEAAAQ

SEQ ID NO: 51036 - protein, 274 aa, Bacillus licheniformis
AQTVPYGIPLIKADKVQAQGFKGANVKVAVLDTGIQASHIDLNVVGGASFVAGEAYNTDGNGHGTHVAGTVAALDNTTGVLGVAPSVSLYAVKVLNSSGSGSYSGIVSGIEWATTNGMDVINMSLGGASGSTAMKQAVDNAYARGVVVVAAAGNSGSSGNTNTIGYPAKYDSVIAVGAVDSNSNRASFSSVGAELEVMAPGAGVYSTYPTNTYATLNGTSMASPHVAGAAALILSKHPNLSASQVRNRLSSTATYLGSSFYYGKGLINVEAAAQ

SEQ ID NO: 51037 - protein, 274 aa, Bacillus licheniformis
AQTVPYGIPLIKADKVQAQGFKGANVKVAVLDTGIQASHPDLNVVGGASFVAGEAYNTDGNGHGTHVAGTVAALDYTTGVLGVAPSVSLYAVKVLNSSGSGSYSGIVSGIEWATTNGMDVINMSLGGASGSTAMKQAVDNAYARGVVVVAAAGNSGSSGNTNTIGYPAKYDSVIAVGAVDSNSNRASFSSVGAELEVMAPGAGVYSTYPTNTYATLNGTSMASPHVAGAAALILSKHPNLSASQVRNRLSSTATYLGSSFYYGKGLINVEAAAQ

SEQ ID NO: 51038 - protein, 274 aa, Bacillus licheniformis
AQTVPYGIPLIKADKVQAQGFKGANVKVAVLDTGIQASHPDLNVVGGASFVAGEAYNTDGNGHGTHVAGTVAALDNTTGVLGVAPSVSLYAVKVLNSSGSGSYSGIVSGIEWATTNGMDVINMSLGGDSGSTAMKQAVDNAYARGVVVVAAAGNSGSSGNTNTIGYPAKYDSVIAVGAVDSNSNRASFSSVGAELEVMAPGAGVYSTYPTNTYATLNGTSMASPHVAGAAALILSKHPNLSASQVRNRLSSTATYLGSSFYYGKGLINVEAAAQ

SEQ ID NO: 51039 - protein, 274 aa, Bacillus licheniformis
AQTVPYGIPLIKADKVQAQGFKGANVKVAVLDTGIQASHPDLNVVGGASFVAGEAYNTDGNGHGTHVAGTVAALDNTTGVLGVAPSVSLYAVKVLNSSGSSSYSGIVSGIEWATTNGMDVINMSLGGASGSTAMKQAVDNAYARGVVVVAAAGNSGSSGNTNTIGYPAKYDSVIAVGAVDSNSNRASFSSVGAELEVMAPGAGVYSTYPTNTYATLNGTSMASPHVAGAAALILSKHPNLSASQVRNRLSSTATYLGSSFYYGKGLINVEAAAQ

SEQ ID NO: 51040 - protein, 274 aa, Bacillus licheniformis
AQTVPYGIPLIKADKVQAQGFKGANVKVAVLDTGIQASHPDLNVVGGASFVAGEAYNTDGNGHGTHVAGTVAALDNTTGVLGVAPSVSLYAVKVLNSSGSISYSGIVSGIEWATTNGMDVINMSLGGASGSTAMKQAVDNAYARGVVVVAAAGNSGSSGNTNTIGYPAKYDSVIAVGAVDSNSNRASFSSVGAELEVMAPGAGVYSTYPTNTYATLNGTSMASPHVAGAAALILSKHPNLSASQVRNRLSSTATYLGSSFYYGKGLINVEAAAQ

SEQ ID NO: 51041 - protein, 274 aa, Bacillus licheniformis
AQTVPYGIPLIKADKVQAQGFKGANVKVAVLDTGIQASHPDLNVVGGASFVAGEAYNTDGNGHGTHVAGTVAALDNNTGVLGVAPSVSLYAVKVLNSSGSGSYSGIVSGIEWATTNGMDVINMSLGGASGSTAMKQAVDNAYARGVVVVAAAGNSGSSGNTNTIGYPAKYDSVIAVGAVDSNSNRASFSSVGAELEVMAPGAGVYSTYPTNTYATLNGTSMASPHVAGAAALILSKHPNLSASQVRNRLSSTATYLGSSFYYGKGLINVEAAAQ

SEQ ID NO: 51042 - protein, 274 aa, Bacillus licheniformis
AQTVPYGIPLIKADKVQAQGFKGANVKVAVLDTGIQASHPDLNVVGGESFVAGEAYNTDGNGHGTHVAGTVAALDNTTGVLGVAPSVSLYAVKVLNSSGSGSYSGIVSGIEWATTNGMDVINMSLGGASGSTAMKQAVDNAYARGVVVVAAAGNSGSSGNTNTIGYPAKYDSVIAVGAVDSNSNRASFSSVGAELEVMAPGAGVYSTYPTNTYATLNGTSMASPHVAGAAALILSKHPNLSASQVRNRLSSTATYLGSSFYYGKGLINVEAAAQ

SEQ ID NO: 51043 - protein, 274 aa, Bacillus licheniformis
AQTVPYGIPLIKADKVQAQGFKGANVKVAVLDTGIQASHPDLNVVGGASFVAGEAYNTDGNGHGTHVAGTVAALDNTTGVLTVAPSVSLYAVKVLNSSGSGSYSGIVSGIEWATTNGMDVINMSLGGASGSTAMKQAVDNAYARGVVVVAAAGNSGSSGNTNTIGYPAKYDSVIAVGAVDSNSNRASFSSVGAELEVMAPGAGVYSTYPTNTYATLNGTSMASPHVAGAAALILSKHPNLSASQVRNRLSSTATYLGSSFYYGKGLINVEAAAQ

SEQ ID NO: 51044 - protein, 274 aa, Bacillus licheniformis
AQTVPYGIPLIKADKVQAQGFKGANVKVAVLDTGIQASHPDLNVVGGASFVAGEAYNHDGNGHGTHVAGTVAALDNTTGVLGVAPSVSLYAVKVLNSSGSGSYSGIVSGIEWATTNGMDVINMSLGGASGSTAMKQAVDNAYARGVVVVAAAGNSGSSGNTNTIGYPAKYDSVIAVGAVDSNSNRASFSSVGAELEVMAPGAGVYSTYPTNTYATLNGTSMASPHVAGAAALILSKHPNLSASQVRNRLSSTATYLGSSFYYGKGLINVEAAAQ

SEQ ID NO: 51045 - protein, 274 aa, Bacillus licheniformis
AQTVPYGIPLIKADKVQAQGFKGANVKVAVLDTGIQASHPDLNVVGGASFVAGEAYNTDGNGHGTHVAGTVAALDNTTGVLGVAPSVSLYAVKVLNSSGSGSYSGIVSGIEWATTNGMDVINMSLGGANGSTAMKQAVDNAYARGVVVVAAAGNSGSSGNTNTIGYPAKYDSVIAVGAVDSNSNRASFSSVGAELEVMAPGAGVYSTYPTNTYATLNGTSMASPHVAGAAALILSKHPNLSASQVRNRLSSTATYLGSSFYYGKGLINVEAAAQ

SEQ ID NO: 51046 - protein, 274 aa, Bacillus licheniformis
AQTVPYGIPLIKADKVQAQGFKGANVKVAVLDTGIQASHEDLNVVGGASFVAGEAYNTDGNGHGTHVAGTVAALDNTTGVLGVAPSVSLYAVKVLNSSGSGSYSGIVSGIEWATTNGMDVINMSLGGASGSTAMKQAVDNAYARGVVVVAAAGNSGSSGNTNTIGYPAKYDSVIAVGAVDSNSNRASFSSVGAELEVMAPGAGVYSTYPTNTYATLNGTSMASPHVAGAAALILSKHPNLSASQVRNRLSSTATYLGSSFYYGKGLINVEAAAQ

SEQ ID NO: 51047 - protein, 274 aa, Bacillus licheniformis
AQTVPYGIPLIKADKVQAQGFKGANVKVAVLDTGIQASHPDLNVVGGASFVAGEAYNTDGNGHGTHVAGTVAALDNTTGVLGVAPSVSLYAVKVLNSSGSGSYSGIVSGIEWATTNGMDVINMSLGGASGSTAMKQAVDNAYARGVVVVAAAGNSGSSGNTNTIGYPAKYDSVIAVGAVDSNSNRASFSSVGAELEVMAPGAGVYSTYPTNTYATQNGTSMASPHVAGAAALILSKHPNLSASQVRNRLSSTATYLGSSFYYGKGLINVEAAAQ

SEQ ID NO: 51048 - protein, 274 aa, Bacillus licheniformis
AQTVPYGIELIKADKVQAQGFKGANVKVAVLDTGIQASHPDLNVVGGASFVAGEAYNTDGNGHGTHVAGTVAALDNTTGVLGVAPSVSLYAVKVLNSSGSGSYSGIVSGIEWATTNGMDVINMSLGGASGSTAMKQAVDNAYARGVVVVAAAGNSGSSGNTNTIGYPAKYDSVIAVGAVDSNSNRASFSSVGAELEVMAPGAGVYSTYPTNTYATLNGTSMASPHVAGAAALILSKHPNLSASQVRNRLSSTATYLGSSFYYGKGLINVEAAAQ

SEQ ID NO: 51049 - protein, 274 aa, Bacillus licheniformis
AQTVPYGIPLIKADKVQAQGFKGANVKVAVLDTGIQASHPDLNVVGGASFVAGEAYNTDGNGHGTHVAGTVAALDSTTGVLGVAPSVSLYAVKVLNSSGSGSYSGIVSGIEWATTNGMDVINMSLGGASGSTAMKQAVDNAYARGVVVVAAAGNSGSSGNTNTIGYPAKYDSVIAVGAVDSNSNRASFSSVGAELEVMAPGAGVYSTYPTNTYATLNGTSMASPHVAGAAALILSKHPNLSASQVRNRLSSTATYLGSSFYYGKGLINVEAAAQ

SEQ ID NO: 51050 - protein, 274 aa, Bacillus licheniformis
AQTVPYGIPLIKADKVQAQGFKGANVKVAVLDTGIQASHPDLNVVGGASFVAGEAYNADGNGHGTHVAGTVAALDNTTGVLGVAPSVSLYAVKVLNSSGSGSYSGIVSGIEWATTNGMDVINMSLGGASGSTAMKQAVDNAYARGVVVVAAAGNSGSSGNTNTIGYPAKYDSVIAVGAVDSNSNRASFSSVGAELEVMAPGAGVYSTYPTNTYATLNGTSMASPHVAGAAALILSKHPNLSASQVRNRLSSTATYLGSSFYYGKGLINVEAAAQ

SEQ ID NO: 51051 - protein, 274 aa, Bacillus licheniformis
AQTVPYGIPLIKADKVQAQGFKGANVKVAVLDTGIQASHPDLNVVGGASFVAGEAYNTDGNGHGTHVAGTVAALDNTTGVLGVAPSVSLYAVKVLNSSGSGSYSGIVSGIEWATTNGMDVINMSLGGASRSTAMKQAVDNAYARGVVVVAAAGNSGSSGNTNTIGYPAKYDSVIAVGAVDSNSNRASFSSVGAELEVMAPGAGVYSTYPTNTYATLNGTSMASPHVAGAAALILSKHPNLSASQVRNRLSSTATYLGSSFYYGKGLINVEAAAQ

SEQ ID NO: 51052 - protein, 274 aa, Bacillus licheniformis
AQTVPYGIPLIKADKVQAQGFKGANVKVAVLDTGIQASHPDLNVVGGASFVAGEAYNTDGNGHGTHVAGTVAALDNTTGVLGVAPSVSLYAVKVLNSSGSGSYSGIVSGIEWATTNGMDVINMSLGGSSGSTAMKQAVDNAYARGVVVVAAAGNSGSSGNTNTIGYPAKYDSVIAVGAVDSNSNRASFSSVGAELEVMAPGAGVYSTYPTNTYATLNGTSMASPHVAGAAALILSKHPNLSASQVRNRLSSTATYLGSSFYYGKGLINVEAAAQ

SEQ ID NO: 51053 - protein, 274 aa, Bacillus licheniformis
AQTVPYGIPLIKADKVQAQGFKGANVKVAVLDTGIQASHADLNVVGGASFVAGEAYNTDGNGHGTHVAGTVAALDNTTGVLGVAPSVSLYAVKVLNSSGSGSYSGIVSGIEWATTNGMDVINMSLGGASGSTAMKQAVDNAYARGVVVVAAAGNSGSSGNTNTIGYPAKYDSVIAVGAVDSNSNRASFSSVGAELEVMAPGAGVYSTYPTNTYATLNGTSMASPHVAGAAALILSKHPNLSASQVRNRLSSTATYLGSSFYYGKGLINVEAAAQ

SEQ ID NO: 51054 - protein, 274 aa, Bacillus licheniformis
AQTVPYGIPLIKADKVQAQGFKGANVKVAVLDTGIQASHPDLNVVGGASFVAGEAYNTDGNGHGTHVAGTVAALDNTTGVLGVAPSVSLYAVKVLNSSGSHSYSGIVSGIEWATTNGMDVINMSLGGASGSTAMKQAVDNAYARGVVVVAAAGNSGSSGNTNTIGYPAKYDSVIAVGAVDSNSNRASFSSVGAELEVMAPGAGVYSTYPTNTYATLNGTSMASPHVAGAAALILSKHPNLSASQVRNRLSSTATYLGSSFYYGKGLINVEAAAQ

SEQ ID NO: 51055 - protein, 274 aa, Bacillus licheniformis
AQTVPYGIPLIKADKVQAQGFKGANVKVAVLDTGIQASHPDLNVVGGASFVAGEAYNTDGNGHGTHVAGTVAALDNTTGVLGVAPSVSLYAVKVLNSSGSGSYSGIVSGIEWATTNGMDVINMSLGGHSGSTAMKQAVDNAYARGVVVVAAAGNSGSSGNTNTIGYPAKYDSVIAVGAVDSNSNRASFSSVGAELEVMAPGAGVYSTYPTNTYATLNGTSMASPHVAGAAALILSKHPNLSASQVRNRLSSTATYLGSSFYYGKGLINVEAAAQ

SEQ ID NO: 51056 - protein, 274 aa, Bacillus licheniformis
AQTVPYGIPLIKADKVQAQGFKGANVKVAVLDTGIQASHPDLNVVGGASFVAGEAYNTDGNGHGTHVAGTVAALDNTTGVLGVAPSVSLYAVKVLNSSGSVSYSGIVSGIEWATTNGMDVINMSLGGASGSTAMKQAVDNAYARGVVVVAAAGNSGSSGNTNTIGYPAKYDSVIAVGAVDSNSNRASFSSVGAELEVMAPGAGVYSTYPTNTYATLNGTSMASPHVAGAAALILSKHPNLSASQVRNRLSSTATYLGSSFYYGKGLINVEAAAQ

SEQ ID NO: 51057 - protein, 274 aa, Bacillus licheniformis
AQTVPYGIPLIKADKVQAQGFKGANVKVAVLDTGIQASHPDLNVVGGSSFVAGEAYNTDGNGHGTHVAGTVAALDNTTGVLGVAPSVSLYAVKVLNSSGSGSYSGIVSGIEWATTNGMDVINMSLGGASGSTAMKQAVDNAYARGVVVVAAAGNSGSSGNTNTIGYPAKYDSVIAVGAVDSNSNRASFSSVGAELEVMAPGAGVYSTYPTNTYATLNGTSMASPHVAGAAALILSKHPNLSASQVRNRLSSTATYLGSSFYYGKGLINVEAAAQ

SEQ ID NO: 51058 - protein, 274 aa, Bacillus licheniformis
AQTVPYGIPLIKADKVQAQGFKGANVKVAVLDTGIQASHPDLNVVGGASFVAGEAYNTDGNGHGTHVAGTVAALDFTTGVLGVAPSVSLYAVKVLNSSGSGSYSGIVSGIEWATTNGMDVINMSLGGASGSTAMKQAVDNAYARGVVVVAAAGNSGSSGNTNTIGYPAKYDSVIAVGAVDSNSNRASFSSVGAELEVMAPGAGVYSTYPTNTYATLNGTSMASPHVAGAAALILSKHPNLSASQVRNRLSSTATYLGSSFYYGKGLINVEAAAQ

SEQ ID NO: 51059 - protein, 274 aa, Bacillus licheniformis
AQTVPYGIPLIKADKVQAQGFKGANVKVAVLDTGIQASHPDLNVVGGASFVAGEAYNTDGNGHGTHVAGTVAALDNTTGVLGVAPSVSLYAVKVLNSSGSYSYSGIVSGIEWATTNGMDVINMSLGGASGSTAMKQAVDNAYARGVVVVAAAGNSGSSGNTNTIGYPAKYDSVIAVGAVDSNSNRASFSSVGAELEVMAPGAGVYSTYPTNTYATLNGTSMASPHVAGAAALILSKHPNLSASQVRNRLSSTATYLGSSFYYGKGLINVEAAAQ

SEQ ID NO: 51060 - protein, 274 aa, Bacillus licheniformis
AQTVPYGIPLIKADKVQAQGFKGANVKVAVLDTGIQASHPDLNVVGGASFVAGEAYNTDGNGHGTHVAGTVAALDNTTGVLGVAPSVSLYAVKVLNSSGSGSYSGIVSGIEWATTRGMDVINMSLGGASGSTAMKQAVDNAYARGVVVVAAAGNSGSSGNTNTIGYPAKYDSVIAVGAVDSNSNRASFSSVGAELEVMAPGAGVYSTYPTNTYATLNGTSMASPHVAGAAALILSKHPNLSASQVRNRLSSTATYLGSSFYYGKGLINVEAAAQ

SEQ ID NO: 51061 - protein, 274 aa, Bacillus licheniformis
AQTVPYGIPLIKADKVQAQGFKGANVKVAVLDTGIQASHPDLNVVGGASFVAGEAYNTDGNGHGTHVAGTVAALDNTTGVLGVAPSVSLYAVKVLNSSGSGSYSGIVSGIEWATTNGMDVINMSLGGASGSTAMKQAVDNAYARGVVVVAAAGNSGSSGNTNTIGYPAKYDSVIAVGAVDSSSNRASFSSVGAELEVMAPGAGVYSTYPTNTYATLNGTSMASPHVAGAAALILSKHPNLSASQVRNRLSSTATYLGSSFYYGKGLINVEAAAQ

SEQ ID NO: 51062 - protein, 274 aa, Bacillus licheniformis
AQTVPYGIPLIKADKVQAQGFKGANVKVAVLDTGIQASHPDLNVVGGASFVAGEAYNTDGNGHGTHVAGTVAALDNTTGVLGVAPSVSLYAVKVLNSSGSGSYSGIVSGIEWATTNGMDVINMSLGGASGSTAMKQAVDNAYARGVVVVAAAGNSGSSGNTNTIGYPAKYDSVIAVGAVDSNSNRASFSSVGAELEVMAPGAGVYSTYPTNTYATLNGTSMVSPHVAGAAALILSKHPNLSASQVRNRLSSTATYLGSSFYYGKGLINVEAAAQ

SEQ ID NO: 51063 - protein, 274 aa, Bacillus licheniformis
AQTVPYGIPLIKADKVQAQGTKGANVKVAVLDTGIQASHPDLNVVGGASFVAGEAYNTDGNGHGTHVAGTVAALDNTTGVLGVAPSVSLYAVKVLNSSGSGSYSGIVSGIEWATTNGMDVINMSLGGASGSTAMKQAVDNAYARGVVVVAAAGNSGSSGNTNTIGYPAKYDSVIAVGAVDSNSNRASFSSVGAELEVMAPGAGVYSTYPTNTYATLNGTSMASPHVAGAAALILSKHPNLSASQVRNRLSSTATYLGSSFYYGKGLINVEAAAQ

SEQ ID NO: 51064 - protein, 274 aa, Bacillus licheniformis
AQTVPYGIPLIKADKVQAQGRKGANVKVAVLDTGIQASHPDLNVVGGASFVAGEAYNTDGNGHGTHVAGTVAALDNTTGVLGVAPSVSLYAVKVLNSSGSGSYSGIVSGIEWATTNGMDVINMSLGGASGSTAMKQAVDNAYARGVVVVAAAGNSGSSGNTNTIGYPAKYDSVIAVGAVDSNSNRASFSSVGAELEVMAPGAGVYSTYPTNTYATLNGTSMASPHVAGAAALILSKHPNLSASQVRNRLSSTATYLGSSFYYGKGLINVEAAAQ

SEQ ID NO: 51065 - protein, 274 aa, Bacillus licheniformis
AQTVPYGIPLIKADKVQAQGFKGANVKVAVLDTGIQASHPDLNVVGGASFVAGEAYNTDGNGHGTHVAGTVAALDATTGVLGVAPSVSLYAVKVLNSSGSGSYSGIVSGIEWATTNGMDVINMSLGGASGSTAMKQAVDNAYARGVVVVAAAGNSGSSGNTNTIGYPAKYDSVIAVGAVDSNSNRASFSSVGAELEVMAPGAGVYSTYPTNTYATLNGTSMASPHVAGAAALILSKHPNLSASQVRNRLSSTATYLGSSFYYGKGLINVEAAAQ

SEQ ID NO: 51066 - protein, 274 aa, Bacillus licheniformis
AQTVPYGIPLIKADKVQAQGFKGANVKVAVLDTGIQASHPDLNVVGGASFVAGEAYNTDGNGHGTHVAGTVAALDNTTGVLGVAPSVSLYCVKVLNSSGSGSYSGIVSGIEWATTNGMDVINMSLGGASGSTAMKQAVDNAYARGVVVVAAAGNSGSSGNTNTIGYPAKYDSVIAVGAVDSNSNRASFSSVGAELEVMAPGAGVYSTYPTNTYATLNGTSMASPHVAGAAALILSKHPNLSASQVRNRLSSTATYLGSSFYYGKGLINVEAAAQ

SEQ ID NO: 51067 - protein, 274 aa, Bacillus licheniformis
AQTVPYGIPLIKADKVQAQGFKGANVKVAVLDTGIQASHTDLNVVGGASFVAGEAYNTDGNGHGTHVAGTVAALDNTTGVLGVAPSVSLYAVKVLNSSGSGSYSGIVSGIEWATTNGMDVINMSLGGASGSTAMKQAVDNAYARGVVVVAAAGNSGSSGNTNTIGYPAKYDSVIAVGAVDSNSNRASFSSVGAELEVMAPGAGVYSTYPTNTYATLNGTSMASPHVAGAAALILSKHPNLSASQVRNRLSSTATYLGSSFYYGKGLINVEAAAQ

SEQ ID NO: 51068 - protein, 274 aa, Bacillus licheniformis
AQTVPYGIPLIKADKVQAQGFKGANVKVAVLDTGIQASHPDLNVVGGASFVAGEAYNTDGNGHGTHVAGTVAALDNTTGVLGVAPSVSLYAVKVLNSSGSGSYSGIVSGIEWATTNGMDVINMSLGGYSGSTAMKQAVDNAYARGVVVVAAAGNSGSSGNTNTIGYPAKYDSVIAVGAVDSNSNRASFSSVGAELEVMAPGAGVYSTYPTNTYATLNGTSMASPHVAGAAALILSKHPNLSASQVRNRLSSTATYLGSSFYYGKGLINVEAAAQ

SEQ ID NO: 51069 - protein, 274 aa, Bacillus licheniformis
AQTVPYGIPLIKADKVQAQGDKGANVKVAVLDTGIQASHPDLNVVGGASFVAGEAYNTDGNGHGTHVAGTVAALDNTTGVLGVAPSVSLYAVKVLNSSGSGSYSGIVSGIEWATTNGMDVINMSLGGASGSTAMKQAVDNAYARGVVVVAAAGNSGSSGNTNTIGYPAKYDSVIAVGAVDSNSNRASFSSVGAELEVMAPGAGVYSTYPTNTYATLNGTSMASPHVAGAAALILSKHPNLSASQVRNRLSSTATYLGSSFYYGKGLINVEAAAQ

SEQ ID NO: 51070 - protein, 274 aa, Bacillus licheniformis
AQTVPYGIPLIKADKVQAQGFKGANVKVAVLDTGIQASHPDLNVVGGASFVAGEAYNTDGNGHGTHVAGTVAALDNTTGVLGVAPSVSLYAVKVLNSSGSGSYSGIVSGIEWATTNGMDVINMSLGGASTSTAMKQAVDNAYARGVVVVAAAGNSGSSGNTNTIGYPAKYDSVIAVGAVDSNSNRASFSSVGAELEVMAPGAGVYSTYPTNTYATLNGTSMASPHVAGAAALILSKHPNLSASQVRNRLSSTATYLGSSFYYGKGLINVEAAAQ

SEQ ID NO: 51071 - protein, 274 aa, Bacillus licheniformis
AQTVPYGIPLIKADKVQAQGFKGANVKVAVLDTGIQASHPDLNVVGGASFVAGEAYNTDGNGHGTHVAGTVAALDNTTGVLDVAPSVSLYAVKVLNSSGSGSYSGIVSGIEWATTNGMDVINMSLGGASGSTAMKQAVDNAYARGVVVVAAAGNSGSSGNTNTIGYPAKYDSVIAVGAVDSNSNRASFSSVGAELEVMAPGAGVYSTYPTNTYATLNGTSMASPHVAGAAALILSKHPNLSASQVRNRLSSTATYLGSSFYYGKGLINVEAAAQ

SEQ ID NO: 51072 - protein, 274 aa, Bacillus licheniformis
AQTVPYGIPLIKADKVQAQGFKGANVKVAVLDTGIQAHHPDLNVVGGASFVAGEAYNTDGNGHGTHVAGTVAALDNTTGVLGVAPSVSLYAVKVLNSSGSGSYSGIVSGIEWATTNGMDVINMSLGGASGSTAMKQAVDNAYARGVVVVAAAGNSGSSGNTNTIGYPAKYDSVIAVGAVDSNSNRASFSSVGAELEVMAPGAGVYSTYPTNTYATLNGTSMASPHVAGAAALILSKHPNLSASQVRNRLSSTATYLGSSFYYGKGLINVEAAAQ

SEQ ID NO: 51073 - protein, 274 aa, Bacillus licheniformis
AQTVPYGIPLIKADKVQAQGFKGANVKVAVLDTGIQASHPDLNVVGGASFVAGEAYNTDGNGHGTHVAGTVAALDNTTGVLGVAPSVSLYAVKVLNSSGSLSYSGIVSGIEWATTNGMDVINMSLGGASGSTAMKQAVDNAYARGVVVVAAAGNSGSSGNTNTIGYPAKYDSVIAVGAVDSNSNRASFSSVGAELEVMAPGAGVYSTYPTNTYATLNGTSMASPHVAGAAALILSKHPNLSASQVRNRLSSTATYLGSSFYYGKGLINVEAAAQ

SEQ ID NO: 51074 - protein, 274 aa, Bacillus licheniformis
AQTVPYGIPLIKADKVQAQGFKGANVKVAVLDTGIQASHPDLNVVGGASFVAGEAYNTDGNGHGTHVAGTVAALDNTTGVLGVAPSVSLYAVKVLNSSGSGSYSGIVSGIEWATTNGMDVINMSLGGASGSTAMKQAVDNAYARGVVVVAAAGNSGSSGNTNTIGYPAKYDSVIAVGAVDSNSNRASFSSVGAELEVMAPGAGVYSTYPTNTYATLNGTSMASPHVAGAAALILSKHPNLSASQVRNALSSTATYLGSSFYYGKGLINVEAAAQ

SEQ ID NO: 51075 - protein, 274 aa, Bacillus licheniformis
AQTVPYGIPLIKADKVQAQGFKGANVKVAVLDTGIQASHPDLNVVGGASFVAGEAYNTDGNGHGTHVAGTVAALDNTTGVLGVAPSRSLYAVKVLNSSGSGSYSGIVSGIEWATTNGMDVINMSLGGASGSTAMKQAVDNAYARGVVVVAAAGNSGSSGNTNTIGYPAKYDSVIAVGAVDSNSNRASFSSVGAELEVMAPGAGVYSTYPTNTYATLNGTSMASPHVAGAAALILSKHPNLSASQVRNRLSSTATYLGSSFYYGKGLINVEAAAQ

SEQ ID NO: 51076 - protein, 274 aa, Bacillus licheniformis
AQTVPYGIPLIKADKVQAQGFKGANVKVAVLDTGIQASHPDLNVVGGASFVAGEAYNTDGNGHGTHVAGTVAALDNTTGVLGVAPSVSLYAVKVLNSSGSGSYSGIVSGIEWATTNGMDVINMSLGGASMSTAMKQAVDNAYARGVVVVAAAGNSGSSGNTNTIGYPAKYDSVIAVGAVDSNSNRASFSSVGAELEVMAPGAGVYSTYPTNTYATLNGTSMASPHVAGAAALILSKHPNLSASQVRNRLSSTATYLGSSFYYGKGLINVEAAAQ

SEQ ID NO: 51077 - protein, 274 aa, Bacillus licheniformis
AQTVPYGIPLIKADKVQAQGFKGANVKVAVLDTGIQASHPDLNVVGGASFVAGEAYNTDGNGHGTHVAGTVAALDNTTGVLGVAPSHSLYAVKVLNSSGSGSYSGIVSGIEWATTNGMDVINMSLGGASGSTAMKQAVDNAYARGVVVVAAAGNSGSSGNTNTIGYPAKYDSVIAVGAVDSNSNRASFSSVGAELEVMAPGAGVYSTYPTNTYATLNGTSMASPHVAGAAALILSKHPNLSASQVRNRLSSTATYLGSSFYYGKGLINVEAAAQ

SEQ ID NO: 51078 - protein, 274 aa, Bacillus licheniformis
AQTVPYGIPLIKADKVQAQGQKGANVKVAVLDTGIQASHPDLNVVGGASFVAGEAYNTDGNGHGTHVAGTVAALDNTTGVLGVAPSVSLYAVKVLNSSGSGSYSGIVSGIEWATTNGMDVINMSLGGASGSTAMKQAVDNAYARGVVVVAAAGNSGSSGNTNTIGYPAKYDSVIAVGAVDSNSNRASFSSVGAELEVMAPGAGVYSTYPTNTYATLNGTSMASPHVAGAAALILSKHPNLSASQVRNRLSSTATYLGSSFYYGKGLINVEAAAQ

SEQ ID NO: 51079 - protein, 274 aa, Bacillus licheniformis WX-02
AQTVPYGIPLIKADKVQAQGFKGANVKVAVLDTGIQASHPDLNVVGGASFVAGEAYNTDGNGHGTHVAGTVAALDNTTGVLGVAPSVSLYAVKVLNSSGSGSYSGIVSGIEWATTNGMDVINMSLGGAWGSTAMKQAVDNAYARGVVVVAAAGNSGSSGNTNTIGYPAKYDSVIAVGAVDSNSNRASFSSVGAELEVMAPGAGVYSTYPTNTYATLNGTSMASPHVAGAAALILSKHPNLSASQVRNRLSSTATYLGSSFYYGKGLINVEAAAQ

SEQ ID NO: 51080 - protein, 274 aa, Bacillus licheniformis
AQTVPYGIPLIKADKVQAQGFKGANVKVAVLDTGIQASHPDLNVVGGASFVAGEAYNTDGNGHGTHVAGTVAALDNTTGVLGVAPSVSLYAVKVLNSSGSCSYSGIVSGIEWATTNGMDVINMSLGGASGSTAMKQAVDNAYARGVVVVAAAGNSGSSGNTNTIGYPAKYDSVIAVGAVDSNSNRASFSSVGAELEVMAPGAGVYSTYPTNTYATLNGTSMASPHVAGAAALILSKHPNLSASQVRNRLSSTATYLGSSFYYGKGLINVEAAAQ

SEQ ID NO: 51081 - protein, 274 aa, Bacillus licheniformis
AQTVPYGIPLIKADKVQAQGFKGANVKVAVLDTGIQASHWDLNVVGGASFVAGEAYNTDGNGHGTHVAGTVAALDNTTGVLGVAPSVSLYAVKVLNSSGSGSYSGIVSGIEWATTNGMDVINMSLGGASGSTAMKQAVDNAYARGVVVVAAAGNSGSSGNTNTIGYPAKYDSVIAVGAVDSNSNRASFSSVGAELEVMAPGAGVYSTYPTNTYATLNGTSMASPHVAGAAALILSKHPNLSASQVRNRLSSTATYLGSSFYYGKGLINVEAAAQ

SEQ ID NO: 51082 - protein, 274 aa, Bacillus licheniformis
AQTVPYGIPLIKADKVQAQGFKGANVKVAVLDTGIQASHPDLNVVGGASFVAGEAYNTDGNGHGTHVAGTVAALDNTTGVLGVAPSVSLYAVKVLNSSGSGSYSGIVSGIEWATTSGMDVINMSLGGASGSTAMKQAVDNAYARGVVVVAAAGNSGSSGNTNTIGYPAKYDSVIAVGAVDSNSNRASFSSVGAELEVMAPGAGVYSTYPTNTYATLNGTSMASPHVAGAAALILSKHPNLSASQVRNRLSSTATYLGSSFYYGKGLINVEAAAQ

SEQ ID NO: 51083 - protein, 274 aa, Bacillus licheniformis
AQTVPYGIPLIKADKVQAQGFKGANVKVAVLDTGIQASHPDLNVVGGASFVAGEAYNTDGNGHGTHVAGTVAALDPTTGVLGVAPSVSLYAVKVLNSSGSGSYSGIVSGIEWATTNGMDVINMSLGGASGSTAMKQAVDNAYARGVVVVAAAGNSGSSGNTNTIGYPAKYDSVIAVGAVDSNSNRASFSSVGAELEVMAPGAGVYSTYPTNTYATLNGTSMASPHVAGAAALILSKHPNLSASQVRNRLSSTATYLGSSFYYGKGLINVEAAAQ

SEQ ID NO: 51084 - protein, 274 aa, Bacillus licheniformis
AQTVPYGIPLIKADKVQAQGFKGANVKVAVLDTGIQASHPDLNVVGGNSFVAGEAYNTDGNGHGTHVAGTVAALDNTTGVLGVAPSVSLYAVKVLNSSGSGSYSGIVSGIEWATTNGMDVINMSLGGASGSTAMKQAVDNAYARGVVVVAAAGNSGSSGNTNTIGYPAKYDSVIAVGAVDSNSNRASFSSVGAELEVMAPGAGVYSTYPTNTYATLNGTSMASPHVAGAAALILSKHPNLSASQVRNRLSSTATYLGSSFYYGKGLINVEAAAQ

SEQ ID NO: 51085 - protein, 274 aa, Bacillus licheniformis
AQTVPYGIPLIKADKVQAQGFKGANVKVAVLDTGIQASHPDLNVVGGASFVAGEAYNTDGNGHGTHVAGTVAALDNTTGVLGVAPSVSLYAVKVLNSSGSGSYSGIVSGIEWATTMGMDVINMSLGGASGSTAMKQAVDNAYARGVVVVAAAGNSGSSGNTNTIGYPAKYDSVIAVGAVDSNSNRASFSSVGAELEVMAPGAGVYSTYPTNTYATLNGTSMASPHVAGAAALILSKHPNLSASQVRNRLSSTATYLGSSFYYGKGLINVEAAAQ

SEQ ID NO: 51086 - protein, 274 aa, Bacillus licheniformis
AQTVPYGVPLIKADKVQAQGFKGANVKVAVLDTGIQASHPDLNVVGGASFVAGEAYNTDGNGHGTHVAGTVAALDNTTGVLGVAPSVSLYAVKVLNSSGSGSYSGIVSGIEWATTNGMDVINMSLGGASGSTAMKQAVDNAYARGVVVVAAAGNSGSSGNTNTIGYPAKYDSVIAVGAVDSNSNRASFSSVGAELEVMAPGAGVYSTYPTNTYATLNGTSMASPHVAGAAALILSKHPNLSASQVRNRLSSTATYLGSSFYYGKGLINVEAAAQ

SEQ ID NO: 51087 - protein, 274 aa, Bacillus licheniformis
AQTVPYGIPLIKADKVQAQGFKGANVKVAVLDTGIQASHPDLNVVGGASFVAGEAYNTDGNGHGTHVAGTVAALDNTTGVLGVAPSVSLYAVKVLNSSGSGSYSGIVSGIEWATTNGMDVINMSLGGASGSTAMKQAVDNAYARGVVVVAAAGNSGSSGNTNTIGYPAKYDSVIAVGAVDSNSNRASFSSVGAELEVMAPGAGVYSTYPTNTYATLSGTSMASPHVAGAAALILSKHPNLSASQVRNRLSSTATYLGSSFYYGKGLINVEAAAQ

SEQ ID NO: 51088 - protein, 274 aa, Bacillus licheniformis
AQTVPYGIPLIKADKVQAQGFKGANVKVAVLDTGIQASHPDLNVVGGDSFVAGEAYNTDGNGHGTHVAGTVAALDNTTGVLGVAPSVSLYAVKVLNSSGSGSYSGIVSGIEWATTNGMDVINMSLGGASGSTAMKQAVDNAYARGVVVVAAAGNSGSSGNTNTIGYPAKYDSVIAVGAVDSNSNRASFSSVGAELEVMAPGAGVYSTYPTNTYATLNGTSMASPHVAGAAALILSKHPNLSASQVRNRLSSTATYLGSSFYYGKGLINVEAAAQ

SEQ ID NO: 51089 - protein, 274 aa, Bacillus licheniformis
AQTVPYGIPLIKADKVQAQGFKGANVKVAVLDTGIQASHKDLNVVGGASFVAGEAYNTDGNGHGTHVAGTVAALDNTTGVLGVAPSVSLYAVKVLNSSGSGSYSGIVSGIEWATTNGMDVINMSLGGASGSTAMKQAVDNAYARGVVVVAAAGNSGSSGNTNTIGYPAKYDSVIAVGAVDSNSNRASFSSVGAELEVMAPGAGVYSTYPTNTYATLNGTSMASPHVAGAAALILSKHPNLSASQVRNRLSSTATYLGSSFYYGKGLINVEAAAQ

SEQ ID NO: 51090 - protein, 274 aa, Bacillus licheniformis
AQTVPYGIPLIKADKVQAQGFKGANVKVAVLDTGIQASHPDLNVVGGISFVAGEAYNTDGNGHGTHVAGTVAALDNTTGVLGVAPSVSLYAVKVLNSSGSGSYSGIVSGIEWATTNGMDVINMSLGGASGSTAMKQAVDNAYARGVVVVAAAGNSGSSGNTNTIGYPAKYDSVIAVGAVDSNSNRASFSSVGAELEVMAPGAGVYSTYPTNTYATLNGTSMASPHVAGAAALILSKHPNLSASQVRNRLSSTATYLGSSFYYGKGLINVEAAAQ

SEQ ID NO: 51091 - protein, 274 aa, Bacillus licheniformis
AQTVPYGIPLIKADKVQAQGFKGANVKVAVLDTGIQASHPDLNVVGGASFVAGEAYNTDGNGHGTHVAGTVAALDNTTGVLGVAPSCSLYAVKVLNSSGSGSYSGIVSGIEWATTNGMDVINMSLGGASGSTAMKQAVDNAYARGVVVVAAAGNSGSSGNTNTIGYPAKYDSVIAVGAVDSNSNRASFSSVGAELEVMAPGAGVYSTYPTNTYATLNGTSMASPHVAGAAALILSKHPNLSASQVRNRLSSTATYLGSSFYYGKGLINVEAAAQ

SEQ ID NO: 51092 - protein, 274 aa, Bacillus licheniformis
AQTVPYGIPLIKADKVQAQGFKGANVKVAVLDTGIQASHPDLNVVGGASFVAGEAYNTDGNGHGTHVAGTVAALDNTTGVLMVAPSVSLYAVKVLNSSGSGSYSGIVSGIEWATTNGMDVINMSLGGASGSTAMKQAVDNAYARGVVVVAAAGNSGSSGNTNTIGYPAKYDSVIAVGAVDSNSNRASFSSVGAELEVMAPGAGVYSTYPTNTYATLNGTSMASPHVAGAAALILSKHPNLSASQVRNRLSSTATYLGSSFYYGKGLINVEAAAQ

SEQ ID NO: 51093 - protein, 274 aa, Bacillus licheniformis
AQTVPYGIPLIKADKVQAQGFKGANVKVAVLDTGIQASHPDLNVVGGASFVAGEAYNTDGNGHGTHVAGTVAALDNTTGVLGVAPSVSQYAVKVLNSSGSGSYSGIVSGIEWATTNGMDVINMSLGGASGSTAMKQAVDNAYARGVVVVAAAGNSGSSGNTNTIGYPAKYDSVIAVGAVDSNSNRASFSSVGAELEVMAPGAGVYSTYPTNTYATLNGTSMASPHVAGAAALILSKHPNLSASQVRNRLSSTATYLGSSFYYGKGLINVEAAAQ

SEQ ID NO: 51094 - protein, 274 aa, Bacillus licheniformis
AQTVPYGIPLIKADKVQAQGFKGANVKVAVLDTGIQASHPDLNVVGGASFVAGEAYNTDGNGHGTHVAGTVAALDNTTGVLGVAPSVSLYAVKVLNSSGSGSYSGIVSGIEWATTNGMDVINMSLGGASSSTAMKQAVDNAYARGVVVVAAAGNSGSSGNTNTIGYPAKYDSVIAVGAVDSNSNRASFSSVGAELEVMAPGAGVYSTYPTNTYATLNGTSMASPHVAGAAALILSKHPNLSASQVRNRLSSTATYLGSSFYYGKGLINVEAAAQ

SEQ ID NO: 51095 - protein, 274 aa, Bacillus licheniformis
AQTVPYGIPLIKADKVQAQGFKGANVKVAVLDTGIQASHPDLNVVGGASFVAGEAYNTDGNGHGTHVAGTVAALDNTTGVLGVAPSVSLYAVKVLNSSGSGSYSGIVSGIEWATTNGMDVINISLGGASGSTAMKQAVDNAYARGVVVVAAAGNSGSSGNTNTIGYPAKYDSVIAVGAVDSNSNRASFSSVGAELEVMAPGAGVYSTYPTNTYATLNGTSMASPHVAGAAALILSKHPNLSASQVRNRLSSTATYLGSSFYYGKGLINVEAAAQ

SEQ ID NO: 51096 - protein, 274 aa, Bacillus licheniformis
AQTVPYGIPLIKADKVQAQGFKGANVKVAVLDTGIQASHPDLNVVGGASFVAGEAYNTDGNGHGTHVAGTVAALDNTTGVLGVAPSVSLYAVKVLNSSGSGSYSGIVSGIEWATTNGMDVINMSLGGAMGSTAMKQAVDNAYARGVVVVAAAGNSGSSGNTNTIGYPAKYDSVIAVGAVDSNSNRASFSSVGAELEVMAPGAGVYSTYPTNTYATLNGTSMASPHVAGAAALILSKHPNLSASQVRNRLSSTATYLGSSFYYGKGLINVEAAAQ

SEQ ID NO: 51097 - protein, 274 aa, Bacillus licheniformis
AQTVPYGIPLIKADKVQAQGFKGANVKVAVLDTGIQASHPDLNVVGGASFVAGEAYNTDGNGHGTHVAGTVAALDNTTGVLGVAPSVSLYAVKVLNSSGSGSYSGIVSGIEWATTCGMDVINMSLGGASGSTAMKQAVDNAYARGVVVVAAAGNSGSSGNTNTIGYPAKYDSVIAVGAVDSNSNRASFSSVGAELEVMAPGAGVYSTYPTNTYATLNGTSMASPHVAGAAALILSKHPNLSASQVRNRLSSTATYLGSSFYYGKGLINVEAAAQ

SEQ ID NO: 51098 - protein, 274 aa, Bacillus licheniformis
AQTVPYGIPLIKADKVQAQGFKGANVKVAVLDTGIQASHPDLNVVGGQSFVAGEAYNTDGNGHGTHVAGTVAALDNTTGVLGVAPSVSLYAVKVLNSSGSGSYSGIVSGIEWATTNGMDVINMSLGGASGSTAMKQAVDNAYARGVVVVAAAGNSGSSGNTNTIGYPAKYDSVIAVGAVDSNSNRASFSSVGAELEVMAPGAGVYSTYPTNTYATLNGTSMASPHVAGAAALILSKHPNLSASQVRNRLSSTATYLGSSFYYGKGLINVEAAAQ

SEQ ID NO: 51099 - protein, 274 aa, Bacillus licheniformis
AQTVPYGIPLIKADKVQAQGFKGANVKVAVLDTGIQASHPDLNVVGGASFVAGEAYNTDGNGHGTHVAGTVAALDNTTGVLGVAPSVSLYAVKVLNSSGSGSYSGIVSGIEWATTNGMDVINMSLGGALGSTAMKQAVDNAYARGVVVVAAAGNSGSSGNTNTIGYPAKYDSVIAVGAVDSNSNRASFSSVGAELEVMAPGAGVYSTYPTNTYATLNGTSMASPHVAGAAALILSKHPNLSASQVRNRLSSTATYLGSSFYYGKGLINVEAAAQ

SEQ ID NO: 51100 - protein, 274 aa, Bacillus licheniformis
AQTVPYGIPLIKADKVQAQGFKGANVKVAVLDTGIQASHPDLNVVGGASFVAGEAYNTDGNGHGTHVAGTVAALDNTTGVLGVAPSVSLYAVKVLNSSGSGSYSGIVSGIEWATTNGMDVINMSLGGASGSTAMKQAVDNAYAKGVVVVAAAGNSGSSGNTNTIGYPAKYDSVIAVGAVDSNSNRASFSSVGAELEVMAPGAGVYSTYPTNTYATLNGTSMASPHVAGAAALILSKHPNLSASQVRNRLSSTATYLGSSFYYGKGLINVEAAAQ

SEQ ID NO: 51101 - protein, 274 aa, Bacillus licheniformis
AQTVPYGIPLIKADKVQAQGFKGANVKVAVLDTGIQADHPDLNVVGGASFVAGEAYNTDGNGHGTHVAGTVAALDNTTGVLGVAPSVSLYAVKVLNSSGSGSYSGIVSGIEWATTNGMDVINMSLGGASGSTAMKQAVDNAYARGVVVVAAAGNSGSSGNTNTIGYPAKYDSVIAVGAVDSNSNRASFSSVGAELEVMAPGAGVYSTYPTNTYATLNGTSMASPHVAGAAALILSKHPNLSASQVRNRLSSTATYLGSSFYYGKGLINVEAAAQ

SEQ ID NO: 51102 - protein, 274 aa, Bacillus licheniformis
AQTVPYGIPLIKADKVQAQGFKGANVKVAVLDTGIQASHPDLNVVGGASFVAGEAYNTDGNGHGTHVAGTVAALDNTTGVLGVAPSVSLYAVKVLNSSGSGSYSGIVSGIEWATTNGMDVINMSLGGASGSTAMKQAVDNAYARGVVVVAAAGNSGSSGNTNTIGYPAKYDSVIAVGAVDSNSNRASFSSVGAELEVMAPGAGVYSTYPPNTYATLNGTSMASPHVAGAAALILSKHPNLSASQVRNRLSSTATYLGSSFYYGKGLINVEAAAQ

SEQ ID NO: 51103 - protein, 274 aa, Bacillus licheniformis
AQQVPYGIPLIKADKVQAQGFKGANVKVAVLDTGIQASHPDLNVVGGASFVAGEAYNTDGNGHGTHVAGTVAALDNTTGVLGVAPSVSLYAVKVLNSSGSGSYSGIVSGIEWATTNGMDVINMSLGGASGSTAMKQAVDNAYARGVVVVAAAGNSGSSGNTNTIGYPAKYDSVIAVGAVDSNSNRASFSSVGAELEVMAPGAGVYSTYPTNTYATLNGTSMASPHVAGAAALILSKHPNLSASQVRNRLSSTATYLGSSFYYGKGLINVEAAAQ

SEQ ID NO: 51104 - protein, 274 aa, Bacillus licheniformis
AQTVPYGIPLIKADKVQAQGAKGANVKVAVLDTGIQASHPDLNVVGGASFVAGEAYNTDGNGHGTHVAGTVAALDNTTGVLGVAPSVSLYAVKVLNSSGSGSYSGIVSGIEWATTNGMDVINMSLGGASGSTAMKQAVDNAYARGVVVVAAAGNSGSSGNTNTIGYPAKYDSVIAVGAVDSNSNRASFSSVGAELEVMAPGAGVYSTYPTNTYATLNGTSMASPHVAGAAALILSKHPNLSASQVRNRLSSTATYLGSSFYYGKGLINVEAAAQ

SEQ ID NO: 51105 - protein, 274 aa, Bacillus licheniformis
AQTVPYGIPLIKADKVQAQGFKGANVKVAVLDTGIQASHPDLNVVGGASFVAGEAYNTDGNGHGTHVAGTVAALDNTTGVLHVAPSVSLYAVKVLNSSGSGSYSGIVSGIEWATTNGMDVINMSLGGASGSTAMKQAVDNAYARGVVVVAAAGNSGSSGNTNTIGYPAKYDSVIAVGAVDSNSNRASFSSVGAELEVMAPGAGVYSTYPTNTYATLNGTSMASPHVAGAAALILSKHPNLSASQVRNRLSSTATYLGSSFYYGKGLINVEAAAQ

SEQ ID NO: 51106 - protein, 274 aa, Bacillus licheniformis
AQTVPYGIPLIKADKVQAQGFKGQNVKVAVLDTGIQASHPDLNVVGGASFVAGEAYNTDGNGHGTHVAGTVAALDNTTGVLGVAPSVSLYAVKVLNSSGSGSYSGIVSGIEWATTNGMDVINMSLGGASGSTAMKQAVDNAYARGVVVVAAAGNSGSSGNTNTIGYPAKYDSVIAVGAVDSNSNRASFSSVGAELEVMAPGAGVYSTYPTNTYATLNGTSMASPHVAGAAALILSKHPNLSASQVRNRLSSTATYLGSSFYYGKGLINVEAAAQ

SEQ ID NO: 51107 - protein, 274 aa, Bacillus licheniformis
AQTVPYGIPLIKADKVQAQGFKGANVKVAVLDTGIQASHPDLNVVGGGSFVAGEAYNTDGNGHGTHVAGTVAALDNTTGVLGVAPSVSLYAVKVLNSSGSGSYSGIVSGIEWATTNGMDVINMSLGGASGSTAMKQAVDNAYARGVVVVAAAGNSGSSGNTNTIGYPAKYDSVIAVGAVDSNSNRASFSSVGAELEVMAPGAGVYSTYPTNTYATLNGTSMASPHVAGAAALILSKHPNLSASQVRNRLSSTATYLGSSFYYGKGLINVEAAAQ

SEQ ID NO: 51108 - protein, 274 aa, Bacillus licheniformis
AQTVPYGIPLIKADKVQAQGFKGANVKVAVLDTGIQAPHPDLNVVGGASFVAGEAYNTDGNGHGTHVAGTVAALDNTTGVLGVAPSVSLYAVKVLNSSGSGSYSGIVSGIEWATTNGMDVINMSLGGASGSTAMKQAVDNAYARGVVVVAAAGNSGSSGNTNTIGYPAKYDSVIAVGAVDSNSNRASFSSVGAELEVMAPGAGVYSTYPTNTYATLNGTSMASPHVAGAAALILSKHPNLSASQVRNRLSSTATYLGSSFYYGKGLINVEAAAQ

SEQ ID NO: 51109 - protein, 274 aa, Bacillus licheniformis
AQTVPYGIPLIKADKVQAQGFKGANVKVAVLDTGIQASHPDLNVVGGASFVAGEAYNTDGNGHGTHVAGTVAALDNTTGVLGVAPSVSLYAVKVLNSSGSTSYSGIVSGIEWATTNGMDVINMSLGGASGSTAMKQAVDNAYARGVVVVAAAGNSGSSGNTNTIGYPAKYDSVIAVGAVDSNSNRASFSSVGAELEVMAPGAGVYSTYPTNTYATLNGTSMASPHVAGAAALILSKHPNLSASQVRNRLSSTATYLGSSFYYGKGLINVEAAAQ

SEQ ID NO: 51110 - protein, 274 aa, Bacillus licheniformis
AQTVPYGIPLIKADKVQAQGFKGANVKVAVLDTGIQASHPDLNVVGGASFVAGEAYNTDGNGHGTHVAGTVAALDNTTGVLGVAPSVSLYAVKVLNSSGSGSYSGIVSGIEWATTNGMDVINMSLGGCSGSTAMKQAVDNAYARGVVVVAAAGNSGSSGNTNTIGYPAKYDSVIAVGAVDSNSNRASFSSVGAELEVMAPGAGVYSTYPTNTYATLNGTSMASPHVAGAAALILSKHPNLSASQVRNRLSSTATYLGSSFYYGKGLINVEAAAQ

SEQ ID NO: 51111 - protein, 274 aa, Bacillus licheniformis
AQTVPYGIPLIKADKVQAQGFKGANVKVAVLDTGIQASHPDLNVVGGFSFVAGEAYNTDGNGHGTHVAGTVAALDNTTGVLGVAPSVSLYAVKVLNSSGSGSYSGIVSGIEWATTNGMDVINMSLGGASGSTAMKQAVDNAYARGVVVVAAAGNSGSSGNTNTIGYPAKYDSVIAVGAVDSNSNRASFSSVGAELEVMAPGAGVYSTYPTNTYATLNGTSMASPHVAGAAALILSKHPNLSASQVRNRLSSTATYLGSSFYYGKGLINVEAAAQ

SEQ ID NO: 51112 - protein, 274 aa, Bacillus licheniformis
AQTVPYGIPLIKADKVQAQGFKGANVKVAVLDTGIQASHPDLNVVGGASFVAGEAYNTDGNGHGTHVAGTVAALDNTTGVLKVAPSVSLYAVKVLNSSGSGSYSGIVSGIEWATTNGMDVINMSLGGASGSTAMKQAVDNAYARGVVVVAAAGNSGSSGNTNTIGYPAKYDSVIAVGAVDSNSNRASFSSVGAELEVMAPGAGVYSTYPTNTYATLNGTSMASPHVAGAAALILSKHPNLSASQVRNRLSSTATYLGSSFYYGKGLINVEAAAQ

SEQ ID NO: 51113 - protein, 274 aa, Bacillus licheniformis
AQTVPYGIPLIKADKVQAQGWKGANVKVAVLDTGIQASHPDLNVVGGASFVAGEAYNTDGNGHGTHVAGTVAALDNTTGVLGVAPSVSLYAVKVLNSSGSGSYSGIVSGIEWATTNGMDVINMSLGGASGSTAMKQAVDNAYARGVVVVAAAGNSGSSGNTNTIGYPAKYDSVIAVGAVDSNSNRASFSSVGAELEVMAPGAGVYSTYPTNTYATLNGTSMASPHVAGAAALILSKHPNLSASQVRNRLSSTATYLGSSFYYGKGLINVEAAAQ

SEQ ID NO: 51114 - protein, 274 aa, Bacillus licheniformis
AQTVPYGIPLIKADKVQAQGGKGANVKVAVLDTGIQASHPDLNVVGGASFVAGEAYNTDGNGHGTHVAGTVAALDNTTGVLGVAPSVSLYAVKVLNSSGSGSYSGIVSGIEWATTNGMDVINMSLGGASGSTAMKQAVDNAYARGVVVVAAAGNSGSSGNTNTIGYPAKYDSVIAVGAVDSNSNRASFSSVGAELEVMAPGAGVYSTYPTNTYATLNGTSMASPHVAGAAALILSKHPNLSASQVRNRLSSTATYLGSSFYYGKGLINVEAAAQ

SEQ ID NO: 51115 - protein, 274 aa, Bacillus licheniformis
AQTVPYGIPLIKADKVQAQGYKGANVKVAVLDTGIQASHPDLNVVGGASFVAGEAYNTDGNGHGTHVAGTVAALDNTTGVLGVAPSVSLYAVKVLNSSGSGSYSGIVSGIEWATTNGMDVINMSLGGASGSTAMKQAVDNAYARGVVVVAAAGNSGSSGNTNTIGYPAKYDSVIAVGAVDSNSNRASFSSVGAELEVMAPGAGVYSTYPTNTYATLNGTSMASPHVAGAAALILSKHPNLSASQVRNRLSSTATYLGSSFYYGKGLINVEAAAQ

SEQ ID NO: 51116 - protein, 274 aa, Bacillus licheniformis
AQTVPYGIPLIKADKVQAQGFKGANVKVAVLDTGIQASHDDLNVVGGASFVAGEAYNTDGNGHGTHVAGTVAALDNTTGVLGVAPSVSLYAVKVLNSSGSGSYSGIVSGIEWATTNGMDVINMSLGGASGSTAMKQAVDNAYARGVVVVAAAGNSGSSGNTNTIGYPAKYDSVIAVGAVDSNSNRASFSSVGAELEVMAPGAGVYSTYPTNTYATLNGTSMASPHVAGAAALILSKHPNLSASQVRNRLSSTATYLGSSFYYGKGLINVEAAAQ

SEQ ID NO: 51117 - protein, 274 aa, Bacillus licheniformis
AQTVPYGIPLIKADKVQAQGFKGANVKVAVLDTGIQASHPDLNVVGGASFVAGEAYNTDGNGHGTHVAGTVAALDNTTGVLWVAPSVSLYAVKVLNSSGSGSYSGIVSGIEWATTNGMDVINMSLGGASGSTAMKQAVDNAYARGVVVVAAAGNSGSSGNTNTIGYPAKYDSVIAVGAVDSNSNRASFSSVGAELEVMAPGAGVYSTYPTNTYATLNGTSMASPHVAGAAALILSKHPNLSASQVRNRLSSTATYLGSSFYYGKGLINVEAAAQ

SEQ ID NO: 51118 - protein, 274 aa, Bacillus licheniformis
AQTVPYGIPLIKADKVQAQGCKGANVKVAVLDTGIQASHPDLNVVGGASFVAGEAYNTDGNGHGTHVAGTVAALDNTTGVLGVAPSVSLYAVKVLNSSGSGSYSGIVSGIEWATTNGMDVINMSLGGASGSTAMKQAVDNAYARGVVVVAAAGNSGSSGNTNTIGYPAKYDSVIAVGAVDSNSNRASFSSVGAELEVMAPGAGVYSTYPTNTYATLNGTSMASPHVAGAAALILSKHPNLSASQVRNRLSSTATYLGSSFYYGKGLINVEAAAQ

SEQ ID NO: 51119 - protein, 274 aa, Bacillus licheniformis
AQTVPYGIPLIKADKVQAQGFKGANVKVAVLDTGIQASHPDLNVVGGASFVAGEAYNTDGNGHGTHVAGTVAALDNTTGVLGVAPSVSLYAVKVLNSSGSDSYSGIVSGIEWATTNGMDVINMSLGGASGSTAMKQAVDNAYARGVVVVAAAGNSGSSGNTNTIGYPAKYDSVIAVGAVDSNSNRASFSSVGAELEVMAPGAGVYSTYPTNTYATLNGTSMASPHVAGAAALILSKHPNLSASQVRNRLSSTATYLGSSFYYGKGLINVEAAAQ

SEQ ID NO: 51120 - protein, 274 aa, Bacillus licheniformis
AQTVPYGIPLIKADKVQAQGFKGANVKVAVLDTGIQASHPDLNVVGGASFVAGEAYNQDGNGHGTHVAGTVAALDNTTGVLGVAPSVSLYAVKVLNSSGSGSYSGIVSGIEWATTNGMDVINMSLGGASGSTAMKQAVDNAYARGVVVVAAAGNSGSSGNTNTIGYPAKYDSVIAVGAVDSNSNRASFSSVGAELEVMAPGAGVYSTYPTNTYATLNGTSMASPHVAGAAALILSKHPNLSASQVRNRLSSTATYLGSSFYYGKGLINVEAAAQ

SEQ ID NO: 51121 - protein, 274 aa, Bacillus licheniformis WX-02
AQTVPYGIPLIKADKVQAQGFKGANVKVAVLDTGIQASHPDLNVVGGASFVAGEAYNTDGNGHGTHVAGTVAALDNTEGVLGVAPSVSLYAVKVLNSSGSGSYSGIVSGIEWATTNGMDVINMSLGGASGSTAMKQAVDNAYARGVVVVAAAGNSGSSGNTNTIGYPAKYDSVIAVGAVDSNSNRASFSSVGAELEVMAPGAGVYSTYPTNTYATLNGTSMASPHVAGAAALILSKHPNLSASQVRNRLSSTATYLGSSFYYGKGLINVEAAAQ

SEQ ID NO: 51122 - protein, 274 aa, Bacillus licheniformis
AQTVPYGIPLIKADKVQAQGHKGANVKVAVLDTGIQASHPDLNVVGGASFVAGEAYNTDGNGHGTHVAGTVAALDNTTGVLGVAPSVSLYAVKVLNSSGSGSYSGIVSGIEWATTNGMDVINMSLGGASGSTAMKQAVDNAYARGVVVVAAAGNSGSSGNTNTIGYPAKYDSVIAVGAVDSNSNRASFSSVGAELEVMAPGAGVYSTYPTNTYATLNGTSMASPHVAGAAALILSKHPNLSASQVRNRLSSTATYLGSSFYYGKGLINVEAAAQ

SEQ ID NO: 51123 - protein, 274 aa, Bacillus licheniformis
AQTVPYGIPLIKADKVQAQGFKGANVKVAVLDTGIQASHPDLNVVGGASFVAGEAYNTDGNGHGTHVAGTVAALDNTTGVLYVAPSVSLYAVKVLNSSGSGSYSGIVSGIEWATTNGMDVINMSLGGASGSTAMKQAVDNAYARGVVVVAAAGNSGSSGNTNTIGYPAKYDSVIAVGAVDSNSNRASFSSVGAELEVMAPGAGVYSTYPTNTYATLNGTSMASPHVAGAAALILSKHPNLSASQVRNRLSSTATYLGSSFYYGKGLINVEAAAQ

SEQ ID NO: 51124 - protein, 274 aa, Bacillus licheniformis
AQTVPYGIPLIKADKVQAQGFKGANVKVAVLDTGIQASHPDLNVVGGASFVASEAYNTDGNGHGTHVAGTVAALDNTTGVLGVAPSVSLYAVKVLNSSGSGSYSGIVSGIEWATTNGMDVINMSLGGASGSTAMKQAVDNAYARGVVVVAAAGNSGSSGNTNTIGYPAKYDSVIAVGAVDSNSNRASFSSVGAELEVMAPGAGVYSTYPTNTYATLNGTSMASPHVAGAAALILSKHPNLSASQVRNRLSSTATYLGSSFYYGKGLINVEAAAQ

SEQ ID NO: 51125 - protein, 274 aa, Bacillus licheniformis
AQTVPYGIPLIKADKVQAQGFKGANVKVAVLDTGIQASHPDLNVVGGASFVAGEAYNTDGNGHGTHVAGTVAALDNTTGVLGVAPSVSLYAVKVLNSSGSGSYSGIVSGIEWATTNGMDVINMSLGGPSGSTAMKQAVDNAYARGVVVVAAAGNSGSSGNTNTIGYPAKYDSVIAVGAVDSNSNRASFSSVGAELEVMAPGAGVYSTYPTNTYATLNGTSMASPHVAGAAALILSKHPNLSASQVRNRLSSTATYLGSSFYYGKGLINVEAAAQ

SEQ ID NO: 51126 - protein, 274 aa, Bacillus licheniformis
AQTVPYGIPLIKADKVQAQGFKGANVKVAVLDTGIQASHPDLNVVGGASFVAGEAYNTDGNGHGTHVAGTVAALDNTTGVLGVAPSVSLYAVKVLNSSGSGSYSGIVSGIEWATTNGMDVINMSLGGAQGSTAMKQAVDNAYARGVVVVAAAGNSGSSGNTNTIGYPAKYDSVIAVGAVDSNSNRASFSSVGAELEVMAPGAGVYSTYPTNTYATLNGTSMASPHVAGAAALILSKHPNLSASQVRNRLSSTATYLGSSFYYGKGLINVEAAAQ

SEQ ID NO: 51127 - protein, 274 aa, Bacillus licheniformis
AQTVPYGIPLIKADKVQAQGFKGANVKVAVLDTGIQASHPDLNVVGGASFVAGEAYNTDGNGHGTHVAGTVAALDNTTGVLGVAPSVSLYAVKVLNSSGSGSYSGIVSGIEWATTNGMDVINMSLGGASGSTAAKQAVDNAYARGVVVVAAAGNSGSSGNTNTIGYPAKYDSVIAVGAVDSNSNRASFSSVGAELEVMAPGAGVYSTYPTNTYATLNGTSMASPHVAGAAALILSKHPNLSASQVRNRLSSTATYLGSSFYYGKGLINVEAAAQ

SEQ ID NO: 51128 - protein, 274 aa, Bacillus licheniformis
AQTVPYGIPLIKADKVQAQGFKGANVKVAVLDTGIQASHPDLNVVGGASFVAGEAYNTDGNGHGTHVAGTVAALDNTTGVLGVAPSVSLYAVKVLNSSGSGSYSGIVSGIEWATTNGMDVINMSLGGESGSTAMKQAVDNAYARGVVVVAAAGNSGSSGNTNTIGYPAKYDSVIAVGAVDSNSNRASFSSVGAELEVMAPGAGVYSTYPTNTYATLNGTSMASPHVAGAAALILSKHPNLSASQVRNRLSSTATYLGSSFYYGKGLINVEAAAQ

SEQ ID NO: 51129 - protein, 274 aa, Bacillus licheniformis
AQTVPYGIPLIKADKVQAQGFKGANVKVAVLDTGIQASHPDLNVVGGASFVAGEAYNTDGNGHGTHVAGTVAALDNTTGVLGVAPSVSLYAVKVLNSSGSGSYSGIVSGIEWATTNGMDVINMSLGGASGSTAMKQAVDNAYARGVVVVAAAGNSGSSGNTNTIQYPAKYDSVIAVGAVDSNSNRASFSSVGAELEVMAPGAGVYSTYPTNTYATLNGTSMASPHVAGAAALILSKHPNLSASQVRNRLSSTATYLGSSFYYGKGLINVEAAAQ

SEQ ID NO: 51130 - protein, 274 aa, Bacillus licheniformis
AQTVPYGIPLIKADKVQAQGFKGANVKVAVLDTGIQASHPDLNVVGGASFVAGEAYNTDGNGHGTHVAGTVAALDNTTGVLGVAPSVSLYAVKVLNSSGSGSYSGIVSGIEWATTYGMDVINMSLGGASGSTAMKQAVDNAYARGVVVVAAAGNSGSSGNTNTIGYPAKYDSVIAVGAVDSNSNRASFSSVGAELEVMAPGAGVYSTYPTNTYATLNGTSMASPHVAGAAALILSKHPNLSASQVRNRLSSTATYLGSSFYYGKGLINVEAAAQ

SEQ ID NO: 51131 - protein, 274 aa, Bacillus licheniformis
AQTVPYGIPLIKADKVQAQGFKGANVKVAVLDTGIQASHPDLNVVGGASFVAGEAYNTDGNGHGTHVAGTVAALDNTTGVLGVAPSVSLYAVKVLNSSGSGSYSGIVSGIEWATTGGMDVINMSLGGASGSTAMKQAVDNAYARGVVVVAAAGNSGSSGNTNTIGYPAKYDSVIAVGAVDSNSNRASFSSVGAELEVMAPGAGVYSTYPTNTYATLNGTSMASPHVAGAAALILSKHPNLSASQVRNRLSSTATYLGSSFYYGKGLINVEAAAQ

SEQ ID NO: 51132 - protein, 274 aa, Bacillus licheniformis
AQTVPYGIPLIKADKVQAQGFKGANVKVAVLDTGIQAEHPDLNVVGGASFVAGEAYNTDGNGHGTHVAGTVAALDNTTGVLGVAPSVSLYAVKVLNSSGSGSYSGIVSGIEWATTNGMDVINMSLGGASGSTAMKQAVDNAYARGVVVVAAAGNSGSSGNTNTIGYPAKYDSVIAVGAVDSNSNRASFSSVGAELEVMAPGAGVYSTYPTNTYATLNGTSMASPHVAGAAALILSKHPNLSASQVRNRLSSTATYLGSSFYYGKGLINVEAAAQ

SEQ ID NO: 51133 - protein, 274 aa, Bacillus licheniformis
AQTVPYGIPLIKADKVQAQGFKGANVKVAVLDTGIQASHPDLNVVGGASFVAGEAYNTDGNGHGTHVAGTVAALDNTTGVLGVAPSVSLYAVKVLNSSGSGSYSGIVSGIEWATTNGMDVINMSLGGASGSTAMKQAVDNAYARGVVVVAAAGNSGSSGNTNTIGYPAKYDSVIAVGAVDSNSNRASFSSVGAELEVMAPGAGVYSTYPTNTYATLNGTSMASPHVAGAAALILSKHPNLSASQVRARLSSTATYLGSSFYYGKGLINVEAAAQ

SEQ ID NO: 51134 - protein, 274 aa, Bacillus licheniformis
AQTVPYGIPLIKADKVQAQGFKGANVKVAVLDTGIQASHPDLNVVGGASFVAGEAYNTDGNGHGTHVAGTVAALDNTTGVLGVAPSVSLYAVKVLNSSGSGSYSGIVSGIEWATTNGMDVINMSLGGASVSTAMKQAVDNAYARGVVVVAAAGNSGSSGNTNTIGYPAKYDSVIAVGAVDSNSNRASFSSVGAELEVMAPGAGVYSTYPTNTYATLNGTSMASPHVAGAAALILSKHPNLSASQVRNRLSSTATYLGSSFYYGKGLINVEAAAQ

SEQ ID NO: 51135 - protein, 274 aa, Bacillus licheniformis
AQTVPYGIPLIKADKVQAQGFKGANVKVAVLDTGIQASHPDLNVVGGASFVAGEAYNTDGNGHGTHVAGTVAALDNTTGVLGVAPSVSLYAVKVLNSSGSGSYSGIVSGIEWATTNGMDVINMSLGGASKSTAMKQAVDNAYARGVVVVAAAGNSGSSGNTNTIGYPAKYDSVIAVGAVDSNSNRASFSSVGAELEVMAPGAGVYSTYPTNTYATLNGTSMASPHVAGAAALILSKHPNLSASQVRNRLSSTATYLGSSFYYGKGLINVEAAAQ

SEQ ID NO: 51136 - protein, 274 aa, Bacillus licheniformis
AQTVPYGIPLIKADKVQAQGFKGANVKVAVLDTGIQASHPDLNVVGGASFVAGEAYNTDGNGHGTHVAGTVAALDNTTGVLGVAPSVSMYAVKVLNSSGSGSYSGIVSGIEWATTNGMDVINMSLGGASGSTAMKQAVDNAYARGVVVVAAAGNSGSSGNTNTIGYPAKYDSVIAVGAVDSNSNRASFSSVGAELEVMAPGAGVYSTYPTNTYATLNGTSMASPHVAGAAALILSKHPNLSASQVRNRLSSTATYLGSSFYYGKGLINVEAAAQ

SEQ ID NO: 51137 - protein, 274 aa, Bacillus mojavensis
AQTVPYGIPLIKADKVQAQGFKGANVKVAVLDTGIQASHPDLNVVGGASFVAGEAYNTDGNGHGTHVAGTVAALDNTTGVLGVAPSVSLYAVKVLNSSGSGMYSGIVSGIEWATTNGMDVINMSLGGASGSTAMKQAVDNAYARGVVVVAAAGNSGSSGNTNTIGYPAKYDSVIAVGAVDSNSNRASFSSVGAELEVMAPGAGVYSTYPTNTYATLNGTSMASPHVAGAAALILSKHPNLSASQVRNRLSSTATYLGSSFYYGKGLINVEAAAQ

SEQ ID NO: 51138 - protein, 274 aa, Bacillus licheniformis
AQTVPYGIPLIKADKVQAQGFKGANVKVAVLDTGIQASHPDLNVVGGASFVAGEAYNTDGNGHGTHVAGTVAALDNTTGVLGVAPSVSLYAVKVLNSSGSGSYSGIVSGIEWATTNGMDVINMSLGGASYSTAMKQAVDNAYARGVVVVAAAGNSGSSGNTNTIGYPAKYDSVIAVGAVDSNSNRASFSSVGAELEVMAPGAGVYSTYPTNTYATLNGTSMASPHVAGAAALILSKHPNLSASQVRNRLSSTATYLGSSFYYGKGLINVEAAAQ

SEQ ID NO: 51139 - protein, 274 aa, Bacillus licheniformis
AQTVPYGIPLIKADKVQAQGFKGANVKVAVLDTGIQASHPDLNVVGGASFVAGEAYNTDGNGHGTHVAGTVAALDNTTGVLGVAPSVSLYAVKVLNSSGSGSYSGIVSGIEWATTNGMDVINMSLGGAIGSTAMKQAVDNAYARGVVVVAAAGNSGSSGNTNTIGYPAKYDSVIAVGAVDSNSNRASFSSVGAELEVMAPGAGVYSTYPTNTYATLNGTSMASPHVAGAAALILSKHPNLSASQVRNRLSSTATYLGSSFYYGKGLINVEAAAQ

SEQ ID NO: 51140 - protein, 274 aa, Bacillus licheniformis
AQTVPYGIPLIKADKVQAQGFKGANVKVAVLDTGIQASHPDLNVVGGASFVAGEAYNTDGNGHGTHVAGTVAALDNTTGVLGVAPSESLYAVKVLNSSGSGSYSGIVSGIEWATTNGMDVINMSLGGASGSTAMKQAVDNAYARGVVVVAAAGNSGSSGNTNTIGYPAKYDSVIAVGAVDSNSNRASFSSVGAELEVMAPGAGVYSTYPTNTYATLNGTSMASPHVAGAAALILSKHPNLSASQVRNRLSSTATYLGSSFYYGKGLINVEAAAQ

SEQ ID NO: 51141 - protein, 274 aa, Bacillus licheniformis
AQTVPYGIPLIKADKVQAQGFKGANVKVAVLDTGIQASHPDLNVVGGASFVAGEAYNTDGNGHGTHVAGTVAALDNTTGVLGVAPSVSLYAVKVLNSSGSFSYSGIVSGIEWATTNGMDVINMSLGGASGSTAMKQAVDNAYARGVVVVAAAGNSGSSGNTNTIGYPAKYDSVIAVGAVDSNSNRASFSSVGAELEVMAPGAGVYSTYPTNTYATLNGTSMASPHVAGAAALILSKHPNLSASQVRNRLSSTATYLGSSFYYGKGLINVEAAAQ

SEQ ID NO: 51142 - protein, 274 aa, Bacillus licheniformis
AQTVPYGIPLIKADKVQAQGFKGANVKVAVLDTGIQAQHPDLNVVGGASFVAGEAYNTDGNGHGTHVAGTVAALDNTTGVLGVAPSVSLYAVKVLNSSGSGSYSGIVSGIEWATTNGMDVINMSLGGASGSTAMKQAVDNAYARGVVVVAAAGNSGSSGNTNTIGYPAKYDSVIAVGAVDSNSNRASFSSVGAELEVMAPGAGVYSTYPTNTYATLNGTSMASPHVAGAAALILSKHPNLSASQVRNRLSSTATYLGSSFYYGKGLINVEAAAQ

SEQ ID NO: 51143 - protein, 274 aa, Bacillus licheniformis
AQTVPYGIPLIKADKVQAQGFKGANVKVAVLDTGIQASHPDLNVVGGRSFVAGEAYNTDGNGHGTHVAGTVAALDNTTGVLGVAPSVSLYAVKVLNSSGSGSYSGIVSGIEWATTNGMDVINMSLGGASGSTAMKQAVDNAYARGVVVVAAAGNSGSSGNTNTIGYPAKYDSVIAVGAVDSNSNRASFSSVGAELEVMAPGAGVYSTYPTNTYATLNGTSMASPHVAGAAALILSKHPNLSASQVRNRLSSTATYLGSSFYYGKGLINVEAAAQ

SEQ ID NO: 51144 - protein, 274 aa, Bacillus licheniformis
AQTVPYGIPLIKADKVQAQGMKGANVKVAVLDTGIQASHPDLNVVGGASFVAGEAYNTDGNGHGTHVAGTVAALDNTTGVLGVAPSVSLYAVKVLNSSGSGSYSGIVSGIEWATTNGMDVINMSLGGASGSTAMKQAVDNAYARGVVVVAAAGNSGSSGNTNTIGYPAKYDSVIAVGAVDSNSNRASFSSVGAELEVMAPGAGVYSTYPTNTYATLNGTSMASPHVAGAAALILSKHPNLSASQVRNRLSSTATYLGSSFYYGKGLINVEAAAQ

SEQ ID NO: 51145 - protein, 274 aa, Bacillus licheniformis
AQTVPYGIPLIKADKVQAQGFKGANVKVAVLDTGIQASHPDLNVVGGASFVAGEAYNLDGNGHGTHVAGTVAALDNTTGVLGVAPSVSLYAVKVLNSSGSGSYSGIVSGIEWATTNGMDVINMSLGGASGSTAMKQAVDNAYARGVVVVAAAGNSGSSGNTNTIGYPAKYDSVIAVGAVDSNSNRASFSSVGAELEVMAPGAGVYSTYPTNTYATLNGTSMASPHVAGAAALILSKHPNLSASQVRNRLSSTATYLGSSFYYGKGLINVEAAAQ

SEQ ID NO: 51146 - protein, 274 aa, Bacillus licheniformis
AQTVPYGIPLIKADKVQAQGFKGANVKVAVLDTGIQASHPDLNVVGGASFVAGEAYNTDGNGHGTHVAGTVAALDNTTGVLGVAPSVSLYAVKVLNSSGSGSYSGIVSGIEWATTNGMDVINMSLGGASASTAMKQAVDNAYARGVVVVAAAGNSGSSGNTNTIGYPAKYDSVIAVGAVDSNSNRASFSSVGAELEVMAPGAGVYSTYPTNTYATLNGTSMASPHVAGAAALILSKHPNLSASQVRNRLSSTATYLGSSFYYGKGLINVEAAAQ

SEQ ID NO: 51147 - protein, 274 aa, Bacillus licheniformis
AQTVPYGIPLIKADKVQAQGFKGANVKVAVLDTGIQASHPDLNVVGGASFVAGEAYNTDGNGHGTHVAGTVAALDNTTGVLGVAPSVSLYAVKVLNSSGSGSYSGIVSGIEWATTNGMDVINMSLGGAVGSTAMKQAVDNAYARGVVVVAAAGNSGSSGNTNTIGYPAKYDSVIAVGAVDSNSNRASFSSVGAELEVMAPGAGVYSTYPTNTYATLNGTSMASPHVAGAAALILSKHPNLSASQVRNRLSSTATYLGSSFYYGKGLINVEAAAQ

SEQ ID NO: 51148 - protein, 274 aa, Bacillus licheniformis
AQTVPYGIPLIKADKVQAQGFKGANVKVAVLDTGIQAVHPDLNVVGGASFVAGEAYNTDGNGHGTHVAGTVAALDNTTGVLGVAPSVSLYAVKVLNSSGSGSYSGIVSGIEWATTNGMDVINMSLGGASGSTAMKQAVDNAYARGVVVVAAAGNSGSSGNTNTIGYPAKYDSVIAVGAVDSNSNRASFSSVGAELEVMAPGAGVYSTYPTNTYATLNGTSMASPHVAGAAALILSKHPNLSASQVRNRLSSTATYLGSSFYYGKGLINVEAAAQ

SEQ ID NO: 51149 - protein, 274 aa, Bacillus licheniformis
AQTVPYGIPLIKADKVQAQGFKGANVKVAVLDTGIQASHPDLNVVGGASFVAGEAYNTDGSGHGTHVAGTVAALDNTTGVLGVAPSVSLYAVKVLNSSGSGSYSGIVSGIEWATTNGMDVINMSLGGASGSTAMKQAVDNAYARGVVVVAAAGNSGSSGNTNTIGYPAKYDSVIAVGAVDSNSNRASFSSVGAELEVMAPGAGVYSTYPTNTYATLNGTSMASPHVAGAAALILSKHPNLSASQVRNRLSSTATYLGSSFYYGKGLINVEAAAQ

SEQ ID NO: 51150 - protein, 274 aa, Bacillus licheniformis
AQTVPYGIPLIKADKVQAQGFKGANVKVAVLDTGIQASHPDLNVVGGASFVAGEAYNTDGNGHGTHVAGTVAALDTTTGVLGVAPSVSLYAVKVLNSSGSGSYSGIVSGIEWATTNGMDVINMSLGGASGSTAMKQAVDNAYARGVVVVAAAGNSGSSGNTNTIGYPAKYDSVIAVGAVDSNSNRASFSSVGAELEVMAPGAGVYSTYPTNTYATLNGTSMASPHVAGAAALILSKHPNLSASQVRNRLSSTATYLGSSFYYGKGLINVEAAAQ

SEQ ID NO: 51151 - protein, 274 aa, Bacillus licheniformis
AQTVPYGIPLIKADKVQAQGFKGANVKVAVLDTGIQASHPDLNVVGGASFVAGEAYNTDGNGHGTHVAGTVAALDNTTGVLGVAPSVSLYAVKVLNSSGSGSYSGIVSGIEWATTNGMDVINMSLGGAFGSTAMKQAVDNAYARGVVVVAAAGNSGSSGNTNTIGYPAKYDSVIAVGAVDSNSNRASFSSVGAELEVMAPGAGVYSTYPTNTYATLNGTSMASPHVAGAAALILSKHPNLSASQVRNRLSSTATYLGSSFYYGKGLINVEAAAQ

SEQ ID NO: 51152 - protein, 274 aa, Bacillus mojavensis
AQTVPYGIPLIKADKVQAQGFKGANVKVAVLDTGIQASHPDLNVVGGASFVAGEAYNTDGNGHGTHVAGTVAALDNTTGVLGVAPSVSLYAVKVLNSSGSGQYSGIVSGIEWATTNGMDVINMSLGGASGSTAMKQAVDNAYARGVVVVAAAGNSGSSGNTNTIGYPAKYDSVIAVGAVDSNSNRASFSSVGAELEVMAPGAGVYSTYPTNTYATLNGTSMASPHVAGAAALILSKHPNLSASQVRNRLSSTATYLGSSFYYGKGLINVEAAAQ

SEQ ID NO: 51153 - protein, 274 aa, Bacillus licheniformis
AQTVPYGIPLIKADKVQAQGFKGANVKVAVLDTGIQASHPDLNVVGGASFVAGEAYNTDGNGHGTHVAGTVAALDNTTGVLGVAPSVSEYAVKVLNSSGSGSYSGIVSGIEWATTNGMDVINMSLGGASGSTAMKQAVDNAYARGVVVVAAAGNSGSSGNTNTIGYPAKYDSVIAVGAVDSNSNRASFSSVGAELEVMAPGAGVYSTYPTNTYATLNGTSMASPHVAGAAALILSKHPNLSASQVRNRLSSTATYLGSSFYYGKGLINVEAAAQ

SEQ ID NO: 51154 - protein, 274 aa, Bacillus licheniformis
AQTVPYGIPLIKADKVQAQGFKGANVKVAVLDTGIQASHPDLNVVGGASFVAGEAYNTDGNGHGTHVAGTVAALDNTTGVLPVAPSVSLYAVKVLNSSGSGSYSGIVSGIEWATTNGMDVINMSLGGASGSTAMKQAVDNAYARGVVVVAAAGNSGSSGNTNTIGYPAKYDSVIAVGAVDSNSNRASFSSVGAELEVMAPGAGVYSTYPTNTYATLNGTSMASPHVAGAAALILSKHPNLSASQVRNRLSSTATYLGSSFYYGKGLINVEAAAQ

SEQ ID NO: 51155 - protein, 274 aa, Bacillus licheniformis
AQTVPYGIPLIKADKVQAQGFKGANVKVAVLDTGIQASHPDLNVVGGASFVAGEAYNTDGNGHGTHVAGTVAALDNTTGVLGVAPSVSLYAVKVLNSSGSGSYSGIVSGIEWATTNGMDVINMSLGGAEGSTAMKQAVDNAYARGVVVVAAAGNSGSSGNTNTIGYPAKYDSVIAVGAVDSNSNRASFSSVGAELEVMAPGAGVYSTYPTNTYATLNGTSMASPHVAGAAALILSKHPNLSASQVRNRLSSTATYLGSSFYYGKGLINVEAAAQ

SEQ ID NO: 51156 - protein, 274 aa, Bacillus licheniformis
AQTVPYGIPLIKADKVQAQGFKGANVKVAVLDTGIQASHPDLNVVGGASFVAGEAYNSDGNGHGTHVAGTVAALDNTTGVLGVAPSVSLYAVKVLNSSGSGSYSGIVSGIEWATTNGMDVINMSLGGASGSTAMKQAVDNAYARGVVVVAAAGNSGSSGNTNTIGYPAKYDSVIAVGAVDSNSNRASFSSVGAELEVMAPGAGVYSTYPTNTYATLNGTSMASPHVAGAAALILSKHPNLSASQVRNRLSSTATYLGSSFYYGKGLINVEAAAQ

SEQ ID NO: 51157 - protein, 274 aa, Bacillus licheniformis
AQTVPYGIPLIKADKVQAQGFKGANVKVAVLDTGIQASHPDLNVVGGASFVAGEAYNIDGNGHGTHVAGTVAALDNTTGVLGVAPSVSLYAVKVLNSSGSGSYSGIVSGIEWATTNGMDVINMSLGGASGSTAMKQAVDNAYARGVVVVAAAGNSGSSGNTNTIGYPAKYDSVIAVGAVDSNSNRASFSSVGAELEVMAPGAGVYSTYPTNTYATLNGTSMASPHVAGAAALILSKHPNLSASQVRNRLSSTATYLGSSFYYGKGLINVEAAAQ

SEQ ID NO: 51158 - protein, 274 aa, Bacillus licheniformis
AQTVPYGIPLIKADKVQAQGFKGANVKVAVLDTGIQASHPDLNVVGGASFVAGEAYNTDGNGHGTHVAGTVAALDNTTGVLGVAPSVSLYAVKVLNSSGSGSYSGIVSGIEWATTNGMDVINMSLGGARGSTAMKQAVDNAYARGVVVVAAAGNSGSSGNTNTIGYPAKYDSVIAVGAVDSNSNRASFSSVGAELEVMAPGAGVYSTYPTNTYATLNGTSMASPHVAGAAALILSKHPNLSASQVRNRLSSTATYLGSSFYYGKGLINVEAAAQ

SEQ ID NO: 51159 - protein, 274 aa, Bacillus licheniformis
AQTVPYGIPLIKADKVQAQGFKGANVKVAVLDTGIQASHPDLNVVGGASFVAGEAYNTDGNGHGTHVAGTVAALDNTTGVLGVAPSVSLYAVKVLNSSGSGSYSGIVSGIEWATTNGMDVINMSLGGASQSTAMKQAVDNAYARGVVVVAAAGNSGSSGNTNTIGYPAKYDSVIAVGAVDSNSNRASFSSVGAELEVMAPGAGVYSTYPTNTYATLNGTSMASPHVAGAAALILSKHPNLSASQVRNRLSSTATYLGSSFYYGKGLINVEAAAQ

SEQ ID NO: 51160 - protein, 274 aa, Bacillus licheniformis
AQTVPYGIPLIKADKVQAQGFKGANVKVAVLDTGIQASHPDLNVVGGASFVAGEAYNTDGNGHGTHVAGTVAALDNTTGVLEVAPSVSLYAVKVLNSSGSGSYSGIVSGIEWATTNGMDVINMSLGGASGSTAMKQAVDNAYARGVVVVAAAGNSGSSGNTNTIGYPAKYDSVIAVGAVDSNSNRASFSSVGAELEVMAPGAGVYSTYPTNTYATLNGTSMASPHVAGAAALILSKHPNLSASQVRNRLSSTATYLGSSFYYGKGLINVEAAAQ

SEQ ID NO: 51161 - protein, 274 aa, Bacillus licheniformis
AQVVPYGIPLIKADKVQAQGFKGANVKVAVLDTGIQASHPDLNVVGGASFVAGEAYNTDGNGHGTHVAGTVAALDNTTGVLGVAPSVSLYAVKVLNSSGSGSYSGIVSGIEWATTNGMDVINMSLGGASGSTAMKQAVDNAYARGVVVVAAAGNSGSSGNTNTIGYPAKYDSVIAVGAVDSNSNRASFSSVGAELEVMAPGAGVYSTYPTNTYATLNGTSMASPHVAGAAALILSKHPNLSASQVRNRLSSTATYLGSSFYYGKGLINVEAAAQ

SEQ ID NO: 51162 - protein, 274 aa, Bacillus licheniformis
AQTVPYGIPLIKADKVQAQGFKGANVKVAVLDTGIQASHFDLNVVGGASFVAGEAYNTDGNGHGTHVAGTVAALDNTTGVLGVAPSVSLYAVKVLNSSGSGSYSGIVSGIEWATTNGMDVINMSLGGASGSTAMKQAVDNAYARGVVVVAAAGNSGSSGNTNTIGYPAKYDSVIAVGAVDSNSNRASFSSVGAELEVMAPGAGVYSTYPTNTYATLNGTSMASPHVAGAAALILSKHPNLSASQVRNRLSSTATYLGSSFYYGKGLINVEAAAQ

SEQ ID NO: 51163 - protein, 274 aa, Bacillus licheniformis
AQTVPYGIPLIKADKVQAQGFKGANVKVAVLDTGIQASHPDLNVVGGASFVAGEAYNTDGNGHGTHVAGTVAALDNTTGVLGVAPSVSLYAVKVLNSSGSGSYSGIVSGIEWATTNGMDVINMSLGGASGSTAMKQAVDNAYARGVVVVAAAGNSGSSGNTSTIGYPAKYDSVIAVGAVDSNSNRASFSSVGAELEVMAPGAGVYSTYPTNTYATLNGTSMASPHVAGAAALILSKHPNLSASQVRNRLSSTATYLGSSFYYGKGLINVEAAAQ

SEQ ID NO: 51164 - protein, 274 aa, Bacillus licheniformis
AQTVPYGIPLIKADKVQAQGFKGANVKVAVLDTGIQASHPDLNVVGGASFVAGEAYNTDGNGHGTHVAGTVAALDNTTGVLCVAPSVSLYAVKVLNSSGSGSYSGIVSGIEWATTNGMDVINMSLGGASGSTAMKQAVDNAYARGVVVVAAAGNSGSSGNTNTIGYPAKYDSVIAVGAVDSNSNRASFSSVGAELEVMAPGAGVYSTYPTNTYATLNGTSMASPHVAGAAALILSKHPNLSASQVRNRLSSTATYLGSSFYYGKGLINVEAAAQ

SEQ ID NO: 51165 - protein, 274 aa, Bacillus licheniformis
AQTVPYGIPLIKADKVQAQGFKGANVKVAVLDTGIQALHPDLNVVGGASFVAGEAYNTDGNGHGTHVAGTVAALDNTTGVLGVAPSVSLYAVKVLNSSGSGSYSGIVSGIEWATTNGMDVINMSLGGASGSTAMKQAVDNAYARGVVVVAAAGNSGSSGNTNTIGYPAKYDSVIAVGAVDSNSNRASFSSVGAELEVMAPGAGVYSTYPTNTYATLNGTSMASPHVAGAAALILSKHPNLSASQVRNRLSSTATYLGSSFYYGKGLINVEAAAQ

SEQ ID NO: 51166 - protein, 274 aa, Bacillus licheniformis
AQTVPYGIPLIKADKVQAQGFKGANVKVAVLDTGIQASHPDLNVVGGASFVAGEAYNTDGNGHGTHVAGTVAALDNTTGVLGVAPSVSLYAVKVLNSSGSGSYSGIVSGIEWATTLGMDVINMSLGGASGSTAMKQAVDNAYARGVVVVAAAGNSGSSGNTNTIGYPAKYDSVIAVGAVDSNSNRASFSSVGAELEVMAPGAGVYSTYPTNTYATLNGTSMASPHVAGAAALILSKHPNLSASQVRNRLSSTATYLGSSFYYGKGLINVEAAAQ

SEQ ID NO: 51167 - protein, 274 aa, Bacillus licheniformis
AQTVPYGIPLIKADKVQAQGFKGANVKVAVLDTGIQASHPDLNVVGGASFVAGEAYNTDGNGHGTHVAGTVAALDNTTGVLGVAPSVSRYAVKVLNSSGSGSYSGIVSGIEWATTNGMDVINMSLGGASGSTAMKQAVDNAYARGVVVVAAAGNSGSSGNTNTIGYPAKYDSVIAVGAVDSNSNRASFSSVGAELEVMAPGAGVYSTYPTNTYATLNGTSMASPHVAGAAALILSKHPNLSASQVRNRLSSTATYLGSSFYYGKGLINVEAAAQ

SEQ ID NO: 51168 - protein, 274 aa, Bacillus licheniformis
AQTVPYGIPLIKADKVQAQGFKGANVKVAVLDTGIQASHPDLNVVGGASFVAGEAYNTDGNGHGTHVAGTVAALDNTTGVLGVAPSVSLYAVKVLNSSGSGSYSGIVSGIEWATTNGMDVINMSLGGLSGSTAMKQAVDNAYARGVVVVAAAGNSGSSGNTNTIGYPAKYDSVIAVGAVDSNSNRASFSSVGAELEVMAPGAGVYSTYPTNTYATLNGTSMASPHVAGAAALILSKHPNLSASQVRNRLSSTATYLGSSFYYGKGLINVEAAAQ

SEQ ID NO: 51169 - protein, 274 aa, Bacillus licheniformis
AQTVPYGIPLIKADKVQAQGFKGANVKVAVLDTGIQASHPDLNVVGGASFVAGEAYNTDGNGHGTHVAGTVAALDNTTGVLGVAPSVSLYAVKVLNSSGSGSYSGIVSGIEWATTNGMDVINMSLGRASGSTAMKQAVDNAYARGVVVVAAAGNSGSSGNTNTIGYPAKYDSVIAVGAVDSNSNRASFSSVGAELEVMAPGAGVYSTYPTNTYATLNGTSMASPHVAGAAALILSKHPNLSASQVRNRLSSTATYLGSSFYYGKGLINVEAAAQ

SEQ ID NO: 51170 - protein, 274 aa, Bacillus licheniformis
AQTVPYGIPLIKADKVQAQGLKGANVKVAVLDTGIQASHPDLNVVGGASFVAGEAYNTDGNGHGTHVAGTVAALDNTTGVLGVAPSVSLYAVKVLNSSGSGSYSGIVSGIEWATTNGMDVINMSLGGASGSTAMKQAVDNAYARGVVVVAAAGNSGSSGNTNTIGYPAKYDSVIAVGAVDSNSNRASFSSVGAELEVMAPGAGVYSTYPTNTYATLNGTSMASPHVAGAAALILSKHPNLSASQVRNRLSSTATYLGSSFYYGKGLINVEAAAQ

SEQ ID NO: 51171 - protein, 274 aa, Bacillus licheniformis
AQTVPYGIPLIKADKVQAQGFKGANVKVAVLDTGIQASHPDLNVVGGASFVAGEAYNTDGNGHGTHVAGTVAALDNTTGVLGVAPDVSLYAVKVLNSSGSGSYSGIVSGIEWATTNGMDVINMSLGGASGSTAMKQAVDNAYARGVVVVAAAGNSGSSGNTNTIGYPAKYDSVIAVGAVDSNSNRASFSSVGAELEVMAPGAGVYSTYPTNTYATLNGTSMASPHVAGAAALILSKHPNLSASQVRNRLSSTATYLGSSFYYGKGLINVEAAAQ

SEQ ID NO: 51172 - protein, 274 aa, Bacillus licheniformis
AQTVPYGIPLIKADKVQAQGFKGANVKVAVLDTGIQASHPDLNVVGGLSFVAGEAYNTDGNGHGTHVAGTVAALDNTTGVLGVAPSVSLYAVKVLNSSGSGSYSGIVSGIEWATTNGMDVINMSLGGASGSTAMKQAVDNAYARGVVVVAAAGNSGSSGNTNTIGYPAKYDSVIAVGAVDSNSNRASFSSVGAELEVMAPGAGVYSTYPTNTYATLNGTSMASPHVAGAAALILSKHPNLSASQVRNRLSSTATYLGSSFYYGKGLINVEAAAQ

SEQ ID NO: 51173 - protein, 274 aa, Bacillus licheniformis
AQTVPYGIPLIKADKVQAQGFKGANVKVAVLDTGIQASHPDLNVVGGASFVAGEAYNTDGNGHGTHVAGTVAALDNTTGVLGVAPSSSLYAVKVLNSSGSGSYSGIVSGIEWATTNGMDVINMSLGGASGSTAMKQAVDNAYARGVVVVAAAGNSGSSGNTNTIGYPAKYDSVIAVGAVDSNSNRASFSSVGAELEVMAPGAGVYSTYPTNTYATLNGTSMASPHVAGAAALILSKHPNLSASQVRNRLSSTATYLGSSFYYGKGLINVEAAAQ

SEQ ID NO: 51174 - protein, 274 aa, Bacillus licheniformis
AQTVPYGIPLIKADKVQAQGFKGANVKVAVLDTGIQASHPDLNVVGGASFVAGEAYNTDGNGHGTHVAGTVAALDNTTGVLLVAPSVSLYAVKVLNSSGSGSYSGIVSGIEWATTNGMDVINMSLGGASGSTAMKQAVDNAYARGVVVVAAAGNSGSSGNTNTIGYPAKYDSVIAVGAVDSNSNRASFSSVGAELEVMAPGAGVYSTYPTNTYATLNGTSMASPHVAGAAALILSKHPNLSASQVRNRLSSTATYLGSSFYYGKGLINVEAAAQ

SEQ ID NO: 51175 - protein, 274 aa, Bacillus licheniformis
AQTVPYGIPLIKADKVQAQGFKGANVKVAVLDTGIQASHPDLNVVGGASFVAGEAYNEDGNGHGTHVAGTVAALDNTTGVLGVAPSVSLYAVKVLNSSGSGSYSGIVSGIEWATTNGMDVINMSLGGASGSTAMKQAVDNAYARGVVVVAAAGNSGSSGNTNTIGYPAKYDSVIAVGAVDSNSNRASFSSVGAELEVMAPGAGVYSTYPTNTYATLNGTSMASPHVAGAAALILSKHPNLSASQVRNRLSSTATYLGSSFYYGKGLINVEAAAQ

SEQ ID NO: 51176 - protein, 274 aa, Bacillus licheniformis
AQTVPYGIPLIKADKVQAQGFKGANVKVAVLDTGIQASHPDLNVVGGASFVAGEAYNTDGNGHGTHVAGTVAALDNTTGVLGVAPSVSLYAVKVLNSSGSGSYSGIVSGIEWATTNGMDVINMSLGGATGSTAMKQAVDNAYARGVVVVAAAGNSGSSGNTNTIGYPAKYDSVIAVGAVDSNSNRASFSSVGAELEVMAPGAGVYSTYPTNTYATLNGTSMASPHVAGAAALILSKHPNLSASQVRNRLSSTATYLGSSFYYGKGLINVEAAAQ

SEQ ID NO: 51177 - protein, 274 aa, Bacillus licheniformis
AQTVPYGIPLIKADKVQAQGFKGANVKVAVLDTGIQASHPDLNVVGGASFVAGEAYNTDGNGHGTHVAGTVAALDNTTGVLGVAPSVSLYAVKVLNSSGSGSYSGIVSGIEWATTNGMDVINMSLGGASGSTAMKQAVDWAYARGVVVVAAAGNSGSSGNTNTIGYPAKYDSVIAVGAVDSNSNRASFSSVGAELEVMAPGAGVYSTYPTNTYATLNGTSMASPHVAGAAALILSKHPNLSASQVRNRLSSTATYLGSSFYYGKGLINVEAAAQ

SEQ ID NO: 51178 - protein, 274 aa, Bacillus licheniformis
AQTVPYGIPLIKADKVQAQGFKGANVKVAVLDTGIQASHPDLNVVGGASFVAGEAYNTDGNGHGTHVAGTVAALDGTTGVLGVAPSVSLYAVKVLNSSGSGSYSGIVSGIEWATTNGMDVINMSLGGASGSTAMKQAVDNAYARGVVVVAAAGNSGSSGNTNTIGYPAKYDSVIAVGAVDSNSNRASFSSVGAELEVMAPGAGVYSTYPTNTYATLNGTSMASPHVAGAAALILSKHPNLSASQVRNRLSSTATYLGSSFYYGKGLINVEAAAQ

SEQ ID NO: 51179 - protein, 274 aa, Bacillus licheniformis
AQTVPYGIPLIKADKVQAQGFKGANVKVAVLDTGIQASHSDLNVVGGASFVAGEAYNTDGNGHGTHVAGTVAALDNTTGVLGVAPSVSLYAVKVLNSSGSGSYSGIVSGIEWATTNGMDVINMSLGGASGSTAMKQAVDNAYARGVVVVAAAGNSGSSGNTNTIGYPAKYDSVIAVGAVDSNSNRASFSSVGAELEVMAPGAGVYSTYPTNTYATLNGTSMASPHVAGAAALILSKHPNLSASQVRNRLSSTATYLGSSFYYGKGLINVEAAAQ

SEQ ID NO: 51180 - protein, 274 aa, Bacillus licheniformis
AQTVPYGIPLIKADKVQAQGFKGANVKVAVLDTGIQASHPDLNVVGGASFVAGEAYNTDGNGHGTHVAGTVAALDNTTGVLGVAPSVSIYAVKVLNSSGSGSYSGIVSGIEWATTNGMDVINMSLGGASGSTAMKQAVDNAYARGVVVVAAAGNSGSSGNTNTIGYPAKYDSVIAVGAVDSNSNRASFSSVGAELEVMAPGAGVYSTYPTNTYATLNGTSMASPHVAGAAALILSKHPNLSASQVRNRLSSTATYLGSSFYYGKGLINVEAAAQ

SEQ ID NO: 51181 - protein, 274 aa, Bacillus licheniformis
AQTVPYGIPLIKADKVQAQGFKGANVKVAVLDTGIQASHPDLNVVGGASFVAGEAYNTDGNGHGTHVAGTVAALDNTTGVLGVAPSQSLYAVKVLNSSGSGSYSGIVSGIEWATTNGMDVINMSLGGASGSTAMKQAVDNAYARGVVVVAAAGNSGSSGNTNTIGYPAKYDSVIAVGAVDSNSNRASFSSVGAELEVMAPGAGVYSTYPTNTYATLNGTSMASPHVAGAAALILSKHPNLSASQVRNRLSSTATYLGSSFYYGKGLINVEAAAQ

SEQ ID NO: 51182 - protein, 274 aa, Bacillus licheniformis
AQTVPYGIPLIKADKVQAQGFKGANVKVAVLDTGIQASHPDLNVVGGASFVAGEAYNTDGNGHGTHVAGTVAALDNTTGVLGVAPSVSFYAVKVLNSSGSGSYSGIVSGIEWATTNGMDVINMSLGGASGSTAMKQAVDNAYARGVVVVAAAGNSGSSGNTNTIGYPAKYDSVIAVGAVDSNSNRASFSSVGAELEVMAPGAGVYSTYPTNTYATLNGTSMASPHVAGAAALILSKHPNLSASQVRNRLSSTATYLGSSFYYGKGLINVEAAAQ

SEQ ID NO: 51183 - protein, 274 aa, Bacillus licheniformis
AQTVPYGIPLIKADKVQAQGFKGANVKVAVLDTGIQASHPDLNVVGGASFVAGEAYNTDGNGHGTHVAGTVAALDNTTGVLGVAPSVSLYAVKVLNSSGSGSYSGIVSGIEWATTEGMDVINMSLGGASGSTAMKQAVDNAYARGVVVVAAAGNSGSSGNTNTIGYPAKYDSVIAVGAVDSNSNRASFSSVGAELEVMAPGAGVYSTYPTNTYATLNGTSMASPHVAGAAALILSKHPNLSASQVRNRLSSTATYLGSSFYYGKGLINVEAAAQ

SEQ ID NO: 51184 - protein, 274 aa, Bacillus licheniformis
AQTVPYGIPLIKADKVQAQGFKGANVKVAVLDTGIQARHPDLNVVGGASFVAGEAYNTDGNGHGTHVAGTVAALDNTTGVLGVAPSVSLYAVKVLNSSGSGSYSGIVSGIEWATTNGMDVINMSLGGASGSTAMKQAVDNAYARGVVVVAAAGNSGSSGNTNTIGYPAKYDSVIAVGAVDSNSNRASFSSVGAELEVMAPGAGVYSTYPTNTYATLNGTSMASPHVAGAAALILSKHPNLSASQVRNRLSSTATYLGSSFYYGKGLINVEAAAQ

SEQ ID NO: 51185 - protein, 274 aa, Bacillus licheniformis
AQTVPYGIPLIKADKVQAQGFKGANVKVAVLDTGIQASHPDLNVVGGASFVAGEAYNTDGNGHGTHVAGTVAALDNTTGVLGVAPSVSLYAVKVLNSSGSGSYSGIVSGIEWATTNGMDVINMSLGQASGSTAMKQAVDNAYARGVVVVAAAGNSGSSGNTNTIGYPAKYDSVIAVGAVDSNSNRASFSSVGAELEVMAPGAGVYSTYPTNTYATLNGTSMASPHVAGAAALILSKHPNLSASQVRNRLSSTATYLGSSFYYGKGLINVEAAAQ

SEQ ID NO: 51186 - protein, 274 aa, Bacillus licheniformis
AQTVPYGIPLIKADKVQAQGFKGANVKVAVLDTGIQATHPDLNVVGGASFVAGEAYNTDGNGHGTHVAGTVAALDNTTGVLGVAPSVSLYAVKVLNSSGSGSYSGIVSGIEWATTNGMDVINMSLGGASGSTAMKQAVDNAYARGVVVVAAAGNSGSSGNTNTIGYPAKYDSVIAVGAVDSNSNRASFSSVGAELEVMAPGAGVYSTYPTNTYATLNGTSMASPHVAGAAALILSKHPNLSASQVRNRLSSTATYLGSSFYYGKGLINVEAAAQ

SEQ ID NO: 51187 - protein, 274 aa, Bacillus licheniformis
AQTVPYGIPLIKADKVQAQGFKGANVKVAVLDTGIQANHPDLNVVGGASFVAGEAYNTDGNGHGTHVAGTVAALDNTTGVLGVAPSVSLYAVKVLNSSGSGSYSGIVSGIEWATTNGMDVINMSLGGASGSTAMKQAVDNAYARGVVVVAAAGNSGSSGNTNTIGYPAKYDSVIAVGAVDSNSNRASFSSVGAELEVMAPGAGVYSTYPTNTYATLNGTSMASPHVAGAAALILSKHPNLSASQVRNRLSSTATYLGSSFYYGKGLINVEAAAQ

SEQ ID NO: 51188 - protein, 274 aa, Bacillus licheniformis
AQTVPYGIPLIKADKVQAQGFKGANVKVAVLDTGIQASHPDLNVVGGASFVAGEAYNTDGNGHGTHVAGTVAALDNTTGVLGVAPSVSLYAVKVLNSSGSGSYSGIVSGIEWATTNGMDVINMSLGGADGSTAMKQAVDNAYARGVVVVAAAGNSGSSGNTNTIGYPAKYDSVIAVGAVDSNSNRASFSSVGAELEVMAPGAGVYSTYPTNTYATLNGTSMASPHVAGAAALILSKHPNLSASQVRNRLSSTATYLGSSFYYGKGLINVEAAAQ

SEQ ID NO: 51189 - protein, 274 aa, Bacillus licheniformis
AQTVPYGIPLIKADKVQAQGFKGANVKVAVLDTGIQASHPDLNVVGGASFVAGEAYNTDGNGHGTHVAGTVAALDNTTGVLGVAPSVSLYAVKVLNSSGSGSYSGIVSGIEWATTNGMDVINMSLGGASGSTAMKQAVDNAYARGVVVVAAAGNSGSSGNTNTIGYPAKYDSVIAVGAVDSNSNRASFSSVGAELEVMAPGAGVYSTYPTNTYATLNGTSMASPHVAGAAALILSKHPNLSASQVRNPLSSTATYLGSSFYYGKGLINVEAAAQ

SEQ ID NO: 51190 - protein, 274 aa, Bacillus licheniformis
AQTVPYGIPLIKADKVQAQGFKGANVKVAVLDTGIQASHPDLNVVGGASFVAGEAYNWDGNGHGTHVAGTVAALDNTTGVLGVAPSVSLYAVKVLNSSGSGSYSGIVSGIEWATTNGMDVINMSLGGASGSTAMKQAVDNAYARGVVVVAAAGNSGSSGNTNTIGYPAKYDSVIAVGAVDSNSNRASFSSVGAELEVMAPGAGVYSTYPTNTYATLNGTSMASPHVAGAAALILSKHPNLSASQVRNRLSSTATYLGSSFYYGKGLINVEAAAQ

SEQ ID NO: 51191 - protein, 274 aa, Bacillus licheniformis
AQTVPYGIPLIKADKVQAQGFKGANVKVAVLDTGIQASHPDLNVVGGASFVAGEAYNTDGNGHGTHVAGTVAALDNTTGVLGVAPSVSLYAVKVLNSSGSGSYSGIVSGIEWATTNGMDVINMSLGGASGSTAMKQAVDNAYARGVVVVAAAGNSGSSGNTNTIGYPAKYDSVIAVGAVDSNSNRASFSSVGAELEVMAPGAGVYSTYPTNTYATLNGTSMASPHVAGAAALILSKHPNLSASQVRNTLSSTATYLGSSFYYGKGLINVEAAAQ

SEQ ID NO: 51192 - protein, 274 aa, Bacillus licheniformis
AQTVPYGIPLIKADKVQAQGFKGANVKVAVLDTGIQASHPDLNVVGGASFVAGEAYNTDGNGHGTHVAGTVAALDNTTGVLGVAPSVSLYAVKVLNSSGSKSYSGIVSGIEWATTNGMDVINMSLGGASGSTAMKQAVDNAYARGVVVVAAAGNSGSSGNTNTIGYPAKYDSVIAVGAVDSNSNRASFSSVGAELEVMAPGAGVYSTYPTNTYATLNGTSMASPHVAGAAALILSKHPNLSASQVRNRLSSTATYLGSSFYYGKGLINVEAAAQ

SEQ ID NO: 51193 - protein, 274 aa, Bacillus licheniformis
AQTVPYGIPLIKADKVQAQGFKGANVKVAVLDTGIQAAHPDLNVVGGASFVAGEAYNTDGNGHGTHVAGTVAALDNTTGVLGVAPSVSLYAVKVLNSSGSGSYSGIVSGIEWATTNGMDVINMSLGGASGSTAMKQAVDNAYARGVVVVAAAGNSGSSGNTNTIGYPAKYDSVIAVGAVDSNSNRASFSSVGAELEVMAPGAGVYSTYPTNTYATLNGTSMASPHVAGAAALILSKHPNLSASQVRNRLSSTATYLGSSFYYGKGLINVEAAAQ

SEQ ID NO: 51194 - protein, 274 aa, Bacillus licheniformis
AQTVPYGIPLIKADKVQAQGKKGANVKVAVLDTGIQASHPDLNVVGGASFVAGEAYNTDGNGHGTHVAGTVAALDNTTGVLGVAPSVSLYAVKVLNSSGSGSYSGIVSGIEWATTNGMDVINMSLGGASGSTAMKQAVDNAYARGVVVVAAAGNSGSSGNTNTIGYPAKYDSVIAVGAVDSNSNRASFSSVGAELEVMAPGAGVYSTYPTNTYATLNGTSMASPHVAGAAALILSKHPNLSASQVRNRLSSTATYLGSSFYYGKGLINVEAAAQ

SEQ ID NO: 51195 - protein, 274 aa, Bacillus licheniformis
AQTVPYGIPLIKADKVQAQGFKGANVKVAVLDTGIQASHPDLNVVGGASFVAGEAYNTDGNGHGTHVAGTVAALDNTTGVLGVAPSVSLYAVKVLNSSGSGSYSGIVSGIEWATTNGMDVINMSLGGASGSTAMKQAVDNAYARGVVVVAAAGNSGSSGNTNTIGYPAKYDSVIAVGAVDSNSNRASFSSVGAELEVMAPGAGVYSTYPTNTYATLNGTSMASPHVAGAAALILSKHPNLSASQVRNRLSSTATYLGPSFYYGKGLINVEAAAQ

SEQ ID NO: 51196 - protein, 274 aa, Bacillus licheniformis
AQTVPYGIPLIKADKVQAQGFKGANVKVAVLDTGIQASHPDLNVVGGASFVAGEAYNTDGNGHGTHVAGTVAALDNTTGVLNVAPSVSLYAVKVLNSSGSGSYSGIVSGIEWATTNGMDVINMSLGGASGSTAMKQAVDNAYARGVVVVAAAGNSGSSGNTNTIGYPAKYDSVIAVGAVDSNSNRASFSSVGAELEVMAPGAGVYSTYPTNTYATLNGTSMASPHVAGAAALILSKHPNLSASQVRNRLSSTATYLGSSFYYGKGLINVEAAAQ

SEQ ID NO: 51197 - protein, 274 aa, Bacillus licheniformis
AQTVPYGIPLIKADKVQAQGFKGANVKVAVLDTGIQASHPDLNVVGGTSFVAGEAYNTDGNGHGTHVAGTVAALDNTTGVLGVAPSVSLYAVKVLNSSGSGSYSGIVSGIEWATTNGMDVINMSLGGASGSTAMKQAVDNAYARGVVVVAAAGNSGSSGNTNTIGYPAKYDSVIAVGAVDSNSNRASFSSVGAELEVMAPGAGVYSTYPTNTYATLNGTSMASPHVAGAAALILSKHPNLSASQVRNRLSSTATYLGSSFYYGKGLINVEAAAQ

SEQ ID NO: 51198 - protein, 274 aa, Bacillus licheniformis
AQTVPYGIPLIKADKVQAQGFKGANVKVAVLDTGIQASHPDLNVVGGASFVAGEAYNTDGNGHGTHVAGTVAALDNTTGVLGVAPSVSLYAVKVLNSSGSGSYSGIVSGIEWATTNGMDVINMSLGGTSGSTAMKQAVDNAYARGVVVVAAAGNSGSSGNTNTIGYPAKYDSVIAVGAVDSNSNRASFSSVGAELEVMAPGAGVYSTYPTNTYATLNGTSMASPHVAGAAALILSKHPNLSASQVRNRLSSTATYLGSSFYYGKGLINVEAAAQ

SEQ ID NO: 51199 - protein, 274 aa, Bacillus licheniformis
AQTVPYGIPLIKADKVQAQGFKGANVKVAVLDTGIQASHPDLNVVGGASFVAGEAYNTDGNGHGTHVAGTVAALDNTTGVLGVAPSVSLYAVKVLNSSGSGSYSGIVSGIEWATTNGMDVINMSLGGASGSTAMKQAVDNAYARGVVVVAAAGNSGSSGNTNTIGYPAKYDSVIAVGAVDSNSNRASFSSVGAELEVMAPGAGVYSTYITNTYATLNGTSMASPHVAGAAALILSKHPNLSASQVRNRLSSTATYLGSSFYYGKGLINVEAAAQ

SEQ ID NO: 51200 - protein, 274 aa, Bacillus licheniformis
AQTVPYGIPLIKADKVQAQGFKGANVKVAVLDTGIQASHPDLNVVGGASFVAGEAYNTDGNGHGTHVAGTVAALDNTTGVLGVAPSVSLYAVKVLASSGSGSYSGIVSGIEWATTNGMDVINMSLGGASGSTAMKQAVDNAYARGVVVVAAAGNSGSSGNTNTIGYPAKYDSVIAVGAVDSNSNRASFSSVGAELEVMAPGAGVYSTYPTNTYATLNGTSMASPHVAGAAALILSKHPNLSASQVRNRLSSTATYLGSSFYYGKGLINVEAAAQ

SEQ ID NO: 51201 - protein, 274 aa, Bacillus licheniformis
AQTVPYGIPLIKADKVQAQGFKGANVKVAVLDTGIQASHPDLNVVGGASFVAGEAYNYDGNGHGTHVAGTVAALDNTTGVLGVAPSVSLYAVKVLNSSGSGSYSGIVSGIEWATTNGMDVINMSLGGASGSTAMKQAVDNAYARGVVVVAAAGNSGSSGNTNTIGYPAKYDSVIAVGAVDSNSNRASFSSVGAELEVMAPGAGVYSTYPTNTYATLNGTSMASPHVAGAAALILSKHPNLSASQVRNRLSSTATYLGSSFYYGKGLINVEAAAQ

SEQ ID NO: 51202 - protein, 274 aa, Bacillus licheniformis
AQTVPYGIPLIKADKVQAQGFKGANVKVAVLDTGIQAKHPDLNVVGGASFVAGEAYNTDGNGHGTHVAGTVAALDNTTGVLGVAPSVSLYAVKVLNSSGSGSYSGIVSGIEWATTNGMDVINMSLGGASGSTAMKQAVDNAYARGVVVVAAAGNSGSSGNTNTIGYPAKYDSVIAVGAVDSNSNRASFSSVGAELEVMAPGAGVYSTYPTNTYATLNGTSMASPHVAGAAALILSKHPNLSASQVRNRLSSTATYLGSSFYYGKGLINVEAAAQ

SEQ ID NO: 51203 - protein, 274 aa, Bacillus licheniformis
AQTVPYGIPLIKADKVQAQGFKGANVKVAVLDTGIQASHPDLNVVGGASFVAGEAYNTDGNGHGTHVAGTVAALDNTTGVLGVAPSVSLYAVKVLNSSGSGSYSGIVSGIEWATTNGMDVINMSLGGASLSTAMKQAVDNAYARGVVVVAAAGNSGSSGNTNTIGYPAKYDSVIAVGAVDSNSNRASFSSVGAELEVMAPGAGVYSTYPTNTYATLNGTSMASPHVAGAAALILSKHPNLSASQVRNRLSSTATYLGSSFYYGKGLINVEAAAQ

SEQ ID NO: 51204 - protein, 274 aa, Bacillus licheniformis
AQTVPYGIPLIKADKVQAQGFKGANVKVAVLDTGIQASHPDLNVVGGASFVAGEAYNTDGNGHGTHVAGTVAALDNTTGVLGVAPSVSLYAVKVLNSSGSGSYSGIVSGIEWATTNGMDVINMSLGGQSGSTAMKQAVDNAYARGVVVVAAAGNSGSSGNTNTIGYPAKYDSVIAVGAVDSNSNRASFSSVGAELEVMAPGAGVYSTYPTNTYATLNGTSMASPHVAGAAALILSKHPNLSASQVRNRLSSTATYLGSSFYYGKGLINVEAAAQ

SEQ ID NO: 51205 - protein, 274 aa, Bacillus licheniformis
AQTVPYGIPLIKADKVQAQGFKGANVKVAVLDTGIQASHPDLNVVGGASFVAGEAYNTDGNGHGTHVAGTVAALDNTTGVLGVAPSVSLYAVKVLNSSGSGSYSGIVSGIEWATTNGMDVINMSLGGNSGSTAMKQAVDNAYARGVVVVAAAGNSGSSGNTNTIGYPAKYDSVIAVGAVDSNSNRASFSSVGAELEVMAPGAGVYSTYPTNTYATLNGTSMASPHVAGAAALILSKHPNLSASQVRNRLSSTATYLGSSFYYGKGLINVEAAAQ

SEQ ID NO: 51206 - protein, 274 aa, Bacillus licheniformis
AQTVPYGIPLIKADKVQAQGFKGANVKVAVLDTGIQASHPDLNVVGGPSFVAGEAYNTDGNGHGTHVAGTVAALDNTTGVLGVAPSVSLYAVKVLNSSGSGSYSGIVSGIEWATTNGMDVINMSLGGASGSTAMKQAVDNAYARGVVVVAAAGNSGSSGNTNTIGYPAKYDSVIAVGAVDSNSNRASFSSVGAELEVMAPGAGVYSTYPTNTYATLNGTSMASPHVAGAAALILSKHPNLSASQVRNRLSSTATYLGSSFYYGKGLINVEAAAQ

SEQ ID NO: 51207 - protein, 274 aa, Bacillus licheniformis
AQTVPYGIPLIKADKVQAQGFKGANVKVAVLDTGIQASHPDLNVVGGASFVAGEAYNTDGNGHGTHVAGTVAALDNTTGVLGVAPSVSLYAVKVLNSSGSGSYSGIVSGIEWATTNGMDVIYMSLGGASGSTAMKQAVDNAYARGVVVVAAAGNSGSSGNTNTIGYPAKYDSVIAVGAVDSNSNRASFSSVGAELEVMAPGAGVYSTYPTNTYATLNGTSMASPHVAGAAALILSKHPNLSASQVRNRLSSTATYLGSSFYYGKGLINVEAAAQ

SEQ ID NO: 51208 - protein, 274 aa, Bacillus licheniformis
AQTVPYGIPLIKADKVQAQGFKGANVKVAVLDTGIQASHPDLNVVGGASFVAGEAYNPDGNGHGTHVAGTVAALDNTTGVLGVAPSVSLYAVKVLNSSGSGSYSGIVSGIEWATTNGMDVINMSLGGASGSTAMKQAVDNAYARGVVVVAAAGNSGSSGNTNTIGYPAKYDSVIAVGAVDSNSNRASFSSVGAELEVMAPGAGVYSTYPTNTYATLNGTSMASPHVAGAAALILSKHPNLSASQVRNRLSSTATYLGSSFYYGKGLINVEAAAQ

SEQ ID NO: 51209 - protein, 274 aa, Bacillus licheniformis
AQTVPYGIPLIKADKVQAQGFKGANVKVAVLDTGIQASHPDLNVVGGASFVAGEAYNTDGNGHGTHVAGTVAALDNTTGVLGVAPSTSLYAVKVLNSSGSGSYSGIVSGIEWATTNGMDVINMSLGGASGSTAMKQAVDNAYARGVVVVAAAGNSGSSGNTNTIGYPAKYDSVIAVGAVDSNSNRASFSSVGAELEVMAPGAGVYSTYPTNTYATLNGTSMASPHVAGAAALILSKHPNLSASQVRNRLSSTATYLGSSFYYGKGLINVEAAAQ

SEQ ID NO: 51210 - protein, 274 aa, Bacillus licheniformis
AQTVPYGIPLIKADKVQAQGFKGANVKVAVLDTGIQASHPDLNVVGGYSFVAGEAYNTDGNGHGTHVAGTVAALDNTTGVLGVAPSVSLYAVKVLNSSGSGSYSGIVSGIEWATTNGMDVINMSLGGASGSTAMKQAVDNAYARGVVVVAAAGNSGSSGNTNTIGYPAKYDSVIAVGAVDSNSNRASFSSVGAELEVMAPGAGVYSTYPTNTYATLNGTSMASPHVAGAAALILSKHPNLSASQVRNRLSSTATYLGSSFYYGKGLINVEAAAQ

SEQ ID NO: 51211 - protein, 274 aa, Bacillus licheniformis
AQTVPYGIPLIKADKVQAQGVKGANVKVAVLDTGIQASHPDLNVVGGASFVAGEAYNTDGNGHGTHVAGTVAALDNTTGVLGVAPSVSLYAVKVLNSSGSGSYSGIVSGIEWATTNGMDVINMSLGGASGSTAMKQAVDNAYARGVVVVAAAGNSGSSGNTNTIGYPAKYDSVIAVGAVDSNSNRASFSSVGAELEVMAPGAGVYSTYPTNTYATLNGTSMASPHVAGAAALILSKHPNLSASQVRNRLSSTATYLGSSFYYGKGLINVEAAAQ

SEQ ID NO: 51212 - protein, 274 aa, Bacillus mojavensis
AQTVPYGIPLIKADKVQAQGFKGANVKVAVLDTGIQASHPDLNVVGGASFVAGEAYNTDGNGHGTHVAGTVAALDNTTGVLGVAPSVSLYAVKVLNSSGSGTYSGIVSGIEWATTNGMDVINMSLGGASGSTAMKQAVDNAYARGVVVVAAAGNSGSSGNTNTIGYPAKYDSVIAVGAVDSNSNRASFSSVGAELEVMAPGAGVYSTYPTNTYATLNGTSMASPHVAGAAALILSKHPNLSASQVRNRLSSTATYLGSSFYYGKGLINVEAAAQ

SEQ ID NO: 51213 - protein, 274 aa, Bacillus licheniformis
AQTVPYGIPLIKADKVQAQGFKGANVKVAVLDTGIQASHPDLNVVGGASFVAGEAYNTDGNGHGTHVAGTVAALDNTTGVLGVAPSKSLYAVKVLNSSGSGSYSGIVSGIEWATTNGMDVINMSLGGASGSTAMKQAVDNAYARGVVVVAAAGNSGSSGNTNTIGYPAKYDSVIAVGAVDSNSNRASFSSVGAELEVMAPGAGVYSTYPTNTYATLNGTSMASPHVAGAAALILSKHPNLSASQVRNRLSSTATYLGSSFYYGKGLINVEAAAQ

SEQ ID NO: 51214 - protein, 274 aa, Bacillus licheniformis
AQTVPYGIPLIKADKVQAQGFKGANVKVAVLDTGIQAWHPDLNVVGGASFVAGEAYNTDGNGHGTHVAGTVAALDNTTGVLGVAPSVSLYAVKVLNSSGSGSYSGIVSGIEWATTNGMDVINMSLGGASGSTAMKQAVDNAYARGVVVVAAAGNSGSSGNTNTIGYPAKYDSVIAVGAVDSNSNRASFSSVGAELEVMAPGAGVYSTYPTNTYATLNGTSMASPHVAGAAALILSKHPNLSASQVRNRLSSTATYLGSSFYYGKGLINVEAAAQ

SEQ ID NO: 51215 - protein, 274 aa, Bacillus licheniformis
AQTVPYGIPLIKADKVQAQGNKGANVKVAVLDTGIQASHPDLNVVGGASFVAGEAYNTDGNGHGTHVAGTVAALDNTTGVLGVAPSVSLYAVKVLNSSGSGSYSGIVSGIEWATTNGMDVINMSLGGASGSTAMKQAVDNAYARGVVVVAAAGNSGSSGNTNTIGYPAKYDSVIAVGAVDSNSNRASFSSVGAELEVMAPGAGVYSTYPTNTYATLNGTSMASPHVAGAAALILSKHPNLSASQVRNRLSSTATYLGSSFYYGKGLINVEAAAQ

SEQ ID NO: 51216 - protein, 274 aa, Bacillus licheniformis
AQTVPYGIPLIKADKVQAQGFKGANVKVAVLDTGIQASHPDLNVVGGASFVAGEAYNTDGNGHGTHVAGTVAALDNTTGVLGVAPSVSLYAVKVLNSSGSPSYSGIVSGIEWATTNGMDVINMSLGGASGSTAMKQAVDNAYARGVVVVAAAGNSGSSGNTNTIGYPAKYDSVIAVGAVDSNSNRASFSSVGAELEVMAPGAGVYSTYPTNTYATLNGTSMASPHVAGAAALILSKHPNLSASQVRNRLSSTATYLGSSFYYGKGLINVEAAAQ

SEQ ID NO: 51217 - protein, 274 aa, Bacillus licheniformis
AQTVPYGIPLIKADKVQAQGFKGANVKVAVLDTGIQAYHPDLNVVGGASFVAGEAYNTDGNGHGTHVAGTVAALDNTTGVLGVAPSVSLYAVKVLNSSGSGSYSGIVSGIEWATTNGMDVINMSLGGASGSTAMKQAVDNAYARGVVVVAAAGNSGSSGNTNTIGYPAKYDSVIAVGAVDSNSNRASFSSVGAELEVMAPGAGVYSTYPTNTYATLNGTSMASPHVAGAAALILSKHPNLSASQVRNRLSSTATYLGSSFYYGKGLINVEAAAQ

SEQ ID NO: 51218 - protein, 274 aa, Bacillus licheniformis
AQTVPYGIPLIKADKVQAQGFKGANVKVAVLDTGIQASHPDLNVVGGASFVAGEAYNTDGNGHGTHVAGTVAALDNTTGVLGVAPSVSLYAVKVLNSSGSGSYSGIVSGIEWATTNGMDVINMSLGGACGSTAMKQAVDNAYARGVVVVAAAGNSGSSGNTNTIGYPAKYDSVIAVGAVDSNSNRASFSSVGAELEVMAPGAGVYSTYPTNTYATLNGTSMASPHVAGAAALILSKHPNLSASQVRNRLSSTATYLGSSFYYGKGLINVEAAAQ

SEQ ID NO: 51219 - protein, 274 aa, Bacillus licheniformis
AQTVPYGIPLIKADKVQAQGFKGANVKVAVLDTGIQASHPDLNVVGGASFVAGEAYNTDGNGHGTHVAGTVAALDNTTGVLRVAPSVSLYAVKVLNSSGSGSYSGIVSGIEWATTNGMDVINMSLGGASGSTAMKQAVDNAYARGVVVVAAAGNSGSSGNTNTIGYPAKYDSVIAVGAVDSNSNRASFSSVGAELEVMAPGAGVYSTYPTNTYATLNGTSMASPHVAGAAALILSKHPNLSASQVRNRLSSTATYLGSSFYYGKGLINVEAAAQ

SEQ ID NO: 51220 - protein, 274 aa, Bacillus licheniformis
AQTVPYGIPLIKADKVQAQGFKGANVKVAVLDTGIQASHPDLNVVGGASFVAGEAYNTDGNGHGTHVAGTVAALDNTTGVLGVAPSVSPYAVKVLNSSGSGSYSGIVSGIEWATTNGMDVINMSLGGASGSTAMKQAVDNAYARGVVVVAAAGNSGSSGNTNTIGYPAKYDSVIAVGAVDSNSNRASFSSVGAELEVMAPGAGVYSTYPTNTYATLNGTSMASPHVAGAAALILSKHPNLSASQVRNRLSSTATYLGSSFYYGKGLINVEAAAQ

SEQ ID NO: 51221 - protein, 274 aa, Bacillus licheniformis
AQTVPYGIPLIKADKVQAQGFKGANVKVAVLDTGIQASHYDLNVVGGASFVAGEAYNTDGNGHGTHVAGTVAALDNTTGVLGVAPSVSLYAVKVLNSSGSGSYSGIVSGIEWATTNGMDVINMSLGGASGSTAMKQAVDNAYARGVVVVAAAGNSGSSGNTNTIGYPAKYDSVIAVGAVDSNSNRASFSSVGAELEVMAPGAGVYSTYPTNTYATLNGTSMASPHVAGAAALILSKHPNLSASQVRNRLSSTATYLGSSFYYGKGLINVEAAAQ

SEQ ID NO: 51222 - protein, 274 aa, Bacillus licheniformis
AQTVPYGIPLIKADKVQAQGFKGANVKVAVLDTGIQASHCDLNVVGGASFVAGEAYNTDGNGHGTHVAGTVAALDNTTGVLGVAPSVSLYAVKVLNSSGSGSYSGIVSGIEWATTNGMDVINMSLGGASGSTAMKQAVDNAYARGVVVVAAAGNSGSSGNTNTIGYPAKYDSVIAVGAVDSNSNRASFSSVGAELEVMAPGAGVYSTYPTNTYATLNGTSMASPHVAGAAALILSKHPNLSASQVRNRLSSTATYLGSSFYYGKGLINVEAAAQ

SEQ ID NO: 51223 - protein, 274 aa, Bacillus licheniformis
AQTVPYGIPLIKADKVQAQGFKGANVKVAVLDTGIQASHPDLNVVGGASFVAGEAYNTDGNGHGTHVAGTVAALDNTTGVLGVAPSVSLYAVKVLNSSGSGSYSGIVSGIEWATTQGMDVINMSLGGASGSTAMKQAVDNAYARGVVVVAAAGNSGSSGNTNTIGYPAKYDSVIAVGAVDSNSNRASFSSVGAELEVMAPGAGVYSTYPTNTYATLNGTSMASPHVAGAAALILSKHPNLSASQVRNRLSSTATYLGSSFYYGKGLINVEAAAQ

SEQ ID NO: 51224 - protein, 274 aa, Bacillus licheniformis
AQTVPYGIPLIKADKVQAQGFKGANVKVAVLDTGIQASHPDLNVVGGASFVAGEAYNTDGNGHGTHVAGTVAALDLTTGVLGVAPSVSLYAVKVLNSSGSGSYSGIVSGIEWATTNGMDVINMSLGGASGSTAMKQAVDNAYARGVVVVAAAGNSGSSGNTNTIGYPAKYDSVIAVGAVDSNSNRASFSSVGAELEVMAPGAGVYSTYPTNTYATLNGTSMASPHVAGAAALILSKHPNLSASQVRNRLSSTATYLGSSFYYGKGLINVEAAAQ

SEQ ID NO: 51225 - protein, 274 aa, Bacillus licheniformis
AQTVPYGIPLIKADKVQAQGIKGANVKVAVLDTGIQASHPDLNVVGGASFVAGEAYNTDGNGHGTHVAGTVAALDNTTGVLGVAPSVSLYAVKVLNSSGSGSYSGIVSGIEWATTNGMDVINMSLGGASGSTAMKQAVDNAYARGVVVVAAAGNSGSSGNTNTIGYPAKYDSVIAVGAVDSNSNRASFSSVGAELEVMAPGAGVYSTYPTNTYATLNGTSMASPHVAGAAALILSKHPNLSASQVRNRLSSTATYLGSSFYYGKGLINVEAAAQ

SEQ ID NO: 51226 - protein, 274 aa, Bacillus licheniformis
AQTVPYGIPLIKADKVQAQGFKGANVKVAVLDTGIQASHPDLNVVGGASFVAGEAYNTDGNGHGTHVAGTVAALDNTTGVLGVAPSASLYAVKVLNSSGSGSYSGIVSGIEWATTNGMDVINMSLGGASGSTAMKQAVDNAYARGVVVVAAAGNSGSSGNTNTIGYPAKYDSVIAVGAVDSNSNRASFSSVGAELEVMAPGAGVYSTYPTNTYATLNGTSMASPHVAGAAALILSKHPNLSASQVRNRLSSTATYLGSSFYYGKGLINVEAAAQ

SEQ ID NO: 51227 - protein, 274 aa, Bacillus licheniformis
AQTVPYGIPLIKADKVQAQGFKGANVKVAVLDTGIQASHPDLNVVGGASFVAGEAYNTDGNGHGTHVAGTVAALDNTTGVLGVAPSVSLYAVKVLNSSGSGSYSGIVSGIEWATTNGMDVINMSLGGASGSTAMKQAVDNAYARGVVVVAAAGNSGSSGNTNTIGYPAKYDSVIAVGAVDSNSNRASFSSVGAELEVMAPGAGVYSTYPTNTYATLNGTSMASPHVAGAAALILSKHPNLSASQVRNVLSSTATYLGSSFYYGKGLINVEAAAQ

SEQ ID NO: 51228 - protein, 274 aa, Bacillus licheniformis
AQTVPYGIPLIKADKVQAQGEKGANVKVAVLDTGIQASHPDLNVVGGASFVAGEAYNTDGNGHGTHVAGTVAALDNTTGVLGVAPSVSLYAVKVLNSSGSGSYSGIVSGIEWATTNGMDVINMSLGGASGSTAMKQAVDNAYARGVVVVAAAGNSGSSGNTNTIGYPAKYDSVIAVGAVDSNSNRASFSSVGAELEVMAPGAGVYSTYPTNTYATLNGTSMASPHVAGAAALILSKHPNLSASQVRNRLSSTATYLGSSFYYGKGLINVEAAAQ

SEQ ID NO: 51229 - protein, 274 aa, Bacillus licheniformis
AQTVPYGIPLIKADKVQAQGFKGANVKVAVLDTGIQASHPDLNVVGGASFVAGEAYNTDGNGHGTHVAGTVAALDNTTGVLGVAPSVSLYAVKVLNSSGSGSYSGIVSGIEWATTNGMDVINMSLGGASGSTAMKQAVDNAYARGVVVVAAAGNSGSSGNTNTIGYPAKYDSVIAVGAVDSNSQRASFSSVGAELEVMAPGAGVYSTYPTNTYATLNGTSMASPHVAGAAALILSKHPNLSASQVRNRLSSTATYLGSSFYYGKGLINVEAAAQ

SEQ ID NO: 51230 - protein, 274 aa, Bacillus licheniformis
AQTVPYGIPLIKADKVQAQGFKGANVKVAVLDTGIQASHPDLNVVGGASFVAGEAYNTDGNGHGTHVAGTVAALDNTTGVLGVAPSISLYAVKVLNSSGSGSYSGIVSGIEWATTNGMDVINMSLGGASGSTAMKQAVDNAYARGVVVVAAAGNSGSSGNTNTIGYPAKYDSVIAVGAVDSNSNRASFSSVGAELEVMAPGAGVYSTYPTNTYATLNGTSMASPHVAGAAALILSKHPNLSASQVRNRLSSTATYLGSSFYYGKGLINVEAAAQ

SEQ ID NO: 51231 - protein, 274 aa, Bacillus licheniformis
AQTVPYGIPLIKADKVQAQGFKGANVKVAVLDTGIQASHPDLNVVGGASFVAGEAYNTDGNGHGTHVAGTVAALDNTTGVLGVAPSVSLYAVKVLNSSGSGSYSGIVSGIEWATTNGMDVINMSLGGASGSTAMKQAVDNAYARGVVVVAAAGNSGSSGNTNTIGYPAKYDSVIAVGAVDSNSNRASFSSVGAELEVMAPGAGVYSTYPTNTYATLNGTSMASPHVAGAAALILSKHPNLSASQVRNILSSTATYLGSSFYYGKGLINVEAAAQ

SEQ ID NO: 51232 - protein, 274 aa, Bacillus licheniformis
AQTVPYGIPLIKADKVQAQGFKGANVKVAVLDTGIQASHPDLNVVGGASFVAGEAYNTDGNGHGTHVAGTVAALDNTTGVLGVAPSVSLYAVKVLNSSGSGSYSGIVSGIEWATTNGMDVINMSLGGASGSTAMKQAVDNAYARGVVVVAAAGNSGSSGNTNTIGYPAKYDSVIAVGAVDSNSNRASFSSVGAELEVMAPGAGVYSTYPTNTYATLNGTSMASPHVAGAAALILSKHPNLSASQVRNWLSSTATYLGSSFYYGKGLINVEAAAQ

SEQ ID NO: 51233 - protein, 274 aa, Bacillus licheniformis
AQTVPYGIPLIKADKVQAQGFKGANVKVAVLDTGIQASHHDLNVVGGASFVAGEAYNTDGNGHGTHVAGTVAALDNTTGVLGVAPSVSLYAVKVLNSSGSGSYSGIVSGIEWATTNGMDVINMSLGGASGSTAMKQAVDNAYARGVVVVAAAGNSGSSGNTNTIGYPAKYDSVIAVGAVDSNSNRASFSSVGAELEVMAPGAGVYSTYPTNTYATLNGTSMASPHVAGAAALILSKHPNLSASQVRNRLSSTATYLGSSFYYGKGLINVEAAAQ

SEQ ID NO: 51234 - protein, 274 aa, Bacillus licheniformis
AQTVPYGIPLIKADKVQAQGFKGANVKVAVLDTGIQASHPDLNVVGGASFVAGEAYNTDGNGHGTHVAGTVAALDMTTGVLGVAPSVSLYAVKVLNSSGSGSYSGIVSGIEWATTNGMDVINMSLGGASGSTAMKQAVDNAYARGVVVVAAAGNSGSSGNTNTIGYPAKYDSVIAVGAVDSNSNRASFSSVGAELEVMAPGAGVYSTYPTNTYATLNGTSMASPHVAGAAALILSKHPNLSASQVRNRLSSTATYLGSSFYYGKGLINVEAAAQ

SEQ ID NO: 51235 - protein, 274 aa, Bacillus licheniformis
AQTVPYGIPLIKADKVQAQGFKGANVKVAVLDTGIQASHPDLNVVGGASFVAGEAYNCDGNGHGTHVAGTVAALDNTTGVLGVAPSVSLYAVKVLNSSGSGSYSGIVSGIEWATTNGMDVINMSLGGASGSTAMKQAVDNAYARGVVVVAAAGNSGSSGNTNTIGYPAKYDSVIAVGAVDSNSNRASFSSVGAELEVMAPGAGVYSTYPTNTYATLNGTSMASPHVAGAAALILSKHPNLSASQVRNRLSSTATYLGSSFYYGKGLINVEAAAQ

SEQ ID NO: 51236 - protein, 274 aa, Bacillus licheniformis
AQTVPYGIPLIKADKVQAQGFKGANVKVAVLDTGIQASHPDLNVVGGASFVAGEAYNTDGNGHGTHVAGTVAALDNTTGVLGVAPSNSLYAVKVLNSSGSGSYSGIVSGIEWATTNGMDVINMSLGGASGSTAMKQAVDNAYARGVVVVAAAGNSGSSGNTNTIGYPAKYDSVIAVGAVDSNSNRASFSSVGAELEVMAPGAGVYSTYPTNTYATLNGTSMASPHVAGAAALILSKHPNLSASQVRNRLSSTATYLGSSFYYGKGLINVEAAAQ

SEQ ID NO: 51237 - protein, 274 aa, Bacillus licheniformis
AQTVPYGIPLIKADKVQAQGFKGANVKVAVLDTGIQASHPDLNVVGGASFVAGEAYNTDGNGHGTHVAGTVAALDNTTGVLGVAPSWSLYAVKVLNSSGSGSYSGIVSGIEWATTNGMDVINMSLGGASGSTAMKQAVDNAYARGVVVVAAAGNSGSSGNTNTIGYPAKYDSVIAVGAVDSNSNRASFSSVGAELEVMAPGAGVYSTYPTNTYATLNGTSMASPHVAGAAALILSKHPNLSASQVRNRLSSTATYLGSSFYYGKGLINVEAAAQ

SEQ ID NO: 51238 - protein, 274 aa, Bacillus licheniformis
AQTVPYGIPLIKADKVQAQGFKGANVKVAVLDTGIQASHPDLNVVGGASFVAGEAYNTDGNGHGTHVAGTVAALDNTTGVLGVAPSVSLYAVKVLNSSGSGSYSGIVSGIEWATTNGMDVINMSLGGASPSTAMKQAVDNAYARGVVVVAAAGNSGSSGNTNTIGYPAKYDSVIAVGAVDSNSNRASFSSVGAELEVMAPGAGVYSTYPTNTYATLNGTSMASPHVAGAAALILSKHPNLSASQVRNRLSSTATYLGSSFYYGKGLINVEAAAQ

SEQ ID NO: 51239 - protein, 274 aa, Bacillus licheniformis
AQTVPYGIPLIKADKVQAQGFKGANVKVAVLDTGIQASHPDLNVVGGASFVAGEAYNTDGNGHGTHVAGTVAALDWTTGVLGVAPSVSLYAVKVLNSSGSGSYSGIVSGIEWATTNGMDVINMSLGGASGSTAMKQAVDNAYARGVVVVAAAGNSGSSGNTNTIGYPAKYDSVIAVGAVDSNSNRASFSSVGAELEVMAPGAGVYSTYPTNTYATLNGTSMASPHVAGAAALILSKHPNLSASQVRNRLSSTATYLGSSFYYGKGLINVEAAAQ

SEQ ID NO: 51240 - protein, 274 aa, Bacillus licheniformis
AQTVPYGIPLIKADKVQAQGFKGANVKVAVLDTGIQASHPDLNVVGGASFVAGEAYNTDGNGHGTHVAGTVAALDNTTGVLGVAPSVSLYAVKVLNSSGSASYSGIVSGIEWATTNGMDVINMSLGGASGSTAMKQAVDNAYARGVVVVAAAGNSGSSGNTNTIGYPAKYDSVIAVGAVDSNSNRASFSSVGAELEVMAPGAGVYSTYPTNTYATLNGTSMASPHVAGAAALILSKHPNLSASQVRNRLSSTATYLGSSFYYGKGLINVEAAAQ

SEQ ID NO: 51241 - protein, 274 aa, Bacillus licheniformis
AQTVPYGIPLIKADKVQAQGFKGANVKVAVLDTGIQASHPDLNVVGGASFVAGEAYNTDGNGHGTHVAGTVAALDNTTGVLGVAPSVSLYAVKVLNSSGSGSYSGIVSGIEWATTNGMDVINMSLGGFSGSTAMKQAVDNAYARGVVVVAAAGNSGSSGNTNTIGYPAKYDSVIAVGAVDSNSNRASFSSVGAELEVMAPGAGVYSTYPTNTYATLNGTSMASPHVAGAAALILSKHPNLSASQVRNRLSSTATYLGSSFYYGKGLINVEAAAQ

SEQ ID NO: 51242 - protein, 274 aa, Bacillus licheniformis
AQTVPYGIPLIKADKVQAQGFKGANVKVAVLDTGIQASHPDLNVVGGASFVAGEAYNTDGNGHGTHVAGTVAALDNTTGVLGVAPSVSYYAVKVLNSSGSGSYSGIVSGIEWATTNGMDVINMSLGGASGSTAMKQAVDNAYARGVVVVAAAGNSGSSGNTNTIGYPAKYDSVIAVGAVDSNSNRASFSSVGAELEVMAPGAGVYSTYPTNTYATLNGTSMASPHVAGAAALILSKHPNLSASQVRNRLSSTATYLGSSFYYGKGLINVEAAAQ

SEQ ID NO: 51243 - protein, 274 aa, Bacillus licheniformis
AQTVPYGIPLIKADKVQAQGFKGANVKVAVLDTGIQASHPDLNVVGGASFVAGEAYNTDGNGHGTHVAGTVAALDNTTGVLGVAPSVSLYAVKVLNSSGSGSYSGIVSGIEWATTNGMDVINMSLGGASGSTAMKQAVDNAYARGVVVVAAAGNSGSSGNTNTIGYPAKYDSVIAVGAVDSNSNRASFSSVGAELEVMAPGAGVYSTYPTNTYATLNGTSMASPHVAGAAALILSKHPNLSASQVRNFLSSTATYLGSSFYYGKGLINVEAAAQ

SEQ ID NO: 51244 - protein, 274 aa, Bacillus licheniformis
AQTVPYGIPLIKADKVQAQGFKGANVKVAVLDTGIQASHPDLNVVGGASFVAGEAYNTDGNGHGTHVAGTVAALDNTTGVLAVAPSVSLYAVKVLNSSGSGSYSGIVSGIEWATTNGMDVINMSLGGASGSTAMKQAVDNAYARGVVVVAAAGNSGSSGNTNTIGYPAKYDSVIAVGAVDSNSNRASFSSVGAELEVMAPGAGVYSTYPTNTYATLNGTSMASPHVAGAAALILSKHPNLSASQVRNRLSSTATYLGSSFYYGKGLINVEAAAQ

SEQ ID NO: 51245 - protein, 274 aa, Bacillus licheniformis
AQTVPYGIPLIKADKVQAQGFKGANVKVAVLDTGIQASHPDLNVVGGASFVAGEAYNTDGNGHGTHVAGTVAALDNTTGVLGVAPSVSLYAVKVLNSSGSGSYSGIVSGIEWATTNRMDVINMSLGGASGSTAMKQAVDNAYARGVVVVAAAGNSGSSGNTNTIGYPAKYDSVIAVGAVDSNSNRASFSSVGAELEVMAPGAGVYSTYPTNTYATLNGTSMASPHVAGAAALILSKHPNLSASQVRNRLSSTATYLGSSFYYGKGLINVEAAAQ

SEQ ID NO: 51246 - protein, 274 aa, Bacillus licheniformis
AQTVPYGIPLIKADKVQAQGFKGANVKVAVLDTGIQASHPDLNVVGGASFVAGEAYNTDGNGHGTHVAGTVAALDVTTGVLGVAPSVSLYAVKVLNSSGSGSYSGIVSGIEWATTNGMDVINMSLGGASGSTAMKQAVDNAYARGVVVVAAAGNSGSSGNTNTIGYPAKYDSVIAVGAVDSNSNRASFSSVGAELEVMAPGAGVYSTYPTNTYATLNGTSMASPHVAGAAALILSKHPNLSASQVRNRLSSTATYLGSSFYYGKGLINVEAAAQ

SEQ ID NO: 51247 - protein, 274 aa, Bacillus mojavensis
AQTVPYGIPLIKADKVQAQGFKGANVKVAVLDTGIQASHPDLNVVGGASFVAGEAYNTDGNGHGTHVAGTVAALDNTTGVLGVAPSVSLYAVKVLNSSGSGGYSGIVSGIEWATTNGMDVINMSLGGASGSTAMKQAVDNAYARGVVVVAAAGNSGSSGNTNTIGYPAKYDSVIAVGAVDSNSNRASFSSVGAELEVMAPGAGVYSTYPTNTYATLNGTSMASPHVAGAAALILSKHPNLSASQVRNRLSSTATYLGSSFYYGKGLINVEAAAQ

SEQ ID NO: 51248 - protein, 274 aa, Bacillus licheniformis
AQTVPYGIPLIKADKVQAQGFKGANVKVAVLDTGIQASHPDLNVVGGASFVAGEAYNTDGNGHGTHVAGTVAALDNTTGVLGVAPSVSLYAVKVLNSSGSGSYSGIVSGIEWATTNGMDVINMSLGGASDSTAMKQAVDNAYARGVVVVAAAGNSGSSGNTNTIGYPAKYDSVIAVGAVDSNSNRASFSSVGAELEVMAPGAGVYSTYPTNTYATLNGTSMASPHVAGAAALILSKHPNLSASQVRNRLSSTATYLGSSFYYGKGLINVEAAAQ

SEQ ID NO: 51249 - protein, 274 aa, Bacillus licheniformis
AQTVPYGIPLIKADKVQAQGFKGANVKVAVLDTGIQASHPDLNVVGGASFVAGEAYNTDGNGHGTHVAGTVAALDNTTGVLGVAPSMSLYAVKVLNSSGSGSYSGIVSGIEWATTNGMDVINMSLGGASGSTAMKQAVDNAYARGVVVVAAAGNSGSSGNTNTIGYPAKYDSVIAVGAVDSNSNRASFSSVGAELEVMAPGAGVYSTYPTNTYATLNGTSMASPHVAGAAALILSKHPNLSASQVRNRLSSTATYLGSSFYYGKGLINVEAAAQ

SEQ ID NO: 51250 - protein, 274 aa, Bacillus licheniformis
AQTVPYGIPLIKADKVQAQGFKGANVKVAVLDTGIQASHPDLNVVGGASFVAGEAYNTDGNGHGTHVAGTVAALDNTTGVLGVAPSVSAYAVKVLNSSGSGSYSGIVSGIEWATTNGMDVINMSLGGASGSTAMKQAVDNAYARGVVVVAAAGNSGSSGNTNTIGYPAKYDSVIAVGAVDSNSNRASFSSVGAELEVMAPGAGVYSTYPTNTYATLNGTSMASPHVAGAAALILSKHPNLSASQVRNRLSSTATYLGSSFYYGKGLINVEAAAQ

SEQ ID NO: 51251 - protein, 274 aa, Bacillus licheniformis
AQTVPYGIPLIKADKVQAQGFKGANVKVAVLDTGIQASHPDLNVVGGASFVAGEAYNTDGNGHGTHVAGTVAALDETTGVLGVAPSVSLYAVKVLNSSGSGSYSGIVSGIEWATTNGMDVINMSLGGASGSTAMKQAVDNAYARGVVVVAAAGNSGSSGNTNTIGYPAKYDSVIAVGAVDSNSNRASFSSVGAELEVMAPGAGVYSTYPTNTYATLNGTSMASPHVAGAAALILSKHPNLSASQVRNRLSSTATYLGSSFYYGKGLINVEAAAQ

SEQ ID NO: 51252 - protein, 274 aa, Bacillus licheniformis
AQTVPYGIPLIKADKVQAQGFKGANVKVAVLDTGIQASHNDLNVVGGASFVAGEAYNTDGNGHGTHVAGTVAALDNTTGVLGVAPSVSLYAVKVLNSSGSGSYSGIVSGIEWATTNGMDVINMSLGGASGSTAMKQAVDNAYARGVVVVAAAGNSGSSGNTNTIGYPAKYDSVIAVGAVDSNSNRASFSSVGAELEVMAPGAGVYSTYPTNTYATLNGTSMASPHVAGAAALILSKHPNLSASQVRNRLSSTATYLGSSFYYGKGLINVEAAAQ

SEQ ID NO: 51253 - protein, 274 aa, Bacillus licheniformis
AQTVPYGIPLIKADKVQAQGFKGANVKVAVLDTGIQASHPDLNVVGGASFVAGEAYNTDGNGHGTHVAGTVAALDNTTGVLGVAPSVSLYAVKVLNSSGSESYSGIVSGIEWATTNGMDVINMSLGGASGSTAMKQAVDNAYARGVVVVAAAGNSGSSGNTNTIGYPAKYDSVIAVGAVDSNSNRASFSSVGAELEVMAPGAGVYSTYPTNTYATLNGTSMASPHVAGAAALILSKHPNLSASQVRNRLSSTATYLGSSFYYGKGLINVEAAAQ

SEQ ID NO: 51254 - protein, 274 aa, Bacillus licheniformis
AQTVPYGIPLIKADKVQAQGFKGANVKVAVLDTGIQASHRDLNVVGGASFVAGEAYNTDGNGHGTHVAGTVAALDNTTGVLGVAPSVSLYAVKVLNSSGSGSYSGIVSGIEWATTNGMDVINMSLGGASGSTAMKQAVDNAYARGVVVVAAAGNSGSSGNTNTIGYPAKYDSVIAVGAVDSNSNRASFSSVGAELEVMAPGAGVYSTYPTNTYATLNGTSMASPHVAGAAALILSKHPNLSASQVRNRLSSTATYLGSSFYYGKGLINVEAAAQ

SEQ ID NO: 51255 - protein, 274 aa, Bacillus licheniformis
AQTVPYGIPLIKADKVQAQGFKGANVKVAVLDTGIQASHPDLNVVGGASFVAGEAYNTDGNGHGTHVAGTVAALDRTTGVLGVAPSVSLYAVKVLNSSGSGSYSGIVSGIEWATTNGMDVINMSLGGASGSTAMKQAVDNAYARGVVVVAAAGNSGSSGNTNTIGYPAKYDSVIAVGAVDSNSNRASFSSVGAELEVMAPGAGVYSTYPTNTYATLNGTSMASPHVAGAAALILSKHPNLSASQVRNRLSSTATYLGSSFYYGKGLINVEAAAQ

SEQ ID NO: 51256 - protein, 274 aa, Bacillus licheniformis
AQTVPYGIPLIKADKVQAQGFKGANVKVAVLDTGIQASHPDLNVVGGASFVAGEAYNTDGNGHGTHVAGTVAALDNTTGVLGVAPSVSLYAVKVLNSSGSGSYSGIVSGIEWATTNGMDVINMSLGGASGSTAMKQAVDNAYARGVVVVAAAGNSGSSGNTNTIGYPAKYDSVIAVGAVDSNSNRASFSSVGAELEVMAPGAGVYSTYPTNTYATLAGTSMASPHVAGAAALILSKHPNLSASQVRNRLSSTATYLGSSFYYGKGLINVEAAAQ

SEQ ID NO: 51257 - protein, 274 aa, Bacillus licheniformis
AQTVPYGIPLIKADKVQAQGFKGANVKVAVLDTGIQASHPDLNVVGGASFVAGEAYNTDGNGHGTHVAGTVAALDQTTGVLGVAPSVSLYAVKVLNSSGSGSYSGIVSGIEWATTNGMDVINMSLGGASGSTAMKQAVDNAYARGVVVVAAAGNSGSSGNTNTIGYPAKYDSVIAVGAVDSNSNRASFSSVGAELEVMAPGAGVYSTYPTNTYATLNGTSMASPHVAGAAALILSKHPNLSASQVRNRLSSTATYLGSSFYYGKGLINVEAAAQ

SEQ ID NO: 51258 - protein, 274 aa, Bacillus licheniformis
AQTVPYGIPLIKADKVQAQGFKGANVKVAVLDTGIQASHPDLNVVGGASFVAGEAYNDDGNGHGTHVAGTVAALDNTTGVLGVAPSVSLYAVKVLNSSGSGSYSGIVSGIEWATTNGMDVINMSLGGASGSTAMKQAVDNAYARGVVVVAAAGNSGSSGNTNTIGYPAKYDSVIAVGAVDSNSNRASFSSVGAELEVMAPGAGVYSTYPTNTYATLNGTSMASPHVAGAAALILSKHPNLSASQVRNRLSSTATYLGSSFYYGKGLINVEAAAQ

SEQ ID NO: 51259 - protein, 274 aa, Bacillus licheniformis
AQTVPYGIPLIKADKVQAQGFKGANVKVAVLDTGIQASHPDLNVVGGASFVAGEAYNTDGNGHGTHVAGTVAALDNTTGVLGVAPSVSLYAVKVLNSSGSGSYSGIVSGIEWATTNGMDVINMSLGGASGSTAMKQAVDNAYARGVVVVAAAGNSGSSGNTNTIGYPAKYDSVIAVGAVDSNSNRASFSSVGAELEVMAPGAGVYSTYPTNTYATLNGTSMASPHVAGAAALILSKHPNLSASQVRNELSSTATYLGSSFYYGKGLINVEAAAQ

SEQ ID NO: 51260 - protein, 274 aa, Bacillus licheniformis
AQTVPYGIPLIKADKVQAQGFKGANVKVAVLDTGIQASHPDLNVVGGASFVAGEAYNTDGNGHGTHVAGTVAALDNTTGVLGVAPSVSTYAVKVLNSSGSGSYSGIVSGIEWATTNGMDVINMSLGGASGSTAMKQAVDNAYARGVVVVAAAGNSGSSGNTNTIGYPAKYDSVIAVGAVDSNSNRASFSSVGAELEVMAPGAGVYSTYPTNTYATLNGTSMASPHVAGAAALILSKHPNLSASQVRNRLSSTATYLGSSFYYGKGLINVEAAAQ

SEQ ID NO: 51261 - protein, 274 aa, Bacillus licheniformis
AQTVPYGIPLIKADKVQAQGFKGANVKVAVLDTGIQASHPDLNVVGGASFVAGEAYNTDGNGHGTHVAGTVAALDNTTGVLGVAPSVSLYAVKVLNSSGSGSYSGIVSGIEWATTNGMDVINMSLGGASGSTAMKQAVDNAYARGVVVVAAAGNSGSSGNTNTIGYPAKYDSVIAVGAVDSNSNRASFSSVGAELEVMAPGAGVYSTYPTNTYATLNGTSMASPHVAGAAALILSKHPNLSASQVRNSLSSTATYLGSSFYYGKGLINVEAAAQ

SEQ ID NO: 51262 - protein, 274 aa, Bacillus licheniformis
AQTVPYGIPLIKADKVQAQGFKGANVKVAVLDTGIQASHPDLNVVGGASFVAGEAYNRDGNGHGTHVAGTVAALDNTTGVLGVAPSVSLYAVKVLNSSGSGSYSGIVSGIEWATTNGMDVINMSLGGASGSTAMKQAVDNAYARGVVVVAAAGNSGSSGNTNTIGYPAKYDSVIAVGAVDSNSNRASFSSVGAELEVMAPGAGVYSTYPTNTYATLNGTSMASPHVAGAAALILSKHPNLSASQVRNRLSSTATYLGSSFYYGKGLINVEAAAQ

SEQ ID NO: 51263 - protein, 274 aa, Bacillus licheniformis
AQTVPYGIPLIKADKVQAQGSKGANVKVAVLDTGIQASHPDLNVVGGASFVAGEAYNTDGNGHGTHVAGTVAALDNTTGVLGVAPSVSLYAVKVLNSSGSGSYSGIVSGIEWATTNGMDVINMSLGGASGSTAMKQAVDNAYARGVVVVAAAGNSGSSGNTNTIGYPAKYDSVIAVGAVDSNSNRASFSSVGAELEVMAPGAGVYSTYPTNTYATLNGTSMASPHVAGAAALILSKHPNLSASQVRNRLSSTATYLGSSFYYGKGLINVEAAAQ

SEQ ID NO: 51264 - protein, 274 aa, Bacillus licheniformis
AQTVPYGIPLIKADKVQAQGFKGANVKVAVLDTGIQAGHPDLNVVGGASFVAGEAYNTDGNGHGTHVAGTVAALDNTTGVLGVAPSVSLYAVKVLNSSGSGSYSGIVSGIEWATTNGMDVINMSLGGASGSTAMKQAVDNAYARGVVVVAAAGNSGSSGNTNTIGYPAKYDSVIAVGAVDSNSNRASFSSVGAELEVMAPGAGVYSTYPTNTYATLNGTSMASPHVAGAAALILSKHPNLSASQVRNRLSSTATYLGSSFYYGKGLINVEAAAQ

SEQ ID NO: 51265 - protein, 274 aa, Bacillus licheniformis
AQTVPYGIPLIKADKVQAQGFKGANVKVAVLDTGIQASHPDLNVVGGASFVAGEAYNTDGNGHGTHVAGTVAALDNTTGVLGVAPSVSWYAVKVLNSSGSGSYSGIVSGIEWATTNGMDVINMSLGGASGSTAMKQAVDNAYARGVVVVAAAGNSGSSGNTNTIGYPAKYDSVIAVGAVDSNSNRASFSSVGAELEVMAPGAGVYSTYPTNTYATLNGTSMASPHVAGAAALILSKHPNLSASQVRNRLSSTATYLGSSFYYGKGLINVEAAAQ

SEQ ID NO: 51266 - protein, 274 aa, Bacillus licheniformis
AQTVPYGIPLIKADKVQAQGFKGANVKVAVLDTGIQASHVDLNVVGGASFVAGEAYNTDGNGHGTHVAGTVAALDNTTGVLGVAPSVSLYAVKVLNSSGSGSYSGIVSGIEWATTNGMDVINMSLGGASGSTAMKQAVDNAYARGVVVVAAAGNSGSSGNTNTIGYPAKYDSVIAVGAVDSNSNRASFSSVGAELEVMAPGAGVYSTYPTNTYATLNGTSMASPHVAGAAALILSKHPNLSASQVRNRLSSTATYLGSSFYYGKGLINVEAAAQ

SEQ ID NO: 51267 - protein, 274 aa, Bacillus licheniformis
AQTVPYGIPLIKADKVQAQGFKGANVKVAVLDTGIQASHPDLNVVGGASFVAGEAYNTDGNGHGTHVAGTVAALDNTTGVLGVAPSVSLYAVKVLNSSGSGSYSGIVSGIEWATTKGMDVINMSLGGASGSTAMKQAVDNAYARGVVVVAAAGNSGSSGNTNTIGYPAKYDSVIAVGAVDSNSNRASFSSVGAELEVMAPGAGVYSTYPTNTYATLNGTSMASPHVAGAAALILSKHPNLSASQVRNRLSSTATYLGSSFYYGKGLINVEAAAQ

SEQ ID NO: 51268 - protein, 274 aa, Bacillus licheniformis
AQTVPYGIPLIKADKVQAQGFKGANVKVAVLDTGIQASHQDLNVVGGASFVAGEAYNTDGNGHGTHVAGTVAALDNTTGVLGVAPSVSLYAVKVLNSSGSGSYSGIVSGIEWATTNGMDVINMSLGGASGSTAMKQAVDNAYARGVVVVAAAGNSGSSGNTNTIGYPAKYDSVIAVGAVDSNSNRASFSSVGAELEVMAPGAGVYSTYPTNTYATLNGTSMASPHVAGAAALILSKHPNLSASQVRNRLSSTATYLGSSFYYGKGLINVEAAAQ

SEQ ID NO: 51269 - protein, 274 aa, Bacillus licheniformis
AQTVPYGIPLIKADKVQAQGFKGANVKVAVLDTGIQASHPDLNVVGGASFVAGEAYNTDGNGHGTHVAGTVAALDNTTGVLGVAPSFSLYAVKVLNSSGSGSYSGIVSGIEWATTNGMDVINMSLGGASGSTAMKQAVDNAYARGVVVVAAAGNSGSSGNTNTIGYPAKYDSVIAVGAVDSNSNRASFSSVGAELEVMAPGAGVYSTYPTNTYATLNGTSMASPHVAGAAALILSKHPNLSASQVRNRLSSTATYLGSSFYYGKGLINVEAAAQ

SEQ ID NO: 51270 - protein, 274 aa, Bacillus licheniformis
AQTVPYGIPLIKADKVQAQGFKGANVKVAVLDTGIQASHPDLNVVGGASFVAGEAYNTDGNGHGTHVAGTVAALDNTTGVLGVAPSVSLYAVKVLNSSGSGSYSGIVSGIEWATTNGMDVINMSLGGASGSTAMKQAVDNAYARGVVVVAAAGNSGSSGNTNTIGYPAKYDSVIAVGAVDSNSNRASFSSVGAELEVMAPGAGVYSTYPTNTYATLNGTSMASPHVAGAAALILSKHPNLSASQVRNGLSSTATYLGSSFYYGKGLINVEAAAQ

SEQ ID NO: 51271 - protein, 274 aa, Bacillus licheniformis
AQTVPYGIPLIKADKVQAQGFKGANVKVAVLDTGIQASHPDLNVVGGASFVAGEAYNTDGNGHGTHVAGTVAALDNTTGVLGVAPSVSLYAVKVLNSSGSGSYSGIVSGIEWATTNGMDVINMSLGGAGGSTAMKQAVDNAYARGVVVVAAAGNSGSSGNTNTIGYPAKYDSVIAVGAVDSNSNRASFSSVGAELEVMAPGAGVYSTYPTNTYATLNGTSMASPHVAGAAALILSKHPNLSASQVRNRLSSTATYLGSSFYYGKGLINVEAAAQ

SEQ ID NO: 51272 - protein, 274 aa, Bacillus licheniformis
AQTVPYGIPLIKADKVQAQGFKGANVKVAVLDTGIQAIHPDLNVVGGASFVAGEAYNTDGNGHGTHVAGTVAALDNTTGVLGVAPSVSLYAVKVLNSSGSGSYSGIVSGIEWATTNGMDVINMSLGGASGSTAMKQAVDNAYARGVVVVAAAGNSGSSGNTNTIGYPAKYDSVIAVGAVDSNSNRASFSSVGAELEVMAPGAGVYSTYPTNTYATLNGTSMASPHVAGAAALILSKHPNLSASQVRNRLSSTATYLGSSFYYGKGLINVEAAAQ

SEQ ID NO: 51273 - protein, 274 aa, Bacillus licheniformis
AQTVPYGIPLIKADKVQAQGPKGANVKVAVLDTGIQASHPDLNVVGGASFVAGEAYNTDGNGHGTHVAGTVAALDNTTGVLGVAPSVSLYAVKVLNSSGSGSYSGIVSGIEWATTNGMDVINMSLGGASGSTAMKQAVDNAYARGVVVVAAAGNSGSSGNTNTIGYPAKYDSVIAVGAVDSNSNRASFSSVGAELEVMAPGAGVYSTYPTNTYATLNGTSMASPHVAGAAALILSKHPNLSASQVRNRLSSTATYLGSSFYYGKGLINVEAAAQ

SEQ ID NO: 51274 - protein, 274 aa, Bacillus licheniformis
AQTVPYGIPLIKADKVQAQGFKGANVKVAVLDTGIQASHPDLNVVGGASFVAGEAYNTDGNGHGTHVAGTVAALDNTTGVLGVAPSVSLYAVKVLNSSGSMSYSGIVSGIEWATTNGMDVINMSLGGASGSTAMKQAVDNAYARGVVVVAAAGNSGSSGNTNTIGYPAKYDSVIAVGAVDSNSNRASFSSVGAELEVMAPGAGVYSTYPTNTYATLNGTSMASPHVAGAAALILSKHPNLSASQVRNRLSSTATYLGSSFYYGKGLINVEAAAQ

SEQ ID NO: 51275 - protein, 274 aa, Bacillus licheniformis
AQTVPYGIPLIKADKVQAQGFKGANVKVAVLDTGIQASHPDLNVVGGASFVAGEAYNTDGNGHGTHVAGTVAALDCTTGVLGVAPSVSLYAVKVLNSSGSGSYSGIVSGIEWATTNGMDVINMSLGGASGSTAMKQAVDNAYARGVVVVAAAGNSGSSGNTNTIGYPAKYDSVIAVGAVDSNSNRASFSSVGAELEVMAPGAGVYSTYPTNTYATLNGTSMASPHVAGAAALILSKHPNLSASQVRNRLSSTATYLGSSFYYGKGLINVEAAAQ

SEQ ID NO: 51276 - protein, 274 aa, Bacillus licheniformis
AQTVPYGIPLIKADKVQAQGFKGANVKVAVLDTGIQASHPDLNVVGGASFVAGEAYNTDGNGHGTHVAGTVAALDNTTGVLGVAPSLSLYAVKVLNSSGSGSYSGIVSGIEWATTNGMDVINMSLGGASGSTAMKQAVDNAYARGVVVVAAAGNSGSSGNTNTIGYPAKYDSVIAVGAVDSNSNRASFSSVGAELEVMAPGAGVYSTYPTNTYATLNGTSMASPHVAGAAALILSKHPNLSASQVRNRLSSTATYLGSSFYYGKGLINVEAAAQ

SEQ ID NO: 51277 - protein, 274 aa, Bacillus licheniformis
AQTVPYGIPLIKADKVQAQGFKGANVKVAVLDTGIQASHPDLNVVGGASFVAGEAYNTDGNGHGTHVAGTVAALDNTTGVLGVAPSVSNYAVKVLNSSGSGSYSGIVSGIEWATTNGMDVINMSLGGASGSTAMKQAVDNAYARGVVVVAAAGNSGSSGNTNTIGYPAKYDSVIAVGAVDSNSNRASFSSVGAELEVMAPGAGVYSTYPTNTYATLNGTSMASPHVAGAAALILSKHPNLSASQVRNRLSSTATYLGSSFYYGKGLINVEAAAQ

SEQ ID NO: 51278 - protein, 274 aa, Bacillus licheniformis
AQTVPYGIPLIKADKVQAQGFKGANVKVAVLDTGIQASHMDLNVVGGASFVAGEAYNTDGNGHGTHVAGTVAALDNTTGVLGVAPSVSLYAVKVLNSSGSGSYSGIVSGIEWATTNGMDVINMSLGGASGSTAMKQAVDNAYARGVVVVAAAGNSGSSGNTNTIGYPAKYDSVIAVGAVDSNSNRASFSSVGAELEVMAPGAGVYSTYPTNTYATLNGTSMASPHVAGAAALILSKHPNLSASQVRNRLSSTATYLGSSFYYGKGLINVEAAAQ

SEQ ID NO: 51279 - protein, 274 aa, Bacillus licheniformis
AQTVPYGIPLIKADKVQAQGFKGANVKVAVLDTGIQASHPDLNVVGGASFVAGEAYNTDGNGHGTHVAGTVAALDNTTGVLGVAPSVSCYAVKVLNSSGSGSYSGIVSGIEWATTNGMDVINMSLGGASGSTAMKQAVDNAYARGVVVVAAAGNSGSSGNTNTIGYPAKYDSVIAVGAVDSNSNRASFSSVGAELEVMAPGAGVYSTYPTNTYATLNGTSMASPHVAGAAALILSKHPNLSASQVRNRLSSTATYLGSSFYYGKGLINVEAAAQ

SEQ ID NO: 51280 - protein, 274 aa, Bacillus licheniformis
AQTVPYGIPLIKADKVQAQGFKGANVKVAVLDTGIQASHPDLNVVGGASFVAGEAYNTDGNGHGTHVAGTVAALDNTTGVLGVAPSVSLYAVKVLNSSGSGSYSGIVSGIEWATTNGMDVINMSLGGASGSTAMKQAVDNAYARGVVVVAAAGNSGSSGNTNTIGYPAKYDSVIAVGAVDSNSNRASFSSVGAELEVMAPGAGVYSTYPTNTYATLNGTSMASPHVAGAAALILSKHPNLSASQVRNKLSSTATYLGSSFYYGKGLINVEAAAQ

SEQ ID NO: 51281 - protein, 274 aa, Bacillus licheniformis
AQTVPYGIPLIKADKVQAQGFKGANVKVAVLDTGIQASHPDLNVVGGASFVAGEAYNTDGNGHGTHVAGTVAALDNTTGVLGVAPSVSLYAVKVLNSSGSQSYSGIVSGIEWATTNGMDVINMSLGGASGSTAMKQAVDNAYARGVVVVAAAGNSGSSGNTNTIGYPAKYDSVIAVGAVDSNSNRASFSSVGAELEVMAPGAGVYSTYPTNTYATLNGTSMASPHVAGAAALILSKHPNLSASQVRNRLSSTATYLGSSFYYGKGLINVEAAAQ

SEQ ID NO: 51282 - protein, 274 aa, Bacillus licheniformis
AQTVPYGIPLIKADKVQAQGFKGANVKVAVLDTGIQASHPDLNVVGGASFVAGEAYNTDGNGHGTHVAGTVAALDNTTGVLGVAPSVSLYAVKVLNSSGSGSYSGIVSGIEWATTNGMDVINMSLGGASFSTAMKQAVDNAYARGVVVVAAAGNSGSSGNTNTIGYPAKYDSVIAVGAVDSNSNRASFSSVGAELEVMAPGAGVYSTYPTNTYATLNGTSMASPHVAGAAALILSKHPNLSASQVRNRLSSTATYLGSSFYYGKGLINVEAAAQ

SEQ ID NO: 51283 - protein, 274 aa, Bacillus licheniformis
AQTVPYGIPLIKADKVQAQGFKGANVKVAVLDTGIQASHPDLNVVGGASFVAGEAYNTDGNGHGTHVAGTVAALDNTTGVLGVAPSVSLYAVKVLNSSGSGSYSGIVSGIEWATTNGMDVINMSLGGASGSTAMKQAVDNAYARGVVVVAAAGNSGSSGNTNTIGYPAKYDSVIAVGAVDSNSNRASFSSVGAELEVMAPGAGVYSTYPTNTYATLNGTSMASPHVAGAAALILSKHPNLSASQVRDRLSSTATYLGSSFYYGKGLINVEAAAQ

SEQ ID NO: 51284 - protein, 274 aa, Bacillus licheniformis
AQTVPYGIPLIKADKVQAQGFKGANVKVAVLDTGIQASHPDLNVVGGASFVAGEAYNTDGNGHGTHVAGTVAALDNTTGVLGVAPSYSLYAVKVLNSSGSGSYSGIVSGIEWATTNGMDVINMSLGGASGSTAMKQAVDNAYARGVVVVAAAGNSGSSGNTNTIGYPAKYDSVIAVGAVDSNSNRASFSSVGAELEVMAPGAGVYSTYPTNTYATLNGTSMASPHVAGAAALILSKHPNLSASQVRNRLSSTATYLGSSFYYGKGLINVEAAAQ

SEQ ID NO: 51285 - protein, 274 aa, Bacillus licheniformis
AQTVPYGIPLIKADKVQAQGFKGANVKVAVLDTGIQASHPDLNVVGGASFVAGEAYNTDGNGHGTHVAGTVAALDNTTGVLGVAPSGSLYAVKVLNSSGSGSYSGIVSGIEWATTNGMDVINMSLGGASGSTAMKQAVDNAYARGVVVVAAAGNSGSSGNTNTIGYPAKYDSVIAVGAVDSNSNRASFSSVGAELEVMAPGAGVYSTYPTNTYATLNGTSMASPHVAGAAALILSKHPNLSASQVRNRLSSTATYLGSSFYYGKGLINVEAAAQ

SEQ ID NO: 51286 - protein, 274 aa, Bacillus licheniformis
AQTVPYGIPLIKADKVQAQGFKGANVKVAVLDTGIQASHPDLNVVGGASFVAGEAYNTDGNGHGTHVAGTVAALDNTTGVLGVAPSVSLYAVKVLNSSGSGSYSGIVSGIEWATTNGMDVINMSLGGASISTAMKQAVDNAYARGVVVVAAAGNSGSSGNTNTIGYPAKYDSVIAVGAVDSNSNRASFSSVGAELEVMAPGAGVYSTYPTNTYATLNGTSMASPHVAGAAALILSKHPNLSASQVRNRLSSTATYLGSSFYYGKGLINVEAAAQ

SEQ ID NO: 51287 - protein, 274 aa, Bacillus licheniformis
AQTVPYGIPLIKADKVQAQGFKGANVKVAVLDTGIQASHPDLNVVGGASFVAGEAYNTDGNGHGTHVAGTVAALDNTTGVLGVAPSPSLYAVKVLNSSGSGSYSGIVSGIEWATTNGMDVINMSLGGASGSTAMKQAVDNAYARGVVVVAAAGNSGSSGNTNTIGYPAKYDSVIAVGAVDSNSNRASFSSVGAELEVMAPGAGVYSTYPTNTYATLNGTSMASPHVAGAAALILSKHPNLSASQVRNRLSSTATYLGSSFYYGKGLINVEAAAQ

SEQ ID NO: 51288 - protein, 274 aa, Bacillus licheniformis
AQTVPYGIPLIKADKVQAQGFKGANVKVAVLDTGIQASHPDLNVVGGASFVAGEAYNTDGNGHGTHVAGTVAALDNTTGVLGVAPSVSLYAVKVLNSSGSGSYSGIVSGIEWATTFGMDVINMSLGGASGSTAMKQAVDNAYARGVVVVAAAGNSGSSGNTNTIGYPAKYDSVIAVGAVDSNSNRASFSSVGAELEVMAPGAGVYSTYPTNTYATLNGTSMASPHVAGAAALILSKHPNLSASQVRNRLSSTATYLGSSFYYGKGLINVEAAAQ

SEQ ID NO: 51289 - protein, 274 aa, Bacillus licheniformis
SQTVPYGIPLIKADKVQAQGFKGANVKVAVLDTGIQASHPDLNVVGGASFVAGEAYNTDGNGHGTHVAGTVAALDNTTGVLGVAPSVSLYAVKVLNSSGSGSYSGIVSGIEWATTNGMDVINMSLGGASGSTAMKQAVDNAYARGVVVVAAAGNSGSSGNTNTIGYPAKYDSVIAVGAVDSNSNRASFSSVGAELEVMAPGAGVYSTYPTNTYATLNGTSMASPHVAGAAALILSKHPNLSASQVRNRLSSTATYLGSSFYYGKGLINVEAAAQ

SEQ ID NO: 51290 - protein, 274 aa, Bacillus licheniformis
AQTVPYGIPLIKADKVQAQGFKGANVKVAVLDTGIQASHPDLNVVGGASFVAGEAYNTDGNGHGTHVAGTVAALDNTTGVLGVAPSVSLYAVKVLNSSGSGSYSGIVSGIEWATTNGMDVINMSLGGASGSTAMKQAVDNAYARGVVVVAAAGNSGSSGNTNTIGYPAKYDSVIAVGAVDSNSNRASFSSVGAELEVMAPGAGVYSTYPTNTYATLNGTSMASPHVAGAAALILSKHPNLSASQVRNHLSSTATYLGSSFYYGKGLINVEAAAQ

SEQ ID NO: 51291 - protein, 274 aa, Bacillus licheniformis
AQTVPYGIPLIKADKVQAQGFKGANVKVAVLDTGIQASHPDLNVVGGASFVAGEAYNTDGNGHGTHVAGTVAALDNTTGVLGVAPSVSLYAVKVLNSSGSGSYSGIVSGIEWATTNGMDVINMSLGGASGSTAMKQAVDNAYARGVVVVAAAGNSGSSGNTNTIGYPAKYDSVIAVGAVDENSNRASFSSVGAELEVMAPGAGVYSTYPTNTYATLNGTSMASPHVAGAAALILSKHPNLSASQVRNRLSSTATYLGSSFYYGKGLINVEAAAQ

SEQ ID NO: 51292 - protein, 274 aa, Bacillus licheniformis
AQTVPYGIPLIKADKVQAQGFKGANVKVAVLDTGIQASHPDLNVVGGASFVAGEAYNTDGNGHGTHVAGTVAALDITTGVLGVAPSVSLYAVKVLNSSGSGSYSGIVSGIEWATTNGMDVINMSLGGASGSTAMKQAVDNAYARGVVVVAAAGNSGSSGNTNTIGYPAKYDSVIAVGAVDSNSNRASFSSVGAELEVMAPGAGVYSTYPTNTYATLNGTSMASPHVAGAAALILSKHPNLSASQVRNRLSSTATYLGSSFYYGKGLINVEAAAQ

SEQ ID NO: 51293 - protein, 274 aa, Bacillus licheniformis
AQTVPYGIPLIKADKVQAQGFKGANVKVAVLDTGIQASHPDLNVVGGASFVAGEAYNTDGNGHGTHVAGTVAALDNTTGVLGVAPSVSLYAVKVLNSSGSGSYSGIVSGIEWATTNGMDVINMSLGGAAGSTAMKQAVDNAYARGVVVVAAAGNSGSSGNTNTIGYPAKYDSVIAVGAVDSNSNRASFSSVGAELEVMAPGAGVYSTYPTNTYATLNGTSMASPHVAGAAALILSKHPNLSASQVRNRLSSTATYLGSSFYYGKGLINVEAAAQ

SEQ ID NO: 51294 - protein, 274 aa, Synthetic construct
AQTVPYGIPLIKADKVQAQGFKGANVKVAVLDTGIQASHPDLNVVGGASFVAGEAYNTDGNGHGTHVAGTVAALDNETGVLGVAPSVSLYAVKVLNSSGSGSYSGIVSGIEWATTNGMDVINMSLGGASGSTAMKQAVDNAYARGVVVVAAAGNSGSSGNTNTIGYPAKYDSVIAVGAVDSNSNRASFSSVGAELEVMAPGAGVYSTYPTNTYATLNGTSMASPHVAGAAALILSKHPNLSASQVRNRLSSTATYLGSSFYYGKGLINVEAAAQ

SEQ ID NO: 51295 - protein, 274 aa, Bacillus licheniformis
AQTVPYGIPLIKADKVQAQGFKGANVKVAVLDTGIQASHPDLNVVGGASFVAGEAYNTDGNGHGTHVAGTVAALDNTTGVLGVAPSVSLYAVKVLNSSGSGSYSGIVSGIEWATTNGMDVINMSLGGASCSTAMKQAVDNAYARGVVVVAAAGNSGSSGNTNTIGYPAKYDSVIAVGAVDSNSNRASFSSVGAELEVMAPGAGVYSTYPTNTYATLNGTSMASPHVAGAAALILSKHPNLSASQVRNRLSSTATYLGSSFYYGKGLINVEAAAQ

SEQ ID NO: 51296 - protein, 274 aa, Bacillus licheniformis
AQTVPYGIPLIKADKVQAQGFKGANVKVAVLDTGIQASHPDLNVVGGASFVAGEAYNTDGNGHGTHVAGTVAALDNTTGVLGVAPSVSLYAVKVLNSSGSGSYSGIVSGIEWATTNGMDVINMSLGGASWSTAMKQAVDNAYARGVVVVAAAGNSGSSGNTNTIGYPAKYDSVIAVGAVDSNSNRASFSSVGAELEVMAPGAGVYSTYPTNTYATLNGTSMASPHVAGAAALILSKHPNLSASQVRNRLSSTATYLGSSFYYGKGLINVEAAAQ

SEQ ID NO: 51297 - protein, 274 aa, Bacillus licheniformis
AQTVPYGIPLIKADKVQAQGFKGANVKVAVLDTGIQASHPDLNVVGGASFVAGEAYNTDGNGHGTHVAGTVAALDNTTGVLGVAPSVSHYAVKVLNSSGSGSYSGIVSGIEWATTNGMDVINMSLGGASGSTAMKQAVDNAYARGVVVVAAAGNSGSSGNTNTIGYPAKYDSVIAVGAVDSNSNRASFSSVGAELEVMAPGAGVYSTYPTNTYATLNGTSMASPHVAGAAALILSKHPNLSASQVRNRLSSTATYLGSSFYYGKGLINVEAAAQ

SEQ ID NO: 51298 - protein, 274 aa, Bacillus licheniformis
AQTVPYGIPLIKADKVQAQGFKGANVKVAVLDTGIQASHPDLNVVGGKSFVAGEAYNTDGNGHGTHVAGTVAALDNTTGVLGVAPSVSLYAVKVLNSSGSGSYSGIVSGIEWATTNGMDVINMSLGGASGSTAMKQAVDNAYARGVVVVAAAGNSGSSGNTNTIGYPAKYDSVIAVGAVDSNSNRASFSSVGAELEVMAPGAGVYSTYPTNTYATLNGTSMASPHVAGAAALILSKHPNLSASQVRNRLSSTATYLGSSFYYGKGLINVEAAAQ

SEQ ID NO: 51299 - protein, 274 aa, Bacillus licheniformis
AQTVPYGIPLIKADKVQAQGFKGANVKVAVLDTGIQASHPDLNVVGGASFVAGEAYNTDGNGHGTHVAGTVAALDNTTGVLGVAPSVSLYAVKVLNSSGSGSYSGIVSGIEWATTNGMDVINMSLGGASHSTAMKQAVDNAYARGVVVVAAAGNSGSSGNTNTIGYPAKYDSVIAVGAVDSNSNRASFSSVGAELEVMAPGAGVYSTYPTNTYATLNGTSMASPHVAGAAALILSKHPNLSASQVRNRLSSTATYLGSSFYYGKGLINVEAAAQ

SEQ ID NO: 51300 - protein, 274 aa, Bacillus licheniformis
AQTVPYGIPLIKADKVQAQGFKGANVKVAVLDTGIQASHPDLNVVGGASFVAGEAYNTDGNGHGTHVAGTVAALDNTTGVLGVAPSVSLYAVKVLNSSGSGSYSGIVSGIEWATTNGMDVINMSLGGASGSTAMKQAVDNAYARGVVVVAAAGNSGSSGSTNTIGYPAKYDSVIAVGAVDSNSNRASFSSVGAELEVMAPGAGVYSTYPTNTYATLNGTSMASPHVAGAAALILSKHPNLSASQVRNRLSSTATYLGSSFYYGKGLINVEAAAQ

SEQ ID NO: 51301 - protein, 274 aa, Bacillus licheniformis
AQTVPYGIPLIKADKVQAQGFKGANVKVAVLDTGIQASHPDLNVVGGASFVAGEAYNTDGNGHGTHVAGTVAALDNTTGVLGVAPSVSLYAVKVLNSSGSGSYSGIVSGIEWATTNGMDVINMSLGGMSGSTAMKQAVDNAYARGVVVVAAAGNSGSSGNTNTIGYPAKYDSVIAVGAVDSNSNRASFSSVGAELEVMAPGAGVYSTYPTNTYATLNGTSMASPHVAGAAALILSKHPNLSASQVRNRLSSTATYLGSSFYYGKGLINVEAAAQ

SEQ ID NO: 51302 - protein, 274 aa, Bacillus licheniformis
AQTVPYGIPLIKADKVQAQGFKGANVKVAVLDTGIQASHPDLNVVGGASFVAGEAYNTDGNGHGTHVAGTVAALDDTTGVLGVAPSVSLYAVKVLNSSGSGSYSGIVSGIEWATTNGMDVINMSLGGASGSTAMKQAVDNAYARGVVVVAAAGNSGSSGNTNTIGYPAKYDSVIAVGAVDSNSNRASFSSVGAELEVMAPGAGVYSTYPTNTYATLNGTSMASPHVAGAAALILSKHPNLSASQVRNRLSSTATYLGSSFYYGKGLINVEAAAQ

SEQ ID NO: 51303 - protein, 274 aa, Bacillus licheniformis
AQTVPYGIPLIKADKVQAQGFKGANVKVAVLDTGIQACHPDLNVVGGASFVAGEAYNTDGNGHGTHVAGTVAALDNTTGVLGVAPSVSLYAVKVLNSSGSGSYSGIVSGIEWATTNGMDVINMSLGGASGSTAMKQAVDNAYARGVVVVAAAGNSGSSGNTNTIGYPAKYDSVIAVGAVDSNSNRASFSSVGAELEVMAPGAGVYSTYPTNTYATLNGTSMASPHVAGAAALILSKHPNLSASQVRNRLSSTATYLGSSFYYGKGLINVEAAAQ

SEQ ID NO: 51304 - protein, 274 aa, Bacillus licheniformis
AQTVPYGIPLIKADKVQAQGFKGANVKVAVLDTGIQASHPDLNVVGGASFVAGEAYNTDGNGHGTHVAGTVAALDNTTGVLGVAPSVSKYAVKVLNSSGSGSYSGIVSGIEWATTNGMDVINMSLGGASGSTAMKQAVDNAYARGVVVVAAAGNSGSSGNTNTIGYPAKYDSVIAVGAVDSNSNRASFSSVGAELEVMAPGAGVYSTYPTNTYATLNGTSMASPHVAGAAALILSKHPNLSASQVRNRLSSTATYLGSSFYYGKGLINVEAAAQ

SEQ ID NO: 51305 - protein, 274 aa, Bacillus licheniformis
AQTVPYGIPLIKADKVQAQGFKGANVKVAVLDTGIQASHPDLNVVGGASFVAGEAYNNDGNGHGTHVAGTVAALDNTTGVLGVAPSVSLYAVKVLNSSGSGSYSGIVSGIEWATTNGMDVINMSLGGASGSTAMKQAVDNAYARGVVVVAAAGNSGSSGNTNTIGYPAKYDSVIAVGAVDSNSNRASFSSVGAELEVMAPGAGVYSTYPTNTYATLNGTSMASPHVAGAAALILSKHPNLSASQVRNRLSSTATYLGSSFYYGKGLINVEAAAQ

SEQ ID NO: 51306 - protein, 274 aa, Bacillus licheniformis
AQTVPYGIPLIKADKVQAQGFKGANVKVAVLDTGIQASHPDLNVVGGASFVAGEAYNTDGNGHGTHVAGTVAALDNTTGVLSVAPSVSLYAVKVLNSSGSGSYSGIVSGIEWATTNGMDVINMSLGGASGSTAMKQAVDNAYARGVVVVAAAGNSGSSGNTNTIGYPAKYDSVIAVGAVDSNSNRASFSSVGAELEVMAPGAGVYSTYPTNTYATLNGTSMASPHVAGAAALILSKHPNLSASQVRNRLSSTATYLGSSFYYGKGLINVEAAAQ

SEQ ID NO: 51307 - protein, 274 aa, Bacillus licheniformis
AQTVPYGIPLIKADKVQAQGFKGANVKVAVLDTGIQASHPDLNVVGGASFVAGEAYNTDGNGHGTHVAGTVAALDNTTGVLVVAPSVSLYAVKVLNSSGSGSYSGIVSGIEWATTNGMDVINMSLGGASGSTAMKQAVDNAYARGVVVVAAAGNSGSSGNTNTIGYPAKYDSVIAVGAVDSNSNRASFSSVGAELEVMAPGAGVYSTYPTNTYATLNGTSMASPHVAGAAALILSKHPNLSASQVRNRLSSTATYLGSSFYYGKGLINVEAAAQ

SEQ ID NO: 51308 - protein, 274 aa, Bacillus licheniformis
AQTVPYGIPLIKADKVQAQGFKGANVKVAVLDTGIQASHPDLNVVGGASFVAGEAYNVDGNGHGTHVAGTVAALDNTTGVLGVAPSVSLYAVKVLNSSGSGSYSGIVSGIEWATTNGMDVINMSLGGASGSTAMKQAVDNAYARGVVVVAAAGNSGSSGNTNTIGYPAKYDSVIAVGAVDSNSNRASFSSVGAELEVMAPGAGVYSTYPTNTYATLNGTSMASPHVAGAAALILSKHPNLSASQVRNRLSSTATYLGSSFYYGKGLINVEAAAQ

SEQ ID NO: 51309 - protein, 273 aa, Bacillus licheniformis
AQTVPYGIPLIKADKVQAQGFKGANVKVAVLDTGIQASHPDLNVVGGASFVAGEAYNTDGNGHGTHVAGTVAALDNTTGVLGVAPSVSLYAVKVLNSSGSGSYSGIVSGIEWATTNGMDVINMSLGGASGSTAMKQAVDNAYARGVVVVAAAGNSGSSGSTNTIGYPAKYDSVIAVGAVDSNSRASFSSVGAELEVMAPGAGVYSTYPTNTYATLNGTSMASPHVAGAAALILSKHPNLSASQVRNRLSSTATYLGSSFYYGKGLINVEAAAQ

SEQ ID NO: 51310 - protein, 273 aa, Bacillus licheniformis WX-02
QTVPYGIPLIKADKVQAQGFKGANVKVAVLDTGIQASHPDLNVVGGASFVAGEAYNTDGNGHGTHVAGTVAALDNTEGVLGVAPSVSLYAVKVLNSSGSGSYSGIVSGIEWATTNGMDVINMSLGGASGSTAMKQAVDNAYARGVVVVAAAGNSGSSGNTNTIGYPAKYDSVIAVGAVDSNSNRASFSSVGAELEVMAPGAGVYSTYPTNTYATLNGTSMASPHVAGAAALILSKHPNLSASQVRNRLSSTATYLGSSFYYGKGLINVEAAAQ

SEQ ID NO: 51311 - protein, 272 aa, Bacillus licheniformis
TVPYGIPLIKADKVQAQGFKGANVKVAVLDTGIQASHPDLNVVGGASFVAGEAYNTDGNGHGTHVAGTVAALDNTTGVLGVAPSVSLYAVKVLNSSGSGSYSGIVSGIEWATTNGMDVINMSLGGASGSTAMKQAVDNAYARGVVVVAAAGNSGSSGNTNTIGYPAKYDSVIAVGAVDSNSNRASFSSVGAELEVMAPGAGVYSTYPTNTYATLNGTSMVSPHVAGAAALILSKHPNLSASQVRNRLSSTATYLGSSFYYGKGLINVEAAAQ

SEQ ID NO: 51312 - protein, 270 aa, Unidentified
MAQSVPWGISRVQAPAAHNRGLTGSGVKVAVLDTGISTHPDLNIRGGASFVPGEPSTQDGNGHGTHVAGTIAALNNSIGVLGVAPSAELYAVKVLGASGSGSVSSIAQGLEWAGNNGMHVANLSLGSPSPSATLEQAVNSATSRGVLVVAASGNSGAGSISYPARYANAMAVGATDQNNNRASFSQYGAGLDIVAPGVNVQSTYPGSTYASLNGTSMATPHVAGAAALVKQKNPSWSNVQIRNHLKNTATSLGSTNLYGSGLVNAEAATR

SEQ ID NO: 51313 - protein, 272 aa, Bacteria
AQSVPWGISRVQAPAAHNRGLTGSGVKVAVLDTGISTHPDLNIRGGASFVPGEPSTQDGNGHGTHVAGTIAALNNSIGVLGVAPSAELYAVKVLGASGSGAAGSVSSIAQGLEWAGNNGMHVANLSLGSPSPSATLEQAVNSATSRGVLVVAASGNSGAGSISYPARYANAMAVGATDQNNNRASFSQYGAGLDIVAPGVNVQSTYPGSTYASLNGTSMATPHVAGAAALVKQKNPSWSNVQIRNHLKNTATSLGSTNLYGSGLVNAEAATR

SEQ ID NO: 51314 - protein, 270 aa, Unidentified
AQSVPWGISRVQAPAAHNRGLTGSGVKVAVLDTGISTHPDLNIRGGASFVPGXEPSTQDGNGHGTHVAGTIAALNNSIGVLGVAPSAELYAVKVLGASGSGSVSSIAQGLEWAGNNGMHVANLSLGSPSPSATLEQAVNSATSRGVLVVAASGNSGAGSISYPARYANAMAVGATDQNNNRASFSQYGAGLDIVAPGVNVQSTYPGSTYASLNGTSMATPHVAGAAALVKQKNPSWSNVQIRNHLKNTATSLGSTNLYGSGLVNAEAATR

SEQ ID NO: 51315 - protein, 270 aa, Unidentified
AQSVPWGISRVQAPAAHNRGLTGSGVKVAVLDTGISTHPDLNIRGGASFVPGEXPSTQDGNGHGTHVAGTIAALNNSIGVLGVAPSAELYAVKVLGASGSGSVSSIAQGLEWAGNNGMHVANLSLGSPSPSATLEQAVNSATSRGVLVVAASGNSGAGSISYPARYANAMAVGATDQNNNRASFSQYGAGLDIVAPGVNVQSTYPGSTYASLNGTSMATPHVAGAAALVKQKNPSWSNVQIRNHLKNTATSLGSTNLYGSGLVNAEAATR

SEQ ID NO: 51316 - protein, 274 aa, Unidentified
AQSVPWGISRVQAPAAHNRGLTGSGVKVAVLDTGISTHPDLNIRGGASFVPGEPSTQDGNGHGTHVAGTIAALNNSIGVLGVAPSAELYAVKVLGATGSGXSGSGSVSSIAQGLEWAGNNGMHVANLSLGSPSPSATLEQAVNSATSRGVLVVAASGNSGAGSISYPARYANAMAVGATDQNNNRASFSQYGAGLDIVAPGVNVQSTYPGSTYASLNGTSMATPHVAGAAALVKQKNPSWSNVQIRNHLKNTATSLGSTNLYGSGLVNAEAATR

SEQ ID NO: 51317 - protein, 274 aa, Unidentified
AQSVPWGISRVQAPAAHNRGLTGSGVKVAVLDTGISTHPDLNIRGGASFVPGEPSTQDGNGHGTHVAGTIAALNNSIGVLGVAPSAELYAVKVLGATGTGXSGSGSVSSIAQGLEWAGNNGMHVANLSLGSPSPSATLEQAVNSATSRGVLVVAASGNSGAGSISYPARYANAMAVGATDQNNNRASFSQYGAGLDIVAPGVNVQSTYPGSTYASLNGTSMATPHVAGAAALVKQKNPSWSNVQIRNHLKNTATSLGSTNLYGSGLVNAEAATR

SEQ ID NO: 51318 - protein, 270 aa, Unidentified
AQSVPWGISRVQAPAAHNRGLTGSGVKVAVLDTGISTHPDLNIRGGASFVPGEPSTQDGNGHGTHVAGTIAALNNSIGVLGVAPSAELYAVKVLGASGSGSRVSSIAQGLEWAGNNGMHVANLSLGSPSPSATLEQAVNSATSRGVLVVAASGNSGAGSISYPARYANAMAVGATDQNNNRASFSQYGAGLDIVAPGVNVQSTYPGSTYASLNGTSMATPHVAGAAALVKQKNPSWSNVQIRNHLKNTATSLGSTNLYGSGLVNAEAATR

SEQ ID NO: 51319 - protein, 270 aa, Unidentified
AQSVPWGISRVQAPAAHNRGLTGSGVKVAVLDTGISTHPDLNIRGGASFVPGEPSTQDGNGHGTHVAGTIAALNNSIGVLGVAPSAELYAVKVLGASGSGSEVSSIAQGLEWAGNNGMHVANLSLGSPSPSATLEQAVNSATSRGVLVVAASGNSGAGSISYPARYANAMAVGATDQNNNRASFSQYGAGLDIVAPGVNVQSTYPGSTYASLNGTSMATPHVAGAAALVKQKNPSWSNVQIRNHLKNTATSLGSTNLYGSGLVNAEAATR

SEQ ID NO: 51320 - protein, 270 aa, Unidentified
AQSVPWGISRVQAPAAHNRGLTGSGVKVAVLDTGISTHPDLNIRGGASFVPGEPSTQDGNGHGTHVAGTIAALNNSIGVLGVAPSAELYAVKVLGASGSGSGVSSIAQGLEWAGNNGMHVANLSLGSPSPSATLEQAVNSATSRGVLVVAASGNSGAGSISYPARYANAMAVGATDQNNNRASFSQYGAGLDIVAPGVNVQSTYPGSTYASLNGTSMATPHVAGAAALVKQKNPSWSNVQIRNHLKNTATSLGSTNLYGSGLVNAEAATR

SEQ ID NO: 51321 - protein, 269 aa, Unidentified
AQSVPWGISRVQAPAAHNRGLTGSGVKVAVLDTGISTHPDLNIRGGASFVPGEPSTQDGNGHGTHVAGTIAALNNSIGVLGVAPSAELYAVKVLGASGSGSVSSIAQGLEWAGNNGMHVANLSLGSPSPSATLEQAVNSATSRGVLVVAASGNSGAGSISYPARYANAMAVGATDQNNNRASFSQYGAGLDIVAPGVNVQSTYPGSTYASLNGTSAATPHVAGAAALVKQKNPSWSNVQIRNHLKNTATSLGSTNLYGSGLVNAEAATR

SEQ ID NO: 51322 - protein, 269 aa, Unidentified
AQSVPWGISRVQAPAAHNRGLTGSGVKVAVLDTGISTHPDLNIRGGASFVPGEPSTQDGNGHGTHVAGTIAALNNSIGVLGVAPSAELYAVKVLGASGSGSVSSIAQGLEWAGNNGMHVANLSLGSPSPSATLEQAVNSATSRGVLVVAASGNSGAGSISYPARYANAMAVGATDQNNNRASFSQYGAGLDIVAPGTNVQSTYPGSTYASLNGTSSATPHVAGAAALVKQKNPSWSNVQIRNHLKNTATSLGSTNLYGSGLVNAEAATR

SEQ ID NO: 51323 - protein, 270 aa, Unidentified
AQSVPWGISRVQAPAAHNRGLTGSGVKVAVLDTGISTHPDLNIRGGASFVPGEPSTQDGNGHGTHVAGTIAALNNSIGVLGVAPSAELYAVKVLGASGSGSVSSIAQGLEWAGNNGMHVANLSLGSPSPSATLEQAVNSATSRGVLVVAASGNSGAGSXISYPARYANAMAVGATDQNNNRASFSQYGAGLDIVAPGVNVQSTYPGSTYASLNGTSMATPHVAGAAALVKQKNPSWSNVQIRNHLKNTATSLGSTNLYGSGLVNAEAATR

SEQ ID NO: 51324 - protein, 270 aa, Unidentified
AQSVPWGISRVQAPAAHNRGLTGSGVKVAVLDTGISTHPDLNIRGGASFVPGEPSTQDGNGHGTHVAGTIAALNNSIGVLGVAPSAELYAVKVLGASGSGSVSSIAQGLEWAGNNGMHVANLSLGXSPSPSATLEQAVNSATSRGVLVVAASGNSGAGSISYPARYANAMAVGATDQNNNRASFSQYGAGLDIVAPGVNVQSTYPGSTYASLNGTSMATPHVAGAAALVKQKNPSWSNVQIRNHLKNTATSLGSTNLYGSGLVNAEAATR

SEQ ID NO: 51325 - protein, 269 aa, Unidentified
AQSVPWGISRVQAPAAHNRGLTGSGVKVAVLDTGISTHPDLNIRGGASFVPGEPSTQDGNGHGTHVAGTIAALNNSIGVLGVAPSAELYAVKVLGASGSGSNSSIAQGLEWAGNNGMHVANLSLGSPSPSATLEQAVNSATSRGVLVVAASGNSGAGSISYPARYANAMAVGATDQNNNRASFSQYGAGLDIVAPGVNVQSTYPGSTYASLNGTSSATPHVAGAAALVKQKNPSWSNVQIRNHLKNTATSLGSTNLYGSGLVNAEAATR

SEQ ID NO: 51326 - protein, 270 aa, Unidentified
AQSVPWGISRVQAPAAHNRGLTGSGVKVAVLDTGISTHPDLNIRGGASFVPGEPSTQDGNGHGTHVAGTIAALNNSIGVLGVAPSAELYAVKVLGASGSGSWVSSIAQGLEWAGNNGMHVANLSLGSPSPSATLEQAVNSATSRGVLVVAASGNSGAGSISYPARYANAMAVGATDQNNNRASFSQYGAGLDIVAPGVNVQSTYPGSTYASLNGTSMATPHVAGAAALVKQKNPSWSNVQIRNHLKNTATSLGSTNLYGSGLVNAEAATR

SEQ ID NO: 51327 - protein, 270 aa, Unidentified
AQSVPWGISRVQAPAAHNRGLTGSGVKVAVLDTGISTHPDLNIRGGASFVPGEPSTQDGNGHGTHVAGTIAALNNSIGVLGVAPSAELYAVKVLGASGSGSVSSIAQGLEWAGNNGMHVANLSLGSXPSPSATLEQAVNSATSRGVLVVAASGNSGAGSISYPARYANAMAVGATDQNNNRASFSQYGAGLDIVAPGVNVQSTYPGSTYASLNGTSMATPHVAGAAALVKQKNPSWSNVQIRNHLKNTATSLGSTNLYGSGLVNAEAATR

SEQ ID NO: 51328 - protein, 269 aa, Unidentified
AQSVPWGISRVQAPAAHNRGLTGSGVKVAVLDTGISTHPDLNIRGGASFVPGEPSTQDGNGHGTHVAGTIAALNNSIGVLGVAPSAELYAVKVLGASGSGSVSSIAQGLEWAGNNGMHVANLSLGSPSPSATLEQAVNSATSRGVLVVAASGNSGAGSISYPARYANAMAVGATDQNNNRASFSQYGAGLDIVAPGVNVQSTWPGSTYASLNGTSSATPHVAGAAALVKQKNPSWSNVQIRNHLKNTATSLGSTNLYGSGLVNAEAATR

SEQ ID NO: 51329 - protein, 270 aa, Unidentified
AQSVPWGISRVQAPAAHNRGLTGSGVKVAVLDTGISTHPDLNIRGGASFVPGEPSTQDGNGHGTHVAGTIAALNNSIGVLGVAPSAELYAVKVLGASGSGSVSSIAQGLEWAGNNGMHVANLSLGSPSPSATLEQAVNSATSRGVLVVAASGNSGAGSISYPARYANAMAVGATDQNNNRASFSQYGAGLDIVAPGVNVQSTYPGSTYASLNGTSMXATPHVAGAAALVKQKNPSWSNVQIRNHLKNTATSLGSTNLYGSGLVNAEAATR

SEQ ID NO: 51330 - protein, 270 aa, Unidentified
AQSVPWGISRVQAPAAHNRGLTGSGVKVAVLDTGISTHPDLNIRGGASFVPGEPSTQDGNGHGTHVAGTIAALNNSIGVLGVAPSAELYAVKVLGASGSGSXVSSIAQGLEWAGNNGMHVANLSLGSPSPSATLEQAVNSATSRGVLVVAASGNSGAGSISYPARYANAMAVGATDQNNNRASFSQYGAGLDIVAPGVNVQSTYPGSTYASLNGTSMATPHVAGAAALVKQKNPSWSNVQIRNHLKNTATSLGSTNLYGSGLVNAEAATR

SEQ ID NO: 51331 - protein, 270 aa, Unidentified
AQSVPWGISRVQAPAAHNRGLTGSGVKVAVLDTGISTHPDLNIRGGASFVPGEPSTQDGNGHGTHVAGTIAALNNSIGVLGVAPSAELYAVKVLGASGSGSKVSSIAQGLEWAGNNGMHVANLSLGSPSPSATLEQAVNSATSRGVLVVAASGNSGAGSISYPARYANAMAVGATDQNNNRASFSQYGAGLDIVAPGVNVQSTYPGSTYASLNGTSMATPHVAGAAALVKQKNPSWSNVQIRNHLKNTATSLGSTNLYGSGLVNAEAATR

SEQ ID NO: 51332 - protein, 270 aa, Unidentified
AQSVPWGISRVQAPAAHNRGLTGSGVKVAVLDTGISTHPDLNIRGGASFVPGEPSTQDGNGHGTHVAGTIAALNNSIGVLGVAPSAELYAVKVLGASGSGSVSSIAQGLEWAGNNGMHVANLSLGSPSPSXATLEQAVNSATSRGVLVVAASGNSGAGSISYPARYANAMAVGATDQNNNRASFSQYGAGLDIVAPGVNVQSTYPGSTYASLNGTSMATPHVAGAAALVKQKNPSWSNVQIRNHLKNTATSLGSTNLYGSGLVNAEAATR

SEQ ID NO: 51333 - protein, 270 aa, Unidentified
AQSVPWGISRVQAPAAHNRGLTGSGVKVAVLDTGISTHPDLNIRGGASFVPGEPSTQDGNGHGTHVAGTIAALNNSIGVLGVAPSAELYAVKVLGASGSGSVSSIAQGLEWAGNNGMHVANLSLGSPXSPSATLEQAVNSATSRGVLVVAASGNSGAGSISYPARYANAMAVGATDQNNNRASFSQYGAGLDIVAPGVNVQSTYPGSTYASLNGTSMATPHVAGAAALVKQKNPSWSNVQIRNHLKNTATSLGSTNLYGSGLVNAEAATR

SEQ ID NO: 51334 - protein, 269 aa, Unidentified
AQSVPWGISRVQAPAAHNRGLTGSGVKVAVLDTGISTHPDLNIRGGASFVPGEPSTQDGNGHGTHVAGTIAALNNSIGVLGVAPSAELYAVKVLGASGSGSASSIAQGLEWAGNNGMHVANLSLGSPSPSATLEQAVNSATSRGVLVVAASGNSGAGSISYPARYANAMAVGATDQNNNRASFSQYGAGLDIVAPGVNVQSTYPGSTYASLNGTSSATPHVAGAAALVKQKNPSWSNVQIRNHLKNTATSLGSTNLYGSGLVNAEAATR

SEQ ID NO: 51335 - protein, 270 aa, Hordeum sp.
AQSVPWGISRVQAPAAHNRGLTGSGVKVAVLDTGIDSTHPDLNIRGGASFVPGEPSTQDGNGHGTHVAGTIAALNNSIGVLGVAPSAELYAVKVLGASGSGSVSSIAQGLEWAGNNGMHVANLSLGSPSPSATLEQAVNSATSRGVLVVAASGNSGAGSISYPARYANAMAVGATDQNNNRASFSQYGAGLDIVAPGVNVQSTYPGSTYASLNGTSMATPHVAGAAALVKQKNPSWSNVQIRNHLKNTATSLGSTNLYGSGLVNAEAATR

SEQ ID NO: 51336 - protein, 270 aa, Unidentified
AQSVPWGISRVQAPAAHNRGLTGSGVKVAVLDTGISTHPDLNIRGGASFVPGEPSTQDGNGHGTHVAGTIAALNNSIGVLGVAPSAELYAVKVLGXASGSGSVSSIAQGLEWAGNNGMHVANLSLGSPSPSATLEQAVNSATSRGVLVVAASGNSGAGSISYPARYANAMAVGATDQNNNRASFSQYGAGLDIVAPGVNVQSTYPGSTYASLNGTSMATPHVAGAAALVKQKNPSWSNVQIRNHLKNTATSLGSTNLYGSGLVNAEAATR

SEQ ID NO: 51337 - protein, 270 aa, unidentified
AQSVPWGISRVQAPAAHNRGLTGSGVKVAVLDTGISTHPDLNIRGGASFVPGEPSTQDGNGHGTHVAGTIAALNNSIGVLGVAPSAELYAVKVLGASEGSGSVSSIAQGLEWAGNNGMHVANLSLGSPSPSATLEQAVNSATSRGVLVVAASGNSGAGSISYPARYANAMAVGATDQNNNRASFSQYGAGLDIVAPGVNVQSTYPGSTYASLNGTSMATPHVAGAAALVKQKNPSWSNVQIRNHLKNTATSLGSTNLYGSGLVNAEAATR

SEQ ID NO: 51338 - protein, 270 aa, Unidentified
AQSVPWGISRVQAPAAHNRGLTGSGVKVAVLDTGISTHPDLNIRGGASFVPGEPSTQDGNGHGTHVAGTIAALNNSIGVLGVAPSAELYAVKVLGASXGSGSVSSIAQGLEWAGNNGMHVANLSLGSPSPSATLEQAVNSATSRGVLVVAASGNSGAGSISYPARYANAMAVGATDQNNNRASFSQYGAGLDIVAPGVNVQSTYPGSTYASLNGTSMATPHVAGAAALVKQKNPSWSNVQIRNHLKNTATSLGSTNLYGSGLVNAEAATR

SEQ ID NO: 51339 - protein, 269 aa, Lederbergia lenta
AQSVPWGISRVQAPAAHNRGLTGSGVKVAVLDTGISTHPDLNIRGGASFVPGEPSTQDGNGHGTHVAGTIAALNNSIGVLGVAPSAELYAVKVLGASGSGSVSSIAQGLEWAGNNGMHVANLSLGSPSPSATLEQAVNSATSRGVLVVAASGNSGAGSISYPARYANAMAVGATDQNNNRASFSQYGAGLDIVAPGVNVQSTYPGSTYASLNGTSMATPHVAGAAALVKQKNPSWSNVQIRNHLKNTATSLGSTNLYGSGLVNAEAATR

SEQ ID NO: 51340 - protein, 270 aa, Unidentified
AQSVPWGISRVQAPAAHNRGLTGSGVKVAVLDTGISTHPDLNIRGGASFVPGEPSTQDGNGHGTHVAGTIAALNNSIGVLGVAPSAELYAVKVLGASGSGSVSSIAQGLEWAGNNGMHVANLSLGSPSPSATLEQAVNSATSRGVLVVAASGNSGXAGSISYPARYANAMAVGATDQNNNRASFSQYGAGLDIVAPGVNVQSTYPGSTYASLNGTSMATPHVAGAAALVKQKNPSWSNVQIRNHLKNTATSLGSTNLYGSGLVNAEAATR

SEQ ID NO: 51341 - protein, 270 aa, Unidentified
AQSVPWGISRVQAPAAHNRGLTGSGVKVAVLDTGISTHPDLNIRGGASFVPGEPSTQDGNGHGTHVAGTIAALNNSIGVLGVAPSAELYAVKVLGASGSGSMVSSIAQGLEWAGNNGMHVANLSLGSPSPSATLEQAVNSATSRGVLVVAASGNSGAGSISYPARYANAMAVGATDQNNNRASFSQYGAGLDIVAPGVNVQSTYPGSTYASLNGTSMATPHVAGAAALVKQKNPSWSNVQIRNHLKNTATSLGSTNLYGSGLVNAEAATR

SEQ ID NO: 51342 - protein, 270 aa, Unidentified
AQSVPWGISRVQAPAAHNRGLTGSGVKVAVLDTGISTHPDLNIRGGASFVPGEPSTQDGNGHGTHVAGTIAALNNSIGVLGVAPSAELYAVKVLGASGSGSQVSSIAQGLEWAGNNGMHVANLSLGSPSPSATLEQAVNSATSRGVLVVAASGNSGAGSISYPARYANAMAVGATDQNNNRASFSQYGAGLDIVAPGVNVQSTYPGSTYASLNGTSMATPHVAGAAALVKQKNPSWSNVQIRNHLKNTATSLGSTNLYGSGLVNAEAATR

SEQ ID NO: 51343 - protein, 269 aa, Unidentified
AQSVPWGISRVQAPAAHNRGLTGSGVKVAVLDTGISTHPDLNIRGGASFVPGEPSTQDGNGHGTHVAGTIAALNNSIGVLGVAPSAELYAVKVLGASGSGSVSSIAQGLEWAGNNGMHVANLSLGSPSPSATLEQAVNSATSRGVLVVAASGNSGAGSISYPARYANAMAVGATDQNNNRASFSQYGAGLDIVAPGVNVQSTYPGSTYASLNGTSFATPHVAGAAALVKQKNPSWSNVQIRNHLKNTATSLGSTNLYGSGLVNAEAATR

SEQ ID NO: 51344 - protein, 269 aa, Unidentified
AQSVPWGISRVQAPAAHNRGLTGSGVKVAVLDTGISTHPDLNIRGGASFVPGEPSTQDGNGHGTHVAGTIAALNNSIGVLGVAPSAELYAVKVLGASGSGSSSSIAQGLEWAGNNGMHVANLSLGSPSPSATLEQAVNSATSRGVLVVAASGNSGAGSISYPARYANAMAVGATDQNNNRASFSQYGAGLDIVAPGVNVQSTYPGSTYASLNGTSSATPHVAGAAALVKQKNPSWSNVQIRNHLKNTATSLGSTNLYGSGLVNAEAATR

SEQ ID NO: 51345 - protein, 270 aa, Unidentified
AQSVPWGISRVQAPAAHNRGLTGSGVKVAVLDTGISTHPDLNIRGGASFVPGEPSTQDGNGHGTHVAGTIAALNNSIGVLGVAPSAELYAVKVLGASGSGSVSSIAQGLEWAGNNGMHVANLSLGSPSPSATLEQAVNSATSRGVLVVAASGNSGAGSISYPARYANAMAVGATDQNNNRASFSQYGXAGLDIVAPGVNVQSTYPGSTYASLNGTSMATPHVAGAAALVKQKNPSWSNVQIRNHLKNTATSLGSTNLYGSGLVNAEAATR

SEQ ID NO: 51346 - protein, 270 aa, Unidentified
AQSVPWGISRVQAPAAHNRGLTGSGVKVAVLDTGISTHPDLNIRGGASFVPGEPSTQDGNGHGTHVAGTIAALNNSIGVLGVAPSAELYAVKVLGASGSGSVSSIAQGLEWAGNNGMHVANLSLGSPSPSATLEQAVNSATSRGVLVVAASGNSGAGSISYPARYANAMAVGATDQNNNRASFSQYGAGLDIVAPGVNVQSTYPGSTYASLNGTSMATXPHVAGAAALVKQKNPSWSNVQIRNHLKNTATSLGSTNLYGSGLVNAEAATR

SEQ ID NO: 51347 - protein, 270 aa, Unidentified
AQSVPWGISRVQAPAAHNRGLTGSGVKVAVLDTGISTHPDLNIRGGASFVPGEPSTQDGNGHGTHVAGTIAALNNSIGVLGVAPSAELYAVKVLGASGSGSVSSIAQGLEWAGNNGMHVANLSLGSPSPSATLEQAVNSATSRGVLVVAASGNSGAGSISYPARYANAMAVGATDQNNNRASFSQYGAGXLDIVAPGVNVQSTYPGSTYASLNGTSMATPHVAGAAALVKQKNPSWSNVQIRNHLKNTATSLGSTNLYGSGLVNAEAATR

SEQ ID NO: 51348 - protein, 269 aa, Unidentified
AQSVPWGISRVQAPAAHNRGLTGSGVKVAVLDTGISTHPDLNIRGGASFVPGEPSTQDGNGHGTHVAGTIAALNNSIGVLGVAPSAELYAVKVLGASGSGSVSSIAQGLEWAGNNGMHVANLSLGSPSPSATLEQAVNSATSRGVLVVAASGNSGAGSISYPARYANAMAVGATDQNNNRASFSQYGAGLDIVAPGVGVQSTYPGSTYASLNGTSSATPHVAGAAALVKQKNPSWSNVQIRNHLKNTATSLGSTNLYGSGLVNAEAATR

SEQ ID NO: 51349 - protein, 270 aa, Unidentified
AQSVPWGISRVQAPAAHNRGLTGSGVKVAVLDTGISTHPDLNIRGGASFVPGEPSTQDGNGHGTHVAGTIAALNNSIGVLGVAPSAELYAVKVLGASGSGSHVSSIAQGLEWAGNNGMHVANLSLGSPSPSATLEQAVNSATSRGVLVVAASGNSGAGSISYPARYANAMAVGATDQNNNRASFSQYGAGLDIVAPGVNVQSTYPGSTYASLNGTSMATPHVAGAAALVKQKNPSWSNVQIRNHLKNTATSLGSTNLYGSGLVNAEAATR

SEQ ID NO: 51350 - protein, 275 aa, Unidentified
AQSVPWGISRVQAPAAHNRGLTGSGVKVAVLDTGIXSTHPDLNIRGGASFVPGEXPSTQDGNGHGTHVAGTIAALNNSIGVLGVAPSAELYAVKVLGASGSGSVSSIAQGLEWAGNNGMHVANLSLGSPSPSATLEQAVNSATSRGVLVVAASGNSGAGSXXXXISYPARYANAMAVGATDQNNNRASFSQYGAGLDIVAPGVNVQSTYPGSTYASLNGTSMATPHVAGAAALVKQKNPSWSNVQIRNHLKNTATSLGSTNLYGSGLVNAEAATR

SEQ ID NO: 51351 - protein, 270 aa, Unidentified
AQSVPWGISRVQAPAAHNRGLTGSGVKVAVLDTGISTHPDLNIRGGASFVPGEPSTQDGNGHGTHVAGTIAALNNSIGVLGVAPSAELYAVKVLGASGSGSFVSSIAQGLEWAGNNGMHVANLSLGSPSPSATLEQAVNSATSRGVLVVAASGNSGAGSISYPARYANAMAVGATDQNNNRASFSQYGAGLDIVAPGVNVQSTYPGSTYASLNGTSMATPHVAGAAALVKQKNPSWSNVQIRNHLKNTATSLGSTNLYGSGLVNAEAATR

SEQ ID NO: 51352 - protein, 270 aa, Unidentified
AQSVPWGISRVQAPAAHNRGLTGSGVKVAVLDTGISTHPDLNIRGGASFVPGEPSTQDGNGHGTHVAGTIAALNNSIGVLGVAPSAELYAVKVLGASGSGSVSSIAQGLEWAGNNGMHVANLSLGSPSPSATLEQAVNSATSRGVLVVAASGNSGAGXSISYPARYANAMAVGATDQNNNRASFSQYGAGLDIVAPGVNVQSTYPGSTYASLNGTSMATPHVAGAAALVKQKNPSWSNVQIRNHLKNTATSLGSTNLYGSGLVNAEAATR

SEQ ID NO: 51353 - protein, 269 aa, Bacillus sp.
AQSVPWGISRVQAPAAHNRGLTGSGVKVAVLDTGISTHPDLNIRGGASFVPGEPSTQDGNGHGTHVAGTIAALNNSIGVLGVAPSAELYAVKVLGASGSGSVSSIAQGLEWAGNNGMHVANLSLGSPSPSATLEQAVNSATSRGVLVVAASGNSGAGSISYPARYANAMAVGATDQNNNRASFSQYGAGLDIVAPGVNVQSTYPGSTYASLNGTSQATPHVAGAAALVKQKNPSWSNVQIRNHLKNTATSLGSTNLYGSGLVNAEAATR

SEQ ID NO: 51354 - protein, 269 aa, Unidentified
AQSVPWGISRVQAPAAHNRGLTGSGVKVAVLDTGISTHPDLNIRGGASFVPGEPSTQDGNGHGTHVAGTIAALNNSIGVLGVAPSAELYAVKVLGASGGGSVSSIAQGLEWAGNNGMHVANLSLGSPSPSATLEQAVNSATSRGVLVVAASGNSGAGSISYPARYANAMAVGATDQNNNRASFSQYGAGLDIVAPGVNVQSTYPGSTYASLNGTSSATPHVAGAAALVKQKNPSWSNVQIRNHLKNTATSLGSTNLYGSGLVNAEAATR

SEQ ID NO: 51355 - protein, 270 aa, Unidentified
AQSVPWGISRVQAPAAHNRGLTGSGVKVAVLDTGISTHPDLNIRGGASFVPGEPSTQDGNGHGTHVAGTIAALNNSIGVLGVAPSAELYAVKVLGASGSGSNVSSIAQGLEWAGNNGMHVANLSLGSPSPSATLEQAVNSATSRGVLVVAASGNSGAGSISYPARYANAMAVGATDQNNNRASFSQYGAGLDIVAPGVNVQSTYPGSTYASLNGTSMATPHVAGAAALVKQKNPSWSNVQIRNHLKNTATSLGSTNLYGSGLVNAEAATR

SEQ ID NO: 51356 - protein, 270 aa, Unidentified
AQSVPWGISRVQAPAAHNRGLTGSGVKVAVLDTGISTHPDLNIRGGASFVPXGEPSTQDGNGHGTHVAGTIAALNNSIGVLGVAPSAELYAVKVLGASGSGSVSSIAQGLEWAGNNGMHVANLSLGSPSPSATLEQAVNSATSRGVLVVAASGNSGAGSISYPARYANAMAVGATDQNNNRASFSQYGAGLDIVAPGVNVQSTYPGSTYASLNGTSMATPHVAGAAALVKQKNPSWSNVQIRNHLKNTATSLGSTNLYGSGLVNAEAATR

SEQ ID NO: 51357 - protein, 270 aa, Unidentified
AQSVPWGISRVQAPAAHNRGLTGSGVKVAVLDTGISTHPDLNIRGGASFVPGEPSTQDGNGHGTHVAGTIAALNNSIGVLGVAPSAELYAVKVLGASGSGSPVSSIAQGLEWAGNNGMHVANLSLGSPSPSATLEQAVNSATSRGVLVVAASGNSGAGSISYPARYANAMAVGATDQNNNRASFSQYGAGLDIVAPGVNVQSTYPGSTYASLNGTSMATPHVAGAAALVKQKNPSWSNVQIRNHLKNTATSLGSTNLYGSGLVNAEAATR

SEQ ID NO: 51358 - protein, 269 aa, Unidentified
AQSVPWGISRVQAPAAHNRGLTGSGVKVAVLDTGISTHPDLNIRGGASFVPGEPSTQDGNGHGTHVAGTIAALNNSIGVLGVAPSAELYAVKVLGASGSGSQSSIAQGLEWAGNNGMHVANLSLGSPSPSATLEQAVNSATSRGVLVVAASGNSGAGSISYPARYANAMAVGATDQNNNRASFSQYGAGLDIVAPGVNVQSTYPGSTYASLNGTSSATPHVAGAAALVKQKNPSWSNVQIRNHLKNTATSLGSTNLYGSGLVNAEAATR

SEQ ID NO: 51359 - protein, 269 aa, Unidentified
AQSVPWGISRVQAPAAHNRGLTGSGVKVAVLDTGISTHPDLNIRGGASFVPGEPSTQDGNGHGTHVAGTIAALNNSIGVLGVAPSAELYAVKVLGASGSGSVSSIAQGLEWAGNNGMHVANLSLGSPSPSATLEQAVNSATSRGVLVVAASGNSGAGSISYPARYANAMAVGATDQNNNRASFSQYGAGLDIVAPGVNVQSTYPGSTYASENGTSSATPHVAGAAALVKQKNPSWSNVQIRNHLKNTATSLGSTNLYGSGLVNAEAATR

SEQ ID NO: 51360 - protein, 270 aa, Unidentified
AQSVPWGISRVQAPAAHNRGLTGSGVKVAVLDTGISTHPDLNIRGGASFVPGEPSTQDGNGHGTHVAGTIAALNNSIGVLGVAPSAELYAVKVLGASGSGSVSSIAQGLEWAGNNGMHVANLSLGSPSPSATLEQAVNSATSRGVLVVAASGNSGAXGSISYPARYANAMAVGATDQNNNRASFSQYGAGLDIVAPGVNVQSTYPGSTYASLNGTSMATPHVAGAAALVKQKNPSWSNVQIRNHLKNTATSLGSTNLYGSGLVNAEAATR

SEQ ID NO: 51361 - protein, 269 aa, Unidentified
AQSVPWGISRVQAPAAHNRKLTGSGVKVAVLDTGISTHPDLNIRGGASFVPGEPSTQDGNGHGTHVAGTIAALNNSIGVLGVAPSAELYAVKVLGASGSGSVSSIAQGLEWAGNNGMHVANLSLGSPSPSATLEQAVNSATSRGVLVVAASGNSGAGSISYPARYANAMAVGATDQNNNRASFSQYGAGLDIVAPGVNVQSTYPGSTYASLNGTSSATPHVAGAAALVKQKNPSWSNVQIRNHLKNTATSLGSTNLYGSGLVNAEAATR

SEQ ID NO: 51362 - protein, 270 aa, Unidentified
AQSVPWGISRVQAPAAHNRGLTGSGVKVAVLDTGISTHPDLNIRGGASFVPGEPSTQDGNGHGTHVAGTIAALNNSIGVLGVAPSAELYAVKVLGASGSGSVSSIAQGLEWAGNNGMHVANLSLGSPSPXSATLEQAVNSATSRGVLVVAASGNSGAGSISYPARYANAMAVGATDQNNNRASFSQYGAGLDIVAPGVNVQSTYPGSTYASLNGTSMATPHVAGAAALVKQKNPSWSNVQIRNHLKNTATSLGSTNLYGSGLVNAEAATR

SEQ ID NO: 51363 - protein, 272 aa, Unidentified
AQSVPWGISRVQAPAAHNRGLTGSGVKVAVLDTGISTHPDLNIRGGASFVPGEPSTQDGNGHGTHVAGTIAALNNSIGVLGVAPSAELYAVKVLGADTXSGSGSVSSIAQGLEWAGNNGMHVANLSLGSPSPSATLEQAVNSATSRGVLVVAASGNSGAGSISYPARYANAMAVGATDQNNNRASFSQYGAGLDIVAPGVNVQSTYPGSTYASLNGTSMATPHVAGAAALVKQKNPSWSNVQIRNHLKNTATSLGSTNLYGSGLVNAEAATR

SEQ ID NO: 51364 - protein, 270 aa, Unidentified
AQSVPWGISRVQAPAAHNRGLTGSGVKVAVLDTGISTHPDLNIRGGASFVPGEPSTQDGNGHGTHVAGTIAALNNSIGVLGVAPSAELYAVKVLGASGSGSDVSSIAQGLEWAGNNGMHVANLSLGSPSPSATLEQAVNSATSRGVLVVAASGNSGAGSISYPARYANAMAVGATDQNNNRASFSQYGAGLDIVAPGVNVQSTYPGSTYASLNGTSMATPHVAGAAALVKQKNPSWSNVQIRNHLKNTATSLGSTNLYGSGLVNAEAATR

SEQ ID NO: 51365 - protein, 270 aa, Unidentified
AQSVPWGISRVQAPAAHNRGLTGSGVKVAVLDTGISTHPDLNXIRGGASFVPGEPSTQDGNGHGTHVAGTIAALNNSIGVLGVAPSAELYAVKVLGASGSGSVSSIAQGLEWAGNNGMHVANLSLGSPSPSATLEQAVNSATSRGVLVVAASGNSGAGSISYPARYANAMAVGATDQNNNRASFSQYGAGLDIVAPGVNVQSTYPGSTYASLNGTSMATPHVAGAAALVKQKNPSWSNVQIRNHLKNTATSLGSTNLYGSGLVNAEAATR

SEQ ID NO: 51366 - protein, 269 aa, Bacillus sp.
AQSVPWGISRVQAPAAHNRGLTGSGVKVAVLDTGISTHPDLNIRGGASFVPGEPSTQDGNGHGTHVAGTIAALNNSIGVLGVAPNAELYAVKVLGASGSGSVSSIAQGLEWAGNNGMHVANLSLGSPSPSATLEQAVNSATSRGVLVVAASGNSGAGSISYPARYANAMAVGATDQNNNRASFSQYGAGLDIVAPGVNVQSTYPGSTYASLNGTSSATPHVAGAAALVKQKNPSWSNVQIRNHLKNTATSLGSTNLYGSGLVNAEAATR

SEQ ID NO: 51367 - protein, 270 aa, Unidentified
AQSVPWGISRVQAPAAHNRGLTGSGVKVAVLDTGISTHPDLNIRGGASFVPGEPSTQDGNGHGTHVAGTIAALNNSIGVLGVAPSAELYAVKVLGASGSGSSVSSIAQGLEWAGNNGMHVANLSLGSPSPSATLEQAVNSATSRGVLVVAASGNSGAGSISYPARYANAMAVGATDQNNNRASFSQYGAGLDIVAPGVNVQSTYPGSTYASLNGTSMATPHVAGAAALVKQKNPSWSNVQIRNHLKNTATSLGSTNLYGSGLVNAEAATR

SEQ ID NO: 51368 - protein, 269 aa, Unidentified
AQSVPWGISRVQAPAAHNRGLTGSGVKVAVLDTGISTHPDLNIRGGASFVPGEPSTQDGNGHGTHVAGTIAALNNSIGVLGVAPSAELYAVKVLGASGSGSPSSIAQGLEWAGNNGMHVANLSLGSPSPSATLEQAVNSATSRGVLVVAASGNSGAGSISYPARYANAMAVGATDQNNNRASFSQYGAGLDIVAPGVNVQSTYPGSTYASLNGTSSATPHVAGAAALVKQKNPSWSNVQIRNHLKNTATSLGSTNLYGSGLVNAEAATR

SEQ ID NO: 51369 - protein, 271 aa, Unidentified
AQSVPWGISRVQAPAAHNRGLTGSGVKVAVLDTGISTHPDLNIRGGASFVPGEPSTQDGNGHGTHVAGTIAALNNSIGVLGVAPSAELYAVKVLGASGSGSGSVSSIAQGLEWAGNNGMHVANLSLGSPSPSATLEQAVNSATSRGVLVVAASGNSGAGSISYPARYANAMAVGATDQNNNRASFSQYGAGLDIVAPGVNVQSTYPGSTYASLNGTSMATPHVAGAAALVKQKNPSWSNVQIRNHLKNTATSLGSTNLYGSGLVNAEAATR

SEQ ID NO: 51370 - protein, 270 aa, Unidentified
AQSVPWGISRVQAPAAHNRGLTGSGVKVAVLDTGISTHPDLNIRGGASFVPGEPSTQDGNGHGTHVAGTIAALNNSIGVLGVAPSAELYAVKVLGASGSGSVSSIAQGLEWAGNNGMHVANLSLGSPSPSATLEQAVNSATSRGVLVVAASGNSGAGSISYPARYANAMAVGATDQNNNRASFSQYGAGLDIVAPGVNVQSTYPGSTYASLNGTSMAXTPHVAGAAALVKQKNPSWSNVQIRNHLKNTATSLGSTNLYGSGLVNAEAATR

SEQ ID NO: 51371 - protein, 270 aa, Unidentified
AQSVPWGISRVQAPAAHNRGLTGSGVKVAVLDTGISTHPDLNIRGGASFVPGEPXSTQDGNGHGTHVAGTIAALNNSIGVLGVAPSAELYAVKVLGASGSGSVSSIAQGLEWAGNNGMHVANLSLGSPSPSATLEQAVNSATSRGVLVVAASGNSGAGSISYPARYANAMAVGATDQNNNRASFSQYGAGLDIVAPGVNVQSTYPGSTYASLNGTSMATPHVAGAAALVKQKNPSWSNVQIRNHLKNTATSLGSTNLYGSGLVNAEAATR

SEQ ID NO: 51372 - protein, 269 aa, Unidentified
AQSVPWGISRVQAPAAHNRGLTGSGVKVAVLDTGISTHPDLNIRGGASFVPGEPSTQDGNGHGTHVAGTIAALNNSIGVLGVAPSAELYAVKVLGASGSGSLSSIAQGLEWAGNNGMHVANLSLGSPSPSATLEQAVNSATSRGVLVVAASGNSGAGSISYPARYANAMAVGATDQNNNRASFSQYGAGLDIVAPGVNVQSTYPGSTYASLNGTSSATPHVAGAAALVKQKNPSWSNVQIRNHLKNTATSLGSTNLYGSGLVNAEAATR

SEQ ID NO: 51373 - protein, 270 aa, Unidentified
AQSVPWGISRVQAPAAHNRGLTGSGVKVAVLDTGISTHPDLNIRGGASFVPGEPSTQDGNGHGTHVAGTIAALNNSIGVLGVAPSAELYAVKVXLGASGSGSVSSIAQGLEWAGNNGMHVANLSLGSPSPSATLEQAVNSATSRGVLVVAASGNSGAGSISYPARYANAMAVGATDQNNNRASFSQYGAGLDIVAPGVNVQSTYPGSTYASLNGTSMATPHVAGAAALVKQKNPSWSNVQIRNHLKNTATSLGSTNLYGSGLVNAEAATR

SEQ ID NO: 51374 - protein, 270 aa, Unidentified
AQSVPWGISRVQAPAAHNRGLTGSGVKVAVLDTGISTHPDLNIRGGASFVPGEPSTQDGNGHGTHVAGTIAALNNSIGVLGVAPSAELYAVKVLXGASGSGSVSSIAQGLEWAGNNGMHVANLSLGSPSPSATLEQAVNSATSRGVLVVAASGNSGAGSISYPARYANAMAVGATDQNNNRASFSQYGAGLDIVAPGVNVQSTYPGSTYASLNGTSMATPHVAGAAALVKQKNPSWSNVQIRNHLKNTATSLGSTNLYGSGLVNAEAATR

SEQ ID NO: 51375 - protein, 272 aa, Unidentified
AQSVPWGISRVQAPAAHNRGLTGSGVKVAVLDTGISTHPDLNIRGGASFVPGEPSTQDGNGHGTHVAGTIAALNNSIGVLGVAPSAELYAVKVLDGATXSGSGSVSSIAQGLEWAGNNGMHVANLSLGSPSPSATLEQAVNSATSRGVLVVAASGNSGAGSISYPARYANAMAVGATDQNNNRASFSQYGAGLDIVAPGVNVQSTYPGSTYASLNGTSMATPHVAGAAALVKQKNPSWSNVQIRNHLKNTATSLGSTNLYGSGLVNAEAATR

SEQ ID NO: 51376 - protein, 274 aa, Unidentified
AQSVPWGISRVQAPAAHNRGLTGSGVKVAVLDTGISTHPDLNIRGGASFVPGEPSTQDGNGHGTHVAGTIAALNNSIGVLGVAPSAELYAVKVLGAGGGSXSGSGSVSSIAQGLEWAGNNGMHVANLSLGSPSPSATLEQAVNSATSRGVLVVAASGNSGAGSISYPARYANAMAVGATDQNNNRASFSQYGAGLDIVAPGVNVQSTYPGSTYASLNGTSMATPHVAGAAALVKQKNPSWSNVQIRNHLKNTATSLGSTNLYGSGLVNAEAATR

SEQ ID NO: 51377 - protein, 270 aa, Unidentified
AQSVPWGISRVQAPAAHNRGLTGSGVKVAVLDTGISTHPDLNIRGGASFVPGEPSTQDGNGHGTHVAGTIAALNNSIGVLGVAPSAELYAVKVLGASGSGSIVSSIAQGLEWAGNNGMHVANLSLGSPSPSATLEQAVNSATSRGVLVVAASGNSGAGSISYPARYANAMAVGATDQNNNRASFSQYGAGLDIVAPGVNVQSTYPGSTYASLNGTSMATPHVAGAAALVKQKNPSWSNVQIRNHLKNTATSLGSTNLYGSGLVNAEAATR

SEQ ID NO: 51378 - protein, 272 aa, Unidentified
AQSVPWGISRVQAPAAHNRGLTGSGVKVAVLDTGISTHPDLNIRGGASFVPGEPSTQDGNGHGTHVAGTIAALNNSIGVLGVAPSAELYAVKVLGATDXSGSGSVSSIAQGLEWAGNNGMHVANLSLGSPSPSATLEQAVNSATSRGVLVVAASGNSGAGSISYPARYANAMAVGATDQNNNRASFSQYGAGLDIVAPGVNVQSTYPGSTYASLNGTSMATPHVAGAAALVKQKNPSWSNVQIRNHLKNTATSLGSTNLYGSGLVNAEAATR

SEQ ID NO: 51379 - protein, 274 aa, Unidentified
AQSVPWGISRVQAPAAHNRGLTGSGVKVAVLDTGISTHPDLNIRGGASFVPGEPSTQDGNGHGTHVAGTIAALNNSIGVLGVAPSAELYAVKVLGAGGGGXSGSGSVSSIAQGLEWAGNNGMHVANLSLGSPSPSATLEQAVNSATSRGVLVVAASGNSGAGSISYPARYANAMAVGATDQNNNRASFSQYGAGLDIVAPGVNVQSTYPGSTYASLNGTSMATPHVAGAAALVKQKNPSWSNVQIRNHLKNTATSLGSTNLYGSGLVNAEAATR

SEQ ID NO: 51380 - protein, 271 aa, Bacteria
AQSVPWGISRVQAPAAHNRGLTGSGVKVAVLDTGISTHPDLNIRGGASFVPGEPSTQDGNGHGTHVAGTIAALNNSIGVLGVAPSAELYAVKVLGASSGGSGSVSSIAQGLEWAGNNGMHVANLSLGSPSPSATLEQAVNSATSRGVLVVAASGNSGAGSISYPARYANAMAVGATDQNNNRASFSQYGAGLDIVAPGVNVQSTYPGSTYASLNGTSMATPHVAGAAALVKQKNPSWSNVQIRNHLKNTATSLGSTNLYGSGLVNAEAATR

SEQ ID NO: 51381 - protein, 270 aa, Unidentified
AQSVPWGISRVQAPAAHNRGLTGSGVKVAVLDTGISTHPDLNIRGGASFVPGEPSTQDGNGHGTHVAGTIAALNNSIGVLGVAPSAELYAVKVLGASGSGSVSSIAQGLEWAGNNGMHVANLSLGSPSPSATLEQAVNSATSRGVLVVAASGNSGAGSISXYPARYANAMAVGATDQNNNRASFSQYGAGLDIVAPGVNVQSTYPGSTYASLNGTSMATPHVAGAAALVKQKNPSWSNVQIRNHLKNTATSLGSTNLYGSGLVNAEAATR

SEQ ID NO: 51382 - protein, 270 aa, Unidentified
AQSVPWGISRVQAPAAHNRGLTGSGVKVAVLDTGISTHPDLNIRGGASFVPGEPSTQDGNGHGTHVAGTIAALNNSIGVLGVAPSAELYAVKVLGASGXSGSVSSIAQGLEWAGNNGMHVANLSLGSPSPSATLEQAVNSATSRGVLVVAASGNSGAGSISYPARYANAMAVGATDQNNNRASFSQYGAGLDIVAPGVNVQSTYPGSTYASLNGTSMATPHVAGAAALVKQKNPSWSNVQIRNHLKNTATSLGSTNLYGSGLVNAEAATR

SEQ ID NO: 51383 - protein, 270 aa, Unidentified
AQSVPWGISRVQAPAAHNRGLTGSGVKVAVLDTGISTHPDLNIRGGASFVPGEPSTQDGNGHGTHVAGTIAALNNSIGVLGVAPSAELYAVKVLGAXSGSGSVSSIAQGLEWAGNNGMHVANLSLGSPSPSATLEQAVNSATSRGVLVVAASGNSGAGSISYPARYANAMAVGATDQNNNRASFSQYGAGLDIVAPGVNVQSTYPGSTYASLNGTSMATPHVAGAAALVKQKNPSWSNVQIRNHLKNTATSLGSTNLYGSGLVNAEAATR

SEQ ID NO: 51384 - protein, 270 aa, Unidentified
AQSVPWGISRVQAPAAHNRGLTGSGVKVAVLDTGISTHPDLNIRGGASFVPGEPSTQDGNGHGTHVAGTIAALNNSIGVLGVAPSAELYAVKVLGASGSGSVSSIAQGLEWAGNNGMHVANLSLXGSPSPSATLEQAVNSATSRGVLVVAASGNSGAGSISYPARYANAMAVGATDQNNNRASFSQYGAGLDIVAPGVNVQSTYPGSTYASLNGTSMATPHVAGAAALVKQKNPSWSNVQIRNHLKNTATSLGSTNLYGSGLVNAEAATR

SEQ ID NO: 51385 - protein, 270 aa, Unidentified
AQSVPWGISRVQAPAAHNRGLTGSGVKVAVLDTGISTHPDLNIRGGASFVPGEPSTQDGNGHGTHVAGTIAALNNSIGVLGVAPSAELYAVKVLGASGSGSVSSIAQGLEWAGNNGMHVANLSLGSPSXPSATLEQAVNSATSRGVLVVAASGNSGAGSISYPARYANAMAVGATDQNNNRASFSQYGAGLDIVAPGVNVQSTYPGSTYASLNGTSMATPHVAGAAALVKQKNPSWSNVQIRNHLKNTATSLGSTNLYGSGLVNAEAATR

SEQ ID NO: 51386 - protein, 270 aa, Unidentified
AQSVPWGISRVQAPAAHNRGLTGSGVKVAVLDTGISTHPDLNIRGGASFVPGEPSTQDGNGHGTHVAGTIAALNNSIGVLGVAPSAELYAVKVLGASGSGSCVSSIAQGLEWAGNNGMHVANLSLGSPSPSATLEQAVNSATSRGVLVVAASGNSGAGSISYPARYANAMAVGATDQNNNRASFSQYGAGLDIVAPGVNVQSTYPGSTYASLNGTSMATPHVAGAAALVKQKNPSWSNVQIRNHLKNTATSLGSTNLYGSGLVNAEAATR

SEQ ID NO: 51387 - protein, 270 aa, Unidentified
AQSVPWGISRVQAPAAHNRGLTGSGVKVAVLDTGISTHPDLNIRGGASFVPGEPSTQDGNGHGTHVAGTIAALNNSIGVLGVAPSAELYAVKVLGASGSGSLVSSIAQGLEWAGNNGMHVANLSLGSPSPSATLEQAVNSATSRGVLVVAASGNSGAGSISYPARYANAMAVGATDQNNNRASFSQYGAGLDIVAPGVNVQSTYPGSTYASLNGTSMATPHVAGAAALVKQKNPSWSNVQIRNHLKNTATSLGSTNLYGSGLVNAEAATR

SEQ ID NO: 51388 - protein, 270 aa, Unidentified
AQSVPWGISRVQAPAAHNRGLTGSGVKVAVLDTGISTHPDLNIRGGASFVPGEPSTQDGNGHGTHVAGTIAALNNSIGVLGVAPSAELYAVKVLGASGSGSTVSSIAQGLEWAGNNGMHVANLSLGSPSPSATLEQAVNSATSRGVLVVAASGNSGAGSISYPARYANAMAVGATDQNNNRASFSQYGAGLDIVAPGVNVQSTYPGSTYASLNGTSMATPHVAGAAALVKQKNPSWSNVQIRNHLKNTATSLGSTNLYGSGLVNAEAATR

SEQ ID NO: 51389 - protein, 270 aa, Unidentified
AQSVPWGISRVQAPAAHNRGLTGSGVKVAVLDTGISTHPDLNIRGGASFVPGEPSTQDGNGHGTHVAGTIAALNNSIGVLGVAPSAELYAVKVLGASGSGXSVSSIAQGLEWAGNNGMHVANLSLGSPSPSATLEQAVNSATSRGVLVVAASGNSGAGSISYPARYANAMAVGATDQNNNRASFSQYGAGLDIVAPGVNVQSTYPGSTYASLNGTSMATPHVAGAAALVKQKNPSWSNVQIRNHLKNTATSLGSTNLYGSGLVNAEAATR

SEQ ID NO: 51390 - protein, 270 aa, Unidentified
AQSVPWGISRVQAPAAHNRGLTGSGVKVAVLDTGISTHPDLNIRGGASFVPGEPSTQDGNGHGTHVAGTIAALNNSIGVLGVAPSAELYAVKVLGASGSGSVSSIAQGLEWAGNNGMHVANLSXLGSPSPSATLEQAVNSATSRGVLVVAASGNSGAGSISYPARYANAMAVGATDQNNNRASFSQYGAGLDIVAPGVNVQSTYPGSTYASLNGTSMATPHVAGAAALVKQKNPSWSNVQIRNHLKNTATSLGSTNLYGSGLVNAEAATR

SEQ ID NO: 51391 - protein, 270 aa, Unidentified
AQSVPWGISRVQAPAAHNRGLTGSGVKVAVLDTGISTHPDLNIRGGASFVPGEPSXTQDGNGHGTHVAGTIAALNNSIGVLGVAPSAELYAVKVLGASGSGSVSSIAQGLEWAGNNGMHVANLSLGSPSPSATLEQAVNSATSRGVLVVAASGNSGAGSISYPARYANAMAVGATDQNNNRASFSQYGAGLDIVAPGVNVQSTYPGSTYASLNGTSMATPHVAGAAALVKQKNPSWSNVQIRNHLKNTATSLGSTNLYGSGLVNAEAATR

SEQ ID NO: 51392 - protein, 270 aa, Unidentified
AQSVPWGISRVQAPAAHNRGLTGSGVKVAVLDTGISTHPDLNIRGGASFVPGEPSTQDGNGHGTHVAGTIAALNNSIGVLGVAPSAELYAVKVLGASGSXGSVSSIAQGLEWAGNNGMHVANLSLGSPSPSATLEQAVNSATSRGVLVVAASGNSGAGSISYPARYANAMAVGATDQNNNRASFSQYGAGLDIVAPGVNVQSTYPGSTYASLNGTSMATPHVAGAAALVKQKNPSWSNVQIRNHLKNTATSLGSTNLYGSGLVNAEAATR

SEQ ID NO: 51393 - protein, 270 aa, Unidentified
AQSVPWGISRVQAPAAHNRGLTGSGVKVAVLDTGISTHPDLNIRGGASFVPGEPSTQDGNGHGTHVAGTIAALNNSIGVLGVAPSAELYAVKVLGASGSGSVSSIAQGLEWAGNNGMHVANLSLGSPSPSATLEQAVNSATSRGVLVVAASGNSGAGSIXSYPARYANAMAVGATDQNNNRASFSQYGAGLDIVAPGVNVQSTYPGSTYASLNGTSMATPHVAGAAALVKQKNPSWSNVQIRNHLKNTATSLGSTNLYGSGLVNAEAATR

SEQ ID NO: 51394 - protein, 270 aa, Unidentified
AQSVPWGISRVQAPAAHNRGLTGSGVKVAVLDTGISTHPDLNIRGGASFVPGEPSTQDGNGHGTHVAGTIAALNNSIGVLGVAPSAELYAVKVLGASGSGSVVSSIAQGLEWAGNNGMHVANLSLGSPSPSATLEQAVNSATSRGVLVVAASGNSGAGSISYPARYANAMAVGATDQNNNRASFSQYGAGLDIVAPGVNVQSTYPGSTYASLNGTSMATPHVAGAAALVKQKNPSWSNVQIRNHLKNTATSLGSTNLYGSGLVNAEAATR

SEQ ID NO: 51395 - protein, 269 aa, Unidentified
AQSVPWGISRVQAPAAHNRGLTGSGVKVAVLDTGISTHPDLNIRGGASFVPGEPSTQDGEGHGTHVAGTIAALNNSIGVLGVAPSAELYAVKVLGASGSGSVSSIAQGLEWAGNNGMHVANLSLGSPSPSATLEQAVNSATSRGVLVVAASGNSGAGSISYPARYANAMAVGATDQNNNRASFSQYGAGLDIVAPGVNVQSTYPGSTYASLNGTSSATPHVAGAAALVKQKNPSWSNVQIRNHLKNTATSLGSTNLYGSGLVNAEAATR

SEQ ID NO: 51396 - protein, 274 aa, Unidentified
AQSVPWGISRVQAPAAHNRGLTGSGVKVAVLDTGISTHPDLNIRGGASFVPGEPSTQDGNGHGTHVAGTIAALNNSIGVLGVAPSAELYAVKVLGASGTGXSGSGSVSSIAQGLEWAGNNGMHVANLSLGSPSPSATLEQAVNSATSRGVLVVAASGNSGAGSISYPARYANAMAVGATDQNNNRASFSQYGAGLDIVAPGVNVQSTYPGSTYASLNGTSMATPHVAGAAALVKQKNPSWSNVQIRNHLKNTATSLGSTNLYGSGLVNAEAATR

SEQ ID NO: 51397 - protein, 270 aa, Unidentified
AQSVPWGISRVQAPAAHNRGLTGSGVKVAVLDTGISTHPDLNIRGGASFVPGEPSTQDGNGHGTHVAGTIAALNNSIGVLGVAPSAELYAVKVLGASGSGSVSSIAQGLEWAGNNGMHVANLSLGSPSPSATLEQAVNSATSRGVLVVAASGNSGAGSISYPARYANAMAVGATDQNNNRASFSQYGAXGLDIVAPGVNVQSTYPGSTYASLNGTSMATPHVAGAAALVKQKNPSWSNVQIRNHLKNTATSLGSTNLYGSGLVNAEAATR

SEQ ID NO: 51398 - protein, 274 aa, Unidentified
AQSVPWGISRVQAPAAHNRGLTGSGVKVAVLDTGISTHPDLNIRGGASFVPGEPSTQDGNGHGTHVAGTIAALNNSIGVLGVAPSAELYAVKVLGAGSGGXSGSGSVSSIAQGLEWAGNNGMHVANLSLGSPSPSATLEQAVNSATSRGVLVVAASGNSGAGSISYPARYANAMAVGATDQNNNRASFSQYGAGLDIVAPGVNVQSTYPGSTYASLNGTSMATPHVAGAAALVKQKNPSWSNVQIRNHLKNTATSLGSTNLYGSGLVNAEAATR

SEQ ID NO: 51399 - protein, 270 aa, Unidentified
AQSVPWGISRVQAPAAHNRGLTGSGVKVAVLDTGISTHPDLNIRGGASFVPGEPSTQDGNGHGTHVAGTIAALNNSIGVLGVAPSAELYAVKVLGASGSGSYVSSIAQGLEWAGNNGMHVANLSLGSPSPSATLEQAVNSATSRGVLVVAASGNSGAGSISYPARYANAMAVGATDQNNNRASFSQYGAGLDIVAPGVNVQSTYPGSTYASLNGTSMATPHVAGAAALVKQKNPSWSNVQIRNHLKNTATSLGSTNLYGSGLVNAEAATR

SEQ ID NO: 51400 - protein, 270 aa, Unidentified
AQSVPWGISRVQAPAAHNRGLTGSGVKVAVLDTGISTHPDLNIRGGASFVPGEPSTQDGNGHGTHVAGTIAALNNSIGVLGVAPSAELYAVKVLGASGSGSAVSSIAQGLEWAGNNGMHVANLSLGSPSPSATLEQAVNSATSRGVLVVAASGNSGAGSISYPARYANAMAVGATDQNNNRASFSQYGAGLDIVAPGVNVQSTYPGSTYASLNGTSMATPHVAGAAALVKQKNPSWSNVQIRNHLKNTATSLGSTNLYGSGLVNAEAATR

SEQ ID NO: 51401 - protein, 269 aa, Bacillus licheniformis
AQTVPYGIPLIKADKVQAQGFKGANVKVAVLDTGIQASHPDLNVVGGASFVAGEAYNTDGNGHGTHVAGTVAALDNTTGVLGVAPSVSLYAVKVLNSSGSGSYSGIVSGIEWATTNGMDVINMSLGGASGSTAMKQAVDNAYAKGVVVVAAAGNSGSSGNTNTIGYPAKYDSVIAVGAVDSNSNRASFSSVGAELEVMAPGAGVYSTYPTNTYATLNGTSMASPHVAGAAALILSKHPNLSASQVRNRLSSTATYLGSSFYYGKGLINV

SEQ ID NO: 51402 - protein, 268 aa, Unidentified
AQSVPWGISRVQAPAAHNRLTGSGVKVAVLDTGISTHPDLNIRGGASFVPGEPSTQDGNGHGTHVAGTIAALNNSIGVLGVAPSAELYAVKVLGASGSGSVSSIAQGLEWAGNNGMHVANLSLGSPSPSATLEQAVNSATSRGVLVVAASGNSGAGSISYPARYANAMAVGATDQNNNRASFSQYGAGLDIVAPGVNVQSTYPGSTYASLNGTSMATPHVAGAAALVKQKNPSWSNVQIRNHLKNTATSLGSTNLYGSGLVNAEAATR

SEQ ID NO: 51403 - protein, 268 aa, Bacillus lentus
AQSVPWGISRVQAPAAHNRGLTGSGVKVAVLDTGISTHPDLNIRGGASFVPGEPSTQDGNGHGTHVAGTIAALNNSIGVLGVAPSAELYAVKVLGASGSGSVSSIAQGLEWAGNNGMHVANLSLGSPSSATLEQAVNSATSRGVLVVAASGNSGAGSISYPARYANAMAVGATDQNNNRASFSQYGAGLDIVAPGVNVQSTYPGSTYASLNGTSMATPHVAGAAALVKQKNPSWSNVQIRNHLKNTATSLGSTNLYGSGLVNAEAATR

SEQ ID NO: 51404 - protein, 268 aa, Lederbergia lenta
AQSVPWGISRVQAPAAHNRGLTGSVKVAVLDTGISTHPDLNIRGGASFVPGEPSTQDGNGHGTHVAGTIAALNNSIGVLGVAPSAELYAVKVLGASGSGSVSSIAQGLEWAGNNGMHVANLSLGSPSPSATLEQAVNSATSRGVLVVAASGNSGAGSISYPARYANAMAVGATDQNNNRASFSQYGAGLDIVAPGVNVQSTYPGSTYASLNGTSMATPHVAGAAALVKQKNPSWSNVQIRNHLKNTATSLGSTNLYGSGLVNAEAATR

SEQ ID NO: 51405 - protein, 268 aa, unidentified
AQSVPWGISRVQAPAAHNRGLTGSGVKVAVLDTGISTHPDLNIRGGASFVPGEPSTQDGNGHGTHVAGTIAALNNSIGVLGVAPSAELYAVKVLGASGSGSVSSIAQGLEWAGNNGMHVANLSLGSPSPSATLEQAVNSATSRGVLVVAASGNSGAGSISYPARYANAMAVGATDQNNNRASFSQYGAGLDIVAPGVNQSTYPGSTYASLNGTSMATPHVAGAAALVKQKNPSWSNVQIRNHLKNTATSLGSTNLYGSGLVNAEAATR

SEQ ID NO: 51406 - protein, 268 aa, Unidentified
AQSVPWGISRVQAPAAHNRGLTGSGVKVAVLDTGISTHPDLNIRGGASFVPGEPSTQDGNGHGTHVAGTIAALNNSIGVLGVAPSAELYAVKVLGASGSGSVSSIAQGLEWAGNNGMHVANLSLGSPSPSATLEQAVNSATSRGVLVVAASGNSGAGSISYPARYANAMAVGATDQNNNRASFSQYGAGLDIVAPGVNVQSTYPGSTYASNGTSMATPHVAGAAALVKQKNPSWSNVQIRNHLKNTATSLGSTNLYGSGLVNAEAATR

SEQ ID NO: 51407 - protein, 268 aa, Synthetic construct
AQSVPWGISRVQAPAAHNRGLTGSGVKVAVLDTGISTHPDLNIRGGASFVPGEPSTQDGNGHGTHVAGTIAALNNSIGVLGVAPSAELYAVKVLGASGSGSVSSIAQGLEWAGNNGMHVANLSLGSPSPSATLEQAVNSATSRGVLVVAASGNSGASISYPARYANAMAVGATDQNNNRASFSQYGAGLDIVAPGVNVQSTYPGSTYASLNGTSMATPHVAGAAALVKQKNPSWSNVQIRNHLKNTATSLGSTNLYGSGLVNAEAATR

SEQ ID NO: 51408 - protein, 268 aa, Unidentified
QSVPWGISRVQAPAAHNRGLTGSGVKVAVLDTGISTHPDLNIRGGASFVPGEPSTQDGNGHGTHVAGTIAALNNSIGVLGVAPSAELYAVKVLGASGSGSVSSIAQGLEWAGNNGMHVANLSLGSPSPSATLEQAVNSATSRGVLVVAASGNSGAGSISYPARYANAMAVGATDQNNNRASFSQYGAGLDIVAPGVNVQSTYPGSTYASLNGTSMATPHVAGAAALVKQKNPSWSNVQIRNHLKNTATSLGSTNLYGSGLVNAEAATR

SEQ ID NO: 51409 - protein, 268 aa, Unidentified
AQSVPWGISRVQAPAAHNRGLTGSGVKVAVLDTGISTHPDLNIRGGASFVPGEPSTQDGNGHGTHVAGTIAALNNSIGVLGVAPSAELYAVKVLGASGSGSVSSIAQGLEWAGNNGMHVANLSLGSPSPSATLEQAVNSATSRGVLVVAASGNSGAGSISYPARYANAMAVGATDQNNNRASFSQYGAGLDIVAPGVNVQSTYPGSTYASLNGTSMATPHVAGAAALVKQKNPSWSNVQIRNHLKNTATSLGSTNLYGSGLVNAEAAT

SEQ ID NO: 51410 - protein, 267 aa, Unidentified
AQSVPWGISRVQAPAAHNRGLTGSGVKVAVLDTGISTHPDLNIRGGASFVPGEPSTQDGNGHGTHVAGTIAALNNSIGVLGVAPSAELYAVKVLGASGSVSSIAQGLEWAGNNGMHVANLSLGSPSPSATLEQAVNSATSRGVLVVAASGNSGAGSISYPARYANAMAVGATDQNNNRASFSQYGAGLDIVAPGVNVQSTYPGSTYASLNGTSMATPHVAGAAALVKQKNPSWSNVQIRNHLKNTATSLGSTNLYGSGLVNAEAATR

SEQ ID NO: 51411 - protein, 267 aa, Unidentified
AQSVPWGISRVQAPAHNRGLTGSGVKVAVLDTGISTHPDLNIRGGASFVPGEPSTQDGNGHGTHVAGTIAALNNSIGVLGVAPSAELYAVKVLGASGSGSVSSIAQGLEWAGNNGMHVANLSLGSPSPSATLEQAVNSATSRGVVVAASGNSGAGSISYPARYANAMAVGATDQNNNRASFSQYGAGLDIVAPGVNVQSTYPGSTYASLNGTSMATPHVAGAAALVKQKNPSWSNVQIRNHLKNTATSLGSTNLYGSGLVNAEAATR

SEQ ID NO: 51412 - protein, 267 aa, Unidentified
SVPWGISRVQAPAAHNRGLTGSGVKVAVLDTGISTHPDLNIRGGASFVPGEPSTQDGNGHGTHVAGTIAALNNSIGVLGVAPSAELYAVKVLGASGSGSVSSIAQGLEWAGNNGMHVANLSLGSPSPSATLEQAVNSATSRGVLVVAASGNSGAGSISYPARYANAMAVGATDQNNNRASFSQYGAGLDIVAPGVNVQSTYPGSTYASLNGTSMATPHVAGAAALVKQKNPSWSNVQIRNHLKNTATSLGSTNLYGSGLVNAEAATR

SEQ ID NO: 51413 - protein, 267 aa, Bacillus licheniformis
AEEAKEKYLIGFNEQEAVSEFVEQVEANDEVAILSEEEEVEIELLHEFETIPVLSVELSPEDVDALELDPAISYIEEDAEVTTMAQSVPWGISRVQAPAAHNRGLTGSGVKVAVLDTGISTHPDLNIRGGASFVPGEPSTQDGNGHGTHVAGTIAALNNSIGVLGVAPSAELYAVKVLGASGSGSVSSIAQGLEWAGNNGMHVANLSLGSPSPSATLEQAVNSATSRGVLVVAASGNSGAGSISYPARYANAMAVGATDQNNNRACF

SEQ ID NO: 51414 - protein, 265 aa, Unidentified
QSVPWGISRVQAPAAHNRGLTGSGVKVAVLDTGISTHPLNIRGGASFVPGEPSTQDGNGHGTHVAGTIAALNNSIGLGVAPSAELYAVKVLGASGSGSVSSIAQGLEWAGNNGMHANLSLGSPSPSATLEQAVNSATSRGVLVVAASGNSGAGSISYPARYANAMAVGATDQNNNRASFSQYGAGLDIVAPGVNVQSTYPGSTYASLNGTSMATPHVAGAAALVKQKNPSWSNVQIRNHLKNTATSLGSTNLYGSGLVNAEAATR

SEQ ID NO: 51415 - protein, 250 aa, Unidentified
GLTGSGVKVAVLDTGISTHPDLNIRGGASFVPGEPSTQDGNGHGTHVAGTIAALNNSIGVLGVAPSAELYAVKVLGASGSGSVSSIAQGLEWAGNNGMHVANLSLGSPSPSATLEQAVNSATSRGVLVVAASGNSGAGSISYPARYANAMAVGATDQNNNRASFSQYGAGLDIVAPGVNVQSTYPGSTYASLNGTSMATPHVAGAAALVKQKNPSWSNVQIRNHLKNTATSLGSTNLYGSGLVNAEAATR

SEQ ID NO: 51416 - protein, 250 aa, Unidentified
LTGQSGVKVAVLDTGISTHPDLNIRGGASFVPGEPSTQDGNGHGTHVAGTIAALNNSIGVLGVAPSAELYAVKVLGASGSGSVSSIAQGLEWAGNNGMHVANLSLGSPSPSATLEQAVNSATSRGVLVVAASGNSGAGSISYPARYANAMAVGATDQNNNRASFSQYGAGLDIVAPGVNVQSTYPGSTYASLNGTSMATPHVAGAAALVKQKNPSWSNVQIRNHLKNTATSLGSTNLYGSGLVNAEAATR

SEQ ID NO: 51417 - protein, 250 aa, Unidentified
LTGNSGVKVAVLDTGISTHPDLNIRGGASFVPGEPSTQDGNGHGTHVAGTIAALNNSIGVLGVAPSAELYAVKVLGASGSGSVSSIAQGLEWAGNNGMHVANLSLGSPSPSATLEQAVNSATSRGVLVVAASGNSGAGSISYPARYANAMAVGATDQNNNRASFSQYGAGLDIVAPGVNVQSTYPGSTYASLNGTSMATPHVAGAAALVKQKNPSWSNVQIRNHLKNTATSLGSTNLYGSGLVNAEAATR

SEQ ID NO: 51418 - protein, 249 aa, Unidentified
AHNSGVKVAVLDTGISTHPDLNIRGGASFVPGEPSTQDGNGHGTHVAGTIAALNNSIGVLGVAPSAELYAVKVLGASGSGSVSSIAQGLEWAGNNGMHVANLSLGSPSPSATLEQAVNSATSRGVLVVAASGNSGAGSISYPARYANAMAVGATDQNNNRASFSQYGAGLDIVAPGVNVQSTYPGSTYASLNGTSMATPHVAGAAALVKQKNPSWSNVQIRNHLKNTATSLGSTNLYGSGLVNAEAATR

SEQ ID NO: 51419 - protein, 249 aa, Unidentified
TGNSGVKVAVLDTGISTHPDLNIRGGASFVPGEPSTQDGNGHGTHVAGTIAALNNSIGVLGVAPSAELYAVKVLGASGSGSVSSIAQGLEWAGNNGMHVANLSLGSPSPSATLEQAVNSATSRGVLVVAASGNSGAGSISYPARYANAMAVGATDQNNNRASFSQYGAGLDIVAPGVNVQSTYPGSTYASLNGTSMATPHVAGAAALVKQKNPSWSNVQIRNHLKNTATSLGSTNLYGSGLVNAEAATR

SEQ ID NO: 51420 - protein, 249 aa, Unidentified
TGQSGVKVAVLDTGISTHPDLNIRGGASFVPGEPSTQDGNGHGTHVAGTIAALNNSIGVLGVAPSAELYAVKVLGASGSGSVSSIAQGLEWAGNNGMHVANLSLGSPSPSATLEQAVNSATSRGVLVVAASGNSGAGSISYPARYANAMAVGATDQNNNRASFSQYGAGLDIVAPGVNVQSTYPGSTYASLNGTSMATPHVAGAAALVKQKNPSWSNVQIRNHLKNTATSLGSTNLYGSGLVNAEAATR

SEQ ID NO: 51421 - protein, 246 aa, Thermus thermophilus
SGVKVAVLDTGISTHPDLNIRGGASFVPGEPSTQDGNGHGTHVAGTIAALNNSIGVLGVAPSAELYAVKVLGASGSGSVSSIAQGLEWAGNNGMHVANLSLGSPSPSATLEQAVNSATSRGVLVVAASGNSGAGSISYPARYANAMAVGATDQNNNRASFSQYGAGLDIVAPGVNVQSTYPGSTYASLNGTSMATPHVAGAAALVKQKNPSWSNVQIRNHLKNTATSLGSTNLYGSGLVNAEAATR

SEQ ID NO: 51422 - protein, 235 aa, Unidentified
AQSVPWGISRVQAPAAHNRGLTGSGVKVAVLDTGISTHPDLNIRGGASFVPGEPSTQDGNGHGTHVAGTIAALNNSIGVLGVAPSAELYAVKVLGASGSGSVSSIAQGLEWAGNNGMHVANLSLGSPSPSATLEQAVNSATSRGVLVVAASGNSGAGSISYPARYANAMAVGATDQNNNRASFSQYGAGLDIVAPGVNVQSTYPGSTYASLNGTSMATPHVAGAAALVKQKNPSW

SEQ ID NO: 51423 - protein, 217 aa, Unidentified
AQSVPWGISRVQAPAAHNRGLTGSGVKVAVLDTGISTHPDLNIRGGASFVPGEPSTQDGNGHGTHVAGTIAALNNSIGVLGVAPSAELYAVKVLGASGSGSVSSIAQGLEWAGNNGMHVANLSLGSPSPSATLEQAVNSATSRGVLVVAASGNSGAGSISYPARYANAMAVGATDQNNNRASFSQYGAGLDIVAPGVNVQSTYPGSTYASLNGTSMA

SEQ ID NO: 51424 - protein, 215 aa, Unidentified
STQDGNGHGTHVAGTIAALNNSIGVLGVAPSAELYAVKVLGASGSGSVSSIAQGLEWAGNNGMHVANLSLGSPSPSATLEQAVNSATSRGVLVVAASGNSGAGSISYPARYANAMAVGATDQNNNRASFSQYGAGLDIVAPGVNVQSTYPGSTYASLNGTSMATPHVAGAAALVKQKNPSWSNVQIRNHLKNTATSLGSTNLYGSGLVNAEAATR

SEQ ID NO: 51425 - protein, 209 aa, Unidentified
AQSVPWGISRVQAPAAHNRGLTGSGVKVAVLDTGISTHPDLNIRGGASFVPGEPSTQDGNGHGTHVAGTIAALNNSIGVLGVAPSAELYAVKVLGASGSGSVSSIAQGLEWAGNNGMHVANLSLGSPSPSATLEQAVNSATSRGVLVVAASGNSGAGSISYPARYANAMAVGATDQNNNRASFSQYGAGLDIVAPGVNVQSTYPGCLTY

SEQ ID NO: 51426 - protein, 206 aa, Unidentified
AQSVPWGISRVQAPAAHNRGLTGSGVKVAVLDTGISTHPDLNIRGGASFVPGEPSTQDGNGHGTHVAGTIAALNNSIGVLGVAPSAELYAVKVLGASGSGSVSSIAQGLEWAGNNGMHVANLSLGSPSPSATLEQAVNSATSRGVLVVAASGNSGAGSISYPARYANAMAVGATDQNNNRASFSQYGAGLDIVAPGVNVQSTYPGA

SEQ ID NO: 51427 - protein, 183 aa, Bacillus licheniformis
AQSVPWGISRVQAPAAHNRGLTGSGVKVAVLDTGISTHPDLNIRGGASFVPGEPSTQDGNGHGTHVAGTIAALNNSIGVLGVAPSAELYAVKVLGASGSGSVSSIAQGLEWAGNNGMHVANLSLGSPSPSATLEQAVNSATSRGVLVVAASGNSGAGSISYPARYANAMAVGATDQNNNRACF

SEQ ID NO: 51428 - protein, 353 aa, Unidentified
AEEAKEKYLIGFNEQEAVSEFVEQVEANDEVAILSEEEEVEIELLHEFETIPVLSVELSPEDVDALELDPAISYIEEDAEVTTMAQSVPWGISRVQAPAAHNRGLTGSGVKVAVLDTGISTHPDLNIRGGASFVPGEPSTQDGNGHGTHVAGTIAALNNSIGVLGVAPNAELYAVKVLGASGSGSVSSIAQGLEWAGNNGMHVANLSLGSPSPSATLEQAVNSATSRGVLVVAASGNSGAGSISYPARYANAMAVGATDQNNNRASFSQYGAGLDIVAPGVNVQSTYPGSTYASLNGTSMATPHVAGAAALVKQKNPSWSNVQIRNHLKNTATSLGSTNLYGSGLVNAEAATR

SEQ ID NO: 51429 - protein, 353 aa, Unidentified
AEEAKEKYLIGFNEQEAVSEFVEQVEANDEVAILSEEEEVEIELLHEFETIPVLSVELSPEDVDALELDPAISYIEEDAEVTTMAQSVPWGISRVQAPAAHNRGLTGSGVKVAVLDTGISTHPDLNIRGGASFVPGEPSTQDGNGAGTHVAGTIAALNNSIGVLGVAPSAELYAVKVLGASGSGSVSSIAQGLEWAGNNGMHVANLSLGSPSPSATLEQAVNSATSRGVLVVAASGNSGAGSISYPARYANAMAVGATDQNNNRASFSQYGAGLDIVAPGVNVQSTYPGSTYASLNGTSMATPHVAGAAALVKQKNPSWSNVQIRNHLKNTATSLGSTNLYGSGLVNAEAATR

SEQ ID NO: 51430 - protein, 301 aa, Unidentified
AEEAKEKYLIGFNEQEAVSEFVEQVEANDEVAILSEEEEVEIELLHEFETIPVLSVELSPEDVDALELDPAISYIEEDAEVTTMAQSVPWGISRVQAPAAHNRGLTGSGVKVAVLDTGISTHPDLNIRGGASFVPGEPSTQDGNGHGTHVAGTIAALNNSIGVLGVAPSAELYAVKVLGASGSGSVSSIAQGLEWAGNNGMHVANLSLGSPSPSATLEQAVNSATSRGVLVVAASGNSGAGSISYPARYANAMAVGATDQNNNRASFSQYGAGLDIVAPGVNVQSTYPGSTYASLNGTAFA

SEQ ID NO: 51431 - protein, 293 aa, Unidentified
AEEAKEKYLIGFNEQEAVSEFVEQVEANDEVAILSEEEEVEIELLHEFETIPVLSVELSPEDVDALELDPAISYIEEDAEVTTMAQSVPWGISRVQAPAAHNRGLTGSGVKVAVLDTGISTHPDLNIRGGASFVPGEPSTQDGNGHGTHVAGTIAALNNSIGVLGVAPSAELYAVKVLGASGSGSVSSIAQGLEWAGNNGMHVANLSLGSPSPSATLEQAVNSATSRGVLVVAASGNSGAGSISYPARYANAMAVGATDQNNNRASFSQYGAGLDIVAPGVNVQSTYPGSVSA

SEQ ID NO: 51432 - protein, 293 aa, Unidentified
AEEAKEKYLIGFNEQEAVSEFVEQVEANDEVAILSEEEEVEIELLHEFETIPVLSVELSPEDVDALELDPAISYIEEDAEVTTMAQSVPWGISRVQAPAAHNRGLTGSGVKVAVLDTGISTHPDLNIRGGASFVPGEPSTQDGNGHGTHVAGTIAALNNSIGVLGVAPSAELYAVKVLGASGSGSVSSIAQGLEWAGNNGMHVANLSLGSPSPSATLEQAVNSATSRGVLVVAASGNSGAGSISYPARYANAMAVGATDQNNNRASFSQYGAGLDIVAPGVNVQSTYPGSVAA

SEQ ID NO: 51433 - protein, 293 aa, Unidentified
AEEAKEKYLIGFNEQEAVSEFVEQVEANDEVAILSEEEEVEIELLHEFETIPVLSVELSPEDVDALELDPAISYIEEDAEVTTMAQSVPWGISRVQAPAAHNRGLTGSGVKVAVLDTGISTHPDLNIRGGASFVPGEPSTQDGNGHGTHVAGTIAALNNSIGVLGVAPSAELYAVKVLGASGSGSVSSIAQGLEWAGNNGMHVANLSLGSPSPSATLEQAVNSATSRGVLVVAASGNSGAGSISYPARYANAMAVGATDQNNNRASFSQYGAGLDIVAPGVNVQSTYPGSIEA

SEQ ID NO: 51434 - protein, 293 aa, Unidentified
AEEAKEKYLIGFNEQEAVSEFVEQVEANDEVAILSEEEEVEIELLHEFETIPVLSVELSPEDVDALELDPAISYIEEDAEVTTMAQSVPWGISRVQAPAAHNRGLTGSGVKVAVLDTGISTHPDLNIRGGASFVPGEPSTQDGNGHGTHVAGTIAALNNSIGVLGVAPSAELYAVKVLGASGSGSVSSIAQGLEWAGNNGMHVANLSLGSPSPSATLEQAVNSATSRGVLVVAASGNSGAGSISYPARYANAMAVGATDQNNNRASFSQYGAGLDIVAPGVNVQSTYPGSCLA

SEQ ID NO: 51435 - protein, 292 aa, Bacillus licheniformis
AEEAKEKYLIGFNEQEAVSEFVEQVEANDEVAILSEEEEVEIELLHEFETIPVLSVELSPEDVDALELDPAISYIEEDAEVTTMAQSVPWGISRVQAPAAHNRGLTGSGVKVAVLDTGISTHPDLNIRGGASFVPGEPSTQDGNGHGTHVAGTIAALNNSIGVLGVAPSAELYAVKVLGASGSGSVSSIAQGLEWAGNNGMHVANLSLGSPSPSATLEQAVNSATSRGVLVVAASGNSGAGSISYPARYANAMAVGATDQNNNRASFSQYGAGLDIVAPGVNVQSTYPGSCF

SEQ ID NO: 51436 - protein, 292 aa, Unidentified
AEEAKEKYLIGFNEQEAVSEFVEQVEANDEVAILSEEEEVEIELLHEFETIPVLSVELSPEDVDALELDPAISYIEEDAEVTTMAQSVPWGISRVQAPAAHNRGLTGSGVKVAVLDTGISTHPDLNIRGGASFVPGEPSTQDGNGHGTHVAGTIAALNNSIGVLGVAPSAELYAVKVLGASGSGSVSSIAQGLEWAGNNGMHVANLSLGSPSPSATLEQAVNSATSRGVLVVAASGNSGAGSISYPARYANAMAVGATDQNNNRASFSQYGAGLDIVAPGVNVQSTYPGALY

SEQ ID NO: 51437 - protein, 142 aa, Unidentified
SPSATLEQAVNSATSRGVLVVAASGNSGAGSISYPARYANAMAVGATDQNNNRASFSQYGAGLDIVAPGVNVQSTYPGSTYASLNGTSMATPHVAGAAALVKQKNPSWSNVQIRNHLKNTATSLGSTNLYGSGLVNAEAATR

SEQ ID NO: 51438 - protein, 138 aa, Unidentified
TLEQAVNSATSRGVLVVAASGNSGAGSISYPARYANAMAVGATDQNNNRASFSQYGAGLDIVAPGVNVQSTYPGSTYASLNGTSMATPHVAGAAALVKQKNPSWSNVQIRNHLKNTATSLGSTNLYGSGLVNAEAATR

SEQ ID NO: 51439 - protein, 274 aa, Bacillus licheniformis
AQTVPYGIPLIKADKVQAQGFKGANVKVAVLDTGIQASHPDLNVVGGASFVAGEAYNTDGNGHGTHVAGTVAALDNTTGVLGVAPSVSLYAVKVLNSSGSGSYSGIVSGIEWATTNGMDVINMSLGGPSGSTAMKQAVDNAYARGVVVVAAAGNSGSSGNTNTIGYPAKYDSVIAVGAVDSNSNRASFSSVGAELEVMAPGAGVYSTYPPNTYATLNGTSMASPHVAGAAALILSKHPNLSASQVRNRLSSTATYLGSSFYYGKGLINVEAAAQ

SEQ ID NO: 51440 - protein, 274 aa, Bacillus licheniformis
AQTVPYGIPLIKADKVQAQGFKGANVKVAVLDTGIQASHPDLNVVGGASFVAGEAYNTDGNGHGTHVAGTVAALDNHTGVLGVAPSVSLYAVKVLNSSGSGSYSGIVSGIEWATTNGMDVINMSLGGASGSTAMKQAVDNAYARGVVVVAAAGNSGSSGNTNTIQYPAKYDSVIAVGAVDSNSNRASFSSVGAELEVMAPGAGVYSTYPTNTYATLNGTSMASPHVAGAAALILSKHPNLSASQVRNRLSSTATYLGSSFYYGKGLINVEAAAQ

SEQ ID NO: 51441 - protein, 274 aa, Bacillus licheniformis WX-02
AQTVPYGIPLIKADKVQAQGFKGANVKVAVLDTGIQASHPDLNVVGGASFVAGEAYNTDGNGHGTHVAGTVAALDNTEGVLGVAPSVSLYAVKVLNSSGSGSYSGIVSGIEWATTNGMDVINMSLGGASGSTAMKQAVDNAYARGVVVVAAAGNSGSSGNTNTIGYPAKYDSVIAVGAVDSNSNRASFSSVGAELEVMAPGAGVYSTYPTNTYATLNGTSMASPHVAGAAALILSKHPNLSASQVRNRLSSTATYLGSSFYYGNGLINVEAAAQ

SEQ ID NO: 51442 - protein, 274 aa, Bacillus mojavensis
AQTVPYGIPLIKADKVQAQGFKGANVKVAVLDTGIQASHPDLNVVGGASFVAGEAYNTDGNGHGTHVAGTVAALDNTTGVLGVAPSVSLYAVKVLNSSGSGSYSGIVSGIEWATTNGMDVINMSLGGASGSTAMKQAVDNAYARGVVVVAAAGNSGSSGGTNTIGYPAKYDSVIAVGAVDSNSNRASFSSVGAELEVMAPGAGVYSTYPTNTYATLSGTSMASPHVAGAAALILSKHPNLSASQVRNRLSSTATYLGSSFYYGKGLINVEAAAQ

SEQ ID NO: 51443 - protein, 274 aa, Bacillus licheniformis WX-02
AQTVPYGIPLIKADKVQAQGFKGANVKVAVLDTGIQASHPDLNVVGGASFVAGEAYNTDGDGHGTHVAGTVAALDNTEGVLGVAPSVSLYAVKVLNSSGSGSYSGIVSGIEWATTNGMDVINMSLGGASGSTAMKQAVDNAYARGVVVVAAAGNSGSSGNTNTIGYPAKYDSVIAVGAVDSNSNRASFSSVGAELEVMAPGAGVYSTYPTNTYATLNGTSMASPHVAGAAALILSKHPNLSASQVRNRLSSTATYLGSSFYYGKGLINVEAAAQ

SEQ ID NO: 51444 - protein, 274 aa, Bacillus subtilis
AQTVPYGIPLIKADKVQAQGFKGANVKVAVLDTGIQASHPDLRVVGGASFVAGEAYNTDGNGHGTHVAGTVAALDNTTGVLGVAPSVSLYAVKVLNSSGSGSYSGIVSGIEWATTNGMDVINMSLGGASGSTAMKQAVDNAYARGVVVVAAAGNSGSSGNTNTIGYPAKYDSVIAVGAVDSNSNRASFSSVGAELEVMAPGAGVYSTYPTNTYATLNGTSMASPHVAGAAALILSKHPNLSASRVRNRLSSTATYLGSSFYYGKGLINVEAAAQ

SEQ ID NO: 51445 - protein, 274 aa, Bacillus licheniformis WX-02
AQTVPYGIPLIKADKVQAQGFKGANVKVAVLDTGIQASHPDLNVVGGASFVAGEAYNTDGNGHGTHVAGTVAALDNTEGVLGVAPSVSLYAVKVLNSSGSGSMSGIVSGIEWATTNGMDVINMSLGGASGSTAMKQAVDNAYARGVVVVAAAGNSGSSGNTNTIGYPAKYDSVIAVGAVDSNSNRASFSSVGAELEVMAPGAGVYSTYPTNTYATLNGTSMASPHVAGAAALILSKHPNLSASQVRNRLSSTATYLGSSFYYGKGLINVEAAAQ

SEQ ID NO: 51446 - protein, 274 aa, Bacillus licheniformis
AQTVPYGIPLIKADKVQAQGFKGANVKVAVLDTGIQASHPDLNVVGGASFVAGEAYNTDGNGHGTHVAGTVAALDNTTGVLGVAPSVSLYAVKVLNSSGSGSYSGIVSGIEWATTNGMDVINMSLGGASGSTAMKQAVDNAYAKGVVVVAAAGNSGSSGNTNTIGYPAKYDSVIAVGAVDSNGNRASFSSVGAELEVMAPGAGVYSTYPTNTYATLNGTSMASPHVAGAAALILSKHPNLSASQVRNRLSSTATYLGSSFYYGKGLINVEAAAQ

SEQ ID NO: 51447 - protein, 274 aa, Bacillus licheniformis
AQTVPYGIPLIKADKVQAQGFKGENVKVAVLDTGIQASHPDLNVVGGASFVAGEAYNTDGNGHGTHVAGTVAALDNTTGVLGVAPSVSLYAVKVLNSSGSGSYSGIVSGIEWATTNGMDVINMSLGGASGSTAMKQAVDNAYARGVVVVAAAGNSGPSGNTNTIGYPAKYDSVIAVGAVDSNSNRASFSSVGAELEVMAPGAGVYSTYPTNTYATLNGTSMASPHVAGAAALILSKHPNLSASQVRNRLSSTATYLGSSFYYGKGLINVEAAAQ

SEQ ID NO: 51448 - protein, 274 aa, Bacillus licheniformis
AQTVPYGIPLIKADKVQAQGFKGXNVKVAVLDTGIQASHPDLNVVGGASFVAGEAYNTDGNGHGTHVAGTVAALDNTTGVLGVAPSVSLYAVKVLNSSGSGSYSGIVSGIEWATTNGMDVINMSLGGASGSTAMKQAVDNAYARGVVVVAAAGNSGPSGNTNTIGYPAKYDSVIAVGAVDSNSNRASFSSVGAELEVMAPGAGVYSTYPTNTYATLNGTSMASPHVAGAAALILSKHPNLSASQVRNRLSSTATYLGSSFYYGKGLINVEAAAQ

SEQ ID NO: 51449 - protein, 274 aa, Bacillus licheniformis
AQTVPYGIPLIKADKVQAQGFKGANVKVAVLDTGIQASHPDLNVVGGASFVAGEAYNTDGNGHGTHVAGTVAALDNTTGVLGVAPSVSLYAVKVLNSSGSGSYSGIVSGIEWATTNGMDVINMSLGGASGSTAMKQAVDNAYARGVVVVAAAGNSGSSGNTNTIGYPAKYDSVIAVGAVDSNSNRASFSSVGAELEVMAPGAGVYSTYPTNTYATWDGTSMASPHVAGAAALILSKHPNLSASQVRNRLSSTATYLGSSFYYGKGLINVEAAAQ

SEQ ID NO: 51450 - protein, 274 aa, Bacillus mojavensis
AQTVPYGIPLIKADKVQAQGFKGANVKVAVLDTGIQASHPDLNVVGGASFVAGEAYNTDGNGHGTHVAGTVAALDNTTGVLGVAPSVLLYAVKVLNSSGSGSYSGIVSGIEWATTNGMDVINMSLGGASGSTAMKQAVDNAYARGVVVVAAAGNSGSSGNTNTIGYPAKYDSVIAVGAVDSNKNRASFSSVGAELEVMAPGAGVYSTYPTNTYATLNGTSMASPHVAGAAALILSKHPNLSASQVRNRLSSTATYLGSSFYYGKGLINVEAAAQ

SEQ ID NO: 51451 - protein, 274 aa, Bacillus licheniformis
AQTVPYGIPLIKADKVQAQGFKGANVKVAVLDTGIQASHEDLNVVGGASFVAGEAYNTDGNGHGTHVAGTVAALDNTTGVLGVAPSVSLYAVKVLNSSGSGSYSGIVSGIEWATTNGMDVINMSLGGASGSTAMKQAVDNAYARGVVVVAAAGNSGSSGNTNTIGYPAKYDSVIAVGAVDSNSNRASFSSVGAELEVMAPGAGVYSTYPTNTYATLSGTSMASPHVAGAAALILSKHPNLSASQVRNRLSSTATYLGSSFYYGKGLINVEAAAQ

SEQ ID NO: 51452 - protein, 274 aa, Bacillus licheniformis
AQTVPYGIPLIKADKVQAQGFKGANVKVAVLDTGIQASHPDLNVVGGASFVAGEAYNTDGNGHGTHVAGTVAALDNNTGVLGVAPSVSLYAVKVLNSSGSGSYSGIVSGIEWATTNGMDVINMSLGGASGSTAMKQAVDNAYARGVVVVAAAGNSGSSGNTNTIQYPAKYDSVIAVGAVDSNSNRASFSSVGAELEVMAPGAGVYSTYPTNTYATLNGTSMASPHVAGAAALILSKHPNLSASQVRNRLSSTATYLGSSFYYGKGLINVEAAAQ

SEQ ID NO: 51453 - protein, 274 aa, Bacillus licheniformis
AQTVPYGIPLIKADKVQAQGFKGANVKVAVLDTGIQASHPALNVVGGASFVAGEAYNTDGNGHGTHVAGTVAALDNTTGVLGVAPSVSLYAVKVLNSSGSGSYSGIVSGIEWATTNGMDVINMSLGGASGSTAMKQAVDNAYARGVVVVAAAGNSGPSGNTNTIGYPAKYDSVIAVGAVDSNSNRASFSSVGAELEVMAPGAGVYSTYPTNTYATLNGTSMASPHVAGAAALILSKHPNLSASQVRNRLSSTATYLGSSFYYGKGLINVEAAAQ

SEQ ID NO: 51454 - protein, 274 aa, Bacillus mojavensis
AQTVPYGIPLIKADKVQAQGFKGANVKVAVLDTGIQASHPDLNVVGGASFVAGEAYNTDGNGHGTHVAGTVAALDNTTGVLGVAPSVSLYAVKVLNSSGSGSYSGIVSGIEWATTNGMDVINMSLGGASGSTAMKQAVDNAYARGVVVVAAAGNSGSSGCTNTIGYPAKYDSVIAVGAVDSNSNRASFSSVGAELEVMAPGAGVYSTYPTNTYATLKGTSMASPHVAGAAALILSKHPNLSASQVRNRLSSTATYLGSSFYYGKGLINVEAAAQ

SEQ ID NO: 51455 - protein, 274 aa, Bacillus glycinifermentans
AQTVPYGIPLIKADKVQAQGFKGANVKVAVLDTGIQASHPDLNVVGGASFVAGEAYNTDGNGHGTHVAGTVAALDNTTGVLGVAPNVSLYAVKVLNSSGSGSYSGIVSGIEWATTNGMDVINMSLGGPSGSTAMKQAVDNAYARGVVVVAAAGNSGSSGNTNTIGYPAKYDSVIAVGAVDSNSNRASFSSVGAELEVMAPGAGVYSTYPTNTYATLNGTSMASPHVAGAAALILSKHPNLSASQVRNRLSSTATYLGSSFYYGKGLINVEAAAQ

SEQ ID NO: 51456 - protein, 274 aa, Bacillus licheniformis WX-02
AQTVPYGIPLIKADKVQAQGFKGANVKVAVLDTGIQASHPDLNVVGGASFVAGEAHNTDGNGHGTHVAGTVAALDNTTGVLGVAPSVSLYAVKVLNSSGSGSYSGIVSGIEWATTNGMDVINMSLGGAWGSTAMKQAVDNAYARGVVVVAAAGNSGSSGNTNTIGYPAKYDSVIAVGAVDSNSNRASFSSVGAELEVMAPGAGVYSTYPTNTYATLNGTSMASPHVAGAAALILSKHPNLSASQVRNRLSSTATYLGSSFYYGKGLINVEAAAQ

SEQ ID NO: 51457 - protein, 274 aa, unidentified [sequence omitted]

SEQ ID NO: 51458 - protein, 274 aa, Bacillus licheniformis
AQTVPYGIPLIKADKVQAQGFKGANVKVAVLDTGCQASHPDLNVVGGASFVAGEAYNTDGNGHGTHVAGTVAALDNTTGVLGVAPSVSLYCVKVLNSSGSGSYSGIVSGIEWATTNGMDVINMSLGGASGSTAMKQAVDNAYARGVVVVAAAGNSGSSGNTNTIGYPAKYDSVIAVGAVDSNSNRASFSSVGAELEVMAPGAGVYSTYPTNTYATLNGTSMASPHVAGAAALILSKHPNLSASQVRNRLSSTATYLGSSFYYGKGLINVEAAAQ

SEQ ID NO: 51459 - protein, 274 aa, Bacillus mojavensis
AQTVPYGIPLIKADKVQAQGFKGANVKVAVLDTGIQASHPDLNVVGGASFVAGEAYNTDGNGHGTHVAGTVAALDNTTGVLGVAPSVSLYAVKVLNSSGSGSYSGIVSGIEWATTNGMDVINMSLGGASGSTAMKQAVDNAYARGVVVVAAAGNSGSSGDTNTIGYPAKYDSVIAVGAVDSNSNRASFSSVGAELEVMAPGAGVYSTYPTNTYATLKGTSMASPHVAGAAALILSKHPNLSASQVRNRLSSTATYLGSSFYYGKGLINVEAAAQ

SEQ ID NO: 51460 - protein, 274 aa, Bacillus licheniformis
AQTVPYGIPLIKADKVQAQGFKGANVKVAVLDTGIQASHPXLNVVGGASFVAGEAYNTDGNGHGTHVAGTVAALDNTTGVLGVAPSVSLYAVKVLNSSGSGSYSGIVSGIEWATTNGMDVINMSLGGASGSTAMKQAVDNAYARGVVVVAAAGNSGPSGNTNTIGYPAKYDSVIAVGAVDSNSNRASFSSVGAELEVMAPGAGVYSTYPTNTYATLNGTSMASPHVAGAAALILSKHPNLSASQVRNRLSSTATYLGSSFYYGKGLINVEAAAQ

SEQ ID NO: 51461 - protein, 274 aa, Bacillus mojavensis
AQTVPYGIPLIKADKVQAQGFKGANVKVAVLDTGIQASHPDLNVVGGASFVAGEAYNTDGNGHGTHVAGTVAALDNTTGVLGVAPSVSLYAVKVLNSSGSGSYSGIVSGIEWATTNGMDVINMSLGGASGSTAMKQAVDNAYARGVVVVAAAGNSGSSGCTNTIGYPAKYDSVIAVGAVDSNSNRASFSSVGAELEVMAPGAGVYSTYPTNTYATLSGTSMASPHVAGAAALILSKHPNLSASQVRNRLSSTATYLGSSFYYGKGLINVEAAAQ

SEQ ID NO: 51462 - protein, 274 aa, Bacillus mojavensis
AQTVPYGIPLIKADKVQAQGFKGANVKVAVLDTGIQASHPDLNVVGGASFVAGEAYNTDGNGHGTHVAGTVAALDNTTGVLGVAPSVSLYAVKVLNSSGSGSYSGIVSGIEWATTNGMDVINMSLGGASGSTAMKQAVDNAYARGVVVVAAAGNSGSSGDTNTIGYPAKYDSVIAVGAVDSNSNRASFSSVGAELEVMAPGAGVYSTYPTNTYATLSGTSMASPHVAGAAALILSKHPNLSASQVRNRLSSTATYLGSSFYYGKGLINVEAAAQ

SEQ ID NO: 51463 - protein, 274 aa, Bacillus licheniformis
AQTVPYGIPLIKADKVQAQGFKGANVKVAVLDTGIQASHPDLNVVGGASFVAGEAYNTDGNGHGTHVAGTVAALDNTTGVLGVAPSVSLYAVKVLNSSGSGSYSGIVSGIEWATTNSMDVIYMSLGGASGSTAMKQAVDNAYARGVVVVAAAGNSGSSGNTNTIGYPAKYDSVIAVGAVDSNSNRASFSSVGAELEVMAPGAGVYSTYPTNTYATLNGTSMASPHVAGAAALILSKHPNLSASQVRNRLSSTATYLGSSFYYGKGLINVEAAAQ

SEQ ID NO: 51464 - protein, 274 aa, Bacillus licheniformis
AQTVPYGIPLIKADKVQAQGFKGANVKVAVLDTGIQASHPDLNVVGGASFVAGEAYNADGNGHGTHVAGTVAALDNTTGVLGVAPSVSLYAVKVLNSSGSGSYSGIVSGIEWATTNGMDVINMSLGGASGSTAMKQAVDNAYARGVVVVAAAGNSGSSGNTNTIGYPAKYDSVIAVGAVDSNSNRASFSSVGAELEVMAPGAGVYSTYPTNTYATWNGTSMASPHVAGAAALILSKHPNLSASQVRNRLSSTATYLGSSFYYGKGLINVEAAAQ

SEQ ID NO: 51465 - protein, 274 aa, Bacillus licheniformis WX-02
AQTVPYGIPLIKADPVQAQGFKGANVKVAVLDTGIQASHPDLNVVGGASFVAGEAYNTDGNGHGTHVAGTVAALDNTEGVLGVAPSVSLYAVKVLNSSGSGSYSGIVSGIEWATTNGMDVINMSLGGASGSTAMKQAVDNAYARGVVVVAAAGNSGSSGNTNTIGYPAKYDSVIAVGAVDSNSNRASFSSVGAELEVMAPGAGVYSTYPTNTYATLNGTSMASPHVAGAAALILSKHPNLSASQVRNRLSSTATYLGSSFYYGKGLINVEAAAQ

SEQ ID NO: 51466 - protein, 274 aa, Bacillus licheniformis
AQTVPYGIPLIKADKVQAQGFKGANVKVAVLDTGIQASHPDLNVRGGASFVAGEAYNTDGNGHGTHVAGTVAALDNTTGVLGVAPSVSLYAVKVLNSSGSGSYSGIVSGIEWATTNGMDVINISLGGASGSTAMKQAVDNAYARGVVVVAAAGNSGSSGNTNTIGYPAKYDSVIAVGAVDSNSNRASFSSVGAELEVMAPGAGVYSTYPTNTYATLNGTSMASPHVAGAAALILSKHPNLSASQVRNRLSSTATYLGSSFYYGKGLINVEAAAQ

SEQ ID NO: 51467 - protein, 274 aa, Bacillus mojavensis
AQTVPYGIPLIKADKVQAQGFKGANVKVAVLDTGIQASHPDLNVVGGASFVAGEAYNTDGNGHGTHVAGTVAALDNTTGVLGVAPSVSLYAVKVLNSSGSGSYSGIVSGIEWATTNGMDVINMSLGGASGSTAMKQAVDNAYARGVVVVAAAGNSGSSGCTNTIGYPAKYDSVIAVGAVDSNSNRASFSSVGAELEVMAPGAGVYSTYPTNTYATLMGTSMASPHVAGAAALILSKHPNLSASQVRNRLSSTATYLGSSFYYGKGLINVEAAAQ

SEQ ID NO: 51468 - protein, 274 aa, Bacillus licheniformis
AQTVPYGIPLIKADKVQAQGFKGANVKVAVLDTGIQASHPDLNVVGGASFVAGEAYNTDGNGHGTHVAGTVAALDNTTGVLGVAPSVSLYAVKVLNSSGSGSYSGIVSGIEWATTNGMDVINMSLGGASGSTAMKQAVDNAYARGVVVVAAAGNSGSSGCTNTIRYPAKYDSVIAVGAVDSNSNRASFSSVGAELEVMAPGAGVYSTYPTNTYATLNGTSMASPHVAGAAALILSKHPNLSASQVRNRLSSTATYLGSSFYYGKGLINVEAAAQ

SEQ ID NO: 51469 - protein, 274 aa, Bacillus mojavensis
AQTVPYGIPLIKADKVQAQGFKGANVKVAVLDTGIQASHPDLNVVGGASFVAGEAYNTDGNGHGTHVAGTVAALDNTTGVLGVAPSVSLYAVKVLNSSGSGSYSGIVSGIEWATTNGMDVINMSLGGASGSTAMKQAVDNAYARGVVVVAAAGNSGSSGGTNTIGYPAKYDSVIAVGAVDSNSNRASFSSVGAELEVMAPGAGVYSTYPTNTYATLMGTSMASPHVAGAAALILSKHPNLSASQVRNRLSSTATYLGSSFYYGKGLINVEAAAQ

SEQ ID NO: 51470 - protein, 274 aa, unidentified
AQTVPYGIPLIKADKVQAQGFKGANVKVAVLDTGIQSSHPDLNVVGGSSFVAGEAYNTDGNGHGTHVAGTVAALDNTTGVLGVAPSVSLYAVKVLNSSGSGSYSGIVSGIEWATTNGMDVINMSLGGASGSTAMKQAVDNAYARGVVVVAAAGNSGSSGNTNTIGYPAKYDSVIAVGAVDSNSNRASFSSVGAELEVMAPGAGVYSTYPTNTYATLNGTSMASPHVAGAAALILSKHPNLSASQVRNRLSSTATYLGSSFYYGKGLINVEAAAQ

SEQ ID NO: 51471 - protein, 274 aa, Bacillus licheniformis
AQTVPYGIELIKADKVQAQGFKGANVKVAVLDTGIQASHPDLNVVGGASFVAGEAYNTDGNGHGTHVAGTVAALDNTTGVLGVAPSVSLYAVKVLNSSGSGSYSGIVSGIEWATTNGMDVINISLGGASGSTAMKQAVDNAYARGVVVVAAAGNSGSSGNTNTIGYPAKYDSVIAVGAVDSNSNRASFSSVGAELEVMAPGAGVYSTYPTNTYATLNGTSMASPHVAGAAALILSKHPNLSASQVRNRLSSTATYLGSSFYYGKGLINVEAAAQ

SEQ ID NO: 51472 - protein, 274 aa, Bacillus licheniformis WX-02
AQTVPYGIPLIKADKVQAQGFKGANVKVAVLDTGIQASHPDLNVVGGASFVAGEAYNTDGNGHGTHVAGTVAALDNTEGVLGVAPSVSLYAVKVLNSSGSGSYSGIVSGIEWATTNGMDVINMSLGGASGSTAMKQAVDNAYARGVVVVAAAGNSGSSGNTNTIGYPAKYDSVIAVGAVDSNSNRASFSSVGAELEVMAPGAGVYSTYPTNTYATLNGTSMASPHVAGAAALILSKHPCLSASQVRNRLSSTATYLGSSFYYGKGLINVEAAAQ

SEQ ID NO: 51473 - protein, 274 aa, Bacillus licheniformis
AQTVPYGIPLIKADKVQAQGFKGANVKVAVLDTGIQASHPDLNVVGGASFVAGEAYNTDGNGHGTHVAGTVAALDNTTGVLGVAPSVSLYAVKVLNSSGSGSYSGIVSGIEWATTNGMDVINMSLGGASGSTAMKQAVDNAYARGVVVVAAAGNSGSSGNTNTIGYPAKYDSVIAVGAVDSNSNRASFSSVGAELEVMAPGAGVYSTYPTNTYATLSGTSMASPHVAGAAALILSKHPNLSASQVRNRLSSTATYLGDSFYYGKGLINVEAAAQ

SEQ ID NO: 51474 - protein, 274 aa, Bacillus licheniformis
AQTVPYGIPLIKADKVQAQGFKGANVKVAVLDTGIQASHPDLNVVGGASFVAGEAYNTDGNGHGTHVAGTVAALDNNTGVLGVAPSVSLYAVKVLNSSGSGSYSGIVSGIEWATTNGMDVINMSLGGASGSTAMKQAVDNAYARGVVVVAAAGNSGSSGNTNTIGYPAKYDSVIAVGAVDSNSNRASFSSVGAELEVMAPGAGVYSTYPTNTYATLSGTSMASPHVAGAAALILSKHPNLSASQVRNRLSSTATYLGSSFYYGKGLINVEAAAQ

SEQ ID NO: 51475 - protein, 274 aa, Bacillus licheniformis WX-02
AQTVPYGIPLIKADKVQAQGFKGANVKVAVLDTGIQASHPDLNVVGGASFVAGEAYNTDGNGHGTHVAGTVAALDNTTGVLGVAPSVSLYAVKVLNSSGSGSYSGIVSGIEWATTNGMDVINMSLGGAWGSTAMKQAVDNAYARGVVVVAAAGNSGSSWNTNTIGYPAKYDSVIAVGAVDSNSNRASFSSVGAELEVMAPGAGVYSTYPTNTYATLNGTSMASPHVAGAAALILSKHPNLSASQVRNRLSSTATYLGSSFYYGKGLINVEAAAQ

SEQ ID NO: 51476 - protein, 274 aa, Bacillus mojavensis
AQTVPYGIPLIKADKVQAQGFKGANVKVAVLDTGIQASHPDLNVVGGASFVAGEAYNTDGNGHGTHVAGTVAALDNTTGVLGVAPSVKLYAVKVLNSSGSGSYSGIVSGIEWATTNGMDVINMSLGGASGSTAMKQAVDNAYARGVVVVAAAGNSGSSGNTNTIGYPAKYDSVIAVGAVDSNMNRASFSSVGAELEVMAPGAGVYSTYPTNTYATLNGTSMASPHVAGAAALILSKHPNLSASQVRNRLSSTATYLGSSFYYGKGLINVEAAAQ

SEQ ID NO: 51477 - protein, 274 aa, Bacillus licheniformis
AQTVPYGIPLIKADKVQAQGFKGANVKVAVLDTGIQASHPDLNVVGGASFVAGEAYNTDGNGHGTHVAGTVAALDNTTGVLGVAPSVSLYAVKVLNSSGSGSYSGIVSGIEWATTNSMDVINMSLGGASGSTAMKQAVDNAYARGVVVVAAAGNSGSSGCTNTIGYPAKYDSVIAVGAVDSNSNRASFSSVGAELEVMAPGAGVYSTYPTNTYATLNGTSMASPHVAGAAALILSKHPNLSASQVRNRLSSTATYLGSSFYYGKGLINVEAAAQ

SEQ ID NO: 51478 - protein, 274 aa, Bacillus mojavensis
AQTVPYGIPLIKADKVQAQGFKGANVKVAVLDTGIQASHPDLNVVGGASFVAGEAYNTDGNGHGTHVAGTVAALDNTTGVLGVAPSVKLYAVKVLNSSGSGSYSGIVSGIEWATTNGMDVINMSLGGASGSTAMKQAVDNAYARGVVVVAAAGNSGSSGNTNTIGYPAKYDSVIAVGAVDSNKNRASFSSVGAELEVMAPGAGVYSTYPTNTYATLNGTSMASPHVAGAAALILSKHPNLSASQVRNRLSSTATYLGSSFYYGKGLINVEAAAQ

SEQ ID NO: 51479 - protein, 274 aa, Bacillus licheniformis WX-02
AQTVPYGIPLIKADKVQAQGFKGANVKVAVLDTGIQASHPDLNVVGGASFVAGEAYNTDGNGHGTHVAGTVAALDNTTGVLGVAPSVSLYAVKVLNSSGSGSYSGIVSGIEWATTNGMDVINMSLGGAWGSTAMKQAVDNAYARGVVVVAAAGNSGSIGNTNTIGYPAKYDSVIAVGAVDSNSNRASFSSVGAELEVMAPGAGVYSTYPTNTYATLNGTSMASPHVAGAAALILSKHPNLSASQVRNRLSSTATYLGSSFYYGKGLINVEAAAQ

SEQ ID NO: 51480 - protein, 274 aa, Bacillus licheniformis
AQTVPYGIPLIKADKVQAQGFKGQNVKVAVLDTGIQASHPDLNVVGGASFVAGEAYNTDGNGHGTHVAGTVAALDNTTGVLGVAPSVSLYAVKVLNSSGSGSYSGIVSGIEWATTNGMDVINMSLGGASGSTAMKQAVDNAYARGVVVVAAAGNSGPSGNTNTIGYPAKYDSVIAVGAVDSNSNRASFSSVGAELEVMAPGAGVYSTYPTNTYATLNGTSMASPHVAGAAALILSKHPNLSASQVRNRLSSTATYLGSSFYYGKGLINVEAAAQ

SEQ ID NO: 51481 - protein, 274 aa, Bacillus licheniformis
AQTVPYGIPLIKADKVQAQGFKGANVKVAVLDTGIQASHPDLNVVGGASFVAGEAYNTDGNGHGTHVAGTVAALDNTTGVLGVAPSVSLYAVKVLNSSGSGSYSGIVSGIEWATTNGMDVINMSLGGASGSTAMKQAVDNAYARGVVVVAAAGNSGSSGNTNTIGYPAKYDSVIAVGAVDSNSNRASFSSVGAELEVMAPGAGVYSTYPPNTYATLNGTSMASPHVAGAAALILSKHPNLSASQVRNRLSSTATYLGPSFYYGKGLINVEAAAQ

SEQ ID NO: 51482 - protein, 274 aa, unidentified
AQTVPYGIPLIKADKVQAQGFKGANVKVAVKDTGIQASHPDLNVVGGASFVAGEAYNTDGNGHGTHVAGTVAALDNTTGVLGVAPSVSLYAVKVLNSSGSGSYSGIVSGIEWATTNGMDVINMSLGGASGSTAMKQAVDNAYARGVVVVAAAGNSGSSGNTNTIGYPAKYDSVIAVGAVDSNSNRASFSSVGAELEVMAPGAGVYSTYPTNTYATLNGTSMASPHVAGAAALILSKHPNLSASQVRNRLSSTATYLGSSFYYGKGLINVEAAVQ

SEQ ID NO: 51483 - protein, 274 aa, Bacillus mojavensis
AQTVPYGIPLIKADKVQAQGFKGANVKVAVLDTGIQASHPDLNVVGGASFVAGEAYNTDGNGHGTHVAGTVAALDNTTGVLGVAPSVSLYAVKVLNSSGSGSYSGIVSGIEWATTNGMDVINMSLGGASGSTAMKQAVDNAYARGVVVVAAAGNSGSSGDTNTIGYPAKYDSVIAVGAVDSNSNRASFSSVGAELEVMAPGAGVYSTYPTNTYATLMGTSMASPHVAGAAALILSKHPNLSASQVRNRLSSTATYLGSSFYYGKGLINVEAAAQ

SEQ ID NO: 51484 - protein, 274 aa, Bacillus licheniformis
AQTVPYGIPLIKADKVQAQGFKGANVKVAVLDTGIQASHPKLNVVGGASFVAGEAYNTDGNGHGTHVAGTVAALDNTTGVLGVAPSVSLYAVKVLNSSGSGSYSGIVSGIEWATTNGMDVINMSLGGASGSTAMKQAVDNAYARGVVVVAAAGNSGPSGNTNTIGYPAKYDSVIAVGAVDSNSNRASFSSVGAELEVMAPGAGVYSTYPTNTYATLNGTSMASPHVAGAAALILSKHPNLSASQVRNRLSSTATYLGSSFYYGKGLINVEAAAQ

SEQ ID NO: 51485 - protein, 274 aa, Bacillus mojavensis
AQTVPYGIPLIKADKVQAQGFKGANVKVAVLDTGIQASHPDLNVVGGASFVAGEAYNTDGNGHGTHVAGTVAALDNTTGVLGVAPSVSLYAVKVLNSSGSGSYSGIVSGIEWATTNGMDVINMSLGGASGSTAMKQAVDNAYARGVVVVAAAGNSGSSGGTNTIGYPAKYDSVIAVGAVDSNSNRASFSSVGAELEVMAPGAGVYSTYPTNTYATLKGTSMASPHVAGAAALILSKHPNLSASQVRNRLSSTATYLGSSFYYGKGLINVEAAAQ

SEQ ID NO: 51486 - protein, 274 aa, Bacillus mojavensis
AQTVPYGIPLIKADKVQAQGFKGANVKVAVLDTGIQASHPDLNVVGGASFVAGEAYNTDGNGHGTHVAGTVAALDNTTGVLGVAPSVLLYAVKVLNSSGSGSYSGIVSGIEWATTNGMDVINMSLGGASGSTAMKQAVDNAYARGVVVVAAAGNSGSSGNTNTIGYPAKYDSVIAVGAVDSNMNRASFSSVGAELEVMAPGAGVYSTYPTNTYATLNGTSMASPHVAGAAALILSKHPNLSASQVRNRLSSTATYLGSSFYYGKGLINVEAAAQ

SEQ ID NO: 51487 - protein, 274 aa, Bacillus licheniformis WX-02
AQTVPYGIPLIKADKVQAQGFKGANVKVAVLDTGIQASHPDLNVVGGASFVAGEAYNTDGNGHGTHVAGTAAALDNTEGVLGVAPSVSLYAVKVLNSSGSGSYSGIVSGIEWATTNGMDVINMSLGGASGSTAMKQAVDNAYARGVVVVAAAGNSGSSGNTNTIGYPAKYDSVIAVGAVDSNSNRASFSSVGAELEVMAPGAGVYSTYPTNTYATLNGTSMASPHVAGAAALILSKHPNLSASQVRNRLSSTATYLGSSFYYGKGLINVEAAAQ

SEQ ID NO: 51488 - protein, 274 aa, Bacillus licheniformis
AQTVPYGIPLIKADKVQAQGFKGANVKVAVLDTGIQASHPDLNVVGGASFVAGEAYNTDGNGHGTHVAGTVAALDNTTGVLGVAPSVSLYAVKVLNSSGSGSYSGIVSGIEWATTNGMDVINISLGGASGSTAMKRAVDNAYARGVVVVAAAGNSGSSGNTNTIGYPAKYDSVIAVGAVDSNSNRASFSSVGAELEVMAPGAGVYSTYPTNTYATLNGTSMASPHVAGAAALILSKHPNLSASQVRNRLSSTATYLGSSFYYGKGLINVEAAAQ

SEQ ID NO: 51489 - protein, 274 aa, Bacillus licheniformis
AQTVPYGIPLIKADKVQAQGFKGANVKVAVLDTGIQASHPDLNVRGGASFVAGEAYNTDGNGHGTHVAGTVAALDNTTGVLGVAPSVSLYAVKVLNSRGSGSYSGIVSGIEWATTNGMDVINMSLGGASGSTAMKQAVDNAYARGVVVVAAAGNSGSSGNTNTIGYPAKYDSVIAVGAVDSNSNRASFSSVGAELEVMAPGAGVYSTYPTNTYATLNGTSMASPHVAGAAALILSKHPNLSASQVRNRLSSTATYLGSSFYYGKGLINVEAAAQ

SEQ ID NO: 51490 - protein, 274 aa, Bacillus licheniformis
AQTVPYGIPLIKADKVQAQGFKGANVKVAVLDTGIQASHEDLNVVGGASFVAGEAYNTDGNGHGTHVAGTVAALDNTTGVLGVAPSVSLYAVKVLNSSGSGSYSGIVSGIEWATTNGMDVINMSLGGASGSTAMKQAVDNAYARGVVVVAAAGNSGSSGNTNTIGYPAKYDSVIAVGAVDSNSNRASFSSVGAELEVMAPGAGVYSTYPTNTYATLNGTSMASPHVAGAAALILSKHPNLSASQVRNRLSSTATYLGDSFYYGKGLINVEAAAQ

SEQ ID NO: 51491 - protein, 274 aa, Bacillus licheniformis
AQTVPYGIPLIKADKVQAQGFKGANVKVAVLDTGIQASHPDLNVVGGASFVAGEAYNTDGNGHGTHVAGTVAALDNTTGVLGVAPSVSSYAVKVLNSSGSGSYSGIVSGIEWATTNGMDVINMSLGGASGSTAMKQAVDNAYARGVVVVAAAGNSGSSGNTNTIGYPAKYDSVIAVGAVDSNSNRASFSSVGAELEVMAPGAGVYSTYPTNTYATWNGTSMASPHVAGAAALILSKHPNLSASQVRNRLSSTATYLGSSFYYGKGLINVEAAAQ

SEQ ID NO: 51492 - protein, 273 aa, Bacillus licheniformis
AQTVPYGIPLIKADKVQAQGFKGANVKVAVLDTGIQASHPDLNVVGGASFVAGEAYNTDGNGHGTHVAGTVAALDNTTGLGVAPSVSLYAVKVLNSSGSGSYSGIVSGIEWATTNGMDVINMSLGGASGSTAMKQAVDNAYARGVVVVAAAGNSGNSGSTNTIGYPAKYDSVIAVGAVDSNSNRASFSSVGAELEVMAPGAGVYSTYPTNTYATLNGTSMASPHVAGAAALILSKHPNLSASQVRNRLSSTATYLGSSFYYGKGLINVEAAAQ

SEQ ID NO: 51493 - protein, 273 aa, Bacillus licheniformis
AQTVPYGIPLIKADKVQAQGFKGANVKVAVLDTGIQASHPDLNVVGGASFVAGEAYNTDGNGHGTHVAGTVAALDNTTGVLGVAPSVSLYAVKVLNSSGSGSYSGIVSGIEWATTNGMDVINMSLGGASGSTAMKQAVDNAYAKGVVVVAAAGNSGSSGNTNTIGYPAKYDSVIAVGAVDSNSNRASFSSVGAELEVMAPGAGVYSTYPTNTYATLNGTSMASPHVAGAAALIMSKHPNLSASQVRNRLSSTATYLGSSFYYGKGLINVEAAA

SEQ ID NO: 51494 - protein, 270 aa, Bacillus licheniformis
QTVPYGIPLIKADKVQAQGFKGANVKVAVLDTGIQASHPLNVVGGASFVAGEAYNTDGNGHGTHVAGTVAALDNTTGLGVAPSVSLYAVKVLNSSGSGSYSGIVSGIEWATTNGMDINMSLGGASGSTAMKQAVDNAYARGVVVVAAAGNSGNSGSTNTIGYPAKYDSVIAVGAVDSNSNRASFSSVGAELEVMAPGAGVYSTYPTNTYATLNGTSMASPHVAGAAALILSKHPNLSASQVRNRLSSTATYLGSSFYYGKGLINVEAAAQ

SEQ ID NO: 51495 - protein, 269 aa, Unidentified
AQSVPWGISRVQAPAAHNRGLTGSGVKVAVLDTGISTHPDLNIRGGASFVPGEPSTQDGNGHGTHVAGTIAALNNSIGVLGVAPSAELYAVKVLGACGSGSVSSIAQGLEWAGNNGMHVANLSLGSPSPSATLEQAVNSATSRGVLVVAASGNSGAGSISYPARYANAMAVGATDQNNNRASFSQYGAGLDIVAPGVNVQSTYPGSTYASLNGTSMATPHVAGAAALVKQKNPSWSNVQIRNHLKNTATSLGSTNLYGSGLVNAEAATR

SEQ ID NO: 51496 - protein, 269 aa, Unidentified
AQSVPWGISRVQAPAAHNRGLTGSGVKVAVLDTGISTHPDLNIRGGASFVPGEPSTQDGNGHGTHVAGTIAAENNSIGVLGVAPSAELYAVKVLGASGSGSVSSIAQGLEWAGNNGMHVANLSLGSPSPSATLEQAVNSATSRGVLVVAASGNSGAGSISYPARYANAMAVGATDQNNNRASFSQYGAGLDIVAPGVNVQSTYPGSTYASLNGTSMATPHVAGAAALVKQKNPSWSNVQIRNHLKNTATSLGSTNLYGSGLVNAEAATR

SEQ ID NO: 51497 - protein, 269 aa, Unidentified
AQSVPWGISRVQAPAAHNRGLTGSGVKVAVLDTGISTHPDLNIRGGASFVPGEPSTQDGNGHGTHVAGTIAALNNSQGVLGVAPSAELYAVKVLGASGSGSVSSIAQGLEWAGNNGMHVANLSLGSPSPSATLEQAVNSATSRGVLVVAASGNSGAGSISYPARYANAMAVGATDQNNNRASFSQYGAGLDIVAPGVNVQSTYPGSTYASLNGTSMATPHVAGAAALVKQKNPSWSNVQIRNHLKNTATSLGSTNLYGSGLVNAEAATR

SEQ ID NO: 51498 - protein, 269 aa, Unidentified
AQSVPWGISRVQAPAAHNRGLTGSGVKVAVLDTGISTHPDLNIRGGASFVPGEPSTQDGNGHGTHVAGTIAALNNSIGVLGVAPSAELYAVKVLGASGSGSVSVIAQGLEWAGNNGMHVANLSLGSPSPSATLEQAVNSATSRGVLVVAASGNSGAGSISYPARYANAMAVGATDQNNNRASFSQYGAGLDIVAPGVNVQSTYPGSTYASLNGTSMATPHVAGAAALVKQKNPSWSNVQIRNHLKNTATSLGSTNLYGSGLVNAEAATR

SEQ ID NO: 51499 - protein, 269 aa, Unidentified
AQSVPWGISRVQAPAAHNRGLTGSGVKVAVLDTGISTHPDLNIRGGASFVPGEPSTQDGNGHGTHVAGTIAALNNSIGVLGVAPSAELYAVKVLGASGSGSVSSIAQGLEWARNNGMHVANLSLGSPSPSATLEQAVNSATSRGVLVVAASGNSGAGSISYPARYANAMAVGATDQNNNRASFSQYGAGLDIVAPGVNVQSTYPGSTYASLNGTSMATPHVAGAAALVKQKNPSWSNVQIRNHLKNTATSLGSTNLYGSGLVNAEAATR

SEQ ID NO: 51500 - protein, 269 aa, Unidentified
AQSRPWGISRVQAPAAHNRGLTGSGVKVAVLDTGISTHPDLNIRGGASFVPGEPSTQDGNGHGTHVAGTIAALNNSIGVLGVAPSAELYAVKVLGASGSGSVSSIAQGLEWAGNNGMHVANLSLGSPSPSATLEQAVNSATSRGVLVVAASGNSGAGSISYPARYANAMAVGATDQNNNRASFSQYGAGLDIVAPGVNVQSTYPGSTYASLNGTSMATPHVAGAAALVKQKNPSWSNVQIRNHLKNTATSLGSTNLYGSGLVNAEAATR

SEQ ID NO: 51501 - protein, 269 aa, Unidentified
AQSVPWGISRVQAPAAHNRGLRGSGVKVAVLDTGISTHPDLNIRGGASFVPGEPSTQDGNGHGTHVAGTIAALNNSIGVLGVAPSAELYAVKVLGASGSGSVSSIAQGLEWAGNNGMHVANLSLGSPSPSATLEQAVNSATSRGVLVVAASGNSGAGSISYPARYANAMAVGATDQNNNRASFSQYGAGLDIVAPGVNVQSTYPGSTYASLNGTSMATPHVAGAAALVKQKNPSWSNVQIRNHLKNTATSLGSTNLYGSGLVNAEAATR

SEQ ID NO: 51502 - protein, 269 aa, Unidentified
AQSVPWGISRVQAPAAMNRGLTGSGVKVAVLDTGISTHPDLNIRGGASFVPGEPSTQDGNGHGTHVAGTIAALNNSIGVLGVAPSAELYAVKVLGASGSGSVSSIAQGLEWAGNNGMHVANLSLGSPSPSATLEQAVNSATSRGVLVVAASGNSGAGSISYPARYANAMAVGATDQNNNRASFSQYGAGLDIVAPGVNVQSTYPGSTYASLNGTSMATPHVAGAAALVKQKNPSWSNVQIRNHLKNTATSLGSTNLYGSGLVNAEAATR

SEQ ID NO: 51503 - protein, 269 aa, Unidentified
AQSVPWGISRVQAPAAHNRGLTGSGVKVAVLDTGISTHPDLNIRGGASFVPGEPSTQDGNGHGTHVAGTIAALNNAIGVLGVAPSAELYAVKVLGASGSGSVSSIAQGLEWAGNNGMHVANLSLGSPSPSATLEQAVNSATSRGVLVVAASGNSGAGSISYPARYANAMAVGATDQNNNRASFSQYGAGLDIVAPGVNVQSTYPGSTYASLNGTSMATPHVAGAAALVKQKNPSWSNVQIRNHLKNTATSLGSTNLYGSGLVNAEAATR

SEQ ID NO: 51504 - protein, 269 aa, Unidentified
AQSVPWGISRVQAPAAHNRGLTGSGVKVAVLDTGISTHPDLNIRGGASFVPGEPSTQDGNGHGTHVAGTIAALNNSIGVLGVAPSAELYAVKVLGASGSGSVSSIAQGLEWAGNNGMHVANLSLGSPSPSATLEQAVNSATSRGVLVVAASGNSGAGSISYPARYANAMAVGATDQNNNRASFSQYGAGLDIVAPGVNVQSTYPGSTYASNNGTSMATPHVAGAAALVKQKNPSWSNVQIRNHLKNTATSLGSTNLYGSGLVNAEAATR

SEQ ID NO: 51505 - protein, 269 aa, Unidentified
AQSVPWGISRVQAPAAHNRGLTGSGVKVAVLDTGISTHPDLNIRGGASFVPGEPSTQDGEGHGTHVAGTIAALNNSIGVLGVAPSAELYAVKVLGASGSGSVSSIAQGLEWAGNNGMHVANLSLGSPSPSATLEQAVNSATSRGVLVVAASGNSGAGSISYPARYANAMAVGATDQNNNRASFSQYGAGLDIVAPGVNVQSTYPGSTYASLNGTSMATPHVAGAAALVKQKNPSWSNVQIRNHLKNTATSLGSTNLYGSGLVNAEAATR

SEQ ID NO: 51506 - protein, 269 aa, Unidentified
AQSVPWGISRVQAPAAHNRGLTGSGVKVAVLDTGISTHPDLNIRGGASFVPGEPSTQDGNGHGTHVAGTIAALNNSIGVLGVAPSAELYAVKVLGASGSGSVSSIAQGLEWAGNNGMHVANLSLGSPSPSATLEQAVNSATSRGVLVVAASGNSGAGSISYPARYANAMAVGATDQNNNRASFSQYGAGLDIVAPGVNVQSTYPGSTYASLNGTSMATPHVAGAAALVKQKNFSWSNVQIRNHLKNTATSLGSTNLYGSGLVNAEAATR

SEQ ID NO: 51507 - protein, 270 aa, Unidentified
AQSVPWGISRVQAPAAHNRGLTGSGVKVAVLDTGISTHPDLNIRGGASFVPGEPSTQDGNGHGTHVAGTIAALNNSIGVLGVAPSAELYAVKVLGAADGSGSVSSIAQGLEWAGNNGMHVANLSLGSPSPSATLEQAVNSATSRGVLVVAASGNSGAGSISYPARYANAMAVGATDQNNNRASFSQYGAGLDIVAPGVNVQSTYPGSTYASLNGTSMATPHVAGAAALVKQKNPSWSNVQIRNHLKNTATSLGSTNLYGSGLVNAEAATR

SEQ ID NO: 51508 - protein, 269 aa, Unidentified
AQSVPWGISRVQAPAAHNRGLTGSGVKVAVLDTGISTHPDLNIRGGASFVPGEPSTQEGNGHGTHVAGTIAALNNSIGVLGVAPSAELYAVKVLGASGSGSVSSIAQGLEWAGNNGMHVANLSLGSPSPSATLEQAVNSATSRGVLVVAASGNSGAGSISYPARYANAMAVGATDQNNNRASFSQYGAGLDIVAPGVNVQSTYPGSTYASLNGTSMATPHVAGAAALVKQKNPSWSNVQIRNHLKNTATSLGSTNLYGSGLVNAEAATR

SEQ ID NO: 51509 - protein, 269 aa, Bacillus sp.
AQSVPWGISRVQAPAAHNRGLTGSGVKVAVLDTGISTHPDLNIRGGASFVPGEPSTQDGNGHGTHVAGTIAALNNSIGVLGVAPNAELYAVKVLGASGSGSVSSIAQGLEWAGNNGMHVANLSLGSPSPSATLEQAVNSATSRGVLVVAASGNSGAGSISYPARYANAMAVGATDQNNNRASFSQYGAGLDIVAPGVNVQSTYPGSTYASLNGTSQATPHVAGAAALVKQKNPSWSNVQIRNHLKNTATSLGSTNLYGSGLVNAEAATR

SEQ ID NO: 51510 - protein, 269 aa, Unidentified
AQSVPWGISRVQAPAAHNRGLTGSGVKVAVLDTGISTHPDLNIRGGASFVPGEPSTQDGNGHGTHVAGTIAALNNSIGVLGVAPSAELYAVKVLGASGFGSVSSIAQGLEWAGNNGMHVANLSLGSPSPSATLEQAVNSATSRGVLVVAASGNSGAGSISYPARYANAMAVGATDQNNNRASFSQYGAGLDIVAPGVNVQSTYPGSTYASLNGTSMATPHVAGAAALVKQKNPSWSNVQIRNHLKNTATSLGSTNLYGSGLVNAEAATR

SEQ ID NO: 51511 - protein, 269 aa, Unidentified
AQSVPWGISRVQAPAAHNRGLTGSGVKVAVLDTGISTHPDLNIRGGASFVPGEPSTQDGNGHGTHVAGTIAALNNSIGVLGVAPSAELYAVKVLGASGSGSVSSIAQGLEWAGNNGMHVANLSLGSPSPSATLEQAVNSATSRGVLVVAASGNSGAGSISYPARYANAMAVGATDQNNNRASFSQYGAGLDIVAPGVNVQSTYPGSTYASLNGTSMATPHVAGAAALVKQKNPSWSNVQIRNHLKNTATSLGSTNLYGSGLVNAPAATR

SEQ ID NO: 51512 - protein, 269 aa, Unidentified
AQSVPWGISRVQAPAAHNRGLTGSGVKVAVLDTGISTHPDLNIRGGASFVPGEPSTQDGNGHGTHVAGTIAALNNSIGVLGVAPSAELYAVKVLGASGSGSVSSIAQGLEWAGNNGMHVANLSLGSPFPSATLEQAVNSATSRGVLVVAASGNSGAGSISYPARYANAMAVGATDQNNNRASFSQYGAGLDIVAPGVNVQSTYPGSTYASLNGTSMATPHVAGAAALVKQKNPSWSNVQIRNHLKNTATSLGSTNLYGSGLVNAEAATR

SEQ ID NO: 51513 - protein, 269 aa, Unidentified
AQSVPWGISRVQAPAAHNRGLTGSGVKVAVLDTGISTHPDLNIRGGASFVPGEPSTQDGNGHGTHVAGTIAALNNSIGVLGVAPSAELYAVKVLGASGSGAVSSIAQGLEWAGNNGMHVANLSLGSPSPSATLEQAVNSATSRGVLVVAASGNSGAGSISYPARYANAMAVGATDQNNNRASFSQYGAGLDIVAPGVNVQSTYPGSTYASLNGTSMATPHVAGAAALVKQKNPSWSNVQIRNHLKNTATSLGSTNLYGSGLVNAEAATR

SEQ ID NO: 51514 - protein, 269 aa, Unidentified
AQSVPWGISRVQAPAAHNRGLTGSGVKVAVLDTGISTHPDLWIRGGASFVPGEPSTQDGNGHGTHVAGTIAALNNSIGVLGVAPSAELYAVKVLGASGSGSVSSIAQGLEWAGNNGMHVANLSLGSPSPSATLEQAVNSATSRGVLVVAASGNSGAGSISYPARYANAMAVGATDQNNNRASFSQYGAGLDIVAPGVNVQSTYPGSTYASLNGTSMATPHVAGAAALVKQKNPSWSNVQIRNHLKNTATSLGSTNLYGSGLVNAEAATR

SEQ ID NO: 51515 - protein, 269 aa, Unidentified
AQSVPWGISRVQAPAAHNRGLTGSGVKVAVLDTGISTHPDLNIRGGASFVPGEPSTQDGNGHGTHVAGTIAALNNSIGVLGVAPSAELYAVKVLGASGSGSVSSIAQGLEWAGNNGMFVANLSLGSPSPSATLEQAVNSATSRGVLVVAASGNSGAGSISYPARYANAMAVGATDQNNNRASFSQYGAGLDIVAPGVNVQSTYPGSTYASLNGTSMATPHVAGAAALVKQKNPSWSNVQIRNHLKNTATSLGSTNLYGSGLVNAEAATR

SEQ ID NO: 51516 - protein, 269 aa, Unidentified
AQSVPWGISRVQAPAAHNRGLTFSGVKVAVLDTGISTHPDLNIRGGASFVPGEPSTQDGNGHGTHVAGTIAALNNSIGVLGVAPSAELYAVKVLGASGSGSVSSIAQGLEWAGNNGMHVANLSLGSPSPSATLEQAVNSATSRGVLVVAASGNSGAGSISYPARYANAMAVGATDQNNNRASFSQYGAGLDIVAPGVNVQSTYPGSTYASLNGTSMATPHVAGAAALVKQKNPSWSNVQIRNHLKNTATSLGSTNLYGSGLVNAEAATR

SEQ ID NO: 51517 - protein, 269 aa, Unidentified
AQSVPWGISRVQAPAAHNRGLTGSGVKVAVLDTGISTHPDLNIRGGASFVPGEPSTQDGNGHGTHVAGTIAALNNSIGVLGVAPSAELYAVNVLGASGSGSVSSIAQGLEWAGNNGMHVANLSLGSPSPSATLEQAVNSATSRGVLVVAASGNSGAGSISYPARYANAMAVGATDQNNNRASFSQYGAGLDIVAPGVNVQSTYPGSTYASLNGTSMATPHVAGAAALVKQKNPSWSNVQIRNHLKNTATSLGSTNLYGSGLVNAEAATR

SEQ ID NO: 51518 - protein, 269 aa, Unidentified
AQSVPWGISRVQAPAAHNRGLTGSGVKVAVLDTGISTHPDLNIRGGASFVPGEPSTQDGNGHGTHVAGTIAALNNSIGVLGVAPSAELYAVKVLGASGSGSVSSIAQGLEWAGNNGMHVANLSLGSPSPSATLEQAVNSATSRGVLVVAASGNSGAGSISYPARYANAMAVGATDQNNNRASFSQYGAGLDIVAPGVNVQSTGPGSTYASLNGTSMATPHVAGAAALVKQKNPSWSNVQIRNHLKNTATSLGSTNLYGSGLVNAEAATR

SEQ ID NO: 51519 - protein, 269 aa, Unidentified
AQSVPWGISRVQAPAAHNRGLTGSGVKVAVLDTGISTHPDLNIRGGASFVPGEPSTQDGNAHGTHVAGTIAALNNSIGVLGVAPSAELYAVKVLGASGSGSVSSIAQGLEWAGNNGMHVANLSLGSPSPSATLEQAVNSATSRGVLVVAASGNSGAGSISYPARYANAMAVGATDQNNNRASFSQYGAGLDIVAPGVNVQSTYPGSTYASLNGTSMATPHVAGAAALVKQKNPSWSNVQIRNHLKNTATSLGSTNLYGSGLVNAEAATR

SEQ ID NO: 51520 - protein, 269 aa, Unidentified
AQSVPWGISRVQAPAAHNRGLTGSGVKVAVLDTGISTHPDLNIRGGASFVPGEPSTQDGNGHGTHVAGTIAALNNSIGVRGVAPSAELYAVKVLGASGSGSVSSIAQGLEWAGNNGMHVANLSLGSPSPSATLEQAVNSATSRGVLVVAASGNSGAGSISYPARYANAMAVGATDQNNNRASFSQYGAGLDIVAPGVNVQSTYPGSTYASLNGTSMATPHVAGAAALVKQKNPSWSNVQIRNHLKNTATSLGSTNLYGSGLVNAEAATR

SEQ ID NO: 51521 - protein, 269 aa, Unidentified
AQSVPWGISRVQAPAAHNRGLTGSGVKVAVLDTGISTHPDLNIRGGASFVPGEPSTQDGNGHGTHVAGTIAALNNSIGVLGVAPSANLYAVKVLGASGSGSVSSIAQGLEWAGNNGMHVANLSLGSPSPSATLEQAVNSATSRGVLVVAASGNSGAGSISYPARYANAMAVGATDQNNNRASFSQYGAGLDIVAPGVNVQSTYPGSTYASLNGTSMATPHVAGAAALVKQKNPSWSNVQIRNHLKNTATSLGSTNLYGSGLVNAEAATR

SEQ ID NO: 51522 - protein, 269 aa, Unidentified
AQSVPWGISRVQAPAAHNRGLTGSGVKVAVLDTGISTHPKLNIRGGASFVPGEPSTQDGNGHGTHVAGTIAALNNSIGVLGVAPSAELYAVKVLGASGSGSVSSIAQGLEWAGNNGMHVANLSLGSPSPSATLEQAVNSATSRGVLVVAASGNSGAGSISYPARYANAMAVGATDQNNNRASFSQYGAGLDIVAPGVNVQSTYPGSTYASLNGTSMATPHVAGAAALVKQKNPSWSNVQIRNHLKNTATSLGSTNLYGSGLVNAEAATR

SEQ ID NO: 51523 - protein, 269 aa, Unidentified
AQSVPWGISRVQAPAAHNRGLTGSGVKVAVLDTGISTHPDLNIRGGASFVPGEPSTQDGNGHGTHVAGTIAALNNSIGVLGVAPSAELYAVKVLGASGSGSVSSIAQGLEWAGNNGMHVANLSLGSPSPSATLEQAVNSATSRGVLVVAASGNSGAGSISYPARYANSMAVGATDQNNNRASFSQYGAGLDIVAPGVNVQSTYPGSTYASLNGTSMATPHVAGAAALVKQKNPSWSNVQIRNHLKNTATSLGSTNLYGSGLVNAEAATR

SEQ ID NO: 51524 - protein, 269 aa, Unidentified
AQSVPWGISRVQAPAAHNRGLTGSSVKVAVLDTGISTHPDLNIRGGASFVPGEPSTQDGNGHGTHVAGTIAALNNSIGVLGVAPSAELYAVKVLGASGSGSVSSIAQGLEWAGNNGMHVANLSLGSPSPSATLEQAVNSATSRGVLVVAASGNSGAGSISYPARYANAMAVGATDQNNNRASFSQYGAGLDIVAPGVNVQSTYPGSTYASLNGTSMATPHVAGAAALVKQKNPSWSNVQIRNHLKNTATSLGSTNLYGSGLVNAEAATR

SEQ ID NO: 51525 - protein, 269 aa, Unidentified
AQSVPWGISRVQAPAAHNRGLTGSGVKVAVLDTGCSTHPDLNIRGGASFVPGEPSTQDGNGHGTHVAGTIAALNNSIGVLGVAPSAELYAVKVLGASGSGSVSSIAQGLEWAGNNGMHVANLSLGSPSPSATLEQAVNSATSRGVLVVAASGNSGAGSISYPARYANAMAVGATDQNNNRASFSQYGAGLDIVAPGVNVQSTYPGSTYASLNGTSMATPHVAGAAALVKQKNPSWSNVQIRNHLKNTATSLGSTNLYGSGLVNAEAATR

SEQ ID NO: 51526 - protein, 269 aa, Unidentified
AQSVPWGISRVQAPAAHNRGLTGSGVKVAVLDTGTSTHPDLNIRGGASFVPGEPSTQDGNGHGTHVAGTIAALNNSIGVLGVAPSAELYAVKVLGASGSGSVSSIAQGLEWAGNNGMHVANLSLGSPSPSATLEQAVNSATSRGVLVVAASGNSGAGSISYPARYANAMAVGATDQNNNRASFSQYGAGLDIVAPGVNVQSTYPGSTYASLNGTSMATPHVAGAAALVKQKNPSWSNVQIRNHLKNTATSLGSTNLYGSGLVNAEAATR

SEQ ID NO: 51527 - protein, 269 aa, Unidentified
AQSVPWGISRVQAPAAHNRGLTGSGVKVAVLDTGISTHPDLNIRGGASFVPGEPSTQDGNGHGTHVAGTIAALNNSIGVLGVAPSAELYAVKVLGASGSGSVSSIAQGLEWAGNNGMHVANLSLGSPSPSATLEQAVNSATSRGVLVVAASGNSGAGSISYPARYANAMAVGATDQNNNRASFSQYGAGLDIVAPGVNVQSTYPGSTYASLEGTSMATPHVAGAAALVKQKNPSWSNVQIRNHLKNTATSLGSTNLYGSGLVNAEAATR

SEQ ID NO: 51528 - protein, 269 aa, Unidentified
AQSVPWGISRVQAPAAHNRGLTGSGVKVAVLDTGISTHPDINIRGGASFVPGEPSTQDGNGHGTHVAGTIAALNNSIGVLGVAPSAELYAVKVLGASGSGSVSSIAQGLEWAGNNGMHVANLSLGSPSPSATLEQAVNSATSRGVLVVAASGNSGAGSISYPARYANAMAVGATDQNNNRASFSQYGAGLDIVAPGVNVQSTYPGSTYASLNGTSMATPHVAGAAALVKQKNPSWSNVQIRNHLKNTATSLGSTNLYGSGLVNAEAATR

SEQ ID NO: 51529 - protein, 269 aa, Unidentified
AQSVPWGISRVQAPRAHNRGLTGSGVKVAVLDTGISTHPDLNIRGGASFVPGEPSTQDGNGHGTHVAGTIAALNNSIGVLGVAPSAELYAVKVLGASGSGSVSSIAQGLEWAGNNGMHVANLSLGSPSPSATLEQAVNSATSRGVLVVAASGNSGAGSISYPARYANAMAVGATDQNNNRASFSQYGAGLDIVAPGVNVQSTYPGSTYASLNGTSMATPHVAGAAALVKQKNPSWSNVQIRNHLKNTATSLGSTNLYGSGLVNAEAATR

SEQ ID NO: 51530 - protein, 269 aa, Unidentified
AQSVPWGISRVQAPAAHNRGSTGSGVKVAVLDTGISTHPDLNIRGGASFVPGEPSTQDGNGHGTHVAGTIAALNNSIGVLGVAPSAELYAVKVLGASGSGSVSSIAQGLEWAGNNGMHVANLSLGSPSPSATLEQAVNSATSRGVLVVAASGNSGAGSISYPARYANAMAVGATDQNNNRASFSQYGAGLDIVAPGVNVQSTYPGSTYASLNGTSMATPHVAGAAALVKQKNPSWSNVQIRNHLKNTATSLGSTNLYGSGLVNAEAATR

SEQ ID NO: 51531 - protein, 269 aa, Unidentified
AQSVPWGISRVQAFAAHNRGLTGSGVKVAVLDTGISTHPDLNIRGGASFVPGEPSTQDGNGHGTHVAGTIAALNNSIGVLGVAPSAELYAVKVLGASGSGSVSSIAQGLEWAGNNGMHVANLSLGSPSPSATLEQAVNSATSRGVLVVAASGNSGAGSISYPARYANAMAVGATDQNNNRASFSQYGAGLDIVAPGVNVQSTYPGSTYASLNGTSMATPHVAGAAALVKQKNPSWSNVQIRNHLKNTATSLGSTNLYGSGLVNAEAATR

SEQ ID NO: 51532 - protein, 269 aa, Unidentified
AQSVPWGISRVQAPAAHNRGLTGSGVKVAVLDTGISTHPDLNIRGGASFVPGEPSTQDGNGHGTHVAGTIAALNNSIGVLGVAPSAELYAVKVLGASGSGSVSSIAQGLEWAGNNGMHVANLSLGSPSPSATLEQAVNSATSRGVLVVAASGNSGAGSISYPARYANAMAVGATDQNNNRASFSQYGAGLDIVAPGVNVQSTTPGSTYASLNGTSMATPHVAGAAALVKQKNPSWSNVQIRNHLKNTATSLGSTNLYGSGLVNAEAATR

SEQ ID NO: 51533 - protein, 269 aa, Unidentified
AQSVPWGISCVQAPAAHNRGLTGSGVKVAVLDTGISTHPDLNIRGGASFVPGEPSTQDGNGHGTHVAGTIAALNNSIGVLGVAPSAELYAVKVLGASGSGSVSSIAQGLEWAGNNGMHVANLSLGSPSPSATLEQAVNSATSRGVLVVAASGNSGAGSISYPARYANAMAVGATDQNNNRASFSQYGAGLDIVAPGVNVQSTYPGSTYASLNGTSMATPHVAGAAALVKQKNPSWSNVQIRNHLKNTATSLGSTNLYGSGLVNAEAATR

SEQ ID NO: 51534 - protein, 269 aa, Unidentified
ARSVPWGISRVQAPAAHNRGLTGSGVKVAVLDTGISTHPDLNIRGGASFVPGEPSTQDGNGHGTHVAGTIAALNNSIGVLGVAPSAELYAVKVLGASGSGSVSSIAQGLEWAGNNGMHVANLSLGSPSPSATLEQAVNSATSRGVLVVAASGNSGAGSISYPARYANAMAVGATDQNNNRASFSQYGAGLDIVAPGVNVQSTYPGSTYASLNGTSMATPHVAGAAALVKQKNPSWSNVQIRNHLKNTATSLGSTNLYGSGLVNAEAATR

SEQ ID NO: 51535 - protein, 269 aa, Unidentified
AQSVPWGISRVQAPAAHNRGLTGSGVKVAVLDTGISTHPDLNIRGGASFVPGEPSTQDGNGHGTHVAGTIAALNNSIGVLGVAPSAELYAVKVLGASGSGSVSSIAQGLEWAGNNGMHVANLSLGSPSPSATLEQAVNSATSRGVLVVAASGNSGAGSISYPARYANAMAVGATDQNNNRASFSQYGAGLDIVAPGVNVQSTYPGSTYASLNGTSMATPHVAGAAALVKQKNPSWSNVQIRNHLKNTATSLGSTNLYGFGLVNAEAATR

SEQ ID NO: 51536 - protein, 269 aa, Unidentified
AQSVPWGISRVQAPAAHNRGLTGSGVKVAVLDTGISTHPDLNIRGGASFVPGEPSTQDGNGHGTHVAGTIAALNNSIGVLGVAPSSELYAVKVLGASGSGSVSSIAQGLEWAGNNGMHVANLSLGSPSPSATLEQAVNSATSRGVLVVAASGNSGAGSISYPARYANAMAVGATDQNNNRASFSQYGAGLDIVAPGVNVQSTYPGSTYASLNGTSMATPHVAGAAALVKQKNPSWSNVQIRNHLKNTATSLGSTNLYGSGLVNAEAATR

SEQ ID NO: 51537 - protein, 269 aa, Unidentified
AQSVPWGISRVQAPAAHNRGLTGSGVKVAVLDTGISTHPDLNIRGGASFVPGEPSTQDGNGHGTHVAGTIAALNNSIGVLGVAPNAELYAVKVLGASGSGSASSIAQGLEWAGNNGMHVANLSLGSPSPSATLEQAVNSATSRGVLVVAASGNSGAGSISYPARYANAMAVGATDQNNNRASFSQYGAGLDIVAPGVNVQSTYPGSTYASLNGTSSATPHVAGAAALVKQKNPSWSNVQIRNHLKNTATSLGSTNLYGSGLVNAEAATR

SEQ ID NO: 51538 - protein, 269 aa, Unidentified
AQSVPWGISRVQAPAAHNRGLTGSGVKVAVLDTGISTHPDLNIRGGASFVPGEPSTQDGNGHGTHVAGTIAALNNSIGVLGVAPSAELYAVKVLGASGSGSVTSIAQGLEWAGNNGMHVANLSLGSPSPSATLEQAVNSATSRGVLVVAASGNSGAGSISYPARYANAMAVGATDQNNNRASFSQYGAGLDIVAPGVNVQSTYPGSTYASLNGTSMATPHVAGAAALVKQKNPSWSNVQIRNHLKNTATSLGSTNLYGSGLVNAEAATR

SEQ ID NO: 51539 - protein, 269 aa, Unidentified
AQSVPWGISRVQAPAAHNRGLTGSGVKVAVLDTGISTHPDLNIRGGASFVPGEPSTQDGNGHGTHVAGTIAALNNSIGVLGVAPSAELYAVKVLGASGSGSVSSIAQGLEWAGNNGMHVANLSLGNPSPSATLEQAVNSATSRGVLVVAASGNSGAGSISYPARYANAMAVGATDQNNNRASFSQYGAGLDIVAPGVNVQSTYPGSTYASLNGTSMATPHVAGAAALVKQKNPSWSNVQIRNHLKNTATSLGSTNLYGSGLVNAEAATR

SEQ ID NO: 51540 - protein, 269 aa, Unidentified
AQSVPWGISRVQAPAAHNRGLTGSGVKVAVLDTGISTHPDLNIRGGASFVPGEPSTQDGNGHGTHVAGTIAALNNSIGVLGVAPSAELYAVKVLGASGSGSVSSIAQGLEWAGNNGMHVANLSLGSPSPSATLEQAVNSATSRGVLVVAASGNSGAGSISYPARYANAMAVGATDQNNNRASFSQYGAGLDIVAPGVNVQSTYPGSTYASLNGTSMATPHVAGAAALVKQKNPSWSNVQIRNHLKNTAGSLGSTNLYGSGLVNAEAATR

SEQ ID NO: 51541 - protein, 269 aa, Unidentified
AQSVPWGISRVQAPAAHNRGLTGSGVKVAVLDTGISTHPDLNIRGGASFVPGEPSTQDGNGHGTHVAGTIAALNNSIGVLGVAPSAELYAVKVLGASGSGSVSSIAQGLEWAGNNGMHVANLSLGSPVPSATLEQAVNSATSRGVLVVAASGNSGAGSISYPARYANAMAVGATDQNNNRASFSQYGAGLDIVAPGVNVQSTYPGSTYASLNGTSMATPHVAGAAALVKQKNPSWSNVQIRNHLKNTATSLGSTNLYGSGLVNAEAATR

SEQ ID NO: 51542 - protein, 269 aa, Unidentified
AQSVPWGISRVQAPAAHNRGLTGSGVKVAVLDTGISTHPDLNIRGGASFVPGEPSTQDGNGHGTHVAGTIAALNNSIGVLGVAPSAELYAVKVLGASGSGSVSSIAQGLEWAGNNGMHVANLSLGSETPSATLEQAVNSATSRGVLVVAASGNSGAGSISYPARYANAMAVGATDQNNNRASFSQYGAGLDIVAPGVNVQSTYPGSTYASLNGTSSATPHVAGAAALVKQKNPSWSNVQIRNHLKNTATSLGSTNLYGSGLVNAEAATR

SEQ ID NO: 51543 - protein, 269 aa, Unidentified
AQSVPWGISRVQAPAAHNRGLTGSGVKVAVLDTGISTHPDLNIRGGASFVPGEPSTQDGNGHGTHVAGTIAALNNSIGVLGVAPSAELYAVKVLGASGSGSVSSIAQGLEWAGNNGMHVANLSLGSPSPSATLEQAVNSATSRGVLVVAASGNSGAGSISYPARYANAMAVGATDQNNNRASFSQYGAGLDIVAPGVNVQSTYPGSTYASLNGTSMATPHVAGAAALVKQKNPSWSNVQIRNHLKNDATSLGSTNLYGSGLVNAEAATR

SEQ ID NO: 51544 - protein, 269 aa, Unidentified
AQSVPWGISRVQAPAAHNRKLTGSGVKVAVLDTGISTHPDLNIRGGASFVPGEPSTQDGNGHGTHVAGTIAALNNSIGVLGVAPSAELYAVKVLGASGDGSVSSIAQGLEWAGNNGMHVANLSLGSPSPSATLEQAVNSATSRGVLVVAASGNSGAGSISYPARYANAMAVGATDQNNNRASFSQYGAGLDIVAPGVNVQSTYPGSTYASLNGTSSATPHVAGAAALVKQKNPSWSNVQIRNHLKNTATSLGSTNLYGSGLVNAEAATR

SEQ ID NO: 51545 - protein, 269 aa, Unidentified
AQSVPWGISRVQAPAAHNRGLTGSGVKVAVLDTGISTHPDLNIRGGASFVPGEPSTQDGNGHGTHVAGTIAALNNSIGVLGVAPSAELYAVKVLGASGSASVSSIAQGLEWAGNNGMHVANLSLGSPSPSATLEQAVNSATSRGVLVVAASGNSGAGSISYPARYANAMAVGATDQNNNRASFSQYGAGLDIVAPGVNVQSTYPGSTYASLNGTSMATPHVAGAAALVKQKNPSWSNVQIRNHLKNTATSLGSTNLYGSGLVNAEAATR

SEQ ID NO: 51546 - protein, 269 aa, Unidentified
AQSVPWGISRVQAPTAHNRGLTGSGVKVAVLDTGISTHPDLNIRGGASFVPGEPSTQDGNGHGTHVAGTIAALNNSIGVLGVAPSAELYAVKVLGASGSGSVSSIAQGLEWAGNNGMHVANLSLGSPSPSATLEQAVNSATSRGVLVVAASGNSGAGSISYPARYANAMAVGATDQNNNRASFSQYGAGLDIVAPGVNVQSTYPGSTYASLNGTSMATPHVAGAAALVKQKNPSWSNVQIRNHLKNTATSLGSTNLYGSGLVNAEAATR

SEQ ID NO: 51547 - protein, 269 aa, Unidentified
AQSVPWGISRVQAPAAHNRGLTGSGVKTAVLDTGISTHPDLNIRGGASFVPGEPSTQDGNGHGTHVAGTIAALNNSIGVLGVAPSAELYAVKVLGASGSGSVSSIAQGLEWAGNNGMHVANLSLGSPSPSATLEQAVNSATSRGVLVVAASGNSGAGSISYPARYANAMAVGATDQNNNRASFSQYGAGLDIVAPGVNVQSTYPGSTYASLNGTSMATPHVAGAAALVKQKNPSWSNVQIRNHLKNTATSLGSTNLYGSGLVNAEAATR

SEQ ID NO: 51548 - protein, 269 aa, Unidentified
AQSVPWGISRVQAPAAHNRGLTGSGVKVAVLDTGISTHPDLNIRGGASFVPGEPSTQDGNGHGTHVAGTIAALNNSIGVLGVAPSAELHAVKVLGASGSGSVSSIAQGLEWAGNNGMHVANLSLGSPSPSATLEQAVNSATSRGVLVVAASGNSGAGSISYPARYANAMAVGATDQNNNRASFSQYGAGLDIVAPGVNVQSTYPGSTYASLNGTSMATPHVAGAAALVKQKNPSWSNVQIRNHLKNTATSLGSTNLYGSGLVNAEAATR

SEQ ID NO: 51549 - protein, 269 aa, Unidentified
AQSVPWGISRVQAPAAHNRGLTGSGVKVAVLDTGISTHPDLNIRGGASFVPGEPSTQDGNGHGTHVAGTIAALNNSIGVLGVAPSAELYAVKVLGASGSGSVSSIAQGLEWAGNNGLHVANLSLGSPSPSATLEQAVNSATSRGVLVVAASGNSGAGSISYPARYANAMAVGATDQNNNRASFSQYGAGLDIVAPGVNVQSTYPGSTYASLNGTSMATPHVAGAAALVKQKNPSWSNVQIRNHLKNTATSLGSTNLYGSGLVNAEAATR

SEQ ID NO: 51550 - protein, 269 aa, Unidentified
AQSVPWGISRVQAPAAHNRGLTGSGVKVAVLDTGISTHPDLNIRGGASFVPGEPSTQDGNGHGTHVAGTIAALNNSIGVLGVAPSAELYAVKVLGASGSGSVSSIAQGLEWAGNNGMHVANLSLGSPSPEATLEQAVNSATSRGVLVVAASGNSGAGSISYPARYANAMAVGATDQNNNRASFSQYGAGLDIVAPGVNVQSTYPGSTYASLNGTSMATPHVAGAAALVKQKNPSWSNVQIRNHLKNTATSLGSTNLYGSGLVNAEAATR

SEQ ID NO: 51551 - protein, 269 aa, Unidentified
AQSVPWGISRVQAPAAHNRGLTGSGVKVAVLDTGISTHPDLNIRGGASFVPGEPSTQDGNGHGTHVAGTIAALNNSIGVLGVAPSAELYAVKVLGASGSGSVSSIAQGLEWAGNNGMHVANLSLGSPSPSATLEQAVNSATSRGVLVVAASGNSGAGSISYPARYANAMAVGATDQNNNRASFSQYGAGLDIVAPGVNVQSSYPGSTYASLNGTSMATPHVAGAAALVKQKNPSWSNVQIRNHLKNTATSLGSTNLYGSGLVNAEAATR

SEQ ID NO: 51552 - protein, 269 aa, Unidentified
AQSVPWGISRVQAPAAHNRGLTGSGVKVAVLDTGISTHPDLNIRGGASFVPGEPSTQDGNGTGTHVAGTIAALNNSIGVLGVAPSAELYAVKVLGASGSGSVSSIAQGLEWAGNNGMHVANLSLGSPSPSATLEQAVNSATSRGVLVVAASGNSGAGSISYPARYANAMAVGATDQNNNRASFSQYGAGLDIVAPGVNVQSTYPGSTYASLNGTSMATPHVAGAAALVKQKNPSWSNVQIRNHLKNTATSLGSTNLYGSGLVNAEAATR

SEQ ID NO: 51553 - protein, 269 aa, Unidentified
AQSVPWGISRVQAPAAHNRGLTGSGVKVAVLDTGISTHPDLNIRGGASFVPGEPSTQDGNGHGTHVAGTIAALNNSIGVLGVAPSAELYAVKVLGASGSGSVSSIAQGLEWAGNNGMHVANLSLGSPSPSATLEQAVNSATSRGVLVVAASGNSGAGSISYPARYANAMAVGATDQNNNRASFSQYGAGLDIVAPGVNVQSTYPGSTYASLNGTSMATPHVAGAAALVKQKNPSWSNVQIRNHLKNTATSLGSINLYGSGLVNAEAATR

SEQ ID NO: 51554 - protein, 269 aa, Unidentified
AQSVPWGISRVQAPAAHNRGLTGSGVKVAVLDTGISTHPDLNIRGGASFVPGEPSTQDGNGHGTHVAGTIAALNNSIGVLGVAPSAELYAVKVLGASGSGSVSSIAQGLEWAGNNGMHVANLSLGSPSPSATLEQAVNSATSRGVLVVAASGNSGAGSISYPARYANAMAVGATSQNNNRASFSQYGAGLDIVAPGVNVQSTYPGSTYASLNGTSMATPHVAGAAALVKQKNPSWSNVQIRNHLKNTATSLGSTNLYGSGLVNAEAATR

SEQ ID NO: 51555 - protein, 269 aa, Unidentified
AQSVPWGISRVQAPAAHNRGLTGSGVKVAVLDTGISTHPDLNIRGGAIFVPGEPSTQDGNGHGTHVAGTIAALNNSIGVLGVAPSAELYAVKVLGASGSGSVSSIAQGLEWAGNNGMHVANLSLGSPSPSATLEQAVNSATSRGVLVVAASGNSGAGSISYPARYANAMAVGATDQNNNRASFSQYGAGLDIVAPGVNVQSTYPGSTYASLNGTSMATPHVAGAAALVKQKNPSWSNVQIRNHLKNTATSLGSTNLYGSGLVNAEAATR

SEQ ID NO: 51556 - protein, 269 aa, Unidentified
AQSVPWGISRVQAPAAHNRGLTGSGVKVAVLDTGISTHPDLNIRGGASFVPGEPSTQDGNGHGTHVAGTIAALNNSIGVLGVAPSAELYAVKVLGASGSGSVSSIAQGLEWAGNNGMHVANLSLGSPSPSATLEQAVNSATSRGVLVVAASGNSGAGSISYPARYANAMAVGATDQNNNRASFSQYGAGLDIVAPGVNVQSTYPGSTYASLNGTSMATPHVAGAAALVKQKNPSWSNVQIRNHLKNTATSLGSTNLYGSGLVNATAATR

SEQ ID NO: 51557 - protein, 269 aa, Unidentified
AQSVPWGISRVQAPAAHNRGLTGSGVKVAVLDTGISTAPDLNIRGGASFVPGEPSTQDGNGHGTHVAGTIAALNNSIGVLGVAPSAELYAVKVLGASGSGSVSSIAQGLEWAGNNGMHVANLSLGSPSPSATLEQAVNSATSRGVLVVAASGNSGAGSISYPARYANAMAVGATDQNNNRASFSQYGAGLDIVAPGVNVQSTYPGSTYASLNGTSMATPHVAGAAALVKQKNPSWSNVQIRNHLKNTATSLGSTNLYGSGLVNAEAATR

SEQ ID NO: 51558 - protein, 269 aa, Unidentified
AQSVPWGISRVQAPAAHNRGLTGSGVKVAVLDTGISTHPDLNIRGGASFVPGEPSTQDGNGHGTHVAGTIAALNNSIGVLGVAPSAELYAVKVLGASGSGSVSSIAQGLEWAGNNGMHVANLSLGSPSPSATLEQAVNSATSRGVLVVAASGNSGAGSISYPARYANAMAVGATDQNNNRASFSQYGAGLDIVAPGVNVQSTYPGSTYASLNGTSMATPHVAGAAALVKQKNPSWSNVQIRNHLKNTLTSLGSTNLYGSGLVNAEAATR

SEQ ID NO: 51559 - protein, 269 aa, Unidentified
AQSVPRGISRVQAPAAHNRGLTGSGVKVAVLDTGISTHPDLNIRGGASFVPGEPSTQDGNGHGTHVAGTIAALNNSIGVLGVAPSAELYAVKVLGASGSGSVSSIAQGLEWAGNNGMHVANLSLGSPSPSATLEQAVNSATSRGVLVVAASGNSGAGSISYPARYANAMAVGATDQNNNRASFSQYGAGLDIVAPGVNVQSTYPGSTYASLNGTSMATPHVAGAAALVKQKNPSWSNVQIRNHLKNTATSLGSTNLYGSGLVNAEAATR

SEQ ID NO: 51560 - protein, 269 aa, Unidentified
AQSVPWGISRVQAPAAHNRGLTGSGVKVAVLDTGISTHPDLNIRGGASFVPGEPSTQDGNGHGTHVAGTIAALNNSIGVLGVAPSAELYAVKVLGASGSGSVSSIAQGLEWAGNNGMHVANLSLGSPSPSATLEQAVNSATSRGVLVVAASGNSGAGSISYPARYANAMAVGATDQNNNRASFSQYGAGLDIVAPGVNVQSTYPGSTYASLNGTSMATPHVAGAAALVKQKNPSWSNVQIRNHLKNTATSLGSTNLYGSGLVNAIAATR

SEQ ID NO: 51561 - protein, 269 aa, Unidentified
AQSVPWGIRRVQAPAAHNRGLTGSGVKVAVLDTGISTHPDLNIRGGASFVPGEPSTQDGNGHGTHVAGTIAALNNSIGVLGVAPSAELYAVKVLGASGSGSVSSIAQGLEWAGNNGMHVANLSLGSPSPSATLEQAVNSATSRGVLVVAASGNSGAGSISYPARYANAMAVGATDQNNNRASFSQYGAGLDIVAPGVNVQSTYPGSTYASLNGTSMATPHVAGAAALVKQKNPSWSNVQIRNHLKNTATSLGSTNLYGSGLVNAEAATR

SEQ ID NO: 51562 - protein, 269 aa, Unidentified
AQSVPWGISRVQAPAAHNRGLTGSGVKVAVLDTGISTHPDLNIRGGASFVPGEPSTQDGNGHGTHVAGTIAALNNSIGVLGVAPSAELYAVKVLGASGSGSVSSIAQGLEWAGNNGMHVANLSLGSPSPSATLEQAVNSATSRGVLVVAASGNSGAGSISYPARYANAMAVGATDQNNNRASFSQYGAGLDIVAPGVNVQSTYPGSTYASLNGTSMATPHVAGAAALVKQKNPGWSNVQIRNHLKNTATSLGSTNLYGSGLVNAEAATR

SEQ ID NO: 51563 - protein, 269 aa, Unidentified
AQSVPWGISRVQAPAAHNRGLTGSGVKVAVLDTGISTHPDLNIRGGASFVPGEPSTQDGNGHGTHVAGTIAALNNSIGVLGVAPSAELYAVKVLGASGSGSVSSIAQGLEWAGNNGMHVANLSLGSPSPSATLEQAVNSATSRGVLVVAASGNSGAGSISYPARYANAVAVGATDQNNNRASFSQYGAGLDIVAPGVNVQSTYPGSTYASLNGTSMATPHVAGAAALVKQKNPSWSNVQIRNHLKNTATSLGSTNLYGSGLVNAEAATR

SEQ ID NO: 51564 - protein, 269 aa, Unidentified
AQSVPWGISRVQAPAAHNRGLTGSGVKVAVLDTGISTHPDLNIRGGASFVPGEPSTQDGNGHGTHVAGTIAALNNSIGVLGVAPSAELYAVKVLGASGSGSVSSIAQGLEWAGNNGMRVANLSLGSPSPSATLEQAVNSATSRGVLVVAASGNSGAGSISYPARYANAMAVGATDQNNNRASFSQYGAGLDIVAPGVNVQSTYPGSTYASLNGTSMATPHVAGAAALVKQKNPSWSNVQIRNHLKNTATSLGSTNLYGSGLVNAEAATR

SEQ ID NO: 51565 - protein, 269 aa, Unidentified
AQSSPWGISRVQAPAAHNRGLTGSGVKVAVLDTGISTHPDLNIRGGASFVPGEPSTQDGNGHGTHVAGTIAALNNSIGVLGVAPSAELYAVKVLGASGSGSVSSIAQGLEWAGNNGMHVANLSLGSPSPSATLEQAVNSATSRGVLVVAASGNSGAGSISYPARYANAMAVGATDQNNNRASFSQYGAGLDIVAPGVNVQSTYPGSTYASLNGTSMATPHVAGAAALVKQKNPSWSNVQIRNHLKNTATSLGSTNLYGSGLVNAEAATR

SEQ ID NO: 51566 - protein, 269 aa, Unidentified
AQSVPWGISRVQSPAAHNRGLTGSGVKVAVLDTGISTHPDLNIRGGASFVPGEPSTQDGNGHGTHVAGTIAALNNSIGVLGVAPSAELYAVKVLGASGSGSVSSIAQGLEWAGNNGMHVANLSLGSPSPSATLEQAVNSATSRGVLVVAASGNSGAGSISYPARYANAMAVGATDQNNNRASFSQYGAGLDIVAPGVNVQSTYPGSTYASLNGTSMATPHVAGAAALVKQKNPSWSNVQIRNHLKNTATSLGSTNLYGSGLVNAEAATR

SEQ ID NO: 51567 - protein, 269 aa, Unidentified
AQSVPWGISRVQAPAAHNRGLTGSGVKVAVLDTGISTHPDLNIRGGASFVPGEPSTQDGNGHGTHVAGTIAALNNSIGVLGVAPSAELYAVKVLGASGSGSVSSIAQGLEWAGNNGMHVANLSLGSPSPSATLEQAVNSATSRGVLVVAASGNSGAGSIDYPARYANAMAVGATDQNNNRASFSQYGAGLDIVAPGVNVQSTYPGSTYASLNGTSQATPHVAGAAALVKQKNPSWSNVQIRNHLKNTATSLGSTNLYGSGLVNAEAATR

SEQ ID NO: 51568 - protein, 269 aa, Unidentified
AQSVPWGISRVQAPAAHNRGLTGSGVKVAVLDTGISTHPDLNIRGGASFVPGEPSTQDGNGHGTHVAGTIAALNNSIGVLGVAPSAELYAVKVLGASGSGSVSAIAQGLEWAGNNGMHVANLSLGSPSPSATLEQAVNSATSRGVLVVAASGNSGAGSISYPARYANAMAVGATDQNNNRASFSQYGAGLDIVAPGVNVQSTYPGSTYASLNGTSMATPHVAGAAALVKQKNPSWSNVQIRNHLKNTATSLGSTNLYGSGLVNAEAATR

SEQ ID NO: 51569 - protein, 269 aa, Unidentified
AQSVPWGISRVQAPAAHNRGLTGSGVKVAVLDTGISTHPDLNIRGGASFVPGEPSTQDGNGHGTHVAGTIAALNNSIGVLGVAPSAELGAVKVLGASGSGSVSSIAQGLEWAGNNGMHVANLSLGSPSPSATLEQAVNSATSRGVLVVAASGNSGAGSISYPARYANAMAVGATDQNNNRASFSQYGAGLDIVAPGVNVQSTYPGSTYASLNGTSMATPHVAGAAALVKQKNPSWSNVQIRNHLKNTATSLGSTNLYGSGLVNAEAATR

SEQ ID NO: 51570 - protein, 269 aa, Unidentified
AQSVPWGISRVQAPAAHNRGLTGSGVKVAVLDTGISTHPDLNIRGGASFVPGEPSTQDGNGHGTHVAGTIAALNNSIGVLGVAPSAEAYAVKVLGASGSGSVSSIAQGLEWAGNNGMHVANLSLGSPSPSATLEQAVNSATSRGVLVVAASGNSGAGSISYPARYANAMAVGATDQNNNRASFSQYGAGLDIVAPGVNVQSTYPGSTYASLNGTSMATPHVAGAAALVKQKNPSWSNVQIRNHLKNTATSLGSTNLYGSGLVNAEAATR

SEQ ID NO: 51571 - protein, 269 aa, Unidentified
AQSVPWGISRVQAPAAHNRGLTGSGVKVAVLDTGISTMPDLNIRGGASFVPGEPSTQDGNGHGTHVAGTIAALNNSIGVLGVAPSAELYAVKVLGASGSGSVSSIAQGLEWAGNNGMHVANLSLGSPSPSATLEQAVNSATSRGVLVVAASGNSGAGSISYPARYANAMAVGATDQNNNRASFSQYGAGLDIVAPGVNVQSTYPGSTYASLNGTSMATPHVAGAAALVKQKNPSWSNVQIRNHLKNTATSLGSTNLYGSGLVNAEAATR

SEQ ID NO: 51572 - protein, 269 aa, Unidentified
AQSVPWGISRVQAPAAHNRGLTGSGVKVAVLDTGISTHPDLNIRGGASFVPGEPSTQDGNGHGTHVAGTIAALNNSIGVLGVAPSAELYAVKVLGASGSGSVSSIAQGIEWAGNNGMHVANLSLGSPSPSATLEQAVNSATSRGVLVVAASGNSGAGSISYPARYANAMAVGATDQNNNRASFSQYGAGLDIVAPGVNVQSTYPGSTYASLNGTSMATPHVAGAAALVKQKNPSWSNVQIRNHLKNTATSLGSTNLYGSGLVNAEAATR

SEQ ID NO: 51573 - protein, 269 aa, Unidentified
AQSVPWGISRVQAPAAHNRGLTGSGVKVAVLDTGISTHPDLNIRGGASFVPGEPSTQDGNGHGTHVAGTIAALNNSIGVLGVAPSAELAAVKVLGASGSGSVSSIAQGLEWAGNNGMHVANLSLGSPSPSATLEQAVNSATSRGVLVVAASGNSGAGSISYPARYANAMAVGATDQNNNRASFSQYGAGLDIVAPGVNVQSTYPGSTYASLNGTSMATPHVAGAAALVKQKNPSWSNVQIRNHLKNTATSLGSTNLYGSGLVNAEAATR

SEQ ID NO: 51574 - protein, 269 aa, Unidentified
AQSVPWGISRVQAPAAHNRGLTGSGVKVAVLDTGISTHPDLNIRGGASFVPGEPSTQDGNGHGTHVAGTIAALNNSIGVLGVAPSAELYAVKVLGASGSGSVSSIGQGLEWAGNNGMHVANLSLGSPSPSATLEQAVNSATSRGVLVVAASGNSGAGSISYPARYANAMAVGATDQNNNRASFSQYGAGLDIVAPGVNVQSTYPGSTYASLNGTSMATPHVAGAAALVKQKNPSWSNVQIRNHLKNTATSLGSTNLYGSGLVNAEAATR

SEQ ID NO: 51575 - protein, 269 aa, Unidentified
AQSVPWGISRVQAPAAHNRGLTGSGVKVAVLDTGISTHPDLNIRGGASSVPGEPSTQDGNGHGTHVAGTIAALNNSIGVLGVAPSAELYAVKVLGASGSGSVSSIAQGLEWAGNNGMHVANLSLGSPSPSATLEQAVNSATSRGVLVVAASGNSGAGSISYPARYANAMAVGATDQNNNRASFSQYGAGLDIVAPGVNVQSTYPGSTYASLNGTSMATPHVAGAAALVKQKNPSWSNVQIRNHLKNTATSLGSTNLYGSGLVNAEAATR

SEQ ID NO: 51576 - protein, 269 aa, Unidentified
AQSVPWGISRVQAPAAHNRGLTGSGVKVAVLDTGISTDPDLNIRGGASFVPGEPSTQDGNGHGTHVAGTIAALNNSIGVLGVAPSAELYAVKVLGASGSGSVSSIAQGLEWAGNNGMHVANLSLGSPSPSATLEQAVNSATSRGVLVVAASGNSGAGSISYPARYANAMAVGATDQNNNRASFSQYGAGLDIVAPGVNVQSTYPGSTYASLNGTSMATPHVAGAAALVKQKNPSWSNVQIRNHLKNTATSLGSTNLYGSGLVNAEAATR

SEQ ID NO: 51577 - protein, 269 aa, Unidentified
ASSVPWGISRVQAPAAHNRGLTGSGVKVAVLDTGISTHPDLNIRGGASFVPGEPSTQDGNGHGTHVAGTIAALNNSIGVLGVAPSAELYAVKVLGASGSGSVSSIAQGLEWAGNNGMHVANLSLGSPSPSATLEQAVNSATSRGVLVVAASGNSGAGSISYPARYANAMAVGATDQNNNRASFSQYGAGLDIVAPGVNVQSTYPGSTYASLNGTSMATPHVAGAAALVKQKNPSWSNVQIRNHLKNTATSLGSTNLYGSGLVNAEAATR

SEQ ID NO: 51578 - protein, 269 aa, Unidentified
AQSVPWGISRVQAPAAHNRGHTGSGVKVAVLDTGISTHPDLNIRGGASFVPGEPSTQDGNGHGTHVAGTIAALNNSIGVLGVAPSAELYAVKVLGASGSGSVSSIAQGLEWAGNNGMHVANLSLGSPSPSATLEQAVNSATSRGVLVVAASGNSGAGSISYPARYANAMAVGATDQNNNRASFSQYGAGLDIVAPGVNVQSTYPGSTYASLNGTSMATPHVAGAAALVKQKNPSWSNVQIRNHLKNTATSLGSTNLYGSGLVNAEAATR

SEQ ID NO: 51579 - protein, 269 aa, Unidentified
AQSVPWGISRVQAPAAHNRGLTGSGVKVAVLDTGISTHPDLNIRGGASFVPGEPSTQDGNGHGTHVAGTIAALNNSIGVLGVAPSAELYAVKVLGASGSGSVSSIAQGLEWAGNNGMHVANLSLGSPSPSATLEQAVNSATSRGVLVVAASGNSGAGSISYPARYANAMAVGATDQNNNRASFSQYGAGLDIVAPGVNVQSTYPGSTYHSLNGTSMATPHVAGAAALVKQKNPSWSNVQIRNHLKNTATSLGSTNLYGSGLVNAEAATR

SEQ ID NO: 51580 - protein, 269 aa, Unidentified
AQSVPWGISRVQAPAAHNRGLTGSGVKVAVLDTGISTHPDLNIRGGASFVPGEPSTQDGNGHGTHVAGTIAALNNSIGVLGVAPSAELYAVKVLGQSGSGSVSSIAQGLEWAGNNGMHVANLSLGSPSPSATLEQAVNSATSRGVLVVAASGNSGAGSISYPARYANAMAVGATDQNNNRASFSQYGAGLDIVAPGVNVQSTYPGSTYASLNGTSMATPHVAGAAALVKQKNPSWSNVQIRNHLKNTATSLGSTNLYGSGLVNAEAATR

SEQ ID NO: 51581 - protein, 269 aa, Unidentified
AQSVPWGISRVQAPAAHNRGLTGSGVKVAVLDTGISTHPDLNIRGGASFVPGEPSTQDGNGHGTHVAGTIAALNNSIGVLGVAPSAELYAVKVLGASGSGSVSSIAQGLEWAGNNGMHVANLSLGSPSPSATLEQAVNSATSRGVLVVAASGNSGAGSISYPARYANAMAVGATDQNNNRASFSQYGAGLDIVAPGVNVQSTYPGSTYASLNGTSMATPHVAGAIALVKQKNPSWSNVQIRNHLKNTATSLGSTNLYGSGLVNAEAATR

SEQ ID NO: 51582 - protein, 269 aa, Unidentified
AQSVPWGISRVQAPAAHNRGLTGSGVKVAVLDTGISTHPDLNIRGGASFVPGEPSTQDGNGHGTHVAGTIAALNNSIGVLGVAPSAELYAVKVLGASGSGSVSSIAQGLEWAGNNGMHVANLSLGSPSPSATLEQAVNSATSRGCLVVAASGNSGAGSISYPARYANAMAVGATDQNNNRASFSQYGAGLDIVAPGVNVQSTYPGSTYASLNGTSMATPHVAGAAALVKQKNPSWSNVQIRNHLKNTATSLGSTNLYGSGLVNAEAATR

SEQ ID NO: 51583 - protein, 269 aa, Unidentified
AQSVPWGISRVQAPAAHNRGLTGSGVKVAVLDTGISTHPDLNIRGGASFVPGEPSTQDGNGHGTHVAGTIAALNNSIGVLGVAPSAELYAVKVLGASGSGSVSSIAQGLEWAGNNGMHVANLSLGSPSPSATLEQAVNSATSRGVLVVAASGNSGAGSISYPARYANAMAVGATDQNNNRARFSQYGAGLDIVAPGVNVQSTYPGSTYASLNGTSMATPHVAGAAALVKQKNPSWSNVQIRNHLKNTATSLGSTNLYGSGLVNAEAATR

SEQ ID NO: 51584 - protein, 269 aa, Unidentified
AQSVPWGISRVQAPAAHNRGLTGSGVKVAVLDTGISTHPDLNIRGGASFVPGEPSTQDGNGHGTHVAGTIAALNNSIGVLGVAPSAQLYAVKVLGASGSGSVSSIAQGLEWAGNNGMHVANLSLGSPSPSATLEQAVNSATSRGVLVVAASGNSGAGSISYPARYANAMAVGATDQNNNRASFSQYGAGLDIVAPGVNVQSTYPGSTYASLNGTSMATPHVAGAAALVKQKNPSWSNVQIRNHLKNTATSLGSTNLYGSGLVNAEAATR

SEQ ID NO: 51585 - protein, 269 aa, Unidentified
AQRVPWGISRVQAPAAHNRGLTGSGVKVAVLDTGISTHPDLNIRGGASFVPGEPSTQDGNGHGTHVAGTIAALNNSIGVLGVAPSAELYAVKVLGASGSGSVSSIAQGLEWAGNNGMHVANLSLGSPSPSATLEQAVNSATSRGVLVVAASGNSGAGSISYPARYANAMAVGATDQNNNRASFSQYGAGLDIVAPGVNVQSTYPGSTYASLNGTSMATPHVAGAAALVKQKNPSWSNVQIRNHLKNTATSLGSTNLYGSGLVNAEAATR

SEQ ID NO: 51586 - protein, 269 aa, Unidentified
AQSVPWGISRVQAPAAHNRGLTGSGVKVAVLDTGISTHPDLNIRGGASFVPGEPSTQDGNGHGTHVAGTIAALNNSIGVLGVAPSAELYAVKVLGASGSGSVSSIAQGLEWAGNNGMHVANLSLGSPSPSATLEQAVNSATSRGVLVVAASGNSGAGSISYPARYANAMAVGATDQNNNRASFSQYGAGLDIVAPGVNVQSTYPGSTYASLNGTSMATPHVAGAAALVKQKNPSWSNVQIRIHLKNTATSLGSTNLYGSGLVNAEAATR

SEQ ID NO: 51587 - protein, 269 aa, Unidentified
AQSVPWGISRVQAPAAHNRGLTGSGVKVAVLDTGISTHPDLNIRGGASFVPGEPSTQDGNGHGTHVAGTIAALNNSIGVLGVAPSAELYAVKVLGASGSGSVSSIAQGLEWAGNNGMHVANLSLGSPSPSATLEQAVNSATSRGVLVVAASGNSGAGSISYPARYANAMAVGATDQNNNRASFSQYGAGLDIVAPGVNVQSTYPGSTYASLNGTSMATPHVAGAAALVKQKLPSWSNVQIRNHLKNTATSLGSTNLYGSGLVNAEAATR

SEQ ID NO: 51588 - protein, 269 aa, Unidentified
AQSVPWGISRVQAPAAHNRGLTGSGVKVAVLDTGISTHPDLNIRGGASFVPGEPSTQDGNGHGTHVAGTIAALNNSIGVLGVAPSAELYAVKVLGASGSGSVSSIAQGLEWAGNNGMHVANLSLGLPSPSATLEQAVNSATSRGVLVVAASGNSGAGSISYPARYANAMAVGATDQNNNRASFSQYGAGLDIVAPGVNVQSTYPGSTYASLNGTSMATPHVAGAAALVKQKNPSWSNVQIRNHLKNTATSLGSTNLYGSGLVNAEAATR

SEQ ID NO: 51589 - protein, 269 aa, Unidentified
AQSVPWGISRVQAPAAHRRGLTGSGVKVAVLDTGISTHPDLNIRGGASFVPGEPSTQDGNGHGTHVAGTIAALNNSIGVLGVAPSAELYAVKVLGASGSGSVSSIAQGLEWAGNNGMHVANLSLGSPSPSATLEQAVNSATSRGVLVVAASGNSGAGSISYPARYANAMAVGATDQNNNRASFSQYGAGLDIVAPGVNVQSTYPGSTYASLNGTSMATPHVAGAAALVKQKNPSWSNVQIRNHLKNTATSLGSTNLYGSGLVNAEAATR

SEQ ID NO: 51590 - protein, 269 aa, Unidentified
AQSVPWGISRVQAPAAHNRGLTGSGVKVAVLDTGISTHPDLNIRGGASFVPGEPSTQDGNGHGTHVAGTIAARNNSIGVLGVAPSAELYAVKVLGASGSGSVSSIAQGLEWAGNNGMHVANLSLGSPSPSATLEQAVNSATSRGVLVVAASGNSGAGSISYPARYANAMAVGATDQNNNRASFSQYGAGLDIVAPGVNVQSTYPGSTYASLNGTSMATPHVAGAAALVKQKNPSWSNVQIRNHLKNTATSLGSTNLYGSGLVNAEAATR

SEQ ID NO: 51591 - protein, 269 aa, Unidentified
AQSVPWGISRLQAPAAHNRGLTGSGVKVAVLDTGISTHPDLNIRGGASFVPGEPSTQDGNGHGTHVAGTIAALNNSIGVLGVAPSAELYAVKVLGASGSGSVSSIAQGLEWAGNNGMHVANLSLGSPSPSATLEQAVNSATSRGVLVVAASGNSGAGSISYPARYANAMAVGATDQNNNRASFSQYGAGLDIVAPGVNVQSTYPGSTYASLNGTSMATPHVAGAAALVKQKNPSWSNVQIRNHLKNTATSLGSTNLYGSGLVNAEAATR

SEQ ID NO: 51592 - protein, 269 aa, Unidentified
AQQVPWGISRVQAPAAHNRGLTGSGVKVAVLDTGISTHPDLNIRGGASFVPGEPSTQDGNGHGTHVAGTIAALNNSIGVLGVAPSAELYAVKVLGASGSGSVSSIAQGLEWAGNNGMHVANLSLGSPSPSATLEQAVNSATSRGVLVVAASGNSGAGSISYPARYANAMAVGATDQNNNRASFSQYGAGLDIVAPGVNVQSTYPGSTYASLNGTSMATPHVAGAAALVKQKNPSWSNVQIRNHLKNTATSLGSTNLYGSGLVNAEAATR

SEQ ID NO: 51593 - protein, 269 aa, Unidentified
AQSVPWGISRVQAPAAHNRGLTGSGVKVAALDTGISTHPDLNIRGGASFVPGEPSTQDGNGHGTHVAGTIAALNNSIGVLGVAPSAELYAVKVLGASGSGSVSSIAQGLEWAGNNGMHVANLSLGSPSPSATLEQAVNSATSRGVLVVAASGNSGAGSISYPARYANAMAVGATDQNNNRASFSQYGAGLDIVAPGVNVQSTYPGSTYASLNGTSMATPHVAGAAALVKQKNPSWSNVQIRNHLKNTATSLGSTNLYGSGLVNAEAATR

SEQ ID NO: 51594 - protein, 269 aa, Unidentified
AQSVPWGISRVQAPAAHNRGLTGSGVKVAVLDTGISTHPDLNIRGGASFVPGEPSTQDGNGHGTHVAGTIAALNNSIGVLGVAPSAELYAVKVLGASGSGSVSSIAQGLEWAGNNGMHVANLSLGSPSWSATLEQAVNSATSRGVLVVAASGNSGAGSISYPARYANAMAVGATDQNNNRASFSQYGAGLDIVAPGVNVQSTYPGSTYASLNGTSMATPHVAGAAALVKQKNPSWSNVQIRNHLKNTATSLGSTNLYGSGLVNAEAATR

SEQ ID NO: 51595 - protein, 269 aa, Unidentified
AQSVPWGISRVQAPAAHNRGLTGSGVKVAVLDTGISTHPDLNIRGGASFVPGEPSTQDGNGHGTHVAGTIAALNNSIGVLGVAPSAELYAVKVLGASGSGSVSSIAQGLEWAGNNGMHVAGLSLGSPSPSATLEQAVNSATSRGVLVVAASGNSGAGSISYPARYANAMAVGATDQNNNRASFSQYGAGLDIVAPGVNVQSTYPGSTYASLNGTSMATPHVAGAAALVKQKNPSWSNVQIRNHLKNTATSLGSTNLYGSGLVNAEAATR

SEQ ID NO: 51596 - protein, 269 aa, Unidentified
AQSVPWGISRVQAPAAHNRGLTGSGVKVAVLDTGISTHPDLNIRGGASFVPGEPFTQDGNGHGTHVAGTIAALNNSIGVLGVAPSAELYAVKVLGASGSGSVSSIAQGLEWAGNNGMHVANLSLGSPSPSATLEQAVNSATSRGVLVVAASGNSGAGSISYPARYANAMAVGATDQNNNRASFSQYGAGLDIVAPGVNVQSTYPGSTYASLNGTSMATPHVAGAAALVKQKNPSWSNVQIRNHLKNTATSLGSTNLYGSGLVNAEAATR

SEQ ID NO: 51597 - protein, 269 aa, Unidentified
AQSVPWGISRVQAPAAHNRGLTGSGVKVAVLDTGISTHPDLNIRGGASFVPGEPSTQDGNGHGTHVAGTIAALNNSIGVLGVAPSAELYAVKVLGASQSGSVSSIAQGLEWAGNNGMHVANLSLGSPSPSATLEQAVNSATSRGVLVVAASGNSGAGSISYPARYANAMAVGATDQNNNRASFSQYGAGLDIVAPGVNVQSTYPGSTYASLNGTSMATPHVAGAAALVKQKNPSWSNVQIRNHLKNTATSLGSTNLYGSGLVNAEAATR

SEQ ID NO: 51598 - protein, 269 aa, Unidentified
AQSVPWGISRVQAPAAHNRGLTGSGVKVAVLDTGISTHPDLNIRGGASFVPGEPSTQDGNGHGTHVAGTIAALNNSIGVLGVAPSAELYAVKVLGASGSGSVSSIAQGLEWAGNNGMHVANLSLGSPSPSATLEQAVNSATSRGVLVVAASGNSGAGSISYPARYANAMAVGATDQNNNRASFSQYGAGLDIVAPGVNVQSTYPGSTYASLNGTSMATPHVAGAAMLVKQKNPSWSNVQIRNHLKNTATSLGSTNLYGSGLVNAEAATR

SEQ ID NO: 51599 - protein, 269 aa, Unidentified
AQSVPWGISRVQAPAAHNRGLTGSGVKVAVLDTGISTHPDLNIRGGASFCPGEPSTQDGNGHGTHVAGTIAALNNSIGVLGVAPSAELYAVKVLGASGSGSVSSIAQGLEWAGNNGMHVANLSLGSPSPSATLEQAVNSATSRGVLVVAASGNSGAGSISYPARYANAMAVGATDQNNNRASFSQYGAGLDIVAPGVNVQSTYPGSTYASLNGTSMATPHVAGAAALVKQKNPSWSNVQIRNHLKNTATSLGSTNLYGSGLVNAEAATR

SEQ ID NO: 51600 - protein, 269 aa, Unidentified
AQSVPWGISRVQAPAAHNRRLTGSGVKVAVLDTGISTHPDLNIRGGASFVPGEPSTQDGNGHGTHVAGTIAALNNSIGVLGVAPSAELYAVKVLGASGSGSVSSIAQGLEWAGNNGMHVANLSLGSPSPSATLEQAVNSATSRGVLVVAASGNSGAGSISYPARYANAMAVGATDQNNNRASFSQYGAGLDIVAPGVNVQSTYPGSTYASLNGTSMATPHVAGAAALVKQKNPSWSNVQIRNHLKNTATSLGSTNLYGSGLVNAEAATR

SEQ ID NO: 51601 - protein, 269 aa, Unidentified
AQSVPWGISRVQAPAAHNRGLTGSGVKVAVLDTGISTHPDLNIRGGASFVPGEPSTQDGNGHGTHVAGTIAALNNSIGVLGVAPSAELYAVKVLGASGSGSVSSIAQGLEWAGNNGMHVANLSLGSPSPSATLCQAVNSATSRGVLVVAASGNSGAGSISYPARYANAMAVGATDQNNNRASFSQYGAGLDIVAPGVNVQSTYPGSTYASLNGTSMATPHVAGAAALVKQKNPSWSNVQIRNHLKNTATSLGSTNLYGSGLVNAEAATR

SEQ ID NO: 51602 - protein, 269 aa, Unidentified
AQSVPWGISRVQAPAAHNRGLTGSGVKVAVLDTGISTHPDLNIRGGASFVPGEPSTQDGNGHGTHVAGTIAALNNSIGVLGVAPSAILYAVKVLGASGSGSVSSIAQGLEWAGNNGMHVANLSLGSPSPSATLEQAVNSATSRGVLVVAASGNSGAGSISYPARYANAMAVGATDQNNNRASFSQYGAGLDIVAPGVNVQSTYPGSTYASLNGTSMATPHVAGAAALVKQKNPSWSNVQIRNHLKNTATSLGSTNLYGSGLVNAEAATR

SEQ ID NO: 51603 - protein, 269 aa, Unidentified
AQSVPWGISRVQAPAAHNRGLTGSGVKVAVLDTGISTHPDLNIRGGASFVPGEPSTQDGNGHGTHVAGTIAALNNSIGVLGVAPSAELYAVKVLGASGSGSVSSIAQGLEWAGNNGMHVANLSLGSPSPSATLEQAVNSATSRGVLVVAASGNSGAGSISYPARYANAMAVGATDQNNNRASFSQYGAGLDIVAPGVNVQSTYPGSTYASLNGTSMATPHVAGAAALVKQKNPSWSNVQIRNHLKNTPTSLGSTNLYGSGLVNAEAATR

SEQ ID NO: 51604 - protein, 269 aa, Unidentified
AQSVPWGISRVQAPAAHNRGLTGSGVKVAVLDTGISTHPDLNIRGGASFVFGEPSTQDGNGHGTHVAGTIAALNNSIGVLGVAPSAELYAVKVLGASGSGSVSSIAQGLEWAGNNGMHVANLSLGSPSPSATLEQAVNSATSRGVLVVAASGNSGAGSISYPARYANAMAVGATDQNNNRASFSQYGAGLDIVAPGVNVQSTYPGSTYASLNGTSMATPHVAGAAALVKQKNPSWSNVQIRNHLKNTATSLGSTNLYGSGLVNAEAATR

SEQ ID NO: 51605 - protein, 269 aa, Unidentified
AQSVPWGISRVQAPAAHNRGLTGSGVKVAVLDTGISTHPDLNIRGGASFVPGEPSTQDGNGHGTHVAGTIAALNNSIGVLGVAPSAELYAVKVLGASGSGSVSSIAQGLEWAGNNGMHVANLSLGSPSPSATLEQAVNSATSRGVLVVAASGNSGAGSISYPARYANAMAVGATDQNNNRASFSQYGAGLDTVAPGVNVQSTYPGSTYASLNGTSMATPHVAGAAALVKQKNPSWSNVQIRNHLKNTATSLGSTNLYGSGLVNAEAATR

SEQ ID NO: 51606 - protein, 269 aa, Unidentified
AQSVPWGISRVQAPAAHNRGYTGSGVKVAVLDTGISTHPDLNIRGGASFVPGEPSTQDGNGHGTHVAGTIAALNNSIGVLGVAPSAELYAVKVLGASGSGSVSSIAQGLEWAGNNGMHVANLSLGSPSPSATLEQAVNSATSRGVLVVAASGNSGAGSISYPARYANAMAVGATDQNNNRASFSQYGAGLDIVAPGVNVQSTYPGSTYASLNGTSMATPHVAGAAALVKQKNPSWSNVQIRNHLKNTATSLGSTNLYGSGLVNAEAATR

SEQ ID NO: 51607 - protein, 269 aa, Unidentified
AQSVPWGISRVQAPAAHNRGLTGSGVKVAVLDTGISTHPDLNIRGGASFVPGEPSTQDGNGHGTHVAGTIAALNNSIGVLGVAPSAELYAVKVLGASGSGSVSSIAQGLEWAGNNGMHVANLSLGSPSPSATLEQAVNSATSRGVLVVAASGNSGAGSISYPARYANAMAVGATDQNNNRASFSQYGAGLDIVAPGVNVQSTYPGSTYASLNGTSMATPHVAGAAALVKQKNPSWHNVQIRNHLKNTATSLGSTNLYGSGLVNAEAATR

SEQ ID NO: 51608 - protein, 269 aa, Unidentified
AQSVPWGISRVQAPAAHNRGLTGSGVKEAVLDTGISTHPDLNIRGGASFVPGEPSTQDGNGHGTHVAGTIAALNNSIGVLGVAPSAELYAVKVLGASGSGSVSSIAQGLEWAGNNGMHVANLSLGSPSPSATLEQAVNSATSRGVLVVAASGNSGAGSISYPARYANAMAVGATDQNNNRASFSQYGAGLDIVAPGVNVQSTYPGSTYASLNGTSMATPHVAGAAALVKQKNPSWSNVQIRNHLKNTATSLGSTNLYGSGLVNAEAATR

SEQ ID NO: 51609 - protein, 269 aa, Unidentified
AQSVPWGISRVQAPAAHNRGLTGSGVKVAVLDTGISTHPDLNIRGGASFVPGEPSTQDGNGHGTHVAGTIAALNNSIGVLGVAPSAELYAVKVLGASGSGSVSSIAQGLEWAGNNGMHVANLSLGSPSPSATLEQAVNSATSRGVLVVAASGNSGAGSISYPARYANAMAVGATDQNNNRASFSQYGAGLDIVAPGCNVQSTYPGSTYASLNGTSMATPHVAGAAALVKQKNPSWSNVQIRNHLKNTATSLGSTNLYGSGLVNAEAATR

SEQ ID NO: 51610 - protein, 269 aa, Unidentified
AQSVPWGISRVQAPAAHNRGLTGSGVKVAVLDTGISTHPDLNIRGGASFVPGEPSTQDGNGHGTHVAGTIAALNNSIGVLGVAPSAELYASKVLGASGSGSVSSIAQGLEWAGNNGMHVANLSLGSPSPSATLEQAVNSATSRGVLVVAASGNSGAGSISYPARYANAMAVGATDQNNNRASFSQYGAGLDIVAPGVNVQSTYPGSTYASLNGTSMATPHVAGAAALVKQKNPSWSNVQIRNHLKNTATSLGSTNLYGSGLVNAEAATR

SEQ ID NO: 51611 - protein, 269 aa, Unidentified
AQSVPWGISRVQAPAAHNRGLTGSGVKVAVLDTGISTHPDLNIRGGASFVPGEPSTQDGNGHGTHVAGTIAALNNSIGVLGVAPSAELYAVKVLGASGSGSVSSIAQGLEWAGNNGMHVANLSLGSPSPSATLEQAVNSATSRGVLVVAASGNSGAGSISYPARYANAMAVGATDQNNNRASFSQYGAGLDIVAPGVNVQSTHPGSTYASLNGTSMATPHVAGAAALVKQKNPSWSNVQIRNHLKNTATSLGSTNLYGSGLVNAEAATR

SEQ ID NO: 51612 - protein, 269 aa, Unidentified
AQSVPWGISRVQAPAAHNRGLTGSGVKVAVLDTGISTHPDLNIRGGASFVPGEPSTQDGNGHGTHVAGTIAALNNSIGVLGVAPSAELYAVKVLGASGSGSVSSIAQGLEWAGNNGMHVANLSLGSPSPSATLEQAVNSATSRGVLVVAASGNSGAGSISYPARYANAMAVGATDQNNNRASFSQYGAGLDIVAPGVNVQSTYPGSTYASLNGTSMATPHVAGAAALVKQKNPSWSNVQIRNHLKNTATSLGSTNLYGSGLVWAEAATR

SEQ ID NO: 51613 - protein, 269 aa, Bacillus sp.
AQSVPWGISRVQAPAAHNRGLTGSGVKVAVLDTGISTHPDLNIRGGASFVPGEPSTQDGNGHGTHVAGTIAALNNSIGVLGVAPNAELYAVKVLGASGSGSVSSIAQGLEWAGNNGMHVANLSLGSPSPSATLEQAVNSATSRGVLVVAASGNSGAGSISYPARYANAMAVGATDQNNNRASFSQYGAGLDIVAPGVNVQSTYPGSTYASLNGTSWATPHVAGAAALVKQKNPSWSNVQIRNHLKNTATSLGSTNLYGSGLVNAEAATR

SEQ ID NO: 51614 - protein, 269 aa, Unidentified
AQSVPWGISRVQAPAAHNRGLTGSGVKVAVLDTGISTHPDLNIRGGASFVPGEPSTQDGNGHGTHVAGTIAALNNSIGVLGVAPSAELYAVKVLGASGSGSVSSIAQGLEWAGNNGMHVANLSLGSPSPSATLEQAVNSATSRGVLVVAASGNSGAGSISYPARYANAMAVGATDQNNNRASFSQYGAGLDIVAPGVNVQSTYPGSTYASLNGTSMATPHVAGAAALVKQKNPSWSNVQIRNHLKNTATSLGSTNLYGSGLVNAERATR

SEQ ID NO: 51615 - protein, 269 aa, Unidentified
AQSVPWGISRVQAPAAHNRGLTGSGVKVAVLDTGISTHPDLNIRGGASFVPGEPSTQDGNGHGTHVAGTIAALNNSIGVLGVAPSAELYAVKVLGASGGGSVSSIAQGLEWAGNNGMHVANLSLGSPSPSATLEQAVNSATSRGVLVVAASGNSGAGSISYPARYANAMAVGATDQNNNRASFSQYGAGLDIVAPGVNVQSTYPGSTYASLNGTSMATPHVAGAAALVKQKNPSWSNVQIRNHLKNTATSLGSTNLYGSGLVNAEAATR

SEQ ID NO: 51616 - protein, 269 aa, Unidentified
AQSVPWGISRVQAPAAHNRGLTGSGVKVAVLDTGISTHPDLNIRGGASFVPGEPSTQDGNGHGTHVAGTIAALNNSIGVLGVAPSAELYAVKVLGASSSGSVSSIAQGLEWAGNNGMHVANLSLGSPSPSATLEQAVNSATSRGVLVVAASGNSGAGSISYPARYANAMAVGATDQNNNRASFSQYGAGLDIVAPGVNVQSTYPGSTYASLNGTSMATPHVAGAAALVKQKNPSWSNVQIRNHLKNTATSLGSTNLYGSGLVNAEAATR

SEQ ID NO: 51617 - protein, 269 aa, Unidentified
AQSVPWGISRVQAPAAHNRGLTGSGVKVAVLDTGISTHPDLNIRGGASFVPGEPSTQDGNGHGTHVAGTIAALNNSIGVLGVAPSAELYAVKVLGASGSGSVSSIAQGLEWAGNNGMHVANLSLGSPSPPATLEQAVNSATSRGVLVVAASGNSGAGSISYPARYANAMAVGATDQNNNRASFSQYGAGLDIVAPGVNVQSTYPGSTYASLNGTSMATPHVAGAAALVKQKNPSWSNVQIRNHLKNTATSLGSTNLYGSGLVNAEAATR

SEQ ID NO: 51618 - protein, 269 aa, Unidentified
AQSVPWGISRVQAPAAHNRGLTGSGVKVAVLDTGISTHPDLNIRGGASFVPGEPSTQDGNGHGTHVAGTIAALNNSIGVLGVAPSAELYAVKVLGASGSGCVSSIAQGLEWAGNNGMHVANLSLGSPSPSATLEQAVNSATSRGVLVVAASGNSGAGSISYPARYANAMAVGATDQNNNRASFSQYGAGLDIVAPGVNVQSTYPGSTYASLNGTSMATPHVAGAAALVKQKNPSWSNVQIRNHLKNTATSLGSTNLYGSGLVNAEAATR

SEQ ID NO: 51619 - protein, 269 aa, Unidentified
AQSVPWGISRVQAPAAHNRGLTGSGVKVAVLDTGISTHPDLNIRGGASFVPGEPSTQDGNGHGTHVAGTIAALNNSIGVLGVAPSAELYAVKVLGASGSGSVSSIAQGLEWAGNNGMHVANLSLGSPSPSATLEQAVNSATSRGVLVVAASGNSGAGSISYPARYANAMAVGATDQNNNRASFSQYGAGLDIVAPGVNVQSTYPGSTYASLNGTSMATPHVAGAAALVKQKNPSWSNVQIRNHLKNTATSLGSTNLYGSGLVNAEFATR

SEQ ID NO: 51620 - protein, 269 aa, Unidentified
AQSVPWGISRVQAPAAHNRGLTGSGVKVAVLDTGISTHPDLNIRGGASFVPGEPSTQDGNGHGTHVAGTIAALNNSIGVLGVAPSAELYAVKVLGASGSGSVSSIAQGLEWAGNNGMHVANLSLGSPSPSATLEQAVNSATSRGVLVVAASGNSGAGSISYPARYANAMAVSATDQNNNRASFSQYGAGLDIVAPGVNVQSTYPGSTYASLNGTSMATPHVAGAAALVKQKNPSWSNVQIRNHLKNTATSLGSTNLYGSGLVNAEAATR

SEQ ID NO: 51621 - protein, 269 aa, Unidentified
AQSVPWGISRVQAPAAHNRGLTGSGVKVAVLDTGISTHPDLNIRGGASFVPGEPSTQDGNGHGTHVAGTIAALNNLIGVLGVAPSAELYAVKVLGASGSGSVSSIAQGLEWAGNNGMHVANLSLGSPSPSATLEQAVNSATSRGVLVVAASGNSGAGSISYPARYANAMAVGATDQNNNRASFSQYGAGLDIVAPGVNVQSTYPGSTYASLNGTSMATPHVAGAAALVKQKNPSWSNVQIRNHLKNTATSLGSTNLYGSGLVNAEAATR

SEQ ID NO: 51622 - protein, 269 aa, Unidentified
AQSVPWGISRVQAPAAHNRGLTGSGVVVAVLDTGISTHPDLNIRGGASFVPGEPSTQDGNGHGTHVAGTIAALNNSIGVLGVAPSAELYAVKVLGASGSGSVSSIAQGLEWAGNNGMHVANLSLGSPSPSATLEQAVNSATSRGVLVVAASGNSGAGSISYPARYANAMAVGATDQNNNRASFSQYGAGLDIVAPGVNVQSTYPGSTYASLNGTSMATPHVAGAAALVKQKNPSWSNVQIRNHLKNTATSLGSTNLYGSGLVNAEAATR

SEQ ID NO: 51623 - protein, 269 aa, Bacillus lentus
AQSVPWGISRVQAPAAHNRGLTGSGVKVAVLDTGISTHPDLNIRGGASFVPGEPSTQDGNGHGTHVAGTIAALNNSIGVLGVAPSAELYAVKVLGASGSGSVSSIAQGLEWAGNNGMHVANLSLGSPSPSATLEQAVNSATSRGVLVVAASGNSGAGSISYPALYANAMAVGATDQNNNRASFSQYGAGLDIVAPGVNVQSTYPGSTYASLNGTSMATPHVAGAAALVKQKNPSWSNVQIRNHLKNTATSLGSTNLYGSGLVNAEAATR

SEQ ID NO: 51624 - protein, 269 aa, Unidentified
AQSVPWGISRVQAPAAHNRGLTGSGVKVAVLDTGISTHPDLNIRGGASFVPGEPSTQDGNGHGTHVAGTIAALNNSIGVLGVAPSAELYAVKVLGASGSGSVSSIAQGLVWAGNNGMHVANLSLGSPSPSATLEQAVNSATSRGVLVVAASGNSGAGSISYPARYANAMAVGATDQNNNRASFSQYGAGLDIVAPGVNVQSTYPGSTYASLNGTSMATPHVAGAAALVKQKNPSWSNVQIRNHLKNTATSLGSTNLYGSGLVNAEAATR

SEQ ID NO: 51625 - protein, 269 aa, Unidentified
AQSVPWGISRVQAPAAHNRGLTGSGVKVAVLDTGISTHPDLNIRGGASFVPGEPSTQDGNGHGTHVAGTIAALNNSIGVLGVAPSAELYAVKVLGASGSGSVSSIAQGLEWAGNNGMHVANLSLGSPSPSATLEQAVNSATSRGVLVVAASGNSGAGSISYPARYANAMAVGATDQNNNRASFSQYGAGLDIVAPGVNVQSTYPGSTYASLNGTSMATPHVAGAANLVKQKNPSWSNVQIRNHLKNTATSLGSTNLYGSGLVNAEAATR

SEQ ID NO: 51626 - protein, 269 aa, Unidentified
AQSVPWGISRVQAPAAHNRGLTGSGVKVAVLDTGISTHPDLNIRGGASFVPGEPSTQDGNGHGTHVAGTIAALNNSIGVLGVAPSAELYAVKVLGASGSGSVSSIAQGLEWAGNNGMHVANLSLGSPSPSATLEQAVNSATSRGVLVVAASGNSGAGSDSYPARYANAMAVGATDQNNNRASFSQYGAGLDIVAPGVNVQSTYPGSTYASLNGTSMATPHVAGAAALVKQKNPSWSNVQIRNHLKNTATSLGSTNLYGSGLVNAEAATR

SEQ ID NO: 51627 - protein, 269 aa, Bacillus sp.
AQSVPWGISRVQAPAAHNRGLTGSGVKVAVLDTGISTHPDLNIRGGASFVPGEPSTQDGNGHGTHVAGTIAALNNSIGVLGVAPSAELYAVKVLGASGSGSVSSIAQGLEWAGNNGMHVANLSLGSPSPSATLEQAVNSATSRGVLVVAASGNSGAGSISYPARYANAMAVGATDQNNNRASFSQYGAGLDIVAPGVNVQSTYPGSTYASLNGTSMATPHVAGAAALVKQKNPSWSPVQIRNHLKNTATSLGSTNLYGSGLVNAEAATR

SEQ ID NO: 51628 - protein, 269 aa, Unidentified
AQSVPWGISRVQAPAAHNRGLTGSGVKVAVLDTGISTHPDLNIRGGASFVPGEPSTQDGNGHGTHVAGTIAALNNSIGVLGVAPSAELYAVKVLGASGSGSVSSIAQGLEWAGNNCMHVANLSLGSPSPSATLEQAVNSATSRGVLVVAASGNSGAGSISYPARYANAMAVGATDQNNNRASFSQYGAGLDIVAPGVNVQSTYPGSTYASLNGTSMATPHVAGAAALVKQKNPSWSNVQIRNHLKNTATSLGSTNLYGSGLVNAEAATR

SEQ ID NO: 51629 - protein, 269 aa, Unidentified
AQSVPWGISRVQAPAAHNRGLTGSGVKVAVLDTGISTHPDLNIRGGASRVPGEPSTQDGNGHGTHVAGTIAALNNSIGVLGVAPSAELYAVKVLGASGSGSVSSIAQGLEWAGNNGMHVANLSLGSPSPSATLEQAVNSATSRGVLVVAASGNSGAGSISYPARYANAMAVGATDQNNNRASFSQYGAGLDIVAPGVNVQSTYPGSTYASLNGTSMATPHVAGAAALVKQKNPSWSNVQIRNHLKNTATSLGSTNLYGSGLVNAEAATR

SEQ ID NO: 51630 - protein, 269 aa, Unidentified
AQSVPWGISRVQAPAAHNRGLTGSGVKVAVLDTGISTHPDLNIRGGASFVPGEPSTQDGNGHGTHVAGTIAALNNSIGVLGVAPSAELYAVKVLGASGSGSVQSIAQGLEWAGNNGMHVANLSLGSPSPSATLEQAVNSATSRGVLVVAASGNSGAGSISYPARYANAMAVGATDQNNNRASFSQYGAGLDIVAPGVNVQSTYPGSTYASLNGTSMATPHVAGAAALVKQKNPSWSNVQIRNHLKNTATSLGSTNLYGSGLVNAEAATR

SEQ ID NO: 51631 - protein, 269 aa, Bacillus sp.
AQSVPWGISRVQAPAAHNRGLTGSGVKVAVLDTGISTHPDLNIRGGASFVPGEPSTQDGNGHGTHVAGTIAALNNSIGVLGVAPNAELYAVKVLGASGSGSVSSIAQGLEWAGNNGMHVANLSLGSPSPSATLEQAVNSATSRGVLVVAASGNSGAGSISYPARYANAMAVGATDQNNNRASFSQYGAGLDIVAPGVNVQSTYPGSTYASLNGTSYATPHVAGAAALVKQKNPSWSNVQIRNHLKNTATSLGSTNLYGSGLVNAEAATR

SEQ ID NO: 51632 - protein, 269 aa, Unidentified
AQSVPWGISRVQAPASHNRGLTGSGVKVAVLDTGISTHPDLNIRGGASFVPGEPSTQDGNGHGTHVAGTIAALNNSIGVLGVAPSAELYAVKVLGASGSGSVSSIAQGLEWAGNNGMHVANLSLGSPSPSATLEQAVNSATSRGVLVVAASGNSGAGSISYPARYANAMAVGATDQNNNRASFSQYGAGLDIVAPGVNVQSTYPGSTYASLNGTSMATPHVAGAAALVKQKNPSWSNVQIRNHLKNTATSLGSTNLYGSGLVNAEAATR

SEQ ID NO: 51633 - protein, 269 aa, Unidentified
AQSVPWGISRVQAPAAHNRGLTGSGVKVAVLDTGISTHPDLNIRGGASFVPGEPSTQDGNGHGTHVAGTIAALNNSIGVLGVAPSAELYAVKVLGASGSGSVSSIAQGLEWAGNNGMHVANLSLGSPSPSATLEQAVNSATSRGVLVVAASGNSGAGSISYPARYANAMAVGATDQNNNRASFSQYGAGLDIVAPGENVQSTYPGSTYASLNGTSMATPHVAGAAALVKQKNPSWSNVQIRNHLKNTATSLGSTNLYGSGLVNAEAATR

SEQ ID NO: 51634 - protein, 269 aa, Unidentified
AQSVPWGISRVQAPAAHNRGLTGSGVKVAVLDTGISTHPDLNIRGGASFVPGEPSTQDGNGHGTHVAGTIAALNNRIGVLGVAPSAELYAVKVLGASGSGSVSSIAQGLEWAGNNGMHVANLSLGSPSPSATLEQAVNSATSRGVLVVAASGNSGAGSISYPARYANAMAVGATDQNNNRASFSQYGAGLDIVAPGVNVQSTYPGSTYASLNGTSMATPHVAGAAALVKQKNPSWSNVQIRNHLKNTATSLGSTNLYGSGLVNAEAATR

SEQ ID NO: 51635 - protein, 269 aa, Unidentified
AQSVPWGISRVQAPAAHNRGLTGSGVKVAVLDTGISTHPDLNIRGSASFVPGEPSTQDGNGHGTHVAGTIAALNNSIGVLGVAPSAELYAVKVLGASGSGSVSSIAQGLEWAGNNGMHVANLSLGSPSPSATLEQAVNSATSRGVLVVAASGNSGAGSISYPARYANAMAVGATDQNNNRASFSQYGAGLDIVAPGVNVQSTYPGSTYASLNGTSMATPHVAGAAALVKQKNPSWSNVQIRNHLKNTATSLGSTNLYGSGLVNAEAATR

SEQ ID NO: 51636 - protein, 269 aa, Unidentified
AQSVPWGISRVQAPAAHNRGLTGSGVLVAVLDTGISTHPDLNIRGGASFVPGEPSTQDGNGHGTHVAGTIAALNNSIGVLGVAPSAELYAVKVLGASGSGSVSSIAQGLEWAGNNGMHVANLSLGSPSPSATLEQAVNSATSRGVLVVAASGNSGAGSISYPARYANAMAVGATDQNNNRASFSQYGAGLDIVAPGVNVQSTYPGSTYASLNGTSMATPHVAGAAALVKQKNPSWSNVQIRNHLKNTATSLGSTNLYGSGLVNAEAATR

SEQ ID NO: 51637 - protein, 269 aa, Unidentified
AQSVPWGISRVQAPAAHNRGLTGSGVKVAVLDTGISTHPDLNIRGGASFVPGEPSTQDGNGHGTHVAGTIAALNNSIGVLGVAPSAELYAVKVLGASGSGSVSSIAQGLEWAGNNGMHVANLSLGSPSPSATLEQAVNSATSRGVLVVAASGNSGAGSISYPARYANAMAVGATDQNNNRASFSQYGAGLDIVAPGVNVQSTYPGSTYASLNGTSMATPHVAGAAALVKQKNPSWSNVQIRNHLKNTARSLGSTNLYGSGLVNAEAATR

SEQ ID NO: 51638 - protein, 269 aa, Unidentified
AQSVPWGISRVQAPAAHNRGLTGSGVKVAVLDTGISTHPDLNIRGGASFVPGEPSTQDGNGHGTHVAGTIAALNNSIGVLGVAPSAELYAVKVLGASGSGSVSSIAQGLEWAGNNGMHVANLSLGSPSPSATLEQAVNSATSRGVLVVAASGNSGAGSISYPARYANAMAVGATDQNNNRASFSQYGAGLDIVAPGVNVQSTYPGSTYASLNGTSMATPHVAGAAALVKQKNPSWSRVQIRNHLKNTATSLGSTNLYGSGLVNAEAATR

SEQ ID NO: 51639 - protein, 269 aa, Unidentified
AQSVPWGISRVQAPAAHNRGLTGSGVKVAVLDTGISTHPDLNIRGGASFVPGEPSTQDGNGHGTHVAGTIAALNNSIGVLGVAPSAELYAVKVLGASGSGSVSSIAQGLEWAGNNGMHVANLSLGSPSPSATLEQAVNSATSRGVLVVAASGNSGAGSISYPARYANAMAVGATDQNNNRASFSQYGAGLDIVAPGVNVQSTYPGSTYASLNGTSMATPHVAGAAALVKQKNPSWSNVQMRNHLKNTATSLGSTNLYGSGLVNAEAATR

SEQ ID NO: 51640 - protein, 269 aa, Unidentified
AQSVPWGISRVQAPAAHNRGLTGSGVKVAVLDTGISTHPDLNIRGGASFVPGEPSTQDGNGHGTHVAGTIAALNNSIGVLGVAPSAELYAVKVLGASGSGSVSSIAQGLEWAGNNGMHVANLSLGSPSPSATLEQAVNSATSRGVLVFAASGNSGAGSISYPARYANAMAVGATDQNNNRASFSQYGAGLDIVAPGVNVQSTYPGSTYASLNGTSMATPHVAGAAALVKQKNPSWSNVQIRNHLKNTATSLGSTNLYGSGLVNAEAATR

SEQ ID NO: 51641 - protein, 269 aa, Unidentified
AQSVPWGISRVQAPAAHNRGLLGSGVKVAVLDTGISTHPDLNIRGGASFVPGEPSTQDGNGHGTHVAGTIAALNNSIGVLGVAPSAELYAVKVLGASGSGSVSSIAQGLEWAGNNGMHVANLSLGSPSPSATLEQAVNSATSRGVLVVAASGNSGAGSISYPARYANAMAVGATDQNNNRASFSQYGAGLDIVAPGVNVQSTYPGSTYASLNGTSMATPHVAGAAALVKQKNPSWSNVQIRNHLKNTATSLGSTNLYGSGLVNAEAATR

SEQ ID NO: 51642 - protein, 269 aa, Unidentified
AQSVPWGISRVQAPAAHNRGLTGSGVKVAVLDTGISTHPDLNIRGGASFVPGEPSTQDGNGHGTHVAGTIAALNNSIGVLGVAPSAHLYAVKVLGASGSGSVSSIAQGLEWAGNNGMHVANLSLGSPSPSATLEQAVNSATSRGVLVVAASGNSGAGSISYPARYANAMAVGATDQNNNRASFSQYGAGLDIVAPGVNVQSTYPGSTYASLNGTSMATPHVAGAAALVKQKNPSWSNVQIRNHLKNTATSLGSTNLYGSGLVNAEAATR

SEQ ID NO: 51643 - protein, 269 aa, Unidentified
AQSVPWGISRVQAPAAHNRGLTGSGVKVAVLDTGISTHPDLFIRGGASFVPGEPSTQDGNGHGTHVAGTIAALNNSIGVLGVAPSAELYAVKVLGASGSGSVSSIAQGLEWAGNNGMHVANLSLGSPSPSATLEQAVNSATSRGVLVVAASGNSGAGSISYPARYANAMAVGATDQNNNRASFSQYGAGLDIVAPGVNVQSTYPGSTYASLNGTSMATPHVAGAAALVKQKNPSWSNVQIRNHLKNTATSLGSTNLYGSGLVNAEAATR

SEQ ID NO: 51644 - protein, 269 aa, Unidentified
AQSVPWGISRVQAPAAHNRGLTGSGVKVAVLDTGISTHPDLNIRGGASFVPGEPSTQDGNGHGTHVAGTIAALNNSIGVLGVAPSAELYAVKVLGASGSGSVSSIAQGLEWAGNNGMHVANLSLGSPSPSATLEQAVNSATSRGVLVVAASGNSGAGSISYPARYANAMAVGATDQNNNRASFSQYGAGLDIVAPGVNVQSTYPGSTYASLNGTSMATPHVAGAAALVKQKNPSWSNVQIRNHLKFTATSLGSTNLYGSGLVNAEAATR

SEQ ID NO: 51645 - protein, 269 aa, Unidentified
AQSVPWGISRVQAPAAHNRGLTGSGVKVAVLDTGISTHPDLNIRGGASFVPGEPSTQDGNGHGTHVAGTIAALNNSIGVLGVAPSAELYAVKVLGASGSGSVSSIAQGLEWAGNNGMHVANLSLGSPSPSATLEQAVNSATSRGVLVVAASGNSGAGSIDYPARYANAMAVGATDQNNNRASFSQYGAGLDIVAPGVNVQSTYPGSTYASLNGTSMATPHVAGAAALVKQKNPSWSNVQIRNHLKNTATSLGSTNLYGSGLVNAEAATR

SEQ ID NO: 51646 - protein, 269 aa, Unidentified
AQSVPWGISRVQAPAAHNRGLTGSGVKVAVLDGGISTHPDLNIRGGASFVPGEPSTQDGNGHGTHVAGTIAALNNSIGVLGVAPSAELYAVKVLGASGSGSVSSIAQGLEWAGNNGMHVANLSLGSPSPSATLEQAVNSATSRGVLVVAASGNSGAGSISYPARYANAMAVGATDQNNNRASFSQYGAGLDIVAPGVNVQSTYPGSTYASLNGTSMATPHVAGAAALVKQKNPSWSNVQIRNHLKNTATSLGSTNLYGSGLVNAEAATR

SEQ ID NO: 51647 - protein, 269 aa, Unidentified
AQSVPWGISRVQAPAAHNRGLTGSGVKVANLDTGISTHPDLNIRGGASFVPGEPSTQDGNGHGTHVAGTIAALNNSIGVLGVAPSAELYAVKVLGASGSGSVSSIAQGLEWAGNNGMHVANLSLGSPSPSATLEQAVNSATSRGVLVVAASGNSGAGSISYPARYANAMAVGATDQNNNRASFSQYGAGLDIVAPGVNVQSTYPGSTYASLNGTSMATPHVAGAAALVKQKNPSWSNVQIRNHLKNTATSLGSTNLYGSGLVNAEAATR

SEQ ID NO: 51648 - protein, 269 aa, Unidentified
AWSVPWGISRVQAPAAHNRGLTGSGVKVAVLDTGISTHPDLNIRGGASFVPGEPSTQDGNGHGTHVAGTIAALNNSIGVLGVAPSAELYAVKVLGASGSGSVSSIAQGLEWAGNNGMHVANLSLGSPSPSATLEQAVNSATSRGVLVVAASGNSGAGSISYPARYANAMAVGATDQNNNRASFSQYGAGLDIVAPGVNVQSTYPGSTYASLNGTSMATPHVAGAAALVKQKNPSWSNVQIRNHLKNTATSLGSTNLYGSGLVNAEAATR

SEQ ID NO: 51649 - protein, 269 aa, Unidentified
AQSVPWGISRVQAPAAHNRGLTGSGVKVAVLDTGISTHPDLNIRGGASFVPGEPSTQDGNGHGTHVAGTIAALNNSIGVLGVAPSAELYAVKVLGASGSGSVSSIAQGLEWAGNNGMHVANLSLGSPSPSATLEQAVNSATSRGVLVVAASGNSGAGSISYPARYANAMAVGATDQNNNRASFSQYGAGLDIVAPGVNVQSTYPGSTYASLNGTSMATPHVAGAAALVKQKNPSWSNVQIRNHLKNTATSLGSTNLYGSGLVNAVAATR

SEQ ID NO: 51650 - protein, 269 aa, Unidentified
AQSVPWGISRVQAPAAHNRGLTGSGVKVAVLDTGISTVPDLNIRGGASFVPGEPSTQDGNGHGTHVAGTIAALNNSIGVLGVAPSAELYAVKVLGASGSGSVSSIAQGLEWAGNNGMHVANLSLGSPSPSATLEQAVNSATSRGVLVVAASGNSGAGSISYPARYANAMAVGATDQNNNRASFSQYGAGLDIVAPGVNVQSTYPGSTYASLNGTSMATPHVAGAAALVKQKNPSWSNVQIRNHLKNTATSLGSTNLYGSGLVNAEAATR

SEQ ID NO: 51651 - protein, 269 aa, Unidentified
AQSVPWGISRVQAPAAHNRGLTGSGVKVAVLDTGISTHPDLNIRGGRSFVPGEPSTQDGNGHGTHVAGTIAALNNSIGVLGVAPSAELYAVKVLGASGSGSVSSIAQGLEWAGNNGMHVANLSLGSPSPSATLEQAVNSATSRGVLVVAASGNSGAGSISYPARYANAMAVGATDQNNNRASFSQYGAGLDIVAPGVNVQSTYPGSTYASLNGTSMATPHVAGAAALVKQKNPSWSNVQIRNHLKNTATSLGSTNLYGSGLVNAEAATR

SEQ ID NO: 51652 - protein, 269 aa, Unidentified
AQSVPWGISRVQAPAAHNRGLTGSGVKVAVLDTGISTHPDLNIRGGASFVPGEPSTQDGNGHGTHVAGTIAALNNSIGVLGVAPSAELYAVKVLGASGSGSVSSIAQGLEWAGNNGMHVANLSLGSPSPSATLEQAVNSATSRGVLVVAASGNSGAGSISYPARYANAMAVGATDQNNNRASFSQYGAGLDIVAPGVNVQSTYPGSTYASLNGTSMATPHVAGAAALVKQKNPSWSNVQIRNHLKNYATSLGSTNLYGSGLVNAEAATR

SEQ ID NO: 51653 - protein, 269 aa, Unidentified
AQSVPWGISRVQAPAAHNRGLTGSGVKVAVLDTGISTHPDLNIRGGASFVPGEPSTQDGNGHGTHVAGTIAALNNSIGVLGVAPSAELYAVKVLGASGSGSVSSIAQGLEWAGNNGMHVANLSLGSPSPSATLEQAVNSATSRGVLVVAASGNSGAGSISYPARYANAMAVGATDQNNNRASFSQYGAGLDIVAPGVNVQSTYPGSTYASLNGTSMATPHVAGAAALVKQKNPSWSNVQIRNHLCNTATSLGSTNLYGSGLVNAEAATR

SEQ ID NO: 51654 - protein, 269 aa, Unidentified
AQSVPWGISRVQAPAAHNRGLTGSGVKVAVLDTGISTHPDLNIRGGASFVPGEPSTQDGNGHGTHVAGTIAALNNSIGVLGVAPSAELYAVKVLGASGSGSVSSIAQGLEWAGNNGMHVANLSLGSPSPSATLEQAVNSATSRGVLVVAASGNSGAGSISYPARYANAMAVGATDQNNNRASFSQYGAGLDVVAPGVNVQSTYPGSTYASLNGTSMATPHVAGAAALVKQKNPSWSNVQIRNHLKNTATSLGSTNLYGSGLVNAEAATR

SEQ ID NO: 51655 - protein, 269 aa, Unidentified
AQSVPWGISRVQAPAAHNRGLTGSGVKVAVLDTGISTHPDLNIRGGASFVPGEPSTQDGNGHGTHVAGTIAALNNSIGVLGVAPSAELYAVKVLGASGSGSVSSIAQGLEWAGNNGVHVANLSLGSPSPSATLEQAVNSATSRGVLVVAASGNSGAGSISYPARYANAMAVGATDQNNNRASFSQYGAGLDIVAPGVNVQSTYPGSTYASLNGTSMATPHVAGAAALVKQKNPSWSNVQIRNHLKNTATSLGSTNLYGSGLVNAEAATR

SEQ ID NO: 51656 - protein, 269 aa, Unidentified
AQSVPWGISRVQAPAAHNRGLTGSGVKVAVLDTGISTHPDLNIRGGASFVPGEPSTQDGNGHGTHVAGTIAALNNSIGVLGVAPNAELYAVKVLGASGSGSSSSIAQGLEWAGNNGMHVANLSLGSPSPSATLEQAVNSATSRGVLVVAASGNSGAGSISYPARYANAMAVGATDQNNNRASFSQYGAGLDIVAPGVNVQSTYPGSTYASLNGTSSATPHVAGAAALVKQKNPSWSNVQIRNHLKNTATSLGSTNLYGSGLVNAEAATR

SEQ ID NO: 51657 - protein, 269 aa, Unidentified
AQSVPWGISRVQAPAAHNRGLTGSGVKVAVLDTGISTHPDLNIRGGASFVPGEPSTQDGNGHGTHVAGTIAALNNSIGVLGVAPSAELYAVKVLGASGSGSVSSIAQGLEWAGNNGMHVANLSLGSPSPSATLEQAVNSATSRGVLVVAASGNSGAGSISYPARYANAMAVGATDQNNNRASFSQYGAGLDIVAPGVNVQSTYPGSTYASLNGTSMATPHVAGAAGLVKQKNPSWSNVQIRNHLKNTATSLGSTNLYGSGLVNAEAATR

SEQ ID NO: 51658 - protein, 269 aa, Unidentified
AQSVPWGISRVQAPAAHNRGLTGSGVKVAVLDTGISTHPDLNIRGGASFVPGEPSTQDGNGHGTHVAGTIAALNNSIGVLGVAPSAELYAVKVLGASGSGSVSSIAQGLEWAGNNGMHVANLSLGSPSPSATLEQAVNSATSRGVLVVAASGNSGAGSISYPARYANAMAVGATDQNNNRASFSQYGAGLDIVAPGVNVQSTYPGSTYFSLNGTSMATPHVAGAAALVKQKNPSWSNVQIRNHLKNTATSLGSTNLYGSGLVNAEAATR

SEQ ID NO: 51659 - protein, 269 aa, Unidentified
AQSVPWGISRVQAPAAHNRGLTGSGVKVAVLDTGISTHPDLNIRGGASFVPGEPSTQDGNGHGTHVAGTIAALNNSIGVLGVAPSAELYAVKVLGASGSGSVSSIAQGLEWAGNNGMHVANLSLGSPSPLATLEQAVNSATSRGVLVVAASGNSGAGSISYPARYANAMAVGATDQNNNRASFSQYGAGLDIVAPGVNVQSTYPGSTYASLNGTSMATPHVAGAAALVKQKNPSWSNVQIRNHLKNTATSLGSTNLYGSGLVNAEAATR

SEQ ID NO: 51660 - protein, 269 aa, Unidentified
AQSVPWGISRVQAPAAHNRGLTGSGVKVAVLDTGISTHPDLNIRGGASFVPGEPSTQDGNGHGTHVAGTIAALNNSIGVLGVAPSAELYAVKVLGASGSGSVSFIAQGLEWAGNNGMHVANLSLGSPSPSATLEQAVNSATSRGVLVVAASGNSGAGSISYPARYANAMAVGATDQNNNRASFSQYGAGLDIVAPGVNVQSTYPGSTYASLNGTSMATPHVAGAAALVKQKNPSWSNVQIRNHLKNTATSLGSTNLYGSGLVNAEAATR

SEQ ID NO: 51661 - protein, 269 aa, Unidentified
AQSVPWGISRVQAPAAHNRGLTGSGVKVAVLDTGISTHPDLNIRGGASFVPGEPSTQDGNGHGTHVAGTIAALNNSIGVLGVAPSAELNAVKVLGASGSGSVSSIAQGLEWAGNNGMHVANLSLGSPSPSATLEQAVNSATSRGVLVVAASGNSGAGSISYPARYANAMAVGATDQNNNRASFSQYGAGLDIVAPGVNVQSTYPGSTYASLNGTSMATPHVAGAAALVKQKNPSWSNVQIRNHLKNTATSLGSTNLYGSGLVNAEAATR

SEQ ID NO: 51662 - protein, 269 aa, Unidentified
AQSVPWGISRVQAPAAHNRGLTGSGVKVAVLDTGITTHPDLNIRGGASFVPGEPSTQDGNGHGTHVAGTIAALNNSIGVLGVAPSAELYAVKVLGASGSGSVSSIAQGLEWAGNNGMHVANLSLGSPSPSATLEQAVNSATSRGVLVVAASGNSGAGSISYPARYANAMAVGATDQNNNRASFSQYGAGLDIVAPGVNVQSTYPGSTYASLNGTSMATPHVAGAAALVKQKNPSWSNVQIRNHLKNTATSLGSTNLYGSGLVNAEAATR

SEQ ID NO: 51663 - protein, 269 aa, Unidentified
AQSVPWGASRVQAPAAHNRGLTGSGVKVAVLDTGISTHPDLNIRGGASFVPGEPSTQDGNGHGTHVAGTIAALNNSIGVLGVAPSAELYAVKVLGASGSGSVSSIAQGLEWAGNNGMHVANLSLGSPSPSATLEQAVNSATSRGVLVVAASGNSGAGSISYPARYANAMAVGATDQNNNRASFSQYGAGLDIVAPGVNVQSTYPGSTYASLNGTSMATPHVAGAAALVKQKNPSWSNVQIRNHLKNTATSLGSTNLYGSGLVNAEAATR

SEQ ID NO: 51664 - protein, 269 aa, Unidentified
AQSVPWGISRVQAPAAHNRGLTGSGVKVAVLDTGISTHPDLNIRGGASFVPGEPSTQDGNGHGTHVAGTIAALNNSIGVLGVAPSAELYAVKVLGMSGSGSVSSIAQGLEWAGNNGMHVANLSLGSPSPSATLEQAVNSATSRGVLVVAASGNSGAGSISYPARYANAMAVGATDQNNNRASFSQYGAGLDIVAPGVNVQSTYPGSTYASLNGTSMATPHVAGAAALVKQKNPSWSNVQIRNHLKNTATSLGSTNLYGSGLVNAEAATR

SEQ ID NO: 51665 - protein, 269 aa, Unidentified
AQSVPWGISRVQAPAAHNRGLTGSGVKVAVLDTGISTHPDLNIRGGASFVPGEPSTQDGNGHGTHVAGTIAALNNSIGVLGVAPSAELYAVKVLGASGSGSVSSIAQGLEWAGNNGMHVANLSLGSPSPSATLEQAVNSATSRGVLVVAASGNSGEGSISYPARYANAMAVGATDQNNNRASFSQYGAGLDIVAPGVNVQSTYPGSTYASLNGTSMATPHVAGAAALVKQKNPSWSNVQIRNHLKNTATSLGSTNLYGSGLVNAEAATR

SEQ ID NO: 51666 - protein, 269 aa, Unidentified
AQSVPWGISRVQAPAAHNRGLTGSGVKVAVLDTGISTHPDLNIRGGASFVPGEPSTQDGNGHGTHVAGTIAALNNSIGVLGVAPSAELYAVKVLGASGSGSVSSIAQGLEWAGNNGMHVANLSLGSPSPSATLEQAVNSATSRGVLVVAASGNSGAGSISYPARYANAMAVGATDQNNNRASFSQYGAGLDIVAPGVNVQSTYPGSTYASLNGTSMATPHVAGAAALVKQKNPSWSNVQSRNHLKNTATSLGSTNLYGSGLVNAEAATR

SEQ ID NO: 51667 - protein, 269 aa, Unidentified
AQSVPWGISRVQAPAAHNRGLTGSGVKVAVLDTGISTHPDLNIRGGACFVPGEPSTQDGNGHGTHVAGTIAALNNSIGVLGVAPSAELYAVKVLGASGSGSVSSIAQGLEWAGNNGMHVANLSLGSPSPSATLEQAVNSATSRGVLVVAASGNSGAGSISYPARYANAMAVGATDQNNNRASFSQYGAGLDIVAPGVNVQSTYPGSTYASLNGTSMATPHVAGAAALVKQKNPSWSNVQIRNHLKNTATSLGSTNLYGSGLVNAEAATR

SEQ ID NO: 51668 - protein, 269 aa, Unidentified
AQSVPWGISRVQAPAAHNRGLTGSGVKVAVLDTGISTHPDLNIRGGASFVPGEPSTQDGNGHGTHVAGTIAALNNSIGVLGVAPSAELYAVKVLGASGSGSVSSIAQGLEWAGNNGMHVANLSLGSPSPSATLEQAVNSATSRGVLVVAASGNSGAGSISYPARYANAMAVGATDQNNNRASFSQYGAGLDIVAPGVNVQSTYPGSTYASLNGTSMATPHVAGAAALVKQKNPSWSNVQIRNHLSNTATSLGSTNLYGSGLVNAEAATR

SEQ ID NO: 51669 - protein, 269 aa, Unidentified
AQSVPWGISRVQAPAAHNRGLTGSGVKVAVLDTGISTHPDLNIRGGASFVPGEPSTQDGNIHGTHVAGTIAALNNSIGVLGVAPSAELYAVKVLGASGSGSVSSIAQGLEWAGNNGMHVANLSLGSPSPSATLEQAVNSATSRGVLVVAASGNSGAGSISYPARYANAMAVGATDQNNNRASFSQYGAGLDIVAPGVNVQSTYPGSTYASLNGTSMATPHVAGAAALVKQKNPSWSNVQIRNHLKNTATSLGSTNLYGSGLVNAEAATR

SEQ ID NO: 51670 - protein, 269 aa, Unidentified
AQSVPWGISRVQAPAAHNRGLTGSGVKVAVLDTGISTHPDLNIRGGASFVPGEPSTQPGNGHGTHVAGTIAALNNSIGVLGVAPSAELYAVKVLGASGSGSVSSIAQGLEWAGNNGMHVANLSLGSPSPSATLEQAVNSATSRGVLVVAASGNSGAGSISYPARYANAMAVGATDQNNNRASFSQYGAGLDIVAPGVNVQSTYPGSTYASLNGTSMATPHVAGAAALVKQKNPSWSNVQIRNHLKNTATSLGSTNLYGSGLVNAEAATR

SEQ ID NO: 51671 - protein, 269 aa, Unidentified
AQSVPWGISRVQAPAAHNRGLTGSGVKVAVLDTGISTHPDLNIRGGASFVPGEPSTQDGNGHGTHVAGTIAALNNSIGVLGVAPSAELYAVKVLGASGSGSVSSIAQGLEWAGNNGMHVANLSLGDPSPSATLEQAVNSATSRGVLVVAASGNSGAGSISYPARYANAMAVGATDQNNNRASFSQYGAGLDIVAPGVNVQSTYPGSTYASLNGTSMATPHVAGAAALVKQKNPSWSNVQIRNHLKNTATSLGSTNLYGSGLVNAEAATR

SEQ ID NO: 51672 - protein, 269 aa, Unidentified
AQSVPWGISRVQAPAAHNRGLTGSGVKVAVLDTGISTHPDLNIRGGASFVPGEPSTQDGNGHGTHVAGTIAALNNSIGVLGVAPSAELYAVKVLGASGSGSVSEIAQGLEWAGNNGMHVANLSLGSPSPSATLEQAVNSATSRGVLVVAASGNSGAGSISYPARYANAMAVGATDQNNNRASFSQYGAGLDIVAPGVNVQSTYPGSTYASLNGTSMATPHVAGAAALVKQKNPSWSNVQIRNHLKNTATSLGSTNLYGSGLVNAEAATR

SEQ ID NO: 51673 - protein, 269 aa, Unidentified
AQSVPWGISRVQAPAAHNRGLTGSGVKVAVLDTGISTHPDLNIRGGASFVPGEPSTQDGNGHGTHVAGTIAALNNSIGVLGVAPSAELYAVKVLGASGSGSVSSIAQGLEWAGNNGMHVANLSLGSPSPSATLEQAVNSATSRGVLVVAASGNSGAGSISYPARYANAMAVGATDQNNNRASFSQYGAGLDIVAPGVNVQSTFPGSTYASLNGTSMATPHVAGAAALVKQKNPSWSNVQIRNHLKNTATSLGSTNLYGSGLVNAEAATR

SEQ ID NO: 51674 - protein, 269 aa, Unidentified
AQSVPWGISRVQAPAAHNRGLTGSGVKVAVLDTGISTHPDLNIRGGASFVPGEPSTQDGNGHGTHVAGTIAALNNSIGVLGVAPSAELYAVKVLGASGSGSVSSIAQGLEWAGNNGMHVANLSLGSPSPSATLEQAVNSATSRGVLVVAASGNSGAGSISYPARYANAMAVGATDQNNNRASFSQYGAGLDIVAPGVNVQSTYPGSTYASLNGTSMATPHVAGAAALVKQKNPSWSNVQIRNTLKNTATSLGSTNLYGSGLVNAEAATR

SEQ ID NO: 51675 - protein, 269 aa, Unidentified
AQSVPWGISRVQAPAAHNRGLTGSGVKVAVLDTGISTHPDLNIRGGASFVPGEPSTQDGNGHGTHVAGTIAALNNSIGVLGVAPSAELYAVKVLGASISGSVSSIAQGLEWAGNNGMHVANLSLGSPSPSATLEQAVNSATSRGVLVVAASGNSGAGSISYPARYANAMAVGATDQNNNRASFSQYGAGLDIVAPGVNVQSTYPGSTYASLNGTSMATPHVAGAAALVKQKNPSWSNVQIRNHLKNTATSLGSTNLYGSGLVNAEAATR

SEQ ID NO: 51676 - protein, 269 aa, Unidentified
AQSVPWGISRVQAPAAHNRGLTGSGVKVAVLDTGISTHPDLNIRGGASFVPGEPSTQDGNGHGTHVAGTIAALNNSIGVLGVAPSAELYAVKVLGASGNGSVSSIAQGLEWAGNNGMHVANLSLGSPSPSATLEQAVNSATSRGVLVVAASGNSGAGSISYPARYANAMAVGATDQNNNRASFSQYGAGLDIVAPGVNVQSTYPGSTYASLNGTSMATPHVAGAAALVKQKNPSWSNVQIRNHLKNTATSLGSTNLYGSGLVNAEAATR

SEQ ID NO: 51677 - protein, 269 aa, Unidentified
AQSVPWGISRVQAPAAHNRGLTGSGVKVAVLDTGISTHPDLNIRGGASFVPGEPSTQDGNGHGTHVAGTIAALNNSIGVLGVAPSAELYAVKVLGASGSGSVSSIAQGLEWAGNNGMHVANLSLGSPSPSATLEQAVNSATSRGVLVVAASGNSGAGSISYPARYANAMAVGATDQNNNRASFSQYGAGLDIVAPGVNVQSTYPGSTYASLNGTSMATPHVAGAAALVKQKNPSWSNVQIRNHLKNTDTSLGSTNLYGSGLVNAEAATR

SEQ ID NO: 51678 - protein, 269 aa, Unidentified
AQSVPWGISRVQAPAAHNRGLTGSGVKVAVLDTGISTHPDLNIRGGASFVPGEPSTQDGNGHGTHVAGTIAALNNSIGVLGVAPSAELYAVKVLGASGSGSVSSIAQGLEWAGNNGMHVANLSLGSPSPSATLEQAVNSATSRGVLVVAASGNSGAGSISYPARYANAMAVGATDQNNNRASFSQYGAGLDIVAPGVNVQSTEPGSTYASLNGTSMATPHVAGAAALVKQKNPSWSNVQIRNHLKNTATSLGSTNLYGSGLVNAEAATR

SEQ ID NO: 51679 - protein, 269 aa, Unidentified
AQSVPWGISRVQAPAAHNRGLTGSGDKVAVLDTGISTHPDLNIRGGASFVPGEPSTQDGNGHGTHVAGTIAALNNSIGVLGVAPSAELYAVKVLGASGSGSVSSIAQGLEWAGNNGMHVANLSLGSPSPSATLEQAVNSATSRGVLVVAASGNSGAGSISYPARYANAMAVGATDQNNNRASFSQYGAGLDIVAPGVNVQSTYPGSTYASLNGTSMATPHVAGAAALVKQKNPSWSNVQIRNHLKNTATSLGSTNLYGSGLVNAEAATR

SEQ ID NO: 51680 - protein, 269 aa, Unidentified
AQSVPWGISRVQAPAAHNRGLTGSGVKVAVLDTGISTHPDLNIRGGASFVPGEPSTQDGNGHGTHCAGTIAALNNSIGVLGVAPSAELYAVKVLGASGSGSVSSIAQGLEWAGNNGMHVANLSLGSPSPSATLEQAVNSATSRGVLVVAASGNSGAGSISYPARYANAMAVGATDQNNNRASFSQYGAGLDIVAPGVNVQSTYPGSTYASLNGTSMATPHVAGAAALVKQKNPSWSNVQIRNHLKNTATSLGSTNLYGSGLVNAEAATR

SEQ ID NO: 51681 - protein, 269 aa, Unidentified
AQSVPWGISRVQAPAAHNRGLTGSGVKVAVLDTGISTHPDLNIRGGASFVPGEPSTQDGNGHGTHVAGTIAAANNSIGVLGVAPSAELYAVKVLGASGSGSVSSIAQGLEWAGNNGMHVANLSLGSPSPSATLEQAVNSATSRGVLVVAASGNSGAGSISYPARYANAMAVGATDQNNNRASFSQYGAGLDIVAPGVNVQSTYPGSTYASLNGTSMATPHVAGAAALVKQKNPSWSNVQIRNHLKNTATSLGSTNLYGSGLVNAEAATR

SEQ ID NO: 51682 - protein, 269 aa, Unidentified
AQSVPWGISRVQAPAAHNRGLTGSGVKVAVLDTGISTHPDLNIRGGASFVPGEPSTQDGNGHGTHVAGTIAALNNSIGVLGVAPSAELYAVKVLGASGSGSVSSIAQGLEWAGNNGMHVANLSLGSPSPSATLEQAVNSATSRGVLVVAASGNSGAGSISYPARYANAMAVGATDQNNNRASFSQYGAGLDIVAPGVNVQSTYPGSTYASLNGTSMATPHVAGAAALVKQKNPSWSNVQIRNHLKNTATSLGSTNLYGSGLVKAEAATR

SEQ ID NO: 51683 - protein, 269 aa, Unidentified
AQSVPWGISRVQAPAAHNRGLTGSGVKVAVLDTGISTHPDLNIRGGASFVPGEPSTQDGNGHGTHVAGTIAALNNSIGVLGVAPSAELYAVKVLGASGSGSVSSIAQGLEWAGNNGMHVANLSLGSPSPSATLEQAVNSATSRGVLVVAASGNSGAGSISYPARYANAMAVGATDQNNNRASFSQYGAGLFIVAPGVNVQSTYPGSTYASLNGTSMATPHVAGAAALVKQKNPSWSNVQIRNHLKNTATSLGSTNLYGSGLVNAEAATR

SEQ ID NO: 51684 - protein, 269 aa, Unidentified
AQSVPWGISRVQAPAAHNRGLTGSGVKVAVLDTGISTHPDLNIRGGASFVPGEPSTQDGNVHGTHVAGTIAALNNSIGVLGVAPSAELYAVKVLGASGSGSVSSIAQGLEWAGNNGMHVANLSLGSPSPSATLEQAVNSATSRGVLVVAASGNSGAGSISYPARYANAMAVGATDQNNNRASFSQYGAGLDIVAPGVNVQSTYPGSTYASLNGTSMATPHVAGAAALVKQKNPSWSNVQIRNHLKNTATSLGSTNLYGSGLVNAEAATR

SEQ ID NO: 51685 - protein, 269 aa, Unidentified
AQSVPWGISRVQAPAAHNRGLTGSGVKVAVLDTGISTHPDLNIRGGASFVPGEPSTQDGNGHGTHVAGTIAALNNSIGVLGVAPSAELYAVKVLGASGSGSVSSIAQGLEWAGNNGMHVANLSLGSPSPSATLEQAVNSATSRGVLVVAASGNSGAGSISYPARYANAMAVGATEQNNNRASFSQYGAGLDIVAPGVNVQSTYPGSTYASLNGTSMATPHVAGAAALVKQKNPSWSNVQIRNHLKNTATSLGSTNLYGSGLVNAEAATR

SEQ ID NO: 51686 - protein, 269 aa, Unidentified
AQSVPWGISRVQAPAAHNRGLTGSGVKVAVLDTGISTHPDLNIRGGASFVPGEPSTQDGNGHGTHVAGTIAALNNSIGVLGVAPSAELYAVKVLGASGSGSVSSIAQGLEWAGNNGMHVANLSLGSPSPSATLEQAVNSATSRGVLVVAASGNSGAGSISYPARYANAMAVGATDQNNNRASFSQYGAGLDIVAPGVNVQSTYPGSEYASLNGTSMATPHVAGAAALVKQKNPSWSNVQIRNHLKNTATSLGSTNLYGSGLVNAEAATR

SEQ ID NO: 51687 - protein, 269 aa, Unidentified
AQSVPWGISRVQAPAAHNRGLTGSGVKVAVLDTGISTHPDLNIRGGASFVPGEPSTQDGNGHGTHVAGTIAALNNSIGVLGVAPSAELYAVKVLGASGSGSVSSIAQGLEWAGNNGMHVANLSLGSPSPSATLEQAVNSATSRGVLVVAASGNSGAGSISYPARYANAMAVGATDQNNNRASFSQWGAGLDIVAPGVNVQSTYPGSTYASLNGTSMATPHVAGAAALVKQKNPSWSNVQIRNHLKNTATSLGSTNLYGSGLVNAEAATR

SEQ ID NO: 51688 - protein, 271 aa, Unidentified
AQSVPWGISRVQAPAAHNRGLTGSGVKVAVLDTGISTHPDLNIRGGASFVPGEPSTQDGNGHGTHVAGTIAALNNSIGVLGVAPSAELYAVKVLGATXSGSGSVSSIAQGLEWAGNNGMHVANLSLGSPSPSATLEQAVNSATSRGVLVVAASGNSGAGSISYPARYANAMAVGATDQNNNRASFSQYGAGLDIVAPGVNVQSTYPGSTYASLNGTSMATPHVAGAAALVKQKNPSWSNVQIKNHLKNTATSLGSTNLYGSGLVNAEAATR

SEQ ID NO: 51689 - protein, 269 aa, Unidentified
AQSVPWGISRVQAPAAHNRGLTGSGVKVAVLDTGISTHPDLNIRGGASFVPGEPSTQDGNGHGTHVAGTIAALNNSIGVLGVAPSAELYAVKVLGASGSGSVSSIAQGLEWAGNNGMHVANLSLGSPSPSATLEQAVNSATSRGVLVVAASGNSGAGSISYPARYANAMAVGATDQNNNRASFSQYGAGLDIVAPGVNVQSTYPGSTYASLNGTSMATPHVAGAAALVKQKNPSWSNVQIRNHLKNTATSLGSTNLYGSGLVNAEAFTR

SEQ ID NO: 51690 - protein, 269 aa, Unidentified
AQSVPWGISRVQAPAAHNRGLTGSGVKVAVLDTGISTHPDLNIRGGASFVPGEPSTQDGNGHGTHVAGTIAALNNSICVLGVAPSAELYAVKVLGASGSGSVSSIAQGLEWAGNNGMHVANLSLGSPSPSATLEQAVNSATSRGVLVVAASGNSGAGSISYPARYANAMAVGATDQNNNRASFSQYGAGLDIVAPGVNVQSTYPGSTYASLNGTSMATPHVAGAAALVKQKNPSWSNVQIRNHLKNTATSLGSTNLYGSGLVNAEAATR

SEQ ID NO: 51691 - protein, 269 aa, Synthetic construct
AQSVPWGISRVQAPAAHNRGLTGSGVKVAVLDTGISTHPDLNIRGGASFVPGEPSTQDGNGHGTHVAGTIAALDNSIGVLGVAPSAELYAVKVLGASGSGSVSSIAQGLEWAGNNGMHVANLSLGSPSPSATLEQAVNSATSRGVLVVAASGNSGAGSISYPARYANAMAVGATDQNNNRASFSQYGAGLDIVAPGVNVQSTYPGSTYASLNGTSMATPHVAGAAALVKQKNPSWSNVQIRNHLKNTATSLGSTNLYGSGLVNAEAATR

SEQ ID NO: 51692 - protein, 269 aa, Unidentified
AQSVPWGISRVQAPAAHNRGLTGSGVKVAVLDTGISTHPDLNIRGGASFVPGEPSTQDGNGHGTHVAGTIAALNNSIGVLGVAPSAELYAVKVLGASGSGNVSSIAQGLEWAGNNGMHVANLSLGSPSPSATLEQAVNSATSRGVLVVAASGNSGAGSISYPARYANAMAVGATDQNNNRASFSQYGAGLDIVAPGVNVQSTYPGSTYASLNGTSMATPHVAGAAALVKQKNPSWSNVQIRNHLKNTATSLGSTNLYGSGLVNAEAATR

SEQ ID NO: 51693 - protein, 269 aa, Unidentified
AQSVPWGISRVQAPAAHNRGLTGSGVKVAVLDTGISTHPDLNIRGGASFVPGEPSTQDGNGHGTHVAGTIAALNNSIGVLGVAPSAELYAVKVLGASGSGSVSSIAQGLEWAGNNGMHVANLSLGSPSPSATLEQAVNSATSRGVLVVAASGNSGAGSISYPARYANAMAVGATDQNNNRASFSQYGAGLDIVAPGVNVQSTYPGSTYASLNGTSMATPHVAGAAVLVKQKNPSWSNVQIRNHLKNTATSLGSTNLYGSGLVNAEAATR

SEQ ID NO: 51694 - protein, 269 aa, Unidentified
AQSVPWGISRVQAPAAHNRGLTGSGVKVAVLDTGISTHPDLNIRGGAWFVPGEPSTQDGNGHGTHVAGTIAALNNSIGVLGVAPSAELYAVKVLGASGSGSVSSIAQGLEWAGNNGMHVANLSLGSPSPSATLEQAVNSATSRGVLVVAASGNSGAGSISYPARYANAMAVGATDQNNNRASFSQYGAGLDIVAPGVNVQSTYPGSTYASLNGTSMATPHVAGAAALVKQKNPSWSNVQIRNHLKNTATSLGSTNLYGSGLVNAEAATR

SEQ ID NO: 51695 - protein, 269 aa, Unidentified
AQSVPWGISRVQAPAAHNRGLTGSRVKVAVLDTGISTHPDLNIRGGASFVPGEPSTQDGNGHGTHVAGTIAALNNSIGVLGVAPSAELYAVKVLGASGSGSVSSIAQGLEWAGNNGMHVANLSLGSPSPSATLEQAVNSATSRGVLVVAASGNSGAGSISYPARYANAMAVGATDQNNNRASFSQYGAGLDIVAPGVNVQSTYPGSTYASLNGTSMATPHVAGAAALVKQKNPSWSNVQIRNHLKNTATSLGSTNLYGSGLVNAEAATR

SEQ ID NO: 51696 - protein, 269 aa, Unidentified
AQSVPWGISRVQAPAAHNRGLTGSGVKVAVLDTGISTHPDLNIRGGASFVPGEPSTQDGNGHGTHVAGTIAALNNSIGVLGVAPSADLYAVKVLGASGSGSVSSIAQGLEWAGNNGMHVANLSLGSPSPSATLEQAVNSATSRGVLVVAASGNSGAGSISYPARYANAMAVGATDQNNNRASFSQYGAGLDIVAPGVNVQSTYPGSTYASLNGTSMATPHVAGAAALVKQKNPSWSNVQIRNHLKNTATSLGSTNLYGSGLVNAEAATR

SEQ ID NO: 51697 - protein, 269 aa, Unidentified
AQSVPWGISRVQAPAAHNRGLTGSGVKVAVLDTGISTHPDLNIRGGASFVPGEPSTQDGNGHGTHVAGTIAALNNSIGVLGVAPSAELYAVKVLGASGSGSVSSIAQGLEWAGNNGMHVANLSLGSPSPSATLEQAVNSATSRGVLVVAASGNSGAGSISYPARYANAMAVGATDQNNNRASFSQYGAGLDIVAPGVNVQSTYPGATYASLNGTSMATPHVAGAAALVKQKNPSWSNVQIRNHLKNTATSLGSTNLYGSGLVNAEAATR

SEQ ID NO: 51698 - protein, 269 aa, Unidentified
AQSVPWGISRVQAPAAHNRGLTGSGVKVAVLDTGISTHPDLNIRGGVSFVPGEPSTQDGNGHGTHVAGTIAALNNSIGVLGVAPSAELYAVKVLGASGSGSVSSIAQGLEWAGNNGMHVANLSLGSPSPSATLEQAVNSATSRGVLVVAASGNSGAGSISYPARYANAMAVGATDQNNNRASFSQYGAGLDIVAPGVNVQSTYPGSTYASLNGTSMATPHVAGAAALVKQKNPSWSNVQIRNHLKNTATSLGSTNLYGSGLVNAEAATR

SEQ ID NO: 51699 - protein, 269 aa, Unidentified
AQSVPWGISRVQAPAAHNRGGTGSGVKVAVLDTGISTHPDLNIRGGASFVPGEPSTQDGNGHGTHVAGTIAALNNSIGVLGVAPSAELYAVKVLGASGSGSVSSIAQGLEWAGNNGMHVANLSLGSPSPSATLEQAVNSATSRGVLVVAASGNSGAGSISYPARYANAMAVGATDQNNNRASFSQYGAGLDIVAPGVNVQSTYPGSTYASLNGTSMATPHVAGAAALVKQKNPSWSNVQIRNHLKNTATSLGSTNLYGSGLVNAEAATR

SEQ ID NO: 51700 - protein, 269 aa, Unidentified
AQSVPWGISRVQAPAAHNRGLTGSGVKVAVLDTGISTHPDLNIRGGASFVPGEPSTQDGNGHGTHVAGTIAALNNSIGVLGVAPSAELYAVKVLGASGSGSVSSIAQGLEWAGNNGMHVANLSLGSPSPKATLEQAVNSATSRGVLVVAASGNSGAGSISYPARYANAMAVGATDQNNNRASFSQYGAGLDIVAPGVNVQSTYPGSTYASLNGTSMATPHVAGAAALVKQKNPSWSNVQIRNHLKNTATSLGSTNLYGSGLVNAEAATR

SEQ ID NO: 51701 - protein, 269 aa, Unidentified
SQSVPWGISRVQAPAAHNRGLTGSGVKVAVLDTGISTHPDLNIRGGASFVPGEPSTQDGNGHGTHVAGTIAALNNSIGVLGVAPSAELYAVKVLGASGSGSVSSIAQGLEWAGNNGMHVANLSLGSPSPSATLEQAVNSATSRGVLVVAASGNSGAGSISYPARYANAMAVGATDQNNNRASFSQYGAGLDIVAPGVNVQSTYPGSTYASLNGTSMATPHVAGAAALVKQKNPSWSNVQIRNHLKNTATSLGSTNLYGSGLVNAEAATR

SEQ ID NO: 51702 - protein, 269 aa, Unidentified
AQSVPWGISRVQAPAAHNRGLTGSGVKVAVLDTGISTHPDLNIRGGASFVPGEPSTQDGNGHGTHVAGTIAALNNSIGVLGVAPSAELYAVKVLGASGSGSVSSIAQGLEWAGNNGMHVANLSLGSPSPSATLEQAVNSATSRGVLVVAASGNSGAGSISYPARYANAMAVGATDQNNNHASFSQYGAGLDIVAPGVNVQSTYPGSTYASLNGTSMATPHVAGAAALVKQKNPSWSNVQIRNHLKNTATSLGSTNLYGSGLVNAEAATR

SEQ ID NO: 51703 - protein, 269 aa, Unidentified
AQSVPWGISRVQAPAAHNRGLTGSGVKVAVLDTGISTHPDLNIRGGASFVPGEPSTQDGNGHGTHVAGTIAALNNSIGVLGVAPSAELYAVKVLGASGSGSVSSIAQGLEWAGNNGMHVANLSLGSPSPSATLEQAVNSATSRGVLVVAASGNSGAGSISYPARYANAMAVGATDQNNNRASFSQYGAGLDIVAPGVNVQSTYPGSTYASLNGTSMATPHVAGAAALVKQKNPSWSNVQIRNHLKNTAQSLGSTNLYGSGLVNAEAATR

SEQ ID NO: 51704 - protein, 269 aa, Unidentified
AQSVPWGISRVQAPAAHNRGLTGSGVKVAVLDTGISTHPHLNIRGGASFVPGEPSTQDGNGHGTHVAGTIAALNNSIGVLGVAPSAELYAVKVLGASGSGSVSSIAQGLEWAGNNGMHVANLSLGSPSPSATLEQAVNSATSRGVLVVAASGNSGAGSISYPARYANAMAVGATDQNNNRASFSQYGAGLDIVAPGVNVQSTYPGSTYASLNGTSMATPHVAGAAALVKQKNPSWSNVQIRNHLKNTATSLGSTNLYGSGLVNAEAATR

SEQ ID NO: 51705 - protein, 269 aa, Unidentified
AQSVPWGISRVQAPAAHNRGLTGSGVKVAVLDTGISTHPDLNIRGGASFVPGEPSTQDGNGHGTHVAGTIAALNNSIGVLGVSPSAELYAVKVLGASGSGSVSSIAQGLEWAGNNGMHVANLSLGSPSPSATLEQAVNSATSRGVLVVAASGNSGAGSISYPARYANAMAVGATDQNNNRASFSQYGAGLDIVAPGVNVQSTYPGSTYASLNGTSMATPHVAGAAALVKQKNPSWSNVQIRNHLKNTATSLGSTNLYGSGLVNAEAATR

SEQ ID NO: 51706 - protein, 269 aa, Unidentified
AQSVPWGISRVQAPAAHNRGLTGSGVKVAVLDTGISSHPDLNIRGGASFVPGEPSTQDGNGHGTHVAGTIAALNNSIGVLGVAPSAELYAVKVLGASGSGSVSSIAQGLEWAGNNGMHVANLSLGSPSPSATLEQAVNSATSRGVLVVAASGNSGAGSISYPARYANAMAVGATDQNNNRASFSQYGAGLDIVAPGVNVQSTYPGSTYASLNGTSMATPHVAGAAALVKQKNPSWSNVQIRNHLKNTATSLGSTNLYGSGLVNAEAATR

SEQ ID NO: 51707 - protein, 269 aa, Unidentified
AQSVPWGISRVQAPAAHNRGLTGSGVKVAVLDTGISTHPDLNIRGGASFVPGEPSTQDGNGHGTHVAGTIAALNNSIGVLGVAPSAELYAVKVLGASGSGSVSSIAQGLEWAGNNGMHVANLSLGSPSPSATLEQAVNSATSRGVLVVAASGWSGAGSISYPARYANAMAVGATDQNNNRASFSQYGAGLDIVAPGVNVQSTYPGSTYASLNGTSMATPHVAGAAALVKQKNPSWSNVQIRNHLKNTATSLGSTNLYGSGLVNAEAATR

SEQ ID NO: 51708 - protein, 269 aa, Unidentified
AQSVPWGISRVQAPAAHNRGLTGSGVKVAVLDTGISTHPDLNIRGGASFVPGEPSTQDGNGHGTHVAGTIAALNNSIGVLGVAPSAELYAVKVLGASGSGSVSSIAQGLEWAGNNGMHVANLSLGSPSPSATLEQAVNSATSRGVLVVAASGNSGAGSISYPARYANAMAVGATDQNNNRASFSQYGAGLDIVAPGVNVQSTYPGSTYASLNGTSMATPHVAGAAALVKQKNPSWSNVQIRNHIKNTATSLGSTNLYGSGLVNAEAATR

SEQ ID NO: 51709 - protein, 269 aa, Unidentified
AQSVPWGISRVQAPAAHNRGLTGSGVKVAVLDTGISTHPSLNIRGGASFVPGEPSTQDGNGHGTHVAGTIAALNNSIGVLGVAPSAELYAVKVLGASGSGSVSSIAQGLEWAGNNGMHVANLSLGSPSPSATLEQAVNSATSRGVLVVAASGNSGAGSISYPARYANAMAVGATDQNNNRASFSQYGAGLDIVAPGVNVQSTYPGSTYASLNGTSMATPHVAGAAALVKQKNPSWSNVQIRNHLKNTATSLGSTNLYGSGLVNAEAATR

SEQ ID NO: 51710 - protein, 269 aa, Unidentified
AQSVPWGISRVQAPAAHNRGLTGSGVKVAVLDTGISTHPDLSIRGGASFVPGEPSTQDGNGHGTHVAGTIAALNNSIGVLGVAPSAELYAVKVLGASGSGSVSSIAQGLEWAGNNGMHVANLSLGSPSPSATLEQAVNSATSRGVLVVAASGNSGAGSISYPARYANAMAVGATDQNNNRASFSQYGAGLDIVAPGVNVQSTYPGSTYASLNGTSMATPHVAGAAALVKQKNPSWSNVQIRNHLKNTATSLGSTNLYGSGLVNAEAATR

SEQ ID NO: 51711 - protein, 269 aa, Unidentified
AQSVPWGISRVQAPAAHNRGLTGSGVKVAVLDTGISTSPDLNIRGGASFVPGEPSTQDGNGHGTHVAGTIAALNNSIGVLGVAPSAELYAVKVLGASGSGSVSSIAQGLEWAGNNGMHVANLSLGSPSPSATLEQAVNSATSRGVLVVAASGNSGAGSISYPARYANAMAVGATDQNNNRASFSQYGAGLDIVAPGVNVQSTYPGSTYASLNGTSMATPHVAGAAALVKQKNPSWSNVQIRNHLKNTATSLGSTNLYGSGLVNAEAATR

SEQ ID NO: 51712 - protein, 269 aa, Unidentified
AQSVPWGISRVRAPAAHNRGLTGSGVKVAVLDTGISTHPDLNIRGGASFVPGEPSTQDGNGHGTHVAGTIAALNNSIGVLGVAPSAELYAVKVLGASGSGSVSSIAQGLEWAGNNGMHVANLSLGSPSPSATLEQAVNSATSRGVLVVAASGNSGAGSISYPARYANAMAVGATDQNNNRASFSQYGAGLDIVAPGVNVQSTYPGSTYASLNGTSMATPHVAGAAALVKQKNPSWSNVQIRNHLKNTATSLGSTNLYGSGLVNAEAATR

SEQ ID NO: 51713 - protein, 269 aa, Unidentified
AQSVPWGISRVQAPAAHNRGLTGSGVKVAVLDTGISTHPDLNIRGGASFVPGEPSTQDGNGHGTHVAGTIAALNNSIGVLGVAPSAELQAVKVLGASGSGSVSSIAQGLEWAGNNGMHVANLSLGSPSPSATLEQAVNSATSRGVLVVAASGNSGAGSISYPARYANAMAVGATDQNNNRASFSQYGAGLDIVAPGVNVQSTYPGSTYASLNGTSMATPHVAGAAALVKQKNPSWSNVQIRNHLKNTATSLGSTNLYGSGLVNAEAATR

SEQ ID NO: 51714 - protein, 269 aa, Unidentified
AQSVPWGIARVQAPAAHNRGLTGSGVKVAVLDTGISTHPDLNIRGGASFVPGEPSTQDGNGHGTHVAGTIAALNNSIGVLGVAPSAELYAVKVLGASGSGSVSSIAQGLEWAGNNGMHVANLSLGSPSPSATLEQAVNSATSRGVLVVAASGNSGAGSISYPARYANAMAVGATDQNNNRASFSQYGAGLDIVAPGVNVQSTYPGSTYASLNGTSMATPHVAGAAALVKQKNPSWSNVQIRNHLKNTATSLGSTNLYGSGLVNAEAATR

SEQ ID NO: 51715 - protein, 269 aa, Unidentified
AQSVPWGISSVQAPAAHNRGLTGSGVKVAVLDTGISTHPDLNIRGGASFVPGEPSTQDGNGHGTHVAGTIAALNNSIGVLGVAPSAELYAVKVLGASGSGSVSSIAQGLEWAGNNGMHVANLSLGSPSPSATLEQAVNSATSRGVLVVAASGNSGAGSISYPARYANAMAVGATDQNNNRASFSQYGAGLDIVAPGVNVQSTYPGSTYASLNGTSMATPHVAGAAALVKQKNPSWSNVQIRNHLKNTATSLGSTNLYGSGLVNAEAATR

SEQ ID NO: 51716 - protein, 269 aa, Unidentified
AQSVPWGISRVQAPAAHNRGLTGSGVKVAVLDTGISTHPDLNIRGGASFVPGEPSTQDGNGHGTHVAGTIAALNNSIGVLGVAPSAELYAVKVLGASGSGSVSSIAQGLEWAGNNGMHVANLSLGSPSPSATLEQAVNSATSRGVLVVAASGNSGAGSISYPARYANAMAVGATDQNNNRASFSQYGAGLDIVAPGVNVQSTYPGSTYASLNGTSMATPHVAGAAALVKQKNPSWSNVQIRNHLKNTETSLGSTNLYGSGLVNAEAATR

SEQ ID NO: 51717 - protein, 269 aa, Unidentified
AQSVPWGISRVQAPAAHNRGLTGSGVKVAVLDTGISTHPDLNIRGGASFVPGEPSTQDGNGHGTHVAGTIAALNNSIGVLGVAPSAELYAVKVLGASGSGSVSSIAQGLEWAGNNRMHVANLSLGSPSPSATLEQAVNSATSRGVLVVAASGNSGAGSISYPARYANAMAVGATDQNNNRASFSQYGAGLDIVAPGVNVQSTYPGSTYASLNGTSMATPHVAGAAALVKQKNPSWSNVQIRNHLKNTATSLGSTNLYGSGLVNAEAATR

SEQ ID NO: 51718 - protein, 269 aa, Unidentified
AQSVPWGISRVQAPAAHNRGLTGSGVKVAVLDTGISTHPDLNIRGGASFVPGEPCTQDGNGHGTHVAGTIAALNNSIGVLGVAPSAELYAVKVLGASGSGSVSSIAQGLEWAGNNGMHVANLSLGSPSPSATLEQAVNSATSRGVLVVAASGNSGAGSISYPARYANAMAVGATDQNNNRASFSQYGAGLDIVAPGVNVQSTYPGSTYASLNGTSMATPHVAGAAALVKQKNPSWSNVQIRNHLKNTATSLGSTNLYGSGLVNAEAATR

SEQ ID NO: 51719 - protein, 271 aa, Unidentified
AQSVPWGISRVQAPAAHNRGLTGSGVKVAVLDTGISTHPDLNIRGGASFVPGEPSTQDGNGHGTHVAGTIAALNNSIGVLGVAPSAELYAVKVLGASGTXSGSVSSIAQGLEWAGNNGMHVANLSLGSPSPSATLEQAVNSATSRGVLVVAASGNSGAGSISAPARYANAMAVGATDQNNNRASFSQYGAGLDIVAPGVNVQSTYPGSTYASLNGTSMATPHVAGAAALVKQKNPSWSNVQIRNHLKNTATSLGSTNLYGSGLVNAEAATR

SEQ ID NO: 51720 - protein, 269 aa, Unidentified
AQSVPWGISRVQAPAAHNRGLTGSGVKVAVLDTGISTHPDLNIRGGADFVPGEPSTQDGNGHGTHVAGTIAALNNSIGVLGVAPSAELYAVKVLGASGSGSVSSIAQGLEWAGNNGMHVANLSLGSPSPSATLEQAVNSATSRGVLVVAASGNSGAGSISYPARYANAMAVGATDQNNNRASFSQYGAGLDIVAPGVNVQSTYPGSTYASLNGTSMATPHVAGAAALVKQKNPSWSNVQIRNHLKNTATSLGSTNLYGSGLVNAEAATR

SEQ ID NO: 51721 - protein, 269 aa, Unidentified
AQSVPWGISRVQAPAAHNRGLTGSGVKVAVLDTGISTHPDLNIRGGASFVPGEPSTQDGNGHGTHVAGTIAALNNSIGVLGVAPSAELYAVKVLGASGMGSVSSIAQGLEWAGNNGMHVANLSLGSPSPSATLEQAVNSATSRGVLVVAASGNSGAGSISYPARYANAMAVGATDQNNNRASFSQYGAGLDIVAPGVNVQSTYPGSTYASLNGTSMATPHVAGAAALVKQKNPSWSNVQIRNHLKNTATSLGSTNLYGSGLVNAEAATR

SEQ ID NO: 51722 - protein, 269 aa, Unidentified
AQSVPWGISRVQAPAAHNRGLTGSGVKVAVLDTGISTHPDLNIRGGASFVPGEPSTQDGNGHGTHVAGTIAALNNSIGVLGVAPSAELYAVKVLGASGSGSVSSFAQGLEWAGNNGMHVANLSLGSPSPSATLEQAVNSATSRGVLVVAASGNSGAGSISYPARYANAMAVGATDQNNNRASFSQYGAGLDIVAPGVNVQSTYPGSTYASLNGTSMATPHVAGAAALVKQKNPSWSNVQIRNHLKNTATSLGSTNLYGSGLVNAEAATR

SEQ ID NO: 51723 - protein, 269 aa, Unidentified
AQSVPWGISRVQAPAAHNRGLTGSGVKVAVLDTGISTHPDLNIRGGASFVPGEPSTQDGNGHGTHVAGTIAALNNSIGVLGVAPSAELYAVKVLGASGSGVVSSIAQGLEWAGNNGMHVANLSLGSPSPSATLEQAVNSATSRGVLVVAASGNSGAGSISYPARYANAMAVGATDQNNNRASFSQYGAGLDIVAPGVNVQSTYPGSTYASLNGTSMATPHVAGAAALVKQKNPSWSNVQIRNHLKNTATSLGSTNLYGSGLVNAEAATR

SEQ ID NO: 51724 - protein, 269 aa, Unidentified
AQSVPWGISRVQAPAAHNRGLTGSGVKVAVLDTGISTHPDLNIRGGASFVNGEPSTQDGNGHGTHVAGTIAALNNSIGVLGVAPSAELYAVKVLGASGSGSVSSIAQGLEWAGNNGMHVANLSLGSPSPSATLEQAVNSATSRGVLVVAASGNSGAGSISYPARYANAMAVGATDQNNNRASFSQYGAGLDIVAPGVNVQSTYPGSTYASLNGTSMATPHVAGAAALVKQKNPSWSNVQIRNHLKNTATSLGSTNLYGSGLVNAEAATR

SEQ ID NO: 51725 - protein, 269 aa, Unidentified
AQSVPWGISRVQAPAAHNRFLTGSGVKVAVLDTGISTHPDLNIRGGASFVPGEPSTQDGNGHGTHVAGTIAALNNSIGVLGVAPSAELYAVKVLGASGSGSVSSIAQGLEWAGNNGMHVANLSLGSPSPSATLEQAVNSATSRGVLVVAASGNSGAGSISYPARYANAMAVGATDQNNNRASFSQYGAGLDIVAPGVNVQSTYPGSTYASLNGTSMATPHVAGAAALVKQKNPSWSNVQIRNHLKNTATSLGSTNLYGSGLVNAEAATR

SEQ ID NO: 51726 - protein, 270 aa, Unidentified
AQSVPWGISRVQAPAAHNRGLTGSGVKVAVLDTGISTHPDLNIRGGASFVPGEPSTQDGNGHGTHVAGTIAALNNSIGVLGVAPSAELYAVKVLGXXSGSGSVSSIAQGLEWAGNNGMHVANLSLGSPSPSATLEQAVNSATSRGVLVVAASGNSGAGSISYPARYANAMAVGATDQNNNRASFSQYGAGLDIVAPGVNVQSTYPGSTYASLNGTSMATPHVAGAAALVKQKNPSWSNVQIRNHLKNTATSLGSTNLYGSGLVNAEAATR

SEQ ID NO: 51727 - protein, 269 aa, Unidentified
AQSVPWGISRVQAPAAHNRGLTGSGVKVAVLDTGISTHPDLNIRGGASFVPGEPSTQDGNGHGTHVAGTIAALNNSIGVLGVAPSAELYAVKVLGASGSGSVSSIAQGLEWAGNNGMHVANLSLGSPSPSATLEQAVNSATSRGVLVVAASGNSGAGSISYPARYANAMAVGATDQNNNRASFSQYGAGLDIVAPGVNVQSTYPGSTYASLNGTSMATPHVAGAAALVKQKNPSWSNVQIRNHLKNTATSLGSTNLYGSGLVRAEAATR

SEQ ID NO: 51728 - protein, 269 aa, Unidentified
AQSVPWGISRVQAPAAHNRGLTGSGVKVAVLDTGISTHPDLNIRGGASFVPGEPSTQDGNGHGTHVAGTIAALNNSIGRLGVAPSAELYAVKVLGASGSGSVSSIAQGLEWAGNNGMHVANLSLGSPSPSATLEQAVNSATSRGVLVVAASGNSGAGSISYPARYANAMAVGATDQNNNRASFSQYGAGLDIVAPGVNVQSTYPGSTYASLNGTSMATPHVAGAAALVKQKNPSWSNVQIRNHLKNTATSLGSTNLYGSGLVNAEAATR

SEQ ID NO: 51729 - protein, 269 aa, Unidentified
AQSVPWGISRVQAPAAHNRGLTGSGVKVAVLDTGISTHPDLNIRGGASFVPGEPSTQDGNGHGTHVAGTIAALNNSIGVLGVAPSAELYAVKVLGASGSGSVSSIAQGLEWAGNNGMHVANLSLGSPSPSATLEQGVNSATSRGVLVVAASGNSGAGSISYPARYANAMAVGATDQNNNRASFSQYGAGLDIVAPGVNVQSTYPGSTYASLNGTSMATPHVAGAAALVKQKNPSWSNVQIRNHLKNTATSLGSTNLYGSGLVNAEAATR

SEQ ID NO: 51730 - protein, 269 aa, Unidentified
AQSVPWGISRVQAPAAHNRGLTGSGVKVAVLDTGISTHPDLNIRGGASFVPGEPSTQDGNGHGTHVAGTIAALNNSIGVLGVAPSAELYAVKVLGASGSGSVSSIAQGLEWAGNNGMHVANLSLGSPSPSATLEQAVNSATSRGVLVVAASGNSGAGSISYPARYANAMAVGATDQNNNRASFSQYGAGLDIVAPGVNVQSTYPGSTYASLNGTSMATPHVAGACALVKQKNPSWSNVQIRNHLKNTATSLGSTNLYGSGLVNAEAATR

SEQ ID NO: 51731 - protein, 269 aa, Unidentified
AQSVPWGISRVQAPAAHNRGLTGSGVKVAVLDTGISTHPDLNIRGGASFVEGEPSTQDGNGHGTHVAGTIAALNNSIGVLGVAPSAELYAVKVLGASGSGSVSSIAQGLEWAGNNGMHVANLSLGSPSPSATLEQAVNSATSRGVLVVAASGNSGAGSISYPARYANAMAVGATDQNNNRASFSQYGAGLDIVAPGVNVQSTYPGSTYASLNGTSMATPHVAGAAALVKQKNPSWSNVQIRNHLKNTATSLGSTNLYGSGLVNAEAATR

SEQ ID NO: 51732 - protein, 269 aa, Unidentified
AQSVPWGISRVQAPAAHNRGLTGSGVKVAVLDTGISTHPDLNIRGGASFVPGEPSTQDGNGHGTHVAGTIAALNNSIGVLGVAPSAELYAVKVLGASGSGSVSSIAQGLEWAGNNGMHVANLSLGSPSPSATLEQAVNSATSRGVLVVAASGNSGAGSISYPARYANAMAVGATDQNNNRASFSQYGAGLDIVAPGVNVQSTYPGSTYASLNGTSMATPHVAGAAALVKQKNPSWSNVQIRNHLKNTATSLGSTNLYGSGLVNAWAATR

SEQ ID NO: 51733 - protein, 269 aa, Bacillus sp.
AQSVPWGISRVQAPAAHNRGLTGSGVKVAVLDTGISTHPDLNIRGGASFVPGEPSTQDGNGHGTHVAGTIAALNNSIGVLGVAPNAELYAVKVLGASGSGSVSSIAQGLEWAGNNGMHVANLSLGSPSPSATLEQAVNSATSRGVLVVAASGNSGAGSISYPARYANAMAVGATDQNNNRASFSQYGAGLDIVAPGVNVQSTYPGSTYASLNGTSGATPHVAGAAALVKQKNPSWSNVQIRNHLKNTATSLGSTNLYGSGLVNAEAATR

SEQ ID NO: 51734 - protein, 269 aa, Unidentified
AQSVPWGISRVQAPAAHNRGLTGSGVKVAVLDTGISTHPDLNIRGGASFVPGEPSTQDGNGHGTHVAGTIAALNNSIGVLGVAPSAELYAVKVLGASGSGSVSSIAQGLEWAGNNGMHVANLSLGSPSPSATLEQAVNSATSRGVLVVAASGNSGAGSISYPARYANAMAVGATDQNNNRASFSQYGAGLDLVAPGVNVQSTYPGSTYASLNGTSMATPHVAGAAALVKQKNPSWSNVQIRNHLKNTATSLGSTNLYGSGLVNAEAATR

SEQ ID NO: 51735 - protein, 269 aa, Unidentified
AQSVPWGISRVQAPAAHNRGLTGSGVKVAVVDTGISTHPDLNIRGGASFVPGEPSTQDGNGHGTHVAGTIAALNNSIGVLGVAPSAELYAVKVLGASGSGSVSSIAQGLEWAGNNGMHVANLSLGSPSPSATLEQAVNSATSRGVLVVAASGNSGAGSISYPARYANAMAVGATDQNNNRASFSQYGAGLDIVAPGVNVQSTYPGSTYASLNGTSMATPHVAGAAALVKQKNPSWSNVQIRNHLKNTATSLGSTNLYGSGLVNAEAATR

SEQ ID NO: 51736 - protein, 269 aa, Unidentified
AQSVPWGISRVQAPAAHNRGLTGSGVKVAVLDTGISTHPDLNIRGGASFAPGEPSTQDGNGHGTHVAGTIAALNNSIGVLGVAPSAELYAVKVLGASGSGSVSSIAQGLEWAGNNGMHVANLSLGSPSPSATLEQAVNSATSRGVLVVAASGNSGAGSISYPARYANAMAVGATDQNNNRASFSQYGAGLDIVAPGVNVQSTYPGSTYASLNGTSMATPHVAGAAALVKQKNPSWSNVQIRNHLKNTATSLGSTNLYGSGLVNAEAATR

SEQ ID NO: 51737 - protein, 269 aa, Unidentified
AQSVPWGISRVQAPAAHNRGLTGSFVKVAVLDTGISTHPDLNIRGGASFVPGEPSTQDGNGHGTHVAGTIAALNNSIGVLGVAPSAELYAVKVLGASGSGSVSSIAQGLEWAGNNGMHVANLSLGSPSPSATLEQAVNSATSRGVLVVAASGNSGAGSISYPARYANAMAVGATDQNNNRASFSQYGAGLDIVAPGVNVQSTYPGSTYASLNGTSMATPHVAGAAALVKQKNPSWSNVQIRNHLKNTATSLGSTNLYGSGLVNAEAATR

SEQ ID NO: 51738 - protein, 269 aa, Unidentified
AQSVPWGISRVQAPAAHNRGLTGSGVKVAVLDTGISTHRDLNIRGGASFVPGEPSTQDGNGHGTHVAGTIAALNNSIGVLGVAPSAELYAVKVLGASGSGSVSSIAQGLEWAGNNGMHVANLSLGSPSPSATLEQAVNSATSRGVLVVAASGNSGAGSISYPARYANAMAVGATDQNNNRASFSQYGAGLDIVAPGVNVQSTYPGSTYASLNGTSMATPHVAGAAALVKQKNPSWSNVQIRNHLKNTATSLGSTNLYGSGLVNAEAATR

SEQ ID NO: 51739 - protein, 269 aa, Unidentified
AQSVPWGISRVQAPAAHNRGLTGSGVKVAVLDTGISTHPDLNIRGGASFVPGEPSTQDGNGHGTHVAGTIAALNNSIGVLGVAPSAELYAVKVLGASGSGSVSSIAQGLEWAGNNGMHVANLSLGSPSPSATLEQAVNSATSRGVLVVAASGNSGAGDISYPARYANAMAVGATDQNNNRASFSQYGAGLDIVAPGVNVQSTYPGSTYASLNGTSMATPHVAGAAALVKQKNPSWSNVQIRNHLKNTATSLGSTNLYGSGLVNAEAATR

SEQ ID NO: 51740 - protein, 269 aa, Unidentified
AQSVPWGISRVQAPAAHNRGLTGSGVKVAVLDTGISTHPDLNIRGGASFVPGEPSTQDGNGHGTHVAGTIAALNNSIGVLGVAPSAELYAVKVLGASGSGSVSSIAQGLEWAGNNGMHVANLSLGSPSPSATLEQAVNSATSRGVLVVAASGNSGAGSISYPARYANAMAVGATDQNNNRASFSQYGAGLDIVAPGVNVQSTYPGSTYASLNGTSMATPHVAGAAALVKLKNPSWSNVQIRNHLKNTATSLGSTNLYGSGLVNAEAATR

SEQ ID NO: 51741 - protein, 269 aa, Unidentified
AQSVPWGISRVQAPAAHNRGLTGSGVKVAVLDTGISTHPDLNIRGGASFVPGEPSTQDGNGHGTHVAGTIAALNNSIGVLGVAPSAELYAVKVLGASGSGSVSSIAQGLEWAGNNGMHVANLSLGSPSPSATLEQAVNSATSRGVLVVAASGNSGAGSISWPARYANAMAVGATDQNNNRASFSQYGAGLDIVAPGVNVQSTYPGSTYASLNGTSMATPHVAGAAALVKQKNPSWSNVQIRNHLKNTATSLGSTNLYGSGLVNAEAATR

SEQ ID NO: 51742 - protein, 269 aa, Unidentified
AQSVPWGISRVQAPAAHNRGLTGSGVKVAVLDTGISTHPDLNIRGGASFVPGEPSTQDGNGHGTHVAGTIAALNNSIGVLGVAPSAELYAVKVLGASGSGDVSSIAQGLEWAGNNGMHVANLSLGSPSPSATLEQAVNSATSRGVLVVAASGNSGAGSISYPARYANAMAVGATDQNNNRASFSQYGAGLDIVAPGVNVQSTYPGSTYASLNGTSMATPHVAGAAALVKQKNPSWSNVQIRNHLKNTATSLGSTNLYGSGLVNAEAATR

SEQ ID NO: 51743 - protein, 269 aa, Unidentified
AQSVPWGISRVQAPAAHNRGLTGSGVKVAVLDTGISTHPDLNIRGGASFVPGEPSTQDGNGHGTHVAGTIAALNNSIGVLGVAPSAELYAVKVLGASGSGSVSSIAQGLEWAGNNGMHVANLSLGSPSPSATLEQAVNSATSRGVLVVAASGNSGAGSISYPARYANAMAVGATDQNNNRASFSQYGAGLDIVAPGVNVQSTYVGSTYASLNGTSMATPHVAGAAALVKQKNPSWSNVQIRNHLKNTATSLGSTNLYGSGLVNAEAATR

SEQ ID NO: 51744 - protein, 269 aa, Unidentified
AQSVPWGISRVQAPAAHNRGLTGSGVKVAVLDTGISTHPDLNIRGGASFVPGEPSTQDGNGHGTHVAGTIAALNNSIGVLGVAPSAWLYAVKVLGASGSGSVSSIAQGLEWAGNNGMHVANLSLGSPSPSATLEQAVNSATSRGVLVVAASGNSGAGSISYPARYANAMAVGATDQNNNRASFSQYGAGLDIVAPGVNVQSTYPGSTYASLNGTSMATPHVAGAAALVKQKNPSWSNVQIRNHLKNTATSLGSTNLYGSGLVNAEAATR

SEQ ID NO: 51745 - protein, 269 aa, Unidentified
AQSVPWGISRVQAPAAHNRGLTGSGVKVAVLDTGISTHPDLNIRGGASFVPGEPSTQDGNGHGTHVAGTIAAGNNSIGVLGVAPSAELYAVKVLGASGSGSVSSIAQGLEWAGNNGMHVANLSLGSPSPSATLEQAVNSATSRGVLVVAASGNSGAGSISYPARYANAMAVGATDQNNNRASFSQYGAGLDIVAPGVNVQSTYPGSTYASLNGTSMATPHVAGAAALVKQKNPSWSNVQIRNHLKNTATSLGSTNLYGSGLVNAEAATR

SEQ ID NO: 51746 - protein, 269 aa, Unidentified
AQSVPWGISRVQAPAAHNRGLTGSGVKVAVLDTGISTHPDLNIRGGASFVPGEPSTQDGNGHGTHVAGTIAALNNSIGVLGVAPSAELYAVKVLGASGSGSVSSIAQGLEWAGNNGMHVANLSLGIPSPSATLEQAVNSATSRGVLVVAASGNSGAGSISYPARYANAMAVGATDQNNNRASFSQYGAGLDIVAPGVNVQSTYPGSTYASLNGTSMATPHVAGAAALVKQKNPSWSNVQIRNHLKNTATSLGSTNLYGSGLVNAEAATR

SEQ ID NO: 51747 - protein, 269 aa, Unidentified
AQSVPWGISRVQAPAAHNRGLTGSGVKVTVLDTGISTHPDLNIRGGASFVPGEPSTQDGNGHGTHVAGTIAALNNSIGVLGVAPSAELYAVKVLGASGSGSVSSIAQGLEWAGNNGMHVANLSLGSPSPSATLEQAVNSATSRGVLVVAASGNSGAGSISYPARYANAMAVGATDQNNNRASFSQYGAGLDIVAPGVNVQSTYPGSTYASLNGTSMATPHVAGAAALVKQKNPSWSNVQIRNHLKNTATSLGSTNLYGSGLVNAEAATR

SEQ ID NO: 51748 - protein, 269 aa, Unidentified
AQSVPWGISRVQAPAAHNRGLTGSGVKVAVLDTGISTHPDLNIRGGASFVPGEPSTQDGNGHGTHVAGTIAALNNSIGVLGVAPSAELVAVKVLGASGSGSVSSIAQGLEWAGNNGMHVANLSLGSPSPSATLEQAVNSATSRGVLVVAASGNSGAGSISYPARYANAMAVGATDQNNNRASFSQYGAGLDIVAPGVNVQSTYPGSTYASLNGTSMATPHVAGAAALVKQKNPSWSNVQIRNHLKNTATSLGSTNLYGSGLVNAEAATR

SEQ ID NO: 51749 - protein, 269 aa, Unidentified
AQSVPWGISRVQAPAAHNRGLTGSGVKVAVLDTGISTHPDLNIRGGASFVPGEPSTQDGNGHGTHVAGTIAALNNSIGVLGVAPSAELYAVKVLGASGTGSVSSIAQGLEWAGNNGMHVANLSLGSPSPSATLEQAVNSATSRGVLVVAASGNSGAGSISYPARYANAMAVGATDQNNNRASFSQYGAGLDIVAPGVNVQSTYPGSTYASLNGTSMATPHVAGAAALVKQKNPSWSNVQIRNHLKNTATSLGSTNLYGSGLVNAEAATR

SEQ ID NO: 51750 - protein, 269 aa, Unidentified
AQSVPWGISRVQAPAAHNRGLTGSGVKVAVLDTGISTHPDLNIRGGASFVPGEPSTQDGNGHGTHVAGTIAALNNSIGVLGVAPSAELYAVKVLGASGSGSVSSIAQGLEWAGNNGMHVANLSLGSPSPSATLEQAVNSATSRGVLVVAASGNSGAGSISYPARYANAMAVGATDQNNNRASFSQYGAGLDIVAPGVNVQSTYPGSTYASLNGTSMATPHIAGAAALVKQKNPSWSNVQIRNHLKNTATSLGSTNLYGSGLVNAEAATR

SEQ ID NO: 51751 - protein, 269 aa, Unidentified
AQSVPWGISRVQAPAAHNRGLTGSGVKVAVLDTGISTHPDLNIRGGASFVPGEPSTQDGNGHGTHVAGTIAALNNSIGVLGVAPSAELYAVKVLGASGSGSVSSIAQGLEWAGNNGMHVANLSLGSPSPSATLEQAVNSATSRGVLVVAASGNSGAGSISYPARYANAMAVGATDQNNNRASFSQYGAGLDIVAPGVNVQSTYPGSTYASLNGTSMATPHVAGAAALVKQKNPSWSNVQIRNHLKNRATSLGSTNLYGSGLVNAEAATR

SEQ ID NO: 51752 - protein, 269 aa, Unidentified
AQSVPWGISRVQAPAAHNRGLTGSGVKVAVLDTGISTHPDLNIRGGASFVPGEPSTQDGNGHGTHVAGTIAALNNSIGVLGVAPSAELYAVKVLGASGSGSVSSIAQGLEWAGNNGMHVANLSLGSPSPSATLEQAVNSATSRGVLFVAASGNSGAGSISYPARYANAMAVGATDQNNNRASFSQYGAGLDIVAPGVNVQSTYPGSTYASLNGTSMATPHVAGAAALVKQKNPSWSNVQIRNHLKNTATSLGSTNLYGSGLVNAEAATR

SEQ ID NO: 51753 - protein, 269 aa, Unidentified
AQSVPWGISRVQAPAAHNRGLTGSGVKVAVLDTGISTHPDLNIRGGASFVPGEPSTQDGNGHGTHVAGTIAALNNSIGVLGVAPSAELYAVKVLGASGSGSVSSIAQGLEWAGNNGMHVANLSLGSPSPSATLEQAVNSATSRGVLVVAASGNSGAGSISYPARYANAMAVGATDQNNNRASFSQYGAGLDIVAPGVNVQSTYPGSTYASLNGTSMATPHVAGAAALVKQKNPSWSNVQIRNHLKNTATSLGSTNLYGSGLVNAFAATR

SEQ ID NO: 51754 - protein, 269 aa, Unidentified
AQSVPWGISRVQAPAAHNRGLTGSGVKVAVLDTGISTHPDLNIRGGASFVPGEPSTQDGNGHGTHVAGTIAALNNSIGVLGVAPSAELYAVKVLGASGSGSVSSIAQGLEWAGNNGMHVANLSLGSPSPSATLEQAVNSATSRGVLVVAASGNSGAGSISYPARYANAMAVGATDQNNNRASFSQYGAGLDIVAPGVNVQSTYPGSTYASLNGTSMATPHVAGAAALVKQKNPSWSNVQIRNHLKNTATSLRSTNLYGSGLVNAEAATR

SEQ ID NO: 51755 - protein, 269 aa, Unidentified
AQSVPWGISRVQAPAAHNRGLTGSGVKVAVLDTGISTHPDLNIRGGASFVPGEPSTQDGNGHGVHVAGTIAALNNSIGVLGVAPSAELYAVKVLGASGSGSVSSIAQGLEWAGNNGMHVANLSLGSPSPSATLEQAVNSATSRGVLVVAASGNSGAGSISYPARYANAMAVGATDQNNNRASFSQYGAGLDIVAPGVNVQSTYPGSTYASLNGTSMATPHVAGAAALVKQKNPSWSNVQIRNHLKNTATSLGSTNLYGSGLVNAEAATR

SEQ ID NO: 51756 - protein, 269 aa, Unidentified
AQSVPWGISRVQAPAAHNRGLTGSGVKVAVLDTGISTHPDLNIRGGASFVPGEPSTQDGNGHGTHVAGTIAALNNSIGVLGVAPSAELYAVKVLGASGSGSVSSIAQGLEWAKNNGMHVANLSLGSPSPSATLEQAVNSATSRGVLVVAASGNSGAGSISYPARYANAMAVGATDQNNNRASFSQYGAGLDIVAPGVNVQSTYPGSTYASLNGTSMATPHVAGAAALVKQKNPSWSNVQIRNHLKNTATSLGSTNLYGSGLVNAEAATR

SEQ ID NO: 51757 - protein, 269 aa, Unidentified
AQSVPWGISRVQAPAAHNRGLTGSGVKVAVLDTGISTHPDLNIRGGASFVPGEPSTQDGNGHGTHVAGTIAALNNSIGVLGVAPSAVLYAVKVLGASGSGSVSSIAQGLEWAGNNGMHVANLSLGSPSPSATLEQAVNSATSRGVLVVAASGNSGAGSISYPARYANAMAVGATDQNNNRASFSQYGAGLDIVAPGVNVQSTYPGSTYASLNGTSMATPHVAGAAALVKQKNPSWSNVQIRNHLKNTATSLGSTNLYGSGLVNAEAATR

SEQ ID NO: 51758 - protein, 269 aa, Unidentified
AQSVPWGISRVQAPAAHNRGLTGSGVKVAVLDTGISTHPDLNIRGGASFVPGEPSTQDGNGHGTHVAGTIAALNNSIGVLGVAPSAELYAVKVLGASGSGSVSSIAQGLEWAGNNGMHVANLSLGSPSPSATLEQAVNSATSRGVLVVAASGNSGAGSISYPARYANAMAVGATDQNNNKASFSQYGAGLDIVAPGVNVQSTYPGSTYASLNGTSMATPHVAGAAALVKQKNPSWSNVQIRNHLKNTATSLGSTNLYGSGLVNAEAATR

SEQ ID NO: 51759 - protein, 269 aa, Unidentified
AQSVPWGISRVQAPAAHNRGLTGSGVKVAVLDTGISTHPDLNIRGGASFVPGEPSTQDGNGHGTHVAGTIAALNNHIGVLGVAPSAELYAVKVLGASGSGSVSSIAQGLEWAGNNGMHVANLSLGSPSPSATLEQAVNSATSRGVLVVAASGNSGAGSISYPARYANAMAVGATDQNNNRASFSQYGAGLDIVAPGVNVQSTYPGSTYASLNGTSMATPHVAGAAALVKQKNPSWSNVQIRNHLKNTATSLGSTNLYGSGLVNAEAATR

SEQ ID NO: 51760 - protein, 269 aa, Unidentified
AQSVPWGISRVQAPAAHNRGMTGSGVKVAVLDTGISTHPDLNIRGGASFVPGEPSTQDGNGHGTHVAGTIAALNNSIGVLGVAPSAELYAVKVLGASGSGSVSSIAQGLEWAGNNGMHVANLSLGSPSPSATLEQAVNSATSRGVLVVAASGNSGAGSISYPARYANAMAVGATDQNNNRASFSQYGAGLDIVAPGVNVQSTYPGSTYASLNGTSMATPHVAGAAALVKQKNPSWSNVQIRNHLKNTATSLGSTNLYGSGLVNAEAATR

SEQ ID NO: 51761 - protein, 269 aa, Unidentified
AQSVPWGISRVQAPAAHNRGLTGSGVKVAVLDTGISTHPDLNIRGGASFVPGEPSTQDGNGHGTHVAGTIAALNNSIGVLGVAPSAELYAVKVLGASGSGSVSSIAQGLEWAGNNGMHVANLSLGSPSPSATLEQAVNSATSRGVLVVAASGNSGAGSISYPARYANAMAVGATDQNNNRAEFSQYGAGLDIVAPGVNVQSTYPGSTYASLNGTSMATPHVAGAAALVKQKNPSWSNVQIRNHLKNTATSLGSTNLYGSGLVNAEAATR

SEQ ID NO: 51762 - protein, 269 aa, Unidentified
AQSVPWGISRVQAPAAHNRGLTGSGVKVAVLDTGISTHPDLNIRGGASFVPGEPSTQDGNGHGTHVAGTIAALNNSIGVLGVAPSAELYAVKVLGASGSGSVSSIAQGLEWAGNNGMHVANLSLGSPSPSATLEQAVNSATSRGVLVVAASGNSGAGSISYPARYANAMAVGATDQNNNRASFSQYGAGLDIVAPGVNVQSTYPGSTYASLNGTSMATPHVAGAAALVKQKNPSWSNVQIRNHLKNTATSLGSTNLYGSGLVNASAATR

SEQ ID NO: 51763 - protein, 269 aa, Unidentified
AQSVPWGISRVQAPAMHNRGLTGSGVKVAVLDTGISTHPDLNIRGGASFVPGEPSTQDGNGHGTHVAGTIAALNNSIGVLGVAPSAELYAVKVLGASGSGSVSSIAQGLEWAGNNGMHVANLSLGSPSPSATLEQAVNSATSRGVLVVAASGNSGAGSISYPARYANAMAVGATDQNNNRASFSQYGAGLDIVAPGVNVQSTYPGSTYASLNGTSMATPHVAGAAALVKQKNPSWSNVQIRNHLKNTATSLGSTNLYGSGLVNAEAATR

SEQ ID NO: 51764 - protein, 269 aa, Unidentified
AQSVPWGISRVQAPAAHNRGLTGRGVKVAVLDTGISTHPDLNIRGGASFVPGEPSTQDGNGHGTHVAGTIAALNNSIGVLGVAPSAELYAVKVLGASGSGSVSSIAQGLEWAGNNGMHVANLSLGSPSPSATLEQAVNSATSRGVLVVAASGNSGAGSISYPARYANAMAVGATDQNNNRASFSQYGAGLDIVAPGVNVQSTYPGSTYASLNGTSMATPHVAGAAALVKQKNPSWSNVQIRNHLKNTATSLGSTNLYGSGLVNAEAATR

SEQ ID NO: 51765 - protein, 269 aa, Unidentified
AQSVPWGISRVQAPAAHNRGLTGSGVKVAVLDTGISTHPDLNIRGGASFVPGEPSTQDGNGHGTHVAGTIAALNNSIGVLGVAPSAELYAVKVLGASGSGSVSSIAQGLEWAGNNGMHVANLSLGSPSPSATLEQAVNSATSRGVLVVAASGNSGAESISYPARYANAMAVGATDQNNNRASFSQYGAGLDIVAPGVNVQSTYPGSTYASLNGTSMATPHVAGAAALVKQKNPSWSNVQIRNHLKNTATSLGSTNLYGSGLVNAEAATR

SEQ ID NO: 51766 - protein, 269 aa, Unidentified
AQSVPWGISRVQAPAAHNRGLTGSGVKVAVLDTGISTKPDLNIRGGASFVPGEPSTQDGNGHGTHVAGTIAALNNSIGVLGVAPSAELYAVKVLGASGSGSVSSIAQGLEWAGNNGMHVANLSLGSPSPSATLEQAVNSATSRGVLVVAASGNSGAGSISYPARYANAMAVGATDQNNNRASFSQYGAGLDIVAPGVNVQSTYPGSTYASLNGTSMATPHVAGAAALVKQKNPSWSNVQIRNHLKNTATSLGSTNLYGSGLVNAEAATR

SEQ ID NO: 51767 - protein, 269 aa, Unidentified
AQSVPWGNSRVQAPAAHNRGLTGSGVKVAVLDTGISTHPDLNIRGGASFVPGEPSTQDGNGHGTHVAGTIAALNNSIGVLGVAPSAELYAVKVLGASGSGSVSSIAQGLEWAGNNGMHVANLSLGSPSPSATLEQAVNSATSRGVLVVAASGNSGAGSISYPARYANAMAVGATDQNNNRASFSQYGAGLDIVAPGVNVQSTYPGSTYASLNGTSMATPHVAGAAALVKQKNPSWSNVQIRNHLKNTATSLGSTNLYGSGLVNAEAATR

SEQ ID NO: 51768 - protein, 269 aa, Unidentified
AQSVPWGISRVQAPAAHNRGLTGSGVKVAVLDTGISTHPDLNIRGGASFVPGEPSTQDGNGHGTHVAGTIAALNNSIGVLGVAPSAELYAVKVLGASGSGSVSSIAQGLEWTGNNGMHVANLSLGSPSPSATLEQAVNSATSRGVLVVAASGNSGAGSISYPARYANAMAVGATDQNNNRASFSQYGAGLDIVAPGVNVQSTYPGSTYASLNGTSMATPHVAGAAALVKQKNPSWSNVQIRNHLKNTATSLGSTNLYGSGLVNAEAATR

SEQ ID NO: 51769 - protein, 269 aa, Unidentified
AQSVPWGISRVQAPAAHNRGLTGSGVKVAVLDTGISTHPDLNIRGGASFVPGEPSTQDGNGHGTHVAGTIAALNNNIGVLGVAPSAELYAVKVLGASGSGSVSSIAQGLEWAGNNGMHVANLSLGSPSPSATLEQAVNSATSRGVLVVAASGNSGAGSISYPARYANAMAVGATDQNNNRASFSQYGAGLDIVAPGVNVQSTYPGSTYASLNGTSMATPHVAGAAALVKQKNPSWSNVQIRNHLKNTATSLGSTNLYGSGLVNAEAATR

SEQ ID NO: 51770 - protein, 269 aa, Unidentified
AQSVPWGISRVQAPAAHNRGLTGSGVKVAVLDTGISTHPDLNIRGGASFVPGEPSTQDGNGHGTHVAGTIAALNNSIGVLGVAPSAELYAVKVLGADGSGSVSSIAQGLEWAGNNGMHVANLSLGSPSPSATLEQAVNSATSRGVLVVAASGNSGAGSISYPARYANAMAVGATDQNNNRASFSQYGAGLDIVAPGVNVQSTYPGSTYASLNGTSMATPHVAGAAALVKQKNPSWSNVQIRNHLKNTATSLGSTNLYGSGLVNAEAATR

SEQ ID NO: 51771 - protein, 269 aa, Unidentified
AQSVPWGISRVQAPAAHNRGLTGSGVKVAVLDTGISTHPDLNIRGGASFVPGEPSTQDGNGHGTHVAGTIAALNNSIGVLGVAPSAELYAVKVLGASGSGSVSSIAQGLEWSGNNGMHVANLSLGSPSPSATLEQAVNSATSRGVLVVAASGNSGAGSISYPARYANAMAVGATDQNNNRASFSQYGAGLDIVAPGVNVQSTYPGSTYASLNGTSMATPHVAGAAALVKQKNPSWSNVQIRNHLKNTATSLGSTNLYGSGLVNAEAATR

SEQ ID NO: 51772 - protein, 269 aa, Unidentified
AQSVPWGISRVQAPAAHNRGLTGQGVKVAVLDTGISTHPDLNIRGGASFVPGEPSTQDGNGHGTHVAGTIAALNNSIGVLGVAPSAELYAVKVLGASGSGSVSSIAQGLEWAGNNGMHVANLSLGSPSPSATLEQAVNSATSRGVLVVAASGNSGAGSISYPARYANAMAVGATDQNNNRASFSQYGAGLDIVAPGVNVQSTYPGSTYASLNGTSMATPHVAGAAALVKQKNPSWSNVQIRNHLKNTATSLGSTNLYGSGLVNAEAATR

SEQ ID NO: 51773 - protein, 269 aa, Unidentified
AQSVPWGISRVQAPAAHNRGLTGSGVKVAVLDTGISTHPDLNIRGGASFFPGEPSTQDGNGHGTHVAGTIAALNNSIGVLGVAPSAELYAVKVLGASGSGSVSSIAQGLEWAGNNGMHVANLSLGSPSPSATLEQAVNSATSRGVLVVAASGNSGAGSISYPARYANAMAVGATDQNNNRASFSQYGAGLDIVAPGVNVQSTYPGSTYASLNGTSMATPHVAGAAALVKQKNPSWSNVQIRNHLKNTATSLGSTNLYGSGLVNAEAATR

SEQ ID NO: 51774 - protein, 269 aa, Unidentified
AQSVPWGISRVQAPAAHNRGLTGSGVKVAVLDTGISTHPDLNIRGGASFVPGEPSTQDGNGHGTHVAGTIAALNNSIGVLGVAPSACLYAVKVLGASGSGSVSSIAQGLEWAGNNGMHVANLSLGSPSPSATLEQAVNSATSRGVLVVAASGNSGAGSISYPARYANAMAVGATDQNNNRASFSQYGAGLDIVAPGVNVQSTYPGSTYASLNGTSMATPHVAGAAALVKQKNPSWSNVQIRNHLKNTATSLGSTNLYGSGLVNAEAATR

SEQ ID NO: 51775 - protein, 269 aa, Unidentified
AQSVPWGISRVQAPAAHNRGLTGSGVKVAVLDTGISTHPDLNIRGGASFVPGEPSTQAGNGHGTHVAGTIAALNNSIGVLGVAPSAELYAVKVLGASGSGSVSSIAQGLEWAGNNGMHVANLSLGSPSPSATLEQAVNSATSRGVLVVAASGNSGAGSISYPARYANAMAVGATDQNNNRASFSQYGAGLDIVAPGVNVQSTYPGSTYASLNGTSMATPHVAGAAALVKQKNPSWSNVQIRNHLKNTATSLGSTNLYGSGLVNAEAATR

SEQ ID NO: 51776 - protein, 269 aa, Unidentified
AQSVPWGISRVQAPAAHNRGLTGSGVKVAVLDTGISTHPDLNIRGGASFVPGEPSTQDGNGHGTHVAGTIAALNNSIGVLGVAPSAELYAVKVLGASGSGSVSSIARGLEWAGNNGMHVANLSLGSPSPSATLEQAVNSATSRGVLVVAASGNSGAGSISYPARYANAMAVGATDQNNNRASFSQYGAGLDIVAPGVNVQSTYPGSTYASLNGTSMATPHVAGAAALVKQKNPSWSNVQIRNHLKNTATSLGSTNLYGSGLVNAEAATR

SEQ ID NO: 51777 - protein, 269 aa, Unidentified
AQSVPWGISRVQAPAAHNRGLTGSGVKVAVLDTGISTHPDLNIRGGASFVPGEPSTQDGNGHGTHVAGTIAALNNSIGVLGVAPSAELYAVKVLGASGSGSVSSIAQGLQWAGNNGMHVANLSLGSPSPSATLEQAVNSATSRGVLVVAASGNSGAGSISYPARYANAMAVGATDQNNNRASFSQYGAGLDIVAPGVNVQSTYPGSTYASLNGTSMATPHVAGAAALVKQKNPSWSNVQIRNHLKNTATSLGSTNLYGSGLVNAEAATR

SEQ ID NO: 51778 - protein, 269 aa, Unidentified
AQSVPWGISRVQAPAAHNRGLTGSGVKVAVLDTGISTHPDLNIRGGASFVPGEPSTQDGNGHGTHVAGTIAALNNSIGVLGVAPSAELYAVKVLGASGSGSVSSIAQGLEWAGNNGMHVANLSLGSPSPSATLEQAVNSATSRGVLVVAASGNSGAGSISYPARYANAMAVGATDQNNNRASFSQYGAGLDIVAPGVNVQSTYLGSTYASLNGTSMATPHVAGAAALVKQKNPSWSNVQIRNHLKNTATSLGSTNLYGSGLVNAEAATR

SEQ ID NO: 51779 - protein, 269 aa, Unidentified
AQSVPWGISRVQAPAAHNRGLTGSGVKVAVLDTGISTHPDLNIRGGASFVPGEVSTQDGNGHGTHVAGTIAALNNSIGVLGVAPSAELYAVKVLGASGSGSVSSIAQGLEWAGNNGMHVANLSLGSPSPSATLEQAVNSATSRGVLVVAASGNSGAGSISYPARYANAMAVGATDQNNNRASFSQYGAGLDIVAPGVNVQSTYPGSTYASLNGTSMATPHVAGAAALVKQKNPSWSNVQIRNHLKNTATSLGSTNLYGSGLVNAEAATR

SEQ ID NO: 51780 - protein, 269 aa, Unidentified
AQSVPWGISRVQAPAAHNRGLTGSGVKVAVLDTGISTHPDLNIRGGASFVPGEPSTQDGNMHGTHVAGTIAALNNSIGVLGVAPSAELYAVKVLGASGSGSVSSIAQGLEWAGNNGMHVANLSLGSPSPSATLEQAVNSATSRGVLVVAASGNSGAGSISYPARYANAMAVGATDQNNNRASFSQYGAGLDIVAPGVNVQSTYPGSTYASLNGTSMATPHVAGAAALVKQKNPSWSNVQIRNHLKNTATSLGSTNLYGSGLVNAEAATR

SEQ ID NO: 51781 - protein, 269 aa, Unidentified
AQSVPWGISRVQAPAAHNRGLTGSGVKVAVLDTGISTHPDLNIRGGASFVPGEPSTQDGNGHGTHVAGTIAALNNSIGVLGVAPSAELYAVKVLGASGSGSVSSIAQGLEWAGNNGMHFANLSLGSPSPSATLEQAVNSATSRGVLVVAASGNSGAGSISYPARYANAMAVGATDQNNNRASFSQYGAGLDIVAPGVNVQSTYPGSTYASLNGTSMATPHVAGAAALVKQKNPSWSNVQIRNHLKNTATSLGSTNLYGSGLVNAEAATR

SEQ ID NO: 51782 - protein, 269 aa, Unidentified
AQSVPWGISRVQAPAAHNRGLTGSGVKVAVLDTGISTHPDLNIRGGASFVPGEPSTQDGNGHGTHVAGTIAALNNSIGVLGVAPSAELYAVKVLGASGSGSVSSIAQGLEWAGNNGMHVANLSLGSPSPSATLEQAVNSATSRGVLVVAASGNSGAGSISYPARYANAMAVGATDQNNNRASFSQYGAGLDIVAPGVNVQSTYPGSTYASLNGTSMATPHVAGAAALVKQKNPSWSNVQIRNHLKNTFTSLGSTNLYGSGLVNAEAATR

SEQ ID NO: 51783 - protein, 269 aa, Unidentified
AQSVPWGISRVQAPAAHNRGLTGSGVKVAVLDTGISTHPDLNIRGGASFEPGEPSTQDGNGHGTHVAGTIAALNNSIGVLGVAPSAELYAVKVLGASGSGSVSSIAQGLEWAGNNGMHVANLSLGSPSPSATLEQAVNSATSRGVLVVAASGNSGAGSISYPARYANAMAVGATDQNNNRASFSQYGAGLDIVAPGVNVQSTYPGSTYASLNGTSMATPHVAGAAALVKQKNPSWSNVQIRNHLKNTATSLGSTNLYGSGLVNAEAATR

SEQ ID NO: 51784 - protein, 269 aa, Unidentified
AQSVPWGISRVQAPAAHNRGLTGSGVKVAVLDTGISTHPDLNIRGGASFVPGEPSTQDGNGHGTHVAGTIAALNNSIGVLGVAPSAELYAVKVLGASGSGSVSSIAQGLEWAGNNGMHVANLSLGSPSPVATLEQAVNSATSRGVLVVAASGNSGAGSISYPARYANAMAVGATDQNNNRASFSQYGAGLDIVAPGVNVQSTYPGSTYASLNGTSMATPHVAGAAALVKQKNPSWSNVQIRNHLKNTATSLGSTNLYGSGLVNAEAATR

SEQ ID NO: 51785 - protein, 269 aa, Unidentified
AQSVPWGISRVQAPAAHNRGLTGSGVKVAVLDTGISTHPDLNIRGGASFVPGEPSTQDGNGHGTHVAGTIAALNNSIGVLGVAPSAELYAVKVLGASGSGSVSSIAQGLEWAGNNGMHVANLSLGSPSPSATLEQAVNSATSRGVLVVAASGNSGAGSISYPARYANAMAVGATDQNNERASFSQYGAGLDIVAPGVNVQSTYPGSTYASLNGTSMATPHVAGAAALVKQKNPSWSNVQIRNHLKNTATSLGSTNLYGSGLVNAEAATR

SEQ ID NO: 51786 - protein, 269 aa, Unidentified
AQSVPWGISRVQAPAAHNRGLTGSGVKVAVLDTGISTHPWLNIRGGASFVPGEPSTQDGNGHGTHVAGTIAALNNSIGVLGVAPSAELYAVKVLGASGSGSVSSIAQGLEWAGNNGMHVANLSLGSPSPSATLEQAVNSATSRGVLVVAASGNSGAGSISYPARYANAMAVGATDQNNNRASFSQYGAGLDIVAPGVNVQSTYPGSTYASLNGTSMATPHVAGAAALVKQKNPSWSNVQIRNHLKNTATSLGSTNLYGSGLVNAEAATR

SEQ ID NO: 51787 - protein, 270 aa, Unidentified
AQSVPWGISRVQAPAAHNRGLTGSGVKVAVLDTGISTHPDLNIRGGASFVPGEPSTQDGNGHGTHVAGTIAALNNSIGVLGVAPSAELYAVKVLGASEGSGSVSSIAQGLEWAGNNGMHVANLSLGSPSPSATLEQAVNSATSRGVLVVAASGNSGAGSISYPARFANAMAVGATDQNNNRASFSQYGAGLDIVAPGVNVQSTYPGSTYASLNGTSMATPHVAGAAALVKQKNPSWSNVQIRNHLKNTATSLGSTNLYGSGLVNAEAATR

SEQ ID NO: 51788 - protein, 269 aa, Unidentified
AQSVPWGISRVQAPAAHNRGLTGSGVKVAVLDTGISTHPDLNIRGGASFVPGEPSTQDGNGHGTHVAGTIAALNNSIGVLGVAPSAELYAVKVLGASGSGSVSSIAQGLEWAGNNGMHVANLSLGSPSPSATLEQAVNSATSRGVLVVAASGNSGAGSISYPARYANAMAVGATDQNNNRASFSQYGAGLDIVAPGVNVQSTYPGSTYASLNGTSMATPHVAGAAALVKQKNPSWSNRQIRNHLKNTATSLGSTNLYGSGLVNAEAATR

SEQ ID NO: 51789 - protein, 269 aa, Unidentified
AQSVPWGISRVQAPAARNRGLTGSGVKVAVLDTGISTHPDLNIRGGASFVPGEPSTQDGNGHGTHVAGTIAALNNSIGVLGVAPSAELYAVKVLGASGSGSVSSIAQGLEWAGNNGMHVANLSLGSPSPSATLEQAVNSATSRGVLVVAASGNSGAGSISYPARYANAMAVGATDQNNNRASFSQYGAGLDIVAPGVNVQSTYPGSTYASLNGTSMATPHVAGAAALVKQKNPSWSNVQIRNHLKNTATSLGSTNLYGSGLVNAEAATR

SEQ ID NO: 51790 - protein, 269 aa, Unidentified
AQSVPWGISRVQAPAAHNRGLTGSGVKVAVLDTGISTHPDLNIRGGASFVPGEPSTQDGNGHGTHVAGTIAALNNSIGVLGVAPSAELYAVKVLGASGSGSVSSIAQGLEWAGNNGMHVANLSLGSPSPSATLEQAVNSATSRGVLVVAASGNSGAGSISYPARYANAMAVGATDQNNNRASFSQYGAGLDIVAPGVNVQSTYPGSTYASLNGTSMATPHVAGAAALVKQKNPVWSNVQIRNHLKNTATSLGSTNLYGSGLVNAEAATR

SEQ ID NO: 51791 - protein, 269 aa, Unidentified
AQSVPWGISRVQAPAAHNRGLTGSGVKVAVLDTGISTHPDLNIRGGASFVPGEPSTQDGNGHGTHVAGTIAALNNSIGVLGVAPSAELYAVKVLGASGSGSVSSIAQGLEWAGNNGMHVANLSLGSPSPSATLEQAVNSATSRGVLVVAASGNSGAGSISYPARYANAMAVGATDQNNNRASFSQYGAGLDIVAPGVNVQSTYPGSTYASLNGTSMATPHVAGAAALVKQKNPSWSNVQIRNHLKNTATSLGSTNLYGSGLVNAHAATR

SEQ ID NO: 51792 - protein, 269 aa, Unidentified
AQSVPWGISRVQAPAAHNRGLTGSGVKVAVLDTGISTHPNLNIRGGASFVPGEPSTQDGNGHGTHVAGTIAALNNSIGVLGVAPSAELYAVKVLGASGSGSVSSIAQGLEWAGNNGMHVANLSLGSPSPSATLEQAVNSATSRGVLVVAASGNSGAGSISYPARYANAMAVGATDQNNNRASFSQYGAGLDIVAPGVNVQSTYPGSTYASLNGTSMATPHVAGAAALVKQKNPSWSNVQIRNHLKNTATSLGSTNLYGSGLVNAEAATR

SEQ ID NO: 51793 - protein, 271 aa, Unidentified
AQSVPWGISRVQAPAAHNRGLTGSGVKVAVLDTGISTHPDLNIRGGASFVPGEPSTQDGNGHGTHVAGTIAALNNSIGVLGVAPSAELYAVKVLGATXSGSGSVSSIAQGLEWAGNNGMHVANLSLGSPSPSATLEQAVNSATSRGVLVVAASGNSGAGSISAPARYANAMAVGATDQNNNRASFSQYGAGLDIVAPGVNVQSTYPGSTYASLNGTSMATPHVAGAAALVKQKNPSWSNVQIRNHLKNTATSLGSTNLYGSGLVNAEAATR

SEQ ID NO: 51794 - protein, 269 aa, Unidentified
AQSVPWGISRVQAPAAHNRGLTGSGVKVAVLDDGISTHPDLNIRGGASFVPGEPSTQDGNGHGTHVAGTIAALNNSIGVLGVAPSAELYAVKVLGASGSGSVSSIAQGLEWAGNNGMHVANLSLGSPSPSATLEQAVNSATSRGVLVVAASGNSGAGSISYPARYANAMAVGATDQNNNRASFSQYGAGLDIVAPGVNVQSTYPGSTYASLNGTSMATPHVAGAAALVKQKNPSWSNVQIRNHLKNTATSLGSTNLYGSGLVNAEAATR

SEQ ID NO: 51795 - protein, 269 aa, Unidentified
AQSVPWGISRVQAPAAHNRGLTGSGVKVAVLDTGISTHPDLNIRGGASFVPGEPSTQDGNGHGTHVAGTIAALNNSIGVLGVAPSAELYAVKVLGASGSGSESSIAQGLEWAGNNGMHVANLSLGSPSPSATLEQAVNSATSRGVLVVAASGNSGAGSISYPARYANAMAVGATDQNNNRASFSQYGAGLDIVAPGVNVQSTYPGSTYASLNGTSMATPHVAGAAALVKQKNPSWSNVQIRNHLKNTATSLGSTNLYGSGLVNAEAATR

SEQ ID NO: 51796 - protein, 269 aa, Unidentified
AQSVPWGISRVQAPAAHNRGLTGSGVKVAVLDTGISTHPDLNIRGGASFVPGEPSTQDGNGHGTHVAGTIAALNNSIGVLGVAPSAELYAVKVLGASGSGSVSSIAQGLLWAGNNGMHVANLSLGSPSPSATLEQAVNSATSRGVLVVAASGNSGAGSISYPARYANAMAVGATDQNNNRASFSQYGAGLDIVAPGVNVQSTYPGSTYASLNGTSMATPHVAGAAALVKQKNPSWSNVQIRNHLKNTATSLGSTNLYGSGLVNAEAATR

SEQ ID NO: 51797 - protein, 269 aa, Unidentified
AQSVPWGISRVQAPAAHNRGLTGSGVKVAVLDTGISTHTDLNIRGGASFVPGEPSTQDGNGHGTHVAGTIAALNNSIGVLGVAPSAELYAVKVLGASGSGSVSSIAQGLEWAGNNGMHVANLSLGSPSPSATLEQAVNSATSRGVLVVAASGNSGAGSISYPARYANAMAVGATDQNNNRASFSQYGAGLDIVAPGVNVQSTYPGSTYASLNGTSMATPHVAGAAALVKQKNPSWSNVQIRNHLKNTATSLGSTNLYGSGLVNAEAATR

SEQ ID NO: 51798 - protein, 269 aa, Unidentified
AQSVPWGISRVQAPAAHNRGLTGSGVKVAVLDTGISTHPDLNIRGGASFVPGEPSTQDGNGHGTHVAGTIAALNNSIGVLGVAPSAELYAVKVLGASGSGSVSTIAQGLEWAGNNGMHVANLSLGSPSPSATLEQAVNSATSRGVLVVAASGNSGAGSISYPARYANAMAVGATDQNNNRASFSQYGAGLDIVAPGVNVQSTYPGSTYASLNGTSMATPHVAGAAALVKQKNPSWSNVQIRNHLKNTATSLGSTNLYGSGLVNAEAATR

SEQ ID NO: 51799 - protein, 270 aa, Aspergillus oryzae
AQSVPWGISRVQAPAAHNRGLTGSGVKVAVLDTGISTHPDLNIRGGASFVPGEPSTQDGNGHGTHVAGTIAALNNSTGVLGVAPSAELYAVKVLGASEGSGSVSSIAQGLEWAGNNGMHVANLSLGSPSPSATLEQAVNSATSRGVLVVAASGNSGAGSISYPARYANAMAVGATDQNNNRASFSQYGAGLDIVAPGVNVQSTYPGSTYASLNGTSMATPHVAGAAALVKQKNPSWSNVQIRNHLKNTATSLGSTNLYGSGLVNAEAATR

SEQ ID NO: 51800 - protein, 269 aa, Unidentified
AQSVPWGISRVQAPAAHNRGLTGSGVKVAVLDTGISTHPDLNIRGGASFVPGEPSTQDGNGHGTHVAGTIAALNNSIGVLGVAPSAELYAVKVLGASGSGSVSSIAQGLEWAGNNGMHVANLSLGSPSPSATLEQAVNSATSRGVLVVAASGNSGAGSISYPARYANAMAVGATDQNNNRASFSQYGAGLDIVAPGVNVQSTYPGSTYASLNGTSMATPHVAGAAALVKQKNPSWSNVQIRNHLKNFATSLGSTNLYGSGLVNAEAATR

SEQ ID NO: 51801 - protein, 269 aa, Unidentified
AQSVPWGISRVQAPAAHNRGLTGSGVKVAVLDTGISTHPDLNIRGGASFVPGEPSTQDGNQHGTHVAGTIAALNNSIGVLGVAPSAELYAVKVLGASGSGSVSSIAQGLEWAGNNGMHVANLSLGSPSPSATLEQAVNSATSRGVLVVAASGNSGAGSISYPARYANAMAVGATDQNNNRASFSQYGAGLDIVAPGVNVQSTYPGSTYASLNGTSMATPHVAGAAALVKQKNPSWSNVQIRNHLKNTATSLGSTNLYGSGLVNAEAATR

SEQ ID NO: 51802 - protein, 269 aa, Unidentified
AQSVPWGISRVQAPAAHNRGLTGSGVKVAVLDTGISTHPDLNIRGGASFVPGEPSTQDGNGHGTHVAGTIAALNNSIGVLGVAPSAELYAVKVLGASGSGSVSSIAQGLEWAGNNGMHVANLSLGSPSPSATLEQAVNSATSRGVLVVAASGNSGAGSISYPARYANAMAVGATDQNNNRASFSQYGAGLDIVAPGVNVQSTYPGSTYASLNGTSMATPHVAGAAALVKQKNPSWSNVQIRNHLKNTATSLGSTNLYGSGLVNAMAATR

SEQ ID NO: 51803 - protein, 269 aa, Unidentified
AQSVPWGISRVQAPAAHNRGLTGSGVKVAVLDTGISTHPDLNRRGGASFVPGEPSTQDGNGHGTHVAGTIAALNNSIGVLGVAPSAELYAVKVLGASGSGSVSSIAQGLEWAGNNGMHVANLSLGSPSPSATLEQAVNSATSRGVLVVAASGNSGAGSISYPARYANAMAVGATDQNNNRASFSQYGAGLDIVAPGVNVQSTYPGSTYASLNGTSMATPHVAGAAALVKQKNPSWSNVQIRNHLKNTATSLGSTNLYGSGLVNAEAATR

SEQ ID NO: 51804 - protein, 269 aa, Unidentified
AQSVPWGISRVQAPAAHNRGLTGSGVKVAVLDTGISTHPMLNIRGGASFVPGEPSTQDGNGHGTHVAGTIAALNNSIGVLGVAPSAELYAVKVLGASGSGSVSSIAQGLEWAGNNGMHVANLSLGSPSPSATLEQAVNSATSRGVLVVAASGNSGAGSISYPARYANAMAVGATDQNNNRASFSQYGAGLDIVAPGVNVQSTYPGSTYASLNGTSMATPHVAGAAALVKQKNPSWSNVQIRNHLKNTATSLGSTNLYGSGLVNAEAATR

SEQ ID NO: 51805 - protein, 269 aa, Unidentified
AQSVPWGISRVQAPAAHNRGLTGSGVKVAVLDTGISTHPDLNIRGGASFVPGEPSTQDGNGHGTHVAGTIAALNNSIGVLGVAPSATLYAVKVLGASGSGSVSSIAQGLEWAGNNGMHVANLSLGSPSPSATLEQAVNSATSRGVLVVAASGNSGAGSISYPARYANAMAVGATDQNNNRASFSQYGAGLDIVAPGVNVQSTYPGSTYASLNGTSMATPHVAGAAALVKQKNPSWSNVQIRNHLKNTATSLGSTNLYGSGLVNAEAATR

SEQ ID NO: 51806 - protein, 269 aa, Unidentified
AQSVPWGISRVQAPAAHNRGLTGSGVKVAVLDTGISTHPDLNIRGGASFVPGEPSTQDGNGHGTHVAGTIAALNNSIGVLGVAPSAELYAVKVLGASGSGSVSSIAQGLEWAGNNGMHVANLSLGSPSPAATLEQAVNSATSRGVLVVAASGNSGAGSISYPARYANAMAVGATDQNNNRASFSQYGAGLDIVAPGVNVQSTYPGSTYASLNGTSMATPHVAGAAALVKQKNPSWSNVQIRNHLKNTATSLGSTNLYGSGLVNAEAATR

SEQ ID NO: 51807 - protein, 269 aa, Unidentified
AQSVPWGISRVQAPAAHNRGLTGSGVKVAVLDTGISTHPDLNIRGGASFVPGEPSTQDGNGHGTHVAGTIAALNNSIGVLGVAPSAELYAVKVLGASGSGSVSSIIQGLEWAGNNGMHVANLSLGSPSPSATLEQAVNSATSRGVLVVAASGNSGAGSISYPARYANAMAVGATDQNNNRASFSQYGAGLDIVAPGVNVQSTYPGSTYASLNGTSMATPHVAGAAALVKQKNPSWSNVQIRNHLKNTATSLGSTNLYGSGLVNAEAATR

SEQ ID NO: 51808 - protein, 269 aa, Unidentified
AQSVPWGISRVQAPAAHNRGLTGSGVKVAVLDTGMSTHPDLNIRGGASFVPGEPSTQDGNGHGTHVAGTIAALNNSIGVLGVAPSAELYAVKVLGASGSGSVSSIAQGLEWAGNNGMHVANLSLGSPSPSATLEQAVNSATSRGVLVVAASGNSGAGSISYPARYANAMAVGATDQNNNRASFSQYGAGLDIVAPGVNVQSTYPGSTYASLNGTSMATPHVAGAAALVKQKNPSWSNVQIRNHLKNTATSLGSTNLYGSGLVNAEAATR

SEQ ID NO: 51809 - protein, 269 aa, Unidentified
AQSVPWGISRVQAPAAHNRGLTSSGVKVAVLDTGISTHPDLNIRGGASFVPGEPSTQDGNGHGTHVAGTIAALNNSIGVLGVAPSAELYAVKVLGASGSGSVSSIAQGLEWAGNNGMHVANLSLGSPSPSATLEQAVNSATSRGVLVVAASGNSGAGSISYPARYANAMAVGATDQNNNRASFSQYGAGLDIVAPGVNVQSTYPGSTYASLNGTSMATPHVAGAAALVKQKNPSWSNVQIRNHLKNTATSLGSTNLYGSGLVNAEAATR

SEQ ID NO: 51810 - protein, 269 aa, Unidentified
AQSVPWGISRVQAPAAHNRGLTGSGVKVAVLDTGISTHPDLNIRGGASFVPGEPSTQDGNGHGTHVAGTIAALNNSIGVLGVAPSAELYAVKVLGASGSGSVSSIAQGLEWAGNNGMHVANLSLGSPSPSATLEQAVNSATRRGVLVVAASGNSGAGSISYPARYANAMAVGATDQNNNRASFSQYGAGLDIVAPGVNVQSTYPGSTYASLNGTSMATPHVAGAAALVKQKNPSWSNVQIRNHLKNTATSLGSTNLYGSGLVNAEAATR

SEQ ID NO: 51811 - protein, 269 aa, Unidentified
AQSVPWGISRVQAPAAHNRGLTGSGVKVAVLDTGISTHPDLNIRGGASFVPGEPSTQDGNGHGTHVAGTIAALNNSIGVLGVAPSAELYAVKVLGASGSGSVSSIAQGLEWLGNNGMHVANLSLGSPSPSATLEQAVNSATSRGVLVVAASGNSGAGSISYPARYANAMAVGATDQNNNRASFSQYGAGLDIVAPGVNVQSTYPGSTYASLNGTSMATPHVAGAAALVKQKNPSWSNVQIRNHLKNTATSLGSTNLYGSGLVNAEAATR

SEQ ID NO: 51812 - protein, 269 aa, Unidentified
AQSVPWGISRVQAPAAHNRGLTGSGVKVAVLDTGISTHPDLNIRGGASFVPGEPSTQDGNGHGTHVAGTIAALNNSIGVLGVAPSAELYAVKVLGASGSGSVESIAQGLEWAGNNGMHVANLSLGSPSPSATLEQAVNSATSRGVLVVAASGNSGAGSISYPARYANAMAVGATDQNNNRASFSQYGAGLDIVAPGVNVQSTYPGSTYASLNGTSMATPHVAGAAALVKQKNPSWSNVQIRNHLKNTATSLGSTNLYGSGLVNAEAATR

SEQ ID NO: 51813 - protein, 269 aa, Unidentified
AQSVPWGISRVQAPAAHNRGLTGSGVKVAVFDTGISTHPDLNIRGGASFVPGEPSTQDGNGHGTHVAGTIAALNNSIGVLGVAPSAELYAVKVLGASGSGSVSSIAQGLEWAGNNGMHVANLSLGSPSPSATLEQAVNSATSRGVLVVAASGNSGAGSISYPARYANAMAVGATDQNNNRASFSQYGAGLDIVAPGVNVQSTYPGSTYASLNGTSMATPHVAGAAALVKQKNPSWSNVQIRNHLKNTATSLGSTNLYGSGLVNAEAATR

SEQ ID NO: 51814 - protein, 269 aa, Unidentified
AQSVPWGIFRVQAPAAHNRGLTGSGVKVAVLDTGISTHPDLNIRGGASFVPGEPSTQDGNGHGTHVAGTIAALNNSIGVLGVAPSAELYAVKVLGASGSGSVSSIAQGLEWAGNNGMHVANLSLGSPSPSATLEQAVNSATSRGVLVVAASGNSGAGSISYPARYANAMAVGATDQNNNRASFSQYGAGLDIVAPGVNVQSTYPGSTYASLNGTSMATPHVAGAAALVKQKNPSWSNVQIRNHLKNTATSLGSTNLYGSGLVNAEAATR

SEQ ID NO: 51815 - protein, 269 aa, Unidentified
AQSVPWGISRVQAPAAHNRGLTGSGVKVAVLDTGISTHPDLNIRGGASFVPGEPSTQDGNGHGTHVAGTIAALNNSIGVLGVAPSAELYAVKVLGASGSGSVSSIAQGLEWAGNNGMHVANLSLGSPSPSATLEQAVNSATSRGVLVVAASGNSGAGSISYPARYANAMAVGATDQNNNRASFSQYGAGLDIVAPGVNVQSTYPGSTYASLNGTSMATPHVAGAAALVKQKNPSWSNVQIRRHLKNTATSLGSTNLYGSGLVNAEAATR

SEQ ID NO: 51816 - protein, 269 aa, Unidentified
AQSVPWGISRVQAPAAHNRGLTGSGVKVAVLDTGISTHPDLNIRGGASFVPGEPSTQDGNGHGTHVAGTIAALNNSIGVLGVAPSAELYAVKVLGASGPGSVSSIAQGLEWAGNNGMHVANLSLGSPSPSATLEQAVNSATSRGVLVVAASGNSGAGSISYPARYANAMAVGATDQNNNRASFSQYGAGLDIVAPGVNVQSTYPGSTYASLNGTSMATPHVAGAAALVKQKNPSWSNVQIRNHLKNTATSLGSTNLYGSGLVNAEAATR

SEQ ID NO: 51817 - protein, 269 aa, Unidentified
AQSVPWGISRVQAPAAHNRGLTGSGVKVAVLDTGISTHPDLNIRGGASFVPGEPSTQDGNGHGTHVAGTIAALNNSIGVLGVAPSAELYAVKVLGASGSGSVSSIAQGLEWAGNNGMHVAELSLGSPSPSATLEQAVNSATSRGVLVVAASGNSGAGSISYPARYANAMAVGATDQNNNRASFSQYGAGLDIVAPGVNVQSTYPGSTYASLNGTSMATPHVAGAAALVKQKNPSWSNVQIRNHLKNTATSLGSTNLYGSGLVNAEAATR

SEQ ID NO: 51818 - protein, 269 aa, Unidentified
AQSVPWGISRVQAPAAHNRGLTGSGVKVAVLDTGISTHPDLNIRGGASFVPGEPSTQDGNEHGTHVAGTIAALNNSIGVLGVAPSAELYAVKVLGASGSGSVSSIAQGLEWAGNNGMHVANLSLGSPSPSATLEQAVNSATSRGVLVVAASGNSGAGSISYPARYANAMAVGATDQNNNRASFSQYGAGLDIVAPGVNVQSTYPGSTYASLNGTSMATPHVAGAAALVKQKNPSWSNVQIRNHLKNTATSLGSTNLYGSGLVNAEAATR

SEQ ID NO: 51819 - protein, 269 aa, Unidentified
AQSVPWGISRVQAPAAHNRGLTGSGVKVAVLDTGISTHPDLNIRGGASFVPGEPSTQDGNGHGTHVAGTIAALNNSIGVLGVAPSAELYAVKVLGASGSGSVSSIAQGLEWAGNNGMHVANLSLGSPSPSATLEQAVNSATSRGVLVVAASGNSGAGSISYPARYANAMAVGATDQNNNRASFSQYGAGLDIVAPGVNVQSTYPGSTYASLNGTSMATPHVAGAAALVKQKNSSWSNVQIRNHLKNTATSLGSTNLYGSGLVNAEAATR

SEQ ID NO: 51820 - protein, 269 aa, Unidentified
AQSVPWGISRVQAPAAHNRGLTGSGVKVAVLDTGISTHPDLNIRGGASFVPGEPSTQDGNGHGTHVAGTIAALNNSIGVLGVAPSALLYAVKVLGASGSGSVSSIAQGLEWAGNNGMHVANLSLGSPSPSATLEQAVNSATSRGVLVVAASGNSGAGSISYPARYANAMAVGATDQNNNRASFSQYGAGLDIVAPGVNVQSTYPGSTYASLNGTSMATPHVAGAAALVKQKNPSWSNVQIRNHLKNTATSLGSTNLYGSGLVNAEAATR

SEQ ID NO: 51821 - protein, 270 aa, Unidentified
AQSVPWGISRVQAPAAHNRGLTGSGVKVAVLDTGISTHPDLNIRGGASFVPGEPSTQDGNGHGTHVAGTIAALNNSIGVLGVAPSAELYAVKVLGASGXSGSVSSIAQGLEWAGNNGMHVANLSLGSPSPSDTLEQAVNSATSRGVLVVAASGNSGAGSISYPARYANAMAVGATDQNNNRASFSQYGAGLDIVAPGVNVQSTYPGSTYASLNGTSMATPHVAGAAALVKQKNPSWSNVQIRNHLKNTATSLGSTNLYGSGLVNAEAATR

SEQ ID NO: 51822 - protein, 269 aa, Unidentified
AQSVPWGISRVQAPAAHNRGTTGSGVKVAVLDTGISTHPDLNIRGGASFVPGEPSTQDGNGHGTHVAGTIAALNNSIGVLGVAPSAELYAVKVLGASGSGSVSSIAQGLEWAGNNGMHVANLSLGSPSPSATLEQAVNSATSRGVLVVAASGNSGAGSISYPARYANAMAVGATDQNNNRASFSQYGAGLDIVAPGVNVQSTYPGSTYASLNGTSMATPHVAGAAALVKQKNPSWSNVQIRNHLKNTATSLGSTNLYGSGLVNAEAATR

SEQ ID NO: 51823 - protein, 269 aa, Unidentified
AQSVPWGISRVQAPAAHNRGLTGSGVKVAVLDTGISTHPDLNIRGGASFVPGEPSTQDGNGHGTHVAGTIAALNNSIGVLGVAPSAELYAVKVLGASGSGSVSSIAQGLEWAGNNGMHVANLSLGSPSPSATLEQAVNSATSRGVLVVAASGNSGAGSISYPARYANAMAVGATDQNNNRASFSQYGAGLDIVAPGVNVQSTYPGSTFASLNGTSMATPHVAGAAALVKQKNPSWSNVQIRNHLKNTATSLGSTNLYGSGLVNAEAATR

SEQ ID NO: 51824 - protein, 269 aa, Unidentified
AQSVPWGISRVQAQAAHNRGLTGSGVKVAVLDTGISTHPDLNIRGGASFVPGEPSTQDGNGHGTHVAGTIAALNNSIGVLGVAPSAELYAVKVLGASGSGSVSSIAQGLEWAGNNGMHVANLSLGSPSPSATLEQAVNSATSRGVLVVAASGNSGAGSISYPARYANAMAVGATDQNNNRASFSQYGAGLDIVAPGVNVQSTYPGSTYASLNGTSMATPHVAGAAALVKQKNPSWSNVQIRNHLKNTATSLGSTNLYGSGLVNAEAATR

SEQ ID NO: 51825 - protein, 269 aa, Unidentified
AQSVPWGISRVQAPAAHNRGLTGSGVKVAVLDTGISTHPDLNIRGGASFVPGEPSTQDGNGHGTHVAGTIAALNNSIGVLGVAPSAELYAVKVLGASGSGSVSSIAQGLEWAGNNGMHVANLSLGSPSPSATLEQAVNSATSRGVLVVAASGNSGAGSISYPARYANAMAVGATDQNNNRASFSQYGAGLDIVAPGVNVQSTNPGSTYASLNGTSMATPHVAGAAALVKQKNPSWSNVQIRNHLKNTATSLGSTNLYGSGLVNAEAATR

SEQ ID NO: 51826 - protein, 269 aa, Unidentified
AQSVPWGISRVQAPAAHNRGLTGSGVKVAVLDTGISTHPDLNIRGGASFVPGEPSTQDGNGHGTHVAGTIAALNNSIGVLGVAPSAELYAVKVLGASGSGEVSSIAQGLEWAGNNGMHVANLSLGSPSPSATLEQAVNSATSRGVLVVAASGNSGAGSISYPARYANAMAVGATDQNNNRASFSQYGAGLDIVAPGVNVQSTYPGSTYASLNGTSMATPHVAGAAALVKQKNPSWSNVQIRNHLKNTATSLGSTNLYGSGLVNAEAATR

SEQ ID NO: 51827 - protein, 269 aa, Bacillus lentus
AQSVPWGISRVQAPAAHNRGLTGSGVKVAVLDTGISTHPDLNIRGGASFVPGEPSTQDGNGHGTHVAGTIAALNNSIGVLGVAPSAELYAVKVLGASGSGSVSSIAQGLEWAGNNGMHVANLSLGSPSPSATLEQAVNSATSRGVLVVAASGNSGAGSISYPAFYANAMAVGATDQNNNRASFSQYGAGLDIVAPGVNVQSTYPGSTYASLNGTSMATPHVAGAAALVKQKNPSWSNVQIRNHLKNTATSLGSTNLYGSGLVNAEAATR

SEQ ID NO: 51828 - protein, 269 aa, Unidentified
AQSVPWGISRVQAPHAHNRGLTGSGVKVAVLDTGISTHPDLNIRGGASFVPGEPSTQDGNGHGTHVAGTIAALNNSIGVLGVAPSAELYAVKVLGASGSGSVSSIAQGLEWAGNNGMHVANLSLGSPSPSATLEQAVNSATSRGVLVVAASGNSGAGSISYPARYANAMAVGATDQNNNRASFSQYGAGLDIVAPGVNVQSTYPGSTYASLNGTSMATPHVAGAAALVKQKNPSWSNVQIRNHLKNTATSLGSTNLYGSGLVNAEAATR

SEQ ID NO: 51829 - protein, 269 aa, Bacillus alkalophilus
AQSVPWGISRVQAPAAHNRGLTGSGVKVAVLDTGISTHPDLNIRGGASFVPGEPSTQDGNGHGTHVAGTIAALNNSIGVLGVAPNAELYAVKVLGASGSGSVSSIAQGLEWAGNNGMHVANLSLGSPSPSATLEQAVNSATSRGVLVVAASGNSGAGSISYPARYANAMAVGATDQNNNRASFSQYGAGLDIVAPGVNVQSTYPGSTYASLNGTSMATPHVAGAAALVKQKNPSWSNVQIRNHLKNTATSLGSTNLYGSGLVNAEAATR

SEQ ID NO: 51830 - protein, 269 aa, Unidentified
AQSVPWGISRVQAPAAHNRGLTGSGVKVAVLDTGISTHPDLNIRGGASFVPGEPSTQDGNGHGTHVAGTIAALNNSIGVLGVAPSAELYAVKVLGASGSGSVSSIAQGLEWAGNNGMAVANLSLGSPSPSATLEQAVNSATSRGVLVVAASGNSGAGSISYPARYANAMAVGATDQNNNRASFSQYGAGLDIVAPGVNVQSTYPGSTYASLNGTSMATPHVAGAAALVKQKNPSWSNVQIRNHLKNTATSLGSTNLYGSGLVNAEAATR

SEQ ID NO: 51831 - protein, 269 aa, Unidentified
AQSVPWGISRVQAPAAHNRGLTGSGVKVAVLDTGISTHPDLNIRGDASFVPGEPSTQDGNGHGTHVAGTIAALNNSIGVLGVAPSAELYAVKVLGASGSGSVSSIAQGLEWAGNNGMHVANLSLGSPSPSATLEQAVNSATSRGVLVVAASGNSGAGSISYPARYANAMAVGATDQNNNRASFSQYGAGLDIVAPGVNVQSTYPGSTYASLNGTSMATPHVAGAAALVKQKNPSWSNVQIRNHLKNTATSLGSTNLYGSGLVNAEAATR

SEQ ID NO: 51832 - protein, 269 aa, Unidentified
AQSVPWGISRVQAPAAHNRGLTGSGVKVAVLDTGISTHPDLNIRGGASFVPGEPSTQDGNGHGTHVAGTIAALNNSIGVLGVAPSAELYAVKVLGASGSTSVSSIAQGLEWAGNNGMHVANLSLGSPSPSATLEQAVNSATSRGVLVVAASGNSGAGSISYPARYANAMAVGATDQNNNRASFSQYGAGLDIVAPGVNVQSTYPGSTYASLNGTSMATPHVAGAAALVKQKNPSWSNVQIRNHLKNTATSLGSTNLYGSGLVNAEAATR

SEQ ID NO: 51833 - protein, 269 aa, Unidentified
AQSVPWGISRVQAPAAHNRGLTGSGVKVAVLDTGISTHPDLNIRGGASFVPGEPSTQDGNTHGTHVAGTIAALNNSIGVLGVAPSAELYAVKVLGASGSGSVSSIAQGLEWAGNNGMHVANLSLGSPSPSATLEQAVNSATSRGVLVVAASGNSGAGSISYPARYANAMAVGATDQNNNRASFSQYGAGLDIVAPGVNVQSTYPGSTYASLNGTSMATPHVAGAAALVKQKNPSWSNVQIRNHLKNTATSLGSTNLYGSGLVNAEAATR

SEQ ID NO: 51834 - protein, 269 aa, Unidentified
AQSVPWGISRVQAPAAHNRGLTGSGVKVAVLDTGISTHPDLNIRGGASFVPGEPSTQDGNGHGTHVAGTIAALNNSIGVLGVAPSAELYAVKVLGASGSGSVSSIAMGLEWAGNNGMHVANLSLGSPSPSATLEQAVNSATSRGVLVVAASGNSGAGSISYPARYANAMAVGATDQNNNRASFSQYGAGLDIVAPGVNVQSTYPGSTYASLNGTSMATPHVAGAAALVKQKNPSWSNVQIRNHLKNTATSLGSTNLYGSGLVNAEAATR

SEQ ID NO: 51835 - protein, 269 aa, Unidentified
AQSVPWGISRVQAPAAHNRGLTGSGVKVAVLDTGISTHPDLNIRGGASCVPGEPSTQDGNGHGTHVAGTIAALNNSIGVLGVAPSAELYAVKVLGASGSGSVSSIAQGLEWAGNNGMHVANLSLGSPSPSATLEQAVNSATSRGVLVVAASGNSGAGSISYPARYANAMAVGATDQNNNRASFSQYGAGLDIVAPGVNVQSTYPGSTYASLNGTSMATPHVAGAAALVKQKNPSWSNVQIRNHLKNTATSLGSTNLYGSGLVNAEAATR

SEQ ID NO: 51836 - protein, 269 aa, Unidentified
AQSVPWGISRVQAPAAHNRGLTGSGVKVAVLDTGISTHPDLNIRGGASFVPGEPSTQDGNGHGTHVAGTIAALNNSIGVLGVAPSAELYAVKVLGASGSGSVSSIAQGLEWAGNNGMHVANLSLGSPSPSATLEQAVNSATSRGVLVVAASGNSGAGSISYPARYANAMAVGATDQNNNRASFSQYGAGLDIVAPGVNVQSTYPGSTYASLNGTSMATPHVAGAAALVKQKRPSWSNVQIRNHLKNTATSLGSTNLYGSGLVNAEAATR

SEQ ID NO: 51837 - protein, 269 aa, Unidentified
AQSVPWGISRVQAPAAHNRGLTGSGVKVAVLDTGISTHPDLNIRGGASFVPGEPSTQDGNGHGTHVAGTIAALNNSIGVLGVAPSAELYAVKVLGASGSGSVSSIAQGLEWAGKNGMHVANLSLGSPSPSATLEQAVNSATSRGVLVVAASGNSGAGSISYPARYANAMAVGATDQNNNRASFSQYGAGLDIVAPGVNVQSTYPGSTYASLNGTSMATPHVAGAAALVKQKNPSWSNVQIRNHLKNTATSLGSTNLYGSGLVNAEAATR

SEQ ID NO: 51838 - protein, 269 aa, Unidentified
AQSVPWGISMVQAPAAHNRGLTGSGVKVAVLDTGISTHPDLNIRGGASFVPGEPSTQDGNGHGTHVAGTIAALNNSIGVLGVAPSAELYAVKVLGASGSGSVSSIAQGLEWAGNNGMHVANLSLGSPSPSATLEQAVNSATSRGVLVVAASGNSGAGSISYPARYANAMAVGATDQNNNRASFSQYGAGLDIVAPGVNVQSTYPGSTYASLNGTSMATPHVAGAAALVKQKNPSWSNVQIRNHLKNTATSLGSTNLYGSGLVNAEAATR

SEQ ID NO: 51839 - protein, 269 aa, Unidentified
AQSVPWGISRVQAPAAHNRGLTGSGVKVAVLDTGISTHPDLNIRGGASFVPGEPSTQDGNGHGTHVAGTIAALNNSIGVLGVAPSAELYAVKVLGASGSGLVSSIAQGLEWAGNNGMHVANLSLGSPSPSATLEQAVNSATSRGVLVVAASGNSGAGSISYPARYANAMAVGATDQNNNRASFSQYGAGLDIVAPGVNVQSTYPGSTYASLNGTSMATPHVAGAAALVKQKNPSWSNVQIRNHLKNTATSLGSTNLYGSGLVNAEAATR

SEQ ID NO: 51840 - protein, 269 aa, Unidentified
AQSMPWGISRVQAPAAHNRGLTGSGVKVAVLDTGISTHPDLNIRGGASFVPGEPSTQDGNGHGTHVAGTIAALNNSIGVLGVAPSAELYAVKVLGASGSGSVSSIAQGLEWAGNNGMHVANLSLGSPSPSATLEQAVNSATSRGVLVVAASGNSGAGSISYPARYANAMAVGATDQNNNRASFSQYGAGLDIVAPGVNVQSTYPGSTYASLNGTSMATPHVAGAAALVKQKNPSWSNVQIRNHLKNTATSLGSTNLYGSGLVNAEAATR

SEQ ID NO: 51841 - protein, 269 aa, Unidentified
AQSVPWGISRVQAPAAHNRGLTGSGVKVAVLDTGISTHPDLNIRGGASFVPGEPSTQDGNGHGTHVAGTIAALNNSIGVLGVAPSAELYAVKVLGASGSGGVSSIAQGLEWAGNNGMHVANLSLGSPSPSATLEQAVNSATSRGVLVVAASGNSGAGSISYPARYANAMAVGATDQNNNRASFSQYGAGLDIVAPGVNVQSTYPGSTYASLNGTSMATPHVAGAAALVKQKNPSWSNVQIRNHLKNTATSLGSTNLYGSGLVNAEAATR

SEQ ID NO: 51842 - protein, 269 aa, Unidentified
AQSVPWGISRVQAPAAHNRGLTGSGVKVAVLDTGISTHPDLNIRGGASFVPGEPSTQDGNGHGTHVAGTIAALNNSIGVLGVAPSAELYAVKVLGASGSGSISSIAQGLEWAGNNGMHVANLSLGSPSPSATLEQAVNSATSRGVLVVAASGNSGAGSISYPARYANAMAVGATDQNNNRASFSQYGAGLDIVAPGVNVQSTYPGSTYASLNGTSMATPHVAGAAALVKQKNPSWSNVQIRNHLKNTATSLGSTNLYGSGLVNAEAATR

SEQ ID NO: 51843 - protein, 270 aa, Unidentified
AQSVPWGISRVQAPAAHNRGLTGSGVKVAVLDTGISTHPDLNIRGGASFVPGEPSTQDGNGHGTHVAGTIAALNNSIGVLGVAPSAELYAVKVLGASGADGSVSSIAQGLEWAGNNGMHVANLSLGSPSPSATLEQAVNSATSRGVLVVAASGNSGAGSISYPARYANAMAVGATDQNNNRASFSQYGAGLDIVAPGVNVQSTYPGSTYASLNGTSMATPHVAGAAALVKQKNPSWSNVQIRNHLKNTATSLGSTNLYGSGLVNAEAATR

SEQ ID NO: 51844 - protein, 269 aa, Unidentified
AQSVPWGISRVQAPAAHNRGLTGSGVKVAVLDTGISTHPDLRIRGGASFVPGEPSTQDGNGHGTHVAGTIAALNNSIGVLGVAPSAELYAVKVLGASGSGSVSSIAQGLEWAGNNGMHVANLSLGSPSPSATLEQAVNSATSRGVLVVAASGNSGAGSISYPARYANAMAVGATDQNNNRASFSQYGAGLDIVAPGVNVQSTYPGSTYASLNGTSMATPHVAGAAALVKQKNPSWSNVQIRNHLKNTATSLGSTNLYGSGLVNAEAATR

SEQ ID NO: 51845 - protein, 269 aa, Unidentified
AQSVPWGISRVQAPAAHNRGLTGSGVKVAVLDTGISTHPDLNIRGGASFVPGEPSTQDGNGHGTHVAGTCAALNNSIGVLGVAPSAELYAVKVLGASGSGSVSSIAQGLEWAGNNGMHVANLSLGSPSPSATLEQAVNSATSRGVLVVAASGNSGAGSISYPARYANAMAVGATDQNNNRASFSQYGAGLDIVAPGVNVQSTYPGSTYASLNGTSMATPHVAGAAALVKQKNPSWSNVQIRNHLKNTATSLGSTNLYGSGLVNAEAATR

SEQ ID NO: 51846 - protein, 269 aa, Unidentified
AQSVPWGISRVQAPAAHNRGLTGSGVKVAVLDTGISTHPDLNIRGGASFVPGEPSTQDGNGHGTHVAGTIAALNNSIGVLGVAPSAELYAVKVLGASGSGSVSSIAQGLEWAGNNGMHVANLSLGFPSPSATLEQAVNSATSRGVLVVAASGNSGAGSISYPARYANAMAVGATDQNNNRASFSQYGAGLDIVAPGVNVQSTYPGSTYASLNGTSMATPHVAGAAALVKQKNPSWSNVQIRNHLKNTATSLGSTNLYGSGLVNAEAATR

SEQ ID NO: 51847 - protein, 269 aa, Unidentified
AQSVPWGISRVQAPAAHNRGLTGSGVKVAVLDTGISLHPDLNIRGGASFVPGEPSTQDGNGHGTHVAGTIAALNNSIGVLGVAPSAELYAVKVLGASGSGSVSSIAQGLEWAGNNGMHVANLSLGSPSPSATLEQAVNSATSRGVLVVAASGNSGAGSISYPARYANAMAVGATDQNNNRASFSQYGAGLDIVAPGVNVQSTYPGSTYASLNGTSMATPHVAGAAALVKQKNPSWSNVQIRNHLKNTATSLGSTNLYGSGLVNAEAATR

SEQ ID NO: 51848 - protein, 269 aa, Unidentified
AQSVPWGISRVQAPAAHNRGLTGSGVKVAVLDTGISTHPDLNIRGGASFVPGEPSTQDGNGHGTHVAGTIAALNNSIGVLGVAPSAELYAVKVLGASGSGSVSSIAQGLEWAGNNGMHVANLSLGSPSPSATLEQAVNSATSRGVLVVAASGNSGAGSISYPARYANAMAVGATDQNNNRASFSQYGAGLDIVAPGVNVQSTYPGSTYASLNGTSMATPHVAGAAALVKQKNPSWSNVQIRNHLKNTATSLGSTNLYGSGLVIAEAATR

SEQ ID NO: 51849 - protein, 269 aa, Unidentified
AQSVPWGISRVQAPAAHNRGLTGSGVQVAVLDTGISTHPDLNIRGGASFVPGEPSTQDGNGHGTHVAGTIAALNNSIGVLGVAPSAELYAVKVLGASGSGSVSSIAQGLEWAGNNGMHVANLSLGSPSPSATLEQAVNSATSRGVLVVAASGNSGAGSISYPARYANAMAVGATDQNNNRASFSQYGAGLDIVAPGVNVQSTYPGSTYASLNGTSMATPHVAGAAALVKQKNPSWSNVQIRNHLKNTATSLGSTNLYGSGLVNAEAATR

SEQ ID NO: 51850 - protein, 269 aa, Unidentified
AQSVPWGISRVQAPAAHNRGLTGSGVKVAVLDTGISTHPDLNIRGGASFVPGEPSTQDGNGHGTHVAGTIAALNNSIGVLGVAPSAELYAVKVLGASGSGSVSSIAQGLEWAGNNGMHVANLSLGSPSPSATLEQAVNSATSRGVLVVAASGNSGAGSISYPARYANAMAVGATDQNNNRASFSQYGAGLDIVACGVNVQSTYPGSTYASLNGTSMATPHVAGAAALVKQKNPSWSNVQIRNHLKNTATSLGSTNLYGSGLVNAEAATR

SEQ ID NO: 51851 - protein, 269 aa, Unidentified
AQSVPWGISRVQAPAAHNRGLTGSGVKVAVLDTGISTHPDLNIRGGASFVPGEPSTQDGNSHGTHVAGTIAALNNSIGVLGVAPSAELYAVKVLGASGSGSVSSIAQGLEWAGNNGMHVANLSLGSPSPSATLEQAVNSATSRGVLVVAASGNSGAGSISYPARYANAMAVGATDQNNNRASFSQYGAGLDIVAPGVNVQSTYPGSTYASLNGTSMATPHVAGAAALVKQKNPSWSNVQIRNHLKNTATSLGSTNLYGSGLVNAEAATR

SEQ ID NO: 51852 - protein, 269 aa, Unidentified
AQSVPWGISRVQAPAAHNRGLTGSGVKVAVLDTGISTHPDLNIRGGASFVPGEPSTQDGNGHGTHVAGTIAALNNSIGVLGVAPSAELYAVKVLGASGSGSVSSIAQGLEWAGLNGMHVANLSLGSPSPSATLEQAVNSATSRGVLVVAASGNSGAGSISYPARYANAMAVGATDQNNNRASFSQYGAGLDIVAPGVNVQSTYPGSTYASLNGTSMATPHVAGAAALVKQKNPSWSNVQIRNHLKNTATSLGSTNLYGSGLVNAEAATR

SEQ ID NO: 51853 - protein, 269 aa, Unidentified
AQSVPWGISRVQAPAAHNRGLTGSGVKVAVLDTGISTHPDLNIRGGASFVPGEPSTQDGNGHGTHVAGTIAALNNSIGVLGVAPSAELYAVKVLGASGDGSVSSIAQGLEWAGNNGMHVANLSLGSPSPSATLEQAVNSATSRGVLVVAASGNSGAGSISYPARYANAMAVGATDQNNNRASFSQYGAGLDIVAPGVNVQSTYPGSTYASLNGTSMATPHVAGAAALVKQKNPSWSNVQIRNHLKNTATSLGSTNLYGSGLVNAEAATR

SEQ ID NO: 51854 - protein, 269 aa, Unidentified
AQSVPWGISRVQAPAAHNRGLTGSGVKVAVLDTGISTHPDLNIRGGASFVPGEPSTQDGNGHGTHVAGTIAALNNSIGVLGVAPSAELYAVKVLGAGGSGSVSSIAQGLEWAGNNGMHVANLSLGSPSPSATLEQAVNSATSRGVLVVAASGNSGAGSISYPARYANAMAVGATDQNNNRASFSQYGAGLDIVAPGVNVQSTYPGSTYASLNGTSMATPHVAGAAALVKQKNPSWSNVQIRNHLKNTATSLGSTNLYGSGLVNAEAATR

SEQ ID NO: 51855 - protein, 269 aa, Unidentified
AQSVPWGISRVQAPAAHNRGLTGSGVKVAVLDTGISTHPDLNIRGGASFVPGEPSTQDGNPHGTHVAGTIAALNNSIGVLGVAPSAELYAVKVLGASGSGSVSSIAQGLEWAGNNGMHVANLSLGSPSPSATLEQAVNSATSRGVLVVAASGNSGAGSISYPARYANAMAVGATDQNNNRASFSQYGAGLDIVAPGVNVQSTYPGSTYASLNGTSMATPHVAGAAALVKQKNPSWSNVQIRNHLKNTATSLGSTNLYGSGLVNAEAATR

SEQ ID NO: 51856 - protein, 269 aa, Unidentified
AQSVPWGISRVQAPAAHNRGLTGSGVKVAVLDTGISTHPDLNIRGGASFVPGEPSTQDGNGHGTHVAGTIAALNNSIGVLGVAPSAELYAVKVLGASGSGSVSSIAQGLEWAGNNGMHVANLSLGSPSPSATLEQAVNSATSRGVLVVAASGNSGAGSISYPARYANAMAVGATDQNNNRASFSQYGAGLDIVAPGVNVQSTLPGSTYASLNGTSMATPHVAGAAALVKQKNPSWSNVQIRNHLKNTATSLGSTNLYGSGLVNAEAATR

SEQ ID NO: 51857 - protein, 269 aa, Unidentified
AQSVPWGISRVQAPAAHNRGLTGSGVKVAVLDTGISTHPDLNIRGGASFVPGEPSTQDGNGHGTHVAGTIAALNNSIGVLGVAPSAELYAVKVLGASGSGSVSSIAQGLEWAGNNGMHVANLSLGSPSPSATLEQAVNSATSRGVLVVAASGNSGAGSISYPARYANAMAVGATDQNNNRASFSQYGAGLDIVAPGVNVCSTYPGSTYASLNGTSMATPHVAGAAALVKQKNPSWSNVQIRNHLKNTATSLGSTNLYGSGLVNAEAATR

SEQ ID NO: 51858 - protein, 269 aa, Unidentified
AQSVPWGISRVQAPAAHNRGLTGSGVKVAVLDTGISTHPDLNIRGGASFVPGEPSTQDGNGHGTHVAGTIAALNNSIGVLGVAPSAELYAVKVLGASGSGSVSSIAQGLEWAGNNGMHVANLSLGSPSPSATLEQAVNSATSRGVLVVAASGNSGAGSISYPARYANAMAVGATDQNNNRASFSQYGAGLDIVAPGVNVQSTYPGSTYASLNGTSMATPHVAGAAALVKFKNPSWSNVQIRNHLKNTATSLGSTNLYGSGLVNAEAATR

SEQ ID NO: 51859 - protein, 269 aa, Unidentified
AQSVPWGISRVQAPAAHNRGLTGSGVKVAVLDTGISTHPDLNIRGGASFVPGEPSTQDGNGHGTHVAGTIAALNNSIGVLGVAPSAELYAVKVLGASGAGSVSSIAQGLEWAGNNGMHVANLSLGSPSPSATLEQAVNSATSRGVLVVAASGNSGAGSISYPARYANAMAVGATDQNNNRASFSQYGAGLDIVAPGVNVQSTYPGSTYASLNGTSMATPHVAGAAALVKQKNPSWSNVQIRNHLKNTATSLGSTNLYGSGLVNAEAATR

SEQ ID NO: 51860 - protein, 269 aa, Bacillus sp.
AQSVPWGISRVQAPAAHNRGLTGSGVKVAVLDTGISTHPDLNIRGGASFVPGEPSTQDGNGHGTHVAGTIAALNNSIGVLGVAPNAELYAVKVLGASGSGSVSSIAQGLEWAGNNGMHVANLSLGSPSPSATLEQAVNSATSRGVLVVAASGNSGAGSISYPARYANAMAVGATDQNNNRASFSQYGAGLDIVAPGVNVQSTYPGSTYASLNGTSEATPHVAGAAALVKQKNPSWSNVQIRNHLKNTATSLGSTNLYGSGLVNAEAATR

SEQ ID NO: 51861 - protein, 269 aa, Unidentified
AQSVPWGISRVQAPAAHNRRLTGSGVKVAVLDTGISTHPDLRIRGGASFVPGEPSTQDGNGHGTHVAGTIAALNNSIGVLGVAPSAELYAVKVLGASGSGSVSSIAQGLEWAGNNGMHVANLSLGSPSPSATLEQAVNSATSRGVLVVAASGNSGAGSISYPARYANAMAVGATDQNNNRASFSQYGAGLDIVAPGVNVQSTYPGSTYASLNGTSSATPHVAGAAALVKQKNPSWSNVQIRNHLKNTATSLGSTNLYGSGLVNAEAATR

SEQ ID NO: 51862 - protein, 269 aa, Unidentified
AQSVPWGISRVQAPAAHNRGLTGSGVKVAVLDTGISTHPDLNIRGGASFVPGEPSTQDGNGHGTHVAGTIAALNNSIGVLGVAPSAELYAVKVLGASGSGSVSSIAQGLEYAGNNGMHVANLSLGSPSPSATLEQAVNSATSRGVLVVAASGNSGAGSISYPARYANAMAVGATDQNNNRASFSQYGAGLDIVAPGVNVQSTYPGSTYASLNGTSMATPHVAGAAALVKQKNPSWSNVQIRNHLKNTATSLGSTNLYGSGLVNAEAATR

SEQ ID NO: 51863 - protein, 269 aa, Unidentified
AQSVPWGISRVQAPAAHNRGLTGSGVKVAVLDTGISTHPDLNIRGGASFVPGEPSTQDGNGHGTHVAGTIAALNNSIGVLGVAPSAELYAVKVLGASGSGSVSSIAQGLEWAGNNGMHVANLSLGSPSPSATLEQAVNSATSRGVLVVAASGNSGAGSISYPARYANAMAVGATDQNNNRADFSQYGAGLDIVAPGVNVQSTYPGSTYASLNGTSMATPHVAGAAALVKQKNPSWSNVQIRNHLKNTATSLGSTNLYGSGLVNAEAATR

SEQ ID NO: 51864 - protein, 269 aa, Unidentified
AQSVPWGISRVQAPAAHNRGLTGSGVKVAVLDTGISTHPDLNIRGGASFVPGEPSTQDGNGHGTHVAGTIAALNNSIGVLGVAPSTELYAVKVLGASGSGSVSSIAQGLEWAGNNGMHVANLSLGSPSPSATLEQAVNSATSRGVLVVAASGNSGAGSISYPARYANAMAVGATDQNNNRASFSQYGAGLDIVAPGVNVQSTYPGSTYASLNGTSMATPHVAGAAALVKQKNPSWSNVQIRNHLKNTATSLGSTNLYGSGLVNAEAATR

SEQ ID NO: 51865 - protein, 269 aa, Unidentified
AQSVPWGISRVQAPAAHNRGLTGSGVKVAVLDTGISTHPDLNIRGGASFVPGEPSTQKGNGHGTHVAGTIAALNNSIGVLGVAPSAELYAVKVLGASGSGSVSSIAQGLEWAGNNGMHVANLSLGSPSPSATLEQAVNSATSRGVLVVAASGNSGAGSISYPARYANAMAVGATDQNNNRASFSQYGAGLDIVAPGVNVQSTYPGSTYASLNGTSMATPHVAGAAALVKQKNPSWSNVQIRNHLKNTATSLGSTNLYGSGLVNAEAATR

SEQ ID NO: 51866 - protein, 269 aa, Unidentified
AQSVPWGISRVQAPAAHNRGLTGSGVKVAVLDTGISTHPDLNIRGGASFVPGEPSRQDGNGHGTHVAGTIAALNNSIGVLGVAPSAELYAVKVLGASGSGSVSSIAQGLEWAGNNGMHVANLSLGSPSPSATLEQAVNSATSRGVLVVAASGNSGAGSISYPARYANAMAVGATDQNNNRASFSQYGAGLDIVAPGVNVQSTYPGSTYASLNGTSMATPHVAGAAALVKQKNPSWSNVQIRNHLKNTATSLGSTNLYGSGLVNAEAATR

SEQ ID NO: 51867 - protein, 269 aa, Unidentified
AQSVPWGISRVQAPAAHNRGLTGSGVKVAVLDTGISTHPDLNIRGGASFVPGEPSTQDGNGHGTHVAGTIAALNNSIGVLGVAPSAPLYAVKVLGASGSGSVSSIAQGLEWAGNNGMHVANLSLGSPSPSATLEQAVNSATSRGVLVVAASGNSGAGSISYPARYANAMAVGATDQNNNRASFSQYGAGLDIVAPGVNVQSTYPGSTYASLNGTSMATPHVAGAAALVKQKNPSWSNVQIRNHLKNTATSLGSTNLYGSGLVNAEAATR

SEQ ID NO: 51868 - protein, 269 aa, Unidentified
AQSVPWGISRVQAPAAHNRGLTGSGVKVAVLDTGISTHPDLNIRGGASFVPGEPSTQWGNGHGTHVAGTIAALNNSIGVLGVAPSAELYAVKVLGASGSGSVSSIAQGLEWAGNNGMHVANLSLGSPSPSATLEQAVNSATSRGVLVVAASGNSGAGSISYPARYANAMAVGATDQNNNRASFSQYGAGLDIVAPGVNVQSTYPGSTYASLNGTSMATPHVAGAAALVKQKNPSWSNVQIRNHLKNTATSLGSTNLYGSGLVNAEAATR

SEQ ID NO: 51869 - protein, 269 aa, Unidentified
AQSVPWGISRVQAPAAHNRGLTGSGVKVAVLDTGISTHPDLNIRGGASFVPGEPSTQDGNGHGTHVAGTIAALNNSIGVLGVAPSAELYAVKVLGASGSGSVSSIAQGLEWAGNNGMHVANLSLGSPSPSATLEQAVNSATSRGVLVVAASGNSGAGSISYPARYANAMAVGATDQNNNRASFSQYGAGLDIVAPGVNVQSTYPGSTYARLNGTSMATPHVAGAAALVKQKNPSWSNVQIRNHLKNTATSLGSTNLYGSGLVNAEAATR

SEQ ID NO: 51870 - protein, 269 aa, Unidentified
AQSVPWGISRVQAPAAHNRGLTGSGVKVAVLDTGISTHPDLNIRGGASFVPGEPSTQDGNGHGTHVAGTIAALNNSIGVLGVAPSAELEAVKVLGASGSGSVSSIAQGLEWAGNNGMHVANLSLGSPSPSATLEQAVNSATSRGVLVVAASGNSGAGSISYPARYANAMAVGATDQNNNRASFSQYGAGLDIVAPGVNVQSTYPGSTYASLNGTSMATPHVAGAAALVKQKNPSWSNVQIRNHLKNTATSLGSTNLYGSGLVNAEAATR

SEQ ID NO: 51871 - protein, 269 aa, Unidentified
AQSVPWGISRVQAPAAHNRGLTGSGVKVAVLDTGISTHPDLNIRGGASFVPGEPRTQDGNGHGTHVAGTIAALNNSIGVLGVAPSAELYAVKVLGASGSGSVSSIAQGLEWAGNNGMHVANLSLGSPSPSATLEQAVNSATSRGVLVVAASGNSGAGSISYPARYANAMAVGATDQNNNRASFSQYGAGLDIVAPGVNVQSTYPGSTYASLNGTSMATPHVAGAAALVKQKNPSWSNVQIRNHLKNTATSLGSTNLYGSGLVNAEAATR

SEQ ID NO: 51872 - protein, 269 aa, Unidentified
AQSVPWGISRVQAPAAHNRGLTGSGVKCAVLDTGISTHPDLNIRGGASFVPGEPSTQDGNGHGTHVAGTIAALNNSIGVLGVAPSAELYAVKVLGASGSGSVSSIAQGLEWAGNNGMHVANLSLGSPSPSATLEQAVNSATSRGVLVVAASGNSGAGSISYPARYANAMAVGATDQNNNRASFSQYGAGLDIVAPGVNVQSTYPGSTYASLNGTSMATPHVAGAAALVKQKNPSWSNVQIRNHLKNTATSLGSTNLYGSGLVNAEAATR

SEQ ID NO: 51873 - protein, 269 aa, Bacillus lentus
AQSVPWGISRVQAPAAHNRGLTGSGVKVAVLDTGISTHPDLNIRGGASFVPGEPSTQDGNGHGTHVAGTIAALNNSIGVLGVAPDAELYAVKVLGASGSGSVSSIAQGLEWAGNNGMHVANLSLGSPSPSATLEQAVNSATSRGVLVVAASGNSGAGSISYPARYANAMAVGATDQNNNRASFSQYGAGLDIVAPGVNVQSTYPGSTYASLNGTSMATPHVAGAAALVKQKNPSWSNVQIRNHLKNTATSLGSTNLYGSGLVNAEAATR

SEQ ID NO: 51874 - protein, 269 aa, Unidentified
AQSVPWGISRVQAPAAHNRGLTGSGVKVAVLDTGISTHPDLNIRGGASFVPGEPSTQDGNGHGTHVAGTIQALNNSIGVLGVAPSAELYAVKVLGASGSGSVSSIAQGLEWAGNNGMHVANLSLGSPSPSATLEQAVNSATSRGVLVVAASGNSGAGSISYPARYANAMAVGATDQNNNRASFSQYGAGLDIVAPGVNVQSTYPGSTYASLNGTSMATPHVAGAAALVKQKNPSWSNVQIRNHLKNTATSLGSTNLYGSGLVNAEAATR

SEQ ID NO: 51875 - protein, 269 aa, Unidentified
AQSVPWGISRVQAPAAHNRGLTGSGVKVAVLDTGISTHPDLNIRGGASFVPGEPSTQDGNGHGTHVAGTIAALNNSIGVLGVAPSAELYAVKVLGASGNGSVSSIAGGLEWAGNNGMHVANLSLGSPSPSATLEQAVNSATSRGVLVVAASGNSGAGSISYPARYANAMAVGATDQNNNRASFSQYGAGLDIVAPGVNVQSTYPGSTYASLNGTSSATPHVAGAAALVKQKNPSWSNVQIRNHLKNTATSLGSTNLYGSGLVNAEAATR

SEQ ID NO: 51876 - protein, 269 aa, Unidentified
AQSVPWGISRVQAPAAHNRGLTGSGVKVAVLDTGISTHPDLNIRGGASFVPGEPSTQDGNGHGTHVAGTIAALNNSIGVLGVAPSAELYAVKVLGASGSGSVSSMAQGLEWAGNNGMHVANLSLGSPSPSATLEQAVNSATSRGVLVVAASGNSGAGSISYPARYANAMAVGATDQNNNRASFSQYGAGLDIVAPGVNVQSTYPGSTYASLNGTSMATPHVAGAAALVKQKNPSWSNVQIRNHLKNTATSLGSTNLYGSGLVNAEAATR

SEQ ID NO: 51877 - protein, 269 aa, Unidentified
AQSVPWGISRVQAPAAHNRGLTGSGVKVAVLDTGISTHPDLNIRGGASFVPGEPSTQDGNGHGTHVAGTIAALNNSIGVLGVAPSAELYAVKVLGASGSGTVSSIAQGLEWAGNNGMHVANLSLGSPSPSATLEQAVNSATSRGVLVVAASGNSGAGSISYPARYANAMAVGATDQNNNRASFSQYGAGLDIVAPGVNVQSTYPGSTYASLNGTSMATPHVAGAAALVKQKNPSWSNVQIRNHLKNTATSLGSTNLYGSGLVNAEAATR

SEQ ID NO: 51878 - protein, 269 aa, Unidentified
AQSVPWGISRVQAPAAHNRGLTGSGVKVAVLDTGISTHPDLNIRGGASFVPGEPSTQDGNGHGTHVAGTIAALNNSIGVLGVAPSAELYAVKVLGASGSGSVSSIAQGLEWAGNNDMHVANLSLGSPSPSATLEQAVNSATSRGVLVVAASGNSGAGSISYPARYANAMAVGATDQNNNRASFSQYGAGLDIVAPGVNVQSTYPGSTYASLNGTSMATPHVAGAAALVKQKNPSWSNVQIRNHLKNTATSLGSTNLYGSGLVNAEAATR

SEQ ID NO: 51879 - protein, 269 aa, Unidentified
AQSVPWGISRVQAPAAHNRGLTGSGVKVAVLDTGISTHPDLNIRGGASFVPGEPSTQDGNGHGTHVAGTIAALNNSIGVLGVAPSAELYAVKVLGASGSGSVSSIAQGLEWAGNNGMHVANLSLGSPSPSATLEQAVNSATSRGVLVVAASGNSGAGSISYPARYANAMARGATDQNNNRASFSQYGAGLDIVAPGVNVQSTYPGSTYASLNGTSMATPHVAGAAALVKQKNPSWSNVQIRNHLKNTATSLGSTNLYGSGLVNAEAATR

SEQ ID NO: 51880 - protein, 269 aa, Unidentified
AQSVPWGISRVQAPAAHNRGLTGSGVKVAVLDTGISTHPDLNIRGGASFVPGEPSTQDGNGHGTHVAGTIAALNNSIGVLGVAPSAELYAVKVLGASGSGSVSSIAQGLEWAGNNGMHVANLSLGSPSPDATLEQAVNSATSRGVLVVAASGNSGAGSISYPARYANAMAVGATDQNNNRASFSQYGAGLDIVAPGVNVQSTYPGSTYASLNGTSMATPHVAGAAALVKQKNPSWSNVQIRNHLKNTATSLGSTNLYGSGLVNAEAATR

SEQ ID NO: 51881 - protein, 269 aa, Unidentified
AQSVPWGISRVQAPAAHNRGLTGSGVKVAVLDTGISTHPDLNIRGGASFVPGEPSTQDGNGHGTHVAGTIAALNNSIGVLGVAPSAELYAVKVLGASGSGSVSSIAQGLEWAGNNGMHVANLSLGSPSPSATLEQAVNSATSRGVLVVAASGNSGAGSISYPARYANAMAVGATDQNNIRASFSQYGAGLDIVAPGVNVQSTYPGSTYASLNGTSMATPHVAGAAALVKQKNPSWSNVQIRNHLKNTATSLGSTNLYGSGLVNAEAATR

SEQ ID NO: 51882 - protein, 269 aa, Unidentified
AQSVPWGISRVQAPAAHNRGLTGSGVKVAVLDTGISTHPDLNIRGGASFVPGEPSTQDGNGHGTHVAGTIAALNNSIGVLGVAPSAELYAVKVLAASGGGSVSSIAQGLEWAGNNGMHVANLSLGSPSPSATLEQAVNSATSRGVLVVAASGNSGAGSISYPARYANAMAVGATDQNNNRASFSQYGAGLDIVAPGVNVQSTYPGSTYASLNGTSSATPHVAGAAALVKQKNPSWSNVQIRNHLKNTATSLGSTNLYGSGLVNAEAATR

SEQ ID NO: 51883 - protein, 269 aa, Unidentified
AQSVPWGISRVQAPAAHNRGLTGSGVKVAVLDTGISTHPDLNIRGGASFVPGEPSTQDGNGHGTHVAGTIAALNNSIGVLGVAPSAELYAVKVLGASGSGSVSSIAQGLEWAGNNGMHVANLSLGSPSPSATLEQAVNSATSRGVLVVAASGNSGAGSISYPARYANAMAVGATDQNNNRASFSQYGAGLDIVAPGVNVQSTYPGSTYDSLNGTSMATPHVAGAAALVKQKNPSWSNVQIRNHLKNTATSLGSTNLYGSGLVNAEAATR

SEQ ID NO: 51884 - protein, 269 aa, Unidentified
AQSVPWGISRVQAPAAHNRGLTGSGVKVAVLDTGISTHPDLNIRGGASFVPGEPSTQDGNGHGTHVAGTIAALNNSIGVLGVAPSAELYAVKVLGASGSGSVSSIAQGLEWAGNNGMHVANLSLGSPSPSATLEQAVNSATSRGVLVVAASGNSGAGSISYPARYANAMAVGATDQNNNRASFSQYGAGLDIVAPGVNVQSTYPGSTYASLNGTSMATPHVSGAAALVKQKNPSWSNVQIRNHLKNTATSLGSTNLYGSGLVNAEAATR

SEQ ID NO: 51885 - protein, 269 aa, Unidentified
AQSVPWGISRVQAPAAHNRGLTGSGVKVAVLDTGISTHPDLNIRGGASFVPGEPSTQDGNGHGTHVAGTIAALNNSIGVLGVAPSAELYAVKVLGASGSGSVSSIAQGLEWAGNNGMHVANLSLGSPSPSATLEQAVNSATSRGVLVVAASGNSGAGSISYPARYANAMAVGATDQNNNRASFSQYGAGLDIVAPGVNVQSTYPGSTYASLNGTSMAGPHVAGAAALVKQKNPSWSNVQIRNHLKNTATSLGSTNLYGSGLVNAEAATR

SEQ ID NO: 51886 - protein, 269 aa, Unidentified
AQSVPWGISRVQAPAAHNRGLTGSGVKVAVLDTGISTHPDLNIRGGASFVPGEPSTQDGNGHGTHVAGTIAALNNWIGVLGVAPSAELYAVKVLGASGSGSVSSIAQGLEWAGNNGMHVANLSLGSPSPSATLEQAVNSATSRGVLVVAASGNSGAGSISYPARYANAMAVGATDQNNNRASFSQYGAGLDIVAPGVNVQSTYPGSTYASLNGTSMATPHVAGAAALVKQKNPSWSNVQIRNHLKNTATSLGSTNLYGSGLVNAEAATR

SEQ ID NO: 51887 - protein, 269 aa, Unidentified
AQSVPWGISRVQAPAAHNRGLTGSGVKVAVLDTGISTHPDLNIRGGASFVPGEPSTQDGNGHGTHVAGTIAALNNSIGVLGVAPSAELYAVKVLGASGSGSVSSIAQGLEWAGNNGMHVANLSLGSPSPSATLEQAVNSATSRGVLVVAASGNSGAGSISYPARYANAMAVGATDQNNVRASFSQYGAGLDIVAPGVNVQSTYPGSTYASLNGTSMATPHVAGAAALVKQKNPSWSNVQIRNHLKNTATSLGSTNLYGSGLVNAEAATR

SEQ ID NO: 51888 - protein, 269 aa, Unidentified
AQSVPWGISRVQARAAHNRGLTGSGVKVAVLDTGISTHPDLNIRGGASFVPGEPSTQDGNGHGTHVAGTIAALNNSIGVLGVAPSAELYAVKVLGASGSGSVSSIAQGLEWAGNNGMHVANLSLGSPSPSATLEQAVNSATSRGVLVVAASGNSGAGSISYPARYANAMAVGATDQNNNRASFSQYGAGLDIVAPGVNVQSTYPGSTYASLNGTSMATPHVAGAAALVKQKNPSWSNVQIRNHLKNTATSLGSTNLYGSGLVNAEAATR

SEQ ID NO: 51889 - protein, 269 aa, Unidentified
AQSVPWGISRVQAPAAHNRGLTGSGVKVAVLDTGISTHPDLNIRGGASFVPGEYSTQDGNGHGTHVAGTIAALNNSIGVLGVAPSAELYAVKVLGASGSGSVSSIAQGLEWAGNNGMHVANLSLGSPSPSATLEQAVNSATSRGVLVVAASGNSGAGSISYPARYANAMAVGATDQNNNRASFSQYGAGLDIVAPGVNVQSTYPGSTYASLNGTSMATPHVAGAAALVKQKNPSWSNVQIRNHLKNTATSLGSTNLYGSGLVNAEAATR

SEQ ID NO: 51890 - protein, 269 aa, Unidentified
AQSVPWGISRVQAPAAHNRGLTGSGVRVAVLDTGISTHPDLNIRGGASFVPGEPSTQDGNGHGTHVAGTIAALNNSIGVLGVAPSAELYAVKVLGASGSGSVSSIAQGLEWAGNNGMHVANLSLGSPSPSATLEQAVNSATSRGVLVVAASGNSGAGSISYPARYANAMAVGATDQNNNRASFSQYGAGLDIVAPGVNVQSTYPGSTYASLNGTSMATPHVAGAAALVKQKNPSWSNVQIRNHLKNTATSLGSTNLYGSGLVNAEAATR

SEQ ID NO: 51891 - protein, 270 aa, Unidentified
AQSVPWGISRVQAPAAHNRGLTGSGVKVAVLDTGISTHPDLNIRGGASFVPGEPSTQDGNGHGTHVAGTIAALNNSIGVLGVAPSAELYAVKVLGASXXSGSVSSIAQGLEWAGNNGMHVANLSLGSPSPSATLEQAVNSATSRGVLVVAASGNSGAGSISYPARYANAMAVGATDQNNNRASFSQYGAGLDIVAPGVNVQSTYPGSTYASLNGTSMATPHVAGAAALVKQKNPSWSNVQIRNHLKNTATSLGSTNLYGSGLVNAEAATR

SEQ ID NO: 51892 - protein, 269 aa, Unidentified
AQSVPWGISRVQAPAAHNRGLTGSAVKVAVLDTGISTHPDLNIRGGASFVPGEPSTQDGNGHGTHVAGTIAALNNSIGVLGVAPSAELYAVKVLGASGSGSVSSIAQGLEWAGNNGMHVANLSLGSPSPSATLEQAVNSATSRGVLVVAASGNSGAGSISYPARYANAMAVGATDQNNNRASFSQYGAGLDIVAPGVNVQSTYPGSTYASLNGTSMATPHVAGAAALVKQKNPSWSNVQIRNHLKNTATSLGSTNLYGSGLVNAEAATR

SEQ ID NO: 51893 - protein, 269 aa, Unidentified
AQSVPWGISRVQAPAAHNRGLTGSGVKVAVLDTGISTHPDLNIRGGASFVPGEPSTQDGNGHGTHVAGTIAALNNSIGVLGVAPSAELYAVKVLGASGSGSVSSIAQGLEWAGNNGMHVANLSLGSPSPSATLEQAVNSATSRGVLVVAASGNSGAGSISYPARYANAMAVGATDQNNNRASFSQYGAGLDIVAPGVNVQSTYPGSTYASLNGTSMATPHVAGAAALVKQKNPSWSNVQIRNHLKNTHTSLGSTNLYGSGLVNAEAATR

SEQ ID NO: 51894 - protein, 269 aa, Unidentified
AQSVPWGISRVQAPAAHNRGLTGSGVKVAVLDTGISTHPDLNIRGGASFVPGEPSTQDGNGHGTHAAGTIAALNNSIGVLGVAPSAELYAVKVLGASGSGSVSSIAQGLEWAGNNGMHVANLSLGSPSPSATLEQAVNSATSRGVLVVAASGNSGAGSISYPARYANAMAVGATDQNNNRASFSQYGAGLDIVAPGVNVQSTYPGSTYASLNGTSMATPHVAGAAALVKQKNPSWSNVQIRNHLKNTATSLGSTNLYGSGLVNAEAATR

SEQ ID NO: 51895 - protein, 269 aa, Unidentified
AQSVPWGISRVQAPAAHNRGLTGFGVKVAVLDTGISTHPDLNIRGGASFVPGEPSTQDGNGHGTHVAGTIAALNNSIGVLGVAPSAELYAVKVLGASGSGSVSSIAQGLEWAGNNGMHVANLSLGSPSPSATLEQAVNSATSRGVLVVAASGNSGAGSISYPARYANAMAVGATDQNNNRASFSQYGAGLDIVAPGVNVQSTYPGSTYASLNGTSMATPHVAGAAALVKQKNPSWSNVQIRNHLKNTATSLGSTNLYGSGLVNAEAATR

SEQ ID NO: 51896 - protein, 269 aa, Unidentified
AQSVPWGISRVQAPAAHNRGLTGSGVKVAVLDTGISTHPDLNIRGGASFVPGEPSTQDGNGHGTHVAGTIAALNNSIGVLGVAPSAELYAVKVLGASGSGSVSSIAQGLEWAGNNGMHVANLSLGSPSPSATLEQAVNSATSRGLLVVAASGNSGAGSISYPARYANAMAVGATDQNNNRASFSQYGAGLDIVAPGVNVQSTYPGSTYASLNGTSMATPHVAGAAALVKQKNPSWSNVQIRNHLKNTATSLGSTNLYGSGLVNAEAATR

SEQ ID NO: 51897 - protein, 269 aa, Unidentified
AQSVPWGISRVQAPAAHNRGLTGSGVKVAVLDTGISTHPDLNIRGGASFVPGEPSTQDGNGHGTHVWGTIAALNNSIGVLGVAPSAELYAVKVLGASGSGSVSSIAQGLEWAGNNGMHVANLSLGSPSPSATLEQAVNSATSRGVLVVAASGNSGAGSISYPARYANAMAVGATDQNNNRASFSQYGAGLDIVAPGVNVQSTYPGSTYASLNGTSMATPHVAGAAALVKQKNPSWSNVQIRNHLKNTATSLGSTNLYGSGLVNAEAATR

SEQ ID NO: 51898 - protein, 269 aa, Unidentified
AQSVPWGISRVQAPAAHNRGLTGSGVKVAVLDTGISTHPDLNIRGGASFVPGEPSTQDGNGHGTHVAGTIAALNNSIGVLGVAWSAELYAVKVLGASGSGSVSSIAQGLEWAGNNGMHVANLSLGSPSPSATLEQAVNSATSRGVLVVAASGNSGAGSISYPARYANAMAVGATDQNNNRASFSQYGAGLDIVAPGVNVQSTYPGSTYASLNGTSMATPHVAGAAALVKQKNPSWSNVQIRNHLKNTATSLGSTNLYGSGLVNAEAATR

SEQ ID NO: 51899 - protein, 269 aa, Unidentified
AQSVPWGISRVQAPAAHNRGLTGSGVKVAVLDTGISTHPDLNIRGGASFVPGEPSTQDGNGHGTHVAGTIAALNNSIGVLGVAPSAELYAVKVLGASGSGSVSSIAQGLEWAGNNGCHVANLSLGSPSPSATLEQAVNSATSRGVLVVAASGNSGAGSISYPARYANAMAVGATDQNNNRASFSQYGAGLDIVAPGVNVQSTYPGSTYASLNGTSMATPHVAGAAALVKQKNPSWSNVQIRNHLKNTATSLGSTNLYGSGLVNAEAATR

SEQ ID NO: 51900 - protein, 269 aa, Unidentified
AQSVPWGISRVQAPAAHNRGLTGSGVKVAVLDTGISTHPDLNIRGGASFVPGEPSTQDGNGHGTHVAGTIAALNNSIGVLGVMPSAELYAVKVLGASGSGSVSSIAQGLEWAGNNGMHVANLSLGSPSPSATLEQAVNSATSRGVLVVAASGNSGAGSISYPARYANAMAVGATDQNNNRASFSQYGAGLDIVAPGVNVQSTYPGSTYASLNGTSMATPHVAGAAALVKQKNPSWSNVQIRNHLKNTATSLGSTNLYGSGLVNAEAATR

SEQ ID NO: 51901 - protein, 269 aa, Unidentified
AQSVPWGISRVQAPAAHNRGLTGSGVKVAVLDTGISTHPDLNIRGIASFVPGEPSTQDGNGHGTHVAGTIAALNNSIGVLGVAPSAELYAVKVLGASGSGSVSSIAQGLEWAGNNGMHVANLSLGSPSPSATLEQAVNSATSRGVLVVAASGNSGAGSISYPARYANAMAVGATDQNNNRASFSQYGAGLDIVAPGVNVQSTYPGSTYASLNGTSMATPHVAGAAALVKQKNPSWSNVQIRNHLKNTATSLGSTNLYGSGLVNAEAATR

SEQ ID NO: 51902 - protein, 269 aa, Unidentified
AQSVPWGISRVQAPAAHNRGLTGSGVKVAVLDTGISTHPDLNIRGGAPFVPGEPSTQDGNGHGTHVAGTIAALNNSIGVLGVAPSAELYAVKVLGASGSGSVSSIAQGLEWAGNNGMHVANLSLGSPSPSATLEQAVNSATSRGVLVVAASGNSGAGSISYPARYANAMAVGATDQNNNRASFSQYGAGLDIVAPGVNVQSTYPGSTYASLNGTSMATPHVAGAAALVKQKNPSWSNVQIRNHLKNTATSLGSTNLYGSGLVNAEAATR

SEQ ID NO: 51903 - protein, 269 aa, Unidentified
AQSVPWGISRVQAPAAHNRGLTGSGVKVAVLDTGISTHPDLNIRGGASFVPGEPSTADGNGHGTHVAGTIAALNNSIGVLGVAPSAELYAVKVLGASGSGSVSSIAQGLEWAGNNGMHVANLSLGSPSPSATLEQAVNSATSRGVLVVAASGNSGAGSISYPARYANAMAVGATDQNNNRASFSQYGAGLDIVAPGVNVQSTYPGSTYASLNGTSMATPHVAGAAALVKQKNPSWSNVQIRNHLKNTATSLGSTNLYGSGLVNAEAATR

SEQ ID NO: 51904 - protein, 269 aa, Bacillus sp.
AQSVPWGISRVQAPAAHNRGLTGSGVKVAVLDTGISTHPDLNIRGGASFVPGEPSTQDGNGHGTHVAGTIAALNNSIGVLGVAPNAELYAVKVLGASGSGSVSSIAQGLEWAGNNGMHVANLSLGSPSPSATLEQAVNSATSRGVLVVAASGNSGAGSISYPARYANAMAVGATDQNNNRASFSQYGAGLDIVAPGVNVQSTYPGSTYASLNGTSCATPHVAGAAALVKQKNPSWSNVQIRNHLKNTATSLGSTNLYGSGLVNAEAATR

SEQ ID NO: 51905 - protein, 269 aa, Unidentified
AQSVPWGISRVQAPAAHNRGLTGSGVKVAVLDTGISTHPDLNIRGGASFVPGEPSTQTGNGHGTHVAGTIAALNNSIGVLGVAPSAELYAVKVLGASGSGSVSSIAQGLEWAGNNGMHVANLSLGSPSPSATLEQAVNSATSRGVLVVAASGNSGAGSISYPARYANAMAVGATDQNNNRASFSQYGAGLDIVAPGVNVQSTYPGSTYASLNGTSMATPHVAGAAALVKQKNPSWSNVQIRNHLKNTATSLGSTNLYGSGLVNAEAATR

SEQ ID NO: 51906 - protein, 269 aa, Unidentified
AQSVPWGISRVQAPAAHNRGLTGSGVKVAVLDTGISTHPDLNIRGGASFVPGEPSTQDGNGHGTHVAGTIAALNNSIGVLGVAPSAELYAVKVLGASGSGSVSSIAQGLEWAGANGMHVANLSLGSPSPSATLEQAVNSATSRGVLVVAASGNSGAGSISYPARYANAMAVGATDQNNNRASFSQYGAGLDIVAPGVNVQSTYPGSTYASLNGTSMATPHVAGAAALVKQKNPSWSNVQIRNHLKNTATSLGSTNLYGSGLVNAEAATR

SEQ ID NO: 51907 - protein, 269 aa, Unidentified
AQSVPWGISRVQAPAAHNRGLTGSGVKVAVLDTGISTHPDLNIRGGASFVPGEPSTQDGNGHGTHVAGTIAALNNSIGVTGVAPSAELYAVKVLGASGSGSVSSIAQGLEWAGNNGMHVANLSLGSPSPSATLEQAVNSATSRGVLVVAASGNSGAGSISYPARYANAMAVGATDQNNNRASFSQYGAGLDIVAPGVNVQSTYPGSTYASLNGTSMATPHVAGAAALVKQKNPSWSNVQIRNHLKNTATSLGSTNLYGSGLVNAEAATR

SEQ ID NO: 51908 - protein, 269 aa, Unidentified
AQSVPWGISRVQAPAAHNRGLTGSGVKVAVLDTGISTLPDLNIRGGASFVPGEPSTQDGNGHGTHVAGTIAALNNSIGVLGVAPSAELYAVKVLGASGSGSVSSIAQGLEWAGNNGMHVANLSLGSPSPSATLEQAVNSATSRGVLVVAASGNSGAGSISYPARYANAMAVGATDQNNNRASFSQYGAGLDIVAPGVNVQSTYPGSTYASLNGTSMATPHVAGAAALVKQKNPSWSNVQIRNHLKNTATSLGSTNLYGSGLVNAEAATR

SEQ ID NO: 51909 - protein, 269 aa, Unidentified
AQSVPWGISRVQAPAAHNRGLTGSGVKVAVLDTGISTHPDLNIRGGASFYPGEPSTQDGNGHGTHVAGTIAALNNSIGVLGVAPSAELYAVKVLGASGSGSVSSIAQGLEWAGNNGMHVANLSLGSPSPSATLEQAVNSATSRGVLVVAASGNSGAGSISYPARYANAMAVGATDQNNNRASFSQYGAGLDIVAPGVNVQSTYPGSTYASLNGTSMATPHVAGAAALVKQKNPSWSNVQIRNHLKNTATSLGSTNLYGSGLVNAEAATR

SEQ ID NO: 51910 - protein, 269 aa, Bacillus sp.
AQSVPWGISRVQAPAAHNRGLTGSGVKVAVLDTGISTHPDLNIRGGASFVPGEPSTQDGNGHGTHVAGTIAALNNSIGVLGVAPSAELYAVKVLGASGSGSVSSIAQGLEWAGNRGMHVANLSLGSPSPSATLEQAVNSATSRGVLVVAASGNSGAGSISYPARYANAMAVGATDQNNNRASFSQYGAGLDIVAPGVNVQSTYPGSTYASLNGTSMATPHVAGAAALVKQKNPSWSNVQIRNHLKNTATSLGSTNLYGSGLVNAEAATR

SEQ ID NO: 51911 - protein, 269 aa, Bacillus sp.
AQSVPWGISRVQAPAAHNRGLTGSGVKVAVLDTGISTHPDLNIRGGASFVPGEPSTQDGNGHGTHVAGTIAALNNSIGVLGVAPNAELYAVKVLGASGSGSVSSIAQGLEWAGNNGMHVANLSLGSPSPSATLEQAVNSATSRGVLVVAASGNSGAGSISYPARYANAIAVGATDQNNNRASFSQYGAGLDIVAPGVNVQSTYPGSTYASLNGTSSATPHVAGAAALVKQKNPSWSNVQIRNHLKNTATSLGSTNLYGSGLVNAEAATR

SEQ ID NO: 51912 - protein, 269 aa, Unidentified
AQSVPWGISRVQAPAAHNRGLTGSGVKVAVLDTGISTHPDLNIRGGASFVPGEPSTQDGNGHGTHVAGTIAALNNSIGVLGVAPSAELYAVKVLGASGSGSVSSIAQGLEWAGNNGMHVANLSLGSPSKSATLEQAVNSATSRGVLVVAASGNSGAGSISYPARYANAMAVGATDQNNNRASFSQYGAGLDIVAPGVNVQSTYPGSTYASLNGTSMATPHVAGAAALVKQKNPSWSNVQIRNHLKNTATSLGSTNLYGSGLVNAEAATR

SEQ ID NO: 51913 - protein, 269 aa, Unidentified
AQSVPWGISRVQAPAAHNRGLTGSGVKVAVLDTGISTHPDLNIRGGASFVPGEPSTQDGNGHGTHVAGTIAALNNSWGVLGVAPSAELYAVKVLGASGSGSVSSIAQGLEWAGNNGMHVANLSLGSPSPSATLEQAVNSATSRGVLVVAASGNSGAGSISYPARYANAMAVGATDQNNNRASFSQYGAGLDIVAPGVNVQSTYPGSTYASLNGTSMATPHVAGAAALVKQKNPSWSNVQIRNHLKNTATSLGSTNLYGSGLVNAEAATR

SEQ ID NO: 51914 - protein, 269 aa, Unidentified
AQSVPWGISRVQAPAAHNRGLTGSGVKVAVLDTGISTHPDLNIRGGASFVPGEPSTQDGNGHGTHVAGTIAALNNSIGVLGVAPSAELYAVKVLGASGSGSVSSIAQGLEWAGNNGMHVANLSLGSPSPSATLEQAVNSATSRGVLVVAASGNSGAGSISYPARYANAMAVGATDQNNNRASFSQYGAGLDIVAPGVNVQSTYPGSTYASLNGTSMATPHVAGAAALVKQKNPSWSNVQIRNHLKRTATSLGSTNLYGSGLVNAEAATR

SEQ ID NO: 51915 - protein, 269 aa, Unidentified
AQSVPWGISRVQAPAAHNRGLTGSGVKVAVLDTGISTHPDLNIRGGASFVPGEPSTQDGNGHGTHVAGTIAALNNSIGVLGVAPSAELYAVKVLGAFGSGSVSSIAQGLEWAGNNGMHVANLSLGSPSPSATLEQAVNSATSRGVLVVAASGNSGAGSISYPARYANAMAVGATDQNNNRASFSQYGAGLDIVAPGVNVQSTYPGSTYASLNGTSMATPHVAGAAALVKQKNPSWSNVQIRNHLKNTATSLGSTNLYGSGLVNAEAATR

SEQ ID NO: 51916 - protein, 269 aa, Unidentified
AQSVPWGISRVQAPAAHNRGLTGSGVKVAVLDTGISTHPDLNIRGGASFVPGEPSTQDGNGHGTHVAGTIAALNNSIGVLGVAPSAELYAVKVLGASGSGSVSSIAQGLEWAGNNGMHVANLSLGSPSPSATLEQAVNSATSRGVLVVAASGNSGAGSISYPARYANAMAVGATDQNNNRASFSQYGAGLDIVAPGVNVQSTSPGSTYASLNGTSMATPHVAGAAALVKQKNPSWSNVQIRNHLKNTATSLGSTNLYGSGLVNAEAATR

SEQ ID NO: 51917 - protein, 269 aa, Unidentified
AQSVPWGISRVQAPAAHNRGLTGSGVKVAVLDTGISTHPDLNIRGGASFVPGEPSTQDGNGHGTHVAGTIAALNNSIGVLGVAPSAELYAVKVLGASGSESVSSIAQGLEWAGNNGMHVANLSLGSPSPSATLEQAVNSATSRGVLVVAASGNSGAGSISYPARYANAMAVGATDQNNNRASFSQYGAGLDIVAPGVNVQSTYPGSTYASLNGTSMATPHVAGAAALVKQKNPSWSNVQIRNHLKNTATSLGSTNLYGSGLVNAEAATR

SEQ ID NO: 51918 - protein, 269 aa, Unidentified
AQSVPWGISRVQAPAAHNRGLTGSGVKVAVLDTGISTHPDLNIRGGASFVPGEPSTQDGNGHGTHVAGTIAALNNSIGVLGVAPSAELYAVKVLGASGSGSVSSIAQGLEWAGNNGMHVANLSLGSPSPSATLEQAVNSATSRGVLVVAASGNSGAGSISYPARYANAMAVGATDQNNNRASFSQYGAGLDIVAPGVNVQSTYPGSTYASLNGTSMATPHVAGAAALVKQKNPSWLNVQIRNHLKNTATSLGSTNLYGSGLVNAEAATR

SEQ ID NO: 51919 - protein, 269 aa, Unidentified
AQSVPWGISRVQAPAAHNRGLTGSGVKVAVLDTGISTHPDLNIRGGASFVPGEPSTQDGNGHGTHVAGTIAALNNSIGVLGVAPSAELYAVKVLGASGSGSVSSIAQGLEWAGNNGMHVANLSLGSPSPSATLEQAVNSATSRGVLVVAASGNSGAGSISYPARYANAMAVGATDQNNNRASFSQYGAGLDIVAPGVNVQSTYPGSTYASLDGTSMATPHVAGAAALVKQKNPSWSNVQIRNHLKNTATSLGSTNLYGSGLVNAEAATR

SEQ ID NO: 51920 - protein, 269 aa, Unidentified
AQSVPWGISRVQAPAAHNRKLTGSGVKVAVLDTGISTHPDLNIRGGASFVPGEPSTQDGNGHGTHVAGTIAALNNSIGVLGVAPSAELYAVKVLGASGSGSVSSIAQGLEWAGNNGMHVANLSLGQPSPSATLEQAVNSATSRGVLVVAASGNSGAGSISYPARYANAMAVGATDQNNNRASFSQYGAGLDIVAPGVNVQSTYPGSTYASLNGTSSATPHVAGAAALVKQKNPSWSNVQIRNHLKNTATSLGSTNLYGSGLVNAEAATR

SEQ ID NO: 51921 - protein, 269 aa, Unidentified
AQSVPWGISRVQAPAAHNRGLTGSGVKVAVLDTGISTHPDLNIRGGASFVPGEPSTQDGNGHGTHVAGTIAALNNSIGVLGVAPSAELYAVKVLGASGSGSVSSIAQGLEWAGNNGMHVANLSLGSPSESATLEQAVNSATSRGVLVVAASGNSGAGSISYPARYANAMAVGATDQNNNRASFSQYGAGLDIVAPGVNVQSTYPGSTYASLNGTSMATPHVAGAAALVKQKNPSWSNVQIRNHLKNTATSLGSTNLYGSGLVNAEAATR

SEQ ID NO: 51922 - protein, 269 aa, Synthetic construct
AQSVPWGISRVQAPAAHNRGLTGSGVKVAVLDTGISTHPDLNIRGGASFVPGEPSTQDGNGHGTHVAGTIAALNNSIGVLGVAPSAELYAVKALGASGSGSVSSIAQGLEWAGNNGMHVANLSLGSPSPSATLEQAVNSATSRGVLVVAASGNSGAGSISYPARYANAMAVGATDQNNNRASFSQYGAGLDIVAPGVNVQSTYPGSTYASLNGTSMATPHVAGAAALVKQKNPSWSNVQIRNHLKNTATSLGSTNLYGSGLVNAEAATR

SEQ ID NO: 51923 - protein, 269 aa, Unidentified
AQSVPWGIERVQAPAAHNRGLTGSGVKVAVLDTGISTHPDLNIRGGASFVPGEPSTQDGNGHGTHVAGTIAALNNSIGVLGVAPSAELYAVKVLGASGSGSVSSIAQGLEWAGNNGMHVANLSLGSPSPSATLEQAVNSATSRGVLVVAASGNSGAGSISYPARYANAMAVGATDQNNNRASFSQYGAGLDIVAPGVNVQSTYPGSTYASLNGTSMATPHVAGAAALVKQKNPSWSNVQIRNHLKNTATSLGSTNLYGSGLVNAEAATR

SEQ ID NO: 51924 - protein, 269 aa, Unidentified
AQSVPWGISRVQAPAAHNRGLTGSGVKVAVLDTGISTHPDLNIRGGASFVPGEPSTQDGNGHGTHVAGTIAALNNSIGVLGVAPSAELTAVKVLGASGSGSVSSIAQGLEWAGNNGMHVANLSLGSPSPSATLEQAVNSATSRGVLVVAASGNSGAGSISYPARYANAMAVGATDQNNNRASFSQYGAGLDIVAPGVNVQSTYPGSTYASLNGTSMATPHVAGAAALVKQKNPSWSNVQIRNHLKNTATSLGSTNLYGSGLVNAEAATR

SEQ ID NO: 51925 - protein, 269 aa, Unidentified
AQSVPWGISRVQAPAAHNRGLTGSGVKVAVLDTGISTHPDLNIRGGASFVPGEPSTQDGNGHGTHVAGTIAALNNSIGVLGVAPSAELRAVKVLGASGSGSVSSIAQGLEWAGNNGMHVANLSLGSPSPSATLEQAVNSATSRGVLVVAASGNSGAGSISYPARYANAMAVGATDQNNNRASFSQYGAGLDIVAPGVNVQSTYPGSTYASLNGTSMATPHVAGAAALVKQKNPSWSNVQIRNHLKNTATSLGSTNLYGSGLVNAEAATR

SEQ ID NO: 51926 - protein, 269 aa, Unidentified
AQSVPWGISRVQAPAAHNRGRTGSGVKVAVLDTGISTHPDLNIRGGASFVPGEPSTQDGNGHGTHVAGTIAALNNSIGVLGVAPSAELYAVKVLGASGSGSVSSIAQGLEWAGNNGMHVANLSLGSPSPSATLEQAVNSATSRGVLVVAASGNSGAGSISYPARYANAMAVGATDQNNNRASFSQYGAGLDIVAPGVNVQSTYPGSTYASLNGTSMATPHVAGAAALVKQKNPSWSNVQIRNHLKNTATSLGSTNLYGSGLVNAEAATR

SEQ ID NO: 51927 - protein, 269 aa, Unidentified
AQSVPWGISRVQAPAAHNRGLTGSGVKVAVLDTGISTHPDLNIRGGGSFVPGEPSTQDGNGHGTHVAGTIAALNNSIGVLGVAPSAELYAVKVLGASGSGSVSSIAQGLEWAGNNGMHVANLSLGSPSPSATLEQAVNSATSRGVLVVAASGNSGAGSISYPARYANAMAVGATDQNNNRASFSQYGAGLDIVAPGVNVQSTYPGSTYASLNGTSMATPHVAGAAALVKQKNPSWSNVQIRNHLKNTATSLGSTNLYGSGLVNAEAATR

SEQ ID NO: 51928 - protein, 269 aa, Unidentified
AQSVPWGISRVQAPAAHNRGLTGSGVKVAVLDTGISTQPDLNIRGGASFVPGEPSTQDGNGHGTHVAGTIAALNNSIGVLGVAPSAELYAVKVLGASGSGSVSSIAQGLEWAGNNGMHVANLSLGSPSPSATLEQAVNSATSRGVLVVAASGNSGAGSISYPARYANAMAVGATDQNNNRASFSQYGAGLDIVAPGVNVQSTYPGSTYASLNGTSMATPHVAGAAALVKQKNPSWSNVQIRNHLKNTATSLGSTNLYGSGLVNAEAATR

SEQ ID NO: 51929 - protein, 269 aa, Unidentified
AQSVPWGISRVQAPAAHNRGLTGSGVKVAVLDTGISTHPDLNIRGGASFVPGEPSTQDGNGHGTHVAGTIAALNNSIGVLGVAPSAELYAVKVLGASGSGSVSSIAQGLEWAGNNGMHVANLSLGSPSPSATLEQAVNSATSRGVLVVAASGNSGAGSISYPARYANAMAVGATDQNNNRASFSQYGAGLDIVAPGVNVQSTYPGSTYASLNGTSMATPHVAGASALVKQKNPSWSNVQIRNHLKNTATSLGSTNLYGSGLVNAEAATR

SEQ ID NO: 51930 - protein, 269 aa, Unidentified
AQSVPWGISRVQAPAAHNRGLTGSGVKVAVLDTGISTHPDLNIRGGASFVPGEPSTQDGNGHGTHVAGTIAALNNSIGVLGVAPSAELYAVKVLGASGSGSLSSIAQGLEWAGNNGMHVANLSLGSPSPSATLEQAVNSATSRGVLVVAASGNSGAGSISYPARYANAMAVGATDQNNNRASFSQYGAGLDIVAPGVNVQSTYPGSTYASLNGTSMATPHVAGAAALVKQKNPSWSNVQIRNHLKNTATSLGSTNLYGSGLVNAEAATR

SEQ ID NO: 51931 - protein, 269 aa, Unidentified
AQSVPWGISRVQAPAAHNRKLTGSGVKVAVLDTGISTHPDLNIRGGASFVPGEPSTQDGEGHGTHVAGTIAALNNSIGVLGVAPSAELYAVKVLGASGSGSVSSIAQGLEWAGNNGMHVANLSLGSPSPSATLEQAVNSATSRGVLVVAASGNSGAGSISYPARYANAMAVGATDQNNNRASFSQYGAGLDIVAPGVNVQSTYPGSTYASLNGTSSATPHVAGAAALVKQKNPSWSNVQIRNHLKNTATSLGSTNLYGSGLVNAEAATR

SEQ ID NO: 51932 - protein, 269 aa, Bacillus lentus
AQSVPWGISRVQAPAAHNRGLTGSGVKVAVLDTGISTHPDLNIRGGASFVPGEPSTQDGNGHGTHVAGTIAALNNSIGVLGVAPSAELYAVKVLGASGSGSVSSIAQGLEWAGNNGMHVANLSLGSPSPSATLEQAVNSATSRGVLVVAASGNSGAGSISYPARYANAMAVGATDQNNNRASFSQYGAGLDIVAPGVNVQSTYPGSTYASLNGTSMATPHVAGAAALVKQKNPSWSNVQIRDHLKNTATSLGSTNLYGSGLVNAEAATR

SEQ ID NO: 51933 - protein, 269 aa, Unidentified
AQSVPWGISRVQAPAAHNRGLTGSGVKVAVLDTGISTHPDLNIRGGASFVPGEPSTQDGNGHGTHVAGTIAALNNSIGVLGVAPSAELYAVKVLGASGSNSVSSIAQGLEWAGNNGMHVANLSLGSPSPSATLEQAVNSATSRGVLVVAASGNSGAGSISYPARYANAMAVGATDQNNNRASFSQYGAGLDIVAPGVNVQSTYPGSTYASLNGTSMATPHVAGAAALVKQKNPSWSNVQIRNHLKNTATSLGSTNLYGSGLVNAEAATR

SEQ ID NO: 51934 - protein, 269 aa, Unidentified
AQSVPWGISRVQAPAAHNRGLTGSGVKVAVLDTGISTHPDLNIRGGASFVPGEPSTQDGNGHGTHVAGTIAALNNSIGVLGVAPSAELYAVKVLGASGSGSVSSIAQGLEWAGNNGMHVANLSLGSPSPSATLEQAVNSATSRGVLVVAASGNSGAGSISYPARYANAMAVGATDQNNNRASFSQYGFGLDIVAPGVNVQSTYPGSTYASLNGTSMATPHVAGAAALVKQKNPSWSNVQIRNHLKNTATSLGSTNLYGSGLVNAEAATR

SEQ ID NO: 51935 - protein, 269 aa, Unidentified
AQSVPWGISRVQAPAAHNRGLTGSGQKVAVLDTGISTHPDLNIRGGASFVPGEPSTQDGNGHGTHVAGTIAALNNSIGVLGVAPSAELYAVKVLGASGSGSVSSIAQGLEWAGNNGMHVANLSLGSPSPSATLEQAVNSATSRGVLVVAASGNSGAGSISYPARYANAMAVGATDQNNNRASFSQYGAGLDIVAPGVNVQSTYPGSTYASLNGTSMATPHVAGAAALVKQKNPSWSNVQIRNHLKNTATSLGSTNLYGSGLVNAEAATR

SEQ ID NO: 51936 - protein, 269 aa, Unidentified
AQSVPWGISRVQAPAAHNRGLTGSGVKVAVLDTGISTHPDLNIRGGASFVPGEPSTQDGNGHGTHVAGTIAALNNSIGVLGVAPSAELYAVKVLGASGSGSVSSIAQGLEWAGNNGMHVANLSLGSPSPSATLEQAVNSATSRGVLVVAASGNSGAGSISYPARYANAMAVGATDQNNNRASFSQYGAGLDIVAPGVNVQSTYPGSTYASLNGTSMATPHVAGAAALVKQKNPSWKNVQIRNHLKNTATSLGSTNLYGSGLVNAEAATR

SEQ ID NO: 51937 - protein, 269 aa, Unidentified
AQSCPWGISRVQAPAAHNRGLTGSGVKVAVLDTGISTHPDLNIRGGASFVPGEPSTQDGNGHGTHVAGTIAALNNSIGVLGVAPSAELYAVKVLGASGSGSVSSIAQGLEWAGNNGMHVANLSLGSPSPSATLEQAVNSATSRGVLVVAASGNSGAGSISYPARYANAMAVGATDQNNNRASFSQYGAGLDIVAPGVNVQSTYPGSTYASLNGTSMATPHVAGAAALVKQKNPSWSNVQIRNHLKNTATSLGSTNLYGSGLVNAEAATR

SEQ ID NO: 51938 - protein, 269 aa, Unidentified
AQSVPWGISRVQAPAAHNRGLTASGVKVAVLDTGISTHPDLNIRGGASFVPGEPSTQDGNGHGTHVAGTIAALNNSIGVLGVAPSAELYAVKVLGASGSGSVSSIAQGLEWAGNNGMHVANLSLGSPSPSATLEQAVNSATSRGVLVVAASGNSGAGSISYPARYANAMAVGATDQNNNRASFSQYGAGLDIVAPGVNVQSTYPGSTYASLNGTSMATPHVAGAAALVKQKNPSWSNVQIRNHLKNTATSLGSTNLYGSGLVNAEAATR

SEQ ID NO: 51939 - protein, 269 aa, Unidentified
AQSVPWGISRVQAPAAHNRGLTGSGVKVAVLDTGISTHPDLNIRGGASFVPGEPHTQDGNGHGTHVAGTIAALNNSIGVLGVAPSAELYAVKVLGASGSGSVSSIAQGLEWAGNNGMHVANLSLGSPSPSATLEQAVNSATSRGVLVVAASGNSGAGSISYPARYANAMAVGATDQNNNRASFSQYGAGLDIVAPGVNVQSTYPGSTYASLNGTSMATPHVAGAAALVKQKNPSWSNVQIRNHLKNTATSLGSTNLYGSGLVNAEAATR

SEQ ID NO: 51940 - protein, 269 aa, Unidentified
AQSVPWGISRVQAPAAHNRGLTGSGVKVAVLDTGISTHPDLNIRGGASFVPGEPSTQDGNGHGTHVAGTIAALNNSIGVLGVAPSAELYAVKVLGASGSGSVSSIAQGLEWAGNNGMHVANLSLGSPSPSATLEQAVNSATSRGVLVVAASGNSGAGSISYPARYANAMAVGATDQNNNRASFSQYGAGLDIVAPGVNVQSTYPGSTYASQNGTSMATPHVAGAAALVKQKNPSWSNVQIRNHLKNTATSLGSTNLYGSGLVNAEAATR

SEQ ID NO: 51941 - protein, 269 aa, Unidentified
AQSVPWGISRVQAPAAHNRGLTGSGVKVAVLDTGISTHNDLNIRGGASFVPGEPSTQDGNGHGTHVAGTIAALNNSIGVLGVAPSAELYAVKVLGASGSGSVSSIAQGLEWAGNNGMHVANLSLGSPSPSATLEQAVNSATSRGVLVVAASGNSGAGSISYPARYANAMAVGATDQNNNRASFSQYGAGLDIVAPGVNVQSTYPGSTYASLNGTSMATPHVAGAAALVKQKNPSWSNVQIRNHLKNTATSLGSTNLYGSGLVNAEAATR

SEQ ID NO: 51942 - protein, 269 aa, Unidentified
AQSVPWGISRVQAPAAHNRGLTGSGVKVAVLDTGISTHPDLNIRGGASFVPGEPSTQDGNGHGTHVAGGIAALNNSIGVLGVAPSAELYAVKVLGASGSGSVSSIAQGLEWAGNNGMHVANLSLGSPSPSATLEQAVNSATSRGVLVVAASGNSGAGSISYPARYANAMAVGATDQNNNRASFSQYGAGLDIVAPGVNVQSTYPGSTYASLNGTSMATPHVAGAAALVKQKNPSWSNVQIRNHLKNTATSLGSTNLYGSGLVNAEAATR

SEQ ID NO: 51943 - protein, 269 aa, Unidentified
AQSVPWGISRVQAPAAHNRGLTGSGVKVAVLDTGISTHPDLNIRGGASFVPGEPSTQDGNGHGTHVAGTIAALNNSIGVLGVAPSAELYAVKVLGASGSGSVSSIAQGLEWAGNNGMHVANLSLGSPSPSATLEQAVNSATSRGVLVVAASGNSGAGSISYPARYANAMAVGATTQNNNRASFSQYGAGLDIVAPGVNVQSTYPGSTYASLNGTSMATPHVAGAAALVKQKNPSWSNVQIRNHLKNTATSLGSTNLYGSGLVNAEAATR

SEQ ID NO: 51944 - protein, 269 aa, Unidentified
AQSVPWGISRVQAPAAHNRGLTGSGVKVAVLDTGISTHPDLNIRGGASFVPGEPSTQDGNGHGTHVAGTIAALNNSIGVLGVAPSAELYAVKVLGASGSGSVSSIAQGVEWAGNNGMHVANLSLGSPSPSATLEQAVNSATSRGVLVVAASGNSGAGSISYPARYANAMAVGATDQNNNRASFSQYGAGLDIVAPGVNVQSTYPGSTYASLNGTSMATPHVAGAAALVKQKNPSWSNVQIRNHLKNTATSLGSTNLYGSGLVNAEAATR

SEQ ID NO: 51945 - protein, 269 aa, Unidentified
AQSVPWGISRVQAPAAHNRGLTGSGVKVAVLDTGISTHPDLNIRGGASFVPGEPSTQDGNGHGTHVAGTIAALNNSIGVLGVAPSAELYAVKVLGASGSGSVSSIAQGLEWAGNNGMHVANLSLGSPSPNATLEQAVNSATSRGVLVVAASGNSGAGSISYPARYANAMAVGATDQNNNRASFSQYGAGLDIVAPGVNVQSTYPGSTYASLNGTSMATPHVAGAAALVKQKNPSWSNVQIRNHLKNTATSLGSTNLYGSGLVNAEAATR

SEQ ID NO: 51946 - protein, 269 aa, Unidentified
AQSVPWGISRVQAPAAHNRGLTGSGVKVAVLDTGISTHPDLNIRGGASFVPGEPSTQDGNGHGTHVAGTIAALNNSIGVLGVAPSAELYAVKVLGASGSGSVSSIAQGLEWAGNNGMHVANLSLGSPSPSATLEQAVNSATSRGVLVVAASGNSGAGSISYPARYANAMAVGATDQNNNRASFSQYGAGLDIVAPGVNVQSTYPGSTYASLNGTSMATPHVAGAAALVKQKNPSWSNVQIRNHLKNTATSLGSTNLYGSGLVNALAATR

SEQ ID NO: 51947 - protein, 269 aa, Unidentified
AQSVPWGISRVQAPAAHNRGLTGSGVKVAVLDTGISTHPDLNIRGGASFVPGEPSTQDGNGHGTHVAGTIAALNNSIGVLGVAPSAELYAVKVLGASGSHSVSSIAQGLEWAGNNGMHVANLSLGSPSPSATLEQAVNSATSRGVLVVAASGNSGAGSISYPARYANAMAVGATDQNNNRASFSQYGAGLDIVAPGVNVQSTYPGSTYASLNGTSMATPHVAGAAALVKQKNPSWSNVQIRNHLKNTATSLGSTNLYGSGLVNAEAATR

SEQ ID NO: 51948 - protein, 269 aa, Unidentified
AQSVPWGISRVQAPAAHNRGLTGSGVKVAVLDTGISTHPDLNIRGGASFVPGEPSTQDGNGHGTHVAGTIAALNNSIGVLGVAPSAELPAVKVLGASGSGSVSSIAQGLEWAGNNGMHVANLSLGSPSPSATLEQAVNSATSRGVLVVAASGNSGAGSISYPARYANAMAVGATDQNNNRASFSQYGAGLDIVAPGVNVQSTYPGSTYASLNGTSMATPHVAGAAALVKQKNPSWSNVQIRNHLKNTATSLGSTNLYGSGLVNAEAATR

SEQ ID NO: 51949 - protein, 269 aa, Unidentified
AQSVPWGISRVQAPAAHNRGLTGSGVKVAVLDTGISTHPDLNIRGGASFVPGEPSTQDGNGHGTHVAGTIAALNNSIGVLGVAPSAELYAVKVLGASGSGSVSSIAQGLEWAGNNGMHVANLSLGSPSPWATLEQAVNSATSRGVLVVAASGNSGAGSISYPARYANAMAVGATDQNNNRASFSQYGAGLDIVAPGVNVQSTYPGSTYASLNGTSMATPHVAGAAALVKQKNPSWSNVQIRNHLKNTATSLGSTNLYGSGLVNAEAATR

SEQ ID NO: 51950 - protein, 269 aa, Unidentified
AQSVPWGISRVQAPAAHNRGLTGSGVKVAVLDTGISTHPDLNIRGGASFVPGEPSTQDGQGHGTHVAGTIAALNNSIGVLGVAPSAELYAVKVLGASGSGSVSSIAQGLEWAGNNGMHVANLSLGSPSPSATLEQAVNSATSRGVLVVAASGNSGAGSISYPARYANAMAVGATDQNNNRASFSQYGAGLDIVAPGVNVQSTYPGSTYASLNGTSMATPHVAGAAALVKQKNPSWSNVQIRNHLKNTATSLGSTNLYGSGLVNAEAATR

SEQ ID NO: 51951 - protein, 269 aa, Unidentified
AQSVPWGISRVQAPAAHNRGLTGSGVKVAVLDTGISTHPDLNIRGGASFVPGEPSTQDGNGHGTHVAGTILALNNSIGVLGVAPSAELYAVKVLGASGSGSVSSIAQGLEWAGNNGMHVANLSLGSPSPSATLEQAVNSATSRGVLVVAASGNSGAGSISYPARYANAMAVGATDQNNNRASFSQYGAGLDIVAPGVNVQSTYPGSTYASLNGTSMATPHVAGAAALVKQKNPSWSNVQIRNHLKNTATSLGSTNLYGSGLVNAEAATR

SEQ ID NO: 51952 - protein, 269 aa, Unidentified
AQSVPWGISRVQANAAHNRGLTGSGVKVAVLDTGISTHPDLNIRGGASFVPGEPSTQDGNGHGTHVAGTIAALNNSIGVLGVAPSAELYAVKVLGASGSGSVSSIAQGLEWAGNNGMHVANLSLGSPSPSATLEQAVNSATSRGVLVVAASGNSGAGSISYPARYANAMAVGATDQNNNRASFSQYGAGLDIVAPGVNVQSTYPGSTYASLNGTSMATPHVAGAAALVKQKNPSWSNVQIRNHLKNTATSLGSTNLYGSGLVNAEAATR

SEQ ID NO: 51953 - protein, 269 aa, Unidentified
AQSVPWGISRVQAPAAHNRGLTGSGVKVAVLDTGISTHPDLNIRGGASFVPGEPSTQDGNGHGTHVAGTIAALNNSIGVLGVAPSAELYAVKVLGASGSGSVSSIAQGLEWAGNNGMHVANLSLGSPSPSATLEQAVNSATSRGVLVVAASGNSGAGSISYPARYANAMAVGATDQNNNRASFSQYGAGLDIVAPGVNVQSTYPGSTYASLNGTSMATPHVAGAAALVKQKNRSWSNVQIRNHLKNTATSLGSTNLYGSGLVNAEAATR

SEQ ID NO: 51954 - protein, 269 aa, Unidentified
AQSVPWGISRVQAPAAHNRGLTGSGVKVAVLDTGISTHPDLNIRGGASFVPGEPSTQDGNGHGTHVAGTIAALNNSIGVLGVAPSAELYAVKVLGASGSGSVSSIAQGLEWAGNNGMHVANLSLGSPSPSATLEQAVNSATSRGVLVVAASGNSGAGSISYPARYANAMAVGATDQNNNRASFSQYGAGLDIVAPGVNVQSTYPGSTYASLNGTSMATPHVAGAAALFKQKNPSWSNVQIRNHLKNTATSLGSTNLYGSGLVNAEAATR

SEQ ID NO: 51955 - protein, 269 aa, Unidentified
AQSVPWGISRVQAPAAHNRGLTGSGVKVAVLDTGISTHPDLNIRGGASFVPGEPSTQDGNGHGTHVAGTIAALNNSIGVLGVAPSAELYAVKVLGASGSGSVSSIAQGLEWAGNNGMHVANLSLGSPSPSATLEQAVNSATSRGVLHVAASGNSGAGSISYPARYANAMAVGATDQNNNRASFSQYGAGLDIVAPGVNVQSTYPGSTYASLNGTSMATPHVAGAAALVKQKNPSWSNVQIRNHLKNTATSLGSTNLYGSGLVNAEAATR

SEQ ID NO: 51956 - protein, 269 aa, Unidentified
AQSVPWGISRVQAPAAHNRGLTGSGVKVAVLDTGISTHPDLNIRGGASFVPGEPSTQDGNGHGTHVAGTIAALNNSIGVLGVAPSAELYAVKVLGASGSGSVSSIAQGLEWAGNNGMHVANLSLGSPSPSATLEQAVNSATSRGVLVVAASGNSGAGSISYPARYANAMAVGATDQNNNRASFSQYGAGLDIVAPGVNVQSTYPGSTYASLNGTSMATPHVAGAAALVKQKNPSWSNVQIRNHLKNTATSLGWTNLYGSGLVNAEAATR

SEQ ID NO: 51957 - protein, 269 aa, Unidentified
AQSVPWGISRVQAPAAHNRGLTGSGVKVAVLDTGISTHPDLNIRGGASFVPGEPSTQDGNGHGTHVAGTIAALNNSIGVVGVAPSAELYAVKVLGASGSGSVSSIAQGLEWAGNNGMHVANLSLGSPSPSATLEQAVNSATSRGVLVVAASGNSGAGSISYPARYANAMAVGATDQNNNRASFSQYGAGLDIVAPGVNVQSTYPGSTYASLNGTSMATPHVAGAAALVKQKNPSWSNVQIRNHLKNTATSLGSTNLYGSGLVNAEAATR

SEQ ID NO: 51958 - protein, 269 aa, Unidentified
AQSVPWGISRVQAPAAHNRGLTGSGVKVAVLDTGISTHPDLNIRGGASFVPGEPSTQDGNGHGTHVAGTIAALNNSIGVLGLAPSAELYAVKVLGASGSGSVSSIAQGLEWAGNNGMHVANLSLGSPSPSATLEQAVNSATSRGVLVVAASGNSGAGSISYPARYANAMAVGATDQNNNRASFSQYGAGLDIVAPGVNVQSTYPGSTYASLNGTSMATPHVAGAAALVKQKNPSWSNVQIRNHLKNTATSLGSTNLYGSGLVNAEAATR

SEQ ID NO: 51959 - protein, 269 aa, Unidentified
AQSVPWGISRVQAPAAHNRGLTGSGVKVAVLDTGISTHPDLNIRGGASFVPGEPSTQDGNGHGTHVAGTIAALNNSIGVLGVAPSAELYAVKVLGASGSGSVSSIAQGLEWAGNNGMHVANLSLGSPSPSATLEQAVNSATSRGVLVVAASGNSGASSISYPARYANAMAVGATDQNNNRASFSQYGAGLDIVAPGVNVQSTYPGSTYASLNGTSMATPHVAGAAALVKQKNPSWSNVQIRNHLKNTATSLGSTNLYGSGLVNAEAATR

SEQ ID NO: 51960 - protein, 269 aa, Unidentified
AQSVPWGISRVQAPAAHNRGLTGSGWKVAVLDTGISTHPDLNIRGGASFVPGEPSTQDGNGHGTHVAGTIAALNNSIGVLGVAPSAELYAVKVLGASGSGSVSSIAQGLEWAGNNGMHVANLSLGSPSPSATLEQAVNSATSRGVLVVAASGNSGAGSISYPARYANAMAVGATDQNNNRASFSQYGAGLDIVAPGVNVQSTYPGSTYASLNGTSMATPHVAGAAALVKQKNPSWSNVQIRNHLKNTATSLGSTNLYGSGLVNAEAATR

SEQ ID NO: 51961 - protein, 269 aa, Unidentified
AQSVPWGISRVQAPAAHNRGLTGSGVKVAVLDTGISTHPDLAIRGGASFVPGEPSTQDGNGHGTHVAGTIAALNNSIGVLGVAPSAELYAVKVLGASGSGSVSSIAQGLEWAGNNGMHVANLSLGSPSPSATLEQAVNSATSRGVLVVAASGNSGAGSISYPARYANAMAVGATDQNNNRASFSQYGAGLDIVAPGVNVQSTYPGSTYASLNGTSMATPHVAGAAALVKQKNPSWSNVQIRNHLKNTATSLGSTNLYGSGLVNAEAATR

SEQ ID NO: 51962 - protein, 269 aa, Unidentified
AQSVPWGISRVQAPAAHNRGLTGSGVKVAVLDTGISTHPDLNIRGGASFVPGEPSTQDGNGHGTHVAGTIAALNNSIGVLGVAPSAELYAVKVLGASGSGSVSSIAQGLEWAGNNGMHVANLSLGQPSPSATLEQAVNSATSRGVLVVAASGNSGAGSISYPARYANAMAVGATDQNNNRASFSQYGAGLDIVAPGVNVQSTYPGSTYASLNGTSMATPHVAGAAALVKQKNPSWSNVQIRNHLKNTATSLGSTNLYGSGLVNAEAATR

SEQ ID NO: 51963 - protein, 269 aa, Unidentified
AQSVPWGISRVQAPAAHNRGLTGSGVKVAVLDTGISTHPDLNIRGGASFVPGEPSTQDGNGHGTHVAGTIAALNNSIGVLGVAPSAELYAVKVLGASGEGSVSSIAQGLEWAGNNGMHVANLSLGSPSPSATLEQAVNSATSRGVLVVAASGNSGAGSISYPARYANAMAVGATDQNNNRASFSQYGAGLDIVAPGVNVQSTYPGSTYASLNGTSMATPHVAGAAALVKQKNPSWSNVQIRNHLKNTATSLGSTNLYGSGLVNAEAATR

SEQ ID NO: 51964 - protein, 269 aa, Unidentified
AQSVPWGISRVQAPAAHNRGLTGSGVKVAVLDTGISTHPDLNIRGGASFVPGEPSTQDGNGHGTHVAGTIAALNNSIGVLGVAPSAELYAVKVLGASGSGRVSSIAQGLEWAGNNGMHVANLSLGSPSPSATLEQAVNSATSRGVLVVAASGNSGAGSISYPARYANAMAVGATDQNNNRASFSQYGAGLDIVAPGVNVQSTYPGSTYASLNGTSMATPHVAGAAALVKQKNPSWSNVQIRNHLKNTATSLGSTNLYGSGLVNAEAATR

SEQ ID NO: 51965 - protein, 269 aa, Unidentified
AQSVPWGISRVQAPAAHNRGLAGSGVKVAVLDTGISTHPDLNIRGGASFVPGEPSTQDGNGHGTHVAGTIAALNNSIGVLGVAPSAELYAVKVLGASGSGSVSSIAQGLEWAGNNGMHVANLSLGSPSPSATLEQAVNSATSRGVLVVAASGNSGAGSISYPARYANAMAVGATDQNNNRASFSQYGAGLDIVAPGVNVQSTYPGSTYASLNGTSMATPHVAGAAALVKQKNPSWSNVQIRNHLKNTATSLGSTNLYGSGLVNAEAATR

SEQ ID NO: 51966 - protein, 269 aa, Unidentified
AQSVPWGISRVQAPAAHNRGLTGSGVKVAVLDTGISTHPDLNIRGGASFVPGEPSTQDGNGHGTHVAGTIAALNNSIGVLGVAPSAELYAVKVLGASGSGSVSSIAQGLEWAGNNGMHVANLSLGSPSPSATLEQAVNSATSRGVLVVAASGNSGAGSISYPARYANAMAVGATDQNNNRASFSQYGAGLDIVAPGVNVQSTYPGSTYASLNGTSMATPHVAGAAALVKQKNPSWSNVQIRNHLKNTATSLGSTNLYGSGLVNCEAATR

SEQ ID NO: 51967 - protein, 271 aa, Unidentified
AQSVPWGISRVQAPAAHNRGLTGSGVKVAVLDTGISTHPDLNIRGGASFVPGEPSTQDGNGHGTHVAGTIAALNNSIGVLGVAPSAELYAVKVLQATXSGSGSVSSIAQGLEWAGNNGMHVANLSLGSPSPSATLEQAVNSATSRGVLVVAASGNSGAGSISYPARYANAMAVGATDQNNNRASFSQYGAGLDIVAPGVNVQSTYPGSTYASLNGTSMATPHVAGAAALVKQKNPSWSNVQIRNHLKNTATSLGSTNLYGSGLVNAEAATR

SEQ ID NO: 51968 - protein, 269 aa, Unidentified
AQSVPWGISRVQAPAAHNRGLTGSGVKVAVLDTGISTHPDLNIRGGASFVPGEPSTQDGNGHGTHVTGTIAALNNSIGVLGVAPSAELYAVKVLGASGSGSVSSIAQGLEWAGNNGMHVANLSLGSPSPSATLEQAVNSATSRGVLVVAASGNSGAGSISYPARYANAMAVGATDQNNNRASFSQYGAGLDIVAPGVNVQSTYPGSTYASLNGTSMATPHVAGAAALVKQKNPSWSNVQIRNHLKNTATSLGSTNLYGSGLVNAEAATR

SEQ ID NO: 51969 - protein, 269 aa, Unidentified
AQSVPWGISRVQAPAAHNRGLTGSGVKVAVLDTGISTHPDLNIRGGASFVPGEPSTQDGNGHGTHVAGTIAALNNSIGVLGVAPSAELYAVKVLGASGSGSVSSIAQGLEWAGNNGMHVANLSLGSPSPQATLEQAVNSATSRGVLVVAASGNSGAGSISYPARYANAMAVGATDQNNNRASFSQYGAGLDIVAPGVNVQSTYPGSTYASLNGTSMATPHVAGAAALVKQKNPSWSNVQIRNHLKNTATSLGSTNLYGSGLVNAEAATR

SEQ ID NO: 51970 - protein, 269 aa, Unidentified
AQSVPWGISRVQAPAAHNRGLTGSGVKVAVLDTGISTHPDLNIRGGASFVPGEPGTQDGNGHGTHVAGTIAALNNSIGVLGVAPSAELYAVKVLGASGSGSVSSIAQGLEWAGNNGMHVANLSLGSPSPSATLEQAVNSATSRGVLVVAASGNSGAGSISYPARYANAMAVGATDQNNNRASFSQYGAGLDIVAPGVNVQSTYPGSTYASLNGTSMATPHVAGAAALVKQKNPSWSNVQIRNHLKNTATSLGSTNLYGSGLVNAEAATR

SEQ ID NO: 51971 - protein, 269 aa, Unidentified
AQSVPWGISRVQAPAAHNRGLTGSGVKVAVLDTGISTHPDLNIRGGASFVPGEPSTQDGNGHGTHVAGTIAALNNSIGVLGVAPSAELYAVKVLGASGSGSVSSIAQGLEWAGNNGMHVANLSLGSPSPSATLEQAVNSATSRGVLVVAASGNSGAGSISYPARYANAMAVGATDQNNNRASFSQYGAGLDIVAPGVNVQSTYPGSTYASLNGTSMATPHVAGAAACVKQKNPSWSNVQIRNHLKNTATSLGSTNLYGSGLVNAEAATR

SEQ ID NO: 51972 - protein, 269 aa, Unidentified
AQSVPWGISRVQAPAAHNRGLTGSGVKVAVLDTGISAHPDLNIRGGASFVPGEPSTQDGNGHGTHVAGTIAALNNSIGVLGVAPSAELYAVKVLGASGSGSVSSIAQGLEWAGNNGMHVANLSLGSPSPSATLEQAVNSATSRGVLVVAASGNSGAGSISYPARYANAMAVGATDQNNNRASFSQYGAGLDIVAPGVNVQSTYPGSTYASLNGTSMATPHVAGAAALVKQKNPSWSNVQIRNHLKNTATSLGSTNLYGSGLVNAEAATR

SEQ ID NO: 51973 - protein, 269 aa, Unidentified
AQSVPWGISRVQAPAAHNRGLTGSGVKVAVLDTGISTHPDLNIRGGASFVPGEPSTQDGNGHGTHVAGTIAALNNSIGVLGVAPSAELYAVKVLGASGSGSVSSIAQGLEWAGNNGMHVANLSLGSPSPSATLEQAVNSATSRGVLVVAASGNSGAGSISYPARYANAMAVGATDQNNNRASFSQYGAGLDIVAPGVNVQSTYPGSTYASLNGTSMATPHVAGAAALVKQKNPSWSNVQIRNHLKNTATSLGSTNLYGSGLVNARAATR

SEQ ID NO: 51974 - protein, 269 aa, Bacillus sp.
AQSVPWGISRVQAPAAHNRGLTGSGVKVAVLDTGISTHPDLNIRGGASFVPGEPSTQDGNGHGTHVAGTIAALRNSIGVLGVAPSAELYAVKVLGASGSGSVSSIAQGLEWAGNNGMHVANLSLGSPSPSATLEQAVNSATSRGVLVVAASGNSGAGSISYPARYANAMAVGATDQNNNRASFSQYGAGLDIVAPGVNVQSTYPGSTYASLNGTSMATPHVAGAAALVKQKNPSWSNVQIRNHLKNTATSLGSTNLYGSGLVNAEAATR

SEQ ID NO: 51975 - protein, 269 aa, Unidentified
AQSVPWGISRVQAPAAHNRGLTGSGVKVAVLDTGISTHPDLNIRGGASFVPGEPSTQDGNGHGTHVAGTIAALNNSIGVLGVAPSAELYAVKVLGATGSGSVSSIAQGLEWAGNNGMHVANLSLGSPSPSATLEQAVNSATSRGVLVVAASGNSGAGSISYPARYANAMAVGATDQNNNRASFSQYGAGLDIVAPGVNVQSTYPGSTYASLNGTSMATPHVAGAAALVKQKNPSWSNVQIRNHLKNTATSLGSTNLYGSGLVNAEAATR

SEQ ID NO: 51976 - protein, 269 aa, Unidentified
AQSVPYGISRVQAPAAHNRGLTGSGVKVAVLDTGISTHPDLNIRGGASFVPGEPSTQDGNGHGTHVAGTIAALNNSIGVLGVAPSAELYAVKVLGASGSGSVSSIAQGLEWAGNNGMHVANLSLGSPSPSATLEQAVNSATSRGVLVVAASGNSGAGSISYPARYANAMAVGATDQNNNRASFSQYGAGLDIVAPGVNVQSTYPGSTYASLNGTSMATPHVAGAAALVKQKNPSWSNVQIRNHLKNTATSLGSTNLYGSGLVNAEAATR

SEQ ID NO: 51977 - protein, 269 aa, Unidentified
AQSVPWGISRVQAPAAHNRGLTGSGVKVAVLDTGISTHPDLNIRGGASFVPGEPSTQDGNGHGTHVAGTIAALNNSIGVLGVAPSAELYAVKVLGASGSGSVSSIAQGLEWAGNNGMHVANLSLGSPSPSATLEQAVNSATSRGVLVVAASGNSGAGSISYPARYANAMAVGATDQNNNRASFSQYGAGLDIVAPGVNVQSTYPGSTYASLNGTSMATPHVAGAAALVKQKNPSWSNVRIRNHLKNTATSLGSTNLYGSGLVNAEAATR

SEQ ID NO: 51978 - protein, 269 aa, Unidentified
AQSVPWGISRVQAPAAHNRGLTGSGVKVAVLDTGISTHPDLMIRGGASFVPGEPSTQDGNGHGTHVAGTIAALNNSIGVLGVAPSAELYAVKVLGASGSGSVSSIAQGLEWAGNNGMHVANLSLGSPSPSATLEQAVNSATSRGVLVVAASGNSGAGSISYPARYANAMAVGATDQNNNRASFSQYGAGLDIVAPGVNVQSTYPGSTYASLNGTSMATPHVAGAAALVKQKNPSWSNVQIRNHLKNTATSLGSTNLYGSGLVNAEAATR

SEQ ID NO: 51979 - protein, 269 aa, Unidentified
AQSVPWGISRVQAPAAHNRGLTGSGVKVAVLDTGISTHPDLNIRGGASFVPGEPSTQDGNGHGTHVAGTIAALNNSIGVLGVAPSAELYAVKVLGASGSGSVSSIAQGLEWAGNNGMHVANLSLGSPSPSATLEQAVNSATSRGVLVVAASGNSGAGSISYPARYANAMAVGATDQNNNRASFSQYGAGLDIVAPGVNVQSTYPGSTYASLNGTSMATPHVAGAAALVKQKNPRWSNVQIRNHLKNTATSLGSTNLYGSGLVNAEAATR

SEQ ID NO: 51980 - protein, 269 aa, Unidentified
AQSVPWGISRVQAPAAHNRGLTGSGVKVAVLDTGISTHPDLNIRGGASFVPGEPSTQDGNGHGTHVAGTIAALNNSIGVLGVAPRAELYAVKVLGASGSGSVSSIAQGLEWAGNNGMHVANLSLGSPSPSATLEQAVNSATSRGVLVVAASGNSGAGSISYPARYANAMAVGATDQNNNRASFSQYGAGLDIVAPGVNVQSTYPGSTYASLNGTSMATPHVAGAAALVKQKNPSWSNVQIRNHLKNTATSLGSTNLYGSGLVNAEAATR

SEQ ID NO: 51981 - protein, 270 aa, Unidentified
AQSVPWGISRVQAPAAHNRGLTGSGVKVAVLDTGISTHPDLNIRGGASFVPGEPSTQDGNGHGTHVAGTIAALNNSIGVLGVAPSAELYAVKVLGASGXSGSVSSIAQGLEWAGNNGMHVANLSLGSPSHSATLEQAVNSATSRGVLVVAASGNSGAGSISYPARYANAMAVGATDQNNNRASFSQYGAGLDIVAPGVNVQSTYPGSTYASLNGTSMATPHVAGAAALVKQKNPSWSNVQIRNHLKNTATSLGSTNLYGSGLVNAEAATR

SEQ ID NO: 51982 - protein, 269 aa, Unidentified
AQSVPWGISRVQAPAAHNRGLTGSGVKVAVLDTGISTHPDLNIRGGASFVPGEPSTQDGNGHGTHVAGTIAALNNSIGVLGVAPSAELYAVKVLGASGSGSVSSIAQGLEWAGNNGMHVANLSLGSPSPSATLEQAVNSATSRGVLVVAASGNSGAGSISYPARYANAMAVGATDQNNNRASFSQYGAGLDIVAPGVNVQSTYPGSTYASLNGTSMATPHVAGAAALVKQKKPSWSNVQIRNHLKNTATSLGSTNLYGSGLVNAEAATR

SEQ ID NO: 51983 - protein, 269 aa, Unidentified
AQSVPWGISRVQAPAAHNRGLTGSGVKVAVLDTGISTHPDLNIRGGASFVPGEPSTQDGNGHGTHVAGTIAALNNSIGVLGVAPSAELYAVKVLGASGSGSVSSIAQGLEWAGNNGMHVANLSLGSPSPSATLEQAVNSATSRGVLVVAASGNSGAGSISYPARYANAMAVGATDQINNRASFSQYGAGLDIVAPGVNVQSTYPGSTYASLNGTSMATPHVAGAAALVKQKNPSWSNVQIRNHLKNTATSLGSTNLYGSGLVNAEAATR

SEQ ID NO: 51984 - protein, 269 aa, Unidentified
AQSVPWGISRVQAPAAHNRGLTGSGVKVAVLDTGISTHPDLNIRGGASFVPGEPSTQDGNGHGTHVAGTIAALNNSIGVLGVAPSAELYAVKVLGASGSGSVSSIAQGLEWAGNNFMHVANLSLGSPSPSATLEQAVNSATSRGVLVVAASGNSGAGSISYPARYANAMAVGATDQNNNRASFSQYGAGLDIVAPGVNVQSTYPGSTYASLNGTSMATPHVAGAAALVKQKNPSWSNVQIRNHLKNTATSLGSTNLYGSGLVNAEAATR

SEQ ID NO: 51985 - protein, 269 aa, Unidentified
AQSVPWGISRVQAPAAHNRGLTGSGVKVAVLDTGISTHPDLNIRGGASFVPGEPSTQDGNGHGTHVAGTIAALNNSIGVLGVAPSAELYAVKVLGASGSGSVSSIAQGLEWAGNNGMHVANLSLGSPSPSATLEQAVNSATSRGVLVVVASGNSGAGSISYPARYANAMAVGATDQNNNRASFSQYGAGLDIVAPGVNVQSTYPGSTYASLNGTSMATPHVAGAAALVKQKNPSWSNVQIRNHLKNTATSLGSTNLYGSGLVNAEAATR

SEQ ID NO: 51986 - protein, 269 aa, Unidentified
AQSVPWGISRVQAPAAHNRGLTGSGVKVGVLDTGISTHPDLNIRGGASFVPGEPSTQDGNGHGTHVAGTIAALNNSIGVLGVAPSAELYAVKVLGASGSGSVSSIAQGLEWAGNNGMHVANLSLGSPSPSATLEQAVNSATSRGVLVVAASGNSGAGSISYPARYANAMAVGATDQNNNRASFSQYGAGLDIVAPGVNVQSTYPGSTYASLNGTSMATPHVAGAAALVKQKNPSWSNVQIRNHLKNTATSLGSTNLYGSGLVNAEAATR

SEQ ID NO: 51987 - protein, 269 aa, Unidentified
AQSVPWGISRVQAPAAHNRGLTGSGVKVAVLDTGISTHPDLNIRGGASFVPGEPSTQDGNGHGTHVAGTIAALNNSIGVLGVAPSAELYAVKVLGASGSGSVSSIAQGLEWAGNNGMHVANLSLGSESPSATLEQAVNSATSRGVLVVAASGNSGAGSISYPARYANAMAVGATDQNNNRASFSQYGAGLDIVAPGVNVQSTYPGSTYASLNGTSMATPHVAGAAALVKQKNPSWSNVQIRNHLKNTATSLGSTNLYGSGLVNAEAATR

SEQ ID NO: 51988 - protein, 269 aa, Unidentified
AQSVPWGISRVQAPAAHNRGLTGSGVKVAVLDTGISTHPDLNIRGGASFVPGEPSTQDGNGHGTHVAGTIAALNNSIGVLGVAPSAELYAVKVLGASGSGSVSSIAQGLEWAGNNGMHVANLSLGSPSPSATLEQAVNSATSRGVLVVAASGNSGAGSISYPARYANAMAVGATDQNNNRASFSQYGAGLDIVAPGVNVQSTYPGSTYASLNGTSMATPHVAGAAALVKQKNPSWSNVQIRNHLKNTATSLGSTNDYGSGLVNAEAATR

SEQ ID NO: 51989 - protein, 269 aa, Unidentified
AQSVPWGISRVQAPAAHNRGLTGSGVKVAVLDTGISTHPDLNIRRGASFVPGEPSTQDGNGHGTHVAGTIAALNNSIGVLGVAPSAELYAVKVLGASGSGSVSSIAQGLEWAGNNGMHVANLSLGSPSPSATLEQAVNSATSRGVLVVAASGNSGAGSISYPARYANAMAVGATDQNNNRASFSQYGAGLDIVAPGVNVQSTYPGSTYASLNGTSMATPHVAGAAALVKQKNPSWSNVQIRNHLKNTATSLGSTNLYGSGLVNAEAATR

SEQ ID NO: 51990 - protein, 269 aa, Unidentified
AQSVPWGISRVQAPAAHNRGLTGSGVKVAVLDTGISTHPDLNIRGGASFVPGEPSTQDGNGHGTHVAGTIAALNNSIGVLGVAPSAELYAVKVLGASGSGSVSSIAQGLEWAGNNGMHVANLSLGSPSPSATLEQAVNSATSRGVLVVAASGNSGAGSISYPARYANAMAVGATDQNNNRASFSQYGAGLDIVAPGVNVQSTYPGSTYASLNGTSMATPHVAGAAALVKQKNPSWSNVQIRNHLKNTATSLGSTNLYGSGLVNAEAAFR

SEQ ID NO: 51991 - protein, 269 aa, Unidentified
AQSVPWGISRVQAPAAHNRGLTGSGVKVAVLDTGISTHPDLNIRGGASFVPGEPSTQDGNGHGTHVAGTIAALNNSIGVLGVAPSAELYAVKVLGASGSGSVSSIAQGLEWAGNNGMHVANLSLGSPSPSATLEQAVNSATSRGVLVVAASGNSGAGSISYPARYANAMAVGATDQNNNRASFSQYGAGLDIVAPGVNVQSTYPGSTYASLNGTSMATPHVAGAAALVKQKNPSWRNVQIRNHLKNTATSLGSTNLYGSGLVNAEAATR

SEQ ID NO: 51992 - protein, 269 aa, Unidentified
AQSVPWGISRVQAPAAHNRGLTGSGVKVAVLDTGISTHPDLNIRGGASFVPGEPSTQDGNGHGTHVAGTIAALNNSIGVLGVAPSAELYAVKVLGASGSGSVSSIAQGLEWAGNNGMHVANLSLGSPSPSATLEQAVNSATSRGVLVVAASGNSGAGSISYPARYANAMAVGATDQNNNRASFSQYGAGLDIVAPGVNVQSTXPGSTYASLNGTSMATPHVAGAAALVKQKNPSWSNVQIRNHLKNTATSLGSTNLYGSGLVNAEAATR

SEQ ID NO: 51993 - protein, 269 aa, Unidentified
AQSVPWGISRVQAPAAHNRGLTGSGVKVAVLDTGISTHPDLNIRGGASFVPGEPSTQDGNGHGTHVAGTIAALNNSIGVLGVAPSAELYAVKVLGASGSGSVSSIAQGLEWAGNNGMHVANLSLGSPSPSATLEQAVNSATSRGVLVVAASGNSGAGSISYPARYANAMAVLATDQNNNRASFSQYGAGLDIVAPGVNVQSTYPGSTYASLNGTSMATPHVAGAAALVKQKNPSWSNVQIRNHLKNTATSLGSTNLYGSGLVNAEAATR

SEQ ID NO: 51994 - protein, 269 aa, Unidentified
AQSVPWGISRVQAPAAHNRGLTGSGVKVAVLDTGISTHPDLNIRGGASFVPGEPSTQDGNGHGTHVAGTIAALNNSIGVLGVAPSAELYAVKVLGASGSGSVSSIAQGLEWAGNNGMHVANLSLGSPSPSATLEQAVNSATSRGVLVLAASGNSGAGSISYPARYANAMAVGATDQNNNRASFSQYGAGLDIVAPGVNVQSTYPGSTYASLNGTSMATPHVAGAAALVKQKNPSWSNVQIRNHLKNTATSLGSTNLYGSGLVNAEAATR

SEQ ID NO: 51995 - protein, 269 aa, Unidentified
AQSVPWGISRVQAPAAHNRGLTGSGVKVAVLDTGISTHPDLNIRGGASFVPGEPSTQDGNGHGTHVAGTIAALNNSIGVLGVAPSAELYAVKVLGASGSGSVSSIAQGLEWAGNNGMHVANLSLGSPHPSATLEQAVNSATSRGVLVVAASGNSGAGSISYPARYANAMAVGATDQNNNRASFSQYGAGLDIVAPGVNVQSTYPGSTYASLNGTSMATPHVAGAAALVKQKNPSWSNVQIRNHLKNTATSLGSTNLYGSGLVNAEAATR

SEQ ID NO: 51996 - protein, 269 aa, Unidentified
AQSVPWGISRVQAPAAHNRGLTGSGVKVAVLDTGISTHPDLNIRGGASFVPGEPSTQDGNGHGTHVAGTIAALNNSIGVLGVAPSAELYAVKVLGASGSGSVSSIAQGLEWAGNNGMHVANLSLGSPSPSATLEQAVNSATSRGVLVVAASGNSGAGSISYPARYANAMAVGATDQNNNRASFSQYGAGLDIVAPGVNVQSTYPGSTYASLNGTSMATPHVAGAAALVKQKNPSWSNVQIRNHLKNTATSLDSTNLYGSGLVNAEAATR

SEQ ID NO: 51997 - protein, 269 aa, Unidentified
AQSVPWGISRVQAPAAHNRGLTGSGVKVAVLDTGISTHPDLNIRGGASFVPGEPSTQDGNGHGTHVAGTIAALNNSIGVLGVAPNAELYAVKVLGASGSGSPSSIAQGLEWAGNNGMHVANLSLGSPSPSATLEQAVNSATSRGVLVVAASGNSGAGSISYPARYANAMAVGATDQNNNRASFSQYGAGLDIVAPGVNVQSTYPGSTYASLNGTSSATPHVAGAAALVKQKNPSWSNVQIRNHLKNTATSLGSTNLYGSGLVNAEAATR

SEQ ID NO: 51998 - protein, 269 aa, Unidentified
AQSVPWGISRVQAPAAHNRGLTGSGVKVAVLDTGISTHPDLNIRGGASFVPGEPSTQDGNGHGTHVAGTIAALNNDIGVLGVAPSAELYAVKVLGASGSGSVSSIAQGLEWAGNNGMHVANLSLGSPSPSATLEQAVNSATSRGVLVVAASGNSGAGSISYPARYANAMAVGATDQNNNRASFSQYGAGLDIVAPGVNVQSTYPGSTYASLNGTSMATPHVAGAAALVKQKNPSWSNVQIRNHLKNTATSLGSTNLYGSGLVNAEAATR

SEQ ID NO: 51999 - protein, 269 aa, Unidentified
AQSVPWGISRVQAPAAHNRGLYGSGVKVAVLDTGISTHPDLNIRGGASFVPGEPSTQDGNGHGTHVAGTIAALNNSIGVLGVAPSAELYAVKVLGASGSGSVSSIAQGLEWAGNNGMHVANLSLGSPSPSATLEQAVNSATSRGVLVVAASGNSGAGSISYPARYANAMAVGATDQNNNRASFSQYGAGLDIVAPGVNVQSTYPGSTYASLNGTSMATPHVAGAAALVKQKNPSWSNVQIRNHLKNTATSLGSTNLYGSGLVNAEAATR

SEQ ID NO: 52000 - protein, 269 aa, Bacillus sp.
AQSVPWGISRVQAPAAHNRGLTGSGVKVAVLDTGISTHPDLNIRGGASFVPGEPSTQDGNGHGTHVAGTIAALNNSIGVLGVAPNAELYAVKVLGASGSGSVSSIAQGLEWAGNNGMHVANLSLGSPSPSATLEQAVNSATSRGVLVVAASGNSGAGSISYPARYANAMAVGATDQNNNRASFSQYGAGLDIVAPGVNVQSTYPGSTYASLNGTSKATPHVAGAAALVKQKNPSWSNVQIRNHLKNTATSLGSTNLYGSGLVNAEAATR

SEQ ID NO: 52001 - protein, 269 aa, Unidentified
AQSVPWGISRVQAPAAHNRGLTGSGVKVAVLDTGISTHPDLNIRGGASFVPGEPSTQDGNGHGTHVAGTIAALNNSIGVLGVAPSAELYAVKVLGASGSGSVSSIAQGLEWAGNNGMHVANLSLGSPSTSATLEQAVNSATSRGVLVVAASGNSGAGSISYPARYANAMAVGATDQNNNRASFSQYGAGLDIVAPGVNVQSTYPGSTYASLNGTSMATPHVAGAAALVKQKNPSWSNVQIRNHLKNTATSLGSTNLYGSGLVNAEAATR

SEQ ID NO: 52002 - protein, 269 aa, Unidentified
AQSVPWGISRVQAPAAHNRGLTGSGVKVAVLDTGISTHPDLNIRGGASFVPGEPSTQDGNGHGTHVAGTLAALNNSIGVLGVAPSAELYAVKVLGASGSGSVSSIAQGLEWAGNNGMHVANLSLGSPSPSATLEQAVNSATSRGVLVVAASGNSGAGSISYPARYANAMAVGATDQNNNRASFSQYGAGLDIVAPGVNVQSTYPGSTYASLNGTSMATPHVAGAAALVKQKNPSWSNVQIRNHLKNTATSLGSTNLYGSGLVNAEAATR

SEQ ID NO: 52003 - protein, 269 aa, Unidentified
AQSVPWGISRVQAPAAHNRGLTGSGVKVAVLDTGISTHPDRNIRGGASFVPGEPSTQDGNGHGTHVAGTIAALNNSIGVLGVAPSAELYAVKVLGASGSGSVSSIAQGLEWAGNNGMHVANLSLGSPSPSATLEQAVNSATSRGVLVVAASGNSGAGSISYPARYANAMAVGATDQNNNRASFSQYGAGLDIVAPGVNVQSTYPGSTYASLNGTSMATPHVAGAAALVKQKNPSWSNVQIRNHLKNTATSLGSTNLYGSGLVNAEAATR

SEQ ID NO: 52004 - protein, 269 aa, Unidentified
AQSVPWGISRVQAPAAHNRGLTGSGVKVAVLDTGISTHPDLNIRGGASFVPGEPSTQDGNGHGTHVAGTIAALNNSIGVLGVAPNAELYAVKVLGASGSGSVSSIAQGLEWAGNNGMHVANLSLGSPSPSATLEQAVNSATSRGVLVVAASGNSGAGSISYPARYANAMAVGATDQNNNRASFSQYGAGLDIVAPGVNVQSTYPGSTYASENGTSSATPHVAGAAALVKQKNPSWSNVQIRNHLKNTATSLGSTNLYGSGLVNAEAATR

SEQ ID NO: 52005 - protein, 269 aa, Unidentified
AQSVPWGISRVQAPAAHNRGLTGSGVKVAVLDTGISTHPDLNIRGGASFVPGEPSTQDGNGHGTHVAGTIAALNNSIGVLGVAPSAELYAVKVLGASGSGSVSSIAQGLEWAGNNGMHVANLSLGSPSPSATXEQAVNSATSRGVLVVAASGNSGAGSISYPARYANAMAVGATDQNNNRASFSQYGAGLDIVAPGVNVQSTYPGSTYASLNGTSMATPHVAGAAALVKQKNPSWSNVQIRNHLKNTATSLGSTNLYGSGLVNAEAATR

SEQ ID NO: 52006 - protein, 269 aa, Alkalihalobacillus clausii
AQSVPWGISRVQAPAAHNRGLTGSGVKVAVLDTGISTHPDLNIRGGASFVPGEPSTQDGNGHGTHVAGTIAALNNSIGVLGVAPSAELYAVKVLGASGSGSVSSIAQGLEWAGNNGMHVANLSLGSPSPSATLEQAVNSATSRGVLVVAASGNSGAGSISYPARDANAMAVGATDQNNNRASFSQYGAGLDIVAPGVNVQSTYPGSTYASLNGTSMATPHVAGAAALVKQKNPSWSNVQIRNHLKNTATSLGSTNLYGSGLVNAEAATR

SEQ ID NO: 52007 - protein, 269 aa, Unidentified
AQSVPWGISRVQAPAAHNRGLTGSGVKVAVLDTGISTHPDLNIRGGASFVPGEPSTQDGNGHGTHVAGTIAALNNSIGVLGVAESAELYAVKVLGASGSGSVSSIAQGLEWAGNNGMHVANLSLGSPSPSATLEQAVNSATSRGVLVVAASGNSGAGSISYPARYANAMAVGATDQNNNRASFSQYGAGLDIVAPGVNVQSTYPGSTYASLNGTSMATPHVAGAAALVKQKNPSWSNVQIRNHLKNTATSLGSTNLYGSGLVNAEAATR

SEQ ID NO: 52008 - protein, 269 aa, Unidentified
AQSVPWGISRVQAPAAHNRGLTGSGVKVAVLDTGISTHPDLNIRGGASFVPGEPSTQDGNGHGTHVAGTIAALNNSIGVLGVAPSAELYAVKVLGASGSGSVSSIAQGLEWAGNNGMHVANLSLGSPSPSATLEQAVNSATSRGVLVVAASGNSGAGSISYPARYANAMAVGATDQNNNRASFSQYGAGLDIVAPGVNVQSTYIGSTYASLNGTSMATPHVAGAAALVKQKNPSWSNVQIRNHLKNTATSLGSTNLYGSGLVNAEAATR

SEQ ID NO: 52009 - protein, 269 aa, Unidentified
AQSVPWGISRVQAPAAHNRGLTGSGVKVAVLDTGISTHPDLNIRGGASFVPGEPSTQDGNGHGTHVAGTIAALNNSIGVLGVAPSAELYAVKVLGASGSGSVSSIAQGLEWAGNNGMHVANLSLGSPSPSATLEQAVNSATSRGVLAVAASGNSGAGSISYPARYANAMAVGATDQNNNRASFSQYGAGLDIVAPGVNVQSTYPGSTYASLNGTSMATPHVAGAAALVKQKNPSWSNVQIRNHLKNTATSLGSTNLYGSGLVNAEAATR

SEQ ID NO: 52010 - protein, 269 aa, Unidentified
AQSVPWGISRVQAPAAHNRGLTGSGVKVAVLDTGISTHPDLNIRGGASFVPGEPSTQDGNGHGTHVAGTIAALNNSIGVLGKAPSAELYAVKVLGASGSGSVSSIAQGLEWAGNNGMHVANLSLGSPSPSATLEQAVNSATSRGVLVVAASGNSGAGSISYPARYANAMAVGATDQNNNRASFSQYGAGLDIVAPGVNVQSTYPGSTYASLNGTSMATPHVAGAAALVKQKNPSWSNVQIRNHLKNTATSLGSTNLYGSGLVNAEAATR

SEQ ID NO: 52011 - protein, 269 aa, Unidentified
AQSVPWNISRVQAPAAHNRGLTGSGVKVAVLDTGISTHPDLNIRGGASFVPGEPSTQDGNGHGTHVAGTIAALNNSIGVLGVAPSAELYAVKVLGASGSGSVSSIAQGLEWAGNNGMHVANLSLGSPSPSATLEQAVNSATSRGVLVVAASGNSGAGSISYPARYANAMAVGATDQNNNRASFSQYGAGLDIVAPGVNVQSTYPGSTYASLNGTSMATPHVAGAAALVKQKNPSWSNVQIRNHLKNTATSLGSTNLYGSGLVNAEAATR

SEQ ID NO: 52012 - protein, 269 aa, Bacillus sp.
AQSVPWGISRVQAPAAHNRGLTGSGVKVAVLDTGISTHPDLNIRGGASFVPGEPSTQDGNGHGTHVAGTIAALNNSIGVLGVAPNAELYAVKVLGASGSGSVSSIAQGLEWAGNNGMHVANLSLGSPSPSATLEQAVNSATSRGVLVVAASGNSGAGSIDYPARYANAMAVGATDQNNNRASFSQYGAGLDIVAPGVNVQSTYPGSTYASLNGTSSATPHVAGAAALVKQKNPSWSNVQIRNHLKNTATSLGSTNLYGSGLVNAEAATR

SEQ ID NO: 52013 - protein, 269 aa, Unidentified
AQSVPWGISRVQAPAAHNRGLTGSGVKVAVLDTGISTHPDLNIRGGASFVPGEPSTQDGNGHGTHVAGTIAALNNSIGVLGVAPSAELYAVKVLGASGSGSVSSIAQGLEWAGNNGMHVANLSLGSPSPSATLEQAVNSATSRGVLVVAASGNSGAGSISYPARYANAMAVGATAQNNNRASFSQYGAGLDIVAPGVNVQSTYPGSTYASLNGTSMATPHVAGAAALVKQKNPSWSNVQIRNHLKNTATSLGSTNLYGSGLVNAEAATR

SEQ ID NO: 52014 - protein, 269 aa, Unidentified
AQSVPWGISRVQAPAAHNRGLTGSGVKVAVLDTGISTHPDLNIRGGASFVPGEPSTQDGNGHGTHVAGTIAALNNSIGVLGVAPSAELYAVKVLGASGSGSVSSIAQGLEWAGNNGMHVANLSLGSPSPMATLEQAVNSATSRGVLVVAASGNSGAGSISYPARYANAMAVGATDQNNNRASFSQYGAGLDIVAPGVNVQSTYPGSTYASLNGTSMATPHVAGAAALVKQKNPSWSNVQIRNHLKNTATSLGSTNLYGSGLVNAEAATR

SEQ ID NO: 52015 - protein, 269 aa, Unidentified
AQSVPWGISRVQAPAAHNRGLTGSGVKVAVLDTGISTHPDLNIRGGASFVPGEPSTQDGNGHGTHVAGTIAALNNSIGVLGVAPSAELYAVKVLGASGSGSVSSIAQGLEWAGNNGMHVANLSLASPSPSATLEQAVNSATSRGVLVVAASGNSGAGSISYPARYANAMAVGATDQNNNRASFSQYGAGLDIVAPGVNVQSTYPGSTYASLNGTSMATPHVAGAAALVKQKNPSWSNVQIRNHLKNTATSLGSTNLYGSGLVNAEAATR

SEQ ID NO: 52016 - protein, 269 aa, Unidentified
AQSVPWGISRVQAPAAHNRGLTGSGVKVAVLDTGISTHPDLNIRGGALFVPGEPSTQDGNGHGTHVAGTIAALNNSIGVLGVAPSAELYAVKVLGASGSGSVSSIAQGLEWAGNNGMHVANLSLGSPSPSATLEQAVNSATSRGVLVVAASGNSGAGSISYPARYANAMAVGATDQNNNRASFSQYGAGLDIVAPGVNVQSTYPGSTYASLNGTSMATPHVAGAAALVKQKNPSWSNVQIRNHLKNTATSLGSTNLYGSGLVNAEAATR

SEQ ID NO: 52017 - protein, 269 aa, Unidentified
AQSVPWGISRVQAPAAHNRGLTGSGVKVAVLDTGISTHPDLNIRGGASFVPGEPSTQDGNGHGTHVAGTIAALNNSIGVLGVAPSAELYAVKVLGASGSGSVSSIAQGLEWAGNNGMHVANLSLGSPSPRATLEQAVNSATSRGVLVVAASGNSGAGSISYPARYANAMAVGATDQNNNRASFSQYGAGLDIVAPGVNVQSTYPGSTYASLNGTSMATPHVAGAAALVKQKNPSWSNVQIRNHLKNTATSLGSTNLYGSGLVNAEAATR

SEQ ID NO: 52018 - protein, 269 aa, Unidentified
AQSVPWGISRVQAPAAHNRGLTGSGVKVAVLDTGISTHPDLNIRGGASFVPGEPSTQDGNGHGTHVAGTIAALNNSIGVLGVAPNAELYAVKVLGASGSGSVSSIAQGLEWAGNNGMHVANLSLGSPSPSATLEQAVNSATSRGVLVVAASGNSGAGSISYPARYANAMAVGATDQNNNRASFSQYGAGLDIVAPGVNVQSTWPGSTYASLNGTSSATPHVAGAAALVKQKNPSWSNVQIRNHLKNTATSLGSTNLYGSGLVNAEAATR

SEQ ID NO: 52019 - protein, 269 aa, Unidentified
AQSVPWGISRVQAPAAHNRGLTGSGVKVAVLDTGISTHPDLNIRGGASFVPGEPSTQDGNGHGTHVAGTIAALNNSIGVLGVAPSAELYAVKVLGASGSGSVSSIAQGLEWAGNSGMHVANLSLGSPSPSATLEQAVNSATSRGVLVVAASGNSGAGSISYPARYANAMAVGATDQNNNRASFSQYGAGLDIVAPGVNVQSTYPGSTYASLNGTSMATPHVAGAAALVKQKNPSWSNVQIRNHLKNTATSLGSTNLYGSGLVNAEAATR

SEQ ID NO: 52020 - protein, 269 aa, Unidentified
AQSVPWGISRVQAPAAHNRGLTGSGVKVAVLDTGISTHPDLNIRGGASFVPGEPSTQDGNGHGTHVAGTIAALNNSIGVLGVAPSAELYAVKVLGASGSGSVSSIAQGLEWAGNNGMHVANLSLGSPSPSATLEQAVNSATSSGVLVVAASGNSGAGSISYPARYANAMAVGATDQNNNRASFSQYGAGLDIVAPGVNVQSTYPGSTYASLNGTSMATPHVAGAAALVKQKNPSWSNVQIRNHLKNTATSLGSTNLYGSGLVNAEAATR

SEQ ID NO: 52021 - protein, 269 aa, Unidentified
AQSVPWGISRVQAPAAHNRKLTGSGVKVAVLDTGISTHPDLNIRGGASFVPGEPSTQDGNGHGTHVAGTIAALNNSIGVLGVAPSAELYAVKVLGASGSGSVSSIAQGLEWAGNNGMHVANLSLGSPSPSATLEQAVNSATSRGVLVVAASGNSGAGSISYPARYANAMAVGATDQNNNRASFSQYGAGLDIVAPGVNVQSTYPGSAYASLNGTSSATPHVAGAAALVKQKNPSWSNVQIRNHLKNTATSLGSTNLYGSGLVNAEAATR

SEQ ID NO: 52022 - protein, 269 aa, Unidentified
AQSVPWGISRVQAPAAHNRGFTGSGVKVAVLDTGISTHPDLNIRGGASFVPGEPSTQDGNGHGTHVAGTIAALNNSIGVLGVAPSAELYAVKVLGASGSGSVSSIAQGLEWAGNNGMHVANLSLGSPSPSATLEQAVNSATSRGVLVVAASGNSGAGSISYPARYANAMAVGATDQNNNRASFSQYGAGLDIVAPGVNVQSTYPGSTYASLNGTSMATPHVAGAAALVKQKNPSWSNVQIRNHLKNTATSLGSTNLYGSGLVNAEAATR

SEQ ID NO: 52023 - protein, 269 aa, Unidentified
AQSVPWGISRVQAPAAHNRGDTGSGVKVAVLDTGISTHPDLNIRGGASFVPGEPSTQDGNGHGTHVAGTIAALNNSIGVLGVAPSAELYAVKVLGASGSGSVSSIAQGLEWAGNNGMHVANLSLGSPSPSATLEQAVNSATSRGVLVVAASGNSGAGSISYPARYANAMAVGATDQNNNRASFSQYGAGLDIVAPGVNVQSTYPGSTYASLNGTSMATPHVAGAAALVKQKNPSWSNVQIRNHLKNTATSLGSTNLYGSGLVNAEAATR

SEQ ID NO: 52024 - protein, 270 aa, Unidentified
AQSVPWGISRVQAPAAHNRGLTGSGVKVAVLDTGISTHPDLNIRGGASFVPGEPSTQDGNGHGTHVAGTIAALNNSIGVLGVAPSAELYAVKVLGAXSGSGSVSSIAQGLEWAGNNGMHVANLSLGSPSPSATLEQAVNSATSRGVLVVAASGNSGAGSISYPARYANAMAVGATDQNNNRASFSQYGPGLDIVAPGVNVQSTYPGSTYASLNGTSMATPHVAGAAALVKQKNPSWSNVQIRNHLKNTATSLGSTNLYGSGLVNAEAATR

SEQ ID NO: 52025 - protein, 269 aa, Unidentified
AQSVPWGISRVQAPAAHNRGLTGSGVKVAVLDTGISTHPDLNIRGGASFVPGEPSTQDGNGHGTHVAGTIAALNNSIGVLGVAPNAELYAVKVLGASGSGSNSSIAQGLEWAGNNGMHVANLSLGSPSPSATLEQAVNSATSRGVLVVAASGNSGAGSISYPARYANAMAVGATDQNNNRASFSQYGAGLDIVAPGVNVQSTYPGSTYASLNGTSSATPHVAGAAALVKQKNPSWSNVQIRNHLKNTATSLGSTNLYGSGLVNAEAATR

SEQ ID NO: 52026 - protein, 269 aa, Unidentified
AQSVPWGISRVQAPAAHNRGLTGSGVKVAVLDTGISTHPDLNIRGGASFVPGEPSTQDGNGHGTHVAGTIAALNNSIGVLGVAPSAELYAVKVLGASGSGSVSSIAQGLEWAGNNGMHVANLSLGSPSPSATLEQAVNSATSRGVLVVAASGNSGAGSISYPARYANAMACGATDQNNNRASFSQYGAGLDIVAPGVNVQSTYPGSTYASLNGTSMATPHVAGAAALVKQKNPSWSNVQIRNHLKNTATSLGSTNLYGSGLVNAEAATR

SEQ ID NO: 52027 - protein, 269 aa, Unidentified
AQSVPWGISRVQAPAAHNRGLTGSGVKVAVLDTGISTHPDLNIRGGASFVPGEPSTQDGNGHGTHVAGTIAALNNSIGVLGVAPSAELYAVKVLGASGSGSVSSIAQGLEWAGNNGMHVANLSLGSPSPSATLEQAVNSATSRGVLVVAASGNSGAGSISYPARYANAMAVGATDQNNNRASFSQYGAGLDIVAPGVNVQSTYPGSTYASLNGTSMATPHVAGAAALVKQKNPSWSNVQIRNHLKNTATSLGSTNLYGSGVVNAEAATR

SEQ ID NO: 52028 - protein, 269 aa, Unidentified
AFSVPWGISRVQAPAAHNRGLTGSGVKVAVLDTGISTHPDLNIRGGASFVPGEPSTQDGNGHGTHVAGTIAALNNSIGVLGVAPSAELYAVKVLGASGSGSVSSIAQGLEWAGNNGMHVANLSLGSPSPSATLEQAVNSATSRGVLVVAASGNSGAGSISYPARYANAMAVGATDQNNNRASFSQYGAGLDIVAPGVNVQSTYPGSTYASLNGTSMATPHVAGAAALVKQKNPSWSNVQIRNHLKNTATSLGSTNLYGSGLVNAEAATR

SEQ ID NO: 52029 - protein, 269 aa, Unidentified
AQSVPWGISRVQAWAAHNRGLTGSGVKVAVLDTGISTHPDLNIRGGASFVPGEPSTQDGNGHGTHVAGTIAALNNSIGVLGVAPSAELYAVKVLGASGSGSVSSIAQGLEWAGNNGMHVANLSLGSPSPSATLEQAVNSATSRGVLVVAASGNSGAGSISYPARYANAMAVGATDQNNNRASFSQYGAGLDIVAPGVNVQSTYPGSTYASLNGTSMATPHVAGAAALVKQKNPSWSNVQIRNHLKNTATSLGSTNLYGSGLVNAEAATR

SEQ ID NO: 52030 - protein, 269 aa, Unidentified
AQSVPWGISRVQAPAAHNRGLTGSGVKVAVLDTGISTHPDLNIRGGASFVPGERSTQDGNGHGTHVAGTIAALNNSIGVLGVAPSAELYAVKVLGASGSGSVSSIAQGLEWAGNNGMHVANLSLGSPSPSATLEQAVNSATSRGVLVVAASGNSGAGSISYPARYANAMAVGATDQNNNRASFSQYGAGLDIVAPGVNVQSTYPGSTYASLNGTSMATPHVAGAAALVKQKNPSWSNVQIRNHLKNTATSLGSTNLYGSGLVNAEAATR

SEQ ID NO: 52031 - protein, 269 aa, Unidentified
AQSVPWGISRVQAPAAHNRGLTGSGVKVAVLDTGISTHPALNIRGGASFVPGEPSTQDGNGHGTHVAGTIAALNNSIGVLGVAPSAELYAVKVLGASGSGSVSSIAQGLEWAGNNGMHVANLSLGSPSPSATLEQAVNSATSRGVLVVAASGNSGAGSISYPARYANAMAVGATDQNNNRASFSQYGAGLDIVAPGVNVQSTYPGSTYASLNGTSMATPHVAGAAALVKQKNPSWSNVQIRNHLKNTATSLGSTNLYGSGLVNAEAATR

SEQ ID NO: 52032 - protein, 269 aa, Bacillus sp.
AQSVPWGISRVQAPAAHNRGLTGSGVKVAVLDTGISTHPDLNIRGGASFVPGEPSTQDGNGHGTHVAGTIAALNNSIGVLGVAPNAELYAVKVLGASGSGSVSSIAQGLEWAGNNGMHVANLSLGSPSPSATLEQAVNSATSRGVLVVAASGNSGAGSISYPARYANAMAVGATDQNNNRASFSQYGAGLDIVAPGVNVQSTYPGSTYASLNGTSPATPHVAGAAALVKQKNPSWSNVQIRNHLKNTATSLGSTNLYGSGLVNAEAATR

SEQ ID NO: 52033 - protein, 269 aa, Unidentified
AQSVPWGISRVQAPAAHNRGLTGSGVKVAVLDTGISTHPDLNIRGGASFVPGEPSTQDGNGHGTHVAGTIAALNNSIGVLGVAPSAELYAVKVLGASGSGHVSSIAQGLEWAGNNGMHVANLSLGSPSPSATLEQAVNSATSRGVLVVAASGNSGAGSISYPARYANAMAVGATDQNNNRASFSQYGAGLDIVAPGVNVQSTYPGSTYASLNGTSMATPHVAGAAALVKQKNPSWSNVQIRNHLKNTATSLGSTNLYGSGLVNAEAATR

SEQ ID NO: 52034 - protein, 269 aa, Unidentified
AQSVPWGISRVQAPAAHNRGLTGSGVKVAVLDTGISTHPVLNIRGGASFVPGEPSTQDGNGHGTHVAGTIAALNNSIGVLGVAPSAELYAVKVLGASGSGSVSSIAQGLEWAGNNGMHVANLSLGSPSPSATLEQAVNSATSRGVLVVAASGNSGAGSISYPARYANAMAVGATDQNNNRASFSQYGAGLDIVAPGVNVQSTYPGSTYASLNGTSMATPHVAGAAALVKQKNPSWSNVQIRNHLKNTATSLGSTNLYGSGLVNAEAATR

SEQ ID NO: 52035 - protein, 269 aa, Unidentified
AQSVPWGISRVQAPAAHNRGLTGSGVKVAVLDTGISTHPDLNIRGGASFVPGEPSTQDGNGHGTHVAGTIAALNNMIGVLGVAPSAELYAVKVLGASGSGSVSSIAQGLEWAGNNGMHVANLSLGSPSPSATLEQAVNSATSRGVLVVAASGNSGAGSISYPARYANAMAVGATDQNNNRASFSQYGAGLDIVAPGVNVQSTYPGSTYASLNGTSMATPHVAGAAALVKQKNPSWSNVQIRNHLKNTATSLGSTNLYGSGLVNAEAATR

SEQ ID NO: 52036 - protein, 269 aa, Unidentified
AQSVPWGISRVQAPAAHNRGLTGSGVKVAVLDTGISTHPDLNIRGGASFVPGEPSTQDGNGHGTHVAGTIAALNNSIGVLGVAPSAELYAVKVLGASGSGSVSSIAQGLEWAGNNGMHVANLSLGSPIPSATLEQAVNSATSRGVLVVAASGNSGAGSISYPARYANAMAVGATDQNNNRASFSQYGAGLDIVAPGVNVQSTYPGSTYASLNGTSMATPHVAGAAALVKQKNPSWSNVQIRNHLKNTATSLGSTNLYGSGLVNAEAATR

SEQ ID NO: 52037 - protein, 269 aa, Unidentified
AQSVPWGISRVQAPAAHNRGLTGSPVKVAVLDTGISTHPDLNIRGGASFVPGEPSTQDGNGHGTHVAGTIAALNNSIGVLGVAPSAELYAVKVLGASGSGSVSSIAQGLEWAGNNGMHVANLSLGSPSPSATLEQAVNSATSRGVLVVAASGNSGAGSISYPARYANAMAVGATDQNNNRASFSQYGAGLDIVAPGVNVQSTYPGSTYASLNGTSMATPHVAGAAALVKQKNPSWSNVQIRNHLKNTATSLGSTNLYGSGLVNAEAATR

SEQ ID NO: 52038 - protein, 269 aa, Unidentified
AQSVPWGISRVQAPAAHNRGLTGSGVKVAVLDTGISTHPDLNIRGGASFVPGEPSTQDGNGHGTHVAGTIAALNNSIGVLGVAPSAELYAVKVLGASGSGSVSSIAQGLEWAGNNGMHVANLSLGSPSHSATLEQAVNSATSRGVLVVAASGNSGAGSISYPARYANAMAVGATDQNNNRASFSQYGAGLDIVAPGVNVQSTYPGSTYASLNGTSMATPHVAGAAALVKQKNPSWSNVQIRNHLKNTATSLGSTNLYGSGLVNAEAATR

SEQ ID NO: 52039 - protein, 269 aa, Unidentified
AQSVPWGISRVQAPAAHNRGLTGSGVKVAVLDTGISTHPDLNIRGGAQFVPGEPSTQDGNGHGTHVAGTIAALNNSIGVLGVAPSAELYAVKVLGASGSGSVSSIAQGLEWAGNNGMHVANLSLGSPSPSATLEQAVNSATSRGVLVVAASGNSGAGSISYPARYANAMAVGATDQNNNRASFSQYGAGLDIVAPGVNVQSTYPGSTYASLNGTSMATPHVAGAAALVKQKNPSWSNVQIRNHLKNTATSLGSTNLYGSGLVNAEAATR

SEQ ID NO: 52040 - protein, 269 aa, Unidentified
AMSVPWGISRVQAPAAHNRGLTGSGVKVAVLDTGISTHPDLNIRGGASFVPGEPSTQDGNGHGTHVAGTIAALNNSIGVLGVAPSAELYAVKVLGASGSGSVSSIAQGLEWAGNNGMHVANLSLGSPSPSATLEQAVNSATSRGVLVVAASGNSGAGSISYPARYANAMAVGATDQNNNRASFSQYGAGLDIVAPGVNVQSTYPGSTYASLNGTSMATPHVAGAAALVKQKNPSWSNVQIRNHLKNTATSLGSTNLYGSGLVNAEAATR

SEQ ID NO: 52041 - protein, 269 aa, Unidentified
AQSVPWGISRVQAPAAHNRGLTGSGVKVAVLDTGISTHPDLNIRGGASFVPGEPSTQDGNGHGTHVAGTIAALNNSIGVLGAAPSAELYAVKVLGASGSGSVSSIAQGLEWAGNNGMHVANLSLGSPSPSATLEQAVNSATSRGVLVVAASGNSGAGSISYPARYANAMAVGATDQNNNRASFSQYGAGLDIVAPGVNVQSTYPGSTYASLNGTSMATPHVAGAAALVKQKNPSWSNVQIRNHLKNTATSLGSTNLYGSGLVNAEAATR

SEQ ID NO: 52042 - protein, 269 aa, Unidentified
AQSVPWGISRVQAPAAHNRGLTGSGVKVAVLDTGISTHPDLNIRGGASFVPGEPSTQDGNGHGTHVAGTIAALNNSIGVLGVAPSAELYAVKVLGASGSGSVSSIAQGLEWAGNNGMHVANLSLGSPSPSATLEQAVNSATSRGVLVVAASGNSGAGSISYPARYANAMAVGATDQNNNRASFSQYGAGLDIVAPGVNVQSTYPGSTYASLNGTSMATPHVAGAAALVKQKNPSWSNVQIRNHLKKTATSLGSTNLYGSGLVNAEAATR

SEQ ID NO: 52043 - protein, 269 aa, Unidentified
AQSVPWGISRVQAPAAHNRGLTGSGVKVAVLDTGISTHPDLNIRGGASFVPGEPSTQDGNGHGTHVAGTIAALNNSIGVLGVAPSAELYAVKVLGASGSGSVSSIAQGLEWAGNNGMHVADLSLGSPSPSATLEQAVNSATSRGVLVVAASGNSGAGSISYPARYANAMAVGATDQNNNRASFSQYGAGLDIVAPGVNVQSTYPGSTYASLNGTSMATPHVAGAAALVKQKNPSWSNVQIRNHLKNTATSLGSTNLYGSGLVNAEAATR

SEQ ID NO: 52044 - protein, 269 aa, Unidentified
AQSVPWGISRVQAPAAHNRGLTGSGVKVAVLDTGISTHPDLNIRGGASFVPGEPSTQDGNGHGTHVAGTIAALNNSIGVLGVAPSAELYAVKVLGASGSGSVSSIAQGLEWAGNNGMHVANLSLGSPSPSATLEQAVNSATSRGVLVVAASGNSGAGSISYPARYANAMAVGATDQNNNRASFSQYGVGLDIVAPGVNVQSTYPGSTYASLNGTSMATPHVAGAAALVKQKNPSWSNVQIRNHLKNTATSLGSTNLYGSGLVNAEAATR

SEQ ID NO: 52045 - protein, 269 aa, Bacillus lentus
AQSVPWGISRVQAPAAHNRGLTGSGVKVAVLDTGISTHPDLNIRGGASFVPGEPSTQDGNGHGTHVAGTIAALNNSIGVLGVAPSAELYAVKVLGASGSGSVSSIADGLEWAGNNGMHVANLSLGSPSPSATLEQAVNSATSRGVLVVAASGNSGAGSISYPARYANAMAVGATDQNNNRASFSQYGAGLDIVAPGVNVQSTYPGSTYASLNGTSMATPHVAGAAALVKQKNPSWSNVQIRNHLKNTATSLGSTNLYGSGLVNAEAATR

SEQ ID NO: 52046 - protein, 269 aa, Unidentified
AQSVPWGISRVQAPAAHNRGLTGSGVKVAVLDTGISTHPDLNIRGGASFVPGEPSTQDGNGHGTHVAGTIAALNNSIGVLGVAPSAELYAVKVLGASGSGSVSSIAQGLEWAGNNGMHVANLSLGSPSPSATLEQAVNSATSRGVLVVAASGNSGAGSIQYPARYANAMAVGATDQNNNRASFSQYGAGLDIVAPGVNVQSTYPGSTYASLNGTSMATPHVAGAAALVKQKNPSWSNVQIRNHLKNTATSLGSTNLYGSGLVNAEAATR

SEQ ID NO: 52047 - protein, 269 aa, Unidentified
AQSVPWGISRVQAPAAHNRGLTGSGVKVAVLDTGISTHPDLNIRGGASFVPGEPSTQDGNGHGTHVAGTIAALNNSIGVLGVAPNAELYAVKVLGASGSGSLSSIAQGLEWAGNNGMHVANLSLGSPSPSATLEQAVNSATSRGVLVVAASGNSGAGSISYPARYANAMAVGATDQNNNRASFSQYGAGLDIVAPGVNVQSTYPGSTYASLNGTSSATPHVAGAAALVKQKNPSWSNVQIRNHLKNTATSLGSTNLYGSGLVNAEAATR

SEQ ID NO: 52048 - protein, 269 aa, Unidentified
AQSVPWGISRVQAPAAHNRGLTGSGVKVAVLDTGISTHPDLNIRGGASFVPGEPSTQDGNGHGTHVAGTIAALNNSIGVLGVAPSAELYAVKVLGASGSGSVSSIAQGLEWCGNNGMHVANLSLGSPSPSATLEQAVNSATSRGVLVVAASGNSGAGSISYPARYANAMAVGATDQNNNRASFSQYGAGLDIVAPGVNVQSTYPGSTYASLNGTSMATPHVAGAAALVKQKNPSWSNVQIRNHLKNTATSLGSTNLYGSGLVNAEAATR

SEQ ID NO: 52049 - protein, 269 aa, Unidentified
AQSVPWGISRVQAPAAHNRGLTGSGVKVAVLDTGISTHPDLNIRGGASFVPGEPSTQDGNGHGTHVAGTIAALNNCIGVLGVAPSAELYAVKVLGASGSGSVSSIAQGLEWAGNNGMHVANLSLGSPSPSATLEQAVNSATSRGVLVVAASGNSGAGSISYPARYANAMAVGATDQNNNRASFSQYGAGLDIVAPGVNVQSTYPGSTYASLNGTSMATPHVAGAAALVKQKNPSWSNVQIRNHLKNTATSLGSTNLYGSGLVNAEAATR

SEQ ID NO: 52050 - protein, 269 aa, Unidentified
AQSVPWGISRVQAPAAHNRGLTGSGVKVAVLDTGISTHPDLNKRGGASFVPGEPSTQDGNGHGTHVAGTIAALNNSIGVLGVAPSAELYAVKVLGASGSGSVSSIAQGLEWAGNNGMHVANLSLGSPSPSATLEQAVNSATSRGVLVVAASGNSGAGSISYPARYANAMAVGATDQNNNRASFSQYGAGLDIVAPGVNVQSTYPGSTYASLNGTSMATPHVAGAAALVKQKNPSWSNVQIRNHLKNTATSLGSTNLYGSGLVNAEAATR

SEQ ID NO: 52051 - protein, 269 aa, Unidentified
AQSVPWGISRVQAPAAHNRGLTGSGVKVAVLDTGISTHPDLNIRGGASFVPGEPSTQDGNGHGTHVAGTIAALNNSIGVLGVAPSAELYEVKVLGASGSGSVSSIAQGLEWAGNNGMHVANLSLGSPSPSATLEQAVNSATSRGVLVVAASGNSGAGSISYPARYANAMAVGATDQNNNRASFSQYGAGLDIVAPGVNVQSTYPGSTYASLNGTSMATPHVAGAAALVKQKNPSWSNVQIRNHLKNTATSLGSTNLYGSGLVNAEAATR

SEQ ID NO: 52052 - protein, 269 aa, Unidentified
AQSVPWGISRVQAPAAHNRGLTGSGVKVAVLDTGISTHPDLNIRGGASFVPGEPSTQDGNGHGTHVAGTIAALNNSIGVLGVAPSAELYAVKVLGASGSGSVSSIAQGLEWAGNNGMHVANLSLGSPSPSATLEQAVNSATSRGVLVVAASGNSGAGSISYPARYANAMAVGATDQNNNRASFSQYGAGLDIVAPGVNVQSTYPGSTYASLNGTSMATPHVAGAAALVKQKNPSWSNVQIRNHLKNTATSLGPTNLYGSGLVNAEAATR

SEQ ID NO: 52053 - protein, 270 aa, Unidentified
AQSVPWGISRVQAPAAHNRGLTGSGVKVAVLDTGISTHPDLNIRGGASFVPGEPSTQDGNGHGTHVAGTIAALNNSIGVLGVAPSAELYAVKVLGASGXSGSVSSIAQGLEWAGNNGMHVANLSLGSPSPSPTLEQAVNSATSRGVLVVAASGNSGAGSISYPARYANAMAVGATDQNNNRASFSQYGAGLDIVAPGVNVQSTYPGSTYASLNGTSMATPHVAGAAALVKQKNPSWSNVQIRNHLKNTATSLGSTNLYGSGLVNAEAATR

SEQ ID NO: 52054 - protein, 269 aa, Unidentified
AQSVPWGISRVQAPAAHNRGLTGSGVKVAVLDTGISTHPDLNIRGGASFVPGEPSTQDGNGHGTHVAGTIAALNNSIGVLGVAPSAELYAVKVLGASGSGSVSSIAQGLEWAGNNMMHVANLSLGSPSPSATLEQAVNSATSRGVLVVAASGNSGAGSISYPARYANAMAVGATDQNNNRASFSQYGAGLDIVAPGVNVQSTYPGSTYASLNGTSMATPHVAGAAALVKQKNPSWSNVQIRNHLKNTATSLGSTNLYGSGLVNAEAATR

SEQ ID NO: 52055 - protein, 269 aa, Unidentified
AQSVPWGISRVQAPAAHNRGVTGSGVKVAVLDTGISTHPDLNIRGGASFVPGEPSTQDGNGHGTHVAGTIAALNNSIGVLGVAPSAELYAVKVLGASGSGSVSSIAQGLEWAGNNGMHVANLSLGSPSPSATLEQAVNSATSRGVLVVAASGNSGAGSISYPARYANAMAVGATDQNNNRASFSQYGAGLDIVAPGVNVQSTYPGSTYASLNGTSMATPHVAGAAALVKQKNPSWSNVQIRNHLKNTATSLGSTNLYGSGLVNAEAATR

SEQ ID NO: 52056 - protein, 272 aa, Unidentified
AQSVPWGISRVQAPAAHNRGLTGSGVKVAVLDTGISTHPDLNIRGGASFVPGEPSTQDGNGHGTHVAGTIAALNNSIGVLGVAPSAELYAVKVLGDATXSGSGSVSSIAQGLEWAGNNGMHVANLSLGSPSPSATLEQAVNSATSRGVLVVAASGNSGAGSISYPARYANAMAVGATDQNNNRASFSQYGAGLDIVAPGVNVQSTYPGSTYASLNGTSMATPHVAGAAALVKQKNPSWSNVQIRNHLKNTATSLGSTNLYGSGLVNAEAATR

SEQ ID NO: 52057 - protein, 269 aa, Unidentified
AQSVPWGISRVQAPAAHNRGLTGSGVKVAVLDTGISTHPDLNIRGGASFVPGEPSTQDGNGHGTHVAGTIAALNNSIGVLGVAPSAELYAVKVLGASGSGSVSSIAQGLEWAGNNGMHVANLSLGSPSPSATLEQAVNSATSRGVLVVAASGNSGAGSISYPARYANAMAVGATDQNNNRASFSQYGAGLDIVAPGVNVQSTYPGSTYASLNGTSMATPHVAGAAALVRQKNPSWSNVQIRNHLKNTATSLGSTNLYGSGLVNAEAATR

SEQ ID NO: 52058 - protein, 269 aa, Unidentified
AQSVPWGISRVQAPAAHNRGLTGSGVKVAVLDTGISTHPDLNIRGGASFVPGEPSTQDGNGHGTHVAGTIAALNNSIGVLGVAPSAELYAVKVLGASGSGSVSSIAQGLEWAGNNGMHVANLSLGSPSPSATLEQAVNSATSRGVLVVAASGNSGAGSISYPARYANAMAVGATDQNNNRASFSQYGAGLDIVAPGXNVQSTYPGSTYASLNGTSMATPHVAGAAALVKQKNPSWSNVQIRNHLKNTATSLGSTNLYGSGLVNAEAATR

SEQ ID NO: 52059 - protein, 269 aa, Unidentified
AQSVPWGISRVQAPAAHNRGLTGSGVKVAVLDTGISTHPDLNIRGGASFVPGEPSTQDGNGHGTHVAGTIAALNNSIGVLGVAPSAELYAGKVLGASGSGSVSSIAQGLEWAGNNGMHVANLSLGSPSPSATLEQAVNSATSRGVLVVAASGNSGAGSISYPARYANAMAVGATDQNNNRASFSQYGAGLDIVAPGVNVQSTYPGSTYASLNGTSMATPHVAGAAALVKQKNPSWSNVQIRNHLKNTATSLGSTNLYGSGLVNAEAATR

SEQ ID NO: 52060 - protein, 269 aa, Unidentified
AQSVPWGISRVQAPAAHNRGLTGSGVKVAVLDTGISTHPDLNIRGGASKVPGEPSTQDGNGHGTHVAGTIAALNNSIGVLGVAPSAELYAVKVLGASGSGSVSSIAQGLEWAGNNGMHVANLSLGSPSPSATLEQAVNSATSRGVLVVAASGNSGAGSISYPARYANAMAVGATDQNNNRASFSQYGAGLDIVAPGVNVQSTYPGSTYASLNGTSMATPHVAGAAALVKQKNPSWSNVQIRNHLKNTATSLGSTNLYGSGLVNAEAATR

SEQ ID NO: 52061 - protein, 269 aa, Unidentified
AQSVPWGISRVQAPAAHNRGLTGSGVKVAVLDTGISTHPDLNIRGGASFVPGEPSTQDGNGHGTHVAGTIAALNNSIGVLGVAPSAELYAVKVLGASGSGSVSSIAQGLEWAGNNGMWVANLSLGSPSPSATLEQAVNSATSRGVLVVAASGNSGAGSISYPARYANAMAVGATDQNNNRASFSQYGAGLDIVAPGVNVQSTYPGSTYASLNGTSMATPHVAGAAALVKQKNPSWSNVQIRNHLKNTATSLGSTNLYGSGLVNAEAATR

SEQ ID NO: 52062 - protein, 269 aa, Unidentified
AQSVPWGISRVQAPAAHNRGLTGSGVKVAVLDTGISTHPDLNIRGGASFVPGEPSTQDGNGHGTHVAGTIAALNNSIGVLGVAPSAELYAVKVLGASGSGSVSSIAQGLEWAGNNHMHVANLSLGSPSPSATLEQAVNSATSRGVLVVAASGNSGAGSISYPARYANAMAVGATDQNNNRASFSQYGAGLDIVAPGVNVQSTYPGSTYASLNGTSMATPHVAGAAALVKQKNPSWSNVQIRNHLKNTATSLGSTNLYGSGLVNAEAATR

SEQ ID NO: 52063 - protein, 269 aa, Unidentified
AQSVPWGISRVQAPAAHNRGLTGSGVKVAVLDTGISTHPDLNIRGGASFVPGEPSTQDGNGHGTHVAGTIAALNNSIGVLGVAPSAELYAVKVLGASGSGSVSSIAQGLEWAGNNGMHVANLSLGSPSPSATLEQAVNSATSRGVLVVAASGNSGAGSISYPARYANAMAVGATDQNNNRASFSQYGAGLDIVAPGLNVQSTYPGSTYASLNGTSMATPHVAGAAALVKQKNPSWSNVQIRNHLKNTATSLGSTNLYGSGLVNAEAATR

SEQ ID NO: 52064 - protein, 269 aa, Unidentified
AQSVPWGISRVQAPAAHNRGLTGSGVKVAVLDTGISTHPDLNIRGGASFVPGEPSTQDGNGHGTHVAGTIAALNNSIGVLGVAPSAELYAVKVLGASGSGSVSSIAQGLEWAGNNGMHVANLSLGSPSPSATLEQAVNSATSRGVLVVAASGNSGAGSISYPARYANAMAVGATDQNNNRASFSQYGAGLDIVAPGVNVQSTYPGSTYASLNGTSMATPHVAGAAALVKQKNPSWSNVQIRNHLKNTSTSLGSTNLYGSGLVNAEAATR

SEQ ID NO: 52065 - protein, 269 aa, Unidentified
AQSVPWGISRVQAPAAHNRGLTGSGVKVAVLDTGISTHPDLNIRGGASFVPGEPSTQDGNGHGTHVAGTIAALNNSIGVLGVAPSAELYAVKVLGASGSGSVSSIAQGLEWAGNNKMHVANLSLGSPSPSATLEQAVNSATSRGVLVVAASGNSGAGSISYPARYANAMAVGATDQNNNRASFSQYGAGLDIVAPGVNVQSTYPGSTYASLNGTSMATPHVAGAAALVKQKNPSWSNVQIRNHLKNTATSLGSTNLYGSGLVNAEAATR

SEQ ID NO: 52066 - protein, 269 aa, Unidentified
AQSVPWGISRVQAPAAHNRGLTGSGVKVAVLDTGISTHPDLNIRGGASFVPGEPSTQDGNGHGTHVAGTIAALNNSIGVLGVAPSAELYAVKVLGASGSGSVSSIAQGLEWAGNNGMHVANLSLGSPSLSATLEQAVNSATSRGVLVVAASGNSGAGSISYPARYANAMAVGATDQNNNRASFSQYGAGLDIVAPGVNVQSTYPGSTYASLNGTSMATPHVAGAAALVKQKNPSWSNVQIRNHLKNTATSLGSTNLYGSGLVNAEAATR

SEQ ID NO: 52067 - protein, 269 aa, Unidentified
AQSVPWGISRVQAPAAHNRGLTGSGVKVAVIDTGISTHPDLNIRGGASFVPGEPSTQDGNGHGTHVAGTIAALNNSIGVLGVAPSAELYAVKVLGASGSGSVSSIAQGLEWAGNNGMHVANLSLGSPSPSATLEQAVNSATSRGVLVVAASGNSGAGSISYPARYANAMAVGATDQNNNRASFSQYGAGLDIVAPGVNVQSTYPGSTYASLNGTSMATPHVAGAAALVKQKNPSWSNVQIRNHLKNTATSLGSTNLYGSGLVNAEAATR

SEQ ID NO: 52068 - protein, 269 aa, Unidentified
AQSVPWGISRVQAPAAHNRGLTGSGVKVAVLDTGISTHPDLNIRGGASFVPGEPSTQDGNGHGTHVAGTIAALNNSIGVLGVAPSAELYAVKVLGASGSGSVSSIAQGLEWAGNNGMHVANLSLGSPSPSATLEQAVNSATSRGVLVVAASGNSGAGSISYPARYANAMAVGATDQNNNRASFSQYGAGLDIVAPGVNVQSTYPGSTYASLNGTSMATPHVAGAAALVKQKNPSWSNVQIRNHLKNTATSLGSTNLYGSGLVNAAAATR

SEQ ID NO: 52069 - protein, 270 aa, Aspergillus oryzae
AQSVPWGISRVQAPAAHNRGLTGSGVKVAVLDTGISTHPDLNIRGGASFVPGEPSTQDGNGHGTHVAGTIAALNNSIGVLGVAPSAELYAVKVLGASEGSGSVSSIAQGLEWAGNNGMHVANLSLGSPSPSATLGQAVNSATSRGVLVVAASGNSGAGSISYPARYANAMAVGATDQNNNRASFSQYGAGLDIVAPGVNVQSTYPGSTYASLNGTSMATPHVAGAAALVKQKNPSWSNVQIRNHLKNTATSLGSTNLYGSGLVNAEAATR

SEQ ID NO: 52070 - protein, 269 aa, Unidentified
AQSVPWGISRVQAPAAHNRGLTGSGVKVAVLDTGISTHPDLNIRGGASFVPGEPSTQDGNGHGTHVAGTIAALNNSIGVLGVAPSAELYAVKVLGASGSGSVSSIAQGLEWAGNNGMHVANLSLGSPSPSATLEQAVNSATSRGVLVVAASGNSGAGSISYPARYANAMAVGATDQNNNRASFSQYGAGLDIVAPGVNVQSTYPGSTYASLNGTSMATPHVAGAAALVKQKNPSWSNVQIRNHLKNTVTSLGSTNLYGSGLVNAEAATR

SEQ ID NO: 52071 - protein, 269 aa, Unidentified
AQSVPWGISRVQAPAAHNRGLTGSGVKVAVLDTGISTHPDLNIRGGASFVPGEPSTQDGNGHGTHVAGTIAALNNSIGVLGVAPSAELYAVKVLGASGSGSVSSIAQGLEWAGNNGMHVANLSLGSPAPSATLEQAVNSATSRGVLVVAASGNSGAGSISYPARYANAMAVGATDQNNNRASFSQYGAGLDIVAPGVNVQSTYPGSTYASLNGTSMATPHVAGAAALVKQKNPSWSNVQIRNHLKNTATSLGSTNLYGSGLVNAEAATR

SEQ ID NO: 52072 - protein, 269 aa, Unidentified
AQSVPWGISRVQAPAAHNRGLTGSGVKVAVLDTGISTHPDLXIRGGASFVPGEPSTQDGNGHGTHVAGTIAALNNSIGVLGVAPSAELYAVKVLGASGSGSVSSIAQGLEWAGNNGMHVANLSLGSPSPSATLEQAVNSATSRGVLVVAASGNSGAGSISYPARYANAMAVGATDQNNNRASFSQYGAGLDIVAPGVNVQSTYPGSTYASLNGTSMATPHVAGAAALVKQKNPSWSNVQIRNHLKNTATSLGSTNLYGSGLVNAEAATR

SEQ ID NO: 52073 - protein, 269 aa, Unidentified
AQSVPWGISRVQAPAAHNRGLTGSGVKVAVLDTGISTHPDLNIRGGASFVPGEPSTQDGNGHGTHVAGTIAALNNSIGVLGNAPSAELYAVKVLGASGSGSVSSIAQGLEWAGNNGMHVANLSLGSPSPSATLEQAVNSATSRGVLVVAASGNSGAGSISYPARYANAMAVGATDQNNNRASFSQYGAGLDIVAPGVNVQSTYPGSTYASLNGTSMATPHVAGAAALVKQKNPSWSNVQIRNHLKNTATSLGSTNLYGSGLVNAEAATR

SEQ ID NO: 52074 - protein, 269 aa, Unidentified
AQSVPWGISRVQAPAAHNRGLTGSGVKVAVLDTGISTHPDLNIRGGASFVPGEPSTQDGNGHGTHVAGTIAALNNSIGVLGVAPSAELYAVKVLGASGSGSVSSIAQGLEWAGNNGMHVANLSLGSPSPSATLEQAVNSATSRGVLVVAASGGSGAGSISYPARYANAMAVGATDQNNNRASFSQYGAGLDIVAPGVNVQSTYPGSTYASLNGTSMATPHVAGAAALVKQKNPSWSNVQIRNHLKNTATSLGSTNLYGSGLVNAEAATR

SEQ ID NO: 52075 - protein, 269 aa, Unidentified
AQSVPWGISRVQAPAAHNRGLTGSGFKVAVLDTGISTHPDLNIRGGASFVPGEPSTQDGNGHGTHVAGTIAALNNSIGVLGVAPSAELYAVKVLGASGSGSVSSIAQGLEWAGNNGMHVANLSLGSPSPSATLEQAVNSATSRGVLVVAASGNSGAGSISYPARYANAMAVGATDQNNNRASFSQYGAGLDIVAPGVNVQSTYPGSTYASLNGTSMATPHVAGAAALVKQKNPSWSNVQIRNHLKNTATSLGSTNLYGSGLVNAEAATR

SEQ ID NO: 52076 - protein, 269 aa, Unidentified
AQSVPWGISRVQAPAAHNRGLTGSGVKVAVLDTGISTHPDLNIRGGASFVPGEPSTQDGNGHGTHVAGTIAALNNSIGVLGVAPSAELYAVKVLGASGSGYVSSIAQGLEWAGNNGMHVANLSLGSPSPSATLEQAVNSATSRGVLVVAASGNSGAGSISYPARYANAMAVGATDQNNNRASFSQYGAGLDIVAPGVNVQSTYPGSTYASLNGTSMATPHVAGAAALVKQKNPSWSNVQIRNHLKNTATSLGSTNLYGSGLVNAEAATR

SEQ ID NO: 52077 - protein, 269 aa, Unidentified
AQSVPWGISRVQAPAAHNRGLTGSGVKVAVLDTGISTHPDLNIRGGASFVPGEPSTQDGNGHGTHVAGTIAALNNSIGVLGVAPSAELKAVKVLGASGSGSVSSIAQGLEWAGNNGMHVANLSLGSPSPSATLEQAVNSATSRGVLVVAASGNSGAGSISYPARYANAMAVGATDQNNNRASFSQYGAGLDIVAPGVNVQSTYPGSTYASLNGTSMATPHVAGAAALVKQKNPSWSNVQIRNHLKNTATSLGSTNLYGSGLVNAEAATR

SEQ ID NO: 52078 - protein, 269 aa, Unidentified
AQSVPWGISRVQAPAAHNRGLTGSGVKVAVLDTGISTHPDLNIRGGASFVPGEPSTQDGNGHGTHVAGTIAALNNSIGVLGVAPSAELYAVKVLGASGSGSVSSIAQGLEWAGNNLMHVANLSLGSPSPSATLEQAVNSATSRGVLVVAASGNSGAGSISYPARYANAMAVGATDQNNNRASFSQYGAGLDIVAPGVNVQSTYPGSTYASLNGTSMATPHVAGAAALVKQKNPSWSNVQIRNHLKNTATSLGSTNLYGSGLVNAEAATR

SEQ ID NO: 52079 - protein, 269 aa, Unidentified
AQSVPWGISRVQAPAAHNRGLTGSGVKVAVLDTGISTHPDLNIRGGASFVPGEPSTQDGNGAGTHVAGTIAALNNSIGVLGVAPSAELYAVKVLGASGSGSVSSIAQGLEWAGNNGMHVANLSLGSPSPSATLEQAVNSATSRGVLVVAASGNSGAGSISYPARYANAMAVGATDQNNNRASFSQYGAGLDIVAPGVNVQSTYPGSTYASLNGTSMATPHVAGAAALVKQKNPSWSNVQIRNHLKNTATSLGSTNLYGSGLVNAEAATR

SEQ ID NO: 52080 - protein, 269 aa, Unidentified
AQSVPWGISRVQAPAAHNRGLTGSGVKVAVLDTGISTHPDLNIRGGASFVPGEPSTQDGNGHGTHVAGTIAALNNSIGVLGVAPSAELYAVKVLGASGSGSVSSIAQGLEWAGNNGMHVANLSLGSPSPSATLEQAVNSATSRGVLVVAASGNSGAGSISYPARYANAMAVGATDQNNNRASFSQYGAGLDIVAPGVNVQSTYPGSTYASLNGTSMATPHVAGAAALVKQKNPSWSNVQIRNHLKNTWTSLGSTNLYGSGLVNAEAATR

SEQ ID NO: 52081 - protein, 271 aa, Unidentified
AQSVPWGISRVQAPAAHNRGLTGSGVKVAVLDTGISTHPDLNIRGGASFVPGEPSTQDGNGHGTHVAGTIAALNNSIGVLGVAPSAELYAVKVLDATXSGSGSVSSIAQGLEWAGNNGMHVANLSLGSPSPSATLEQAVNSATSRGVLVVAASGNSGAGSISYPARYANAMAVGATDQNNNRASFSQYGAGLDIVAPGVNVQSTYPGSTYASLNGTSMATPHVAGAAALVKQKNPSWSNVQIRNHLKNTATSLGSTNLYGSGLVNAEAATR

SEQ ID NO: 52082 - protein, 274 aa, Unidentified
AQSVPWGISRVQAPAAHNRGLTGSGVKVAVLDTGISTHPDLNIRGGASFVPGEPSTQDGNGHGTHVAGTIAALNNSIGVLGVAPGAELYAVKVLGAGGGSXSGSGSVSSIAQGLEWAGNNGMHVANLSLGSPSPSATLEQAVNSATSRGVLVVAASGNSGAGSISYPARYANAMAVGATDQNNNRASFSQYGAGLDIVAPGVNVQSTYPGSTYASLNGTSMATPHVAGAAALVKQKNPSWSNVQIRNHLKNTATSLGSTNLYGSGLVNAEAATR

SEQ ID NO: 52083 - protein, 269 aa, Unidentified
AQSVPWGISRVQAPAAHNRGLTGSGVKVAVADTGISTHPDLNIRGGASFVPGEPSTQDGNGHGTHVAGTIAALNNSIGVLGVAPSAELYAVKVLGASGSGSVSSIAQGLEWAGNNGMHVANLSLGSPSPSATLEQAVNSATSRGVLVVAASGNSGAGSISYPARYANAMAVGATDQNNNRASFSQYGAGLDIVAPGVNVQSTYPGSTYASLNGTSMATPHVAGAAALVKQKNPSWSNVQIRNHLKNTATSLGSTNLYGSGLVNAEAATR

SEQ ID NO: 52084 - protein, 269 aa, Unidentified
AQSVPWGISRVQAPAAHNRGLTGLGVKVAVLDTGISTHPDLNIRGGASFVPGEPSTQDGNGHGTHVAGTIAALNNSIGVLGVAPSAELYAVKVLGASGSGSVSSIAQGLEWAGNNGMHVANLSLGSPSPSATLEQAVNSATSRGVLVVAASGNSGAGSISYPARYANAMAVGATDQNNNRASFSQYGAGLDIVAPGVNVQSTYPGSTYASLNGTSMATPHVAGAAALVKQKNPSWSNVQIRNHLKNTATSLGSTNLYGSGLVNAEAATR

SEQ ID NO: 52085 - protein, 269 aa, Unidentified
AQSVPWGISRVQAPAAHNRGLTGSGVKVAVLDTGISTHPDLNIRGGASFVPGEPSTQDGNGHGTHVAGTIAALNNSIGVLGVAPSAELYAVKVLGASGSGSVSSIAQGLEWAGNNGMHVANLSLGSPSPSATLEQAVNSATSRGSLVVAASGNSGAGSISYPARYANAMAVGATDQNNNRASFSQYGAGLDIVAPGVNVQSTYPGSTYASLNGTSMATPHVAGAAALVKQKNPSWSNVQIRNHLKNTATSLGSTNLYGSGLVNAEAATR

SEQ ID NO: 52086 - protein, 269 aa, Unidentified
AQSVPWGISRVQAPAAHNRGLTGSGVKVAVLDTGISTHPDLNIRGGAFFVPGEPSTQDGNGHGTHVAGTIAALNNSIGVLGVAPSAELYAVKVLGASGSGSVSSIAQGLEWAGNNGMHVANLSLGSPSPSATLEQAVNSATSRGVLVVAASGNSGAGSISYPARYANAMAVGATDQNNNRASFSQYGAGLDIVAPGVNVQSTYPGSTYASLNGTSMATPHVAGAAALVKQKNPSWSNVQIRNHLKNTATSLGSTNLYGSGLVNAEAATR

SEQ ID NO: 52087 - protein, 272 aa, Unidentified
AQSVPWGISRVQAPAAHNRGLTGSGVKVAVLDTGISTHPDLNIRGGASFVPGEPSTQDGNGHGTHVAGTIAALNNSIGVLGVAPSAELYAVKVLGATXSDGSGSVSSIAQGLEWAGNNGMHVANLSLGSPSPSATLEQAVNSATSRGVLVVAASGNSGAGSISYPARYANAMAVGATDQNNNRASFSQYGAGLDIVAPGVNVQSTYPGSTYASLNGTSMATPHVAGAAALVKQKNPSWSNVQIRNHLKNTATSLGSTNLYGSGLVNAEAATR

SEQ ID NO: 52088 - protein, 269 aa, Unidentified
AQSVPWGISRVQAPAAHNRGLTGSGVKNAVLDTGISTHPDLNIRGGASFVPGEPSTQDGNGHGTHVAGTIAALNNSIGVLGVAPSAELYAVKVLGASGSGSVSSIAQGLEWAGNNGMHVANLSLGSPSPSATLEQAVNSATSRGVLVVAASGNSGAGSISYPARYANAMAVGATDQNNNRASFSQYGAGLDIVAPGVNVQSTYPGSTYASLNGTSMATPHVAGAAALVKQKNPSWSNVQIRNHLKNTATSLGSTNLYGSGLVNAEAATR

SEQ ID NO: 52089 - protein, 269 aa, Unidentified
AQSVPWGISRVQAPAAHNRGLTGSGVKVAVLDTGISTHPTLNIRGGASFVPGEPSTQDGNGHGTHVAGTIAALNNSIGVLGVAPSAELYAVKVLGASGSGSVSSIAQGLEWAGNNGMHVANLSLGSPSPSATLEQAVNSATSRGVLVVAASGNSGAGSISYPARYANAMAVGATDQNNNRASFSQYGAGLDIVAPGVNVQSTYPGSTYASLNGTSMATPHVAGAAALVKQKNPSWSNVQIRNHLKNTATSLGSTNLYGSGLVNAEAATR

SEQ ID NO: 52090 - protein, 269 aa, Unidentified
AQSVPWGISRVQAPAAHNRGLTGSGVKVAVLDTGISTHPDLNIRGGASFVPGEPSTQDGNGHGTHVAGTIAALNNSIGVLGVAPSAELYAVKVLGASGSGSVSSIAQGLEWAGNNGMHVANLSLGSPSPSATLEQAVNSATSRGVLVVAASGNSGAGSISYPARYANAMAVGATDQNNNRASFSQYGAGLDIVAPGVNVQSTYPGSTYASLNGTSMATPHVAGAAALVKQKNPSWSNVQIRNHLKNTATSLKSTNLYGSGLVNAEAATR

SEQ ID NO: 52091 - protein, 269 aa, Unidentified
AQSVPWGISRVQAPAAHNRGLTGSGVKVAVLDTGISTHPDLNIRGGASFVPGEPSTQDGNGHGTHVAGTIAALNNSIGVLGVAPSAELYAVKVLGASGSGSVSSIAQGLEWAGNNGMHEANLSLGSPSPSATLEQAVNSATSRGVLVVAASGNSGAGSISYPARYANAMAVGATDQNNNRASFSQYGAGLDIVAPGVNVQSTYPGSTYASLNGTSMATPHVAGAAALVKQKNPSWSNVQIRNHLKNTATSLGSTNLYGSGLVNAEAATR

SEQ ID NO: 52092 - protein, 269 aa, Unidentified
AQSVPWGISRVQAPAAHNRGLTGSGVKVAVLDTGISTHPDLNIIGGASFVPGEPSTQDGNGHGTHVAGTIAALNNSIGVLGVAPSAELYAVKVLGASGSGSVSSIAQGLEWAGNNGMHVANLSLGSPSPSATLEQAVNSATSRGVLVVAASGNSGAGSISYPARYANAMAVGATDQNNNRASFSQYGAGLDIVAPGVNVQSTYPGSTYASLNGTSMATPHVAGAAALVKQKNPSWSNVQIRNHLKNTATSLGSTNLYGSGLVNAEAATR

SEQ ID NO: 52093 - protein, 269 aa, Unidentified
AQSVPWGISHVQAPAAHNRGLTGSGVKVAVLDTGISTHPDLNIRGGASFVPGEPSTQDGNGHGTHVAGTIAALNNSIGVLGVAPSAELYAVKVLGASGSGSVSSIAQGLEWAGNNGMHVANLSLGSPSPSATLEQAVNSATSRGVLVVAASGNSGAGSISYPARYANAMAVGATDQNNNRASFSQYGAGLDIVAPGVNVQSTYPGSTYASLNGTSMATPHVAGAAALVKQKNPSWSNVQIRNHLKNTATSLGSTNLYGSGLVNAEAATR

SEQ ID NO: 52094 - protein, 269 aa, Unidentified
AQSVPWGISRVQAPAAHNRGLTGSGVKVAVLDTGISTHPDLNIRGGASFVPGEPSTQDGNGHGTHVAGTIAALNNSIGVLGVAPSAELYAVKVLGASGSGSVSSIAQGLEWAGNNGMHVANLSLGSPSPSATLEQAVNSATSRGVLVVAASGNSGAGSISYPARYANAMAVGATDQNNNRASFSQYGAGLDIVAPGVNVQSTYPGSTYASLNGTSMATPHVAGAAALVKQKNPSWSNVQIRNHLKNTKTSLGSTNLYGSGLVNAEAATR

SEQ ID NO: 52095 - protein, 269 aa, Unidentified
AQSVPWGISRVQAPAAHNRGLTGSGVKVAVLDTGISTNPDLNIRGGASFVPGEPSTQDGNGHGTHVAGTIAALNNSIGVLGVAPSAELYAVKVLGASGSGSVSSIAQGLEWAGNNGMHVANLSLGSPSPSATLEQAVNSATSRGVLVVAASGNSGAGSISYPARYANAMAVGATDQNNNRASFSQYGAGLDIVAPGVNVQSTYPGSTYASLNGTSMATPHVAGAAALVKQKNPSWSNVQIRNHLKNTATSLGSTNLYGSGLVNAEAATR

SEQ ID NO: 52096 - protein, 269 aa, Unidentified
AQSVPWGISRVQAPAAHNRGLTGSGVKVAVLDTGISTHPDLNIRGGASFVPGEPSTQDGNGHGTHVAGTIAALNNSIGVLGVAPSAELYAVKVLGASGSGSVSSIAQGLEWAGNNGMHVANISLGSPSPSATLEQAVNSATSRGVLVVAASGNSGAGSISYPARYANAMAVGATDQNNNRASFSQYGAGLDIVAPGVNVQSTYPGSTYASLNGTSMATPHVAGAAALVKQKNPSWSNVQIRNHLKNTATSLGSTNLYGSGLVNAEAATR

SEQ ID NO: 52097 - protein, 269 aa, Unidentified
AQSVPWGISRVQAPAAHNRGLTGSGVKVAVLDTGISTHPDLNIRGGASFVPGEPSTQDGNGHGTHVAGTIAALNNSIGVLGVAPSAELYAVKVLGASGSGQVSSIAQGLEWAGNNGMHVANLSLGSPSPSATLEQAVNSATSRGVLVVAASGNSGAGSISYPARYANAMAVGATDQNNNRASFSQYGAGLDIVAPGVNVQSTYPGSTYASLNGTSMATPHVAGAAALVKQKNPSWSNVQIRNHLKNTATSLGSTNLYGSGLVNAEAATR

SEQ ID NO: 52098 - protein, 269 aa, Unidentified
AQSVPWGISRVQAPAAHNRGLTGSGVKVAVLDTGISTCPDLNIRGGASFVPGEPSTQDGNGHGTHVAGTIAALNNSIGVLGVAPSAELYAVKVLGASGSGSVSSIAQGLEWAGNNGMHVANLSLGSPSPSATLEQAVNSATSRGVLVVAASGNSGAGSISYPARYANAMAVGATDQNNNRASFSQYGAGLDIVAPGVNVQSTYPGSTYASLNGTSMATPHVAGAAALVKQKNPSWSNVQIRNHLKNTATSLGSTNLYGSGLVNAEAATR

SEQ ID NO: 52099 - protein, 269 aa, Unidentified
AQSVPWGISRVQAPAAHNRGLTGSGVKVAVLDTGISTHPDLNIRGGATFVPGEPSTQDGNGHGTHVAGTIAALNNSIGVLGVAPSAELYAVKVLGASGSGSVSSIAQGLEWAGNNGMHVANLSLGSPSPSATLEQAVNSATSRGVLVVAASGNSGAGSISYPARYANAMAVGATDQNNNRASFSQYGAGLDIVAPGVNVQSTYPGSTYASLNGTSMATPHVAGAAALVKQKNPSWSNVQIRNHLKNTATSLGSTNLYGSGLVNAEAATR

SEQ ID NO: 52100 - protein, 269 aa, Unidentified
AQSVPWGISRVQAPAAHNRGLTGSGVKVAVLDTGISTHPDLNIRGGASFVPGEPSTQDGNGHGTHVAGTIAALNNSIGVLGVAPSAELYAVKVLGASGSGSVSSIAQGLEWAGNNGMHVANLSLGSPSGSATLEQAVNSATSRGVLVVAASGNSGAGSISYPARYANAMAVGATDQNNNRASFSQYGAGLDIVAPGVNVQSTYPGSTYASLNGTSMATPHVAGAAALVKQKNPSWSNVQIRNHLKNTATSLGSTNLYGSGLVNAEAATR

SEQ ID NO: 52101 - protein, 269 aa, Unidentified
AQSVPWGISRVQAPAAHNRGLTGSGVKVAVLDTGISTHPDLNIRGGASFVPGEPSTQDGNGHGTHVAGTIAALNNSIGVLGVAPSAELYAVKVLGASGSGSVSSIAQGLEWAGNNEMHVANLSLGSPSPSATLEQAVNSATSRGVLVVAASGNSGAGSISYPARYANAMAVGATDQNNNRASFSQYGAGLDIVAPGVNVQSTYPGSTYASLNGTSMATPHVAGAAALVKQKNPSWSNVQIRNHLKNTATSLGSTNLYGSGLVNAEAATR

SEQ ID NO: 52102 - protein, 269 aa, Unidentified
AQSVPWGISRVQAPAAHNRGLTGSGVKVAVLDTGISTHPDLNIRGGASFVPGEPSTQDGNGHGTHVAGTIAALNNSIGVLGVAPSAELYAVKVLGASGSGSVSSIAQGLEWAGNNGMHVANLSLGSPSPSATLEQAVNSATSRGVLVVAASGNSGAGSISYPARYANAMAVGATDQNNNRASFSQYGAGLDIVAPGVNVQSTYPGSTYASLNGTSMATPHVAGAAALVKQKNPSWSNVQIRNHLKNKATSLGSTNLYGSGLVNAEAATR

SEQ ID NO: 52103 - protein, 269 aa, Unidentified
AQSVPWGISRVQAPAAHNRGLTGSGVKVAVLDTGISTHPDLNIRGGASFVPGEPSTQDGNGHGTHVAGTIAALNNSIGVLGVAPSAELYAVKVLGASGSGSVSSIAQGLEWAGNNGMHVANLSLGSPSPSATLEQAVNSATSRGVLVVAASGNSGAGSISYPARYANAMAVGATDQNNNRASFSQYGAGLDIVAPGVNVQSTYPGSTYASLNGTSMATPHVAGAAALVKQKNPSWSNVQIRNHLKNTATSLGSTNLYGNGLVNAEAATR

SEQ ID NO: 52104 - protein, 269 aa, Unidentified
AQSVPWGISRVQAPAAHNRGLTGSGVKVAVLDTGISTHPDLNIRGGAMFVPGEPSTQDGNGHGTHVAGTIAALNNSIGVLGVAPSAELYAVKVLGASGSGSVSSIAQGLEWAGNNGMHVANLSLGSPSPSATLEQAVNSATSRGVLVVAASGNSGAGSISYPARYANAMAVGATDQNNNRASFSQYGAGLDIVAPGVNVQSTYPGSTYASLNGTSMATPHVAGAAALVKQKNPSWSNVQIRNHLKNTATSLGSTNLYGSGLVNAEAATR

SEQ ID NO: 52105 - protein, 269 aa, Unidentified
AQSVPWGISRVQAPAAHNRGLTGSGVKVAVLDTGISTHPDLNIRGGASFVPGEPSTQDGNGHGTHVAGTIAALNNSIGVLGVAPSAELYAVKVLGASGSGSVSSIAQGLEWAGNNGMHVANLSLGSPSPSATLEQAVNSATSRGVLVVAASGNSGAGSISYPARYANAMAVGATDQNNNRASFSQYGAGLDIVAPGSNVQSTYPGSTYASLNGTSMATPHVAGAAALVKQKNPSWSNVQIRNHLKNTATSLGSTNLYGSGLVNAEAATR

SEQ ID NO: 52106 - protein, 269 aa, Unidentified
AQSVPWGISRVQAPAAHNRGLTGSGVKVAVLDTGISTHPDLNIRGGASFVPGEPSTQDGNGHGTHVAGTIAALNNSIGVLGVAPSAELYAVKVLGASGSGSVSSIAQGLEWAGNNGMHVANLSLGSPSPSATLEQAVNSATSRGVLVVAASGNSGAGSISYPARYANAMAVGATDQNNNRASFSQYGAGLDIVAPGVNVQSTYPGSTYASLNGTSMATPHVAGAAALVKQKNNSWSNVQIRNHLKNTATSLGSTNLYGSGLVNAEAATR

SEQ ID NO: 52107 - protein, 269 aa, Unidentified
AQSVPWGISRVQAPAAHNRGLTGSGVKVAVLDTGISTHPDLNIRGGASFVPGEPSTQDGNGHGTHVAGTIAALNNSIGVLGVAPSAELYAVKVLGASGSGSVSSIAQGLEWAGNNGMHVANLSLGSPSPSATLEQAVNSATSRGVLVVAASGNSGAGSISYPARYANAMAVGATDQNNNRASFSQYGAGLDIVAPGVNVQSTYPGSTYASMNGTSMATPHVAGAAALVKQKNPSWSNVQIRNHLKNTATSLGSTNLYGSGLVNAEAATR

SEQ ID NO: 52108 - protein, 269 aa, Unidentified
AQSVPWGISRVQAPAAHNRGLTGSGVKVAVLDTGISTHPDLNIRGGASFVPGEPSTQDGNGHGTHVAGTIAALNNSIGVLGVAPSAELYAVKVLGASGSGSVSSIAQGLEWAGNNGMHVANLSLGSPSPSATLEQAVNSATSRGVLVVAASGNSGAGSISYPARYANAMAVGATDQNNNRASFSQYGAGLDIVAPGVNVQSTYPGSTYASDNGTSMATPHVAGAAALVKQKNPSWSNVQIRNHLKNTATSLGSTNLYGSGLVNAEAATR

SEQ ID NO: 52109 - protein, 269 aa, Unidentified
AQVVPWGISRVQAPAAHNRGLTGSGVKVAVLDTGISTHPDLNIRGGASFVPGEPSTQDGNGHGTHVAGTIAALNNSIGVLGVAPSAELYAVKVLGASGSGSVSSIAQGLEWAGNNGMHVANLSLGSPSPSATLEQAVNSATSRGVLVVAASGNSGAGSISYPARYANAMAVGATDQNNNRASFSQYGAGLDIVAPGVNVQSTYPGSTYASLNGTSMATPHVAGAAALVKQKNPSWSNVQIRNHLKNTATSLGSTNLYGSGLVNAEAATR

SEQ ID NO: 52110 - protein, 269 aa, Unidentified
AQSVPWGISRVQAPAAHNRGLTGSGVKVAVLDTGISTHPDLNIRGGASFVPGEPSTQDGNGHGTHVAGTIAALNNSIGVLGVAPSAALYAVKVLGASGSGSVSSIAQGLEWAGNNGMHVANLSLGSPSPSATLEQAVNSATSRGVLVVAASGNSGAGSISYPARYANAMAVGATDQNNNRASFSQYGAGLDIVAPGVNVQSTYPGSTYASLNGTSMATPHVAGAAALVKQKNPSWSNVQIRNHLKNTATSLGSTNLYGSGLVNAEAATR

SEQ ID NO: 52111 - protein, 269 aa, Unidentified
AQSVPWGISRVQAPAAFNRGLTGSGVKVAVLDTGISTHPDLNIRGGASFVPGEPSTQDGNGHGTHVAGTIAALNNSIGVLGVAPSAELYAVKVLGASGSGSVSSIAQGLEWAGNNGMHVANLSLGSPSPSATLEQAVNSATSRGVLVVAASGNSGAGSISYPARYANAMAVGATDQNNNRASFSQYGAGLDIVAPGVNVQSTYPGSTYASLNGTSMATPHVAGAAALVKQKNPSWSNVQIRNHLKNTATSLGSTNLYGSGLVNAEAATR

SEQ ID NO: 52112 - protein, 269 aa, Unidentified
AQSVPWGISRVQAPAAHNRGLTGSGVKVAVLDTGISTHPDLNIRGGASFVPGEPSTQDGNGHGTHVAGTIAALNNSIGVLGVAPSAELYAVKVLGASGSGSVSSIAQGLEWAGNNGMHVANLSLGSPSPSATLEQAVNSATSRGVLVVAASGNSGAGSISYPARYANAMAVGATDQNNNRASFSQYGAGLDIVAPGVNVQSTYPGSTYASLNGTSMATPHVAGAAALVKQKNHSWSNVQIRNHLKNTATSLGSTNLYGSGLVNAEAATR

SEQ ID NO: 52113 - protein, 269 aa, Unidentified
AQSVPWGISRVQAPAAHNRGLTGSGVKVAVLDTGISTHPDLNIRGGASFVPGEPSTQYGNGHGTHVAGTIAALNNSIGVLGVAPSAELYAVKVLGASGSGSVSSIAQGLEWAGNNGMHVANLSLGSPSPSATLEQAVNSATSRGVLVVAASGNSGAGSISYPARYANAMAVGATDQNNNRASFSQYGAGLDIVAPGVNVQSTYPGSTYASLNGTSMATPHVAGAAALVKQKNPSWSNVQIRNHLKNTATSLGSTNLYGSGLVNAEAATR

SEQ ID NO: 52114 - protein, 271 aa, Unidentified
AQSVPWGISRVQAPAAHNRGLTGSGVKVAVLDTGISTHPDLNIRGGASFVPGEPSTQDGNGHGTHVAGTIAALNNSIGVLGVAPSAELYAVKVLNATXSGSGSVSSIAQGLEWAGNNGMHVANLSLGSPSPSATLEQAVNSATSRGVLVVAASGNSGAGSISYPARYANAMAVGATDQNNNRASFSQYGAGLDIVAPGVNVQSTYPGSTYASLNGTSMATPHVAGAAALVKQKNPSWSNVQIRNHLKNTATSLGSTNLYGSGLVNAEAATR

SEQ ID NO: 52115 - protein, 269 aa, Unidentified
AQSVPWGISRVQAPAAHNRGLTGSGVKVAVLDTGISTHPDLNIRGGASFVPGEPSTQDGNGHGTHVAGTIAALNNSIGVLGVAPSAELYAVKVLGASGSGSVSSIAQGLEWAGNNGMHVANLSLGSPSPSATLEQAVNSATSRGVLVVAASGNSGAGSISYPARYANAMAVGATDQNNNRASFSQYGAGLDIVAPGVNVQSTYPGSTYASLNGTSMATPHVAGAAALVKQKNPSWSNVQIRNHLKNTRTSLGSTNLYGSGLVNAEAATR

SEQ ID NO: 52116 - protein, 269 aa, Unidentified
AQSVPWGISRVQAPAAHNRGLTGSGVKVAVLDTGISTHPDLNIRGGASFVPGEPSTQDGNGHGTHVAGTIAALNNSIGVLGVAPSAELYAVKVLGASGSGSVSSIAQGLEWAGNNGMHVANLSLGSPSPSATLEQAVNSATSRGVLVVAASGNSGAGSISYPARYANAMAVGATDQNNNRASFSQYGAGLDIVAPGANVQSTYPGSTYASLNGTSMATPHVAGAAALVKQKNPSWSNVQIRNHLKNTATSLGSTNLYGSGLVNAEAATR

SEQ ID NO: 52117 - protein, 269 aa, Unidentified
AQSVPWGISRVQAPAAHNRGLTGSGVKVAVLDTGISTHPDLNIRGGASFVPGEPSTQDGNGHGTHVAGTIAALNNSIGVLGVAPSAELYAVKVLGASGSGSVSSIAQGLEWAGNNGMHVANLSLGSPSPSATLEQAVNSATSRGVLVVAASGNSGAGXISYPARYANAMAVGATDQNNNRASFSQYGAGLDIVAPGVNVQSTYPGSTYASLNGTSMATPHVAGAAALVKQKNPSWSNVQIRNHLKNTATSLGSTNLYGSGLVNAEAATR

SEQ ID NO: 52118 - protein, 269 aa, Unidentified
AQSVPWGISRVQAPAAHNRGLTGSGVKVAVLDTGISTHPDLNIRGGASFVPGEPSTQDGNGHGTHVAGTIAALNNSIGVLGVAPSAELYAVKVLGASGSGSVSSIAQGLEWAGNNGMHVANLSLGSPSPSATLEQAVNSATSRGVIVVAASGNSGAGSISYPARYANAMAVGATDQNNNRASFSQYGAGLDIVAPGVNVQSTYPGSTYASLNGTSMATPHVAGAAALVKQKNPSWSNVQIRNHLKNTATSLGSTNLYGSGLVNAEAATR

SEQ ID NO: 52119 - protein, 269 aa, Synthetic construct
AQSVPWGISRVQAPAAHNRGLTGSGVKVAVLDTGISTHPDLNIRGGASFVPGEPSTNDGNGHGTHVAGTIAALNNSIGVLGVAPSAELYAVKVLGASGSGSVSSIAQGLEWAGNNGMHVANLSLGSPSPSATLEQAVNSATSRGVLVVAASGNSGAGSISYPARYANAMAVGATDQNNNRASFSQYGAGLDIVAPGVNVQSTYPGSTYASLNGTSMATPHVAGAAALVKQKNPSWSNVQIRNHLKNTATSLGSTNLYGSGLVNAEAATR

SEQ ID NO: 52120 - protein, 269 aa, Unidentified
AQSVPWGISRVQAPAAHNRGLTGSGVKVAVLDTGISTHPDLNIRGGASFVPGEPSTQDRNGHGTHVAGTIAALNNSIGVLGVAPSAELYAVKVLGASGSGSVSSIAQGLEWAGNNGMHVANLSLGSPSPSATLEQAVNSATSRGVLVVAASGNSGAGSISYPARYANAMAVGATDQNNNRASFSQYGAGLDIVAPGVNVQSTYPGSTYASLNGTSMATPHVAGAAALVKQKNPSWSNVQIRNHLKNTATSLGSTNLYGSGLVNAEAATR

SEQ ID NO: 52121 - protein, 269 aa, Bacillus sp.
AQSVPWGISRVQAPAAHNRGLTGSGVKVAVLDTGISTHPDLNIRGGASFVPGEPSTQDGNGHGTHVAGTIAALNNSIGVLGVAPNAELYAVKVLGASGSGSVSSIAQGLEWAGNNGMHVANLSLGSPSPSATLEQAVNSATSRGVLVVAASGNSGAGSISYPARYANAMAVGATDQNNNRASFSQYGAGLDIVAPGVNVQSTYPGSTYASLNGTSAATPHVAGAAALVKQKNPSWSNVQIRNHLKNTATSLGSTNLYGSGLVNAEAATR

SEQ ID NO: 52122 - protein, 269 aa, Unidentified
AQSVPWGISRVQAPAAHNRGLTGSGVKVAVLDTGISTHPFLNIRGGASFVPGEPSTQDGNGHGTHVAGTIAALNNSIGVLGVAPSAELYAVKVLGASGSGSVSSIAQGLEWAGNNGMHVANLSLGSPSPSATLEQAVNSATSRGVLVVAASGNSGAGSISYPARYANAMAVGATDQNNNRASFSQYGAGLDIVAPGVNVQSTYPGSTYASLNGTSMATPHVAGAAALVKQKNPSWSNVQIRNHLKNTATSLGSTNLYGSGLVNAEAATR

SEQ ID NO: 52123 - protein, 269 aa, Unidentified
AQSVPWGISRVQAPAAHNRGLTGSGVKVAVLDTGISTHPDLNIRGGASFVPGEPSTQDGNGHGTHVAGTIAALNNSIGVLGVAPSAELYAVKVLGASGSGSVSSIAQGLEWAGNNGMHVANLSLGSPSPSATLEQAVNSATSRGVLVVAASGNSGAGSISYPARYANAMAVGATDQNNNRASFSQYGAGSDIVAPGVNVQSTYPGSTYASLNGTSMATPHVAGAAALVKQKNPSWSNVQIRNHLKNTATSLGSTNLYGSGLVNAEAATR

SEQ ID NO: 52124 - protein, 269 aa, Unidentified
AQSVPWGISRVQAPAAHNRGLTGSGVKVAVLDTGISTHPDLNIRGGASFVPGEPSTQDGNGHGTHVAGTIAALNNSIGVLGVAPSAELYAVKVLGASGSGSVSSIAQGLEWAGNNGMHVANLSLGSPSPSATLEQAVNSATSRGVLVVAASGNSGAGSISYPARYANAMAVGATDQNNNRASFSQYGAGLDIVAPGVNVQSTYPGSTYASLNGTSMATPHVAGAAALVKQKNPSWSNVQIRNHLKNLATSLGSTNLYGSGLVNAEAATR

SEQ ID NO: 52125 - protein, 269 aa, Unidentified
AQSVPWGISRVQAPAAHNRGLTGSGVKVAVLDTGISTHPDLNIRGGASFVPGEPSTQDGNGHGTHVAGTIAALNNSIFVLGVAPSAELYAVKVLGASGSGSVSSIAQGLEWAGNNGMHVANLSLGSPSPSATLEQAVNSATSRGVLVVAASGNSGAGSISYPARYANAMAVGATDQNNNRASFSQYGAGLDIVAPGVNVQSTYPGSTYASLNGTSMATPHVAGAAALVKQKNPSWSNVQIRNHLKNTATSLGSTNLYGSGLVNAEAATR

SEQ ID NO: 52126 - protein, 269 aa, Unidentified
AQSVPWGISRVQAPAAHNRGLTGSGVKVAVLDTGISTHPDLNIRGGASFVPGEPSTQDGNGHGTHVAGTIAALNNSIGVLGVAPSAELYAVKVLGASGSGSVSSIAQGLEWAGNNGMHVANLSLGSPSNSATLEQAVNSATSRGVLVVAASGNSGAGSISYPARYANAMAVGATDQNNNRASFSQYGAGLDIVAPGVNVQSTYPGSTYASLNGTSMATPHVAGAAALVKQKNPSWSNVQIRNHLKNTATSLGSTNLYGSGLVNAEAATR

SEQ ID NO: 52127 - protein, 269 aa, Unidentified
AQSVPWGISRVQAPAAHNRGLTGSGVKVAVLDTGISTHPDLNIRGGASFVPGEPSTQDGNGHGTHVAGTIAALNNSIGVLGVAPSAELYAVKVLGASGSGSVSSIAQGLEWAGNNGMHVANLSLGSPSPSATLEQAVNSATSRGVLVVAASGNSGAGSISYPAQYANAMAVGATDQNNNRASFSQYGAGLDIVAPGVNVQSTYPGSTYASLNGTSMATPHVAGAAALVKQKNPSWSNVQIRNHLKNTATSLGSTNLYGSGLVNAEAATR

SEQ ID NO: 52128 - protein, 269 aa, Unidentified
AQSVPWGISRVQAPAAHNRGLTGSGVKVAVLDTGISTHPDLNIRGGASFVPGEPSTQDGNGHGTHVAGTIAALNNSIGVLGVAPSAKLYAVKVLGASGSGSVSSIAQGLEWAGNNGMHVANLSLGSPSPSATLEQAVNSATSRGVLVVAASGNSGAGSISYPARYANAMAVGATDQNNNRASFSQYGAGLDIVAPGVNVQSTYPGSTYASLNGTSMATPHVAGAAALVKQKNPSWSNVQIRNHLKNTATSLGSTNLYGSGLVNAEAATR

SEQ ID NO: 52129 - protein, 269 aa, Unidentified
AQSVPWGISRVQAPAAHNRGLTGSGVKVAVLDTGISTHPDLNIRGGASFVPGEPSTQDGNGHGTHVAGTIAALNNSIGVLGVAPSAELYAVKVLGASGSGSVSSIAQGLEWAGNNGMHVANLSLGSPSPSATLEQAVNSATSRGVLVVAASGNSGAGSISYPARYANAMAVGATDQNNNRASFSQYGAGLDIVAPGVNVQSTYPGSTYASLNGTSMATPHVAGAAALVKQKNPSWSNVQIRNHLKNTATNLGSTNLYGSGLVNAEAATR

SEQ ID NO: 52130 - protein, 269 aa, Unidentified
AQSVPWGISRVQAPAAHKRGLTGSGVKVAVLDTGISTHPDLNIRGGASFVPGEPSTQDGNGHGTHVAGTIAALNNSIGVLGVAPSAELYAVKVLGASGSGSVSSIAQGLEWAGNNGMHVANLSLGSPSPSATLEQAVNSATSRGVLVVAASGNSGAGSISYPARYANAMAVGATDQNNNRASFSQYGAGLDIVAPGVNVQSTYPGSTYASLNGTSMATPHVAGAAALVKQKNPSWSNVQIRNHLKNTATSLGSTNLYGSGLVNAEAATR

SEQ ID NO: 52131 - protein, 269 aa, Unidentified
AQSVPWGISRVQAPAAHNRGLTGSGVKVAVLDTGISTHPDLIIRGGASFVPGEPSTQDGNGHGTHVAGTIAALNNSIGVLGVAPSAELYAVKVLGASGSGSVSSIAQGLEWAGNNGMHVANLSLGSPSPSATLEQAVNSATSRGVLVVAASGNSGAGSISYPARYANAMAVGATDQNNNRASFSQYGAGLDIVAPGVNVQSTYPGSTYASLNGTSMATPHVAGAAALVKQKNPSWSNVQIRNHLKNTATSLGSTNLYGSGLVNAEAATR

SEQ ID NO: 52132 - protein, 269 aa, Unidentified
AQSVPWGISRVQAPAAHNRGLTGSGVKVAVLDTGISTHPDLNIRGGASFVPGEPSTQDGNGHGTHVAGTIAALNNSIGVLGVAPSAELYAVKVLGASGSGSVSSIAQGLEWAGNNGMHVANLSLGSPSPSATLEQAVNSATSRGVLVVAASGNSGAGSISYPARYANAMAVGATDQNNNRASFSQHGAGLDIVAPGVNVQSTYPGSTYASLNGTSMATPHVAGAAALVKQKNPSWSNVQIRNHLKNTATSLGSTNLYGSGLVNAEAATR

SEQ ID NO: 52133 - protein, 269 aa, Unidentified
AQSVPWGISRVQAPAAHNRGLTGSGVKVAVLDTGISTHPDLNIRGGAKFVPGEPSTQDGNGHGTHVAGTIAALNNSIGVLGVAPSAELYAVKVLGASGSGSVSSIAQGLEWAGNNGMHVANLSLGSPSPSATLEQAVNSATSRGVLVVAASGNSGAGSISYPARYANAMAVGATDQNNNRASFSQYGAGLDIVAPGVNVQSTYPGSTYASLNGTSMATPHVAGAAALVKQKNPSWSNVQIRNHLKNTATSLGSTNLYGSGLVNAEAATR

SEQ ID NO: 52134 - protein, 269 aa, Unidentified
AQSVPWGISRVQAPAAHNRGLTGSGVKVAVLDTGISTHPDLNIRGGASFVPGEPSTQDGNGHGTHVAGTIAALNNQIGVLGVAPSAELYAVKVLGASGSGSVSSIAQGLEWAGNNGMHVANLSLGSPSPSATLEQAVNSATSRGVLVVAASGNSGAGSISYPARYANAMAVGATDQNNNRASFSQYGAGLDIVAPGVNVQSTYPGSTYASLNGTSMATPHVAGAAALVKQKNPSWSNVQIRNHLKNTATSLGSTNLYGSGLVNAEAATR

SEQ ID NO: 52135 - protein, 269 aa, Unidentified
AQSVPWGISRVQAPAAHNRGLTGSGVKVAVLDTGISTHPDLNIRGGASFVPGEPSTQDGNGHGTHVAGTIAALNNSIGVLGVAPSAELYAVKVLGASGSGSVSSIAQGLEWAGNNGMHVANLSLGSPSPTATLEQAVNSATSRGVLVVAASGNSGAGSISYPARYANAMAVGATDQNNNRASFSQYGAGLDIVAPGVNVQSTYPGSTYASLNGTSMATPHVAGAAALVKQKNPSWSNVQIRNHLKNTATSLGSTNLYGSGLVNAEAATR

SEQ ID NO: 52136 - protein, 269 aa, Unidentified
AQSVPWGISRVQAPAAHNRGLVGSGVKVAVLDTGISTHPDLNIRGGASFVPGEPSTQDGNGHGTHVAGTIAALNNSIGVLGVAPSAELYAVKVLGASGSGSVSSIAQGLEWAGNNGMHVANLSLGSPSPSATLEQAVNSATSRGVLVVAASGNSGAGSISYPARYANAMAVGATDQNNNRASFSQYGAGLDIVAPGVNVQSTYPGSTYASLNGTSMATPHVAGAAALVKQKNPSWSNVQIRNHLKNTATSLGSTNLYGSGLVNAEAATR

SEQ ID NO: 52137 - protein, 269 aa, Unidentified
AQSVPWGISRVQAPAAHNRGLTGSGVKVAVLDTGISTHPDLNIRGGASFVPGEPSTQDGNGHGTHVAGTIAALNNSIGVLGVAPSAELYAVKVLGASGSGSVSSIAQGLEWAGNNGMHVANLSLGSPSPGATLEQAVNSATSRGVLVVAASGNSGAGSISYPARYANAMAVGATDQNNNRASFSQYGAGLDIVAPGVNVQSTYPGSTYASLNGTSMATPHVAGAAALVKQKNPSWSNVQIRNHLKNTATSLGSTNLYGSGLVNAEAATR

SEQ ID NO: 52138 - protein, 269 aa, Unidentified
AQSVPWGISRVQAPAAHNRGLTGSGVKVAVLDTGISTHPDLNIRGGASFVPGEPSTQDGNGHGTHVAGTIAALNNSIGVLGVAPSAELYAVKVLGASGSGSVSSIAQGLEWAGNNGMHVANLSLGSPSPSATLEQAVNSATSRGVLVVAASGNSGAGSISYPARYANAMAVGATDQNNNRASFSQYGAGLDIVAPGVNVQSTYPGSAYASLNGTSMATPHVAGAAALVKQKNPSWSNVQIRNHLKNTATSLGSTNLYGSGLVNAEAATR

SEQ ID NO: 52139 - protein, 269 aa, Unidentified
AQSVPWGISRVQAPAAHNRGLTGSGVKVAVLDTGISTHPDLNITGGASFVPGEPSTQDGNGHGTHVAGTIAALNNSIGVLGVAPSAELYAVKVLGASGSGSVSSIAQGLEWAGNNGMHVANLSLGSPSPSATLEQAVNSATSRGVLVVAASGNSGAGSISYPARYANAMAVGATDQNNNRASFSQYGAGLDIVAPGVNVQSTYPGSTYASLNGTSMATPHVAGAAALVKQKNPSWSNVQIRNHLKNTATSLGSTNLYGSGLVNAEAATR

SEQ ID NO: 52140 - protein, 269 aa, Unidentified
AQSVPWGISRVQAPAAHNRGLTGSGVFVAVLDTGISTHPDLNIRGGASFVPGEPSTQDGNGHGTHVAGTIAALNNSIGVLGVAPSAELYAVKVLGASGSGSVSSIAQGLEWAGNNGMHVANLSLGSPSPSATLEQAVNSATSRGVLVVAASGNSGAGSISYPARYANAMAVGATDQNNNRASFSQYGAGLDIVAPGVNVQSTYPGSTYASLNGTSMATPHVAGAAALVKQKNPSWSNVQIRNHLKNTATSLGSTNLYGSGLVNAEAATR

SEQ ID NO: 52141 - protein, 269 aa, Unidentified
AQSVPWGISRVQAPAAHNRGLTGSGVKVAVLDTGISTHPCLNIRGGASFVPGEPSTQDGNGHGTHVAGTIAALNNSIGVLGVAPSAELYAVKVLGASGSGSVSSIAQGLEWAGNNGMHVANLSLGSPSPSATLEQAVNSATSRGVLVVAASGNSGAGSISYPARYANAMAVGATDQNNNRASFSQYGAGLDIVAPGVNVQSTYPGSTYASLNGTSMATPHVAGAAALVKQKNPSWSNVQIRNHLKNTATSLGSTNLYGSGLVNAEAATR

SEQ ID NO: 52142 - protein, 269 aa, Unidentified
AQSVPWGISRVQAPAAHNRGLTGSGVKVAVLDTGISTHPDLNIRGGASFVPGEPSTQDGNGHGTHVAGTIAALNNSIGVLGVAPSAELYAVKVLGASGSGSVSSIAQGLEWAGNNGMHVANLSLGSPSPSATLEQAVNSATSRGVLVVAASGNSGAGSISYPARYANAMAVGATDQNNNRASFSQYGAGLDIVAPGVNVQSTYPGSTYASLNGTSMATPHVAGAAALVKQKNPSWSNVQIRNHLKNTATSLGSTNHYGSGLVNAEAATR

SEQ ID NO: 52143 - protein, 269 aa, Unidentified
AQSVPWGISRVQAPAAHNRGLTGSGVKVAVLDTGISTHPDLNIRGGAYFVPGEPSTQDGNGHGTHVAGTIAALNNSIGVLGVAPSAELYAVKVLGASGSGSVSSIAQGLEWAGNNGMHVANLSLGSPSPSATLEQAVNSATSRGVLVVAASGNSGAGSISYPARYANAMAVGATDQNNNRASFSQYGAGLDIVAPGVNVQSTYPGSTYASLNGTSMATPHVAGAAALVKQKNPSWSNVQIRNHLKNTATSLGSTNLYGSGLVNAEAATR

SEQ ID NO: 52144 - protein, 269 aa, Unidentified
AQSVPWGISRVQAPAAHNRGLTGSGVKVAVLDTGISTHPDLNIRGGASFVPGEPSTQDGNGHGTHVAGTIAALNNSIGVLGVAPSAELYAVKVLGASGSGSVSSIAQGLEWAGNNGMHVANLSLGSPSPSATLEQAVNSATSRGVLVVAASGNSGAGSISYPARYANAMAVGATDQNNNRASFSQYGAGLDIVAPGVNVQSTYPGSTYASLNGTSMATPHVAGAAALVKQKNPSWSNVQIRNHLKNTATSLESTNLYGSGLVNAEAATR

SEQ ID NO: 52145 - protein, 269 aa, Unidentified
AQSVPWGISRVQAPAAHNRGLTGSGVKVAVLDTGISTHPDLNIRGGASFVPGEPSTQDGNGHGTHVAGTIAALNNSIGVLGVAPSAELYAVKVLGASGSGSVSSIAQGLEWAGNNGMHVANLSLGSPKPSATLEQAVNSATSRGVLVVAASGNSGAGSISYPARYANAMAVGATDQNNNRASFSQYGAGLDIVAPGVNVQSTYPGSTYASLNGTSMATPHVAGAAALVKQKNPSWSNVQIRNHLKNTATSLGSTNLYGSGLVNAEAATR

SEQ ID NO: 52146 - protein, 269 aa, Unidentified
AQSVPWGISRVQAPAAHNRGLTGSGVKVAVLDTGISTHPDLNIRGGASFVPGEPSTQDGNGHGTHVAGTIAALNNSIGVLGVAPSAELYAVKVLGASGSGSVSSIAQGLEWAGNNGMHVANLSLGSPSPSATLEQAVNSATSRGVLVVAASGNSGAGSISYPARYANAMAVGATDQNNNRASFSQYGAGLDIVAPGVNVQSTYPGSTYASLNGTSMATPHVRGAAALVKQKNPSWSNVQIRNHLKNTATSLGSTNLYGSGLVNAEAATR

SEQ ID NO: 52147 - protein, 269 aa, Unidentified
AQSVPWGISRVQAPAAHNRGLTGSGVKVAVLDTGISTHPDLNIRGGASFVPGEPSTQDGNGHGTHVAGTIAALNNSIGVLGVAPSAELYAVKVLGASGSGSVSSIAQGLEWAGNNGGHVANLSLGSPSPSATLEQAVNSATSRGVLVVAASGNSGAGSISYPARYANAMAVGATDQNNNRASFSQYGAGLDIVAPGVNVQSTYPGSTYASLNGTSMATPHVAGAAALVKQKNPSWSNVQIRNHLKNTATSLGSTNLYGSGLVNAEAATR

SEQ ID NO: 52148 - protein, 269 aa, Alkalihalobacillus clausii
AQSVPWGISRVQAPAAHNRGLTGSGVKVAVLDTGISTHPDLNIRGGASFVPGEPSTQDGNGHGTHVAGTIAALNNSIGVLGVAPSAELYAVKVLGASGSGSVSSIAQGLEWAGNNGMHVANLSLGSPSPSATLEQAVNSATSRGVLVVAASGNSGAGSISYPARYANAMAVGATDQNNNRASFSQYGAGLDIVAPGVNVQSTVPGSTYASLNGTSMATPHVAGAAALVKQKNPSWSNVQIRNHLKNTATSLGSTNLYGSGLVNAEAATR

SEQ ID NO: 52149 - protein, 269 aa, Unidentified
AQSVPWGISRVQAPAAHNRGLTGSGVKVAVLDTGISTHPDLNIRGGASFVPGEPSTQDGNGHGTHVAGTIAALNNSIGVLGVAPSAELYAVKVLGASGSGSVSSIAQGLEWAGNNGMHVANLSLGSPSPSATLEQAVNSATSRGVLVVAASGNSGAGSISYPARYANAMAVGATCQNNNRASFSQYGAGLDIVAPGVNVQSTYPGSTYASLNGTSMATPHVAGAAALVKQKNPSWSNVQIRNHLKNTATSLGSTNLYGSGLVNAEAATR

SEQ ID NO: 52150 - protein, 269 aa, Unidentified
AQSVPWGISRVQAPAAHNRGLTGSGVKVAVLDTGISTHPDLNIRGGASFVPGEPVTQDGNGHGTHVAGTIAALNNSIGVLGVAPSAELYAVKVLGASGSGSVSSIAQGLEWAGNNGMHVANLSLGSPSPSATLEQAVNSATSRGVLVVAASGNSGAGSISYPARYANAMAVGATDQNNNRASFSQYGAGLDIVAPGVNVQSTYPGSTYASLNGTSMATPHVAGAAALVKQKNPSWSNVQIRNHLKNTATSLGSTNLYGSGLVNAEAATR

SEQ ID NO: 52151 - protein, 269 aa, Unidentified
AQSVPWGISRVQAPAAHNRGLTGSGVKVAVLDTGISTHPDLNIRGGASFVPGEPSTQDGNGHGTHVAGTIAALNNSIGVLGVAPSAELYAVKVLGASGSGSVSSIAQGLEWAGNNGMHVANLSLGSPSPSACLEQAVNSATSRGVLVVAASGNSGAGSISYPARYANAMAVGATDQNNNRASFSQYGAGLDIVAPGVNVQSTYPGSTYASLNGTSMATPHVAGAAALVKQKNPSWSNVQIRNHLKNTATSLGSTNLYGSGLVNAEAATR

SEQ ID NO: 52152 - protein, 269 aa, Unidentified
AQSVPWGISRVQAPAAHNRGLTGSGVKVAVLDTGISTHPDLNIRGGASFVPGEPSTQDGNGHGTHVAGTIAALNNSIGVLGWAPSAELYAVKVLGASGSGSVSSIAQGLEWAGNNGMHVANLSLGSPSPSATLEQAVNSATSRGVLVVAASGNSGAGSISYPARYANAMAVGATDQNNNRASFSQYGAGLDIVAPGVNVQSTYPGSTYASLNGTSMATPHVAGAAALVKQKNPSWSNVQIRNHLKNTATSLGSTNLYGSGLVNAEAATR

SEQ ID NO: 52153 - protein, 269 aa, Unidentified
AQSVPWGISRVQAPAAHNRGLTGSGVKVAVLDTGISTHPDLNIRGGASFVPGEPSTQDGNGHGTHVAGTIAALNNIIGVLGVAPSAELYAVKVLGASGSGSVSSIAQGLEWAGNNGMHVANLSLGSPSPSATLEQAVNSATSRGVLVVAASGNSGAGSISYPARYANAMAVGATDQNNNRASFSQYGAGLDIVAPGVNVQSTYPGSTYASLNGTSMATPHVAGAAALVKQKNPSWSNVQIRNHLKNTATSLGSTNLYGSGLVNAEAATR

SEQ ID NO: 52154 - protein, 269 aa, Unidentified
AQSVPWGISRVQAPAAHNRGLTGSGVKVAVLDTGISTHPDLNIRGGASFVPGEPSTQDGNGHGTHVAGTIAALNNSIGVLGVAPSAELYAVKVLGASGSGSVSDIAQGLEWAGNNGMHVANLSLGSPSPSATLEQAVNSATSRGVLVVAASGNSGAGSISYPARYANAMAVGATDQNNNRASFSQYGAGLDIVAPGVNVQSTYPGSTYASLNGTSMATPHVAGAAALVKQKNPSWSNVQIRNHLKNTATSLGSTNLYGSGLVNAEAATR

SEQ ID NO: 52155 - protein, 269 aa, Unidentified
AQSVPWGISRVQAPAAHNRGLTGSGVKVAVLDTGISTHPDLNIRGGASFVPGEPSTQDGNGHGTHVAGTIAALNNSIGVLGVAPSAELYAVKVLGASGSGSVSSIAQGLEWAGNNGMHVANLSLGSPSPSATLEQAVNSATSRGVLVVAASGNSGAGSISYPARYANAMAVGATDQNNNRASFSQYGEGLDIVAPGVNVQSTYPGSTYASLNGTSMATPHVAGAAALVKQKNPSWSNVQIRNHLKNTATSLGSTNLYGSGLVNAEAATR

SEQ ID NO: 52156 - protein, 269 aa, Unidentified
AQSVPWGISRVQAPAAHNRGLTGSGVKVAVLDTGISTHPDLNIRGGASFVPGEPSTQDGNGHGTHVAGTIAALNNSIGVLGVAPSAELYAVKVLGASGSGSVSGIAQGLEWAGNNGMHVANLSLGSPSPSATLEQAVNSATSRGVLVVAASGNSGAGSISYPARYANAMAVGATDQNNNRASFSQYGAGLDIVAPGVNVQSTYPGSTYASLNGTSMATPHVAGAAALVKQKNPSWSNVQIRNHLKNTATSLGSTNLYGSGLVNAEAATR

SEQ ID NO: 52157 - protein, 269 aa, Unidentified
AQSVPWGISRVQAPAAHNRGLTGSGVKVAVLDTGISTHPDLNIRGGASFVPGEPSTQDGNGHGTHVAGTIAALNNSIGVLGVAPSAELYAVKVLGASGSGSVSSIAQGLEWAGNNIMHVANLSLGSPSPSATLEQAVNSATSRGVLVVAASGNSGAGSISYPARYANAMAVGATDQNNNRASFSQYGAGLDIVAPGVNVQSTYPGSTYASLNGTSMATPHVAGAAALVKQKNPSWSNVQIRNHLKNTATSLGSTNLYGSGLVNAEAATR

SEQ ID NO: 52158 - protein, 269 aa, Unidentified
AQSVPWGISRVQAPAAHNRGLTGSGVKVAVLDTGISTHPDLNIRGGASFVPGEPSTQDGNGHGTHVAGTIAALNNSIGVLGVAPSAELYAVKVLGASGSGSVSSIAQGLEWAGNNGMHVANLSLGSPSPSATLEQAVNSATSRGVLVVAASGNSGAGSISYPARYRNAMAVGATDQNNNRASFSQYGAGLDIVAPGVNVQSTYPGSTYASLNGTSMATPHVAGAAALVKQKNPSWSNVQIRNHLKNTATSLGSTNLYGSGLVNAEAATR

SEQ ID NO: 52159 - protein, 269 aa, Unidentified
AQSVPWGISRVQAPAAHNRGLTGSGVKVAVLDTGISTHPDLNIRGGASFVPGEPSTQDGNGHGTHVAGTIAALNNSIGVLGVAPSAELYAVKVLGASGSGSVSSIAQGLEWAGNNGMHVAALSLGSPSPSATLEQAVNSATSRGVLVVAASGNSGAGSISYPARYANAMAVGATDQNNNRASFSQYGAGLDIVAPGVNVQSTYPGSTYASLNGTSMATPHVAGAAALVKQKNPSWSNVQIRNHLKNTATSLGSTNLYGSGLVNAEAATR

SEQ ID NO: 52160 - protein, 269 aa, Unidentified
AQSVPWGISRVQAPAAHNRGLTGSGVKVAVLDTGISTHPYLNIRGGASFVPGEPSTQDGNGHGTHVAGTIAALNNSIGVLGVAPSAELYAVKVLGASGSGSVSSIAQGLEWAGNNGMHVANLSLGSPSPSATLEQAVNSATSRGVLVVAASGNSGAGSISYPARYANAMAVGATDQNNNRASFSQYGAGLDIVAPGVNVQSTYPGSTYASLNGTSMATPHVAGAAALVKQKNPSWSNVQIRNHLKNTATSLGSTNLYGSGLVNAEAATR

SEQ ID NO: 52161 - protein, 269 aa, Unidentified
AQSVPWGISRVQAPAAHNRGLTGSGVKVAVLDTGISTHPDLNIRGGASFVPGEPSTQDGNGHGTHVAGTIAALNNSIGVLGVAPSAELYAVKVLGASGSGSVSSIAQGLEWAGNNGMHVANLSLGSPSPSATLEQAVNSATSRGVLVVAASGNSGAGSISYPARYANAMAVGATDQNNNRASFSQYGAGKDIVAPGVNVQSTYPGSTYASLNGTSMATPHVAGAAALVKQKNPSWSNVQIRNHLKNTATSLGSTNLYGSGLVNAEAATR

SEQ ID NO: 52162 - protein, 269 aa, Unidentified
AQSVPWGISRVQAPAAHNRGKTGSGVKVAVLDTGISTHPDLNIRGGASFVPGEPSTQDGNGHGTHVAGTIAALNNSIGVLGVAPSAELYAVKVLGASGSGSVSSIAQGLEWAGNNGMHVANLSLGSPSPSATLEQAVNSATSRGVLVVAASGNSGAGSISYPARYANAMAVGATDQNNNRASFSQYGAGLDIVAPGVNVQSTYPGSTYASLNGTSMATPHVAGAAALVKQKNPSWSNVQIRNHLKNTATSLGSTNLYGSGLVNAEAATR

SEQ ID NO: 52163 - protein, 269 aa, Unidentified
AQSVPWGISRVQAPAAHNRGLTGSGVKVAVLDTGISTHPDLNIRGGASFVPGEPSTQDGNGHGTHVAGTIAALNNSIGVLGVAPSAELYAVKVLGASGSGSVSSIAQGLEWAGNNGMHVANLSLGSPSPSATLEQAVNSATSRGVLVVAASGNSGAGSISYPARYANAMAVGATDQNNNRASFSQYGAGLDIVAPGVNVQSTYPGSTYASLNGTSMATPHVAGAAALVKQKNPSWSNVQIRNHLKNTATSLGSTNLYGVGLVNAEAATR

SEQ ID NO: 52164 - protein, 269 aa, Unidentified
AQSVPWGISRVQAPAAHNRGLTGSGVKVAVLDTGISTHPDLNIRGGASFVPGEPSTQDGNGHGTHVAGTIAALNNSIGVLGVAPSAELYAVKVLGASGSGSVSSIAQGLEWAGNNGMHVANLSLGSPSPSATLEQAVNSATSRGVLVVAASGNSGAGSISYPARYANAMAVGATDQNNNRASFSQYGAGLDIVAPGVNVQSTYPGSTYASLNGTSMATPHVAGAAALVKQKNPSWSNVQIRNHLKNTATSLGSTNLYGSGLVAAEAATR

SEQ ID NO: 52165 - protein, 269 aa, Unidentified
AQSVPWGISRVQAPAAHNRGLTGSGVKVAVLDTGISTHPRLNIRGGASFVPGEPSTQDGNGHGTHVAGTIAALNNSIGVLGVAPSAELYAVKVLGASGSGSVSSIAQGLEWAGNNGMHVANLSLGSPSPSATLEQAVNSATSRGVLVVAASGNSGAGSISYPARYANAMAVGATDQNNNRASFSQYGAGLDIVAPGVNVQSTYPGSTYASLNGTSMATPHVAGAAALVKQKNPSWSNVQIRNHLKNTATSLGSTNLYGSGLVNAEAATR

SEQ ID NO: 52166 - protein, 269 aa, Unidentified
AQSVPWGISRVQAPAAHNRGLTGSGVKVAVLDTGISTHPDLNIRGGASFVPGEPSTQDGNGHGTHVAGTIAALNNSIGVLGVAPSAELYAVKVLGASGSGSVSSIAQGLEWAGNNGMHVANLSLGSPSPSATLEQAVNSATSRGVLVVAASGNSGAGSISYPARYANAMAVGATDQNNNRASFSQYGAGLDIVAPGRNVQSTYPGSTYASLNGTSMATPHVAGAAALVKQKNPSWSNVQIRNHLKNTATSLGSTNLYGSGLVNAEAATR

SEQ ID NO: 52167 - protein, 269 aa, Unidentified
AQSVPWGISRVQAPAAHNRGLTGSGVKVAVLDTGISTHPDLNIRGGASFVPGEPSTQDGNGHGTHVAGTIAALNNSIGVLGTAPSAELYAVKVLGASGSGSVSSIAQGLEWAGNNGMHVANLSLGSPSPSATLEQAVNSATSRGVLVVAASGNSGAGSISYPARYANAMAVGATDQNNNRASFSQYGAGLDIVAPGVNVQSTYPGSTYASLNGTSMATPHVAGAAALVKQKNPSWSNVQIRNHLKNTATSLGSTNLYGSGLVNAEAATR

SEQ ID NO: 52168 - protein, 269 aa, Synthetic construct
AQSVPWGISRVQAPAAHNRGLTGSGVKVAVLDTGISTHPDLNIRGGASFVPGEPSTQDGNGHGTHVAGTIAALNNSIGVLGVAPSAELYAVKVLGASGSGSVSSIAQGLEWAGNNGMHVANLSAGSPSPSATLEQAVNSATSRGVLVVAASGNSGAGSISYPARYANAMAVGATDQNNNRASFSQYGAGLDIVAPGVNVQSTYPGSTYASLNGTSMATPHVAGAAALVKQKNPSWSNVQIRNHLKNTATSLGSTNLYGSGLVNAEAATR

SEQ ID NO: 52169 - protein, 269 aa, Unidentified
AQSVPWGISRVQAPAAHNRGLTGSGVKVAVLDTGISTHPDLNIRGGASFVPGEPSTQDGNGHGTHVAGTIACLNNSIGVLGVAPSAELYAVKVLGASGSGSVSSIAQGLEWAGNNGMHVANLSLGSPSPSATLEQAVNSATSRGVLVVAASGNSGAGSISYPARYANAMAVGATDQNNNRASFSQYGAGLDIVAPGVNVQSTYPGSTYASLNGTSMATPHVAGAAALVKQKNPSWSNVQIRNHLKNTATSLGSTNLYGSGLVNAEAATR

SEQ ID NO: 52170 - protein, 269 aa, Unidentified
AQSVPWGISRVQAPAAHNRGLTGSGVKVAVLDTGISTHPDLNIRGGASFVPGEPSTQDGNGHGTHVAGTIAALNNSIGVLGVAPSAELYAVKVLGASGSGSVSSIAQGLEWAGNNGTHVANLSLGSPSPSATLEQAVNSATSRGVLVVAASGNSGAGSISYPARYANAMAVGATDQNNNRASFSQYGAGLDIVAPGVNVQSTYPGSTYASLNGTSMATPHVAGAAALVKQKNPSWSNVQIRNHLKNTATSLGSTNLYGSGLVNAEAATR

SEQ ID NO: 52171 - protein, 269 aa, Unidentified
AQSVPWGISRVQAPAAHNRGLTGSGVKVAVLDTGISTHPDLNIRGGASFVPGEPSTQDGNGHGTHVAGTIAALNNSIGVLGVAPSAELYAVKVLGASGSGSVSSIAQGLEWAGNNGMHVANLSLGSPSPSATLEQAVNSATSRGVLVVAASGNSGAGSISYPARYANAMAVGATDQNNNRASFSQYGAGLDIVAPGVNVQSTYPGSTYASLNGTSMATPHVAGAAALVKQKNPSWSNVQICNHLKNTATSLGSTNLYGSGLVNAEAATR

SEQ ID NO: 52172 - protein, 269 aa, Unidentified
AQSVPWGISRVQAPAAHNRGLTGSGVKVAVLDTGISTHPDLNIRGGASFVPGEPSTQDGNGHGTHVAGTIAALNNSIGVLGVAPSAELYAVKVLGASGSGSVSSIAQGLEWAGNNGMHVANLSLGSPSPSATLEQAVNSATSRGVLVVAASGNSGAGSISYPARYANAMAVGATDQNNNRASFSQYGAGLDIVAPGVNVQSTYPRSTYASLNGTSMATPHVAGAAALVKQKNPSWSNVQIRNHLKNTATSLGSTNLYGSGLVNAEAATR

SEQ ID NO: 52173 - protein, 269 aa, Unidentified
AQSVPWGISRVQAPAAHNRGLTGSGVKVAVLDTGISTHPDLNIRGGASFVPGEPSTQDGNGHGTHVAGTIAALNNSIGVLGVAPSAELYAVKVLGASGSGSVSSIAQGLEWAGNNGMHVANLSLGSPSPSATLEQAVNSATSRGVLVVAASGNSGAGSIEYPARYANAMAVGATDQNNNRASFSQYGAGLDIVAPGVNVQSTYPGSTYASLNGTSMATPHVAGAAALVKQKNPSWSNVQIRNHLKNTATSLGSTNLYGSGLVNAEAATR

SEQ ID NO: 52174 - protein, 269 aa, Unidentified
AQSVPWGISRVQAPAAHNRGLTGSGVKVAVLDTGISTHPDLNIRGGASFVPGEPSTQDGNGHGTHVAGTIAALNNSIGVLGVAPSAELYAVKVLGASGSGSVSSIAQGLEWAGNNGMHVANLSLGSPSPSATLEQAVNSATSRGVLVVAASGNSGAGSISAPARYANAMAVGATDQNNNRASFSQYGAGLDIVAPGVNVQSTYPGSTYASLNGTSMATPHVAGAAALVKQKNPSWSNVQIRNHLKNTATSLGSTNLYGSGLVNAEAATR

SEQ ID NO: 52175 - protein, 269 aa, Unidentified
AQSVPWGISRVQAPAAHNRGLTGSGVKVAVLDTGISTHPDLNIRGGASFWPGEPSTQDGNGHGTHVAGTIAALNNSIGVLGVAPSAELYAVKVLGASGSGSVSSIAQGLEWAGNNGMHVANLSLGSPSPSATLEQAVNSATSRGVLVVAASGNSGAGSISYPARYANAMAVGATDQNNNRASFSQYGAGLDIVAPGVNVQSTYPGSTYASLNGTSMATPHVAGAAALVKQKNPSWSNVQIRNHLKNTATSLGSTNLYGSGLVNAEAATR

SEQ ID NO: 52176 - protein, 269 aa, Unidentified
AQSVPWGISRVQAPAAHNRGLTGSGVKVAVLDTGISTHPDLNIRGGASFVPGEPSTQDGNGHGTHVAGTIAALNNSIGVLGVAPSAELYFVKVLGASGSGSVSSIAQGLEWAGNNGMHVANLSLGSPSPSATLEQAVNSATSRGVLVVAASGNSGAGSISYPARYANAMAVGATDQNNNRASFSQYGAGLDIVAPGVNVQSTYPGSTYASLNGTSMATPHVAGAAALVKQKNPSWSNVQIRNHLKNTATSLGSTNLYGSGLVNAEAATR

SEQ ID NO: 52177 - protein, 269 aa, Unidentified
AQSVPWGISRVQAPAAHNRGLTGSGVKVAVLDTGISTHPDLNIRGGASFVPGEPSTQDGNGHGTHVAGTIAALNNSIGVLGVAPSAELYAVKVLGASGSGSVSSIAQGLEWAGNNGMHVANLSLGSPSRSATLEQAVNSATSRGVLVVAASGNSGAGSISYPARYANAMAVGATDQNNNRASFSQYGAGLDIVAPGVNVQSTYPGSTYASLNGTSMATPHVAGAAALVKQKNPSWSNVQIRNHLKNTATSLGSTNLYGSGLVNAEAATR

SEQ ID NO: 52178 - protein, 269 aa, Unidentified
AQSVPWGISRVQAPAAHNRGLTGSGVKVAVLDTGISTHPDLKIRGGASFVPGEPSTQDGNGHGTHVAGTIAALNNSIGVLGVAPSAELYAVKVLGASGSGSVSSIAQGLEWAGNNGMHVANLSLGSPSPSATLEQAVNSATSRGVLVVAASGNSGAGSISYPARYANAMAVGATDQNNNRASFSQYGAGLDIVAPGVNVQSTYPGSTYASLNGTSMATPHVAGAAALVKQKNPSWSNVQIRNHLKNTATSLGSTNLYGSGLVNAEAATR

SEQ ID NO: 52179 - protein, 269 aa, Unidentified
AQSVPWGISRVQAPAAHNRGLTGSGVKVAVLDTGISTHPDLNIRGGASFVPGEPSTQDGNGHGTHVAGTIAALNNSIGVLGVAPSAELYAVKVLGASGSGSVSSIAQGLEWIGNNGMHVANLSLGSPSPSATLEQAVNSATSRGVLVVAASGNSGAGSISYPARYANAMAVGATDQNNNRASFSQYGAGLDIVAPGVNVQSTYPGSTYASLNGTSMATPHVAGAAALVKQKNPSWSNVQIRNHLKNTATSLGSTNLYGSGLVNAEAATR

SEQ ID NO: 52180 - protein, 269 aa, Unidentified
AQSVPWGISRVQAPAAHNRGLTGSGVKVAVLDTGISTHPDLNIRGGASFVPGEPSTQDGNGHGTHVAGTIAALNNSIGVLGVAPSAELYAVKVLGASGSGSVSSIAQGLEWAGNNGMHVANLSLGSPSPSATLEQAVNSATSRGVGVVAASGNSGAGSISYPARYANAMAVGATDQNNNRASFSQYGAGLDIVAPGVNVQSTYPGSTYASLNGTSMATPHVAGAAALVKQKNPSWSNVQIRNHLKNTATSLGSTNLYGSGLVNAEAATR

SEQ ID NO: 52181 - protein, 269 aa, Unidentified
AQSVPWGISRVQAPAAHNRGLTGSGVKVAVLDTGISTHPDLNIRGGASFVPGEPSTQDGNGHGTHVAGTIAALNNSIGVLGVAPSAELYAVKVLGASGSGSVSSIAQGLEWAGNNGMHVANLSLGSPSPSATLEQAVNSATSRGVLVVAASGNSGAGSISYPARYANAMAVGATDQNNNRASFSQYGAGLDIVAPGVNVQSTYPGMTYASLNGTSMATPHVAGAAALVKQKNPSWSNVQIRNHLKNTATSLGSTNLYGSGLVNAEAATR

SEQ ID NO: 52182 - protein, 269 aa, Unidentified
AQSVPWGISRVQAPAAHNRGLTGHGVKVAVLDTGISTHPDLNIRGGASFVPGEPSTQDGNGHGTHVAGTIAALNNSIGVLGVAPSAELYAVKVLGASGSGSVSSIAQGLEWAGNNGMHVANLSLGSPSPSATLEQAVNSATSRGVLVVAASGNSGAGSISYPARYANAMAVGATDQNNNRASFSQYGAGLDIVAPGVNVQSTYPGSTYASLNGTSMATPHVAGAAALVKQKNPSWSNVQIRNHLKNTATSLGSTNLYGSGLVNAEAATR

SEQ ID NO: 52183 - protein, 269 aa, Unidentified
AQSVPWGISRVQAPAAHNRGLTGSGVKVAVLDTGISTHPDLNIRGGASFVPGEPSTQDGNGHGTHVAGTIAALNNSIGVLGVAPSAELYAVKVLPASGSGSVSSIAQGLEWAGNNGMHVANLSLGSPSPSATLEQAVNSATSRGVLVVAASGNSGAGSISYPARYANAMAVGATDQNNNRASFSQYGAGLDIVAPGVNVQSTYPGSTYASLNGTSMATPHVAGAAALVKQKNPSWSNVQIRNHLKNTATSLGSTNLYGSGLVNAEAATR

SEQ ID NO: 52184 - protein, 269 aa, Unidentified
AQSVPWGISRVQAPAAHNRGLTGSGVKVAVLDTGISTHPDLNIRGGASFVPGEPSTQDGNGHGTHVAGTIAALNNSIGVLGVAPSAELYAVKVLGASGSGSVSSIAQGLEWVGNNGMHVANLSLGSPSPSATLEQAVNSATSRGVLVVAASGNSGAGSISYPARYANAMAVGATDQNNNRASFSQYGAGLDIVAPGVNVQSTYPGSTYASLNGTSMATPHVAGAAALVKQKNPSWSNVQIRNHLKNTATSLGSTNLYGSGLVNAEAATR

SEQ ID NO: 52185 - protein, 269 aa, Unidentified
AQSVPWGISRVQAPAAHNRGLTGSGVXVAVLDTGISTHPDLNIRGGASFVPGEPSTQDGNGHGTHVAGTIAALNNSIGVLGVAPSAELYAVKVLGASGSGSVSSIAQGLEWAGNNGMHVANLSLGSPSPSATLEQAVNSATSRGVLVVAASGNSGAGSISYPARYANAMAVGATDQNNNRASFSQYGAGLDIVAPGVNVQSTYPGSTYASLNGTSMATPHVAGAAALVKQKNPSWSNVQIRNHLKNTATSLGSTNLYGSGLVNAEAATR

SEQ ID NO: 52186 - protein, 269 aa, Unidentified
AQSVPWGISRVQAPAAHNRGLTGSGVKVAVLDTGISTHHDLNIRGGASFVPGEPSTQDGNGHGTHVAGTIAALNNSIGVLGVAPSAELYAVKVLGASGSGSVSSIAQGLEWAGNNGMHVANLSLGSPSPSATLEQAVNSATSRGVLVVAASGNSGAGSISYPARYANAMAVGATDQNNNRASFSQYGAGLDIVAPGVNVQSTYPGSTYASLNGTSMATPHVAGAAALVKQKNPSWSNVQIRNHLKNTATSLGSTNLYGSGLVNAEAATR

SEQ ID NO: 52187 - protein, 269 aa, Unidentified
AQSVPWGISRVQAPAAHNRGLTGSGVKVAVLDTGISTHPDLNIRGGASFVPGEPSTQDGNGHGTHVAGTIAALNNSIGVLGVAPSAELYAVKVLGASGSGSVSSIAQGLEWAGNNGMHVANLSLGSPDPSATLEQAVNSATSRGVLVVAASGNSGAGSISYPARYANAMAVGATDQNNNRASFSQYGAGLDIVAPGVNVQSTYPGSTYASLNGTSMATPHVAGAAALVKQKNPSWSNVQIRNHLKNTATSLGSTNLYGSGLVNAEAATR

SEQ ID NO: 52188 - protein, 270 aa, Aspergillus oryzae
AQSVPWGISRVQAPAAHNRGLTGSGVKVAVLDTGISTHPDLNIRGGASFVPGEPSTQDGNGHGTHVAGTIAALNNSIGVLGVAPSAELYAVKVLGASEGSGSVSSIAQGLEWAGNNGMHVANLSLGSPSPSATLKQAVNSATSRGVLVVAASGNSGAGSISYPARYANAMAVGATDQNNNRASFSQYGAGLDIVAPGVNVQSTYPGSTYASLNGTSMATPHVAGAAALVKQKNPSWSNVQIRNHLKNTATSLGSTNLYGSGLVNAEAATR

SEQ ID NO: 52189 - protein, 269 aa, Unidentified
AQSVPWGISRVQAPAAHNRGLTGSGVKVAVLDTGISFHPDLNIRGGASFVPGEPSTQDGNGHGTHVAGTIAALNNSIGVLGVAPSAELYAVKVLGASGSGSVSSIAQGLEWAGNNGMHVANLSLGSPSPSATLEQAVNSATSRGVLVVAASGNSGAGSISYPARYANAMAVGATDQNNNRASFSQYGAGLDIVAPGVNVQSTYPGSTYASLNGTSMATPHVAGAAALVKQKNPSWSNVQIRNHLKNTATSLGSTNLYGSGLVNAEAATR

SEQ ID NO: 52190 - protein, 269 aa, Bacillus lentus
AQSVPWGISRVQAPAAHNRGLTGSGVKVAVLDTGISTHPDLNIRGGASFVPGEPSTQDGNGHGTHVAGTIAALNNSIGVLGVAPSAELYAVKVLGASGSGSVSSIAQGLEWAGNNGMHVANLSLGSPSPSATLEQAVNSATSRGVLVVAASGNSGAGSISYPAGYANAMAVGATDQNNNRASFSQYGAGLDIVAPGVNVQSTYPGSTYASLNGTSMATPHVAGAAALVKQKNPSWSNVQIRNHLKNTATSLGSTNLYGSGLVNAEAATR

SEQ ID NO: 52191 - protein, 269 aa, Unidentified
AQSVPWGISRVQAPAAHNRGLTGSGVKVAVLDTPISTHPDLNIRGGASFVPGEPSTQDGNGHGTHVAGTIAALNNSIGVLGVAPSAELYAVKVLGASGSGSVSSIAQGLEWAGNNGMHVANLSLGSPSPSATLEQAVNSATSRGVLVVAASGNSGAGSISYPARYANAMAVGATDQNNNRASFSQYGAGLDIVAPGVNVQSTYPGSTYASLNGTSMATPHVAGAAALVKQKNPSWSNVQIRNHLKNTATSLGSTNLYGSGLVNAEAATR

SEQ ID NO: 52192 - protein, 269 aa, Unidentified
AQSVPWGISRVQAPAAHNRGLTGSGVKVAVLDTGISTHPDLNIRGGASFVPGEPSTQDGNGHGTHVAGTIAALNNSIGVLGVAPSAELYAVKVLGASGSGSVSSIAQGLEWAGNNGMHVANLSLGSPSPSATLEQAVNSATSRGVLVVAASGNSGAGSISYPARYANAMAVGATDQNNNRASFSQYGAGLDIVAPGVNVQSTYPGSTYASLNGTSMATPHVAGAAALVKQKNPSWSNVQIRNHLKNEATSLGSTNLYGSGLVNAEAATR

SEQ ID NO: 52193 - protein, 269 aa, Unidentified
AQSVPWGISRVQAPAAHNRGLTGSGVKVAVLDTGISTHPDLNIRGGASFVPGEPSTQCGNGHGTHVAGTIAALNNSIGVLGVAPSAELYAVKVLGASGSGSVSSIAQGLEWAGNNGMHVANLSLGSPSPSATLEQAVNSATSRGVLVVAASGNSGAGSISYPARYANAMAVGATDQNNNRASFSQYGAGLDIVAPGVNVQSTYPGSTYASLNGTSMATPHVAGAAALVKQKNPSWSNVQIRNHLKNTATSLGSTNLYGSGLVNAEAATR

SEQ ID NO: 52194 - protein, 269 aa, Unidentified
AQSVPWGISRVQAPAAHNRGLTGSGVKVAVLDTGISTHPDLNIRGGASFVPGEPSTQDGNGHGTHVAGTIAALNNSIGVLGVAPSAELYAVKVLGAAGSGSVSSIAQGLEWAGNNGMHVANLSLGSPSPSATLEQAVNSATSRGVLVVAASGNSGAGSISYPARYANAMAVGATDQNNNRASFSQYGAGLDIVAPGVNVQSTYPGSTYASLNGTSMATPHVAGAAALVKQKNPSWSNVQIRNHLKNTATSLGSTNLYGSGLVNAEAATR

SEQ ID NO: 52195 - protein, 269 aa, Unidentified
AQSVPWGISRVQAPAAHNRGLTGSGVKVAVLDTGISTHPDLNIRGGASFVPGEPSTQDGNGHGTHVAGTIAALNNSIGVLGVAPSAELYAVKVLGASGSGSVSSIAQGLEWAGNNGMHVANLSLGRPSPSATLEQAVNSATSRGVLVVAASGNSGAGSISYPARYANAMAVGATDQNNNRASFSQYGAGLDIVAPGVNVQSTYPGSTYASLNGTSMATPHVAGAAALVKQKNPSWSNVQIRNHLKNTATSLGSTNLYGSGLVNAEAATR

SEQ ID NO: 52196 - protein, 269 aa, Unidentified
AQSVPWGISRVQAPAAHNRGLTGSGVKVAVLDTGISTHPDLNIRGGASFVPGEPSTQDGNGHGTHVAGTIAALNNSIGVLGVAPSAELYAVKVLGASGSGSVSSIAQGLEWAGNNGMHVANLSLGSPSPSATLEQAVNSATSRGVLVVAASGNSGAGSISYPARYANAMAVGATDQNNNRASFSQYGAGLDIVAPGVNVQSTYPGSTYASLPGTSMATPHVAGAAALVKQKNPSWSNVQIRNHLKNTATSLGSTNLYGSGLVNAEAATR

SEQ ID NO: 52197 - protein, 269 aa, Unidentified
AQSVPWGISRVQAPAAHNRGLTGSGVKVAVLDTGISTHPDLNIRGGASFVPGEPSTQDGNGHGTHVAGTIAALNNSIGVLGVAPSAELYAVKVLGASGSGSVSSIAQGLEWAGNNGMHVANLSLGSPSPSATLEQAVNSATSRGVLVVAASGNSGAGSISYPARYANAMAVGATDQNNNRASFSQYGAGLDIVAPGVNVQSTYPGSTYASLNGTSMATPHVAGAAALVKQKNTSWSNVQIRNHLKNTATSLGSTNLYGSGLVNAEAATR

SEQ ID NO: 52198 - protein, 269 aa, Unidentified
AQSVPWGISRVQAPAAHNRGLTGSGVKVAVLDTGISTHPDLNIRGGASFVPGEPSTQDGNGHGTHVAGTIAALNNSIGVLGVAPSAELYAVKVLGASGSGSVSSIAQGLEWAGNNGMHVANLSLGSPSPSATLEQAVNSATSRGVLVVAASGNSGAGSISYPARYANAMAVGATDQNNNRASFSQYGAGLDIVAPGVNVWSTYPGSTYASLNGTSMATPHVAGAAALVKQKNPSWSNVQIRNHLKNTATSLGSTNLYGSGLVNAEAATR

SEQ ID NO: 52199 - protein, 269 aa, Unidentified
AQSVPWGISRVQAPAAHNRGLTGSGVKVAVLDTGISTHPDLNIRGGASFVPGEPSTQDGNGHGTHVAGTIAALNNSIGVLGVAPSAELYAVKVLGASGSGSVSSIAQGLEWAGNNGMHVANLSLGSPQPSATLEQAVNSATSRGVLVVAASGNSGAGSISYPARYANAMAVGATDQNNNRASFSQYGAGLDIVAPGVNVQSTYPGSTYASLNGTSMATPHVAGAAALVKQKNPSWSNVQIRNHLKNTATSLGSTNLYGSGLVNAEAATR

SEQ ID NO: 52200 - protein, 269 aa, Unidentified
AQSVPWGISRVQAPAAHNRGLTGSGVKVAVLDTGISTHPDLNIRGGASFVPGEPSTQDGNGHGTHVAGTIAALNNSIGVLGVAPSAELYAVKVLGASGSGSVSSIAQGLEWAGNNYMHVANLSLGSPSPSATLEQAVNSATSRGVLVVAASGNSGAGSISYPARYANAMAVGATDQNNNRASFSQYGAGLDIVAPGVNVQSTYPGSTYASLNGTSMATPHVAGAAALVKQKNPSWSNVQIRNHLKNTATSLGSTNLYGSGLVNAEAATR

SEQ ID NO: 52201 - protein, 269 aa, Unidentified
AQSVPWGISRVQAPAAHNRGLTGSGVKVAVLDTGISTHPDLNIRGGASFVPGEPSTQDGNGHGTHVAGTIAALNNSIGVLGVAPSAELYAVKVLGASGSGSVSSIAQGLEWAGNNGMHVANLSLGSPSYSATLEQAVNSATSRGVLVVAASGNSGAGSISYPARYANAMAVGATDQNNNRASFSQYGAGLDIVAPGVNVQSTYPGSTYASLNGTSMATPHVAGAAALVKQKNPSWSNVQIRNHLKNTATSLGSTNLYGSGLVNAEAATR

SEQ ID NO: 52202 - protein, 269 aa, Unidentified
AQSVPWGISRVQAPAAHNRGLTGSVVKVAVLDTGISTHPDLNIRGGASFVPGEPSTQDGNGHGTHVAGTIAALNNSIGVLGVAPSAELYAVKVLGASGSGSVSSIAQGLEWAGNNGMHVANLSLGSPSPSATLEQAVNSATSRGVLVVAASGNSGAGSISYPARYANAMAVGATDQNNNRASFSQYGAGLDIVAPGVNVQSTYPGSTYASLNGTSMATPHVAGAAALVKQKNPSWSNVQIRNHLKNTATSLGSTNLYGSGLVNAEAATR

SEQ ID NO: 52203 - protein, 269 aa, Unidentified
AQSVPWGISRVQAPAAHNRGLTGSGVKVAVLDTGISTHPDLNIRGGASFVPGEPSTQDGNGHGTHVAGTIAALNNSIGVLGVAPSAELYAVKVLGASGSGSVSSIAQGLEWAGNNGMHVANLSLGSPSPSATLEQAVNSATSRGVLVVAASGNSGAGSISYPARYANAMAVGATDQNNNRASFSQYGAGLDIVAPGVNVQSTYPGSTYASLNGTSMATPHVAGAAALVKQKNPSWSNVQIRNHLKNTATSLGSTNLYGSGLVNAEAAGR

SEQ ID NO: 52204 - protein, 270 aa, Unidentified
AQSVPWGISRVQAPAAHNRGLTGSGVKVAVLDTGISTHPDLNIRGGASFVPGEPSTQDGNGHGTHVAGTIAALNNSIGVLGVAPSAELYAVKVLGASGSGSTVSSIAQGLEWAGNNGMHVANLSLGSPSPSATLEQAVNSATSRGVLVVAASGNSGAGSISAPARYANAMAVGATDQNNNRASFSQYGAGLDIVAPGVNVQSTYPGSTYASLNGTSMATPHVAGAAALVKQKNPSWSNVQIRNHLKNTATSLGSTNLYGSGLVNAEAATR

SEQ ID NO: 52205 - protein, 269 aa, Unidentified
AQSVPWGISRVQAPAAHNRGLTGSGVKVAVLDTGISTHPDLNIRGGASFVPGEPSTQDGNGHGTHVAGTIAALNNSIGVLGVAPSAELYAVKVLGASGSGSVSSIAQGLEWAGNNGMHVANLSLGSPSPSATLEQAVNSATSRGVLVVAASGNSGAGSISYPARYANAMAVGATDQNNNRASFSQYGAGLDIVAPGVNVQSTYPGSTYASLNGTSMATPHVAGAAALVKQKNKSWSNVQIRNHLKNTATSLGSTNLYGSGLVNAEAATR

SEQ ID NO: 52206 - protein, 269 aa, Unidentified
AQSVPWGISRVQAPAAHNRGLTGSGVKVAVLDTGISTHPDLNIRGGASFVPGEPSTQDGNGHGTHVAGTIAALNNSIGVLGVAPSAELYAVKVLGASGSGSVSSIAQGLEWAGNNGMHVANLSLGSPSPSATLEQAVNSATSRGVLVVAASGNSGAGSISYPARYANAMAVGATDQNNNRASFSQYGAGLDIVAPGVNVQSTYPGSTYASENGTSMATPHVAGAAALVKQKNPSWSNVQIRNHLKNTATSLGSTNLYGSGLVNAEAATR

SEQ ID NO: 52207 - protein, 269 aa, Unidentified
AQSVPWGISRVQAPAAHNRGLTGSGVKVAVLDTGISTHPDLNIRGGASFVPGEPSTQDGNGHGTHVAGTIAALNNSIGVLGVAPSAELYAVKVLGASGSGSVSSIAQGLEWAGNNGMHVANLSLGSPSPIATLEQAVNSATSRGVLVVAASGNSGAGSISYPARYANAMAVGATDQNNNRASFSQYGAGLDIVAPGVNVQSTYPGSTYASLNGTSMATPHVAGAAALVKQKNPSWSNVQIRNHLKNTATSLGSTNLYGSGLVNAEAATR

SEQ ID NO: 52208 - protein, 269 aa, Unidentified
AQSVPWGISRVQAPAAHNRGLTGSGVKVAVLDTGISTHPDLNIRGGASFVPGEPSTQDGNGHGTHVAGTIAALNNSIGVLGVAPSAELYAVKVLGASGSGSVSSIAQGLEWAGNNGMHVANLSLGSPSPSATLEQAVNSATSRGVLVVAASGNSGAGSISYPARYANAMAVGATDQNNNRASFSQYGAGLDIVFPGVNVQSTYPGSTYASLNGTSMATPHVAGAAALVKQKNPSWSNVQIRNHLKNTATSLGSTNLYGSGLVNAEAATR

SEQ ID NO: 52209 - protein, 269 aa, Bacillus lentus
AQSVPWGISRVQAPAAHNRGLTGSGVKVAVLDTGISTHPDLNIRGGASFVPGEPSTQDGNGHGTHVAGTIAALNNSIGVLGVAPSAELYAVKVLGASGSGSVSSIAQGLEWAGNNGMHVANLSLGSPSPSATLEQAVNSATSRGVLVVAASGNSGAGSISYPAIYANAMAVGATDQNNNRASFSQYGAGLDIVAPGVNVQSTYPGSTYASLNGTSMATPHVAGAAALVKQKNPSWSNVQIRNHLKNTATSLGSTNLYGSGLVNAEAATR

SEQ ID NO: 52210 - protein, 269 aa, Unidentified
AQSVPWGISRVQAPAAHNRGLQGSGVKVAVLDTGISTHPDLNIRGGASFVPGEPSTQDGNGHGTHVAGTIAALNNSIGVLGVAPSAELYAVKVLGASGSGSVSSIAQGLEWAGNNGMHVANLSLGSPSPSATLEQAVNSATSRGVLVVAASGNSGAGSISYPARYANAMAVGATDQNNNRASFSQYGAGLDIVAPGVNVQSTYPGSTYASLNGTSMATPHVAGAAALVKQKNPSWSNVQIRNHLKNTATSLGSTNLYGSGLVNAEAATR

SEQ ID NO: 52211 - protein, 269 aa, Unidentified
AQSVPWGISRVQAPAAHNRGLTGSGVKVAVLDTGISTHPDLNIRGGASFVPGEPSTQDGNGHGTHVAGTIAALNNSIGVLGVAPSAELYAVKVLGASGSGSVSSIAQGLEWAGNNGMHVANLSLGSPSPSATLEQAVNSATSRGVLVVAASGNSGAGSISYPARYANAMAVGATDQNNNRASFSQYGAGLDIVAPGVNVVSTYPGSTYASLNGTSMATPHVAGAAALVKQKNPSWSNVQIRNHLKNTATSLGSTNLYGSGLVNAEAATR

SEQ ID NO: 52212 - protein, 269 aa, Unidentified
AQSVPWGISRVQAPAAHNRGLTGSGVKVAVLDTGISTHPDLNIRGGASFVPGEPSTQDGNGHGTHVAGTIAALNNSIGVLGVAPSAELYAVKVLGASGSGSVSSIAQGLEWAGNNGMHVANLSLGSPSPSATLEQAVNSATSRGVLVVAASGNSGAGSISYPARYANAMAVGATDQNNNIASFSQYGAGLDIVAPGVNVQSTYPGSTYASLNGTSMATPHVAGAAALVKQKNPSWSNVQIRNHLKNTATSLGSTNLYGSGLVNAEAATR

SEQ ID NO: 52213 - protein, 269 aa, Unidentified
AQSVPWGISRVQAPAAHNRGLTGSGVKVAVLDTGISTTPDLNIRGGASFVPGEPSTQDGNGHGTHVAGTIAALNNSIGVLGVAPSAELYAVKVLGASGSGSVSSIAQGLEWAGNNGMHVANLSLGSPSPSATLEQAVNSATSRGVLVVAASGNSGAGSISYPARYANAMAVGATDQNNNRASFSQYGAGLDIVAPGVNVQSTYPGSTYASLNGTSMATPHVAGAAALVKQKNPSWSNVQIRNHLKNTATSLGSTNLYGSGLVNAEAATR

SEQ ID NO: 52214 - protein, 269 aa, Unidentified
AQSVPWGISRVQAPAAHNRGLTGSGVKVAVLDTGISTHPDLNIRGGASFVPGEPSTQDGNGHGTHVAGTIAALNNSIGVLGVAPSAELYAVKVLGASGSGSVSSIAQGLEWAGNNGMHVANLSLGSPSPSATLEQAVNSATSRGVLVVAASGNSGAGSISYPARYANAMAVGATDQNNNRASFSQYGAGLDIVAPGVNVQSTYPGSTYESLNGTSMATPHVAGAAALVKQKNPSWSNVQIRNHLKNTATSLGSTNLYGSGLVNAEAATR

SEQ ID NO: 52215 - protein, 269 aa, Unidentified
AQSVPWGISRVQAPAAHNRGLTGSGVKVAVLDTGISTHPDLNIRGGASFVPGEPSTQDGNGHGTHVAGTIAALNNSIGVLGVALSAELYAVKVLGASGSGSVSSIAQGLEWAGNNGMHVANLSLGSPSPSATLEQAVNSATSRGVLVVAASGNSGAGSISYPARYANAMAVGATDQNNNRASFSQYGAGLDIVAPGVNVQSTYPGSTYASLNGTSMATPHVAGAAALVKQKNPSWSNVQIRNHLKNTATSLGSTNLYGSGLVNAEAATR

SEQ ID NO: 52216 - protein, 269 aa, Unidentified
AQSVPWGISRVQAPAAHNRGLTGSGVKVAVLDTGISTHPDLNIRGGASFVPGEPSTQDGNGHGTHVAGTIAALNNSIGVLGVAPSAELYAVKVLGASGSGSVSSIAQGLEWAGNNGMHVANLSLGSPSPSATLEQAVNSATSRGVLVVAASGNSGAGSISYPARYANAMAVGATDQNNNRASFSQYGAGLDIVAPGVNVQSTYPGSTYAFLNGTSMATPHVAGAAALVKQKNPSWSNVQIRNHLKNTATSLGSTNLYGSGLVNAEAATR

SEQ ID NO: 52217 - protein, 269 aa, Unidentified
AQSVPWGISRVQAPAAHNRGLTGSGVKVAVLDTGISTHPDLNIRGGASFVPGEPSTQDGNGHGTHVAGTIAALNNVIGVLGVAPSAELYAVKVLGASGSGSVSSIAQGLEWAGNNGMHVANLSLGSPSPSATLEQAVNSATSRGVLVVAASGNSGAGSISYPARYANAMAVGATDQNNNRASFSQYGAGLDIVAPGVNVQSTYPGSTYASLNGTSMATPHVAGAAALVKQKNPSWSNVQIRNHLKNTATSLGSTNLYGSGLVNAEAATR

SEQ ID NO: 52218 - protein, 269 aa, Unidentified
AQSVPWGISRVQAPAAHNRGLTGSGVKVAVLDTGISTHPDLNIRGGASFVPGEPSTQDGNGHGTHVAGTIAALNNSIGVLGVAPSAELYAVKVLGASGSGSVSSIAQGLEWAGNNGMYVANLSLGSPSPSATLEQAVNSATSRGVLVVAASGNSGAGSISYPARYANAMAVGATDQNNNRASFSQYGAGLDIVAPGVNVQSTYPGSTYASLNGTSMATPHVAGAAALVKQKNPSWSNVQIRNHLKNTATSLGSTNLYGSGLVNAEAATR

SEQ ID NO: 52219 - protein, 269 aa, Unidentified
AQSVPWGISRVQAPAAHNRGLTGSGVKVAVLDTGISTHPDLNIRGGASFVPGEPSTQDGNGHGTHVAGTIAALNNSIGVLGVAPSAELYAVKVLGASGSGSVSSIAQGLEWAGNNGMHVANLSLGSPSPSATLEQAVNSATSRGVLVVAASGNSGAGSISYPGRYANAMAVGATDQNNNRASFSQYGAGLDIVAPGVNVQSTYPGSTYASLNGTSMATPHVAGAAALVKQKNPSWSNVQIRNHLKNTATSLGSTNLYGSGLVNAEAATR

SEQ ID NO: 52220 - protein, 269 aa, Unidentified
AQSVPWGISRVQAPAAHNRGLTGSGVKVAVLDTGISTHPDLNIRGGASFVPGEPSTQDGNGHGTHVAGTIAALNNSIGVLGVAPSAELYAVKVLGASGSGSVSSIAQGLEWAGNNGMHVANLSLGSPSPSATLEQAVNSATSRGVLVVAASGNSGAGSISYPARYANAMAVGATDQNNNRASFSQYGAGLDIVAPGVNVQSTYPGWTYASLNGTSMATPHVAGAAALVKQKNPSWSNVQIRNHLKNTATSLGSTNLYGSGLVNAEAATR

SEQ ID NO: 52221 - protein, 269 aa, Unidentified
AQSVPWGISRVQAPAAHNRGLTGSGVKVAVLDTGISTHPDLNIRGGASFVPGEPSTQDGNGHGTHVAGTIAALNNSIGVLGVAPSAELYAVKVLGASGSGSVSSIAQGLEWAGNNGMHVANLSLGSPSISATLEQAVNSATSRGVLVVAASGNSGAGSISYPARYANAMAVGATDQNNNRASFSQYGAGLDIVAPGVNVQSTYPGSTYASLNGTSMATPHVAGAAALVKQKNPSWSNVQIRNHLKNTATSLGSTNLYGSGLVNAEAATR

SEQ ID NO: 52222 - protein, 269 aa, Unidentified
AQSVPWGISRVQAPAAHNRGLTGSGVKVAVLDTGISTHPDLNIRGGASFVPGEPSTQDGNGHGTHVAGTIAALNNSIGVLGVAPSAELYAVKVLGASGSGSVSSIAQGLEWAGNNGMHVANLSLGSPSPSATLEQAVNSATSRGVLVVAASGNSGAGSISYPARYANAMAVGATDQNNNRASFSQYGAGLDIVAPGVNVESTYPGSTYASLNGTSMATPHVAGAAALVKQKNPSWSNVQIRNHLKNTATSLGSTNLYGSGLVNAEAATR

SEQ ID NO: 52223 - protein, 269 aa, Unidentified
AQSVPWGISRVQAPAAHNRGLTGSGVKVAVTDTGISTHPDLNIRGGASFVPGEPSTQDGNGHGTHVAGTIAALNNSIGVLGVAPSAELYAVKVLGASGSGSVSSIAQGLEWAGNNGMHVANLSLGSPSPSATLEQAVNSATSRGVLVVAASGNSGAGSISYPARYANAMAVGATDQNNNRASFSQYGAGLDIVAPGVNVQSTYPGSTYASLNGTSMATPHVAGAAALVKQKNPSWSNVQIRNHLKNTATSLGSTNLYGSGLVNAEAATR

SEQ ID NO: 52224 - protein, 269 aa, Unidentified
AQSVPWGISRVQAPAAHNRGLTGSGVKVAVLDTGISTHPDLDIRGGASFVPGEPSTQDGNGHGTHVAGTIAALNNSIGVLGVAPSAELYAVKVLGASGSGSVSSIAQGLEWAGNNGMHVANLSLGSPSPSATLEQAVNSATSRGVLVVAASGNSGAGSISYPARYANAMAVGATDQNNNRASFSQYGAGLDIVAPGVNVQSTYPGSTYASLNGTSMATPHVAGAAALVKQKNPSWSNVQIRNHLKNTATSLGSTNLYGSGLVNAEAATR

SEQ ID NO: 52225 - protein, 269 aa, Unidentified
AQSVPWGISRVQAPAAHNRGLTGSGVKVAVLDTGISTHPDLNIRGGASFVPGEPSTQDGNGHGTHVAGTIAALNNSIGVLGVAPSAELYAVKVLGASGSGSVSSIAQGLEWAGNFGMHVANLSLGSPSPSATLEQAVNSATSRGVLVVAASGNSGAGSISYPARYANAMAVGATDQNNNRASFSQYGAGLDIVAPGVNVQSTYPGSTYASLNGTSMATPHVAGAAALVKQKNPSWSNVQIRNHLKNTATSLGSTNLYGSGLVNAEAATR

SEQ ID NO: 52226 - protein, 269 aa, Unidentified
AQSVPWGISRVQAPAAHNRGLTGSGVKVAVLDTGISTHPDLNIRGGASFVPGEPSTQDGNGHGTHVAGTIAALNNSIGVLGVAPSAELYAVKVLGASGSGSVSSIAQGLEWAGNNGMHVANLSLGSPSPSATLEQAVNSATSRGVLVVAASGNSGAGSISYPARYANAMAVGATDQNNNRASFSQYGAGLDIVAPGVNVQSTYPGSTYASLNGTSMATPHVAGAAALVKQKNGSWSNVQIRNHLKNTATSLGSTNLYGSGLVNAEAATR

SEQ ID NO: 52227 - protein, 269 aa, Unidentified
AQSVPWGISRVQAPAAHNRGLTGSGVKVAVLDTGISTHPDLNIRGGASFVPGEPSTQDGNGHGTHVAGTIAALNNSIGVLGVAPSAELYAVKVLGASGSGSVSSIAQGLEWAGNNGMHVANLSLGSPSPSATLEQAVNSATSRGVLVVAASGNSGAGSISYPARYANAMAVGATDRNNNRASFSQYGAGLDIVAPGVNVQSTYPGSTYASLNGTSMATPHVAGAAALVKQKNPSWSNVQIRNHLKNTATSLGSTNLYGSGLVNAEAATR

SEQ ID NO: 52228 - protein, 269 aa, Unidentified
AQSVPWGISRVQAPAAHNRGLTGSGVKVAVLDTGISTHPDLNIRGGASFVPGEPSTQDGNGHGTHVAGTIAALNNSIGVLGVAPSAELYAVKVLGASGSGSVSSIAQGLEWAGNNGMHVANLSLGSPSPSATLEQAVRSATSRGVLVVAASGNSGAGSISYPARYANAMAVGATDQNNNRASFSQYGAGLDIVAPGVNVQSTYPGSTYASLNGTSMATPHVAGAAALVKQKNPSWSNVQIRNHLKNTATSLGSTNLYGSGLVNAEAATR

SEQ ID NO: 52229 - protein, 269 aa, Unidentified
AQSVPWGIWRVQAPAAHNRGLTGSGVKVAVLDTGISTHPDLNIRGGASFVPGEPSTQDGNGHGTHVAGTIAALNNSIGVLGVAPSAELYAVKVLGASGSGSVSSIAQGLEWAGNNGMHVANLSLGSPSPSATLEQAVNSATSRGVLVVAASGNSGAGSISYPARYANAMAVGATDQNNNRASFSQYGAGLDIVAPGVNVQSTYPGSTYASLNGTSMATPHVAGAAALVKQKNPSWSNVQIRNHLKNTATSLGSTNLYGSGLVNAEAATR

SEQ ID NO: 52230 - protein, 269 aa, Unidentified
AQSVPWGISRVQAPAAHNRGLTGSGVKVAVLDTGISTHPDLNIRGGASFVPGEPSTQDGNGHGTHVAGTIAALNNSIGVLGVAPSAELYAVKVLGASGSGSVSSIAQGLEWAGNNGMHVANLSLGSPSPSATLEQAVNSATSRGVLVVAASGNSGAGSISYPARYANAMAVGATDQNNNRASFSQYGAGLDIVAPGVNVQSTYPGSTYASLNGTSMATPHVAGAAALVKQKNPSWSNVQIRNHLKNTATSLGSTNLYGSGNVNAEAATR

SEQ ID NO: 52231 - protein, 269 aa, Unidentified
AQSVPWGISRVQAPAAHNRGLTGSGVKVAVLDTGISTFPDLNIRGGASFVPGEPSTQDGNGHGTHVAGTIAALNNSIGVLGVAPSAELYAVKVLGASGSGSVSSIAQGLEWAGNNGMHVANLSLGSPSPSATLEQAVNSATSRGVLVVAASGNSGAGSISYPARYANAMAVGATDQNNNRASFSQYGAGLDIVAPGVNVQSTYPGSTYASLNGTSMATPHVAGAAALVKQKNPSWSNVQIRNHLKNTATSLGSTNLYGSGLVNAEAATR

SEQ ID NO: 52232 - protein, 269 aa, Unidentified
AQSVPWGISRVQAPAAHNRGLTGSGVKVAVLDTGISTHPDLNIRGGASFVPGEPSTQDGNGHGTHVAGTIAALNNSIGVLGVAPSAELYAVKVLGASGSGSVSSIAQGLEWAGNNGMHVANSSLGSPSPSATLEQAVNSATSRGVLVVAASGNSGAGSISYPARYANAMAVGATDQNNNRASFSQYGAGLDIVAPGVNVQSTYPGSTYASLNGTSMATPHVAGAAALVKQKNPSWSNVQIRNHLKNTATSLGSTNLYGSGLVNAEAATR

SEQ ID NO: 52233 - protein, 269 aa, Unidentified
AQSVPWGISRVQAPAAHNRGLTGSGVKVAVLDTGISTHPDLNIRGGASFVPGEPSTQDGNGHGTHVAGTIAALNNSIGVLGVAPNAELYAVKVLGASGSGSVSSIAQGLEWAGNNGMHVANLSLGSPSPSATLEQAVNSATSRGVLVVAASGNSGAGSISYPARYANAMAVGATDQNNNRASFSQYGAGLDIVAPGTNVQSTYPGSTYASLNGTSSATPHVAGAAALVKQKNPSWSNVQIRNHLKNTATSLGSTNLYGSGLVNAEAATR

SEQ ID NO: 52234 - protein, 269 aa, Unidentified
AQSVPWGISRVQAPAAHNRGLTGSGVKVAVLDTGISTHPDLNIRGGASFVPGEPSTQDGNGHGTHVAGTIAALNNSIGVLGVAPSAELYAVKVLGASGSGSVSSIAQGLEWAGNNNMHVANLSLGSPSPSATLEQAVNSATSRGVLVVAASGNSGAGSISYPARYANAMAVGATDQNNNRASFSQYGAGLDIVAPGVNVQSTYPGSTYASLNGTSMATPHVAGAAALVKQKNPSWSNVQIRNHLKNTATSLGSTNLYGSGLVNAEAATR

SEQ ID NO: 52235 - protein, 269 aa, Unidentified
AQSVPWGISRVQAPAAHNRGLTGSGVKVAVLDTGISTHPQLNIRGGASFVPGEPSTQDGNGHGTHVAGTIAALNNSIGVLGVAPSAELYAVKVLGASGSGSVSSIAQGLEWAGNNGMHVANLSLGSPSPSATLEQAVNSATSRGVLVVAASGNSGAGSISYPARYANAMAVGATDQNNNRASFSQYGAGLDIVAPGVNVQSTYPGSTYASLNGTSMATPHVAGAAALVKQKNPSWSNVQIRNHLKNTATSLGSTNLYGSGLVNAEAATR

SEQ ID NO: 52236 - protein, 269 aa, Unidentified
AQSVPWGISRVQAPAAHNRGLTGSGVKVAVLDTGISTHPDLNIRGGASFVPGEPSTQDGNGHGTHVAGTIAALNNSIGVLGVAPSAELYAVKVLGASGSGSVSSIAQGLEWAGNNGMHVANLSLGSPSPSATLEQAVNSATSRGVLVVAASGNSGAGSISYPARYANAMAVGATDQNNNRASFSQYGAGLDIVAPGVNVQSTYPGITYASLNGTSMATPHVAGAAALVKQKNPSWSNVQIRNHLKNTATSLGSTNLYGSGLVNAEAATR

SEQ ID NO: 52237 - protein, 269 aa, Unidentified
AQSVPWGISRVQAPAAHNRGLTGSGVKVAVLDTGISTHPDLNIRGGASFVPGEPSTQDGNGHGTHVAGTIAALNNSIGVLGVAPWAELYAVKVLGASGSGSVSSIAQGLEWAGNNGMHVANLSLGSPSPSATLEQAVNSATSRGVLVVAASGNSGAGSISYPARYANAMAVGATDQNNNRASFSQYGAGLDIVAPGVNVQSTYPGSTYASLNGTSMATPHVAGAAALVKQKNPSWSNVQIRNHLKNTATSLGSTNLYGSGLVNAEAATR

SEQ ID NO: 52238 - protein, 269 aa, Unidentified
AQSVPWGISRVQAPAAHNRKLTGSGVKVAVLDTGISTHPDLNIRGGASFVPGEPSTQDGNGHGTHVAGTIAALNNSIGVLGVAPSAELYAVKVLGASGSGSVSSIAQGLEWAGNNGMHVANLSLGSPSPSATLEQAVNSATSRGVLVVAASGNSGAGSISYPARYANAMAVGATDQNNNRASFSQYGAGLDIVAPGVNVQSTYPGSTYASLNGTSMATPHVAGAAALVKQKNPSWSNVQIRNHLKNTATSLGSTNLYGSGLVNAEAATR

SEQ ID NO: 52239 - protein, 269 aa, Unidentified
AQSVPWGISRVQAPAAHNRGLTGSGVKVAVLDTGISTHPDLNIRGGASFVPGEPSTQDGNGHGTHVAGTIAALNNSIGVLGVAPSAELYAVKVLGASGSGSVSSIAQGLEWAGNNGMHVANLSLGSPSPSATLEQAVNSATSRGVLVVAASGNSGAGSISYPARYANAMAVGATDQNNNRASFSQYGAGLDIVAPGVNVQSTYPGSTYASLNGTSMATPHVAGAACLVKQKNPSWSNVQIRNHLKNTATSLGSTNLYGSGLVNAEAATR

SEQ ID NO: 52240 - protein, 269 aa, Unidentified
AQSVPWGISRVQAPAAHNRGLTGSGVKVAVLDTGISTHPDLNIRGGASFVPGEPSTQDGNGHGTHVAGTIVALNNSIGVLGVAPSAELYAVKVLGASGSGSVSSIAQGLEWAGNNGMHVANLSLGSPSPSATLEQAVNSATSRGVLVVAASGNSGAGSISYPARYANAMAVGATDQNNNRASFSQYGAGLDIVAPGVNVQSTYPGSTYASLNGTSMATPHVAGAAALVKQKNPSWSNVQIRNHLKNTATSLGSTNLYGSGLVNAEAATR

SEQ ID NO: 52241 - protein, 269 aa, Unidentified
AQSVPWGISRVQAPAAHNRGLTGSGVKVAVLDTGISTHPELNIRGGASFVPGEPSTQDGNGHGTHVAGTIAALNNSIGVLGVAPSAELYAVKVLGASGSGSVSSIAQGLEWAGNNGMHVANLSLGSPSPSATLEQAVNSATSRGVLVVAASGNSGAGSISYPARYANAMAVGATDQNNNRASFSQYGAGLDIVAPGVNVQSTYPGSTYASLNGTSMATPHVAGAAALVKQKNPSWSNVQIRNHLKNTATSLGSTNLYGSGLVNAEAATR

SEQ ID NO: 52242 - protein, 269 aa, Unidentified
AQSVPWGISRVQAPAAHNRGLTGSGVKVAVLDTGISTHPDLNIRGGASFVPGEPSTQDGNGHGTHVAGTIAALNNSIGVLGVAPSAELYAVKVLGASGSGSVSSIAQGLEWAGNNGMHVANLSLGSPSPSATLEQAVNSATSRGVLVVAASGNSGAGSISYPARYANAMAVGATDQNNNRASFSQYGAGLDIVAPGVNVQSTYPGSTYASLNGTSMAAPHVAGAAALVKQKNPSWSNVQIRNHLKNTATSLGSTNLYGSGLVNAEAATR

SEQ ID NO: 52243 - protein, 269 aa, Unidentified
AQSVPWGISRVQAPAAHNRGLTGSGVKVAVLDTGISTHPDLNQRGGASFVPGEPSTQDGNGHGTHVAGTIAALNNSIGVLGVAPSAELYAVKVLGASGSGSVSSIAQGLEWAGNNGMHVANLSLGSPSPSATLEQAVNSATSRGVLVVAASGNSGAGSISYPARYANAMAVGATDQNNNRASFSQYGAGLDIVAPGVNVQSTYPGSTYASLNGTSMATPHVAGAAALVKQKNPSWSNVQIRNHLKNTATSLGSTNLYGSGLVNAEAATR

SEQ ID NO: 52244 - protein, 269 aa, Unidentified
AQSVPWGISRVQAPAAHNRGLTGSGVKVAVLDTGISTHPDLNIRGGASFVPGEPSTQDGNGHGTHVAGTIAALNNSIGVLGVAPSAELYAVKVLGASGSGSVSSIAQGLEWAGNNGMHVANLSLGSNSPSATLEQAVNSATSRGVLVVAASGNSGAGSISYPARYANAMAVGATDQNNNRASFSQYGAGLDIVAPGVNVQSTYPGSTYASLNGTSMATPHVAGAAALVKQKNPSWSNVQIRNHLKNTATSLGSTNLYGSGLVNAEAATR

SEQ ID NO: 52245 - protein, 269 aa, Unidentified
AQSVPWGISRVQAPAAHNRGLTGSGVKVAVLDTGISTHPDLNIRGGASFVPGEPSTQDGNGHGTHVAGTIAALNNSIGVLGVAYSAELYAVKVLGASGSGSVSSIAQGLEWAGNNGMHVANLSLGSPSPSATLEQAVNSATSRGVLVVAASGNSGAGSISYPARYANAMAVGATDQNNNRASFSQYGAGLDIVAPGVNVQSTYPGSTYASLNGTSMATPHVAGAAALVKQKNPSWSNVQIRNHLKNTATSLGSTNLYGSGLVNAEAATR

SEQ ID NO: 52246 - protein, 269 aa, Unidentified
AQSVPWGISRVQAPAAHNRGLTGSGVKVAVLDTGISTHPDLNIRGGASFVPGEPSTQDGNGHGTHVAGTIAALNNSIGVLGVAPSAELYAVKVLGASGSGSVSSIAQGLEWAGNNGMHVANLSLGSPSPSATLEQAVNSATSRGVLVVAASGNSGAGSISYPARYANAMAVGATDQNNNRASFSQYGAGLDIVAPGVXVQSTYPGSTYASLNGTSMATPHVAGAAALVKQKNPSWSNVQIRNHLKNTATSLGSTNLYGSGLVNAEAATR

SEQ ID NO: 52247 - protein, 269 aa, Unidentified
AQSVPWGISRVQAPAAHNRGLTGSGVKVAVLDTGISTHPDLNIRGGASFVPGEPSTQDGNGHGTHVAGTIAALNNSIGVLGVAPSAELYAVKVLGASGSGSVSSIAQGLEWAGNNGMHVANLSLGSPSPSATLEQAVNSATSRGVLVVAASGNSGAGSISYPARYANAMAVGATDQNNNRASFSQYGAGLDIVAPGVNVQSTYPQSTYASLNGTSMATPHVAGAAALVKQKNPSWSNVQIRNHLKNTATSLGSTNLYGSGLVNAEAATR

SEQ ID NO: 52248 - protein, 269 aa, Unidentified
AQSVPWGISRVQAPAAHNRGLTGSGVKVAVLDTGISTHPDLNIRGGASFVPGEPSTQDGNGHGTHVAGTIAALNNSIGVLGHAPSAELYAVKVLGASGSGSVSSIAQGLEWAGNNGMHVANLSLGSPSPSATLEQAVNSATSRGVLVVAASGNSGAGSISYPARYANAMAVGATDQNNNRASFSQYGAGLDIVAPGVNVQSTYPGSTYASLNGTSMATPHVAGAAALVKQKNPSWSNVQIRNHLKNTATSLGSTNLYGSGLVNAEAATR

SEQ ID NO: 52249 - protein, 269 aa, Unidentified
AQSVPWGISRVQAPAAHNRGLTGSGVKVAVLDTGISTHPDLNIRGGASFVPGEPSTQDGNGHGTHVAGTIAALNNSIGVLGVAPSAELYAVKVLGASGSGSVSSIAQGLEWAGNNGMHVANLSLGSPSPSATLEQAVNSATSRGGLVVAASGNSGAGSISYPARYANAMAVGATDQNNNRASFSQYGAGLDIVAPGVNVQSTYPGSTYASLNGTSMATPHVAGAAALVKQKNPSWSNVQIRNHLKNTATSLGSTNLYGSGLVNAEAATR

SEQ ID NO: 52250 - protein, 269 aa, Unidentified
AQSVPWGISRVQAPAAHNRGLTGSGVKVAVLDTGISTHPDLNIRGGASFVPGEPSTQDGNGHGTHVAGTIAALNNSIGVLGVAPSAELYAVKVLGASGSGSVSSIAQGLEWAGNNGMHVANLSLGSPSPSATLEQAVNSATSRGVLVVAASGNSGAGSISYPARYANAMAVGATDQNNNRASFSQYGAGLDIVAPGVNVQSTYPGSTYASLNGTSMATPHVAGAASLVKQKNPSWSNVQIRNHLKNTATSLGSTNLYGSGLVNAEAATR

SEQ ID NO: 52251 - protein, 269 aa, Unidentified
AQSVPWGISRVQAPAAHNRGLTGSGVKVAVLDTGISTHPDLNIRGGASFVPGEPSTQDGNGHGTHVAGTIAALNNSIGVLGVAPSAELYAVKVLGASGSGSVSSIAQGLEWAGNNGMHVANLSLGSPSPSATLEQAVNSATSRGVWVVAASGNSGAGSISYPARYANAMAVGATDQNNNRASFSQYGAGLDIVAPGVNVQSTYPGSTYASLNGTSMATPHVAGAAALVKQKNPSWSNVQIRNHLKNTATSLGSTNLYGSGLVNAEAATR

SEQ ID NO: 52252 - protein, 269 aa, Unidentified
AQSVPWGISRVQAPAAHNRGLTGSGVKVAVLDTGISTIPDLNIRGGASFVPGEPSTQDGNGHGTHVAGTIAALNNSIGVLGVAPSAELYAVKVLGASGSGSVSSIAQGLEWAGNNGMHVANLSLGSPSPSATLEQAVNSATSRGVLVVAASGNSGAGSISYPARYANAMAVGATDQNNNRASFSQYGAGLDIVAPGVNVQSTYPGSTYASLNGTSMATPHVAGAAALVKQKNPSWSNVQIRNHLKNTATSLGSTNLYGSGLVNAEAATR

SEQ ID NO: 52253 - protein, 269 aa, Unidentified
AQSVPWGISRVQAPAAHNRGLTGSGVKVAVLDTGISTHPDLNIRGGASFVPGEPSTQDGNGHGTHVAGTIAALNNSIGVLGVAPSAELYAVKVLGASGSGSVSSIAQGLEWAGNNGMPVANLSLGSPSPSATLEQAVNSATSRGVLVVAASGNSGAGSISYPARYANAMAVGATDQNNNRASFSQYGAGLDIVAPGVNVQSTYPGSTYASLNGTSMATPHVAGAAALVKQKNPSWSNVQIRNHLKNTATSLGSTNLYGSGLVNAEAATR

SEQ ID NO: 52254 - protein, 269 aa, Unidentified
AQSVPWGISRVQAPAAHNRGLTGSGVKVAVLDTGISTHPDLNIRGGASFVPGEPSTQDGNGHGTHVAGTIAALNNSIGVLGVAPSAELYAVKVLGAMGSGSVSSIAQGLEWAGNNGMHVANLSLGSPSPSATLEQAVNSATSRGVLVVAASGNSGAGSISYPARYANAMAVGATDQNNNRASFSQYGAGLDIVAPGVNVQSTYPGSTYASLNGTSMATPHVAGAAALVKQKNPSWSNVQIRNHLKNTATSLGSTNLYGSGLVNAEAATR

SEQ ID NO: 52255 - protein, 269 aa, Unidentified
AQSVPWGISRVQAPAAHNRGLTGSGVKVAVLDTGISTHPDLNIRGGASFVPGEPSTQDGNGHGTHVAGTIAALNNSIGVLGVAPSAELYAVKVLGASGSGSVSSIAQGLEWAGNNGMHVANLSLGSPSPSATLEQAVNSATSRGVLVVAASGNEGAGSISYPARYANAMAVGATDQNNNRASFSQYGAGLDIVAPGVNVQSTYPGSTYASLNGTSMATPHVAGAAALVKQKNPSWSNVQIRNHLKNTATSLGSTNLYGSGLVNAEAATR

SEQ ID NO: 52256 - protein, 269 aa, Unidentified
AQSVPWGISRVQAPAAHNRGLTGSGVKVAVLDTGISTHPDLNIRGGASFVPGEPSTQDGNGHGTHVAGTIAALNNSIGVLGVAPSAELFAVKVLGASGSGSVSSIAQGLEWAGNNGMHVANLSLGSPSPSATLEQAVNSATSRGVLVVAASGNSGAGSISYPARYANAMAVGATDQNNNRASFSQYGAGLDIVAPGVNVQSTYPGSTYASLNGTSMATPHVAGAAALVKQKNPSWSNVQIRNHLKNTATSLGSTNLYGSGLVNAEAATR

SEQ ID NO: 52257 - protein, 269 aa, Synthetic construct
AQSVPWGISRVQAPAAHNRGLTGSGVKVAVLDTGISTHPDLNIRGGASFVPGEPSTQDGNGHGTHVAGTIAALNNSIGVLGVAPSAELYAVKVLGASGSGSVSSIAQGLEWAGNNGMHVANLSLGSPSPSATLEQAVNSATSRGVLVVAASGNSGAGSISYPARYANAMAVGATDQNNNRASFSQYGPGLDIVAPGVNVQSTYPGSTYASLNGTSMATPHVAGAAALVKQKNPSWSNVQIRNHLKNTATSLGSTNLYGSGLVNAEAATR

SEQ ID NO: 52258 - protein, 269 aa, Unidentified
AQSVPWGISRVQAPAAHNRGLTGSGVKVAVLDTGISTHPGLNIRGGASFVPGEPSTQDGNGHGTHVAGTIAALNNSIGVLGVAPSAELYAVKVLGASGSGSVSSIAQGLEWAGNNGMHVANLSLGSPSPSATLEQAVNSATSRGVLVVAASGNSGAGSISYPARYANAMAVGATDQNNNRASFSQYGAGLDIVAPGVNVQSTYPGSTYASLNGTSMATPHVAGAAALVKQKNPSWSNVQIRNHLKNTATSLGSTNLYGSGLVNAEAATR

SEQ ID NO: 52259 - protein, 269 aa, Unidentified
AQSVPWGISRVQAPAAHNRGLTGSGVKVAVLDTGISTHPDLNIRGGASFVPGEPSTQDGNGHGTHVAGTIAALNNSIGVLGVAPSAELYAVKVLGASGSGSVSSIAQGLEWAGNNGMHVANLSLGSPSPSATLEQAVNSATSRGVLVVAASGNSGAGSISYPASYANAMAVGATDQNNNRASFSQYGAGLDIVAPGVNVQSTYPGSTYASLNGTSMATPHVAGAAALVKQKNPSWSNVQIRNHLKNTATSLGSTNLYGSGLVNAEAATR

SEQ ID NO: 52260 - protein, 269 aa, Unidentified
AQSVPWGISRVQAPAAHNRGLTGSGVKVAVLDTGISTHPDLNIRGGASFVPGEPSTQDGNGHGTHVAGTIAALNNSIGVLGVAPSAELYAIKVLGASGSGSVSSIAQGLEWAGNNGMHVANLSLGSPSPSATLEQAVNSATSRGVLVVAASGNSGAGSISYPARYANAMAVGATDQNNNRASFSQYGAGLDIVAPGVNVQSTYPGSTYASLNGTSMATPHVAGAAALVKQKNPSWSNVQIRNHLKNTATSLGSTNLYGSGLVNAEAATR

SEQ ID NO: 52261 - protein, 269 aa, Unidentified
AQSVPWGISRVQAPAAHNRGLTGSGVKVAVLDTGISTHPDLNIRGGAGFVPGEPSTQDGNGHGTHVAGTIAALNNSIGVLGVAPSAELYAVKVLGASGSGSVSSIAQGLEWAGNNGMHVANLSLGSPSPSATLEQAVNSATSRGVLVVAASGNSGAGSISYPARYANAMAVGATDQNNNRASFSQYGAGLDIVAPGVNVQSTYPGSTYASLNGTSMATPHVAGAAALVKQKNPSWSNVQIRNHLKNTATSLGSTNLYGSGLVNAEAATR

SEQ ID NO: 52262 - protein, 269 aa, Unidentified
AQSVPWGISRVQAPAAHNRGLTGSGVKVAVLDTGISTHPDLNIRGGASFVPGEPSTQDGNGHGTHVAGTIAALNNSIGVLGVAPSAFLYAVKVLGASGSGSVSSIAQGLEWAGNNGMHVANLSLGSPSPSATLEQAVNSATSRGVLVVAASGNSGAGSISYPARYANAMAVGATDQNNNRASFSQYGAGLDIVAPGVNVQSTYPGSTYASLNGTSMATPHVAGAAALVKQKNPSWSNVQIRNHLKNTATSLGSTNLYGSGLVNAEAATR

SEQ ID NO: 52263 - protein, 269 aa, Unidentified
AQSVPWGISRVQAPAAHNRGLTGSGVKVAVLDTGISTHPDLNIRGGASFVPGEPSTFDGNGHGTHVAGTIAALNNSIGVLGVAPSAELYAVKVLGASGSGSVSSIAQGLEWAGNNGMHVANLSLGSPSPSATLEQAVNSATSRGVLVVAASGNSGAGSISYPARYANAMAVGATDQNNNRASFSQYGAGLDIVAPGVNVQSTYPGSTYASLNGTSMATPHVAGAAALVKQKNPSWSNVQIRNHLKNTATSLGSTNLYGSGLVNAEAATR

SEQ ID NO: 52264 - protein, 269 aa, Unidentified
AQSVPWGISRVQAPAAHNRGLTGSGVKVAVLDTGISTHPDLNIRGGASFVPGEPSTQDGNGHGTHVAGTIAALNNSIGVLGVAPSAELYAVKVLGASGSGSVSSIAQGLEWAGNNGMHVANLSLGSPSFSATLEQAVNSATSRGVLVVAASGNSGAGSISYPARYANAMAVGATDQNNNRASFSQYGAGLDIVAPGVNVQSTYPGSTYASLNGTSMATPHVAGAAALVKQKNPSWSNVQIRNHLKNTATSLGSTNLYGSGLVNAEAATR

SEQ ID NO: 52265 - protein, 269 aa, Unidentified
AQSVPWGISRVQAPAAHNRGLTGSGVKVAVLDTGISTHPDLNIRGGASFVPGEPSTQDGNGHGTHVAGTIAALNNSIGVLGVAPSAELYAVKVLGASGSGSVSSIAQGLEWAGNNGMHVANLSLGSPSPSATLEQAVNCATSRGVLVVAASGNSGAGSISYPARYANAMAVGATDQNNNRASFSQYGAGLDIVAPGVNVQSTYPGSTYASLNGTSMATPHVAGAAALVKQKNPSWSNVQIRNHLKNTATSLGSTNLYGSGLVNAEAATR

SEQ ID NO: 52266 - protein, 269 aa, Unidentified
AQSVPWGISRVQAPAAHNRGLTGSGVKVAVLDTGISTHPDLNIRGGASFVPGEPSTQDGNGHGTHVAGTIAALNNSIGVLGVAPSAELYAVKVLGASGSGSVSSIAQGLEWAGNNGMHVANLSLGSPSPHATLEQAVNSATSRGVLVVAASGNSGAGSISYPARYANAMAVGATDQNNNRASFSQYGAGLDIVAPGVNVQSTYPGSTYASLNGTSMATPHVAGAAALVKQKNPSWSNVQIRNHLKNTATSLGSTNLYGSGLVNAEAATR

SEQ ID NO: 52267 - protein, 269 aa, Unidentified
AQSVPWGISRVQAPAAHNRGLTGSGVKVAVLDTGISTHPDLNIRGGASFVPGEPSTQDGNGHGTHVAGTIAALNNSIGVLGVAPSAELYAVKVLGASGSGSVSSIAQGLEWAGNNGMHVANLSLGSPSPSATLEQAVNSATSRGVLVVAASGNSGAGSISYPARYANAMAVGATDQRNNRASFSQYGAGLDIVAPGVNVQSTYPGSTYASLNGTSMATPHVAGAAALVKQKNPSWSNVQIRNHLKNTATSLGSTNLYGSGLVNAEAATR

SEQ ID NO: 52268 - protein, 269 aa, Unidentified
AQSVPWGISRVQAPAAHNRGLTGSGVKVAELDTGISTHPDLNIRGGASFVPGEPSTQDGNGHGTHVAGTIAALNNSIGVLGVAPSAELYAVKVLGASGSGSVSSIAQGLEWAGNNGMHVANLSLGSPSPSATLEQAVNSATSRGVLVVAASGNSGAGSISYPARYANAMAVGATDQNNNRASFSQYGAGLDIVAPGVNVQSTYPGSTYASLNGTSMATPHVAGAAALVKQKNPSWSNVQIRNHLKNTATSLGSTNLYGSGLVNAEAATR

SEQ ID NO: 52269 - protein, 269 aa, Unidentified
AQSVPWGISRVQAPAAHNRGLTGSGVKVAVLDTGISTHPDLNIRGGASFVPGEPSTQDGNGHGTHVAGTIAALNNSIGVFGVAPSAELYAVKVLGASGSGSVSSIAQGLEWAGNNGMHVANLSLGSPSPSATLEQAVNSATSRGVLVVAASGNSGAGSISYPARYANAMAVGATDQNNNRASFSQYGAGLDIVAPGVNVQSTYPGSTYASLNGTSMATPHVAGAAALVKQKNPSWSNVQIRNHLKNTATSLGSTNLYGSGLVNAEAATR

SEQ ID NO: 52270 - protein, 269 aa, Unidentified
AQSVPWGISRVQAPAAHNRGLTGSGVKVAVLDTGISTHPDLNIRGGASFVPGEPSTQDGNGHGTHVAGTIAALNNSIGVLGVAPSAELYAVKVLGASGSGSVSSIAQGLEWAGNNGMHVANLSLGSPSPSATLEQAVNSATSRGVLVVAASGNSGAGSISYPARYANAMAVGATDQNNNRASFSQYGAGLDIVAPGVNVQSTYPGSTYASLNGTSMATPHVAGAAALVKQKNPSWSNVDIRNHLKNTATSLGSTNLYGSGLVNAEAATR

SEQ ID NO: 52271 - protein, 269 aa, Unidentified
AQSVPWGISRVQAPAAHNRGLTGSGVKVAVLDTGISTHPDLNIRGGASFVPGEPSTRDGNGHGTHVAGTIAALNNSIGVLGVAPSAELYAVKVLGASGSGSVSSIAQGLEWAGNNGMHVANLSLGSPSPSATLEQAVNSATSRGVLVVAASGNSGAGSISYPARYANAMAVGATDQNNNRASFSQYGAGLDIVAPGVNVQSTYPGSTYASLNGTSMATPHVAGAAALVKQKNPSWSNVQIRNHLKNTATSLGSTNLYGSGLVNAEAATR

SEQ ID NO: 52272 - protein, 269 aa, Unidentified
AQSVPWGISRVQAPAAHNRGLTGSGVKVAVLDTGISTHPDLNIRGGASFVPGEPSTQDGNGHGTHVAGTIAALNNSIGVLGVAPSAGLYAVKVLGASGSGSVSSIAQGLEWAGNNGMHVANLSLGSPSPSATLEQAVNSATSRGVLVVAASGNSGAGSISYPARYANAMAVGATDQNNNRASFSQYGAGLDIVAPGVNVQSTYPGSTYASLNGTSMATPHVAGAAALVKQKNPSWSNVQIRNHLKNTATSLGSTNLYGSGLVNAEAATR

SEQ ID NO: 52273 - protein, 269 aa, Unidentified
AQSVPWGISRVQAPAAHNRGLTGSGVKVAVLDTGISTHPDLNIRGGASFVPGEPSTQDGNHHGTHVAGTIAALNNSIGVLGVAPSAELYAVKVLGASGSGSVSSIAQGLEWAGNNGMHVANLSLGSPSPSATLEQAVNSATSRGVLVVAASGNSGAGSISYPARYANAMAVGATDQNNNRASFSQYGAGLDIVAPGVNVQSTYPGSTYASLNGTSMATPHVAGAAALVKQKNPSWSNVQIRNHLKNTATSLGSTNLYGSGLVNAEAATR

SEQ ID NO: 52274 - protein, 269 aa, Unidentified
AQSVPWGISRVQAPAAHNRGLTGSGVKVAVLDTGIRTHPDLNIRGGASFVPGEPSTQDGNGHGTHVAGTIAALNNSIGVLGVAPSAELYAVKVLGASGSGSVSSIAQGLEWAGNNGMHVANLSLGSPSPSATLEQAVNSATSRGVLVVAASGNSGAGSISYPARYANAMAVGATDQNNNRASFSQYGAGLDIVAPGVNVQSTYPGSTYASLNGTSMATPHVAGAAALVKQKNPSWSNVQIRNHLKNTATSLGSTNLYGSGLVNAEAATR

SEQ ID NO: 52275 - protein, 269 aa, Unidentified
AQSVPWGISRVQAPAAHNRGLTGSGVKVAVLDTGISTHPDLNIRGGASFVPGEPSTQDGNGHGTHVAGTIAALNNSIGVLGVAPSAELYAVKVLGASGSGSVSSIAQGLEWAGNNGMHVANLSLGSPSPSATLEQAVNSATSRGVLVVAASGNSGAGSISYPARYANAMAVGATDQFNNRASFSQYGAGLDIVAPGVNVQSTYPGSTYASLNGTSMATPHVAGAAALVKQKNPSWSNVQIRNHLKNTATSLGSTNLYGSGLVNAEAATR

SEQ ID NO: 52276 - protein, 270 aa, Unidentified
AQSVPWGISRVQAPAAHNRGLTGSGVKVAVLDTGISTHPDLNIRGGASFVPGEPSTQDGNGHGTHVAGTIAALNNSIGVLGVAPSAELYAVKVLGAXSGSGSVSSIAQGLEWAGNNGMHVANLSLGSPSHSATLEQAVNSATSRGVLVVAASGNSGAGSISYPARYANAMAVGATDQNNNRASFSQYGAGLDIVAPGVNVQSTYPGSTYASLNGTSMATPHVAGAAALVKQKNPSWSNVQIRNHLKNTATSLGSTNLYGSGLVNAEAATR

SEQ ID NO: 52277 - protein, 269 aa, Unidentified
AQSVPWGISRVQAPAAHNRGLTGSGVKVAVLDTGISTHPDLNIRGGASFVPGEPSTQDGNGHGTHVAGTIAALNNSIGVLGVAPSAELYAVKVLGASGSGSVSSIAQGLEWAGNNGMHVANLSLGSPSPSATLERAVNSATSRGVLVVAASGNSGAGSISYPARYANAMAVGATDQNNNRASFSQYGAGLDIVAPGVNVQSTYPGSTYASLNGTSMATPHVAGAAALVKQKNPSWSNVQIRNHLKNTATSLGSTNLYGSGLVNAEAATR

SEQ ID NO: 52278 - protein, 269 aa, Unidentified
AQSVPWGISRVQAPAAHNRGATGSGVKVAVLDTGISTHPDLNIRGGASFVPGEPSTQDGNGHGTHVAGTIAALNNSIGVLGVAPSAELYAVKVLGASGSGSVSSIAQGLEWAGNNGMHVANLSLGSPSPSATLEQAVNSATSRGVLVVAASGNSGAGSISYPARYANAMAVGATDQNNNRASFSQYGAGLDIVAPGVNVQSTYPGSTYASLNGTSMATPHVAGAAALVKQKNPSWSNVQIRNHLKNTATSLGSTNLYGSGLVNAEAATR

SEQ ID NO: 52279 - protein, 269 aa, Synthetic construct
AQSVPWGISRVQAPAAHNRGLTGSGVKVAVLDTGISTHPDLNIRGGASFVPGEPSTQDGNGHGTHVAGTIAALNNSIGVLGVAPSAELYAVKVLGASGSGSVSSIAQGLEWAGNNGMHVANLSLGSPSPSATLEQAVNSATSRGVLVVAASGNSGAGSISYPARYANAMAVGATDQNNNRNSFSQYGAGLDIVAPGVNVQSTYPGSTYASLNGTSMATPHVAGAAALVKQKNPSWSNVQIRNHLKNTATSLGSTNLYGSGLVNAEAATR

SEQ ID NO: 52280 - protein, 269 aa, Unidentified
AQSVPWGISRVQAPAAHNRGLTGSGVKVAVLDTGISTHPDLNIRGGASFVPGEPSTQDGNGHGTHVAGTIAALNNSIGVLGVAPSAELYAVKVLGASGSGSVSSIAQGLEWAGNNGMHVANLSLGSPSPSATLEQAVNSATSRGVLVVAASGNSGAGSISYPARYANAMAVGATDQNNNRASFSQYGAGLDIVAPGVNVQSTYPGSTYASLNGTSMATPHVAGAAALVKQKNPSWSNVQIRNHLKHTATSLGSTNLYGSGLVNAEAATR

SEQ ID NO: 52281 - protein, 269 aa, Unidentified
AQSVPWGISRVQAPAAHNRGLTGSGVKVAVLDTGISTHPDLNIRGGASFVPGEPSTQDGNGHGDHVAGTIAALNNSIGVLGVAPSAELYAVKVLGASGSGSVSSIAQGLEWAGNNGMHVANLSLGSPSPSATLEQAVNSATSRGVLVVAASGNSGAGSISYPARYANAMAVGATDQNNNRASFSQYGAGLDIVAPGVNVQSTYPGSTYASLNGTSMATPHVAGAAALVKQKNPSWSNVQIRNHLKNTATSLGSTNLYGSGLVNAEAATR

SEQ ID NO: 52282 - protein, 269 aa, Unidentified
AQSVPWGISRVQAPAAHNRGLTGSGVKVAVLDTGISTHPDLNIRGGASFVPGEPSTQDGNGHGTHVAGTIAALNNSIGVLGVAPSAELYAVKVLGASGSGSVSSIAQGLEWAGNNGMHVANLSLGSPSPSATLEQAVNSATSRGVLWVAASGNSGAGSISYPARYANAMAVGATDQNNNRASFSQYGAGLDIVAPGVNVQSTYPGSTYASLNGTSMATPHVAGAAALVKQKNPSWSNVQIRNHLKNTATSLGSTNLYGSGLVNAEAATR

SEQ ID NO: 52283 - protein, 269 aa, Unidentified
AQSVPWGISRVQAPAAHNRGLTGSGVKVAVLDTGISTHPDLNIRGGASFVPGEPSTQDGNGHGTHVAGTIAALNNSIGVLGVAPSAELYAVKVLGASGSGSVSSIAQGLEWAGNNGMHVANLSLGSPSPSATLEQAVNSATSRGVLVVAASGNSGAGSISYPARYANAMAVGATDQNNNRASFSQYGAGLDIVAPGVNVQSTYPGSTYASLNGTSMATPHVAGAAALVKQKNPSWSNVQIENHLKNTATSLGSTNLYGSGLVNAEAATR

SEQ ID NO: 52284 - protein, 269 aa, Unidentified
AQSVPWGISRVQAPAAHNRGLTGSGVKVAVLDTGISTHPDLNIRGGASFVPGEPSTQDGNGHGTHVAGTIAALNNSIGVLGVAPSAELYAVKVLGASGSGPVSSIAQGLEWAGNNGMHVANLSLGSPSPSATLEQAVNSATSRGVLVVAASGNSGAGSISYPARYANAMAVGATDQNNNRASFSQYGAGLDIVAPGVNVQSTYPGSTYASLNGTSMATPHVAGAAALVKQKNPSWSNVQIRNHLKNTATSLGSTNLYGSGLVNAEAATR

SEQ ID NO: 52285 - protein, 269 aa, Unidentified
AQSVPWGISRVQAPAAHNRGLTGSGVKVAVLDTGISTEPDLNIRGGASFVPGEPSTQDGNGHGTHVAGTIAALNNSIGVLGVAPSAELYAVKVLGASGSGSVSSIAQGLEWAGNNGMHVANLSLGSPSPSATLEQAVNSATSRGVLVVAASGNSGAGSISYPARYANAMAVGATDQNNNRASFSQYGAGLDIVAPGVNVQSTYPGSTYASLNGTSMATPHVAGAAALVKQKNPSWSNVQIRNHLKNTATSLGSTNLYGSGLVNAEAATR

SEQ ID NO: 52286 - protein, 269 aa, Unidentified
AQSVPWGISRVQAPAAHNRGLTGSGVKVAVLDTGISTHPDLNIRGGASFVPGEPSTQDGNGHGTHVAGTIAALNNSIGVLGVAPSAELYAVKVLGASGSGSVSSIAQGLEWAGNNGMHVANLSLGSPSPSATLEQAVNSATSRGVLVVAASGNSGAGSISYPARYANAMAVGATDQNNNRASFSQYGAGLDIVAPGVNVQSTYPGSTYASLNGTSMATPHVAGAAALVKQKNPSWSFVQIRNHLKNTATSLGSTNLYGSGLVNAEAATR

SEQ ID NO: 52287 - protein, 269 aa, Unidentified
AQSVPWGISRVQAPAAHNRGLTGSGVKVAVLDTGISTHPDLNIRGGASFVPGEPSTQNGNGHGTHVAGTIAALNNSIGVLGVAPSAELYAVKVLGASGSGSVSSIAQGLEWAGNNGMHVANLSLGSPSPSATLEQAVNSATSRGVLVVAASGNSGAGSISYPARYANAMAVGATDQNNNRASFSQYGAGLDIVAPGVNVQSTYPGSTYASLNGTSMATPHVAGAAALVKQKNPSWSNVQIRNHLKNTATSLGSTNLYGSGLVNAEAATR

SEQ ID NO: 52288 - protein, 269 aa, Unidentified
AQSVPWGISRVQAPAAHNRGLTGSGVKVAVLDTGISTHPDLNIRGGASFVPGEPSTQDGNGHGTHVAGTIAALNNSIGVLGVAPSAELYAVKVLGASGSGSVSSIAQGLEWAGNNGMHVANLSLGSPSPSATLEQAVNSATSRGVLVVAASGNSGAGSISYPARYANAMAVGATDQNNNRASFSQYGAGLDIVAPGVNVQSTYPGDTYASLNGTSMATPHVAGAAALVKQKNPSWSNVQIRNHLKNTATSLGSTNLYGSGLVNAEAATR

SEQ ID NO: 52289 - protein, 270 aa, Unidentified
AQSVPWGISRVQAPAAHNRGLTGSGVKVAVLDTGISTHPDLNIRGGASFVPGEPSTQDGNGHGTHVAGTIAALNNSIGVLGVAPSAELYAVKVLGAXSGSGSVSSIAQGLEWAGNNGMHVANLSLGSKSPSATLEQAVNSATSRGVLVVAASGNSGAGSISYPARYANAMAVGATDQNNNRASFSQYGAGLDIVAPGVNVQSTYPGSTYASLNGTSMATPHVAGAAALVKQKNPSWSNVQIRNHLKNTATSLGSTNLYGSGLVNAEAATR

SEQ ID NO: 52290 - protein, 269 aa, Unidentified
AQSVPWGISRVQAPAAHNRGLTGSGVKVAVLDTGISTHPDLNIRGGASFVPGEPSTQDGNGHGTHVAGTIAALNNSIGVLGVAPSAELYAVKVLEASGSGSVSSIAQGLEWAGNNGMHVANLSLGSPSPSATLEQAVNSATSRGVLVVAASGNSGAGSISYPARYANAMAVGATDQNNNRASFSQYGAGLDIVAPGVNVQSTYPGSTYASLNGTSMATPHVAGAAALVKQKNPSWSNVQIRNHLKNTATSLGSTNLYGSGLVNAEAATR

SEQ ID NO: 52291 - protein, 269 aa, Unidentified
AQSVPWGISRVQAPAAHNRGLTGSGVKVAVLDTGISTHPDLNIRGGASFVPGEPSTQDGNGHGTHVAGTIAALNNYIGVLGVAPSAELYAVKVLGASGSGSVSSIAQGLEWAGNNGMHVANLSLGSPSPSATLEQAVNSATSRGVLVVAASGNSGAGSISYPARYANAMAVGATDQNNNRASFSQYGAGLDIVAPGVNVQSTYPGSTYASLNGTSMATPHVAGAAALVKQKNPSWSNVQIRNHLKNTATSLGSTNLYGSGLVNAEAATR

SEQ ID NO: 52292 - protein, 269 aa, Unidentified
AQSVPWGISRVQAPAAHNRGLTGSGVKVAVLDTGISTHPDLNIRGGASFVPGEPSTQDGNGHGTHVAGTIAALNNSIGVLGVAPSAELYAVKVLGASGSGSVSSIAQGLEWAGNNGMHVANLSLGSPSPSATLEQAVNSATSRGVLVVAASGNSGAGSISYPARYANTMAVGATDQNNNRASFSQYGAGLDIVAPGVNVQSTYPGSTYASLNGTSMATPHVAGAAALVKQKNPSWSNVQIRNHLKNTATSLGSTNLYGSGLVNAEAATR

SEQ ID NO: 52293 - protein, 269 aa, Unidentified
AQSVPWGISRVQAPAAHNRGPTGSGVKVAVLDTGISTHPDLNIRGGASFVPGEPSTQDGNGHGTHVAGTIAALNNSIGVLGVAPSAELYAVKVLGASGSGSVSSIAQGLEWAGNNGMHVANLSLGSPSPSATLEQAVNSATSRGVLVVAASGNSGAGSISYPARYANAMAVGATDQNNNRASFSQYGAGLDIVAPGVNVQSTYPGSTYASLNGTSMATPHVAGAAALVKQKNPSWSNVQIRNHLKNTATSLGSTNLYGSGLVNAEAATR

SEQ ID NO: 52294 - protein, 269 aa, Unidentified
AQSVPWGISRVQAPAAHNRGLTGSGVKVAVLDTGISTHPDLNIRGGASFVPGEPSTQDGNDHGTHVAGTIAALNNSIGVLGVAPSAELYAVKVLGASGSGSVSSIAQGLEWAGNNGMHVANLSLGSPSPSATLEQAVNSATSRGVLVVAASGNSGAGSISYPARYANAMAVGATDQNNNRASFSQYGAGLDIVAPGVNVQSTYPGSTYASLNGTSMATPHVAGAAALVKQKNPSWSNVQIRNHLKNTATSLGSTNLYGSGLVNAEAATR

SEQ ID NO: 52295 - protein, 269 aa, Unidentified
AQSVPWGISRVQAPAAHNRGLTGSGVKVAVLDTGISTHPDLNIRGGASFVPGEPSTQDGNGHGEHVAGTIAALNNSIGVLGVAPSAELYAVKVLGASGSGSVSSIAQGLEWAGNNGMHVANLSLGSPSPSATLEQAVNSATSRGVLVVAASGNSGAGSISYPARYANAMAVGATDQNNNRASFSQYGAGLDIVAPGVNVQSTYPGSTYASLNGTSMATPHVAGAAALVKQKNPSWSNVQIRNHLKNTATSLGSTNLYGSGLVNAEAATR

SEQ ID NO: 52296 - protein, 269 aa, Unidentified
AQSVPWGISRVQAPAAHNRGLTGSGVKVAVLDTGISTHPDLNIRGGASFVPGEPSTQDGNGHGTHVAGTIAALNNSIGVLGVAPSAELYAVKVLGASGSGSVSSIAQGLEWAGNNGMHVANLSLGSPSPSATLEQAVNSATSRGVLVVAASGNSGAGSISYPARYANAMAVGATDQNNNRASFSQYGAGLDIVAPGVNVQSTYPGSTYASLNGTSMATPHVAGAAALVKQKNPSWSNVQIRNHLKNTATSLGSTNLYGSGRVNAEAATR

SEQ ID NO: 52297 - protein, 270 aa, Unidentified
AQSVPWGISRVQAPAAHNRGLTGSGVKVAVLDTGISTHPDLNIRGGASFVPGEPSTQDGHGHGTHVAGTIAALNNSIGVLGVAPSAELYAVKVLGASEGSGSVSSIAQGLEWAGNNGMHVANLSLGSPSPSATLEQAVNSATSRGVLVVAASGNSGAGSISYPARYANAMAVGATDQNNNRASFSQYGAGLDIVAPGVNVQSTYPGSTYASLNGTSMATPHVAGAAALVKQKNPSWSNVQIRNHLKNTATSLGSTNLYGSGLVNAEAATR

SEQ ID NO: 52298 - protein, 269 aa, Unidentified
AQSVPWGISRVQAPAAHNRGLTGSGVKVAVLDTGISTHPDLNIRGGASFVPGEPSTQDGNGHGTHVAGTIAALNNSIGVLGVAPSAELYAVKVLGASGSGSVSSIAQGLEWAGNNGMHVANLSLGSPSPSATLEQAVNSATSRGVLVVAASGNSGAGSISYPARYANAMAVGATDQNNNRASFSQYGAGLDIVAPGVNVQSTYPGSTYASLNGTSMATPHVAGAAALVKQKNPSWSNVQIRNRLKNTATSLGSTNLYGSGLVNAEAATR

SEQ ID NO: 52299 - protein, 269 aa, Unidentified
AQSVPWGISRVQAPAAHNRGLTGSGVKVAVLDTGISTHPDLNIRGGASFVPGEPSTQDGNGHGTHVAGTIAALNNSIGVLGRAPSAELYAVKVLGASGSGSVSSIAQGLEWAGNNGMHVANLSLGSPSPSATLEQAVNSATSRGVLVVAASGNSGAGSISYPARYANAMAVGATDQNNNRASFSQYGAGLDIVAPGVNVQSTYPGSTYASLNGTSMATPHVAGAAALVKQKNPSWSNVQIRNHLKNTATSLGSTNLYGSGLVNAEAATR

SEQ ID NO: 52300 - protein, 269 aa, Unidentified
AQSVPWGISRVQAPAAHNRGLTGSGVKSAVLDTGISTHPDLNIRGGASFVPGEPSTQDGNGHGTHVAGTIAALNNSIGVLGVAPSAELYAVKVLGASGSGSVSSIAQGLEWAGNNGMHVANLSLGSPSPSATLEQAVNSATSRGVLVVAASGNSGAGSISYPARYANAMAVGATDQNNNRASFSQYGAGLDIVAPGVNVQSTYPGSTYASLNGTSMATPHVAGAAALVKQKNPSWSNVQIRNHLKNTATSLGSTNLYGSGLVNAEAATR

SEQ ID NO: 52301 - protein, 269 aa, Unidentified
AQSVPWGISRVQAPAAHNRGLTGSGVKVAVLDTGISTHPDLNIRGGASFVPGEPSTQDGNGHGTHVAGTIAALNNSIGVLGVAPSAELYAVKVLGRSGSGSVSSIAQGLEWAGNNGMHVANLSLGSPSPSATLEQAVNSATSRGVLVVAASGNSGAGSISYPARYANAMAVGATDQNNNRASFSQYGAGLDIVAPGVNVQSTYPGSTYASLNGTSMATPHVAGAAALVKQKNPSWSNVQIRNHLKNTATSLGSTNLYGSGLVNAEAATR

SEQ ID NO: 52302 - protein, 269 aa, Unidentified
AQSVPWGISRVQAPAAHNRGLTGSGVKVAVLDTGISTHPDLNIRGGASFVPGEPSTQDGNGHGTHVAGTIAALNNSIGVLGVAPSAELYAVKVLGASGSGSVSSIAQGLEWAGNNGMHVANLSLGSPSVSATLEQAVNSATSRGVLVVAASGNSGAGSISYPARYANAMAVGATDQNNNRASFSQYGAGLDIVAPGVNVQSTYPGSTYASLNGTSMATPHVAGAAALVKQKNPSWSNVQIRNHLKNTATSLGSTNLYGSGLVNAEAATR

SEQ ID NO: 52303 - protein, 269 aa, Unidentified
AQSVPWGISRVQAPAAHNRGLTGSGVKVAVLDTGISTHPDLNIRGGASFVPGEPSTQDGNGHGTHVAGTIAALNNSIGVLGVAPSAELYAVKVLGASGSGSVSSIAQGLEWAGNNGMHVANLSLGSPSPSATLEQAVNSATSRGVLVVAASGNSGAGSISYPARYANAMAVGATDQNNNRASFSQYGAGLDIVAPGVNVQSTYRGSTYASLNGTSMATPHVAGAAALVKQKNPSWSNVQIRNHLKNTATSLGSTNLYGSGLVNAEAATR

SEQ ID NO: 52304 - protein, 269 aa, Unidentified
AQSVPWGISRVQAPAAHNRGLTGSGVKVAVLDTGISTHPDLNIRGGASFVPGEPSTQDGNGHGTHVAGTIAALNNSIGVLGVAPSAELYAVKVLGASGSGSVSSIAQGLEWAGNNGMHVANLSLGSPSPSATLEQAVNSATSRGVLVVAASGNSGAGSISYPARYANAMAVGATDQNNNRASFSQYGAGLDIVAPGVNVQSTYPGSTYASLNGTSMATPHVAGEAALVKQKNPSWSNVQIRNHLKNTATSLGSTNLYGSGLVNAEAATR

SEQ ID NO: 52305 - protein, 269 aa, Unidentified
AQSVPWGISRVQAPAAHNRGLTGSGVKVAVLDTGISTHPDLNIRGGASFVPGEPSTQDGNGHGTHVAGTIAALNNSIGVLGVAPSAELYAVKVLGASGSGSVSSIAQGLEWAGNNGMHVANLSLGSPSPSATLEQAVNSATSRGVLVVAASGNSGAGSISYPARYANAMAVGATDQNNNRASFSQYGAGLDIVAPGVNVQSTYPGSTYASLNGTSMATPHVAGAAALVKHKNPSWSNVQIRNHLKNTATSLGSTNLYGSGLVNAEAATR

SEQ ID NO: 52306 - protein, 269 aa, Unidentified
AQSVPWGISRVQAPAAHNRGLTGSGVKVAVLDTGISTHPDLNIRGGASFVPGEPSTQDGNGHGTHVAGTIAALNNSIGVLGVAPSAELYAVKVLGASGSGSVSSIAQGLEWAGNNGMHVANLSLGSPSPSATLEQAVNSATSRGVLVVAASGNSGAGSISYPARYANAMAVGATDQNNNRASFSQYGAGLDIVAPGVNVQSTYPGSTYASLNGTSMATPHVAGAAALVKQKVPSWSNVQIRNHLKNTATSLGSTNLYGSGLVNAEAATR

SEQ ID NO: 52307 - protein, 269 aa, Unidentified
AQSVPWGISRVQAPAAHNRGLTGSGVKVAVLDTGISTHPDLNIRGGASFVPGEPSTQDGNGFGTHVAGTIAALNNSIGVLGVAPSAELYAVKVLGASGSGSVSSIAQGLEWAGNNGMHVANLSLGSPSPSATLEQAVNSATSRGVLVVAASGNSGAGSISYPARYANAMAVGATDQNNNRASFSQYGAGLDIVAPGVNVQSTYPGSTYASLNGTSMATPHVAGAAALVKQKNPSWSNVQIRNHLKNTATSLGSTNLYGSGLVNAEAATR

SEQ ID NO: 52308 - protein, 269 aa, Unidentified
AQSVPWGISRVQAPAAHNRGLTGSGVKVAVLDTGISTHPDLNIRGGASFVPGEPSTQDGNGHGTHVAGTIAALNNSIGVLGVAPSAELYAVKVLGASGSGSVSSIAQGLEWAGNNGMHVANLSLGSPSPSATLEQAVNSATSRGVLVVAASGNSGAGSISYPARYANAMAVGATDQNNNRASFSQYGAGLDIVAPGVNVQSTYPGSTYASLNGTSMATPHVAGAAALVKQKNPSWSNVQIQNHLKNTATSLGSTNLYGSGLVNAEAATR

SEQ ID NO: 52309 - protein, 269 aa, Unidentified
AQSVPWGISRVQAPAAHNRGLTGSGVKVAVLDTGISTHPDLNIRGGASFVPGEPSTQDGNGHGTHVAGTIAALNNSIGVLGVAPSAELYAVKVLGASGSGSVSSIAQGLEWAGNNGMHVANLSLGSPNPSATLEQAVNSATSRGVLVVAASGNSGAGSISYPARYANAMAVGATDQNNNRASFSQYGAGLDIVAPGVNVQSTYPGSTYASLNGTSMATPHVAGAAALVKQKNPSWSNVQIRNHLKNTATSLGSTNLYGSGLVNAEAATR

SEQ ID NO: 52310 - protein, 269 aa, Hordeum sp.
AQSVPWGISRVQAPAAHNRGLTGSGVKVAVLDTGISTHPDLNIRGGASFVPGEPSTQDGNGHGTHVAGTIAALNNSIGVLGVAPSAELYAVKVLGASGSGSVASIAQGLEWAGNNGMHVANLSLGSPSPSATLEQAVNSATSRGVLVVAASGNSGAGSISYPARYANAMAVGATDQNNNRASFSQYGAGLDIVAPGVNVQSTYPGSTYASLNGTSMATPHVAGAAALVKQKNPSWSNVQIRNHLKNTATSLGSTNLYGSGLVNAEAATR

SEQ ID NO: 52311 - protein, 269 aa, Synthetic construct
AQSVPWGISRVQAPAAHNRGLTGSGVKVAVLDTGISTHPDLNIRGGASFVPGEPSTQDGNGHGTHVAGTIAALNNSIGVLGVAPSAELYAVKVLGASGSGSVSSIAQGLEWAGNNGMHVANLSLGSPSPSATLEQAVNSATSRGVLVVAASGNSGAGSISYPARYANAMAVGATDQNNNRASFSQYGAGLDIAAPGVNVQSTYPGSTYASLNGTSMATPHVAGAAALVKQKNPSWSNVQIRNHLKNTATSLGSTNLYGSGLVNAEAATR

SEQ ID NO: 52312 - protein, 269 aa, Unidentified
AQSVPWGISRVQAPAAHNRGLTGSGVKVAVLDTGISTHPDLNIRGGASFVPGEPSTQDENGHGTHVAGTIAALNNSIGVLGVAPSAELYAVKVLGASGSGSVSSIAQGLEWAGNNGMHVANLSLGSPSPSATLEQAVNSATSRGVLVVAASGNSGAGSISYPARYANAMAVGATDQNNNRASFSQYGAGLDIVAPGVNVQSTYPGSTYASLNGTSMATPHVAGAAALVKQKNPSWSNVQIRNHLKNTATSLGSTNLYGSGLVNAEAATR

SEQ ID NO: 52313 - protein, 269 aa, Unidentified
AQSVPWGISRVQAPAAHNRGLTGSGVKVAVLDTGISTHPDLNIRGGASFVPGEPSTQDGNGHGTHVAGTIAALNNSIGVLGVAPSAELYAVKVLGASGSGSVSSIAQGLEWAGNNGMHVANLSLGSPSPSATLEQAVNSATSRGVLVVAASGNSGAGSISYPARYANAMAVGATDQNNNRASFSQYGAGLDIVAPGVNVQSTYPGSTYASLNGTSMATPHVAGAAALVKQKNPSWSNVQIKNHLKNTATSLGSTNLYGSGLVNAEAATR

SEQ ID NO: 52314 - protein, 269 aa, Unidentified
AQSVPWGISRVQAPAAHNRGLTGSGVKVAVLDTGISTHPDLNIRGGASFVPGEPSTQDGNGHGTHVAGTIAALNNSIGVLGVAPSAELYAVKVLGASGSGSVSSIAQGLEWAGNNGMHVANLSLGSPLPSATLEQAVNSATSRGVLVVAASGNSGAGSISYPARYANAMAVGATDQNNNRASFSQYGAGLDIVAPGVNVQSTYPGSTYASLNGTSMATPHVAGAAALVKQKNPSWSNVQIRNHLKNTATSLGSTNLYGSGLVNAEAATR

SEQ ID NO: 52315 - protein, 269 aa, Unidentified
AQSVPWGISRVQAPAAHNRGQTGSGVKVAVLDTGISTHPDLNIRGGASFVPGEPSTQDGNGHGTHVAGTIAALNNSIGVLGVAPSAELYAVKVLGASGSGSVSSIAQGLEWAGNNGMHVANLSLGSPSPSATLEQAVNSATSRGVLVVAASGNSGAGSISYPARYANAMAVGATDQNNNRASFSQYGAGLDIVAPGVNVQSTYPGSTYASLNGTSMATPHVAGAAALVKQKNPSWSNVQIRNHLKNTATSLGSTNLYGSGLVNAEAATR

SEQ ID NO: 52316 - protein, 269 aa, Unidentified
AQSVPWGISRVQAPAAHNRGLTGSGVKVAVLDTGISTHPDLNIRGGASFVPGEPSTQDGNGHGTHVAGTIAALNNSIGVLGVAPSAELYAVKVLGASGSGSVSSIAQGLEWAGNNGMHVANLSLGSPSPSATLEQAVNSATSRGVLVVAASGNSGAGSISYPARYANAMAVGATDQNNNRASFSQYGAGLDIVAPGVNVQSTYPGSTYASLNGTSMATPHVAGAAALVKQKNPSWSNVQIRNHLKNTYTSLGSTNLYGSGLVNAEAATR

SEQ ID NO: 52317 - protein, 269 aa, Unidentified
AQSVPWGISRVQAPAAHNRGLTGSGVKVAVLDTGISTHPDLNIRGGASFVPGEPSTQDGNGHGTHVAGTIAALNNSIGVLGVAPSAELYAVKVLGASGSGSVSSIAQGLEWAGNNPMHVANLSLGSPSPSATLEQAVNSATSRGVLVVAASGNSGAGSISYPARYANAMAVGATDQNNNRASFSQYGAGLDIVAPGVNVQSTYPGSTYASLNGTSMATPHVAGAAALVKQKNPSWSNVQIRNHLKNTATSLGSTNLYGSGLVNAEAATR

SEQ ID NO: 52318 - protein, 269 aa, Unidentified
AQSVPWGISRVQAPAAHNRGLTGSGVKVAVLDTGISTHPDLNIRGGASFVPGEPSTQDGNGHGTHVAGTIAALNNSIGVLGVAPSAELYAVKVLGASGSGSVSSIAQGLEWAGNNQMHVANLSLGSPSPSATLEQAVNSATSRGVLVVAASGNSGAGSISYPARYANAMAVGATDQNNNRASFSQYGAGLDIVAPGVNVQSTYPGSTYASLNGTSMATPHVAGAAALVKQKNPSWSNVQIRNHLKNTATSLGSTNLYGSGLVNAEAATR

SEQ ID NO: 52319 - protein, 269 aa, Unidentified
AQSVPWGISRVQAPAAHNRGLTGSGVKVAVLDTGISTHPDLNIRGGASFVPGEPSTQDGNGHGTHVAGTIAALNNSIGVLGVAPSAELYAVKVLGASGSGSVSSIAQGLEWAGNNGMHVANLSLGSPSPSATLEQAVNSATSRGVLVVAASGNSGAGSISYPARYANAMAVGATDQNNNRASFSQYGAGLDIVAPGVNVQSTYPGSTYASLNGTSMATPHVAGAAALVKQKNPSWSNVQIRNHLKNTATSLGSTNLYGKGLVNAEAATR

SEQ ID NO: 52320 - protein, 269 aa, Unidentified
AQSVPWGISRVQAPAAHNRGLTGSGVKVAVLDTGISTHPDLNIRGGASFVPGEPSTQDGNGHGTHVAGTITALNNSIGVLGVAPSAELYAVKVLGASGSGSVSSIAQGLEWAGNNGMHVANLSLGSPSPSATLEQAVNSATSRGVLVVAASGNSGAGSISYPARYANAMAVGATDQNNNRASFSQYGAGLDIVAPGVNVQSTYPGSTYASLNGTSMATPHVAGAAALVKQKNPSWSNVQIRNHLKNTATSLGSTNLYGSGLVNAEAATR

SEQ ID NO: 52321 - protein, 270 aa, Unidentified
AQSVPWGISRVQAPAAHNRGLTGSGVKVAVLDTGISTHPDLNIRGGASFVPGEPSTQDGNGHGTHVAGTIAALNNSIGVLGVAPSAELYAVKVLGASEGSGSVSSIAQGLEWAGNNGMHVANLSLGSPSPSATLEQAVNSATSRGVLVVAASGNSGAGSISYPSRYANAMAVGATDQNNNRASFSQYGAGLDIVAPGVNVQSTYPGSTYASLNGTSMATPHVAGAAALVKQKNPSWSNVQIRNHLKNTATSLGSTNLYGSGLVNAEAATR

SEQ ID NO: 52322 - protein, 269 aa, Unidentified
AQSVPWGISRVQAPAAHNRGLTGSGSKVAVLDTGISTHPDLNIRGGASFVPGEPSTQDGNGHGTHVAGTIAALNNSIGVLGVAPSAELYAVKVLGASGSGSVSSIAQGLEWAGNNGMHVANLSLGSPSPSATLEQAVNSATSRGVLVVAASGNSGAGSISYPARYANAMAVGATDQNNNRASFSQYGAGLDIVAPGVNVQSTYPGSTYASLNGTSMATPHVAGAAALVKQKNPSWSNVQIRNHLKNTATSLGSTNLYGSGLVNAEAATR

SEQ ID NO: 52323 - protein, 269 aa, Unidentified
AQSVPWGISRVQAPAAHNRGLTGSGVKVAVLDTGISTHPDLNIRGGASFVPGEPSTQDGNGHGTHVAGTIAALNNSIGVLGVAPSAELYAVKVLGASGSGSVSSIAQGLEWAGNNGMHVANLSLGSPSPSATLEQAVNSATSRGVLVVAASGNSGAGSISYPARYANAMAVGATDQNNNRASFSQYGAGLDIVAPGVNVQSTYPGSTYASLNGTSMATPHVAGAAALVKQKNPSWSNVQIRNHLKNTATSLGSANLYGSGLVNAEAATR

SEQ ID NO: 52324 - protein, 271 aa, Unidentified
AQSVPWGISRVQAPAAHNRGLTGSGVKVAVLDTGISTHPDLNIRGGASFVPGEPSTQDGNGHGTHVAGTIAALNNSIGVLGVAPSAELYAVKVLRATXSGSGSVSSIAQGLEWAGNNGMHVANLSLGSPSPSATLEQAVNSATSRGVLVVAASGNSGAGSISYPARYANAMAVGATDQNNNRASFSQYGAGLDIVAPGVNVQSTYPGSTYASLNGTSMATPHVAGAAALVKQKNPSWSNVQIRNHLKNTATSLGSTNLYGSGLVNAEAATR

SEQ ID NO: 52325 - protein, 269 aa, Unidentified
AQSVPWGISRVQAPAAHNRGLTGSGVKVAVLDTGISTHPDLNIRGGASFVPGEPSTQDGNGHGTHVAGTIAALNNSIGVLGVAPSAELYAVKVLGASGSGSVSSIAQGLEWAGNNGMHVANLSLGSPSPSATLEQAVNSATSRGVLVVAASGNSGAGSISYPARYANAMAVGATDQNNNRASFSQYGAGLDIVAPGVNVQSTYPGSTYASLNGTSMATPHVAGAAALVKQKNPSWSNVQIRNHLKNTMTSLGSTNLYGSGLVNAEAATR

SEQ ID NO: 52326 - protein, 269 aa, Unidentified
AQSVPWGISRVQAPAAHNRGLTGSGVKVAVLDTGISTHPDLNIRGGASFVPGEPSTQDGNGHGTHVAGTIAALNNSIGVLGVAPSAELYAVKVLGASGSGSVSSIAQGLEWAGNNGMHVANLSLGSPSPSATLEQAVNSATSRGVLVVAASGNSGAGSISYPARYANAMAVGATDQNNNRASFSQYGAGLDIVAPGVNVQSTYPGFTYASLNGTSMATPHVAGAAALVKQKNPSWSNVQIRNHLKNTATSLGSTNLYGSGLVNAEAATR

SEQ ID NO: 52327 - protein, 269 aa, Unidentified
AQSVPWGISRVQAPAAHNRGLTGSGVKAAVLDTGISTHPDLNIRGGASFVPGEPSTQDGNGHGTHVAGTIAALNNSIGVLGVAPSAELYAVKVLGASGSGSVSSIAQGLEWAGNNGMHVANLSLGSPSPSATLEQAVNSATSRGVLVVAASGNSGAGSISYPARYANAMAVGATDQNNNRASFSQYGAGLDIVAPGVNVQSTYPGSTYASLNGTSMATPHVAGAAALVKQKNPSWSNVQIRNHLKNTATSLGSTNLYGSGLVNAEAATR

SEQ ID NO: 52328 - protein, 269 aa, Unidentified
AQSVPWGISRVQAPAAHNRGLTGSGVKVAVLDTGISTHPDLNIRGGASFVPGEPSTQDGNGHGTHVAGTIAALNNSIGVLGVAPSAELYAVKVLGASGSGSVSSIAQGLEWAGNNGMHVANLSLGSPCPSATLEQAVNSATSRGVLVVAASGNSGAGSISYPARYANAMAVGATDQNNNRASFSQYGAGLDIVAPGVNVQSTYPGSTYASLNGTSMATPHVAGAAALVKQKNPSWSNVQIRNHLKNTATSLGSTNLYGSGLVNAEAATR

SEQ ID NO: 52329 - protein, 269 aa, Unidentified
AQSVPWGISRVQAPAAHNRGLTGSGVKVAVLDTGISTHPDLNIRGGASFVPGEPSTQDGNGHGTHVAGTIAALNNSIGVLGVAPSAELYAVKVLGASGSGSVSSIAQGLEWAGNNGMHVANLSLGHPSPSATLEQAVNSATSRGVLVVAASGNSGAGSISYPARYANAMAVGATDQNNNRASFSQYGAGLDIVAPGVNVQSTYPGSTYASLNGTSMATPHVAGAAALVKQKNPSWSNVQIRNHLKNTATSLGSTNLYGSGLVNAEAATR

SEQ ID NO: 52330 - protein, 269 aa, Unidentified
AQSVPWGISRVQAPAAHNRGLTGSGVKVAVLDTGISTHLDLNIRGGASFVPGEPSTQDGNGHGTHVAGTIAALNNSIGVLGVAPSAELYAVKVLGASGSGSVSSIAQGLEWAGNNGMHVANLSLGSPSPSATLEQAVNSATSRGVLVVAASGNSGAGSISYPARYANAMAVGATDQNNNRASFSQYGAGLDIVAPGVNVQSTYPGSTYASLNGTSMATPHVAGAAALVKQKNPSWSNVQIRNHLKNTATSLGSTNLYGSGLVNAEAATR

SEQ ID NO: 52331 - protein, 269 aa, Unidentified
AQSVPWGISRVQAPAAHNRGLTGSGVKVAVLDTGISTHPDLNIRGGASFVPGEPSTQDGNGHGTHVAGTIAALNNSIGVLGVAPSAELYAVKVLGASGSGSVSSIAQGLEWAGNNGMHVFNLSLGSPSPSATLEQAVNSATSRGVLVVAASGNSGAGSISYPARYANAMAVGATDQNNNRASFSQYGAGLDIVAPGVNVQSTYPGSTYASLNGTSMATPHVAGAAALVKQKNPSWSNVQIRNHLKNTATSLGSTNLYGSGLVNAEAATR

SEQ ID NO: 52332 - protein, 269 aa, Unidentified
AQSVPWGISRVQAPAAHNRGLTGSGVKVAVLDTGISTHPDLNIRGGASFVPGEPSTQDGNGHGTHVAGTIAALNNSIGVLGVAPSAELYAVKVLGASGSGSVSSIAQGLEWAGNNGMHVANLSLGSPSPSATLEQAVNSATSRGVLVVAASGNSGAGSISYPARYANAMAVGATDQNNNRASFSQYGAGLDIVAPGVNVQSTYPGSTYASLNGTSMATPHVAGAAALVKQKNPSWSNVQIRNHLKNIATSLGSTNLYGSGLVNAEAATR

SEQ ID NO: 52333 - protein, 269 aa, Unidentified
AQSVPWGISRVFAPAAHNRGLTGSGVKVAVLDTGISTHPDLNIRGGASFVPGEPSTQDGNGHGTHVAGTIAALNNSIGVLGVAPSAELYAVKVLGASGSGSVSSIAQGLEWAGNNGMHVANLSLGSPSPSATLEQAVNSATSRGVLVVAASGNSGAGSISYPARYANAMAVGATDQNNNRASFSQYGAGLDIVAPGVNVQSTYPGSTYASLNGTSMATPHVAGAAALVKQKNPSWSNVQIRNHLKNTATSLGSTNLYGSGLVNAEAATR

SEQ ID NO: 52334 - protein, 269 aa, Unidentified
AQSVPWGISRVQAPAAHNRGLTGSGVKVAVLDTGISTHPDLNIRGGASFVPGEPSTQDGNGHGTHVAGTIAALNNSIGVLGVAPSAELYAVKVLGASGSGSVSSIAQGLEWAGNNGMHVANLSLGSPTPSATLEQAVNSATSRGVLVVAASGNSGAGSISYPARYANAMAVGATDQNNNRASFSQYGAGLDIVAPGVNVQSTYPGSTYASLNGTSMATPHVAGAAALVKQKNPSWSNVQIRNHLKNTATSLGSTNLYGSGLVNAEAATR

SEQ ID NO: 52335 - protein, 269 aa, Unidentified
AQSVPWGISRVQAPFAHNRGLTGSGVKVAVLDTGISTHPDLNIRGGASFVPGEPSTQDGNGHGTHVAGTIAALNNSIGVLGVAPSAELYAVKVLGASGSGSVSSIAQGLEWAGNNGMHVANLSLGSPSPSATLEQAVNSATSRGVLVVAASGNSGAGSISYPARYANAMAVGATDQNNNRASFSQYGAGLDIVAPGVNVQSTYPGSTYASLNGTSMATPHVAGAAALVKQKNPSWSNVQIRNHLKNTATSLGSTNLYGSGLVNAEAATR

SEQ ID NO: 52336 - protein, 269 aa, Unidentified
AQSVPWGISRVQAPAAHNRGLTGSGVKVAVLDTGISTHPDLNIRGGASFVPGEPSTQQGNGHGTHVAGTIAALNNSIGVLGVAPSAELYAVKVLGASGSGSVSSIAQGLEWAGNNGMHVANLSLGSPSPSATLEQAVNSATSRGVLVVAASGNSGAGSISYPARYANAMAVGATDQNNNRASFSQYGAGLDIVAPGVNVQSTYPGSTYASLNGTSMATPHVAGAAALVKQKNPSWSNVQIRNHLKNTATSLGSTNLYGSGLVNAEAATR

SEQ ID NO: 52337 - protein, 269 aa, Unidentified
AQSVPWGISRVQAPAAHNRGLTGSGVKVAVLDTGISTHPDLNIRGGASFHPGEPSTQDGNGHGTHVAGTIAALNNSIGVLGVAPSAELYAVKVLGASGSGSVSSIAQGLEWAGNNGMHVANLSLGSPSPSATLEQAVNSATSRGVLVVAASGNSGAGSISYPARYANAMAVGATDQNNNRASFSQYGAGLDIVAPGVNVQSTYPGSTYASLNGTSMATPHVAGAAALVKQKNPSWSNVQIRNHLKNTATSLGSTNLYGSGLVNAEAATR

SEQ ID NO: 52338 - protein, 269 aa, Unidentified
AQSVPWGISRVQAPAAHNRGLTGSTVKVAVLDTGISTHPDLNIRGGASFVPGEPSTQDGNGHGTHVAGTIAALNNSIGVLGVAPSAELYAVKVLGASGSGSVSSIAQGLEWAGNNGMHVANLSLGSPSPSATLEQAVNSATSRGVLVVAASGNSGAGSISYPARYANAMAVGATDQNNNRASFSQYGAGLDIVAPGVNVQSTYPGSTYASLNGTSMATPHVAGAAALVKQKNPSWSNVQIRNHLKNTATSLGSTNLYGSGLVNAEAATR

SEQ ID NO: 52339 - protein, 269 aa, Unidentified
AQSVPWGISRVQAPAAHNRGLTGSGVKVAVLDTGISTHPDLNIRGGASFVPGEPSTQDGNGHGTHVAGTIAAFNNSIGVLGVAPSAELYAVKVLGASGSGSVSSIAQGLEWAGNNGMHVANLSLGSPSPSATLEQAVNSATSRGVLVVAASGNSGAGSISYPARYANAMAVGATDQNNNRASFSQYGAGLDIVAPGVNVQSTYPGSTYASLNGTSMATPHVAGAAALVKQKNPSWSNVQIRNHLKNTATSLGSTNLYGSGLVNAEAATR

SEQ ID NO: 52340 - protein, 269 aa, Unidentified
AQSVPWGISRVQAPAAHNRGLTGSGVKVAVLDTGISTHPDLNIRGGASFVPGEPSTQDGNGHGTHVAGTIAALNNSIGVLGVAPSAELYAVKVLGASGSGSVSSIAQGLEWAGNNGMHVANLSLGSPSPSATLEQAVNSATSRGVLVVAASGNSIAGSISYPARYANAMAVGATDQNNNRASFSQYGAGLDIVAPGVNVQSTYPGSTYASLNGTSMATPHVAGAAALVKQKNPSWSNVQIRNHLKNTATSLGSTNLYGSGLVNAEAATR

SEQ ID NO: 52341 - protein, 269 aa, Unidentified
AQSVPWGISRVQAPAAHNRGLTGSGVKVAVLDTGISTHPDLNIRGGASFVPGEPLTQDGNGHGTHVAGTIAALNNSIGVLGVAPSAELYAVKVLGASGSGSVSSIAQGLEWAGNNGMHVANLSLGSPSPSATLEQAVNSATSRGVLVVAASGNSGAGSISYPARYANAMAVGATDQNNNRASFSQYGAGLDIVAPGVNVQSTYPGSTYASLNGTSMATPHVAGAAALVKQKNPSWSNVQIRNHLKNTATSLGSTNLYGSGLVNAEAATR

SEQ ID NO: 52342 - protein, 269 aa, Unidentified
AQSVPWGISRVQAPAAHNRGLTGSGVKVAVLDTGISTHPDLNIRGGASFVPGEPSTQDGNGHGTHVNGTIAALNNSIGVLGVAPSAELYAVKVLGASGSGSVSSIAQGLEWAGNNGMHVANLSLGSPSPSATLEQAVNSATSRGVLVVAASGNSGAGSISYPARYANAMAVGATDQNNNRASFSQYGAGLDIVAPGVNVQSTYPGSTYASLNGTSMATPHVAGAAALVKQKNPSWSNVQIRNHLKNTATSLGSTNLYGSGLVNAEAATR

SEQ ID NO: 52343 - protein, 269 aa, Unidentified
AQSVPWGISRVQAPAAHNRGLTGSGVKVAVLDTGISTHPDLNIRGGASFVPGEPSTQDGNGHGTHVAGTIAALNNSIGVLGVAPNAELYAVKVLGASGGGSVSSIAQGLEWAGNNGMHVANLSLGSPSPSATLEQAVNSATSRGVLVVAASGNSGAGSISYPARYANAMAVGATDQNNNRASFSQYGAGLDIVAPGVNVQSTYPGSTYASLNGTSSATPHVAGAAALVKQKNPSWSNVQIRNHLKNTATSLGSTNLYGSGLVNAEAATR

SEQ ID NO: 52344 - protein, 269 aa, Unidentified
AQSVPWGISRVQAPAAHNRGLTGSGVKVAVLDSGISTHPDLNIRGGASFVPGEPSTQDGNGHGTHVAGTIAALNNSIGVLGVAPSAELYAVKVLGASGSGSVSSIAQGLEWAGNNGMHVANLSLGSPSPSATLEQAVNSATSRGVLVVAASGNSGAGSISYPARYANAMAVGATDQNNNRASFSQYGAGLDIVAPGVNVQSTYPGSTYASLNGTSMATPHVAGAAALVKQKNPSWSNVQIRNHLKNTATSLGSTNLYGSGLVNAEAATR

SEQ ID NO: 52345 - protein, 269 aa, Unidentified
AQSVPWGISRVQAPAAHNRGLTGSGVKVAVLDTGISTHPDLNIRGGASFVPGEPSTQDGNGHGTHVAGTIAALNNSIGVLGVAPSAELYAVKVLGASGSGSVSSIAQGLEWAGNNGMHVANLSLGSPSPSATLEQAVNSATSRGVLVVAASGNSGAGSISYPARYANAMAVGATDQNNNRASFSQYGAGLDIVAPGVNVQSTYPGSTYASLNGTSMATPHVAGAAALVKQKNPSWSNVQIRNHLKNTGTSLGSTNLYGSGLVNAEAATR

SEQ ID NO: 52346 - protein, 269 aa, Unidentified
AQSVPWGISRVQAPAAHNRGITGSGVKVAVLDTGISTHPDLNIRGGASFVPGEPSTQDGNGHGTHVAGTIAALNNSIGVLGVAPSAELYAVKVLGASGSGSVSSIAQGLEWAGNNGMHVANLSLGSPSPSATLEQAVNSATSRGVLVVAASGNSGAGSISYPARYANAMAVGATDQNNNRASFSQYGAGLDIVAPGVNVQSTYPGSTYASLNGTSMATPHVAGAAALVKQKNPSWSNVQIRNHLKNTATSLGSTNLYGSGLVNAEAATR

SEQ ID NO: 52347 - protein, 269 aa, Unidentified
AQSVPWGISRVQAPAAHNRGLTGSGVKVAVLDTGISTHPDLNIRGGASFVPGEPSTQDGNGHGTHVAGTIAALNNSIGVLGVAPSAELYAVKVLGASGSGSVSSIAQGLEWAGNNGAHVANLSLGSPSPSATLEQAVNSATSRGVLVVAASGNSGAGSISYPARYANAMAVGATDQNNNRASFSQYGAGLDIVAPGVNVQSTYPGSTYASLNGTSMATPHVAGAAALVKQKNPSWSNVQIRNHLKNTATSLGSTNLYGSGLVNAEAATR

SEQ ID NO: 52348 - protein, 269 aa, Unidentified
AQSYPWGISRVQAPAAHNRGLTGSGVKVAVLDTGISTHPDLNIRGGASFVPGEPSTQDGNGHGTHVAGTIAALNNSIGVLGVAPSAELYAVKVLGASGSGSVSSIAQGLEWAGNNGMHVANLSLGSPSPSATLEQAVNSATSRGVLVVAASGNSGAGSISYPARYANAMAVGATDQNNNRASFSQYGAGLDIVAPGVNVQSTYPGSTYASLNGTSMATPHVAGAAALVKQKNPSWSNVQIRNHLKNTATSLGSTNLYGSGLVNAEAATR

SEQ ID NO: 52349 - protein, 269 aa, Unidentified
AQSVPWGISRVQAPAAHNRGLTGSGVKVAVLDTGISTHPDLNIRGGASFVPGEPSTQDGNGHGTHVAGTIAALNNSIGVLGVAPSAELYAVKVLGASGSGSVSSIAQGLEWAGNNGMHVANLSLGSPSPSATLEQAVNSATSNGVLVVAASGNSGAGSISYPARYANAMAVGATDQNNNRASFSQYGAGLDIVAPGVNVQSTYPGSTYASLNGTSMATPHVAGAAALVKQKNPSWSNVQIRNHLKNTATSLGSTNLYGSGLVNAEAATR

SEQ ID NO: 52350 - protein, 269 aa, Unidentified
AQSVPWGISRVQAPAAHNRGLTGSGVKVAVLDTGISTHPDLNIRGGASFVPGEPSTQDGNGHGTHVAGTIAALNNSIGVLGVAPSAELYAVKVLGASGSGSVSSIAQGLEWAGNNGMHVANLSLGSPSPSATLEQAVNSATSRGVLVVAASGNSGAGSISYPARYANAMAVGATDQNNNRASFSQYGAGLDIVAPGVNVQSTYPGSTYASLNGTSMATPHVAGAAALVKQKNPSWSNVQIRNHLKNTATSLGSTNLFGSGLVNAEAATR

SEQ ID NO: 52351 - protein, 269 aa, Unidentified
AQSVPWGISRVQAPAAHNRGLTGSGVKVAVLDTGISTHPDLNIRGGASFVPGEPSTQDGNGHGTHVAGTIAALNNSIGVLGVAPSAELYAVKVLGASGSGSVSSIAQGLEWAGNNGMHVANLSLGSPSPCATLEQAVNSATSRGVLVVAASGNSGAGSISYPARYANAMAVGATDQNNNRASFSQYGAGLDIVAPGVNVQSTYPGSTYASLNGTSMATPHVAGAAALVKQKNPSWSNVQIRNHLKNTATSLGSTNLYGSGLVNAEAATR

SEQ ID NO: 52352 - protein, 269 aa, Unidentified
AQSVPWGISRVQAPAAHNRGLTGSGVKVAVLDTGISTHPDLNIRGGASFMPGEPSTQDGNGHGTHVAGTIAALNNSIGVLGVAPSAELYAVKVLGASGSGSVSSIAQGLEWAGNNGMHVANLSLGSPSPSATLEQAVNSATSRGVLVVAASGNSGAGSISYPARYANAMAVGATDQNNNRASFSQYGAGLDIVAPGVNVQSTYPGSTYASLNGTSMATPHVAGAAALVKQKNPSWSNVQIRNHLKNTATSLGSTNLYGSGLVNAEAATR

SEQ ID NO: 52353 - protein, 269 aa, Unidentified
AQSVPWGISRVQAPAAHNRGLTGSGVKVAVLDTGISTHPDLNIRGGASFVPGEPSTQDGNGHGTHVAGTIAALNNSIGVLGVAPSAELYAVKVLGASGSGSVSSIAQGLEWAGNNGMHVANLSLGSPSPSATLEQAVNSATSRGVLVVAASGNSGAGSISYPARYANAMAVGATDQNNNRASFSQYGAGLDIVAPGVNVQSTYPGSTYAELNGTSMATPHVAGAAALVKQKNPSWSNVQIRNHLKNTATSLGSTNLYGSGLVNAEAATR

SEQ ID NO: 52354 - protein, 269 aa, Unidentified
AQSVPWGISRVQAPAAHNRGLTGSGVKVAVLDTGISTHPDLNIRGGASFVPGEPSTQSGNGHGTHVAGTIAALNNSIGVLGVAPSAELYAVKVLGASGSGSVSSIAQGLEWAGNNGMHVANLSLGSPSPSATLEQAVNSATSRGVLVVAASGNSGAGSISYPARYANAMAVGATDQNNNRASFSQYGAGLDIVAPGVNVQSTYPGSTYASLNGTSMATPHVAGAAALVKQKNPSWSNVQIRNHLKNTATSLGSTNLYGSGLVNAEAATR

SEQ ID NO: 52355 - protein, 269 aa, Unidentified
AQSVPWGISRVQAPAAHNRGLTGSGVKVAVLDTGISTHPDLNIRGGASFVPGEPSTQDGNGHGTHVAGTIAALNNSIGVLGVAPSAELYAVKVLGASGSGSVSSIAQGLEWGGNNGMHVANLSLGSPSPSATLEQAVNSATSRGVLVVAASGNSGAGSISYPARYANAMAVGATDQNNNRASFSQYGAGLDIVAPGVNVQSTYPGSTYASLNGTSMATPHVAGAAALVKQKNPSWSNVQIRNHLKNTATSLGSTNLYGSGLVNAEAATR

SEQ ID NO: 52356 - protein, 269 aa, Unidentified
AQSVPWGISRVQAPAAHNRGLTGSGVKVAVLDTGISTHPDLNIRGGASFVPGEPSTQDGNGHGTHVAGTIAALNNSIGVLGVAPSAELYAVKVLGASGSGSVSSIAQGLEWAGNNGMHVANLSLGSPSPSATLRQAVNSATSRGVLVVAASGNSGAGSISYPARYANAMAVGATDQNNNRASFSQYGAGLDIVAPGVNVQSTYPGSTYASLNGTSMATPHVAGAAALVKQKNPSWSNVQIRNHLKNTATSLGSTNLYGSGLVNAEAATR

SEQ ID NO: 52357 - protein, 269 aa, Unidentified
AQSVPWGISRVQAPAAHNRGLTGSGVKVAVLDTGISTHPDLNIRGGASFVPGEPSTQDGNGHGTHVAGTIAALNNSIGVLGVAPSAELYAVTVLGASGSGSVSSIAQGLEWAGNNGMHVANLSLGSPSPSATLEQAVNSATSRGVLVVAASGNSGAGSISYPARYANAMAVGATDQNNNRASFSQYGAGLDIVAPGVNVQSTYPGSTYASLNGTSMATPHVAGAAALVKQKNPSWSNVQIRNHLKNTATSLGSTNLYGSGLVNAEAATR

SEQ ID NO: 52358 - protein, 269 aa, Unidentified
AQSVPWGISRVQAPAAHNRGLTGSGVKVAVLDTGISTHPDLNIRGGAVFVPGEPSTQDGNGHGTHVAGTIAALNNSIGVLGVAPSAELYAVKVLGASGSGSVSSIAQGLEWAGNNGMHVANLSLGSPSPSATLEQAVNSATSRGVLVVAASGNSGAGSISYPARYANAMAVGATDQNNNRASFSQYGAGLDIVAPGVNVQSTYPGSTYASLNGTSMATPHVAGAAALVKQKNPSWSNVQIRNHLKNTATSLGSTNLYGSGLVNAEAATR

SEQ ID NO: 52359 - protein, 269 aa, Unidentified
AQSVPWGISRVQAPAAHNRGLTGSGVKVAVLDTGISTHPDLNIRGGASFVPGEPKTQDGNGHGTHVAGTIAALNNSIGVLGVAPSAELYAVKVLGASGSGSVSSIAQGLEWAGNNGMHVANLSLGSPSPSATLEQAVNSATSRGVLVVAASGNSGAGSISYPARYANAMAVGATDQNNNRASFSQYGAGLDIVAPGVNVQSTYPGSTYASLNGTSMATPHVAGAAALVKQKNPSWSNVQIRNHLKNTATSLGSTNLYGSGLVNAEAATR

SEQ ID NO: 52360 - protein, 269 aa, Unidentified
AQSVPWGISRVQAPAAHNRGLTGSGVKVAVLDTGISTHPDLNIRGGASFVPGEPSTQDGNGHGTHVAGTIAALNNSIGVLGVAPSAELYAVKVLGASGSGSVSSIAQGLEWAGNNGMHVANLSLGSPSPSATLEQAVNSATSRGVLVVAASGNSGAGSISYPARYANAMAVGATDQNNNRASFSQYGAGLDFVAPGVNVQSTYPGSTYASLNGTSMATPHVAGAAALVKQKNPSWSNVQIRNHLKNTATSLGSTNLYGSGLVNAEAATR

SEQ ID NO: 52361 - protein, 269 aa, Bacillus lentus
AQSVPWGISRVQAPAAHNRGLTGSGVKVAVLDTGISTHPDLNIRGGASFVPGEPSTQDGNGHGTHVAGTIAALNNSIGVLGVAPSAELYAVKVLGASGSGSVSSIAQGLEWAGNNGMHVANLSLGSPSPSATLEQAVNSATSRGVLVVAASGNSGAGSISYPAMYANAMAVGATDQNNNRASFSQYGAGLDIVAPGVNVQSTYPGSTYASLNGTSMATPHVAGAAALVKQKNPSWSNVQIRNHLKNTATSLGSTNLYGSGLVNAEAATR

SEQ ID NO: 52362 - protein, 269 aa, Unidentified
AQSVPWGISRVQAPAAHNRGLTGSGVKVAVLDTGISTHPLLNIRGGASFVPGEPSTQDGNGHGTHVAGTIAALNNSIGVLGVAPSAELYAVKVLGASGSGSVSSIAQGLEWAGNNGMHVANLSLGSPSPSATLEQAVNSATSRGVLVVAASGNSGAGSISYPARYANAMAVGATDQNNNRASFSQYGAGLDIVAPGVNVQSTYPGSTYASLNGTSMATPHVAGAAALVKQKNPSWSNVQIRNHLKNTATSLGSTNLYGSGLVNAEAATR

SEQ ID NO: 52363 - protein, 269 aa, Unidentified
AQSVPWGISRVQAPAAHNRGLTGSGVKVAVLDTGISTHPDLNIRGGASFVPGEPSTQDGNGHGTHVAGTIAALNNSIGVLGVAPSAELYAVKVLGASGSGSVSSIAQGLEWAGNNGMHVANLSLGSPSPFATLEQAVNSATSRGVLVVAASGNSGAGSISYPARYANAMAVGATDQNNNRASFSQYGAGLDIVAPGVNVQSTYPGSTYASLNGTSMATPHVAGAAALVKQKNPSWSNVQIRNHLKNTATSLGSTNLYGSGLVNAEAATR

SEQ ID NO: 52364 - protein, 269 aa, Unidentified
AQSVPWGISRVQAPAAHNRGLTGSGVKVAVLDTGIFTHPDLNIRGGASFVPGEPSTQDGNGHGTHVAGTIAALNNSIGVLGVAPSAELYAVKVLGASGSGSVSSIAQGLEWAGNNGMHVANLSLGSPSPSATLEQAVNSATSRGVLVVAASGNSGAGSISYPARYANAMAVGATDQNNNRASFSQYGAGLDIVAPGVNVQSTYPGSTYASLNGTSMATPHVAGAAALVKQKNPSWSNVQIRNHLKNTATSLGSTNLYGSGLVNAEAATR

SEQ ID NO: 52365 - protein, 269 aa, Unidentified
AQSVPWGISAVQAPAAHNRGLTGSGVKVAVLDTGISTHPDLNIRGGASFVPGEPSTQDGNGHGTHVAGTIAALNNSIGVLGVAPSAELYAVKVLGASGSGSVSSIAQGLEWAGNNGMHVANLSLGSPSPSATLEQAVNSATSRGVLVVAASGNSGAGSISYPARYANAMAVGATDQNNNRASFSQYGAGLDIVAPGVNVQSTYPGSTYASLNGTSMATPHVAGAAALVKQKNPSWSNVQIRNHLKNTATSLGSTNLYGSGLVNAEAATR

SEQ ID NO: 52366 - protein, 269 aa, Unidentified
AQSVPWGISRVQAPAAHNRGLTGSGVKVAVLDTGISTHPDLNIRGGASFVPGEPSTQDGEGHGTHVAGTIAALNNSIGVLGVAPNAELYAVKVLGASGSGSVSSIAQGLEWAGNNGMHVANLSLGSPSPSATLEQAVNSATSRGVLVVAASGNSGAGSISYPARYANAMAVGATDQNNNRASFSQYGAGLDIVAPGVNVQSTYPGSTYASLNGTSSATPHVAGAAALVKQKNPSWSNVQIRNHLKNTATSLGSTNLYGSGLVNAEAATR

SEQ ID NO: 52367 - protein, 269 aa, Unidentified
AQSVPWGISRVQAPAAHNRGLTGSGVKVAVLDTGISTHPDLNIRGGASFVPGEPSTQDGNGHGTHVAGTIAALNNSIGVLGVAPSAELYAVKVLGASGSGKVSSIAQGLEWAGNNGMHVANLSLGSPSPSATLEQAVNSATSRGVLVVAASGNSGAGSISYPARYANAMAVGATDQNNNRASFSQYGAGLDIVAPGVNVQSTYPGSTYASLNGTSMATPHVAGAAALVKQKNPSWSNVQIRNHLKNTATSLGSTNLYGSGLVNAEAATR

SEQ ID NO: 52368 - protein, 269 aa, Unidentified
AQSVPWGISRVQAPAAHNRGLTGSGVKVAVLDTGISTHPDLNIRGGASFVPGEPSTQDGNGHGTHVAGTIAALNNSIGVLGVAPSAELYAVKVLGAPGSGSVSSIAQGLEWAGNNGMHVANLSLGSPSPSATLEQAVNSATSRGVLVVAASGNSGAGSISYPARYANAMAVGATDQNNNRASFSQYGAGLDIVAPGVNVQSTYPGSTYASLNGTSMATPHVAGAAALVKQKNPSWSNVQIRNHLKNTATSLGSTNLYGSGLVNAEAATR

SEQ ID NO: 52369 - protein, 269 aa, Bacillus sp.
AQSVPWGISRVQAPAAHNRGLTGSGVKVAVLDTGISTHPDLNIRGGASFVPGEPSTQDGNGHGTHVAGTIAALNNSIGVLGVAPNAELYAVKVLGASGSGSVSSIAQGLEWAGNNGMHVANLSLGSPSPSATLEQAVNSATSRGVLVVAASGNSGAGSISYPARYANAMAVGATDQNNNRASFSQYGAGLDIVAPGVNVQSTYPGSTYASLNGTSLATPHVAGAAALVKQKNPSWSNVQIRNHLKNTATSLGSTNLYGSGLVNAEAATR

SEQ ID NO: 52370 - protein, 269 aa, Unidentified
AQSVPWGISRVQAPAAHNRGLTGSGVKVAVLDTGISTHPDLNIRGGASFVPGEPSTQDGNGHGTHVAGTIAALNNSIGVLGVAPSAELYAVKVLGASGSGSVSSIAQGLEWAGNNGMHVANLSLGSPSPSATLEQAVNSATSRGVLVVAASGNSGAGSISYPARYANAMAVGATDQNNNRASFSQYGAGLDIVAPGVNVQSTYPGSTYASLNGTSMATPHVAGAAALVKQKNPSWSNVQIRNHLKNTITSLGSTNLYGSGLVNAEAATR

SEQ ID NO: 52371 - protein, 269 aa, Unidentified
AQSVPWGISRVQAPAAHNRGLTGSGVKVAVLDTGISTHPDLNIRGGASFVPGEPSTQIGNGHGTHVAGTIAALNNSIGVLGVAPSAELYAVKVLGASGSGSVSSIAQGLEWAGNNGMHVANLSLGSPSPSATLEQAVNSATSRGVLVVAASGNSGAGSISYPARYANAMAVGATDQNNNRASFSQYGAGLDIVAPGVNVQSTYPGSTYASLNGTSMATPHVAGAAALVKQKNPSWSNVQIRNHLKNTATSLGSTNLYGSGLVNAEAATR

SEQ ID NO: 52372 - protein, 269 aa, Bacillus sp.
AQSVPWGISRVQAPAAHNRGLTGSGVKVAVLDTGISTHPDLNIRGGASFVPGEPSTQDGNGHGTHVAGTIAALNNSIGVLGVAPNAELYAVKVLGASGSGSVSSIAQGLEWAGNNGMHVANLSLGSPSPSATLEQAVNSATSRGVLVVAASGNSGAGSISYPARYANAMAVGATDQNNNRASFSQYGAGLDIVAPGVNVQSTYPGSTYASLNGTSTATPHVAGAAALVKQKNPSWSNVQIRNHLKNTATSLGSTNLYGSGLVNAEAATR

SEQ ID NO: 52373 - protein, 269 aa, Unidentified
AQSVPWGISRVQAPAAHNRGLTGSGVKVAVLDTGISTHPDLNIRGGASFVPGEPSTQDGNGHGTHVAGTIAALNNSIGVLGVAPSAELYAVKVLGASGSGSVSSIAQGLEWAGNNGSHVANLSLGSPSPSATLEQAVNSATSRGVLVVAASGNSGAGSISYPARYANAMAVGATDQNNNRASFSQYGAGLDIVAPGVNVQSTYPGSTYASLNGTSMATPHVAGAAALVKQKNPSWSNVQIRNHLKNTATSLGSTNLYGSGLVNAEAATR

SEQ ID NO: 52374 - protein, 269 aa, Unidentified
AQSVPWGISRVQAPAAHNRGLTGSGVKVAVLDTGISTHPDLNIRGGASFVPGEPSTQDGNGHGTHVAGTIAALNNSIGVLGVAPSAELYAVKVLGASGSGSVSSIAQGLEWAGNNGMHVANLSLGSPSPSATLEQAVNSATSRGVLVVAASGNSGAGSISYPARYANAMAVGATDQNNNRASFSQYGAGLDIVAPGVNVQSTYPGSTYASLNGTSMATPHVAGAAALVKQKNPSWSNVQIRNHLKNTAKSLGSTNLYGSGLVNAEAATR

SEQ ID NO: 52375 - protein, 269 aa, Unidentified
AQSVPWGISRVQAPAAHNRGLTGSGVKVAVLDTGISRHPDLNIRGGASFVPGEPSTQDGNGHGTHVAGTIAALNNSIGVLGVAPSAELYAVKVLGASGSGSVSSIAQGLEWAGNNGMHVANLSLGSPSPSATLEQAVNSATSRGVLVVAASGNSGAGSISYPARYANAMAVGATDQNNNRASFSQYGAGLDIVAPGVNVQSTYPGSTYASLNGTSMATPHVAGAAALVKQKNPSWSNVQIRNHLKNTATSLGSTNLYGSGLVNAEAATR

SEQ ID NO: 52376 - protein, 269 aa, Unidentified
AQSVPWGISRVQAPAAHNRGLTGSGVKVAVLDTGISTHPDLNIRGGASFVPGEPSTQDGNGHGTHVAGTIAALNNSIGVLGVAPSAELYAVKVLGASGSGSVSSIAQGLEWAGNNGMHVANLSLGSPSPSATLEQAVNSATSRGVLVVAASGNSGAGSISYPARYANAMAVGATDQNNNRASFSQYGAGLDIVAPGVNIQSTYPGSTYASLNGTSMATPHVAGAAALVKQKNPSWSNVQIRNHLKNTATSLGSTNLYGSGLVNAEAATR

SEQ ID NO: 52377 - protein, 269 aa, Unidentified
AQSVPWGISRVQAPAAHNRGLTGSGVKVAVLDTGISTHPDLNIRGGASFVPGEPSTQDGNGHGTHVAGTIAALNNSIGVLGVAPSAELYAVKVLGASGSGSVSSIAQGLEWAGNNGMHVANLSLGSQSPSATLEQAVNSATSRGVLVVAASGNSGAGSISYPARYANAMAVGATDQNNNRASFSQYGAGLDIVAPGVNVQSTYPGSTYASLNGTSMATPHVAGAAALVKQKNPSWSNVQIRNHLKNTATSLGSTNLYGSGLVNAEAATR

SEQ ID NO: 52378 - protein, 269 aa, Unidentified
AQSVPWGISRVQAPAAHNRGLTGSGVKVAVLDTGISTHPDLNIRGGAEFVPGEPSTQDGNGHGTHVAGTIAALNNSIGVLGVAPSAELYAVKVLGASGSGSVSSIAQGLEWAGNNGMHVANLSLGSPSPSATLEQAVNSATSRGVLVVAASGNSGAGSISYPARYANAMAVGATDQNNNRASFSQYGAGLDIVAPGVNVQSTYPGSTYASLNGTSMATPHVAGAAALVKQKNPSWSNVQIRNHLKNTATSLGSTNLYGSGLVNAEAATR

SEQ ID NO: 52379 - protein, 269 aa, Unidentified
AQSVPWGISRVQAPAAHNRGLTGSGVKVAVLDTGISTHPDLNIRGGASFVPGEPSTQDGNGHGTHVAGTIAALNNSIGVLGVAPSAELYAVKVLGASGSGMVSSIAQGLEWAGNNGMHVANLSLGSPSPSATLEQAVNSATSRGVLVVAASGNSGAGSISYPARYANAMAVGATDQNNNRASFSQYGAGLDIVAPGVNVQSTYPGSTYASLNGTSMATPHVAGAAALVKQKNPSWSNVQIRNHLKNTATSLGSTNLYGSGLVNAEAATR

SEQ ID NO: 52380 - protein, 269 aa, Unidentified
AQSVPWGISRVQAPAAHNRGLTGSGVKVAVLDTGISTHPDLNIRGGASFVPGEPSTQMGNGHGTHVAGTIAALNNSIGVLGVAPSAELYAVKVLGASGSGSVSSIAQGLEWAGNNGMHVANLSLGSPSPSATLEQAVNSATSRGVLVVAASGNSGAGSISYPARYANAMAVGATDQNNNRASFSQYGAGLDIVAPGVNVQSTYPGSTYASLNGTSMATPHVAGAAALVKQKNPSWSNVQIRNHLKNTATSLGSTNLYGSGLVNAEAATR

SEQ ID NO: 52381 - protein, 269 aa, Unidentified
AQSVPWGISRVQAPAAHNRGLTGSGVKVAVLDTGISTHPDLNIRGGASFVPGEPSTQDGNGHGTHVAGTIAALNNSIGVLGVAPSAELYAVKVLGASGSGSVSSIAQGLEWAGNNGMHVANLSLGSPSPSATLEQAVNSATSTGVLVVAASGNSGAGSISYPARYANAMAVGATDQNNNRASFSQYGAGLDIVAPGVNVQSTYPGSTYASLNGTSMATPHVAGAAALVKQKNPSWSNVQIRNHLKNTATSLGSTNLYGSGLVNAEAATR

SEQ ID NO: 52382 - protein, 269 aa, Unidentified
AQSVPWGISRVQAPAAHNRGLTGSGVKVAVLDTGISTWPDLNIRGGASFVPGEPSTQDGNGHGTHVAGTIAALNNSIGVLGVAPSAELYAVKVLGASGSGSVSSIAQGLEWAGNNGMHVANLSLGSPSPSATLEQAVNSATSRGVLVVAASGNSGAGSISYPARYANAMAVGATDQNNNRASFSQYGAGLDIVAPGVNVQSTYPGSTYASLNGTSMATPHVAGAAALVKQKNPSWSNVQIRNHLKNTATSLGSTNLYGSGLVNAEAATR

SEQ ID NO: 52383 - protein, 269 aa, Unidentified
AQSVPWGISRVQAPAAHNRGLTGSGVKVAVLDTGISTHPDLNIRGGASFVPGEPSTQDGNGHGTHVAGTIAALNNSIGVLGVAPSAELYAVKVLGASGSGSVSSIAQGLEWAGNNGMHVANLSLGSPSPSATLEQAVNSATSRGVLVVAASGNSGAGSISYPARYANAMAVGATDQNNNRASFSQYGAGLDAVAPGVNVQSTYPGSTYASLNGTSMATPHVAGAAALVKQKNPSWSNVQIRNHLKNTATSLGSTNLYGSGLVNAEAATR

SEQ ID NO: 52384 - protein, 269 aa, Unidentified
AQSVPWGISRVQAPAAHNRGLTGSGVKVAVLDTGISTHPDLNIRGGASFVPGEPSTQDGNGHGTHVAGTIAALNNSIGVLGVAPSAELYAVKVLGASGSGSVSSIAQGLEWAGNNGMHVANLSLGSPSPSATLEQAVNSATSRGVLVVAASGNSGAGSISYPARYANAMAVGATDQNNNRASFSQYGAGLDIVAPGVNVQSTYPGSTYASLNGTSMATPHVAGAAALVKQKNPSWSNVQIRNHLKNTATSLGSTNLYGSGLVNLEAATR

SEQ ID NO: 52385 - protein, 269 aa, Unidentified
AQSVPWGISRVQAPAAHNRGLTGSGVKVAVLDTGISTHPDLNIRGGASFVPGEPSTQDGNGHGTHVAGTIAALNNSIGVLGVAPSAELYAVKVLGASGSGSVSSIAQGLEWAGNNGQHVANLSLGSPSPSATLEQAVNSATSRGVLVVAASGNSGAGSISYPARYANAMAVGATDQNNNRASFSQYGAGLDIVAPGVNVQSTYPGSTYASLNGTSMATPHVAGAAALVKQKNPSWSNVQIRNHLKNTATSLGSTNLYGSGLVNAEAATR

SEQ ID NO: 52386 - protein, 269 aa, Unidentified
AQSVPWGISRVQAPAAHNRGLTGSGVKVAVLDTGISTHPDLNIRGGASFVPGEPSTQDGNGHGTHVAGTIAALNNSIGVLGVAPSAELYAVKVLGASGSGSVSSIAQGLEWAGNNGMHVANLSLGSPSPYATLEQAVNSATSRGVLVVAASGNSGAGSISYPARYANAMAVGATDQNNNRASFSQYGAGLDIVAPGVNVQSTYPGSTYASLNGTSMATPHVAGAAALVKQKNPSWSNVQIRNHLKNTATSLGSTNLYGSGLVNAEAATR

SEQ ID NO: 52387 - protein, 269 aa, Unidentified
AQSVPWGISRVQAPAAHNRGLTGSGVKVAVLDTGISTHEDLNIRGGASFVPGEPSTQDGNGHGTHVAGTIAALNNSIGVLGVAPSAELYAVKVLGASGSGSVSSIAQGLEWAGNNGMHVANLSLGSPSPSATLEQAVNSATSRGVLVVAASGNSGAGSISYPARYANAMAVGATDQNNNRASFSQYGAGLDIVAPGVNVQSTYPGSTYASLNGTSMATPHVAGAAALVKQKNPSWSNVQIRNHLKNTATSLGSTNLYGSGLVNAEAATR

SEQ ID NO: 52388 - protein, 269 aa, Unidentified
AQSVPWGISRVQAPAAHNRGNTGSGVKVAVLDTGISTHPDLNIRGGASFVPGEPSTQDGNGHGTHVAGTIAALNNSIGVLGVAPSAELYAVKVLGASGSGSVSSIAQGLEWAGNNGMHVANLSLGSPSPSATLEQAVNSATSRGVLVVAASGNSGAGSISYPARYANAMAVGATDQNNNRASFSQYGAGLDIVAPGVNVQSTYPGSTYASLNGTSMATPHVAGAAALVKQKNPSWSNVQIRNHLKNTATSLGSTNLYGSGLVNAEAATR

SEQ ID NO: 52389 - protein, 269 aa, Unidentified
AQSVPWGISRVQAPAAHNRGLTGSGVKVAVLDTGISTHPDLNIRGGASFVPGEPSTQDGNGHGTHVAGTIAALNNSIGVLGVAPSAELYAVKVLGASGSGSVSSIAQGLEWAGNNGMHVANLSLGSPSPSATLEQAVNSATSRGVLVVAASGNSGAGSISYPARYANAMAVGATDQNNNRASFSQYGAGLDIVAPGVNVLSTYPGSTYASLNGTSMATPHVAGAAALVKQKNPSWSNVQIRNHLKNTATSLGSTNLYGSGLVNAEAATR

SEQ ID NO: 52390 - protein, 269 aa, Unidentified
AQSVPWGISRVQAPAAHNRGLTGSGVKVAVLDTGISTHPDLNIRGGASFVPGEPSTQDGNGHGTHVAGTIAALNNSIGVLGVAPSAELYAVKVLGASGSGSXSSIAQGLEWAGNNGMHVANLSLGSPSPSATLEQAVNSATSRGVLVVAASGNSGAGSISYPARYANAMAVGATDQNNNRASFSQYGAGLDIVAPGVNVQSTYPGSTYASLNGTSMATPHVAGAAALVKQKNPSWSNVQIRNHLKNTATSLGSTNLYGSGLVNAEAATR

SEQ ID NO: 52391 - protein, 269 aa, Unidentified
AQSVPWGISRVQAPAAHNRGLTGSGVKVAVLDTGISTHPDLNIRGGASFVPGEPSTQDGNGHGTHVAGTIAALNNSIGVLGVAPNAELYAVKVLGASGSGSQSSIAQGLEWAGNNGMHVANLSLGSPSPSATLEQAVNSATSRGVLVVAASGNSGAGSISYPARYANAMAVGATDQNNNRASFSQYGAGLDIVAPGVNVQSTYPGSTYASLNGTSSATPHVAGAAALVKQKNPSWSNVQIRNHLKNTATSLGSTNLYGSGLVNAEAATR

SEQ ID NO: 52392 - protein, 269 aa, Unidentified
AQSVPWGISRVQAPAAHNRGLTGSGVKVAVLDTGISTHPDLNIRGGASFVPGEPSTQHGNGHGTHVAGTIAALNNSIGVLGVAPSAELYAVKVLGASGSGSVSSIAQGLEWAGNNGMHVANLSLGSPSPSATLEQAVNSATSRGVLVVAASGNSGAGSISYPARYANAMAVGATDQNNNRASFSQYGAGLDIVAPGVNVQSTYPGSTYASLNGTSMATPHVAGAAALVKQKNPSWSNVQIRNHLKNTATSLGSTNLYGSGLVNAEAATR

SEQ ID NO: 52393 - protein, 269 aa, Unidentified
AQSVPWGISRVQAPAAHNRGLTGSGVKVAVLDTGISTHPDLNIRGGASFVPGEPSTQDGNGHGTHVAGTIAALNNSIGVLGVAPSAELYAVKVLGASGSGSVSSIAQGLEWAGNNGMHVANLSLGSPWPSATLEQAVNSATSRGVLVVAASGNSGAGSISYPARYANAMAVGATDQNNNRASFSQYGAGLDIVAPGVNVQSTYPGSTYASLNGTSMATPHVAGAAALVKQKNPSWSNVQIRNHLKNTATSLGSTNLYGSGLVNAEAATR

SEQ ID NO: 52394 - protein, 269 aa, Bacillus lentus
AQSVPWGISRVQAPAAHNRGLTGSGVKVAVLDTGISTHPDLNIRGGASFVPGEPSTQDGNGHGTHVAGTIAALNNSIGVLGVAPSAELYAVKVLGASGSGSVSSIAQGLEWAGNNGMHVANLSLGSPSPSATLEQAVNSATSRGVLVVAASGNSGAGSISYPACYANAMAVGATDQNNNRASFSQYGAGLDIVAPGVNVQSTYPGSTYASLNGTSMATPHVAGAAALVKQKNPSWSNVQIRNHLKNTATSLGSTNLYGSGLVNAEAATR

SEQ ID NO: 52395 - protein, 269 aa, Unidentified
AQSVPWGISRVQAPAAHNRGLTGSGVKVAVLDTGISTHPDLNIRGGASFVPGEPSTQDGNGHGTHVAGTIAALNNSIGVLGVAPSAELYAVKVLGASGSGSVSSIAQGLEWAGNNGMHVANLSLGSPSPSATLEQAVNSATSRGVLVVAASGNSGAGSISYPATYANAMAVGATDQNNNRASFSQYGAGLDIVAPGVNVQSTYPGSTYASLNGTSMATPHVAGAAALVKQKNPSWSNVQIRNHLKNTATSLGSTNLYGSGLVNAEAATR

SEQ ID NO: 52396 - protein, 269 aa, Unidentified
AQSVPWGISRVQAPAAHNRGLTGSGVKVAVLDTGISTHPDLNIRGGASFVPGEPSTQDGNGHGTHVAGTIAALNNSIGVLGVAPSAELYAVKVLGASGSGSVSSIAQGLEWAGNNGMHVANLSLGSPSPSATLEQAVNSATSRGVLVVAASGNSGAGSISYPARYANAMAVGATDQNNNRASFSQYGAGLDIVAPGVNVQSTYPGSTYADLNGTSMATPHVAGAAALVKQKNPSWSNVQIRNHLKNTATSLGSTNLYGSGLVNAEAATR

SEQ ID NO: 52397 - protein, 269 aa, Unidentified
AQSVPWGISRVQAPAAHNRGLTGSGVKVAVLDTGISTHPDLNIRGGASFVPGEPSTQDGNGHGTHVAGTIAALNNSIGVLGVAPSAELYAVKVLGASGSGSVSSIAQGLEWAGNNGMHVANLSLGSPSPSATLEQAVNSATSRGVLVVAASGNSGAGSISYPARYANAMAVGATDQNNNRASFSQYGAELDIVAPGVNVQSTYPGSTYASLNGTSAATPHVAGAAALVKQKNPSWSNVQIRNHLKNTATSLGSTNLYGSGLVNAEAATR

SEQ ID NO: 52398 - protein, 269 aa, Unidentified
AQSVPWGISRVQAPAAHNRGLTGSGVKVAVLDTGISTHWDLNIRGGASFVPGEPSTQDGNGHGTHVAGTIAALNNSIGVLGVAPSAELYAVKVLGASGSGSVSSIAQGLEWAGNNGMHVANLSLGSPSPSATLEQAVNSATSRGVLVVAASGNSGAGSISYPARYANAMAVGATDQNNNRASFSQYGAGLDIVAPGVNVQSTYPGSTYASLNGTSMATPHVAGAAALVKQKNPSWSNVQIRNHLKNTATSLGSTNLYGSGLVNAEAATR

SEQ ID NO: 52399 - protein, 269 aa, Unidentified
AQSVPWGISRVQAPAAHNRGLTGSGVKVAVLDTGISTHPDLNIRGGASFVPGEPSTQDGNGHGTHVAGTIAALNNSIGVLGVAPSAELYAVKVLGASGSGSVSSIAQGLEWAGDNGMHVANLSLGSPSPSATLEQAVNSATSRGVLVVAASGNSGAGSISYPARYANAMAVGATDQNNNRASFSQYGAGLDIVAPGVNVQSTYPGSTYASLNGTSMATPHVAGAAALVKQKNPSWSNVQIRNHLKNTATSLGSTNLYGSGLVNAEAATR

SEQ ID NO: 52400 - protein, 269 aa, Unidentified
AQSVPWGISRVQAPAAHNRGLTGSGVKVAVLDTGISTYPDLNIRGGASFVPGEPSTQDGNGHGTHVAGTIAALNNSIGVLGVAPSAELYAVKVLGASGSGSVSSIAQGLEWAGNNGMHVANLSLGSPSPSATLEQAVNSATSRGVLVVAASGNSGAGSISYPARYANAMAVGATDQNNNRASFSQYGAGLDIVAPGVNVQSTYPGSTYASLNGTSMATPHVAGAAALVKQKNPSWSNVQIRNHLKNTATSLGSTNLYGSGLVNAEAATR

SEQ ID NO: 52401 - protein, 269 aa, Unidentified
AQSVPWGISRVQAPAAHNRGLTGSGVKVAVLDTGISTHPDLNIRGGASFVPGEPSTQDGNGHGTHVAGTIAALNNSIGVLGPAPSAELYAVKVLGASGSGSVSSIAQGLEWAGNNGMHVANLSLGSPSPSATLEQAVNSATSRGVLVVAASGNSGAGSISYPARYANAMAVGATDQNNNRASFSQYGAGLDIVAPGVNVQSTYPGSTYASLNGTSMATPHVAGAAALVKQKNPSWSNVQIRNHLKNTATSLGSTNLYGSGLVNAEAATR

SEQ ID NO: 52402 - protein, 269 aa, Unidentified
AQSVPWGISRVQAPAAHNRGLTGSGVKVAVLDTGISTHPDLNIRGGASFVPGEPSTQDGNGHGTHVAGTIAALNNSIGVLGVAPSAELYAVKVLGASGSGSVSSIAQGLEWAGNNGMHVANLSLGSPSPSATLEQAVNSATSRGVLVVAASGNSGAGSISYPARYANAMAVGATDQNNNRASFSQYGAGLDIVAPGVNVKSTYPGSTYASLNGTSMATPHVAGAAALVKQKNPSWSNVQIRNHLKNTATSLGSTNLYGSGLVNAEAATR

SEQ ID NO: 52403 - protein, 269 aa, Unidentified
AQSVPWGISRVQAPAAHNRGLTGSGVKVAVLDTGISTHPDLNIRGGASFVPGEPSTQDGNGHGTHVSGTIAALNNSIGVLGVAPSAELYAVKVLGASGSGSVSSIAQGLEWAGNNGMHVANLSLGSPSPSATLEQAVNSATSRGVLVVAASGNSGAGSISYPARYANAMAVGATDQNNNRASFSQYGAGLDIVAPGVNVQSTYPGSTYASLNGTSMATPHVAGAAALVKQKNPSWSNVQIRNHLKNTATSLGSTNLYGSGLVNAEAATR

SEQ ID NO: 52404 - protein, 269 aa, Unidentified
AQSVPWGISRVQAPAAHNRGLTGSGVKVAVLDTGISTHPDLNIRGGASFVPGEPSTQDGNGHGTHVAGTIAALNNSIGVLGVAPSAELYAVKVLGASGSGSVSSIAQGLEWAGNNGMHVANLSLGSPSPSATLEQAVNSATSRGVLVVAASGNSGAGSISYPARYANAMAVGATDQNNNRASFSQYGAGLDIVAPGVNVQSTYPGSTYASLNGTSMATPHVAGAAALVKQKNPSWSNVQIRNHLKNTTTSLGSTNLYGSGLVNAEAATR

SEQ ID NO: 52405 - protein, 269 aa, Unidentified
AQSVPWGISRVQAPAAHNRGLTGSGTKVAVLDTGISTHPDLNIRGGASFVPGEPSTQDGNGHGTHVAGTIAALNNSIGVLGVAPSAELYAVKVLGASGSGSVSSIAQGLEWAGNNGMHVANLSLGSPSPSATLEQAVNSATSRGVLVVAASGNSGAGSISYPARYANAMAVGATDQNNNRASFSQYGAGLDIVAPGVNVQSTYPGSTYASLNGTSMATPHVAGAAALVKQKNPSWSNVQIRNHLKNTATSLGSTNLYGSGLVNAEAATR

SEQ ID NO: 52406 - protein, 269 aa, Unidentified
AQSVPWGISRVQAPAAHNRGLTGSGVKVAVLDTGISTHPDLNIRGGASFVPGEPSTQDGNGHGTHVAGTIAALNNSIGVLGVAPSAELYAVKVLGASGSGSVSSIAQGLEWAGNNGMHVANLSLGSPSPSATLEQAVNSATSRGVLVVAASGNDGAGSISYPARYANAMAVGATDQNNNRASFSQYGAGLDIVAPGVNVQSTYPGSTYASLNGTSMATPHVAGAAALVKQKNPSWSNVQIRNHLKNTATSLGSTNLYGSGLVNAEAATR

SEQ ID NO: 52407 - protein, 269 aa, Unidentified
AQSVPWGISRVQAPAAHNRGLTGSGVKVAVLDTGISTHPDLNIRGGASFVPGEPSTQDGNGHGTHVAGTIAALNNSIGVLGVAPSASLYAVKVLGASGSGSVSSIAQGLEWAGNNGMHVANLSLGSPSPSATLEQAVNSATSRGVLVVAASGNSGAGSISYPARYANAMAVGATDQNNNRASFSQYGAGLDIVAPGVNVQSTYPGSTYASLNGTSMATPHVAGAAALVKQKNPSWSNVQIRNHLKNTATSLGSTNLYGSGLVNAEAATR

SEQ ID NO: 52408 - protein, 269 aa, Unidentified
AQSVPWGISRVQAPAAHNRGLTGSGVKVAVLDTGISTHPDLNIRGGASFVPGEPSTQDGNGHGTHVAGTIAALNNSIGVLGVAPSAELYAVKVLGASGSGSVSSIAQGLEWAGNNGMHVANLSLGSPSPSATLEQAVNSATSRGVLVVAASGNSGAGSISYPARYANAMAVGATDQNNNRASFSQYGAGLDIVAPGVNVQSTYPGSTYASLNGTSMATPHVAGAAALVKQKNPDWSNVQIRNHLKNTATSLGSTNLYGSGLVNAEAATR

SEQ ID NO: 52409 - protein, 269 aa, Unidentified
AQSVPWGISRVQAPAAHNRGLTGSGVKVAVLDTGISTHPDLNIRGGASFVPGEPSTQDGNGHGTHVAGTIAALNNSIGVLGVAPSAELYAVKVLGASGSGSVSSIAQGLEWAGNNGMHVANLSLGSPSQSATLEQAVNSATSRGVLVVAASGNSGAGSISYPARYANAMAVGATDQNNNRASFSQYGAGLDIVAPGVNVQSTYPGSTYASLNGTSMATPHVAGAAALVKQKNPSWSNVQIRNHLKNTATSLGSTNLYGSGLVNAEAATR

SEQ ID NO: 52410 - protein, 269 aa, Unidentified
AQSVPNGISRVQAPAAHNRGLTGSGVKVAVLDTGISTHPDLNIRGGASFVPGEPSTQDGNGHGTHVAGTIAALNNSIGVLGVAPSAELYAVKVLGASGSGSVSSIAQGLEWAGNNGMHVANLSLGSPSPSATLEQAVNSATSRGVLVVAASGNSGAGSISYPARYANAMAVGATDQNNNRASFSQYGAGLDIVAPGVNVQSTYPGSTYASLNGTSMATPHVAGAAALVKQKNPSWSNVQIRNHLKNTATSLGSTNLYGSGLVNAEAATR

SEQ ID NO: 52411 - protein, 269 aa, Unidentified
AQSVPWGISRVQAPAAHNRGLTGSGVKVAVLDTGISTHPDLNIRGGASFVPGEPSTQDGNGHGTHVAGTIAALNNSIGVLGVAPSAELWAVKVLGASGSGSVSSIAQGLEWAGNNGMHVANLSLGSPSPSATLEQAVNSATSRGVLVVAASGNSGAGSISYPARYANAMAVGATDQNNNRASFSQYGAGLDIVAPGVNVQSTYPGSTYASLNGTSMATPHVAGAAALVKQKNPSWSNVQIRNHLKNTATSLGSTNLYGSGLVNAEAATR

SEQ ID NO: 52412 - protein, 269 aa, Unidentified
AQSVPWGISRVQAPAAHNRGLTGSGVKVAVLDTGISTHPDLNIRGGASFVPGEPSTQDGNGHGTHVAGTIAALNNSIGVLGVAPSAELYAVKVLGASGSGSVSSIAQGLEWAGNNGMHVANLSLGSPSPSATLEQAVNSATSRGVLVVAASGNSGAGSISYPARYANAMAVGATDQNNNRASFSQYGAGLDIVAPGVNVQSTYPGSTYAALNGTSMATPHVAGAAALVKQKNPSWSNVQIRNHLKNTATSLGSTNLYGSGLVNAEAATR

SEQ ID NO: 52413 - protein, 269 aa, Unidentified
AQSVPWGISRVQAPAAHNRGLTGSGVKVAVLDTGISTHPDLNIRGGASFVPGEPSTQFGNGHGTHVAGTIAALNNSIGVLGVAPSAELYAVKVLGASGSGSVSSIAQGLEWAGNNGMHVANLSLGSPSPSATLEQAVNSATSRGVLVVAASGNSGAGSISYPARYANAMAVGATDQNNNRASFSQYGAGLDIVAPGVNVQSTYPGSTYASLNGTSMATPHVAGAAALVKQKNPSWSNVQIRNHLKNTATSLGSTNLYGSGLVNAEAATR

SEQ ID NO: 52414 - protein, 269 aa, Unidentified
AQSVPWGISRVQAPAAHNRGLTGSGVKVAVLDTGISTHPDLNIRGGASFVPGEPSTQDGNGHGTHVAGTIGALNNSIGVLGVAPSAELYAVKVLGASGSGSVSSIAQGLEWAGNNGMHVANLSLGSPSPSATLEQAVNSATSRGVLVVAASGNSGAGSISYPARYANAMAVGATDQNNNRASFSQYGAGLDIVAPGVNVQSTYPGSTYASLNGTSMATPHVAGAAALVKQKNPSWSNVQIRNHLKNTATSLGSTNLYGSGLVNAEAATR

SEQ ID NO: 52415 - protein, 269 aa, Unidentified
AQSVPWGISRVQAPAAHNRGLTGSGVKVAVLDTGISTHPDLNIRGGASFVPGEPSTQDGNGHGTHVAGTIAALNNSIGVLGVAPSAELYAVKVLGASGSGSVSSIAQGLEWAGNNGMHVANLSLGSPSASATLEQAVNSATSRGVLVVAASGNSGAGSISYPARYANAMAVGATDQNNNRASFSQYGAGLDIVAPGVNVQSTYPGSTYASLNGTSMATPHVAGAAALVKQKNPSWSNVQIRNHLKNTATSLGSTNLYGSGLVNAEAATR

SEQ ID NO: 52416 - protein, 269 aa, Bacillus sp.
AQSVPWGISRVQAPAAHNRGLTGSGVKVAVLDTGISTHPDLNIRGGASFVPGEPSTQDGNGHGTHVAGTIAALNNSIGVLGVAPNAELYAVKVLGASGSGSVSSIAQGLEWAGNNGMHVANLSLGSPSPSATLEQAVNSATSRGVLVVAASGNSGAGSISYPARYANAMAVGATDQNNNRASFSQYGAGLDIVAPGVNVQSTYPGSTYASLNGTSHATPHVAGAAALVKQKNPSWSNVQIRNHLKNTATSLGSTNLYGSGLVNAEAATR

SEQ ID NO: 52417 - protein, 269 aa, Unidentified
AQSVPWGISRVQAPAAHNRGLTGSGVKVAVLDTGISTHPDLNIRGGASFVPGEPSTQDGNGHGTHVAGTIAALNNSIGVLGVAPSAELYAVKVLGASGSGIVSSIAQGLEWAGNNGMHVANLSLGSPSPSATLEQAVNSATSRGVLVVAASGNSGAGSISYPARYANAMAVGATDQNNNRASFSQYGAGLDIVAPGVNVQSTYPGSTYASLNGTSMATPHVAGAAALVKQKNPSWSNVQIRNHLKNTATSLGSTNLYGSGLVNAEAATR

SEQ ID NO: 52418 - protein, 269 aa, Unidentified
AQSVPWGISRVQAPAAHNRGLTGSGVKVAVLDTGISTHPDLNIRGGASFVPGEPSTQDGNGHGTHVAGTIAALNNSIGVLGVAPSAELYAVKVLGASGSGSVSSIAQGLEWAGNNGMHVANLSLGSPSPSATLEQAVNSATSRGVLVVAASGNSGAGSISYPARYANAMAVGATDQNNNRASFSQYGAGLDIVAPGVNVTSTYPGSTYASLNGTSMATPHVAGAAALVKQKNPSWSNVQIRNHLKNTATSLGSTNLYGSGLVNAEAATR

SEQ ID NO: 52419 - protein, 269 aa, Unidentified
AQSVPWGISRVQAPAAHNRGLTGSGVKVAVLDTGISTHPDLNIRGGASFVPGEPSTQDGNGHGTHVAGTIAALNNSIGVLGIAPSAELYAVKVLGASGSGSVSSIAQGLEWAGNNGMHVANLSLGSPSPSATLEQAVNSATSRGVLVVAASGNSGAGSISYPARYANAMAVGATDQNNNRASFSQYGAGLDIVAPGVNVQSTYPGSTYASLNGTSMATPHVAGAAALVKQKNPSWSNVQIRNHLKNTATSLGSTNLYGSGLVNAEAATR

SEQ ID NO: 52420 - protein, 269 aa, Unidentified
AQSVPWGISRVQAPAAHNRGLWGSGVKVAVLDTGISTHPDLNIRGGASFVPGEPSTQDGNGHGTHVAGTIAALNNSIGVLGVAPSAELYAVKVLGASGSGSVSSIAQGLEWAGNNGMHVANLSLGSPSPSATLEQAVNSATSRGVLVVAASGNSGAGSISYPARYANAMAVGATDQNNNRASFSQYGAGLDIVAPGVNVQSTYPGSTYASLNGTSMATPHVAGAAALVKQKNPSWSNVQIRNHLKNTATSLGSTNLYGSGLVNAEAATR

SEQ ID NO: 52421 - protein, 269 aa, Unidentified
AQSVPWGISRVQAPAAHNRGLTGSGVKVAVLDTGISTHPDLNIRGGASFVPGEPSTQDGNGHGTHVAGTIAALNNSIGVLGVAPSAELYRVKVLGASGSGSVSSIAQGLEWAGNNGMHVANLSLGSPSPSATLEQAVNSATSRGVLVVAASGNSGAGSISYPARYANAMAVGATDQNNNRASFSQYGAGLDIVAPGVNVQSTYPGSTYASLNGTSMATPHVAGAAALVKQKNPSWSNVQIRNHLKNTATSLGSTNLYGSGLVNAEAATR

SEQ ID NO: 52422 - protein, 269 aa, Unidentified
AQSVPWGISRVQAPAAHNRGLTGSGVKVAVLDTGISTHPDLNIRGGASFVPGEPSTQDGNGHGTHVAGTIAALNNFIGVLGVAPSAELYAVKVLGASGSGSVSSIAQGLEWAGNNGMHVANLSLGSPSPSATLEQAVNSATSRGVLVVAASGNSGAGSISYPARYANAMAVGATDQNNNRASFSQYGAGLDIVAPGVNVQSTYPGSTYASLNGTSMATPHVAGAAALVKQKNPSWSNVQIRNHLKNTATSLGSTNLYGSGLVNAEAATR

SEQ ID NO: 52423 - protein, 269 aa, Unidentified
AQSVPWGISRVQAPAAHNRGLTGSGVKVAVLDTGISTHPDLNIRGGASFVPGEPSTQDGNGHGTHVAGTIAALNNSIGVLGCAPSAELYAVKVLGASGSGSVSSIAQGLEWAGNNGMHVANLSLGSPSPSATLEQAVNSATSRGVLVVAASGNSGAGSISYPARYANAMAVGATDQNNNRASFSQYGAGLDIVAPGVNVQSTYPGSTYASLNGTSMATPHVAGAAALVKQKNPSWSNVQIRNHLKNTATSLGSTNLYGSGLVNAEAATR

SEQ ID NO: 52424 - protein, 270 aa, Unidentified
AQSVPWGISRVQAPAAHNRGLTGSGVKVAVLDTGISTHPDLNIRGGASFVPGEPSTQDGFGHGTHVAGTIAALNNSIGVLGVAPSAELYAVKVLGASEGSGSVSSIAQGLEWAGNNGMHVANLSLGSPSPSATLEQAVNSATSRGVLVVAASGNSGAGSISYPARYANAMAVGATDQNNNRASFSQYGAGLDIVAPGVNVQSTYPGSTYASLNGTSMATPHVAGAAALVKQKNPSWSNVQIRNHLKNTATSLGSTNLYGSGLVNAEAATR

SEQ ID NO: 52425 - protein, 269 aa, Unidentified
AQSVPWGISRVQAPAAHNRGLTGSGVKVAVLDTGISTHPDLNIRGGASFVPGEPSTQDGNGHGTHVAGTIAALNNSIGVLGVAPSAMLYAVKVLGASGSGSVSSIAQGLEWAGNNGMHVANLSLGSPSPSATLEQAVNSATSRGVLVVAASGNSGAGSISYPARYANAMAVGATDQNNNRASFSQYGAGLDIVAPGVNVQSTYPGSTYASLNGTSMATPHVAGAAALVKQKNPSWSNVQIRNHLKNTATSLGSTNLYGSGLVNAEAATR

SEQ ID NO: 52426 - protein, 270 aa, Aspergillus oryzae
AQSVPWGISRVQAPAAHNRGLTGSGVKVAVLDTGISTHPDLNIRGGASFVPGEPSTQDGNGHGTHVAGTIAALNNSIGVLGVAPSAELYAVKVLGASEGSGSVSSIAQGLEWAGNNGMHVANLSLGSPSPSATLEQAVNSATSRGVLVVAASGNSGAGSISYPARYANAMAVGATDQNNNRASFSQYGAGLDIVAPGVNVQSTYPGSTYASLNGTSMATPHVAGAAALVKQKNPSWSNVQIRNHLKNTATSLGNTNLYGSGLVNAEAATR

SEQ ID NO: 52427 - protein, 269 aa, Unidentified
AQSVPWGISRVQAPAAHNRGLTGSGVKVAVLDTGISTHPDLNIRGGASFVPGEPSTQDGNGHGTHVAGTIAALNNSIGVLGVAPSAELYAVKVLGASGSGSVSSIAQGLEWAGNNGMHVANLSLGSPSPSATLEQAVNSATSRGVLVVAASGNSGXGSISYPARYANAMAVGATDQNNNRASFSQYGAGLDIVAPGVNVQSTYPGSTYASLNGTSMATPHVAGAAALVKQKNPSWSNVQIRNHLKNTATSLGSTNLYGSGLVNAEAATR

SEQ ID NO: 52428 - protein, 269 aa, Unidentified
AQSVPWGISRVQAPAAHNRGLTGSGVKVAVLDTGISTHPDLNIRGGASFVPGEPSTQDGNGHGTHVAGTIAALNNEIGVLGVAPSAELYAVKVLGASGSGSVSSIAQGLEWAGNNGMHVANLSLGSPSPSATLEQAVNSATSRGVLVVAASGNSGAGSISYPARYANAMAVGATDQNNNRASFSQYGAGLDIVAPGVNVQSTYPGSTYASLNGTSMATPHVAGAAALVKQKNPSWSNVQIRNHLKNTATSLGSTNLYGSGLVNAEAATR

SEQ ID NO: 52429 - protein, 269 aa, Unidentified
AQSVPWGISRVQAPAAHNRGLTGSGVKVAVLDTGISTHPDLNIRGGASFVPGEPSTQDGNGHGTHVAGTIAALNNSIGVLGVAPSAELYAVKVLGASGSGSVSSIAQGLEWAGNNGMHVANLSLGSPSDSATLEQAVNSATSRGVLVVAASGNSGAGSISYPARYANAMAVGATDQNNNRASFSQYGAGLDIVAPGVNVQSTYPGSTYASLNGTSMATPHVAGAAALVKQKNPSWSNVQIRNHLKNTATSLGSTNLYGSGLVNAEAATR

SEQ ID NO: 52430 - protein, 269 aa, Unidentified
AQSVPWGISRVQAPAAHNRGLTGSGVKVAVLDTGISTHPDLNIRGGASFVPGEPSTQDGNGHGTHVAGTIAALNNSIGVLGVAPSAELYAVKVLGASGSGSVSSIAQGLEWAGNNGMHVANLSLGSPSPSATLEQAVNSATSRGVLVVAASGNXGAGSISYPARYANAMAVGATDQNNNRASFSQYGAGLDIVAPGVNVQSTYPGSTYASLNGTSMATPHVAGAAALVKQKNPSWSNVQIRNHLKNTATSLGSTNLYGSGLVNAEAATR

SEQ ID NO: 52431 - protein, 269 aa, Unidentified
AQSVPWGISRVQAPAAHNRGLTGSGVKVAVLDTGISTHPDLNIRGGASFVPGEPSTQDGNGHGTHVAGTIAALNNSIGVLGVAPSAELYAVKVLGASGSGSVSSIAQGLEWAGNNGMHVANLSLGSPSPSATLEQAVNSATSRGVLVVAASGNSGAGSISYPARYANAMAVGATDQNNNRASFSQYGAGLDIVAPGVNVQSTYPPSTYASLNGTSMATPHVAGAAALVKQKNPSWSNVQIRNHLKNTATSLGSTNLYGSGLVNAEAATR

SEQ ID NO: 52432 - protein, 269 aa, Unidentified
AQSVPWGISRVQAPAAHNRGLTGSGVKVAVLDTGISTHPDLNIRGGASFVPGEPSTQDGNGHGTHVAGTIAALNNSIGVLGVAPSAELYAVKVLGASGSGSVSSIAQGLEWAGNNGMHVANLSLGSPSMSATLEQAVNSATSRGVLVVAASGNSGAGSISYPARYANAMAVGATDQNNNRASFSQYGAGLDIVAPGVNVQSTYPGSTYASLNGTSMATPHVAGAAALVKQKNPSWSNVQIRNHLKNTATSLGSTNLYGSGLVNAEAATR

SEQ ID NO: 52433 - protein, 269 aa, Unidentified
AQSVPWGISRVQAPAAHNRGLTGSGVKVAVLDTGISTHPDLNIRGGASFVPGEPSTQDGNGHGTHVAGTIAALNNSIGVLGVAPSAEMYAVKVLGASGSGSVSSIAQGLEWAGNNGMHVANLSLGSPSPSATLEQAVNSATSRGVLVVAASGNSGAGSISYPARYANAMAVGATDQNNNRASFSQYGAGLDIVAPGVNVQSTYPGSTYASLNGTSMATPHVAGAAALVKQKNPSWSNVQIRNHLKNTATSLGSTNLYGSGLVNAEAATR

SEQ ID NO: 52434 - protein, 269 aa, Unidentified
AQSVPWGISRVQAPAAHNRGLTGSGVKVAVLDTGISTHPDLNIRGGASFVPGEPSTQDGNGHGTHVAGTIAALNNSIGVLGVAPSAELYAVKVLGASGSGSVSSIAQGLEWAGNNGMHVANLSLGSPYPSATLEQAVNSATSRGVLVVAASGNSGAGSISYPARYANAMAVGATDQNNNRASFSQYGAGLDIVAPGVNVQSTYPGSTYASLNGTSMATPHVAGAAALVKQKNPSWSNVQIRNHLKNTATSLGSTNLYGSGLVNAEAATR

SEQ ID NO: 52435 - protein, 269 aa, Unidentified
AQSVPWGISRVQAPAAHNRGLTGSGVKVAVLDTGISTHPDLNIRGGASFVPGEPSTQDGNGHGTHVAGTIAALNNSIGVLGVAPSAELYAVKVLGASGSGSVSSIAQGLEWAGNNGMHVANLSLGSPSPSATLEQAVNSATSRGVLVVAASGNSGAGSISYPAXYANAMAVGATDQNNNRASFSQYGAGLDIVAPGVNVQSTYPGSTYASLNGTSMATPHVAGAAALVKQKNPSWSNVQIRNHLKNTATSLGSTNLYGSGLVNAEAATR

SEQ ID NO: 52436 - protein, 271 aa, Unidentified
AQSVPWGISRVQAPAAHNRGLTGSGVKVAVLDTGISTHPDLNIRGGASFVPGEPSTQDGNGHGTHVAGTIAALNNSIGVLGVAPSAELYAVKVLKATXSGSGSVSSIAQGLEWAGNNGMHVANLSLGSPSPSATLEQAVNSATSRGVLVVAASGNSGAGSISYPARYANAMAVGATDQNNNRASFSQYGAGLDIVAPGVNVQSTYPGSTYASLNGTSMATPHVAGAAALVKQKNPSWSNVQIRNHLKNTATSLGSTNLYGSGLVNAEAATR

SEQ ID NO: 52437 - protein, 269 aa, Unidentified
AQSVPWGISRVQAPAAHNRGLTGSGVKVAVLDTGISTHPDLNIRGGASFVPGEPSTQDGNGHGTHVAGTIAALNNSIGVLGVAPSLELYAVKVLGASGSGSVSSIAQGLEWAGNNGMHVANLSLGSPSPSATLEQAVNSATSRGVLVVAASGNSGAGSISYPARYANAMAVGATDQNNNRASFSQYGAGLDIVAPGVNVQSTYPGSTYASLNGTSMATPHVAGAAALVKQKNPSWSNVQIRNHLKNTATSLGSTNLYGSGLVNAEAATR

SEQ ID NO: 52438 - protein, 269 aa, Bacillus sp.
AQSVPWGISRVQAPAAHNRGLTGSGVKVAVLDTGISTHPDLNIRGGASFVPGEPSTQDGNGHGTHVAGTIAALNNSIGVLGVAPNAELYAVKVLGASGSGSVSSIAQGLEWAGNNGLHVANLSLGSPSPSATLEQAVNSATSRGVLVVAASGNSGAGSISYPARYANAMAVGATDQNNNRASFSQYGAGLDIVAPGVNVQSTYPGSTYASLNGTSSATPHVAGAAALVKQKNPSWSNVQIRNHLKNTATSLGSTNLYGSGLVNAEAATR

SEQ ID NO: 52439 - protein, 269 aa, Unidentified
AQSVPWGISRVQAPAAHNRGLTGSGVKVAVLDTGISTHPDLNERGGASFVPGEPSTQDGNGHGTHVAGTIAALNNSIGVLGVAPSAELYAVKVLGASGSGSVSSIAQGLEWAGNNGMHVANLSLGSPSPSATLEQAVNSATSRGVLVVAASGNSGAGSISYPARYANAMAVGATDQNNNRASFSQYGAGLDIVAPGVNVQSTYPGSTYASLNGTSMATPHVAGAAALVKQKNPSWSNVQIRNHLKNTATSLGSTNLYGSGLVNAEAATR

SEQ ID NO: 52440 - protein, 269 aa, Unidentified
AQSVPWGISRVQAPAAHNRGLTGSGVKVAVLDTGISTHPDLNIRGGASFVPGEPSTQDGNGHGTHVAGTIAALNNSIGVLGVAPSAELYAVKVLGASGSGSVSSIAQGLEWAGNNAMHVANLSLGSPSPSATLEQAVNSATSRGVLVVAASGNSGAGSISYPARYANAMAVGATDQNNNRASFSQYGAGLDIVAPGVNVQSTYPGSTYASLNGTSMATPHVAGAAALVKQKNPSWSNVQIRNHLKNTATSLGSTNLYGSGLVNAEAATR

SEQ ID NO: 52441 - protein, 269 aa, Unidentified
AQSVPWGISRVQAPAAHNRGLTGSGVKVAVLDTGISTHPDLNIRGGASFVPGEPSTQDGNGHGTHVAGTIAALNNTIGVLGVAPSAELYAVKVLGASGSGSVSSIAQGLEWAGNNGMHVANLSLGSPSPSATLEQAVNSATSRGVLVVAASGNSGAGSISYPARYANAMAVGATDQNNNRASFSQYGAGLDIVAPGVNVQSTYPGSTYASLNGTSMATPHVAGAAALVKQKNPSWSNVQIRNHLKNTATSLGSTNLYGSGLVNAEAATR

SEQ ID NO: 52442 - protein, 269 aa, Unidentified
AQSVPWGISRVQAPAAHNRGLTGSGVKVAVLDTGISTHPDLNIRGGASFVPGEPSTQVGNGHGTHVAGTIAALNNSIGVLGVAPSAELYAVKVLGASGSGSVSSIAQGLEWAGNNGMHVANLSLGSPSPSATLEQAVNSATSRGVLVVAASGNSGAGSISYPARYANAMAVGATDQNNNRASFSQYGAGLDIVAPGVNVQSTYPGSTYASLNGTSMATPHVAGAAALVKQKNPSWSNVQIRNHLKNTATSLGSTNLYGSGLVNAEAATR

SEQ ID NO: 52443 - protein, 269 aa, Unidentified
AQSVPWGISRVQAPAAHNRGLTGSGVKVAVLDTGISTHPDLNIRGGASFVPGEPSTQDGNGHGTHVAGTIAALNNSIGVLGVAPSAELYAVKVLGASGSGSVSSIAQGLEWAGNNGMHVANLSLGSPSPSATLEQAVNSATSRGVLVVAASGNSGAGSISYPARYANAMAVGATDQNNNRASFSQYGAGLDIVAPGVNVQSTYPGSTYASLNGTSMATPHVAGAAALVKQKNPSWSNVQIRNHLKNTATGLGSTNLYGSGLVNAEAATR

SEQ ID NO: 52444 - protein, 269 aa, Unidentified
AQSVPWGISRVQAPAAHNRGLTGSGVKVAVLDTGISTHPDLNIRGGASFVPGEPSTQDGNGHGTHVAGTIAALNNSIGVLGVAPSAELYAVKVLGASGSGSLSSIAQGLEWAGNNGMHVANLSLGSPSPSATLEQAVNSATSRGVLVVAASGNSGAGSISYPARYANAMAVGATDQNNNRASFSQYGAGLDIVAPGVNVQSTYPGSTYASLNGTSFATPHVAGAAALVKQKNPSWSNVQIRNHLKNTATSLGSTNLYGSGLVNAEAATR

SEQ ID NO: 52445 - protein, 269 aa, Unidentified
AQSVPWGISRVQAPAAHNRGLTGSGVKVAVLDTGISTHPDLNIRGGASFVPGEPSTQDGNGHGTHVAGTIAALNNSIGVLGVAPSAELYAVKVLGASGSGSVSSIAQGLEWAGNNGMHVANLSLGSPSPSATLEQAVNSATSRGVLVVAASGNSGAGSISYPARYANAMAVGATDQMNNRASFSQYGAGLDIVAPGVNVQSTYPGSTYASLNGTSMATPHVAGAAALVKQKNPSWSNVQIRNHLKNTATSLGSTNLYGSGLVNAEAATR

SEQ ID NO: 52446 - protein, 269 aa, Unidentified
AQSVPWGISRVQAPAAHNRGLTGSGVKVAVLDTGISTHPDLNIRGGASFVPGEPSTQDKNGHGTHVAGTIAALNNSIGVLGVAPSAELYAVKVLGASGSGSVSSIAQGLEWAGNNGMHVANLSLGSPSPSATLEQAVNSATSRGVLVVAASGNSGAGSISYPARYANAMAVGATDQNNNRASFSQYGAGLDIVAPGVNVQSTYPGSTYASLNGTSMATPHVAGAAALVKQKNPSWSNVQIRNHLKNTATSLGSTNLYGSGLVNAEAATR

SEQ ID NO: 52447 - protein, 269 aa, Unidentified
AQSVPWGISRVQAPAAHNRGLTGSGVKVAVLDTGISTHPDLNIRGGASFVPGEPSTQDGNGHGTHVAGTIAALNNSIGVLGDAPSAELYAVKVLGASGSGSVSSIAQGLEWAGNNGMHVANLSLGSPSPSATLEQAVNSATSRGVLVVAASGNSGAGSISYPARYANAMAVGATDQNNNRASFSQYGAGLDIVAPGVNVQSTYPGSTYASLNGTSMATPHVAGAAALVKQKNPSWSNVQIRNHLKNTATSLGSTNLYGSGLVNAEAATR

SEQ ID NO: 52448 - protein, 269 aa, Unidentified
AQSVPWGISRVQAPAAHNRGLTGSGVKVAVLDTGISTGPDLNIRGGASFVPGEPSTQDGNGHGTHVAGTIAALNNSIGVLGVAPSAELYAVKVLGASGSGSVSSIAQGLEWAGNNGMHVANLSLGSPSPSATLEQAVNSATSRGVLVVAASGNSGAGSISYPARYANAMAVGATDQNNNRASFSQYGAGLDIVAPGVNVQSTYPGSTYASLNGTSMATPHVAGAAALVKQKNPSWSNVQIRNHLKNTATSLGSTNLYGSGLVNAEAATR

SEQ ID NO: 52449 - protein, 269 aa, Unidentified
AQSVPWGISRVQAPAAHNRGLTGSGVKVAVLDTGISTHPDLNIRGGASFVPGEPSTQDGNGHGTHVAGTIAALNNSIGVLGVAPSAELYAVKVLGASGSGSVSSIAQGLEWAGNNGMHVANLSLGSPSPSATLEQAVNSATSRGVLVVAASGNSGAGSISYPARYANAMAVGATDQNNNRASFSQYGAGLDIVAPGVNVQSTYPGSTYASLNGTSMATPHVAGAAALVKQKNPSWSNVQIRNHLKNTAESLGSTNLYGSGLVNAEAATR

SEQ ID NO: 52450 - protein, 269 aa, Unidentified
AQSVPWGISRVQAPAAHNRGLTGSGVKVAVLDTGISTHPDLNIRGGASFVPGEPSTQDGNGHGTHVAGTIAALNNSIGVLGVAPSAELYAVKVLGASGSGSVSSIAQGLEWAGNNGMHVANLSLGSPSCSATLEQAVNSATSRGVLVVAASGNSGAGSISYPARYANAMAVGATDQNNNRASFSQYGAGLDIVAPGVNVQSTYPGSTYASLNGTSMATPHVAGAAALVKQKNPSWSNVQIRNHLKNTATSLGSTNLYGSGLVNAEAATR

SEQ ID NO: 52451 - protein, 269 aa, Unidentified
AQSVPWGVSRVQAPAAHNRGLTGSGVKVAVLDTGISTHPDLNIRGGASFVPGEPSTQDGNGHGTHVAGTIAALNNSIGVLGVAPSAELYAVKVLGASGSGSVSSIAQGLEWAGNNGMHVANLSLGSPSPSATLEQAVNSATSRGVLVVAASGNSGAGSISYPARYANAMAVGATDQNNNRASFSQYGAGLDIVAPGVNVQSTYPGSTYASLNGTSMATPHVAGAAALVKQKNPSWSNVQIRNHLKNTATSLGSTNLYGSGLVNAEAATR

SEQ ID NO: 52452 - protein, 269 aa, Unidentified
AQSVPWGISRVQAPAAHNRGLTGSGVKVAVLDTGISTHPDLNIRGGASFVPGEPSTQDGNGHGTHVAGTIAALNNSIGVLGVAPSAELIAVKVLGASGSGSVSSIAQGLEWAGNNGMHVANLSLGSPSPSATLEQAVNSATSRGVLVVAASGNSGAGSISYPARYANAMAVGATDQNNNRASFSQYGAGLDIVAPGVNVQSTYPGSTYASLNGTSMATPHVAGAAALVKQKNPSWSNVQIRNHLKNTATSLGSTNLYGSGLVNAEAATR

SEQ ID NO: 52453 - protein, 269 aa, Unidentified
AQSVPWGISRVQAPAAHNRGLTGSGVKVAVLDTGISTHPDLNIRGGASFVPGEPSTQDGNGHGTHVAGTIAALNNSIGVLGVAPSAELYAVKVLGASGSGSVSSIAQGLEWAGNNGMHVANLSLGSPEPSATLEQAVNSATSRGVLVVAASGNSGAGSISYPARYANAMAVGATDQNNNRASFSQYGAGLDIVAPGVNVQSTYPGSTYASLNGTSMATPHVAGAAALVKQKNPSWSNVQIRNHLKNTATSLGSTNLYGSGLVNAEAATR

SEQ ID NO: 52454 - protein, 269 aa, Unidentified
AQSVPWGISRVQAPAAHNRGLTGSGVKVAVLDTGISTHPDLNIRGGANFVPGEPSTQDGNGHGTHVAGTIAALNNSIGVLGVAPSAELYAVKVLGASGSGSVSSIAQGLEWAGNNGMHVANLSLGSPSPSATLEQAVNSATSRGVLVVAASGNSGAGSISYPARYANAMAVGATDQNNNRASFSQYGAGLDIVAPGVNVQSTYPGSTYASLNGTSMATPHVAGAAALVKQKNPSWSNVQIRNHLKNTATSLGSTNLYGSGLVNAEAATR

SEQ ID NO: 52455 - protein, 269 aa, Unidentified
AQSVPWGISRVQAPAAHNRGLTGSGVKVAVLDTGISTHPDLNIRGGASFVPGEPSTQDGNGHGTHVAGTIAALNNSIGVLGVAPNAELYAVKVLGASGSGSVSSIAQGLEWAGNNGMHVANLSLGSPSPSATLEQAVNSATSRGVLVVAASGNSGAGSISYPARYANAMAVGATDQNNNRASFSQYGAGLDIVAPGVGVQSTYPGSTYASLNGTSSATPHVAGAAALVKQKNPSWSNVQIRNHLKNTATSLGSTNLYGSGLVNAEAATR

SEQ ID NO: 52456 - protein, 269 aa, Unidentified
AQSVPWGISRVQAPAAHNRGLTGSGVKVAVLDTGISTHPDLNIRGGASFVPGEPSTQDGNGHGTHVAGTIAALNNSIGVLGVAPSAELYAVKVLGASGSGSVSSIAQGLEWAGNNGMHVANLSLGSPSPSATLEQAVNSATSRGVLVVAASGNSGAGSESYPARYANAMAVGATDQNNNRASFSQYGAGLDIVAPGVNVQSTYPGSTYASLNGTSMATPHVAGAAALVKQKNPSWSNVQIRNHLKNTATSLGSTNLYGSGLVNAEAATR

SEQ ID NO: 52457 - protein, 269 aa, Unidentified
AQSVPWGISRVQAPAAHNRGLTGSGVKVAVLDTGISTHPDLNIRGGASFVPGEPSTQDGNGHGTHVAGTIAALNNSIGVLGVAPSAELYAVKVLGASGSGSVSSIAQGLEWAGNNGMHVANLSLGSPMPSATLEQAVNSATSRGVLVVAASGNSGAGSISYPARYANAMAVGATDQNNNRASFSQYGAGLDIVAPGVNVQSTYPGSTYASLNGTSMATPHVAGAAALVKQKNPSWSNVQIRNHLKNTATSLGSTNLYGSGLVNAEAATR

SEQ ID NO: 52458 - protein, 269 aa, Unidentified
AQSVPWGISRVQAPAAHNRGCTGSGVKVAVLDTGISTHPDLNIRGGASFVPGEPSTQDGNGHGTHVAGTIAALNNSIGVLGVAPSAELYAVKVLGASGSGSVSSIAQGLEWAGNNGMHVANLSLGSPSPSATLEQAVNSATSRGVLVVAASGNSGAGSISYPARYANAMAVGATDQNNNRASFSQYGAGLDIVAPGVNVQSTYPGSTYASLNGTSMATPHVAGAAALVKQKNPSWSNVQIRNHLKNTATSLGSTNLYGSGLVNAEAATR

SEQ ID NO: 52459 - protein, 270 aa, Aspergillus oryzae
AQSVPWGISRVQAPAAHNRGLTGSGVKVAVLDTGISTHPDLNIRGGASFVPGEPSTQDGNGHGTHVAGTIAALNNSIGVLGVAPSAELYAVKVLGASEGSGSVSSIAQGLEWAGNNGMHVANLSLGSPSPSATLEQAVNSATSRGVLVVAASGNSGAGSISYPARYANAMAVGATDQNNNRASFSQYGAGLDIVAPGVNVQSTYPGSTYASLNGTSMATPHVAGAAALVKQKNPSWSNVQIRNHLKNTATSLGRTNLYGSGLVNAEAATR

SEQ ID NO: 52460 - protein, 270 aa, Unidentified
AQSVPWGISRVQAPAAHNRGLTGSGVKVAVLDTGISTHPDLNIRGGASFVPGEPSTQDGNGHGTHVAGTIAALNNSIGVLGVAPSAELYAVKVLGAXSGSGSVSSIAQGLEWAGNNGMHVANLSLGSPSPSDTLEQAVNSATSRGVLVVAASGNSGAGSISYPARYANAMAVGATDQNNNRASFSQYGAGLDIVAPGVNVQSTYPGSTYASLNGTSMATPHVAGAAALVKQKNPSWSNVQIRNHLKNTATSLGSTNLYGSGLVNAEAATR

SEQ ID NO: 52461 - protein, 269 aa, Unidentified
AQSVPWGISRVQAPAAHNRGLTGSGVKVAVLDTGISTHPDLNIRGGARFVPGEPSTQDGNGHGTHVAGTIAALNNSIGVLGVAPSAELYAVKVLGASGSGSVSSIAQGLEWAGNNGMHVANLSLGSPSPSATLEQAVNSATSRGVLVVAASGNSGAGSISYPARYANAMAVGATDQNNNRASFSQYGAGLDIVAPGVNVQSTYPGSTYASLNGTSMATPHVAGAAALVKQKNPSWSNVQIRNHLKNTATSLGSTNLYGSGLVNAEAATR

SEQ ID NO: 52462 - protein, 269 aa, Unidentified
AQSVPWGISRVQAPAAHNRGLTGSGVKVAVLDTGISTHPDLNIRGGASFVPGEPSTQDGNGHGTHVAGTIAALNNSIGVLGVADSAELYAVKVLGASGSGSVSSIAQGLEWAGNNGMHVANLSLGSPSPSATLEQAVNSATSRGVLVVAASGNSGAGSISYPARYANAMAVGATDQNNNRASFSQYGAGLDIVAPGVNVQSTYPGSTYASLNGTSMATPHVAGAAALVKQKNPSWSNVQIRNHLKNTATSLGSTNLYGSGLVNAEAATR

SEQ ID NO: 52463 - protein, 269 aa, Unidentified
AQSVPWGISRVQAPAAHNRGLTGSGVKVAVLDTGISTHPDLNIRGGASFVPGEPSTQLGNGHGTHVAGTIAALNNSIGVLGVAPSAELYAVKVLGASGSGSVSSIAQGLEWAGNNGMHVANLSLGSPSPSATLEQAVNSATSRGVLVVAASGNSGAGSISYPARYANAMAVGATDQNNNRASFSQYGAGLDIVAPGVNVQSTYPGSTYASLNGTSMATPHVAGAAALVKQKNPSWSNVQIRNHLKNTATSLGSTNLYGSGLVNAEAATR

SEQ ID NO: 52464 - protein, 269 aa, Synthetic construct
AQSVPWGISRVQAPAAHNRGLTGSGVKVAVLDTGISTHPDLNIRGGASFVPGEPSTQDGNGHGTHVAGTIAALNNSIGVLGVAPSAELYAVKVLGASGSGSVSSIAQGLEWAGNNGMHVANLSLGSPSPSATLEQAVNSATSRGVLVVAASNNSGAGSISYPARYANAMAVGATDQNNNRASFSQYGAGLDIVAPGVNVQSTYPGSTYASLNGTSMATPHVAGAAALVKQKNPSWSNVQIRNHLKNTATSLGSTNLYGSGLVNAEAATR

SEQ ID NO: 52465 - protein, 269 aa, Unidentified
AQSVPWGISRVQAPAAHNRGLTGSGVKVAVLDTGISTHPDLNIRGGASFVPGEPSTQDGNGHGTHVAGTIAALNNGIGVLGVAPSAELYAVKVLGASGSGSVSSIAQGLEWAGNNGMHVANLSLGSPSPSATLEQAVNSATSRGVLVVAASGNSGAGSISYPARYANAMAVGATDQNNNRASFSQYGAGLDIVAPGVNVQSTYPGSTYASLNGTSMATPHVAGAAALVKQKNPSWSNVQIRNHLKNTATSLGSTNLYGSGLVNAEAATR

SEQ ID NO: 52466 - protein, 269 aa, Unidentified
AQSVPWGISRVQAPAAHNRGLTGSGVKVAVLDTGISTHPDLNIRGGASFVPGEPSTQDGNGHGTHVAGTIAALNNSIGVLGVAPSAELYAVKVLGASGSGSVSSIAQGLEWAGNNGMHVANLSLGSPSPSATLEQAVNSATSRGVLVVAASGNSGAGSISYPARYANAMAVGATDQNNNRASFSQYGAGLDIVAPGVNVQSTYPGSTYASCNGTSMATPHVAGAAALVKQKNPSWSNVQIRNHLKNTATSLGSTNLYGSGLVNAEAATR

SEQ ID NO: 52467 - protein, 269 aa, Unidentified
AQSVPWGISRVQAPAAHNRGLTGSGVKVAVLDTGISTHPDLNIRGGASFVPGEPSTQDGNGHGTHVAGTIAALNNSIGVLGVAISAELYAVKVLGASGSGSVSSIAQGLEWAGNNGMHVANLSLGSPSPSATLEQAVNSATSRGVLVVAASGNSGAGSISYPARYANAMAVGATDQNNNRASFSQYGAGLDIVAPGVNVQSTYPGSTYASLNGTSMATPHVAGAAALVKQKNPSWSNVQIRNHLKNTATSLGSTNLYGSGLVNAEAATR

SEQ ID NO: 52468 - protein, 269 aa, Unidentified
AQSVPWGISRVQAPAAHNRGLTGSGVKVAVLDTGISTHPDLNIRGGASFVPGEPSTQDGNGHGTHVAGTIAALNNSIGVLGVAPSAELYAVKVLGASGSGSVSSIAQGLEWAGNNGMHVANLSLGSPSPSATLEQAVNSATSRGVLVVAASGNSGAGSISYPARYANAMAVGATDQNNNRASFSQYGAGLDIVAPGDNVQSTYPGSTYASLNGTSMATPHVAGAAALVKQKNPSWSNVQIRNHLKNTATSLGSTNLYGSGLVNAEAATR

SEQ ID NO: 52469 - protein, 269 aa, Unidentified
AQSVPWGISRVQAPAAHNRGLTGSGVKVAVLDTGISTHPDLNIRGGASFVPGEPSTQDGNGHGTHVAGTIAALNNSIGVLGVAPSAELYAVKVLGASGSGSVSSIAQGLEWAGNNGMHVANLSLGSPSPSATLEQAVNSATSRGVLVVAASGNSGADSISYPARYANAMAVGATDQNNNRASFSQYGAGLDIVAPGVNVQSTYPGSTYASLNGTSMATPHVAGAAALVKQKNPSWSNVQIRNHLKNTATSLGSTNLYGSGLVNAEAATR

SEQ ID NO: 52470 - protein, 269 aa, Unidentified
AQSVPWGISRVQAPAAHNRGLTGSGVKVAVLDTGISTHPDLNIRGGASFVPGEPSTQDGNGHGTHVAGTIAALNNSIGVLGVAPSAELYAVKVLGASGSGSVSSIAQGLEWAGNNGMHVANLSLGSPSPSATLEQAVNSATSRGVLVVAASGNSGACSISYPARYANAMAVGATDQNNNRASFSQYGAGLDIVAPGVNVQSTYPGSTYASLNGTSMATPHVAGAAALVKQKNPSWSNVQIRNHLKNTATSLGSTNLYGSGLVNAEAATR

SEQ ID NO: 52471 - protein, 269 aa, Unidentified
AQSVPWGISRVQAPAAHNRGLTGSGVKVAVLDTGISTHPDLNIRGGASFVPGEPSTQDGNGHGTHVAGTVAALNNSIGVLGVAPSAELYAVKVLGASGSGSVSSIAQGLEWAGNNGMHVANLSLGSPSPSATLEQAVNSATSRGVLVVAASGNSGAGSISYPARYANAMAVGATDQNNNRASFSQYGAGLDIVAPGVNVQSTYPGSTYASLNGTSMATPHVAGAAALVKQKNPSWSNVQIRNHLKNTATSLGSTNLYGSGLVNAEAATR

SEQ ID NO: 52472 - protein, 269 aa, Unidentified
AQSVPWGISRVQAPAAHNRGLTGSGVKVAVLDTGISTHPDLNIRGGASFVPGEPSTQDGNGHGTHVAGTIAALNNSIGVLGVAPSAELYAVKVLGAEGSGSVSSIAQGLEWAGNNGMHVANLSLGSPSPSATLEQAVNSATSRGVLVVAASGNSGAGSISYPARYANAMAVGATDQNNNRASFSQYGAGLDIVAPGVNVQSTYPGSTYASLNGTSMATPHVAGAAALVKQKNPSWSNVQIRNHLKNTATSLGSTNLYGSGLVNAEAATR

SEQ ID NO: 52473 - protein, 269 aa, Unidentified
AQSVPWGISRVQAPAAHNRGLTGSGVKVAVLDTGISTHPDLNIRGGASFVPGEPSTQDGNGHGTHVAGTIAALNNSIGVLGVAPSAELYAVKVLGASGSGFVSSIAQGLEWAGNNGMHVANLSLGSPSPSATLEQAVNSATSRGVLVVAASGNSGAGSISYPARYANAMAVGATDQNNNRASFSQYGAGLDIVAPGVNVQSTYPGSTYASLNGTSMATPHVAGAAALVKQKNPSWSNVQIRNHLKNTATSLGSTNLYGSGLVNAEAATR

SEQ ID NO: 52474 - protein, 269 aa, Unidentified
AQSVPWGISRVQAPAAHNRGLTGSGVKVAVLDTGISTHPDLNIRGGASFVPGEPSTQDGNGHGTHVAGTIAALNNSIGVLGVAPSAELYAVKVLGASGSGSVSSIAQGLEWAGNNGMHVANLSLGSPSSSATLEQAVNSATSRGVLVVAASGNSGAGSISYPARYANAMAVGATDQNNNRASFSQYGAGLDIVAPGVNVQSTYPGSTYASLNGTSMATPHVAGAAALVKQKNPSWSNVQIRNHLKNTATSLGSTNLYGSGLVNAEAATR

SEQ ID NO: 52475 - protein, 269 aa, Unidentified
AQSVPWGISRVQAPAAHNRGLTGSGVKVAVLDTGISTHPDLNIRGGASFVPGEPSTQDGNGHGTHVAGTIAALNNSIGVMGVAPSAELYAVKVLGASGSGSVSSIAQGLEWAGNNGMHVANLSLGSPSPSATLEQAVNSATSRGVLVVAASGNSGAGSISYPARYANAMAVGATDQNNNRASFSQYGAGLDIVAPGVNVQSTYPGSTYASLNGTSMATPHVAGAAALVKQKNPSWSNVQIRNHLKNTATSLGSTNLYGSGLVNAEAATR

SEQ ID NO: 52476 - protein, 269 aa, Unidentified
AQSVPWGISRVQAPAAHNRGLTGSGVKVAVLDTGISTHPDLNIRGGASFVPGEPSTQDGNGHGTHVAGTIAALNNSIGVLGVAPSAELYAVKVLGASGSGSVSSIAQGLEWAGNNGMHVANLSLGSPSPSATLEQAVNSATSRGVLVVAASGNSGAGSISYPARYANAMAVGATDQNNNRASFSQYGAGLDIVAPGVNVQSTYPGSTYASLNGTSMATPHVAGAAALVKQKNPSWSNVQIRNHLKNTATSLGSTRLYGSGLVNAEAATR

SEQ ID NO: 52477 - protein, 269 aa, Unidentified
AQSVPWGISRVQAPAAHNRGLTGSGVKVAVLDTGISTHPDLNIRGGASFVPGEPSTQDGNGHGTHVAGTIAALNNSIGVLGVAPSAELYAVKVLGASGSGSVSSIAQGLEWAGNNGMHVANLSLGSPSPSATLEQAVNSATSRGVLVVAASGNSGAGSISYPARYANAMAVGATDQNNNRASFSQYGAGLDIVAPGVNVQSTYPGSTYASLNGTSMATPHVGGAAALVKQKNPSWSNVQIRNHLKNTATSLGSTNLYGSGLVNAEAATR

SEQ ID NO: 52478 - protein, 269 aa, Unidentified
AQSVPWGISRVQAPAAHNRGLTGSGVKVAVLDTGISTHPDLNIRGGASFVPGEPSTQDGNGHGTHVAGTIAALNNSIGVLGVAPSAELYAVKVLGASGSGSVSSIAQGLEWAGNNGMHVANLSLGSPSPSATLEQAVNSATSRGVLVVAASGNSGAGSISYPARYANAMAVGATDQNNNRASFSQYGAGLDIVAPGVNVQSTYPGSTYASLNGTSMATPHVAGAAALVKQKNPSWSNVQIRNHLKITATSLGSTNLYGSGLVNAEAATR

SEQ ID NO: 52479 - protein, 269 aa, Unidentified
AQSVPWGISRVQAPAAHNRGLTGSGVKVAVLDTGISTHPDLNIRGGASFVPGEPSTQDGNGHGTHVAGTIAALNNSIGVLGVAPSAELYAVKVLGASGSGSVSSIAQGLEWAGNNGMHVANLSLGSPSPSATLEQAVNSATSRGVLVVAASGNSGAGSISYPARYANAMAVGATDQNNNRASFSQYGAGLDIVAPGTNVQSTYPGSTYASLNGTSMATPHVAGAAALVKQKNPSWSNVQIRNHLKNTATSLGSTNLYGSGLVNAEAATR

SEQ ID NO: 52480 - protein, 269 aa, Unidentified
AQSVPWGISRVQAPAAHNRGLTGSGAKVAVLDTGISTHPDLNIRGGASFVPGEPSTQDGNGHGTHVAGTIAALNNSIGVLGVAPSAELYAVKVLGASGSGSVSSIAQGLEWAGNNGMHVANLSLGSPSPSATLEQAVNSATSRGVLVVAASGNSGAGSISYPARYANAMAVGATDQNNNRASFSQYGAGLDIVAPGVNVQSTYPGSTYASLNGTSMATPHVAGAAALVKQKNPSWSNVQIRNHLKNTATSLGSTNLYGSGLVNAEAATR

SEQ ID NO: 52481 - protein, 269 aa, Unidentified
AQSVPWGISRVQAPAAHNRGLTGSGVKVAVLDTGISTHPDLNIRGGASFVPGEPSTQDGNGHGTHVAGTIAALNNSIGVLGVAPSAELYAVKVLGASGSGSVSSIAQGLEWAGNNGMHVANLSLGMPSPSATLEQAVNSATSRGVLVVAASGNSGAGSISYPARYANAMAVGATDQNNNRASFSQYGAGLDIVAPGVNVQSTYPGSTYASLNGTSMATPHVAGAAALVKQKNPSWSNVQIRNHLKNTATSLGSTNLYGSGLVNAEAATR

SEQ ID NO: 52482 - protein, 270 aa, Unidentified
AQSVPWGISRVQAPAAHNRGLTGSGVKVAVLDTGISTHPDLNIRGGASFVPGEPSTQDGNGHGTHVAGTIAALNNSIGVLGVAPSAELYAVKVLGASGXSGSVSSIAQGLEWAGNNGMHVANLSLGSKSPSATLEQAVNSATSRGVLVVAASGNSGAGSISYPARYANAMAVGATDQNNNRASFSQYGAGLDIVAPGVNVQSTYPGSTYASLNGTSMATPHVAGAAALVKQKNPSWSNVQIRNHLKNTATSLGSTNLYGSGLVNAEAATR

SEQ ID NO: 52483 - protein, 269 aa, Unidentified
AASVPWGISRVQAPAAHNRGLTGSGVKVAVLDTGISTHPDLNIRGGASFVPGEPSTQDGNGHGTHVAGTIAALNNSIGVLGVAPSAELYAVKVLGASGSGSVSSIAQGLEWAGNNGMHVANLSLGSPSPSATLEQAVNSATSRGVLVVAASGNSGAGSISYPARYANAMAVGATDQNNNRASFSQYGAGLDIVAPGVNVQSTYPGSTYASLNGTSMATPHVAGAAALVKQKNPSWSNVQIRNHLKNTATSLGSTNLYGSGLVNAEAATR

SEQ ID NO: 52484 - protein, 269 aa, Unidentified
AQSVPWGISRVQAPAAHNRGWTGSGVKVAVLDTGISTHPDLNIRGGASFVPGEPSTQDGNGHGTHVAGTIAALNNSIGVLGVAPSAELYAVKVLGASGSGSVSSIAQGLEWAGNNGMHVANLSLGSPSPSATLEQAVNSATSRGVLVVAASGNSGAGSISYPARYANAMAVGATDQNNNRASFSQYGAGLDIVAPGVNVQSTYPGSTYASLNGTSMATPHVAGAAALVKQKNPSWSNVQIRNHLKNTATSLGSTNLYGSGLVNAEAATR

SEQ ID NO: 52485 - protein, 269 aa, Unidentified
AQSVPWGISRVQAPAAHNRGLTGSGVKVAVLDTGISTHPDLNIRGGASFVPGEPSTQDGNGHGTHVAGTIAALNNSIGVLGVAPSPELYAVKVLGASGSGSVSSIAQGLEWAGNNGMHVANLSLGSPSPSATLEQAVNSATSRGVLVVAASGNSGAGSISYPARYANAMAVGATDQNNNRASFSQYGAGLDIVAPGVNVQSTYPGSTYASLNGTSMATPHVAGAAALVKQKNPSWSNVQIRNHLKNTATSLGSTNLYGSGLVNAEAATR

SEQ ID NO: 52486 - protein, 269 aa, Unidentified
AQSVPWGISRVQAPAAHNRGLTGSGVKVAVLDTGISTHPDLNIRGGASFVPGEPSTQDGNGHGTHVAGTIAALNNSIGVLGVAPSAELYAVKVLGASGSGSVSSIAQGLEWAGNNGMHVANLSLGSPSPSATLEQAVNSATSRGVLVVAASGNSGAGSISYPARYANAMAVGATDQNNNRASFSQYGAGLDIVDPGVNVQSTYPGSTYASLNGTSMATPHVAGAAALVKQKNPSWSNVQIRNHLKNTATSLGSTNLYGSGLVNAEAATR

SEQ ID NO: 52487 - protein, 269 aa, Unidentified
AQSVPWGISRVQAPAAHNRGLTGSGVKVAVLDTGISTHPDLNIRGGASFVPGEPSTQGGNGHGTHVAGTIAALNNSIGVLGVAPSAELYAVKVLGASGSGSVSSIAQGLEWAGNNGMHVANLSLGSPSPSATLEQAVNSATSRGVLVVAASGNSGAGSISYPARYANAMAVGATDQNNNRASFSQYGAGLDIVAPGVNVQSTYPGSTYASLNGTSMATPHVAGAAALVKQKNPSWSNVQIRNHLKNTATSLGSTNLYGSGLVNAEAATR

SEQ ID NO: 52488 - protein, 269 aa, Unidentified
AQSVPWGSSRVQAPAAHNRGLTGSGVKVAVLDTGISTHPDLNIRGGASFVPGEPSTQDGNGHGTHVAGTIAALNNSIGVLGVAPSAELYAVKVLGASGSGSVSSIAQGLEWAGNNGMHVANLSLGSPSPSATLEQAVNSATSRGVLVVAASGNSGAGSISYPARYANAMAVGATDQNNNRASFSQYGAGLDIVAPGVNVQSTYPGSTYASLNGTSMATPHVAGAAALVKQKNPSWSNVQIRNHLKNTATSLGSTNLYGSGLVNAEAATR

SEQ ID NO: 52489 - protein, 270 aa, Aspergillus oryzae
AQSVPWGISRVQAPAAHNRGLTGSGVKVAVLDTGISTHPDLNIRGGASFVPGEPSTQDGNGHGTHVAGTIAALNNSIGVLGVAPSAELYAVKVLGASEGSGSVSSIAQGLEWAGNNGMHVANLSLGSPSPSATLEQAVNSATSRGVLVVAASGNSGVGSISYPARYANAMAVGATDQNNNRASFSQYGAGLDIVAPGVNVQSTYPGSTYASLNGTSMATPHVAGAAALVKQKNPSWSNVQIRNHLKNTATSLGSTNLYGSGLVNAEAATR

SEQ ID NO: 52490 - protein, 269 aa, Unidentified
AQSVPWGISRVQAPAAHNRGLTGSGVKVAVLDTGISTHPDLNIRGGASFVPGEPSTQDGNGHGTHVAGTIAALNNSIGVLGVAPSAELYAVKVLGASGSGSVSSIAQGLEWAGNNGMHVANLSLGSPSPSATLEQAVNSATSRGVLVVAASGNSGAGSISYPARYANAMAVGATDQNNNRASFSQYGAGLDIVAPGVNVQSTYPGSTYASLNGTSMATPHVAGAAALVKQKNPSWSNVQIRNHLKNTATSLGSTNLYGSGLVNAEAITR

SEQ ID NO: 52491 - protein, 269 aa, Unidentified
AQSVPWGISRVQAPAAHNRGLTGSGVKVAVLDTGISTHPDLNIRGGASFVPGEPSTQDGNGHGTHVAGTIAALNNSIGVLGVAPSAELYAVKVLGASGSGSVSSIAQGLEWAGNNGFHVANLSLGSPSPSATLEQAVNSATSRGVLVVAASGNSGAGSISYPARYANAMAVGATDQNNNRASFSQYGAGLDIVAPGVNVQSTYPGSTYASLNGTSMATPHVAGAAALVKQKNPSWSNVQIRNHLKNTATSLGSTNLYGSGLVNAEAATR

SEQ ID NO: 52492 - protein, 269 aa, Unidentified
AQSVPWGISRVQAPAAHNRGLTGSGVKVAVLDTGISTHPDLNIRGGASFVPGEPSTQDGNGHGTHVAGTIAALNNSIGVLGVAPSAELCAVKVLGASGSGSVSSIAQGLEWAGNNGMHVANLSLGSPSPSATLEQAVNSATSRGVLVVAASGNSGAGSISYPARYANAMAVGATDQNNNRASFSQYGAGLDIVAPGVNVQSTYPGSTYASLNGTSMATPHVAGAAALVKQKNPSWSNVQIRNHLKNTATSLGSTNLYGSGLVNAEAATR

SEQ ID NO: 52493 - protein, 269 aa, Unidentified
AQSVPWGISRVQAPAAHNRGLTGWGVKVAVLDTGISTHPDLNIRGGASFVPGEPSTQDGNGHGTHVAGTIAALNNSIGVLGVAPSAELYAVKVLGASGSGSVSSIAQGLEWAGNNGMHVANLSLGSPSPSATLEQAVNSATSRGVLVVAASGNSGAGSISYPARYANAMAVGATDQNNNRASFSQYGAGLDIVAPGVNVQSTYPGSTYASLNGTSMATPHVAGAAALVKQKNPSWSNVQIRNHLKNTATSLGSTNLYGSGLVNAEAATR

SEQ ID NO: 52494 - protein, 270 aa, Unidentified
AQSVPWGISRVQAPAAHNRGLTGSGVKVAVLDTGISTHPDLNIRGGASFVPGEPSTQDGNGHGTHVAGTIAALNNSIGVLGVAPSAELYAVKVLGASEGIGSVSSIAQGLEWAGNNGMHVANLSLGSPSPSATLEQAVNSATSRGVLVVAASGNSGAGSISYPARYANAMAVGATDQNNNRASFSQYGAGLDIVAPGVNVQSTYPGSTYASLNGTSMATPHVAGAAALVKQKNPSWSNVQIRNHLKNTATSLGSTNLYGSGLVNAEAATR

SEQ ID NO: 52495 - protein, 269 aa, Unidentified
AQSVPWGISRVQAPAAHNRGLTGSGVKVAVLDTGISTHPDLNIRGGASFVPGEPSTQDGNGHGTHVAGTIAALNNSIGVLGVAPSAELYAVKVLGASGSGSVSSIAQGLEWAGNNGMHVANLSLGSPSPSATLEQAVNSATSRGVLVVAASGNSGAGSISYPARYANAMAVGATDQDNNRASFSQYGAGLDIVAPGVNVQSTYPGSTYASLNGTSMATPHVAGAAALVKQKNPSWSNVQIRNHLKNTATSLGSTNLYGSGLVNAEAATR

SEQ ID NO: 52496 - protein, 269 aa, Unidentified
AQSVPWGISRVQAPAAHNRGLTGSGVKVAVLDTGISTHPDLNIRGGASFVPGEPSTQDGNGHGTHVAGTIAALNNSIGVLGFAPSAELYAVKVLGASGSGSVSSIAQGLEWAGNNGMHVANLSLGSPSPSATLEQAVNSATSRGVLVVAASGNSGAGSISYPARYANAMAVGATDQNNNRASFSQYGAGLDIVAPGVNVQSTYPGSTYASLNGTSMATPHVAGAAALVKQKNPSWSNVQIRNHLKNTATSLGSTNLYGSGLVNAEAATR

SEQ ID NO: 52497 - protein, 269 aa, Unidentified
AQSVPWGISRVQAPAAHNRGLTGSGVKVAVLDTGISTHPDLNIRGGASFVPGEPSTQDGNGHGTHVAGTIAALNNSIGVLGVAPSAELYAVKVLGASGSGSVSSIAQGLEWAGNNGMHVANLSLGSPSPSATLEQAVNSATSRGVLVVAASGNSGAGSISYPARYANAMAVGATDQNNNRASFSQYGAGLDIVAPGVNVQSTYPGSTYASLNGTSMATPHVAGAAALVKNKNPSWSNVQIRNHLKNTATSLGSTNLYGSGLVNAEAATR

SEQ ID NO: 52498 - protein, 269 aa, Unidentified
AQSVPWGISRVQAPAAHNRGLTGSGVKVAVLDTGISTRPDLNIRGGASFVPGEPSTQDGNGHGTHVAGTIAALNNSIGVLGVAPSAELYAVKVLGASGSGSVSSIAQGLEWAGNNGMHVANLSLGSPSPSATLEQAVNSATSRGVLVVAASGNSGAGSISYPARYANAMAVGATDQNNNRASFSQYGAGLDIVAPGVNVQSTYPGSTYASLNGTSMATPHVAGAAALVKQKNPSWSNVQIRNHLKNTATSLGSTNLYGSGLVNAEAATR

SEQ ID NO: 52499 - protein, 269 aa, Unidentified
AQSVPWGISRVQAPAAHNRGLTGSGVKVAVLDTGISTHPDLNIRGGASFVPGEPSTQDGNGHGTHVAGTIAALNNSIGVLGVAPSAELYAVQVLGASGSGSVSSIAQGLEWAGNNGMHVANLSLGSPSPSATLEQAVNSATSRGVLVVAASGNSGAGSISYPARYANAMAVGATDQNNNRASFSQYGAGLDIVAPGVNVQSTYPGSTYASLNGTSMATPHVAGAAALVKQKNPSWSNVQIRNHLKNTATSLGSTNLYGSGLVNAEAATR

SEQ ID NO: 52500 - protein, 269 aa, Unidentified
AQSVPWGISRVQAPAAHNRGLTGSGVKVAVLDTGISTHPDLNIRGGAHFVPGEPSTQDGNGHGTHVAGTIAALNNSIGVLGVAPSAELYAVKVLGASGSGSVSSIAQGLEWAGNNGMHVANLSLGSPSPSATLEQAVNSATSRGVLVVAASGNSGAGSISYPARYANAMAVGATDQNNNRASFSQYGAGLDIVAPGVNVQSTYPGSTYASLNGTSMATPHVAGAAALVKQKNPSWSNVQIRNHLKNTATSLGSTNLYGSGLVNAEAATR

SEQ ID NO: 52501 - protein, 269 aa, Unidentified
AQSVPWGISRVQAPAAHNRGLTGSGVKVAVLDTGISTHPDLNIRGGASFVPGEPSTQDGNGHGTHVAGTIAALNNSIGVLGVAPSAELYAVKVLGASGSGSVSSIAQGLEWAGNNSMHVANLSLGSPSPSATLEQAVNSATSRGVLVVAASGNSGAGSISYPARYANAMAVGATDQNNNRASFSQYGAGLDIVAPGVNVQSTYPGSTYASLNGTSMATPHVAGAAALVKQKNPSWSNVQIRNHLKNTATSLGSTNLYGSGLVNAEAATR

SEQ ID NO: 52502 - protein, 269 aa, Unidentified
AQSVPWGISRVQAPAAHNRGLTGSGVKVAVLDTGISTHPDLNIRGGASFVPGEPSTQDGNGHGTHVAGTIAALNNSIGVLGVAPSAELYAVKVLGASGSGSVSSIAQGLEWAGNNGMHVANLSLGSPSPSATLEQAVNSATSRGVLVVAASGNSGAGSISYPARYANAMAVGATDQNNNRASFSQYGAGLDIVAPGVNVQSTYPGSTYASLNGTSMATPHVAGAAALVKQKNPSWSNVQIRNHLKNTATSLGSTNLYGMGLVNAEAATR

SEQ ID NO: 52503 - protein, 269 aa, Unidentified
AQSVPWGISRVQAPAAHNRGLTGSGVKVAVLDTGISTHPILNIRGGASFVPGEPSTQDGNGHGTHVAGTIAALNNSIGVLGVAPSAELYAVKVLGASGSGSVSSIAQGLEWAGNNGMHVANLSLGSPSPSATLEQAVNSATSRGVLVVAASGNSGAGSISYPARYANAMAVGATDQNNNRASFSQYGAGLDIVAPGVNVQSTYPGSTYASLNGTSMATPHVAGAAALVKQKNPSWSNVQIRNHLKNTATSLGSTNLYGSGLVNAEAATR

SEQ ID NO: 52504 - protein, 269 aa, Unidentified
AQSVPWGISRVQAPAAHNRGLTGSGVKVAVLDTGISTHPDLNIRGGASFVPGEPSTQDGNGHGTHVAGTIAALNNSIGVLGVAPSAELYAVKVLGASGSGSVSSIAQGLEWAGNNGMHVANLSLGSPSPSATLEQAVNSATSRGVLVVAASGNSGAGSISYPARYANAMAVGATDQNNNRASFSQYGAGLDIVAPGVNVQSTYPGSTYASLNGTSMATPHVAGAAALVFQKNPSWSNVQIRNHLKNTATSLGSTNLYGSGLVNAEAATR

SEQ ID NO: 52505 - protein, 269 aa, Unidentified
AQSVPWGISRVQAPAAHNRGETGSGVKVAVLDTGISTHPDLNIRGGASFVPGEPSTQDGNGHGTHVAGTIAALNNSIGVLGVAPSAELYAVKVLGASGSGSVSSIAQGLEWAGNNGMHVANLSLGSPSPSATLEQAVNSATSRGVLVVAASGNSGAGSISYPARYANAMAVGATDQNNNRASFSQYGAGLDIVAPGVNVQSTYPGSTYASLNGTSMATPHVAGAAALVKQKNPSWSNVQIRNHLKNTATSLGSTNLYGSGLVNAEAATR

SEQ ID NO: 52506 - protein, 269 aa, Unidentified
AQSVPWGISRVQAPAAHNRGLTGSGVKVAVLDTGISTHPDLNIRGGASFVPGEPSTQDGNGHGTHVAGTIAALNNPIGVLGVAPSAELYAVKVLGASGSGSVSSIAQGLEWAGNNGMHVANLSLGSPSPSATLEQAVNSATSRGVLVVAASGNSGAGSISYPARYANAMAVGATDQNNNRASFSQYGAGLDIVAPGVNVQSTYPGSTYASLNGTSMATPHVAGAAALVKQKNPSWSNVQIRNHLKNTATSLGSTNLYGSGLVNAEAATR

SEQ ID NO: 52507 - protein, 269 aa, Unidentified
AQSVPWGISRVQAPAAHNRGLTGSGVKVAVLDTGISTHPDLNIRGGASFVPGEPSTQDGNGHGTHVAGTIAALNNSIGVLGVAPSAELYAVKVLGASGSGSVSSIAQGLEWAGNNGMHVANLSLGSPSPSATLEQAVNSATSRGVLVVAASGNSGAGSISYPARYANAMAVGATDQNNNRASFSQYGAGLDIVAPGVNVQSTYPGSTYASLNGTSMATPHVAGAAALVKQKNPSWSNVQIRNHLKNTCTSLGSTNLYGSGLVNAEAATR

SEQ ID NO: 52508 - protein, 269 aa, Unidentified
AQSVPWGISRVQAPAAHNRGLTGSGVKVAVLDTGISTHPDLNIRGGASFVPGEPSTQDGNGHGTHVAGTIAALNNSIGVLGVAPSAELYAVKVLGASGSGSVSSIAQGLEWAGNNGMHVANLSLGSPSPSATLEQAVNSATSRGVLVVAASGNSGAGSISYPARYANAMAVGATDQNNNRASFSQYGAGLDIVAPGVNVQSTYPGSTYASLSGTSMATPHVAGAAALVKQKNPSWSNVQIRNHLKNTATSLGSTNLYGSGLVNAEAATR

SEQ ID NO: 52509 - protein, 269 aa, Unidentified
AQSVPWGISRVQAPAAHNRGLTGSGVKVAVLDTGISTHPDLNIRGGASFVPGEPSTQDGNGHGTHVAGTIAALNNSIGVLGVAPSAELYAVKVLGASGSGSNSSIAQGLEWAGNNGMHVANLSLGSPSPSATLEQAVNSATSRGVLVVAASGNSGAGSISYPARYANAMAVGATDQNNNRASFSQYGAGLDIVAPGVNVQSTYPGSTYASLNGTSXATPHVAGAAALVKQKNPSWSNVQIRNHLKNTATSLGSTNLYGSGLVNAEAATR

SEQ ID NO: 52510 - protein, 269 aa, Unidentified
AQSVPWGISRVQAPAAHNRGLTGSGVKVAVLDTGISTHPDLNIRGGASFVPGEPSTQDGNGHGTHVAGTIAALNNSIGVLGVAPSAELYAVKVLGASGSGSVSSIAQGLEWAGNNGMHVANLSLGSPSPSATLEQAVNSATSRGVLVVAASGNSGAGSISYPARYANAMAVGATDQNNNRASFSQDGAGLDIVAPGVNVQSTYPGSTYASLNGTSMATPHVAGAAALVKQKNPSWSNVQIRNHLKNTATSLGSTNLYGSGLVNAEAATR

SEQ ID NO: 52511 - protein, 270 aa, Unidentified
AQSVPWGISRVQAPAAHNRGLTGSGVKVAVLDTGISTHPDLNIRGGASFVPGEPSTQDGNGHGTHVAGTIAALNNSIGVLGVAPSAELYAVKVLGASEGSGSASSIAQGLEWAGNNGMHVANLSLGSPSPSATLEQAVNSATSRGVLVVAASGNSGAGSISYPARYANAMAVGATDQNNNRASFSQYGAGLDIVAPGVNVQSTYPGSTYASLNGTSMATPHVAGAAALVKQKNPSWSNVQIRNHLKNTATSLGSTNLYGSGLVNAEAATR

SEQ ID NO: 52512 - protein, 269 aa, Unidentified
AQSVPWGISRVQAPAAHNRGLTGSGVKVAVLDTGISTHPDLNIRGGASFVPGEPSTQDGNGHGTHVAGTIAALNNSIGVLGVAPSAELYAVKVLGASNSGSVSSIAQGLEWAGNNGMHVANLSLGSPSPSATLEQAVNSATSRGVLVVAASGNSGAGSISYPARYANAMAVGATDQNNNRASFSQYGAGLDIVAPGVNVQSTYPGSTYASLNGTSMATPHVAGAAALVKQKNPSWSNVQIRNHLKNTATSLGSTNLYGSGLVNAEAATR

SEQ ID NO: 52513 - protein, 269 aa, Unidentified
AQSVPWGISRVQAPAAHNRGLTGSGVKVAVLDTGISTHPDLNIRGGASFVPGEPSTQDGNGHGTHVAGTIAALNNSIGVLGVAPSAELYAVKVLGASGSGSVSSIAQGLEWAGNNGMHVANLSLGSPSPSATLEQAVNSATSRGVLVVAASGNSGAGSISYPARYANAMAVGATDQNNNRASFSQYGAGLDIVAPGVNVQSTYPGSTYASLNGTSMATPHVAGAAALVKQKNPSWSNVQIDNHLKNTATSLGSTNLYGSGLVNAEAATR

SEQ ID NO: 52514 - protein, 269 aa, Bacillus subtilis
AQSVPWGISRVQAPAAHNRGLTGSGVKVAVLDTGISTHPDLNIRGGASFVPGEPSTQDGNGHGTHVAGTIAALNNSIGVLGVAPSAELYAVKVLGASGSGSVSSIAQGLEWAGNNGMHVANLSLGSPSPSATLEQAVNSATSRGVLVVAASGNSGAGSISYPARYANAMAVGATDQNNNRASFSQYGAGLDIVAPGVNVDSTYPGSTYASLNGTSMATPHVAGAAALVKQKNPSWSNVQIRNHLKNTATSLGSTNLYGSGLVNAEAATR

SEQ ID NO: 52515 - protein, 269 aa, Unidentified
AQSVPWGISRVQAPAAHNRGLTGSGVKVAVLDTGISTHPDLNIRGGASFVPGEPSTQDGNGHGTHVAGTIAALNNSIGVLGVAPSAELYAVKVLGASGSGSVSSIAQGLEWAGNNGMHVANLSLGSPSPSATLEQAVNSATSRGVLVVAASGNSGAGSISYPARYANAMAVGATDQNNNRASFSQYGAGLDIVAPGVNVQSTYPGSTYASLNGTSMATPHVAGAAALVKQKNPSWSNVQIRNHLRNTATSLGSTNLYGSGLVNAEAATR

SEQ ID NO: 52516 - protein, 269 aa, Unidentified
AQSVPWGISRVQAPAAHNRGLTGSGVKVAVLDTGISTHPDLNIRGGASFVPGEPSTQDGNGHGTHVAGTIAALNNSIGVLGMAPSAELYAVKVLGASGSGSVSSIAQGLEWAGNNGMHVANLSLGSPSPSATLEQAVNSATSRGVLVVAASGNSGAGSISYPARYANAMAVGATDQNNNRASFSQYGAGLDIVAPGVNVQSTYPGSTYASLNGTSMATPHVAGAAALVKQKNPSWSNVQIRNHLKNTATSLGSTNLYGSGLVNAEAATR

SEQ ID NO: 52517 - protein, 269 aa, Unidentified
AQSVPWGISRVQAPAAHNRGLTGSGVKVAVLDTGISTHPDLNIRGGASFVPGEPSTQDGNGHGTHVAGTIAALNNSIGVLGVAPSAELYAVKVLGASGSGSVSSIAQGLEWAGNNGMHVANLSLGSPSPSATLEQAVNSATSRGVLVVAASGNSGAGSISYPARYANAMAVGATDQNNNRASFSQYGAGLDIVAPGVNVQSTYPGSTYASLNGTSMATPHVAGAAALVKQKNPSWSNVQIRVHLKNTATSLGSTNLYGSGLVNAEAATR

SEQ ID NO: 52518 - protein, 269 aa, Unidentified
AQSVPWGISRVQAPAAHNRGLTGSGVKVAVLDTGISTHPDLNIRGGASFVPGEPSTQDGNGHGTHVAGTIAALNNSIGVLGVAPSAELYAVKVLGASGSGSVSSIAQGLEWAGNNGMHVANLSLGSPSPSATLEQAVNSATSRGVLVVAASGNSGAGSISYPARYANAMAVGATDQNNNRASFSQYGAGLDIVAPGVNVISTYPGSTYASLNGTSMATPHVAGAAALVKQKNPSWSNVQIRNHLKNTATSLGSTNLYGSGLVNAEAATR

SEQ ID NO: 52519 - protein, 269 aa, Unidentified
AQSVPWGISRVQAPAAHNRGLTGSGVKVAVLDTGISTHPDLNIRGGASFVPGEPSTQDGNGHGTHVPGTIAALNNSIGVLGVAPSAELYAVKVLGASGSGSVSSIAQGLEWAGNNGMHVANLSLGSPSPSATLEQAVNSATSRGVLVVAASGNSGAGSISYPARYANAMAVGATDQNNNRASFSQYGAGLDIVAPGVNVQSTYPGSTYASLNGTSMATPHVAGAAALVKQKNPSWSNVQIRNHLKNTATSLGSTNLYGSGLVNAEAATR

SEQ ID NO: 52520 - protein, 269 aa, Unidentified
AQSVPWGISRVQAPAAHNRGLTGSGVKVAVLDTGISTHPDLNIRGGASFVPGEPSTQDGNGHGTHVAGTIAALNNSIGVLGVAPSAELYAVKVLGASGSGSVSSIAQGLEWAGNNGMHVANLSLGSPSPSATLEQAVNSATSRGVLVVAASGNSGAGSISYPARYANAMAVGATDQNNNRASFSQYGAGLDIVAPGVNVQSTYPGSTYASLNGTSMATPHVAGAAALVKQKNPSWSNVQIRNHLKNTATSLGSTNLYGSGLVNAEASTR

SEQ ID NO: 52521 - protein, 269 aa, Unidentified
AQSVPWGISRVQAPAAHNRGLTGSGVKVAVLDTGISTHPDLNIRGGASFVPGEPSTQDGNGHGTHVAGTIAALNNSIGVLGVAPSAELYAVKVLGASGSGSVSSIAQGLEWAGNNGMHVANLSLGSPSPSATLEQAVNSATSRGVLVVAASGNSGAGSISYPARYANAMAVGATDQNNNRASFSQYGAGLDIVAPGVNVQSTYPGSTYASLNGTSMATPHVAGAAALVKQKNPSWSNVQIRNHLKNTATSLGSVNLYGSGLVNAEAATR

SEQ ID NO: 52522 - protein, 269 aa, Unidentified
AQTVPWGISRVQAPAAHNRGLTGSGVKVAVLDTGISTHPDLNIRGGASFVPGEPSTQDGNGHGTHVAGTIAALNNSIGVLGVAPSAELYAVKVLGASGSGSVSSIAQGLEWAGNNGMHVANLSLGSPSPSATLEQAVNSATSRGVLVVAASGNSGAGSISYPARYANAMAVGATDQNNNRASFSQYGAGLDIVAPGVNVQSTYPGSTYASLNGTSMATPHVAGAAALVKQKNPSWSNVQIRNHLKNTATSLGSTNLYGSGLVNAEAATR

SEQ ID NO: 52523 - protein, 269 aa, Bacillus sp.
AQSVPWGISRVQAPAAHNRGLTGSGVKVAVLDTGISTHPDLNIRGGASFVPGEPSTQDGNGHGTHVAGTIAALNNSIGVLGVAPNAELYAVKVLGASGSGSVSSIAQGLEWAGNNGMHVANLSLGSPSPSATLEQAVNSATSRGVLVVAASGNSGAGSIGYPARYANAMAVGATDQNNNRASFSQYGAGLDIVAPGVNVQSTYPGSTYASLNGTSSATPHVAGAAALVKQKNPSWSNVQIRNHLKNTATSLGSTNLYGSGLVNAEAATR

SEQ ID NO: 52524 - protein, 269 aa, Unidentified
AQSVPWGISRVQAPAAHNRGLTGSGVKVAVLDTGISTHPDLNIRGGASFVPGEPSTQDGNGHGTHVAGTIAALNNSIGVLGVAPSAELYAVKVLGASGSGSVSSIAQGLEWAGNNGMHVANLSLGSPSPSATLEQAVNSATSRGVLVVAASGNSGAGSISYPARYANAMAVGATDQNNNRASFSQYGAGLDIVAPGVNVQSTYPGSTYASLNGTSMATPHVAGAATLVKQKNPSWSNVQIRNHLKNTATSLGSTNLYGSGLVNAEAATR

SEQ ID NO: 52525 - protein, 269 aa, Bacillus sp.
AQSVPWGISRVQAPAAHNRGLTGSGVKVAVLDTGISTHPDLNIRGGASFVPGEPSTQDGNGHGTHVAGTIAALNNSIGVLGVAPSAELYAVKVLGASGSGSVSSIAQGLEWAGRNGMHVANLSLGSPSPSATLEQAVNSATSRGVLVVAASGNSGAGSISYPARYANAMAVGATDQNNNRASFSQYGAGLDIVAPGVNVQSTYPGSTYASLNGTSMATPHVAGAAALVKQKNPSWSNVQIRNHLKNTATSLGSTNLYGSGLVNAEAATR

SEQ ID NO: 52526 - protein, 270 aa, Unidentified
AQSVPWGISRVQAPAAHNRGLTGSGVKVAVLDTGISTHPDLNIRGGASFVPGEPSTQDGNGHGTHVAGTIAALNNSIGVLGVAPSAELYAVKVLGASEGSGSVSSIAQGLEWAGNNGMHVANLSLGSPSPSATVEQAVNSATSRGVLVVAASGNSGAGSISYPARYANAMAVGATDQNNNRASFSQYGAGLDIVAPGVNVQSTYPGSTYASLNGTSMATPHVAGAAALVKQKNPSWSNVQIRNHLKNTATSLGSTNLYGSGLVNAEAATR

SEQ ID NO: 52527 - protein, 269 aa, Unidentified
AQSVPWGISRVQAPAAHNRGLTGSGVKVAVLDTGISTHPDLNIRGGASFVPGEPSTQDGNGHGTHVAGTIAALNNSIGVLGVAPSAELYAVKVLGASGSGSVSSIAQGLEWAGNNGMHVANLSLGSPSPSATLEQAVNSATSRGVLVVAASGNSGAGSISYPARYANAMAVGATDQNNNRASFSQYGAGLDIVAPGVNVQSTYPGSTYASLNGTSMATPHVAGAAALVKQKNPSWSNVQIRNHLKNTATSLGSTNLYGSGMVNAEAATR

SEQ ID NO: 52528 - protein, 269 aa, Alkalihalobacillus clausii
AQSVPWGISRVQAPAAHNRGLTGSGVKVAVLDTGISTHPDLNIRGGASFVPGEPSTQDGNGHGTHVAGTIAALNNSIGVLGVAPSAELYAVKVLGASGSGSVSSIAQGLEWAGNNGMHVANLSLGSPSPSATLEQAVNSATSRGVLVVAASGNSGAGSISYPARYANAMAVGATDQNNNRASFSQYGAGLDIVAPGVNVQSTYPGSTYASLNGTSMATPHVAGAAALVKQKNPSLSNVQIRNHLKNTATSLGSTNLYGSGLVNAEAATR

SEQ ID NO: 52529 - protein, 270 aa, Unidentified
AQSVPWGISRVQAPAAHNRGLTGSGVKVAVLDTGISTHPDLNIRGGASFVPGEPSTQDGNGHGTHVAGTIAALNNSIGVLGVAPSAELYAVKVLGAXSGSGSVSSIAQGLEWAGNNGMHVANLSLGSPSPSPTLEQAVNSATSRGVLVVAASGNSGAGSISYPARYANAMAVGATDQNNNRASFSQYGAGLDIVAPGVNVQSTYPGSTYASLNGTSMATPHVAGAAALVKQKNPSWSNVQIRNHLKNTATSLGSTNLYGSGLVNAEAATR

SEQ ID NO: 52530 - protein, 269 aa, Unidentified
AQSVPWGISRVQAPAAHNRGLTGSGVKVAVLDTGISTHPDLNIRGGASFVPGEPSTQDGNGHGTHVAGTIAALNNSIGVLGVAPSARLYAVKVLGASGSGSVSSIAQGLEWAGNNGMHVANLSLGSPSPSATLEQAVNSATSRGVLVVAASGNSGAGSISYPARYANAMAVGATDQNNNRASFSQYGAGLDIVAPGVNVQSTYPGSTYASLNGTSMATPHVAGAAALVKQKNPSWSNVQIRNHLKNTATSLGSTNLYGSGLVNAEAATR

SEQ ID NO: 52531 - protein, 269 aa, Bacillus sp.
AQSVPWGISRVQAPAAHNRGLTGSGVKVAVLDTGISTHPDLNIRGGASFVPGEPSTQDGNGHGTHVAGTIAALNNSIGVLGVAPNAELYAVKVLGASGSGSVSSIAQGLEWAGNNGMHVANLSLGSPSPSATLEQAVNSATSRGVLVVAASGNSGAGSISYPARYANAMAVGATDQNNNRASFSQYGAGLDIVAPGVNVQSTYPGSTYASLNGTSIATPHVAGAAALVKQKNPSWSNVQIRNHLKNTATSLGSTNLYGSGLVNAEAATR

SEQ ID NO: 52532 - protein, 269 aa, Unidentified
AQSVPWGISRVQAPAAHNRGLTGSGVKVAVLDTGISTPPDLNIRGGASFVPGEPSTQDGNGHGTHVAGTIAALNNSIGVLGVAPSAELYAVKVLGASGSGSVSSIAQGLEWAGNNGMHVANLSLGSPSPSATLEQAVNSATSRGVLVVAASGNSGAGSISYPARYANAMAVGATDQNNNRASFSQYGAGLDIVAPGVNVQSTYPGSTYASLNGTSMATPHVAGAAALVKQKNPSWSNVQIRNHLKNTATSLGSTNLYGSGLVNAEAATR

SEQ ID NO: 52533 - protein, 269 aa, Unidentified
AQSVPWGISRVQAPAAHNRGLTGSGVKVAVLDTGISTHPDLNIRGGASFVPGEPSTQDGNGHGTHVAGTIAALNNSIGVLGVAPSAELYAVKVLGASGSGSVSSIAQGLEWAGNNGMHVANLSLGSPSPSATLEQAVNSATSRGVLVVAASGNSGAGSISYPARYANAMAVGATDQNNNRASFSQYGAGLDIVAPGVNVQSTYPGSTYNSLNGTSMATPHVAGAAALVKQKNPSWSNVQIRNHLKNTATSLGSTNLYGSGLVNAEAATR

SEQ ID NO: 52534 - protein, 269 aa, Unidentified
AQSVPWGISRVQAPAAHNRGLTGSGVKVAVLDTGISTHPDLNIRGGASFVPGEPSTQDGNGHGTHVAGTIAALNNSIGVLGVAPSAELYAVKVLGASGSGSVSSIAQGLEDAGNNGMHVANLSLGSPSPSATLEQAVNSATSRGVLVVAASGNSGAGSISYPARYANAMAVGATDQNNNRASFSQYGAGLDIVAPGVNVQSTYPGSTYASLNGTSMATPHVAGAAALVKQKNPSWSNVQIRNHLKNTATSLGSTNLYGSGLVNAEAATR

SEQ ID NO: 52535 - protein, 269 aa, Unidentified
AQSVPWGISRVQAPAAHNRGLTGSGVKVAVLDTGISTHPDLNIRGGASFVPGEPSTQDGNGHGTHVAGTIAALNNSIGVLGVAPSAELYAVKVLCASGSGSVSSIAQGLEWAGNNGMHVANLSLGSPSPSATLEQAVNSATSRGVLVVAASGNSGAGSISYPARYANAMAVGATDQNNNRASFSQYGAGLDIVAPGVNVQSTYPGSTYASLNGTSMATPHVAGAAALVKQKNPSWSNVQIRNHLKNTATSLGSTNLYGSGLVNAEAATR

SEQ ID NO: 52536 - protein, 269 aa, Unidentified
AQSVPWGISRVQAPAAHNRGLTGSGVKVAVLDTGISTHPDLNIRGGASFVPGEPSTQRGNGHGTHVAGTIAALNNSIGVLGVAPSAELYAVKVLGASGSGSVSSIAQGLEWAGNNGMHVANLSLGSPSPSATLEQAVNSATSRGVLVVAASGNSGAGSISYPARYANAMAVGATDQNNNRASFSQYGAGLDIVAPGVNVQSTYPGSTYASLNGTSMATPHVAGAAALVKQKNPSWSNVQIRNHLKNTATSLGSTNLYGSGLVNAEAATR

SEQ ID NO: 52537 - protein, 269 aa, Unidentified
AQSVPWGISRVQAPAAHNRGLTGSGVKVAVLDTGISTHPDLNIRGGASFVPGEPSTQDGNGHGTHVAGTIAALNNSIGVLGVAPSAELYAVKVLGASGSGSDSSIAQGLEWAGNNGMHVANLSLGSPSPSATLEQAVNSATSRGVLVVAASGNSGAGSISYPARYANAMAVGATDQNNNRASFSQYGAGLDIVAPGVNVQSTYPGSTYASLNGTSMATPHVAGAAALVKQKNPSWSNVQIRNHLKNTATSLGSTNLYGSGLVNAEAATR

SEQ ID NO: 52538 - protein, 269 aa, Unidentified
AQSVPWGISRVQAPAAHNRGLTGSGVKVAVLDTGISTHPDLNIRGGASFVPGEPSTQDGNGHGTHVAGTIAALNNSIGVLGSAPSAELYAVKVLGASGSGSVSSIAQGLEWAGNNGMHVANLSLGSPSPSATLEQAVNSATSRGVLVVAASGNSGAGSISYPARYANAMAVGATDQNNNRASFSQYGAGLDIVAPGVNVQSTYPGSTYASLNGTSMATPHVAGAAALVKQKNPSWSNVQIRNHLKNTATSLGSTNLYGSGLVNAEAATR

SEQ ID NO: 52539 - protein, 269 aa, Unidentified
AQSVPWGISRVQAPAAHNRGLTGSGVKVAVLDTGISTHPDLNIRGGASFVPGEPSTQDGNGHGTHVAGTIAALNNSIGVLGEAPSAELYAVKVLGASGSGSVSSIAQGLEWAGNNGMHVANLSLGSPSPSATLEQAVNSATSRGVLVVAASGNSGAGSISYPARYANAMAVGATDQNNNRASFSQYGAGLDIVAPGVNVQSTYPGSTYASLNGTSMATPHVAGAAALVKQKNPSWSNVQIRNHLKNTATSLGSTNLYGSGLVNAEAATR

SEQ ID NO: 52540 - protein, 270 aa, Unidentified
AQSVPWGISRVQAPAAHNRGLTGSGVKVAVLDTGISTHPDLNIRGGASFVPGEPSTQDGNGHGTHVAGTIAALNNSIGVLGVAPSAELYAVKVLGASGXSGSVSSIAQGLEWAGNNGMHVANLSLGSPSPSATLEQAVNSATSRGVLVVAASGNSGAGSISYPARYANAMAVGATDQNNNRASFSQYGPGLDIVAPGVNVQSTYPGSTYASLNGTSMATPHVAGAAALVKQKNPSWSNVQIRNHLKNTATSLGSTNLYGSGLVNAEAATR

SEQ ID NO: 52541 - protein, 269 aa, Unidentified
AQSVPWGISRVQAPAAHNRGLTGSGVKVAVLDTGISTHPDLNIRGGASFVPGEPSTQDGNGHGTHVAGTIAALNNSIGVLGVAPSAELYAVKVLGASGSGSVSSIAQGLEWAGNNGMHVANLSLGSPSPSATLEQAVNSATSRGVLVVAASGNSGAGSISYPARYANAMAVGATDQNNNRASFSQYGAGLDIVAPGVNVQSTYPGSTYASLNGTSMATPHVAGAAALVKQKNPSWSNVQIRNHLKNTATSNGSTNLYGSGLVNAEAATR

SEQ ID NO: 52542 - protein, 269 aa, Bacillus sp.
AQSVPWGISRVQAPAAHNRGLTGSGVKVAVLDTGISTHPDLNIRGGASFVPGEPSTQDGNGHGTHVAGTIAALNNSIGVLGVAPNAELYAVKVLGASGSGSVSSIAQGLEWAGNNGMHVANLSLGSPSPSATLEQAVNSATSRGVLVVAASGNSGAGSISYPARYANAMAVGATDQNNNRASFSQYGAGLDIVAPGVNVQSTYPGSTYASLNGTSNATPHVAGAAALVKQKNPSWSNVQIRNHLKNTATSLGSTNLYGSGLVNAEAATR

SEQ ID NO: 52543 - protein, 269 aa, Unidentified
AQSVPWGISRVQAPAAHNRGLTGSGVKVAVLDTGISTHPDLNIRGGASFVPGEPSTQDGNGHGTHVAGTIAALNNSIGVLGVAPSAELYAVKVLGASGSGSVSSIAQGLEWAGNNGMHVANLSLGSPSPSATLEQAVNSATSRGVLVVAASGNSGAGSISYPARYANAMAVGATDQNNNRASFSQYGAGLDIVAPGVNVQSTYPGSTYASLNGTSMATPHVAGAAALVKQKNPSWSNVQVRNHLKNTATSLGSTNLYGSGLVNAEAATR

SEQ ID NO: 52544 - protein, 269 aa, Unidentified
AQSVPWGISRVQAPAAHNRGLTGSGVKVAVLDTGISTHPDLNIRGGASFVPGEPSTQDGNGHGTHVAGTIAALNNSIGVLGVAPSAELYAVKVLGASGSGSVSSIAQGLEWAGNNVMHVANLSLGSPSPSATLEQAVNSATSRGVLVVAASGNSGAGSISYPARYANAMAVGATDQNNNRASFSQYGAGLDIVAPGVNVQSTYPGSTYASLNGTSMATPHVAGAAALVKQKNPSWSNVQIRNHLKNTATSLGSTNLYGSGLVNAEAATR

SEQ ID NO: 52545 - protein, 269 aa, Unidentified
AQSVPWGISRVQAPAAHNRGLTGSGVKVAVLDTGISTHPDLNIRGGASFVPGEPSTQDGNGHGTHVAGTIAALNNSIGVLGVAPSAELYAVKVLGASGSGSVSSIAQGLEWAGNNGMHVANLSLGSPSPSATLEQAVNSATSRGVLGVAASGNSGAGSISYPARYANAMAVGATDQNNNRASFSQYGAGLDIVAPGVNVQSTYPGSTYASLNGTSMATPHVAGAAALVKQKNPSWSNVQIRNHLKNTATSLGSTNLYGSGLVNAEAATR

SEQ ID NO: 52546 - protein, 269 aa, Unidentified
AQSVPWGISRVQAPAAHNRGLTGSGVKVAVLDTGISTHPDLNIRGGASFVPGEPSTQDGNGHGTHVAGTIAALNNSIGVLGVAPSAELYAVKVLGASGSGSVSSIAQGLEWAGNNGMHVANLSLGSPSPSATLEQAVNSATSRGVLVVAASGNSGAGSISYPARYANAMAVGATDQNNNRASFSQYGAGLDIVAPGVNVQSTYPGSTYASLNGTSMATPHVAGAAALVKQKNPSWSNVQIRNHLKNTATSLGHTNLYGSGLVNAEAATR

SEQ ID NO: 52547 - protein, 269 aa, Unidentified
AQSVPWGISRVHAPAAHNRGLTGSGVKVAVLDTGISTHPDLNIRGGASFVPGEPSTQDGNGHGTHVAGTIAALNNSIGVLGVAPSAELYAVKVLGASGSGSVSSIAQGLEWAGNNGMHVANLSLGSPSPSATLEQAVNSATSRGVLVVAASGNSGAGSISYPARYANAMAVGATDQNNNRASFSQYGAGLDIVAPGVNVQSTYPGSTYASLNGTSMATPHVAGAAALVKQKNPSWSNVQIRNHLKNTATSLGSTNLYGSGLVNAEAATR

SEQ ID NO: 52548 - protein, 269 aa, Unidentified
AQSVPWGISRVQAPAAHNRGLTGSGVKVAVLDTGISTHPDLNIRGGASFVPGEPSTQDGNGHGTHVAGTIAALNNSIGVLGVAPSAEIYAVKVLGASGSGSVSSIAQGLEWAGNNGMHVANLSLGSPSPSATLEQAVNSATSRGVLVVAASGNSGAGSISYPARYANAMAVGATDQNNNRASFSQYGAGLDIVAPGVNVQSTYPGSTYASLNGTSMATPHVAGAAALVKQKNPSWSNVQIRNHLKNTATSLGSTNLYGSGLVNAEAATR

SEQ ID NO: 52549 - protein, 271 aa, Unidentified
AQSVPWGISRVQAPAAHNRGLTGSGVKVAVLDTGISTHPDLNIRGGASFVPGEPSTQDGNGHGTHVAGTIAALNNSIGVLGVAPSAELYAVKVLEATXSGSGSVSSIAQGLEWAGNNGMHVANLSLGSPSPSATLEQAVNSATSRGVLVVAASGNSGAGSISYPARYANAMAVGATDQNNNRASFSQYGAGLDIVAPGVNVQSTYPGSTYASLNGTSMATPHVAGAAALVKQKNPSWSNVQIRNHLKNTATSLGSTNLYGSGLVNAEAATR

SEQ ID NO: 52550 - protein, 269 aa, Unidentified
AQSVPWGISRVQAPAAHNRGLTGSGVKVAVLDTGISTHPDLNIRGGASFVPGEPSTQDGNGHGTHVAGTIAALNNSIGVLGVAPSAYLYAVKVLGASGSGSVSSIAQGLEWAGNNGMHVANLSLGSPSPSATLEQAVNSATSRGVLVVAASGNSGAGSISYPARYANAMAVGATDQNNNRASFSQYGAGLDIVAPGVNVQSTYPGSTYASLNGTSMATPHVAGAAALVKQKNPSWSNVQIRNHLKNTATSLGSTNLYGSGLVNAEAATR

SEQ ID NO: 52551 - protein, 269 aa, Unidentified
AQSVPWGISRVQAPAAHNRGLTGSGVKVAVLDTGISTHPDLNIRGGASFVPGEPSTQDGNGHGTHVAGTIAALNNSIGVLGVAPSAELYAVKVLGASGSGSVSSIAQGLEWAGNNGMHVANLSLGSPSPSATLEQAVNSATSRGVLVVAASGNSGAGSIXYPARYANAMAVGATDQNNNRASFSQYGAGLDIVAPGVNVQSTYPGSTYASLNGTSMATPHVAGAAALVKQKNPSWSNVQIRNHLKNTATSLGSTNLYGSGLVNAEAATR

SEQ ID NO: 52552 - protein, 269 aa, Unidentified
AQSVPWGISRVQAPAAHNRGLTGSGVKVAVLDTGISTHPDLNIRGGASFVPGEPSTQDGNGHGTHVAGTIAALNNSIGVLGYAPSAELYAVKVLGASGSGSVSSIAQGLEWAGNNGMHVANLSLGSPSPSATLEQAVNSATSRGVLVVAASGNSGAGSISYPARYANAMAVGATDQNNNRASFSQYGAGLDIVAPGVNVQSTYPGSTYASLNGTSMATPHVAGAAALVKQKNPSWSNVQIRNHLKNTATSLGSTNLYGSGLVNAEAATR

SEQ ID NO: 52553 - protein, 269 aa, Unidentified
AQSVPWGISRVQAPAAHNRGLTGSGVKVAVLDTGISTHPDLNIRGGASFVPGEPSTQDGNGHGTHVAGTIAALNNSIGVLGVAPSAELMAVKVLGASGSGSVSSIAQGLEWAGNNGMHVANLSLGSPSPSATLEQAVNSATSRGVLVVAASGNSGAGSISYPARYANAMAVGATDQNNNRASFSQYGAGLDIVAPGVNVQSTYPGSTYASLNGTSMATPHVAGAAALVKQKNPSWSNVQIRNHLKNTATSLGSTNLYGSGLVNAEAATR

SEQ ID NO: 52554 - protein, 269 aa, Unidentified
AQSVPWGISRVQAPAAHNRGLTGSGVKVAVLDTGISTHPDLNIRGGASFVPGEPSTQDGNGHGTHVAGTIAALNNKIGVLGVAPSAELYAVKVLGASGSGSVSSIAQGLEWAGNNGMHVANLSLGSPSPSATLEQAVNSATSRGVLVVAASGNSGAGSISYPARYANAMAVGATDQNNNRASFSQYGAGLDIVAPGVNVQSTYPGSTYASLNGTSMATPHVAGAAALVKQKNPSWSNVQIRNHLKNTATSLGSTNLYGSGLVNAEAATR

SEQ ID NO: 52555 - protein, 269 aa, Unidentified
AQSVPWGISRVQAPAAHNRGLTGSGVKVAVLDTGISTHPDLNIRGGASFVPGEPSTQDGNGHGTHVAGTIAALNNSIGVLGVAPSAELYAVKVLGASGSGSVSSIAQGLEWAGNNGMHVANLSLGSPSPSATLEQAVNSATSRGVLVVAASGNSGAGSISYPARYANAMAVGATDQNNNRASFSQYGAGLDIVAPGVNVQSTWPGSTYASLNGTSMATPHVAGAAALVKQKNPSWSNVQIRNHLKNTATSLGSTNLYGSGLVNAEAATR

SEQ ID NO: 52556 - protein, 269 aa, Unidentified
AQSVPWGISRVQAPAAHNRGLTGSGVKVAVLDTGISTHPDLNIRGGASFVPGEPSTQDGNGHGTHVAGTIAALNNSIGVLGVAPSAELYAVKVLGASGSGSVSSIAQGLEWAGNNGMHVANLSLGSPSPSATLEQAVNSATSRGVLVVAASGNSGAGSISYPARYANAMAVGATDENNNRASFSQYGAGLDIVAPGVNVQSTYPGSTYASLNGTSMATPHVAGAAALVKQKNPSWSNVQIRNHLKNTATSLGSTNLYGSGLVNAEAATR

SEQ ID NO: 52557 - protein, 269 aa, Unidentified
AQSVPWGISRVQAPAAHNRGLTGSGVKVAVLDTGISTHPDLNIRGGASFVPGEPSTQDGNGHGTHVAGTIAALNNSIGVLGVAPSAELYAVKVLGASGSGSVSSIAQGLEWAGNNGMHVANLSLGSPSPSATLEQAVNSATSRGVLVVAASGNSGAGSISYPARYANAMAVGATDQNNNRASFSQYGAGLDIVAPGVNVQSTYPGSTYASLNGTSMATPHVAGAALLVKQKNPSWSNVQIRNHLKNTATSLGSTNLYGSGLVNAEAATR

SEQ ID NO: 52558 - protein, 269 aa, Unidentified
AQSVPWGISRVQAPAAHNRGLTGSGVKVAVLDTGISTHPDLNIRGGASFVPGEPSTQDGNGHGTHVAGTIAALNNSIGVLGVAPMAELYAVKVLGASGSGSVSSIAQGLEWAGNNGMHVANLSLGSPSPSATLEQAVNSATSRGVLVVAASGNSGAGSISYPARYANAMAVGATDQNNNRASFSQYGAGLDIVAPGVNVQSTYPGSTYASLNGTSMATPHVAGAAALVKQKNPSWSNVQIRNHLKNTATSLGSTNLYGSGLVNAEAATR

SEQ ID NO: 52559 - protein, 269 aa, Unidentified
AQSVPWGISRVQAPAAHNRGLTGSGVKVAVLDTGISTHPDLNIRGGASFVPGEPSTQDGNGHGTHVAGTIAALNNSIGVLGVAPSAELLAVKVLGASGSGSVSSIAQGLEWAGNNGMHVANLSLGSPSPSATLEQAVNSATSRGVLVVAASGNSGAGSISYPARYANAMAVGATDQNNNRASFSQYGAGLDIVAPGVNVQSTYPGSTYASLNGTSMATPHVAGAAALVKQKNPSWSNVQIRNHLKNTATSLGSTNLYGSGLVNAEAATR

SEQ ID NO: 52560 - protein, 269 aa, Unidentified
AQSVPWGISRVQAPAAHNRGLTGSGVKVAVLDTGISTHPDLNIRGGASFVPGEPSTQDGNGHGTHVAGTIAALNNSIGVLGVAPSAELYAVKVLGASGSGSVSSIAQGLEWAGNNGMHVANLSLGSPSPSATLEQAVNSATSRGVLVVAASGNSGAGSISYPARYANAMAVGATDQNNQRASFSQYGAGLDIVAPGVNVQSTYPGSTYASLNGTSMATPHVAGAAALVKQKNPSWSNVQIRNHLKNTATSLGSTNLYGSGLVNAEAATR

SEQ ID NO: 52561 - protein, 269 aa, Unidentified
AQSVPWGISRVQAPAAHNRGLTGSGVKVAVLDTGISTHPDLNIRGGASFVPGEPSTQDGNGHGTHVAGTIAALNNSIGVLGVAPSAELYAVKVLGASGSGSVSSIAQGLEWAGNNGMHVANLSLGSPSPSATLEQAVNSATSRGVLVVAASGNSGAGSISYPARYANAMAVGATDQNNNRASFSQYGAGLDIVAPGVNVQSTYPGSTYASLNGTSMATPHVAGAAALVKQKNPSWSNVQIRNHLKNTQTSLGSTNLYGSGLVNAEAATR

SEQ ID NO: 52562 - protein, 270 aa, Unidentified
AQSVPWGISRVQAPAAHNRGLTGSGVKVAVLDTGISTHPDLNIRGGASFVPGEPSTQDGAGHGTHVAGTIAALNNSIGVLGVAPSAELYAVKVLGASEGSGSVSSIAQGLEWAGNNGMHVANLSLGSPSPSATLEQAVNSATSRGVLVVAASGNSGAGSISYPARYANAMAVGATDQNNNRASFSQYGAGLDIVAPGVNVQSTYPGSTYASLNGTSMATPHVAGAAALVKQKNPSWSNVQIRNHLKNTATSLGSTNLYGSGLVNAEAATR

SEQ ID NO: 52563 - protein, 269 aa, Unidentified
AQSVPWGISRVQAKAAHNRGLTGSGVKVAVLDTGISTHPDLNIRGGASFVPGEPSTQDGNGHGTHVAGTIAALNNSIGVLGVAPSAELYAVKVLGASGSGSVSSIAQGLEWAGNNGMHVANLSLGSPSPSATLEQAVNSATSRGVLVVAASGNSGAGSISYPARYANAMAVGATDQNNNRASFSQYGAGLDIVAPGVNVQSTYPGSTYASLNGTSMATPHVAGAAALVKQKNPSWSNVQIRNHLKNTATSLGSTNLYGSGLVNAEAATR

SEQ ID NO: 52564 - protein, 269 aa, Unidentified
AQSVPWGISRVQAPAAHNRGLTGSGVKVAVLDTGISTHPDLNIRGGASFVPGEPSTQDGNGHGTHVAGTIAALNNSIGVLGQAPSAELYAVKVLGASGSGSVSSIAQGLEWAGNNGMHVANLSLGSPSPSATLEQAVNSATSRGVLVVAASGNSGAGSISYPARYANAMAVGATDQNNNRASFSQYGAGLDIVAPGVNVQSTYPGSTYASLNGTSMATPHVAGAAALVKQKNPSWSNVQIRNHLKNTATSLGSTNLYGSGLVNAEAATR

SEQ ID NO: 52565 - protein, 269 aa, Unidentified
AQSVPWGISRVQAPAAHNRGLTGSGVKVAVLDTGISTHPDLNIRGGASFVPGEPSTQDGNGHGTHVAGTIAALNNSIGVLGVAPSAELDAVKVLGASGSGSVSSIAQGLEWAGNNGMHVANLSLGSPSPSATLEQAVNSATSRGVLVVAASGNSGAGSISYPARYANAMAVGATDQNNNRASFSQYGAGLDIVAPGVNVQSTYPGSTYASLNGTSMATPHVAGAAALVKQKNPSWSNVQIRNHLKNTATSLGSTNLYGSGLVNAEAATR

SEQ ID NO: 52566 - protein, 269 aa, Unidentified
AQSVPWGISRVQAPAAHNRGLTGSGVKVAVLDTGISTHPDLNIRGGASFVPGEPSTQDGNGHGTHVAGTIAALNNSIGVLGVAPSAELYAVKVLGASGSGSVSSIAQGLEWAGNNGMHVANLSLGSPSPSATLEQAVNSATSRGVLVVAASGNSGAGSISYPARYANAMAVGATDQNNNRASFSQYGAGLDIVAPGVNVQSTYPGSTYASLNGTSMATPHVAGAAALVKQKNPSWSNVQIHNHLKNTATSLGSTNLYGSGLVNAEAATR

SEQ ID NO: 52567 - protein, 269 aa, Unidentified
AQSVPWGISRVQAPAAHNRGLTGSGVKVAVLDTGISTHPDLNIRGGASFVPGEPSTQDGNGHGTHVAGTIAALNNSIGVLGVAPSAELYAVKVLGASGSGSVSSIAQGLEWAGNNGMHVANLSLGSPSPSATLEQAVNSATSRGVLVVAASGNSGAGSISYPARYANAMAVGATDQNNNRASFSQYGAGLDIVAPGVNVQSTYPGSTYASLNGTSMATPHVAGAAALVKQKNPSRSNVQIRNHLKNTATSLGSTNLYGSGLVNAEAATR

SEQ ID NO: 52568 - protein, 269 aa, Bacillus lentus
AQSVPWGISRVQAPAAHNRGLTGSGVKVAVLDTGISTHPDLNIRGGASFVPGEPSTQDGNGHGTHVAGTIAALNNSIGVLGVAPSAELYAVKVLGASGSGSVSSIAQGLEWAGNNGMHVANLSLGSPSPSATLEQAVNSATSRGVLVVAASGNSGAGSISYPARIANAMAVGATDQNNNRASFSQYGAGLDIVAPGVNVQSTYPGSTYASLNGTSMATPHVAGAAALVKQKNPSWSNVQIRNHLKNTATSLGSTNLYGSGLVNAEAATR

SEQ ID NO: 52569 - protein, 269 aa, Unidentified
AQSVPWGISRVEAPAAHNRGLTGSGVKVAVLDTGISTHPDLNIRGGASFVPGEPSTQDGNGHGTHVAGTIAALNNSIGVLGVAPSAELYAVKVLGASGSGSVSSIAQGLEWAGNNGMHVANLSLGSPSPSATLEQAVNSATSRGVLVVAASGNSGAGSISYPARYANAMAVGATDQNNNRASFSQYGAGLDIVAPGVNVQSTYPGSTYASLNGTSMATPHVAGAAALVKQKNPSWSNVQIRNHLKNTATSLGSTNLYGSGLVNAEAATR

SEQ ID NO: 52570 - protein, 268 aa, Bacillus alkalophilus
QSVPWGISRVQAPAAHNRGLTGSGVKVAVLDTGISTHPDLNIRGGASFVPGEPSTQDGNGHGTHVAGTIAALNNSIGVLGVAPNAELYAVKVLGASGSGSVSSIAQGLEWAGNNGMHVANLSLGSPSPSATLEQAVNSATSRGVLVVAASGNSGAGSISYPARYANAMAVGATDQNNNRASFSQYGAGLDIVAPGVNVQSTYPGSTYASLNGTSMATPHVAGAAALVKQKNPSWSNVQIRNHLKNTATSLGSTNLYGSGLVNAEAATR

SEQ ID NO: 52571 - protein, 268 aa, Unidentified
AQSVPWGISRVQAPAHNRGLAGSGVKVAVLDTGISTHPDLNIRGGASFVPGEPSTQDGNGHGTHVAGTIAALNNSIGVLGVAPSAELYAVKVLGASGSGSVSSIAQGLEWAGNNGMHVANLSLGSPSPSATLEQAVNSATSRGVLVVAASGNSGAGSISYPARYANAMAVGATDQNNNRASFSQYGAGLDIVAPGVNVQSTYPGSTYASLNGTSMATPHVAGAAALVKQKNPSWSNVQIRNHLKNTATSLGSTNLYGSGLVNAEAATR

SEQ ID NO: 52572 - protein, 268 aa, Unidentified
AQSVPWGISRVQAPAAHNRGLTGSGVKVAVLDTGISTHPDLNIRGGASFVPGEPSTQDGEGHGTHVAGTIAALNNSIGVLGVAPSAELYAVKVLGASGSGSVSSIAQGLEWAGNNGMHVANLSLGSPSPSATLEQAVNSATSRGVVVAASGNSGAGSISYPARYANAMAVGATDQNNNRASFSQYGAGLDIVAPGVNVQSTYPGSTYASLNGTSMATPHVAGAAALVKQKNPSWSNVQIRNHLKNTATSLGSTNLYGSGLVNAEAATR

SEQ ID NO: 52573 - protein, 268 aa, Unidentified
QSVPWGISRVQAPAAHNRGLRGSGVKVAVLDTGISTHPDLNIRGGASFVPGEPSTQDGNGHGTHVAGTIAALNNSIGVLGVAPSAELYAVKVLGASGSGSVSSIAQGLEWAGNNGMHVANLSLGSPSPSATLEQAVNSATSRGVLVVAASGNSGAGSISYPARYANAMAVGATDQNNNRASFSQYGAGLDIVAPGVNVQSTYPGSTYASLNGTSMATPHVAGAAALVKQKNPSWSNVQIRNHLKNTATSLGSTNLYGSGLVNAEAATR

SEQ ID NO: 52574 - protein, 268 aa, Unidentified
QSVPWGISRVQAPAAHNRGLTGSGVKVAVLDTGISTHPDLNIRGGASFVPGEPSTQDGNGHGTHVAGTIAALNNSIGVLGVAPSAELYAVKVLGASGSGSVSSIAQGLEWAGNNGMHVANLSLGSPSPSATLEQAVNSATSRGVLVVAASGNSGAGSISYPARYANAMAVGATDQNNNRASFSQYGAGLDIVAPGVNVQSTYPGSTYASLNGTSMATPHVAGAAALVKQKNPSWSNVQIRNHLKNTATSLGSTNLYGSGLVRAEAATR

SEQ ID NO: 52575 - protein, 268 aa, Unidentified
QSVPWGISRVQAPAAHNRGLTGSGVKVAVLDTGISTHPDRNIRGGASFVPGEPSTQDGNGHGTHVAGTIAALNNSIGVLGVAPSAELYAVKVLGASGSGSVSSIAQGLEWAGNNGMHVANLSLGSPSPSATLEQAVNSATSRGVLVVAASGNSGAGSISYPARYANAMAVGATDQNNNRASFSQYGAGLDIVAPGVNVQSTYPGSTYASLNGTSMATPHVAGAAALVKQKNPSWSNVQIRNHLKNTATSLGSTNLYGSGLVNAEAATR

SEQ ID NO: 52576 - protein, 268 aa, Unidentified
QSVPWGISRVQAPAAHNRGLTGSGVKVAVLDTGISTHPDLNIRGGASFVPGEPSTQDGNGHGTHVAGTIAALNNRIGVLGVAPSAELYAVKVLGASGSGSVSSIAQGLEWAGNNGMHVANLSLGSPSPSATLEQAVNSATSRGVLVVAASGNSGAGSISYPARYANAMAVGATDQNNNRASFSQYGAGLDIVAPGVNVQSTYPGSTYASLNGTSMATPHVAGAAALVKQKNPSWSNVQIRNHLKNTATSLGSTNLYGSGLVNAEAATR

SEQ ID NO: 52577 - protein, 268 aa, Unidentified
QSVPWGIARVQAPAAHNRGLTGSGVKVAVLDTGISTHPDLNIRGGASFVPGEPSTQDGNGHGTHVAGTIAALNNSIGVLGVAPSAELYAVKVLGASGSGSVSSIAQGLEWAGNNGMHVANLSLGSPSPSATLEQAVNSATSRGVLVVAASGNSGAGSISYPARYANAMAVGATDQNNNRASFSQYGAGLDIVAPGVNVQSTYPGSTYASLNGTSMATPHVAGAAALVKQKNPSWSNVQIRNHLKNTATSLGSTNLYGSGLVNAEAATR

SEQ ID NO: 52578 - protein, 268 aa, Unidentified
QSVPWGISRVQAPAAHNRRLTGSGVKVAVLDTGISTHPDLNIRGGASFVPGEPSTQDGNGHGTHVAGTIAALNNSIGVLGVAPSAELYAVKVLGASGSGSVSSIAQGLEWAGNNGMHVANLSLGSPSPSATLEQAVNSATSRGVLVVAASGNSGAGSISYPARYANAMAVGATDQNNNRASFSQYGAGLDIVAPGVNVQSTYPGSTYASLNGTSMATPHVAGAAALVKQKNPSWSNVQIRNHLKNTATSLGSTNLYGSGLVNAEAATR

SEQ ID NO: 52579 - protein, 268 aa, Unidentified
QSRPWGISRVQAPAAHNRGLTGSGVKVAVLDTGISTHPDLNIRGGASFVPGEPSTQDGNGHGTHVAGTIAALNNSIGVLGVAPSAELYAVKVLGASGSGSVSSIAQGLEWAGNNGMHVANLSLGSPSPSATLEQAVNSATSRGVLVVAASGNSGAGSISYPARYANAMAVGATDQNNNRASFSQYGAGLDIVAPGVNVQSTYPGSTYASLNGTSMATPHVAGAAALVKQKNPSWSNVQIRNHLKNTATSLGSTNLYGSGLVNAEAATR

SEQ ID NO: 52580 - protein, 268 aa, Unidentified
QSVPWGISRVQAPAAHNRGLTGSGVKVAVLDTGISTHPDLNIRGGASFVPGEPSTQDGNGHGTHVAGTIAALNNSIGVRGVAPSAELYAVKVLGASGSGSVSSIAQGLEWAGNNGMHVANLSLGSPSPSATLEQAVNSATSRGVLVVAASGNSGAGSISYPARYANAMAVGATDQNNNRASFSQYGAGLDIVAPGVNVQSTYPGSTYASLNGTSMATPHVAGAAALVKQKNPSWSNVQIRNHLKNTATSLGSTNLYGSGLVNAEAATR

SEQ ID NO: 52581 - protein, 268 aa, Unidentified
QSVPWGISRVQAPAAHNRGLTGSGVKVAVLDTGISTHPDLNIRGGASFVPGEPSTQDGNGHGTHVAGTIAALNNSIGVLGVAPSAELYAVKVLGASGSGSVSSIAQGLEWAGNNGMHVANLSLGSPSPSATLEQAVNSATSRGVLVVAASGNSGAGSISYPARYANAMAVGATDQNNNRASFSQYGAGLDIVAPGVNVQSTYPGSTYASLNGTSMATPHVAGAAALVKQKNPSWSNVQIRNRLKNTATSLGSTNLYGSGLVNAEAATR

SEQ ID NO: 52582 - protein, 268 aa, Unidentified
QSVPWGISRVQAPAAHNRGLTGSGVKVAVLDTGISTHPDLNIRGGASFVPGEPSTQDGNGHGTHVAGTIAALNNSIGVLGVAPSAELYAVKVLGASGSGSVSSIAQGLEWAGNNGMHVANLSLGSPSPSATLEQAVNSATSRGVLVVAASGNSGAGSISYPARYANAMAVGATDQNNNRASFSQYGAGLDIVAPGVNVQSTYPGFTYASLNGTSMATPHVAGAAALVKQKNPSWSNVQIRNHLKNTATSLGSTNLYGSGLVNAEAATR

SEQ ID NO: 52583 - protein, 268 aa, Unidentified
QSVPWGISRVQAPAAHNRGLTGSGVKVAVLDTGISTHPDLNIRGGASFVPGEPSTQDGNGHGTHVAGTIAALNNSIGVLGVAPSAELYAVKVLGASGSGSVSSIAQGLEWAGNNGMHVANLSLGSPSPSATLEQAVNSATSRGVLVVAASGNSGAGSISYPARYANAMAVGATDQNNNRASFSQYGAGLDIVAPGVNVQSTYPGSTYASLNGTSMATPHVAGAAALVKQKNPSWSNVQIRNHLKNTATSLGSTNLYGSGLVNALAATR

SEQ ID NO: 52584 - protein, 268 aa, Synthetic construct
QSVPWGISRVQAPAAHNRGLTGSGVKVAVLDTGISTHPDLNIRGGASFVPGEPSTQDGNGHGTHVAGTIAALNNSIGVLGVAPSAELYAVKVLGASGSGSVSSIAQGLEWAGNNGMHVANLSLGSPSPSATLEQAVNSATSRGVLVVAASGNSGAGSISYPASYANAMAVGATDQNNNRASFSQYGAGLDIVAPGVNVQSTYPGSTYASLNGTSMATPHVAGAAALVKQKNPSWSNVQIRNHLKNTATSLGSTNLYGSGLVNAEAATR

SEQ ID NO: 52585 - protein, 268 aa, Unidentified
QSVPWGISRVQAPAAHNRGLTGSGVKVAVLDTGISTHPDLNIRGGASFVPGEPSTQDGNGHGTHVAGTIAALNNSIGVLGVAPSAELYAVKVLGASGSGSVSSIAQGLEWARNNGMHVANLSLGSPSPSATLEQAVNSATSRGVLVVAASGNSGAGSISYPARYANAMAVGATDQNNNRASFSQYGAGLDIVAPGVNVQSTYPGSTYASLNGTSMATPHVAGAAALVKQKNPSWSNVQIRNHLKNTATSLGSTNLYGSGLVNAEAATR

SEQ ID NO: 52586 - protein, 268 aa, Unidentified
QSVPWGISRVQAPAAHRRGLTGSGVKVAVLDTGISTHPDLNIRGGASFVPGEPSTQDGNGHGTHVAGTIAALNNSIGVLGVAPSAELYAVKVLGASGSGSVSSIAQGLEWAGNNGMHVANLSLGSPSPSATLEQAVNSATSRGVLVVAASGNSGAGSISYPARYANAMAVGATDQNNNRASFSQYGAGLDIVAPGVNVQSTYPGSTYASLNGTSMATPHVAGAAALVKQKNPSWSNVQIRNHLKNTATSLGSTNLYGSGLVNAEAATR

SEQ ID NO: 52587 - protein, 268 aa, Unidentified
QSVPWGISRVQAPAAHNRGLTGSGVKVAVLDTGISTHPDLNIRGGASFVPGEPSTQDGNGHGTHVAGTIAALNNSIGVLGVAPSAELYAVKVLGASGSGSVSSIAQGLEWAGNNGMHVANLSLGSPSPSATLEQAVNSATSRGVLVVAASGNSGAGSISYPARYANAMAVGATDQNNNRASFSQYGAGLDIVAPGVNVQSTYPGSTYASLNGTSMATPHVAGAAALVKQKNPSWRNVQIRNHLKNTATSLGSTNLYGSGLVNAEAATR

SEQ ID NO: 52588 - protein, 268 aa, Unidentified
QSVPWGISRVQAPAAHNRGLTGRGVKVAVLDTGISTHPDLNIRGGASFVPGEPSTQDGNGHGTHVAGTIAALNNSIGVLGVAPSAELYAVKVLGASGSGSVSSIAQGLEWAGNNGMHVANLSLGSPSPSATLEQAVNSATSRGVLVVAASGNSGAGSISYPARYANAMAVGATDQNNNRASFSQYGAGLDIVAPGVNVQSTYPGSTYASLNGTSMATPHVAGAAALVKQKNPSWSNVQIRNHLKNTATSLGSTNLYGSGLVNAEAATR

SEQ ID NO: 52589 - protein, 268 aa, Synthetic construct
QSVPWGISRVQAPAAHNRGLTGSGVKVAVLDTGISTHPDLNINGGASFVPGEPSTQDGNGHGTHVAGTIAALNNSIGVLGVAPSAELYAVKVLGASGSGSVSSIAQGLEWAGNNGMHVANLSLGSPSPSATLEQAVNSATSRGVLVVAASGNSGAGSISYPARYANAMAVGATDQNNNRASFSQYGAGLDIVAPGVNVQSTYPGSTYASLNGTSMATPHVAGAAALVKQKNPSWSNVQIRNHLKNTATSLGSTNLYGSGLVNAEAATR

SEQ ID NO: 52590 - protein, 268 aa, Unidentified
QSVPWGISRVQAPAAHNRGLTGSGVKVAVLDTGISTHPDLNIRGGASFVPGEPSTQDGNGHGTHVAGTIAALNNSIGVLGVAPSAELYAVKVLGASGSGSVSSIAQGLEWAGNNGMHVANLSLGSPSPSATLEQAVNSATSRGVLVVAASGNSGAGSISYPARYANAMAVGATDQNNNRASFSQYGAGLDIVAPGVNVQSTYPGSTYASLNGTSMATPHVAGAAALVKQKNPSWSNRQIRNHLKNTATSLGSTNLYGSGLVNAEAATR

SEQ ID NO: 52591 - protein, 268 aa, Unidentified
QSVPWGISRVQAPAAHNRGLTGSGVKVAVLDTGISTHPDLNIRGGASFVPGEPSTQDGNGHGTHVAGTIAALNNSIGVLGVAPSAELYAVKVLGASGSGSVSSIAQGLEWAGNNGMHVANLSLGSPSPSATLEQAVNSATSRGVLVVAASGNSGAGSISYPARYANAMAVGATDQNNNRASFSQYGAGLDIVAPGVNVQSTYPGSTYASLNGTSMATPHVAGAAALVKQKNPSRSNVQIRNHLKNTATSLGSTNLYGSGLVNAEAATR

SEQ ID NO: 52592 - protein, 268 aa, Bacillus licheniformis
AEEAKEKYLIGFNEQEAVSEFVEQVEANDEVAILSEEEEVEIELLHEFETIPVLSVELSPEDVDALELDPAISYIEEDAEVTTMAQSVPWGISRVQAPAAHNRGLTGSGVKVAVLDTGISTHPDLNIRGGASFVPGEPSTQDGNGHGTHVAGTIAALNNSIGVLGVAPSAELYAVKVLGASGSGSVSSIAQGLEWAGNNGMHVANLSLGSPSPSATLEQAVNSATSRGVLVVAASGNSGAGSISYPARYANAMAVGATDQNNNRACLS

SEQ ID NO: 52593 - protein, 260 aa, Unidentified
RVQAPAAHNRGLTGSGVKVAVLDTGISTHPDLNIRGGASFVPGEPSTQDGNGHGTHVAGTIAALNNSIGVLGVAPNAELYAVKVLGASGSGSVSSIAQGLEWAGNNGMHVANLSLGSPSPSATLEQAVNSATSRGVLVVAASGNSGAGSISYPARYANAMAVGATDQNNNRASFSQYGAGLDIVAPGVNVQSTYPGSTYASLNGTSMATPHVAGAAALVKQKNPSWSNVQIRNHLKNTATSLGSTNLYGSGLVNAEAATR

SEQ ID NO: 52594 - protein, 250 aa, Unidentified
AVHNSGVKVAVLDTGISTHPDLNIRGGASFVPGEPSTQDGNGHGTHVAGTIAALNNSIGVLGVAPSAELYAVKVLGASGSGSVSSIAQGLEWAGNNGMHVANLSLGSPSPSATLEQAVNSATSRGVLVVAASGNSGAGSISYPARYANAMAVGATDQNNNRASFSQYGAGLDIVAPGVNVQSTYPGSTYASLNGTSMATPHVAGAAALVKQKNPSWSNVQIRNHLKNTATSLGSTNLYGSGLVNAEAATR

SEQ ID NO: 52595 - protein, 250 aa, Unidentified
VTGQSGVKVAVLDTGISTHPDLNIRGGASFVPGEPSTQDGNGHGTHVAGTIAALNNSIGVLGVAPSAELYAVKVLGASGSGSVSSIAQGLEWAGNNGMHVANLSLGSPSPSATLEQAVNSATSRGVLVVAASGNSGAGSISYPARYANAMAVGATDQNNNRASFSQYGAGLDIVAPGVNVQSTYPGSTYASLNGTSMATPHVAGAAALVKQKNPSWSNVQIRNHLKNTATSLGSTNLYGSGLVNAEAATR

SEQ ID NO: 52596 - protein, 250 aa, Unidentified
VTGNSGVKVAVLDTGISTHPDLNIRGGASFVPGEPSTQDGNGHGTHVAGTIAALNNSIGVLGVAPSAELYAVKVLGASGSGSVSSIAQGLEWAGNNGMHVANLSLGSPSPSATLEQAVNSATSRGVLVVAASGNSGAGSISYPARYANAMAVGATDQNNNRASFSQYGAGLDIVAPGVNVQSTYPGSTYASLNGTSMATPHVAGAAALVKQKNPSWSNVQIRNHLKNTATSLGSTNLYGSGLVNAEAATR

SEQ ID NO: 52597 - protein, 248 aa, Unidentified
THSGVKVAVLDTGISTHPDLNIRGGASFVPGEPSTQDGNGHGTHVAGTIAALNNSIGVLGVAPSAELYAVKVLGASGSGSVSSIAQGLEWAGNNGMHVANLSLGSPSPSATLEQAVNSATSRGVLVVAASGNSGAGSISYPARYANAMAVGATDQNNNRASFSQYGAGLDIVAPGVNVQSTYPGSTYASLNGTSMATPHVAGAAALVKQKNPSWSNVQIRNHLKNTATSLGSTNLYGSGLVNAEAATR

SEQ ID NO: 52598 - protein, 243 aa, Bacillus licheniformis
AEEAKEKYLIGFNEQEAVSEFVEQVEANDEVAILSEEEEVEIELLHEFETIPVLSVELSPEDVDALELDPAISYIEEDAEVTTMAQSVPWGISRVQAPAAHNRGLTGSGVKVAVLDTGISTHPDLNIRGGASFVPGEPSTQDGNGHGTHVAGTIAALNNSIGVLGVAPSAELYAVKVLGASGSGSVSSIAQGLEWAGNNGMHVANLSLGSPSPSATLEQAVNSATSRGVLVVAASGNSGAGCL

SEQ ID NO: 52599 - protein, 234 aa, Unidentified
NTHPDLNIRGGASFVPGEPSTQDGNGHGTHVAGTIAALNNSIGVLGVAPSAELYAVKVLGASGSGSVSSIAQGLEWAGNNGMHVANLSLGSPSPSATLEQAVNSATSRGVLVVAASGNSGAGSISYPARYANAMAVGATDQNNNRASFSQYGAGLDIVAPGVNVQSTYPGSTYASLNGTSMATPHVAGAAALVKQKNPSWSNVQIRNHLKNTATSLGSTNLYGSGLVNAEAATR

SEQ ID NO: 52600 - protein, 217 aa, Saccharomyces cerevisiae
AQSVPWGISRVQAPAAHNRGLTGSGVKVAVLDTGISTHPDLNIRGGASFVPGEPSTQDGNGHGTHVAGTIAALNNSIGVLGVAPSAELYAVKVLGASGSGSVSSIAQGLEWAGNNGMHVANLSLGSPSPSATLEQAVNSATSRGVLVVAASGNSGAGSISYPARYANAMAVGATDQNNNRASFSQYGAGLDIVAPGVNVQSTYPGSTYASLNGTAFA

SEQ ID NO: 52601 - protein, 217 aa, Unidentified
AQSVPWGISRVQAPAAHNRGLTGSGVKVAVLDTGISTHPDLNIRGGASFVPGEPSTQDGNGHGTHVAGTIAALNNSIGVLGVAPSAELYAVKVLGASGSGSVSSIAQGLEWAGNNGMHVANLSLGSPSPSATLEQAVNSATSRGVLVVAASGNSGAGSISYPARYANAMAVGATDQNNNRASFSQYGAGLDIVAPGVNVQSTYPGSTYASLNGTCFA

SEQ ID NO: 52602 - protein, 209 aa, Unidentified
AQSVPWGISRVQAPAAHNRGLTGSGVKVAVLDTGISTHPDLNIRGGASFVPGEPSTQDGNGHGTHVAGTIAALNNSIGVLGVAPSAELYAVKVLGASGSGSVSSIAQGLEWAGNNGMHVANLSLGSPSPSATLEQAVNSATSRGVLVVAASGNSGAGSISYPARYANAMAVGATDQNNNRASFSQYGAGLDIVAPGVNVQSTYPGSCLA

SEQ ID NO: 52603 - protein, 209 aa, Unidentified
AQSVPWGISRVQAPAAHNRGLTGSGVKVAVLDTGISTHPDLNIRGGASFVPGEPSTQDGNGHGTHVAGTIAALNNSIGVLGVAPSAELYAVKVLGASGSGSVSSIAQGLEWAGNNGMHVANLSLGSPSPSATLEQAVNSATSRGVLVVAASGNSGAGSISYPARYANAMAVGATDQNNNRASFSQYGAGLDIVAPGVNVQSTYPGSVSA

SEQ ID NO: 52604 - protein, 209 aa, Unidentified
AQSVPWGISRVQAPAAHNRGLTGSGVKVAVLDTGISTHPDLNIRGGASFVPGEPSTQDGNGHGTHVAGTIAALNNSIGVLGVAPSAELYAVKVLGASGSGSVSSIAQGLEWAGNNGMHVANLSLGSPSPSATLEQAVNSATSRGVLVVAASGNSGAGSISYPARYANAMAVGATDQNNNRASFSQYGAGLDIVAPGVNVQSTYPGSVAA

SEQ ID NO: 52605 - protein, 209 aa, Unidentified
AQSVPWGISRVQAPAAHNRGLTGSGVKVAVLDTGISTHPDLNIRGGASFVPGEPSTQDGNGHGTHVAGTIAALNNSIGVLGVAPSAELYAVKVLGASGSGSVSSIAQGLEWAGNNGMHVANLSLGSPSPSATLEQAVNSATSRGVLVVAASGNSGAGSISYPARYANAMAVGATDQNNNRASFSQYGAGLDIVAPGVNVQSTYPGSIEA

SEQ ID NO: 52606 - protein, 208 aa, Bacillus licheniformis
AQSVPWGISRVQAPAAHNRGLTGSGVKVAVLDTGISTHPDLNIRGGASFVPGEPSTQDGNGHGTHVAGTIAALNNSIGVLGVAPSAELYAVKVLGASGSGSVSSIAQGLEWAGNNGMHVANLSLGSPSPSATLEQAVNSATSRGVLVVAASGNSGAGSISYPARYANAMAVGATDQNNNRASFSQYGAGLDIVAPGVNVQSTYPGSCF

SEQ ID NO: 52607 - protein, 208 aa, Unidentified
AQSVPWGISRVQAPAAHNRGLTGSGVKVAVLDTGISTHPDLNIRGGASFVPGEPSTQDGNGHGTHVAGTIAALNNSIGVLGVAPSAELYAVKVLGASGSGSVSSIAQGLEWAGNNGMHVANLSLGSPSPSATLEQAVNSATSRGVLVVAASGNSGAGSISYPARYANAMAVGATDQNNNRASFSQYGAGLDIVAPGVNVQSTYPGALY

SEQ ID NO: 52608 - protein, 295 aa, Unidentified
AEEAKEKYLIGFNEQEAVSEFVEQVEANDEVAILSEEEEVEIELLHEFETIPVLSVELSPEDVDALELDPAISYIEEDAEVTTMAQSVPWGISRVQAPAAHNRGLTGSGVKVAVLDTGISTHPDLNIRGGASFVPGEPSTQDGNGHGTHVAGTIAALNNSIGVLGVAPSAELYAVKVLGASGSGSVSSIAQGLEWAGNNGMHVANLSLGSPSPSATLEQAVNSATSRGVLVVAASGNSGAGSISYPARYANAMAVGATDQNNNRASFSQYGAGLDIVAPGVNVQSTYPGCLANGT

SEQ ID NO: 52609 - protein, 294 aa, Unidentified
AEEAKEKYLIGFNEQEAVSEFVEQVEANDEVAILSEEEEVEIELLHEFETIPVLSVELSPEDVDALELDPAISYIEEDAEVTTMAQSVPWGISRVQAPAAHNRGLTGSGVKVAVLDTGISTHPDLNIRGGASFVPGEPSTQDGNGHGTHVAGTIAALNNSIGVLGVAPSAELYAVKVLGASGSGSVSSIAQGLEWAGNNGMHVANLSLGSPSPSATLEQAVNSATSRGVLVVAASGNSGAGSISYPARYANAMAVGATDQNNNRASFSQYGAGLDIVAPGVNVQSTYPGCLPAS

SEQ ID NO: 52610 - protein, 294 aa, Unidentified
AEEAKEKYLIGFNEQEAVSEFVEQVEANDEVAILSEEEEVEIELLHEFETIPVLSVELSPEDVDALELDPAISYIEEDAEVTTMAQSVPWGISRVQAPAAHNRGLTGSGVKVAVLDTGISTHPDLNIRGGASFVPGEPSTQDGNGHGTHVAGTIAALNNSIGVLGVAPSAELYAVKVLGASGSGSVSSIAQGLEWAGNNGMHVANLSLGSPSPSATLEQAVNSATSRGVLVVAASGNSGAGSISYPARYANAMAVGATDQNNNRASFSQYGAGLDIVAPGVNVQSTYPGSLACS

SEQ ID NO: 52611 - protein, 293 aa, Unidentified
AEEAKEKYLIGFNEQEAVSEFVEQVEANDEVAILSEEEEVEIELLHEFETIPVLSVELSPEDVDALELDPAISYIEEDAEVTTMAQSVPWGISRVQAPAAHNRGLTGSGVKVAVLDTGISTHPDLNIRGGASFVPGEPSTQDGNGHGTHVAGTIAALNNSIGVLGVAPSAELYAVKVLGASGSGSVSSIAQGLEWAGNNGMHVANLSLGSPSPSATLEQAVNSATSRGVLVVAASGNSGAGSISYPARYANAMAVGATDQNNNRASFSQYGAGLDIVAPGVNVQSTYPGCVTA

SEQ ID NO: 52612 - protein, 184 aa, Bacillus licheniformis
AQSVPWGISRVQAPAAHNRGLTGSGVKVAVLDTGISTHPDLNIRGGASFVPGEPSTQDGNGHGTHVAGTIAALNNSIGVLGVAPSAELYAVKVLGASGSGSVSSIAQGLEWAGNNGMHVANLSLGSPSPSATLEQAVNSATSRGVLVVAASGNSGAGSISYPARYANAMAVGATDQNNNRACLS

SEQ ID NO: 52613 - protein, 274 aa, Bacillus licheniformis
AQTVPYGIPLIKADKVQAQGYKGANVKVAVLDTGIQASHPDLNVVGGASFVAGEAYNTDGNGHGTHVAGTVAALDNTTGVLGVAPNVSLYAVKVLNSSGSGSYSGIVSGIEWATTNGMDVINMSLGGASGSTAMKQAVDNAYARGVVVVAAAGNSGSSGNTNTIGYPAKYDSVIAVGAVDSNSNRASFSSVGAELEVMAPGAGVYSTYPTSTYATLNGTSMASPHVAGAAALILSKHPNLSASQVRNRLSSTATYLGSSFYYGKGLINVEAAAQ

SEQ ID NO: 52614 - protein, 274 aa, Bacillus licheniformis
AQVVPYGIPLIKADKVQAQGFKGANVKVAVLDTGIQASHPDLNVVGGASFVAGEAYNTDGNGHGTHVAGTVAALDNTTGVLGVAPSVSLYAVKVLNSSGSGSYSGIVSGIEWATTNGMDVINMSLGGQSGSTAMKQAVDNAYARGVVVVAAAGNSGSSGNTNTIGYPAKYDSVIAVGAVDSESNRASFSSVGAELEVMAPGAGVYSTYPTNTYATLNGTSMASPHVAGAAALILSKHPNLSASQVRNRLSSTATYLGSSFYYGKGLINVEAAAQ

SEQ ID NO: 52615 - protein, 274 aa, Bacillus licheniformis
AQTVPYGIPLIKADKVQAQGFKGANVKVAVLDTGIQASHPDLNVVGGASFVAGEAYNTDGNGHGTHVAGTVAALDNTTGVLGVAPSVSLYAVKVLNSSGSGSYSGIVSGIEWATTNGMDVINMSLGTASGSTAMKQAVDNAYARGVVVVAAAGNSGSSGNTNTISYPAKYDSVIAVGAVDSNSNRASFSSVGAELEVMAPGAGVYSTYPENTYATLNGTSMASPHVAGAAALILSKHPNLSASQVRNRLSSTATYLGSSFYYGKGLINVEAAAQ

SEQ ID NO: 52616 - protein, 274 aa, Bacillus licheniformis
AQTVPYGIPLIKADKVQAQGFKGANVKVAVLDTGIQASHPDLNVVGGASFVAGEAYNTDGNGHGTHVAGTVAALDNTTGVLGVAPSVSLYAVKVLNSSGSGSYSGIVSGIEWATTNGMDVINMSLGGQSGSTAMKQAVDNAYARGVVVVAAAGNSGSSGNTNTIGYPAKYDSVIAVGAVDSNSNQASFSSVGAELEVMAPGAGVYSTYPTNTYATLNGTSMASPHVAGAAALILSKHPNLSASQVRNRLSSTATYLGSPFYYGKGLINVEAAAQ

SEQ ID NO: 52617 - protein, 274 aa, Bacillus licheniformis
AQTVPYGIPLIKADKVQAQGFKGANVKVAVLDTGIQASHPDLNVVGGASFVAGEAYNTDGNGHGTHVAGTVAALDNTTGVLGVAPSVSLYAVKVLNSSGSGSYSGIVSGIEWATTNGMDVINISLGGASGSTAMKQAVDNAYARGVVVVAAAGNSGSSGNTNTISYPAKYDSVIAVGAVDSNSNRASFSSVGAELEVMAPGAGVYSTYPTNTYATLNGTSMASPHVAGAAALILSKHPSLSASQVRNRLSSTATYLGSSFYYGKGLINVEAAAQ

SEQ ID NO: 52618 - protein, 274 aa, Bacillus licheniformis
AQTVPYGIPLIKADKVQAQGFKGANVKVAVLDTGIQASHPDLNVVGGASFVAGEAYNTDGNGHGTHVAGTVAALDNTTGVLGVAPSVSLYAVKVLNSSGSGSYSGIVSGIEWATTNGMDVINMSLGGASGSTAMKRAVDNAYARGVVVVAAAGNSGSSGNTNTIQYPAKYDSVIAVGAVDSNSNRASFSSVGAELEVMAPGAGVYSTYPTNTYATLNGTSMASPHVAGAAALILSKHPNLSASQVRNRLSSTATYLGESFYYGKGLINVEAAAQ

SEQ ID NO: 52619 - protein, 274 aa, Bacillus licheniformis
AQVVPYGIPLIKADKVQAQGFKGANVKVAVLDTGIQASHPDLNVVGGASFVAGEAYNTDGNGHGTHVAGTVAALDNTNGVLGVAPSVSLYAVKVLNSSGSGSYSGIVSGIEWATTNGMDVINMILGGASGSTAMKQAVDNAYARGVVVVAAAGNSGSSGNTNTIGYPAKYDSVIAVGAVDSNSNRASFSSVGAELEVMAPGAGVYSTYPTNTYATLNGTSMASPHVAGAAALILSKHPNLSASQVRNRLSSTATYLGSSFYYGKGLINVEAAAQ

SEQ ID NO: 52620 - protein, 274 aa, Bacillus licheniformis
AQVVPYGIPLIKADKVQAQGFKGANVKVAVLDTGIQASHPDLNVVGGASFVAGEAYNTDGNGHGTHVAGTVAALDNTTGVLGVAPSVSLYAVKVLNSSGSGSYSGIVSGIEWATTNGMDVINMSLGGASGSTAMKQAVDNAYARGVVVVAAAGNSGSSGNTNTIGYPAKYDSVIAVGAVDSNSNRASFSSVGAELEVMAPGAGVYSTYPINTYATLNGTSMASPHVAGAAALILSKHPNLSASQVRNRLSSTATYLGSPFYYGKGLINVEAAAQ

SEQ ID NO: 52621 - protein, 274 aa, Bacillus licheniformis
AQVVPYGIPLIKADKVQAQGFKGANVKVAVLDTGIQASHEDLNVVGGASFVAGEAYNTDGNGHGTHVAGTVAALDNTTGVLGVAPSVSLYAVKVLNSSGSGSYSGIVSGIEWATTNGMDVINMSLGGASGSTAMKQAVDNAYARGVVVVAAAGNSGSSGNTNTIGQPAKYDSVIAVGAVDSNSNRASFSSVGAELEVMAPGAGVYSTYPTNTYATLNGTSMASPHVAGAAALILSKHPNLSASQVRNRLSSTATYLGSSFYYGKGLINVEAAAQ

SEQ ID NO: 52622 - protein, 274 aa, Bacillus licheniformis
AQTVPYGIPLIKADKVQAQGFKGANVKVAVLDTGIQASHPDLNVVGGASFVAGEAYNTDGNGHGTHVAGTVAALDNTTGVLGVAPSVSLYAVKVLNSSGSGSYSGIVSGIEWATTNGMDVINMSLGGQSGSTAMKQAVDNAYARGVVVVAAAGNSGSSGNTNTIGYPAKYDSVIAVGAVDSNSNRASFSSVGAELEVMAPGAGVYSTYPINTYATLNGTSMASPHVAGAAALILSKHPNLSASQVRNRLSSTATYLGSPFYYGKGLINVEAAAQ

SEQ ID NO: 52623 - protein, 274 aa, Bacillus licheniformis
AQTVPYGIPLIKADKVQAQGFKGANVKVAVLDTGIQASHPDLNVRGGASFVAGEAYNTDGNGHGTHVAGTVAALDNTTGVLGVAPSVSLYAVKVLNSSGSGSYSGIVSGIEWATTNGMDVINISLGGASGSTAMKRAVDNAYARGVVVVAAAGNSGSSGNTNTIGYPAKYDSVIAVGAVDSNSNRASFSSVGAELEVMAPGAGVYSTYPTNTYATLNGTSMASPHVAGAAALILSKHPNLSASQVRNRLSSTATYLGSSFYYGKGLINVEAAAQ

SEQ ID NO: 52624 - protein, 274 aa, Bacillus licheniformis
AQVVPYGIPLIKADKVQAQGFKGANVKVAVLDTGIQASHPDLNVVGGASFVAGEAYNTDGNGHGTHVAGTVAALDNTTGVLGVAPSDSLYAVKVLNSSGSGSYSGIVSGIEWATTNGMDVINMSLGGASGSTAMKQAVDNAYARGVVVVAAAGNSGSSGNTNTIGYPAKYDSVIAVGAVDSNSNRASFSSVGAELEVMAPGAGVYSTYPTNTYATLNGTSMASPHVAGAAALILSKHPNLSASQVRNRLSSTATYLGSPFYYGKGLINVEAAAQ

SEQ ID NO: 52625 - protein, 274 aa, Bacillus licheniformis
AQTVPYGIELIKADKVQAQGFKGANVKVAVLDTGIQASHPDLNVRGGASFVAGEAYNTDGNGHGTHVAGTVAALDNTTGVLGVAPSVSLYAVKVLNSSGSGSYSGIVSGIEWATTNGMDVINISLGGASGSTAMKQAVDNAYARGVVVVAAAGNSGSSGNTNTIGYPAKYDSVIAVGAVDSNSNRASFSSVGAELEVMAPGAGVYSTYPTNTYATLNGTSMASPHVAGAAALILSKHPNLSASQVRNRLSSTATYLGSSFYYGKGLINVEAAAQ

SEQ ID NO: 52626 - protein, 275 aa, Bacillus licheniformis
AQTVPYGIPLIKADKVQAQGFKGANVKVAVLDTGIQASHPDLNVVGGASFVAGEAYNTDGNGHGTHVAGTVAALDNTTGVLGVAPSVSLYAVKVLNSSGSGXTYSGIVSGIEWATTNGMDVINMSLGGPSGSTAMKQAVDNAYARGVVVVAAAGNSGSSGNTNTIGYPAKYDSVIAVGAVDSNSNRASFSSVGAELEVMAPGAGVYSTYPTSTYATLNGTSMASPHVAGAAALILSKHPNLSASQVRNRLSSTATYLGSSFYYGKGLINVEAAAQ

SEQ ID NO: 52627 - protein, 275 aa, Bacillus licheniformis
AQTVPYGIPLIKADKVQAQGFKGANVKVAVLDTGIQASHPDLNVVGGASFVAGEAYNTDGNGHGTHVAGTVAALDNTTGVLGVAPSVSLYAVKVLNSXSGSGTYSGIVSGIEWATTNGMDVINMSLGGKSGSTAMKQAVDNAYARGVVVVAAAGNSGSSGNTNTIGYPAKYDSVIAVGAVDSNSNRASFSSVGAELEVMAPGAGVYSTYPTSTYATLNGTSMASPHVAGAAALILSKHPNLSASQVRNRLSSTATYLGSSFYYGKGLINVEAAAQ

SEQ ID NO: 52628 - protein, 274 aa, Synthetic construct
AQTVPYGIPLIKADKVQAQGFKGANVKVAVLDTGIQASHPDLNVVGGASFVAGEAYNTDGNGHGTHVAGTVAALDNTTGVLGVAPSVSLYAVKVLNSSGSGSYSGIVSGIEWATTNGMDVINMSLGGASGSTAMKQAVDNAYARGVVVVAAAGNSGNSGSTNTIGYPAKYDSVIAVGAVDSNSNRASFSSVGAELEVMAPGAGVYSTYPTNTYATPNGTSMASPHVAGAAALILSKHPNLSASQVRNRLSSTATYLGSSFYYGKGLINVEAAAQ

SEQ ID NO: 52629 - protein, 274 aa, Bacillus licheniformis
AQTVPYGIPLIKADKVQAQGFKGANVKVAVLDTGIQASHPDLNVVGGASFVAGEAYNTDGNGHGTHVAGTVAALDNTTGVLGVAPSVSLYAVKVLNSSGSGSYSGIVSGIEWATTNGMDVINMSLGGASGSTAMKQAVDNAYARGVVVVAAAGNSGSSGNTNTIGQPAKYDSVIAVGAVDSNSNRASFSSVGAELEVMAPGAGVYSTYPTNTYATLNGTSMASPHVAGAAALILSKHPNLSASQVRNDLSSTATYLGSPFYYGKGLINVEAAAQ

SEQ ID NO: 52630 - protein, 274 aa, Bacillus licheniformis
AQTVPYGIPLIKADKVQAQGFKGANVKVAVLDTGIQASHPDLNVVGGASFVAGEAYNADGNGHGTHVAGTVAALDNTTGVLGVAPSVSSYAVKVLNSSGSGSYSGIVSGIEWATTNGMDVINMSLGGASGSTAMKQAVDNAYARGVVVVAAAGNSGSSGNTNTIGYPAKYDSVIAVGAVDSNSNRASFSSVGAELEVMAPGAGVYSTYPTNTYATWNGTSMASPHVAGAAALILSKHPNLSASQVRNRLSSTATYLGSSFYYGKGLINVEAAAQ

SEQ ID NO: 52631 - protein, 274 aa, Synthetic construct
AQTVPYGIPLIKADKVQAQGFKGANVKVAVLDTGIQASHPDLNVVGGASFVAGEAYNNDGNGHGTHVAGTVAALDNTTGVLGVAPSVSLYAVKVLNSSGSGSYSGIVSGIEWATTNGMDVINMSLGGASGSTAMKQAVDNAYARGVVVVAAAGNSGNSGSTNTIGYPAKYDSVIAVGAVDSNSNRASFSSVGAELEVMAPGAGVYSTYPTNTYATLNGTSMASPHVAGAAALILSKHPNLSASQVRNRLSSTATYLGSSFYYGKGLINVEAAAQ

SEQ ID NO: 52632 - protein, 274 aa, Bacillus licheniformis
AQTVPYGIPLIKADKVQAQGFKGANVKVAVLDTGIQASHPDLNVVGGASFVAGEAYNTDGNGHGTHVAGTVAALDNTTGVLGVAPSVSSYAVKVLNSSGSGSYSGIVSGIEWATTNGMDVINMSLGGASGSTAMKQAVDNAYARGVVVVAAAGNSGSSGNTNTIGYPAKYDSVIAVGAVDSNSNRASFSSVGAELEVMAPGAGVYSTYPTNTYATWDGTSMASPHVAGAAALILSKHPNLSASQVRNRLSSTATYLGSSFYYGKGLINVEAAAQ

SEQ ID NO: 52633 - protein, 275 aa, Bacillus licheniformis
AQTVPYGIPLIKADKVQAQGFKGANVKVAVLDTGIQASHPDLNVVGGASFVAGEAYNTDGNGHGTHVAGTVAALDNTTGVLGVAPSVSLYAVKVLNSSGXSGTYSGIVSGIEWATTNGMDVINMSLGGKSGSTAMKQAVDNAYARGVVVVAAAGNSGSSGNTNTIGYPAKYDSVIAVGAVDSNSNRASFSSVGAELEVMAPGAGVYSTYPTSTYATLNGTSMASPHVAGAAALILSKHPNLSASQVRNRLSSTATYLGSSFYYGKGLINVEAAAQ

SEQ ID NO: 52634 - protein, 274 aa, Bacillus licheniformis
AQTVPYGIPLIKADKVQAQGFKGANVKVAVLDTGIQASHPDLNVVGGASFVAGEAYNTDGNGHGTHVAGTVAALDNTTGVLGVAPSVSLYAVKVLNSSGSGSYSGIVSGIEWATTNGMDVINMSLGGPSGSTAMKQAVDNAYARGVVVVAAAGNSGSSGNTNTIGYPAKYDSVIAVGAVDSNSNRASFSSVGAELEVMAPGAGVYSTYPPNTYATLNGTSMASPHVAGAAALILSKHPNLSASQVRNRLSSTATYLGSPFYYGKGLINVEAAAQ

SEQ ID NO: 52635 - protein, 275 aa, Bacillus licheniformis
AQTVPYGIPLIKADKVQAQGFKGANVKVAVLDTGIQASHPDLNVVGGASFVAGEAYNTDGNGHGTHVAGTVAALDNTTGVLGVAPSVSLYAVKVLNSSGSGTYSGIVSGIEWATTNGMDVINMSLGGPSGXSTAMKQAVDNAYARGVVVVAAAGNSGSSGNTNTIGYPAKYDSVIAVGAVDSNSNRASFSSVGAELEVMAPGAGVYSTYPTSTYATLNGTSMASPHVAGAAALILSKHPNLSASQVRNRLSSTATYLGSSFYYGKGLINVEAAAQ

SEQ ID NO: 52636 - protein, 274 aa, Bacillus licheniformis
AQTVPYGIPLIKADKVQAQGFKGANVKVAVLDTGIQASHPDLNVVGGASFVAGEAYNTDGNGHGTHVAGTVAALDNTTGVLGVAPSVSLYAVKVLNSSGSGSYSGIVSGIEWATTNGMDVINMSLGGRSGSTAMKQAVDNAYARGVVVVAAAGNSGSSGNTNTIGQPAKYDSVIAVGAVDSNSNRASFSSVGAELEVMAPGAGVYSTYPTNTYATLNGTSMASPHVAGAAALILSKHPNLSASQVRNRLSSTATYLGSPFYYGKGLINVEAAAQ

SEQ ID NO: 52637 - protein, 274 aa, Bacillus licheniformis
AQVVPYGIPLIKADKVQAQGFKGANVKVAVLDTGIQASHPDLNVVGGASFVAGEAYNTDGNGHGTHVAGTVAALDNTTGVLGVAPSVSLYAVKVLNSSGSGSYSGIVSGIEWATTNGMDVINMILGGASGSTAMKQAVDNAYARGVVVVAAAGNSGSSGNTNTIGQPAKYDSVIAVGAVDSNSNRASFSSVGAELEVMAPGAGVYSTYPTNTYATLNGTSMASPHVAGAAALILSKHPNLSASQVRNRLSSTATYLGSSFYYGKGLINVEAAAQ

SEQ ID NO: 52638 - protein, 274 aa, Bacillus licheniformis
AQTVPYGIPLIKADKVQAQGFKGANVKVAVLDTGIQASHPDLNVVGGASFVAGEAYNTDGNGHGTHVAGTVAALDNTTGVLGVAPCVSLYCVKVLNSSGSGSYSGIVSGIEWATTNGMDVINMSLGGASGSTAMKQAVDNAYARGVVVVAAAGNSGSSGNTNTIGYPAKYDSVIAVGAVDSNSNRASFSSVGAELEVMAPGAEVYSTYPTNTYATLNGTSMASPHVAGAAALILSKHPNLSASQVRNRLSSTATYLGSSFYYGKGLINVEAAAQ

SEQ ID NO: 52639 - protein, 274 aa, Bacillus licheniformis
AQTVPYGIPLIKADKVQAQGFKGANVKVAVLDTGIQASHPDLNVVGGASFVAGEAYNTDGNGHGTHVAGTVAALDNTTGVLGVAPSVSLYAVKVLNSSGSGSYSGIVSGIEWATTNGMDVINISLGGASGSTAMKQAVDNAYARGSVVVAAAGNSGSSGNTNTIGYPAKYDSVIAVGAVDSNSNRASFSSVGAELEVMAPGAGVYSTYPENTYATLNGTSMASPHVAGAAALILSKHPNLSASQVRNRLSSTATYLGSSFYYGKGLINVEAAAQ

SEQ ID NO: 52640 - protein, 274 aa, Synthetic construct
AQTVPYGIPLIKADKVQAQGFKGANVKVAVLDTGIQASHPDLNVVGGASFVAGEAYNTDGNGHGTHVAGTVAALDNTTGVLGVAPSVSLYAVKVLNSSGSGSYSGIVSGIEWATTNGMDVINMSLGGASGSTAMKQAVDNAYARGVVVVAAAGNSGNSGSTNTIGYPAKYDSVIAVGAVDSNSNRASFSSVGAELEVMAPGAGVYSEYPTNTYATLNGTSMASPHVAGAAALILSKHPNLSASQVRNRLSSTATYLGSSFYYGKGLINVEAAAQ

SEQ ID NO: 52641 - protein, 274 aa, Bacillus subtilis
AQIVPYGIPLIKADKVQAQGFKGANVKVAVLDTGIQASHPDLNVDGGASFVAGEAYNTDGNGHGTHVAGTVAALDNTTGVLGVAPSVSLYAVKVLNSSGDGSYSGIVSGIEWATTNGMDVINMSLGGASGSTAMKQAVDNAYARGVVVVAAAGNSGSSGNTNTIGYPAKYDSVIAVGAVDSNSNRASFSSVGAELEVMAPGAGVYSTYPTNTYATLNGTSMASPHVAGAAALILSKHPNLSASQVRNRLSSTATYLGSSFYYGKGLINVEAAAQ

SEQ ID NO: 52642 - protein, 274 aa, Bacillus licheniformis
AQTVPYGIPLIKADKVQAQGFKGANVKVAVLDTGIQASHPDLNVVGGASFVAGEAYNTDGNGHGTHVAGTVAALDNTTGVLGVAPSVSLYAVKVLNSSGSGSYSGIVSGIEWATTNGMDVINISLGGASGSTAMKRAVDNAYARGVVVVAAAGNSGSSGNTNTIGYPAKYDSVIAVGAVDSNSNRASFSSVGAELEVMAPGAGVYSTYPTNTYATLNGTSMASPHVAGAAALILSKHPNLSASQVRNRLSSTATYLGESFYYGKGLINVEAAAQ

SEQ ID NO: 52643 - protein, 274 aa, Synthetic construct
AQTVPYGIPLIKADKVQAQGFKGANVKVAVLDTGIQSSHPDLNVVGGSSFVAGEAYNTDGNGHGTHVAGTVAALDNTTGVLGVAPSVSLYAVKVLNSSGSGSYSGIVSGIEWATTNGMDVINMSLGGASGSTAMKQAVDNAYARGVVVVAQAGNSGSSGNTNTIGYPAKYDSVIAVGAVDSNSNRASFSSVGAELEVMAPGAGVYSTYPTNTYATLNGTSMASPHVAGAAALILSKHPNLSASQVRNRLSSTATYLGSSFYYGKGLINVEAAAQ

SEQ ID NO: 52644 - protein, 275 aa, Bacillus licheniformis
AQTVPYGIPLIKADKVQAQGFKGANVKVAVLDTGIQASHPDLNVVGGASFVAGEAYNTDGNGHGTHVAGTVAALDNTTGVLGVAPSVSLYAVKVLNSSGXSGTYSGIVSGIEWATTNGMDVINMSLGGPSGSTAMKQAVDNAYARGVVVVAAAGNSGSSGNTNTIGYPAKYDSVIAVGAVDSNSNRASFSSVGAELEVMAPGAGVYSTYPTSTYATLNGTSMASPHVAGAAALILSKHPNLSASQVRNRLSSTATYLGSSFYYGKGLINVEAAAQ

SEQ ID NO: 52645 - protein, 274 aa, Bacillus licheniformis
AQTVPYGIPLIKADKVQAQGFKGANVKVAVLDTGIQASHPDLNVVGGASFVAGEAYNTDGNGHGTHVAGTVAALDNNTGVLGVAPSVSLYAVKVLNSSGSGSYSGIVSGIEWATTNGMDVINMSLGGASGSTAMKQAVDNAYARGVVVVAAAGNSGSSGNTNTIGYPAKYDSVIAVGAVDSNSNRASFSSVGAELEVMAPGAGVYSTYPTNTYATLSGTSMASPHVAGAAALIWSKHPNLSASQVRNRLSSTATYLGSSFYYGKGLINVEAAAQ

SEQ ID NO: 52646 - protein, 274 aa, Bacillus licheniformis
AQVVPYGIPLIKADKVQAQGFKGANVKVAVLDTGIQASHPDLNVVGGASFVAGEAYNTDGNGHGTHVAGTVAALDNTTGVLGVAPSVSLYAVKVLNSSGSGSYSGIVSGIEWATTNGMDVINMSLGGASGSTAMKQAVDNAYARGVVVVAAAGNSGSSGNTNTIGYPAKYDSVIAVGAVDSNSNRASFSSVGAELEVMAPGAGVYSTYPTPTYATLNGTSMASPHVAGAAALILSKHPNLSASQVRNRLSSTATYLGSPFYYGKGLINVEAAAQ

SEQ ID NO: 52647 - protein, 275 aa, Bacillus licheniformis
AQTVPYGIPLIKADKVQAQGFKGANVKVAVLDTGIQASHPDLNVVGGASFVAGEAYNTDGNGHGTHVAGTVAALDNTTGVLGVAPSVSLYAVKVLNSSGSGTXYSGIVSGIEWATTNGMDVINMSLGGPSGSTAMKQAVDNAYARGVVVVAAAGNSGSSGNTNTIGYPAKYDSVIAVGAVDSNSNRASFSSVGAELEVMAPGAGVYSTYPTSTYATLNGTSMASPHVAGAAALILSKHPNLSASQVRNRLSSTATYLGSSFYYGKGLINVEAAAQ

SEQ ID NO: 52648 - protein, 274 aa, Bacillus licheniformis
AQTVPYGIPLIKADKVQAQGFKGANVKVAVLDTGIQASHPDLNVVGGASFVAGEAYNQDGNGHGTHVAGTVAALDNTTGVLGVAPSVSSYAVKVLNSSGSGSYSGIVSGIEWATTNGMDVINMSLGGASGSTAMKQAVDNAYARGVVVVAAAGNSGSSGNTNTIGYPAKYDSVIAVGAVDSNSNRASFSSVGAELEVMAPGAGVYSTYPTNTYATWNGTSMASPHVAGAAALILSKHPNLSASQVRNRLSSTATYLGSSFYYGKGLINVEAAAQ

SEQ ID NO: 52649 - protein, 274 aa, Bacillus licheniformis
AQTVPYGIPLIKADKVQAQGFKGANVKVAVLDTGIQASHPDLNVVGGASFVAGEAYNTDGNGHGTHVAGTVAALDNTTGVLGVAPSVSLYAVKVLNSSGSGSYSGIVSGIEWATTNGMDVINMSLGGPSGSTAMKQAVDNAYARGVVVVAAAGNSGSSGNTNTIGYPAKYDSVIAVGAVDSNSNRAPFSSVGAELEVMAPGAGVYSTYPPNTYATLNGTSMASPHVAGAAALILSKHPNLSASQVRNRLSSTATYLGSSFYYGKGLINVEAAAQ

SEQ ID NO: 52650 - protein, 274 aa, Bacillus licheniformis
AQTVPYGIPLIKADKVQAQGFKGANVKVAVLDTGIQASHPDLNVVGGASFVAGEAYNTDGNGHGTHVAGTVAALDNTTGVLGVAPSVSLYAVKVLNSSGSGTYSGIVSGIEWATTNGMDVINMSLGGPSGSTAMKQAVDNAYARGVVVVAAAGNSGSSGNTNTIGYPAKYDSVIAVGAVDSNSNRASFSSVGAELEVMAPGAGVYSTYPTSTYATLNGTSMASPHVAGAAALILSKHPNLSASQVRNRLSSTATYLGSSFYYGKGLINVEAAAQ

SEQ ID NO: 52651 - protein, 274 aa, Synthetic construct
AQTVPYGIPLIKADKVQAQGFKGANVKVAVLDTGIQASHPDLNVVGGASFVAGEAYNTDGEGHGTHVAGTVAALDNTTGVLGVAPSVSLYAVKVLNSSGSGSYSGIVSGIEWATTNGMDVINMSLGGASGSTAMKQAVDNAYARGVVVVAAAGNSGNSGSTNTIGYPAKYDSVIAVGAVDSNSNRASFSSVGAELEVMAPGAGVYSTYPTNTYATLNGTSMASPHVAGAAALILSKHPNLSASQVRNRLSSTATYLGSSFYYGKGLINVEAAAQ

SEQ ID NO: 52652 - protein, 275 aa, Bacillus licheniformis
AQTVPYGIPLIKADKVQAQGFKGANVKVAVLDTGIQASHPDLNVVGGASFVAGEAYNTDGNGHGTHVAGTVAALDNTTGVLGVAPSVSLYAVKVLXNSSGSGTYSGIVSGIEWATTNGMDVINMSLGGPSGSTAMKQAVDNAYARGVVVVAAAGNSGSSGNTNTIGYPAKYDSVIAVGAVDSNSNRASFSSVGAELEVMAPGAGVYSTYPTSTYATLNGTSMASPHVAGAAALILSKHPNLSASQVRNRLSSTATYLGSSFYYGKGLINVEAAAQ

SEQ ID NO: 52653 - protein, 274 aa, Synthetic construct
AQTVPYGIPLIKADKVQAQGFKGANVKVAVLDTGIQASHPDLNVVGGASFVAGEAYNTDGNGHGTHVAGTVAALDNTTGVLGVAPSVSLYAVKVLNSSGSGSYSGIVSGIEWATTNGMDVINMSLGGASGSTAMKQAVDNAYARGVVVVAAAGNSGNSGSTNTIGYPAKYDSVIAVGAVDSNSNRASFSSVGAELEVMANGAGVYSTYPTNTYATLNGTSMASPHVAGAAALILSKHPNLSASQVRNRLSSTATYLGSSFYYGKGLINVEAAAQ

SEQ ID NO: 52654 - protein, 274 aa, Bacillus licheniformis
AQTVPYGIPLIKADKVQAQGFKGANVKVAVLDTGIQASHPDLNVVDGASFVAGEAYNTDGHGHGTHVAGTVAALDNTTGVLGVAPSVSLYAVKVLNSSGSGSYSGIVSGIEWATTNGMDVINMSLGGASGSTAMKQAVDNAYARGVVVVAAAGNSGSSGNTNTIGYPAKYDSVIAVGAVDSNSNRASFSSVEAELEVMAPGAGVYSTYPTNTYATLNGTSMASPHVAGAAALILSKHPNLSASQVRNRLSSTATYLGSSFYYGKGLINVEAAAQ

SEQ ID NO: 52655 - protein, 274 aa, Bacillus licheniformis
AQTVPYGIELIKADKVQAQGFKGANVKVAVLDTGIQASHPDLNVVGGASFVAGEAYNTDGNGHGTHVAGTVAALDNTTGVLGVAPSVSLYAVKVLNSSGSGSYSGIVSGIEWATTNGMDVINMSLGGASGSTAMKQAVDNAYARGVVVVAAAGNSGSSGNTNTIGQPAKYDSVIAVGAVDSNSNRASFSSVGAELEVMAPGAGVYSTYPTNTYATLNGTSMASPHVAGAAALILSKHPNLSASQVRNRLSSTATYLGSPFYYGKGLINVEAAAQ

SEQ ID NO: 52656 - protein, 274 aa, Bacillus licheniformis
AQTVPYGIPLIKADKVQAQGFKGANVKVAVLDTGIQASHPDLNVVGGASFVAGEAYNTDGNGHGTHVAGTVAALDNTTGVLGVAPSVSLYAVKVLASSGSGSYSGIVSGIEWATTNGMDVIAMSLGGASGSTAMKQAVDNAYARGVVVVAAAGNSGSSGNTNTIGYPAKYDSVIAVGAVDSNSNRASFSSVGAELEVMAPGAGVYSTYPTNTYATLAGTSMASPHVAGAAALILSKHPNLSASQVRNRLSSTATYLGSSFYYGKGLINVEAAAQ

SEQ ID NO: 52657 - protein, 274 aa, Bacillus licheniformis
AQVVPYGIPLIKADKVQAQGFKGANVKVAVLDTGIQASHPDLNVVGGASFVAGEAYNTDGNGHGTHVAGTVAALDNTTGVLGVAPSDSLYAVKVLNSSGSGSYSGIVSGIEWATTNGMDVINMSLGGASGSTAMKQAVDNAYARGVVVVAAAGNSGSSGNTNTIGYPAKYDSVIAVGAVDSNSNRASFSSVGAELEVMAPGAGVYSTYPTNTYATLNSTSMASPHVAGAAALILSKHPNLSASQVRNRLSSTATYLGSSFYYGKGLINVEAAAQ

SEQ ID NO: 52658 - protein, 274 aa, Bacillus licheniformis
AQVVPYGIPLIKADKVQAQGFKGANVKVAVLDTGIQASHPDLNVVGGASFVAGEAYNTDGNGHGTHVAGTVAALDNTTGVLGVAPSVSLYAVKVLNSSGSGSYSGIVSGIEWATTNGMDVINMSLGGASGSTAMKQAVDNAYARGVVVVAAAGNSGSSGNTNTIGYPAKYDSVIAVGAVDSESNRASFSSVGAELEVMAPGAGVYSTYPTNTYATLNGTSMASPHVAGAAALILSKHPNLSASQVRNRLSSTATYLGSPFYYGKGLINVEAAAQ

SEQ ID NO: 52659 - protein, 275 aa, Bacillus licheniformis
AQTVPYGIPLIKADKVQAQGFKGANVKVAVLDTGIQASHPDLNVVGGASFVAGEAYNTDGNGHGTHVAGTVAALDNTTGVLGVAPSVSLYAVKVLNSSGSXGTYSGIVSGIEWATTNGMDVINMSLGGPSGSTAMKQAVDNAYARGVVVVAAAGNSGSSGNTNTIGYPAKYDSVIAVGAVDSNSNRASFSSVGAELEVMAPGAGVYSTYPTSTYATLNGTSMASPHVAGAAALILSKHPNLSASQVRNRLSSTATYLGSSFYYGKGLINVEAAAQ

SEQ ID NO: 52660 - protein, 274 aa, Synthetic construct
AQTVPYGIPLIKADKVQAQGFKGANVKVAVLDTGIQASHPDLNVVGGASFVAGEAYNTDGNGHGTHVAGTVAALDNTTGVLGVAPSVSLYAVKVLNSSGSGSYSGIVSGIEWATTNGMDVINMSLGGASGSTAMKQAVDNAYARGVVVVAAAGNSGNSGSTNTIGYPAKYDSVIAVGAVDSNSNRASSSSVGAELEVMAPGAGVYSTYPTNTYATLNGTSMASPHVAGAAALILSKHPNLSASQVRNRLSSTATYLGSSFYYGKGLINVEAAAQ

SEQ ID NO: 52661 - protein, 274 aa, Bacillus licheniformis
AQTVPYGIPLIKADKVQAQGFKGANVKVAVLDTGIQASHPDLNVVGGASFVAGEAYNTDGNGHGTHVAGTVAALDNTTGVLGVAPSVSLYAVKVLNSSGSGSYSGIVSGIEWATTNGMDVINMSLGGQSGSTAMKQAVDNAYARGVVVVAAAGNSGSSGNTNTIGQPAKYDSVIAVGAVDSNSNRASFSSVGAELEVMAPGAGVYSTYPTNTYATLNSTSMASPHVAGAAALILSKHPNLSASQVRNRLSSTATYLGSSFYYGKGLINVEAAAQ

SEQ ID NO: 52662 - protein, 274 aa, Bacillus licheniformis
AQTVPYGIPLIKADKVQAQGFKGANVKVAVLDTGIQASHPDLNVVGGASFVAGEAYNTDGNGHGTHVAGTVAALDNTTGVLGVAPSVSLYAVKVLNSSGSGSYSGIVSGIEWATTNGMDVINMSLGGQSGSTAMKQAVDNAYARGVVVVAAAGNSGSSGNTNTIGYPAKYDSVIAVGAVDSNSNRASFSSVGAELEVMAPGAGVYSTYPTNTYATLNGTSMASPHVAGAAALILSKHPNLSASQVRNDLSSTATYLGSPFYYGKGLINVEAAAQ

SEQ ID NO: 52663 - protein, 274 aa, Bacillus licheniformis
AQVVPYGIPLIKADKVQAQGFKGANVKVAVLDTGIQASHPDLNVVGGASFVAGEAYNTDGNGHGTHVAGTVAALDNTTGVLGVAPSVSLYAVKVLNSSGSGSYSGIVSGIEWATTNGMDVINMILGGASGSTAMKQAVDNAYARGVVVVAAAGNSGSSGNTNTIGYPAKYDSVIAVGAVDSNSNRASFSSVGAELEVMAPGAGVYSTYPTNTYATLNSTSMASPHVAGAAALILSKHPNLSASQVRNRLSSTATYLGSSFYYGKGLINVEAAAQ

SEQ ID NO: 52664 - protein, 274 aa, Bacillus licheniformis
AQTVPYGIPLIKADKVQAQGFKGANVKVAVLDTGIQASHPDLNVVGGASFVAGEAYNTDGNGHGTHVAGTVAALDNTTGVLGVAPSVSLYAVKVLNSSGSGSYSGIVSGIEWATTAGMDVINMSLGGASGSTAMKQAVDAAYARGVVVVAAAGNSGSSGNTNTIGYPAKYDSVIAVGAVDSNSNRASFSSVGAELEVMAPGAGVYSTYPTNTYATLNGTSMASPHVAGAAALILSKHPNLSASQVRARLSSTATYLGSSFYYGKGLINVEAAAQ

SEQ ID NO: 52665 - protein, 274 aa, unidentified
AQTVPYGIPLIKADKVQAQGFKGANVKVAVLDTGIQASHPDLNVVGGASFVAGEAYNTDGNGHGTHVAGTVAALDNTTGVLGVAPSVSLYAVKVLNSSGSGSYSGIVSGIEWATTNGMDVINMSLGGASGSTAMKQAFDNAYARGVVVVAAAGNSGNSGSTNTIGYPAKYDSVIAVGAVDSNSNRASFSSVGAELEVMAPGAGVYSTYPTNTYATLNGTSMASPHVAGAAALILSKHPNLSASQVRNRLSSTATYLGSSFYYGKGLINVEAAAQ

SEQ ID NO: 52666 - protein, 274 aa, Bacillus licheniformis
AQTVPYGIPLIKADKVQAQGFKGANVKVAVLDTGIQASHPDLNVVGGASFVAGEAYNTDGNGHGTHVAGTVAALDNTTGVLGVAPSVSLYAVKVLNSSGSGSYSGIVSGIEWATTNGMDVINISLGGASGSTAMKQAVDNAYARGVVVVAAAGNSGSSGNTNTISYPAKYDSVIAVGAVDSNSNRASFSSVGAELEVMAPGAGVYSTYPTNTYATLSGTSMASPHVAGAAALILSKHPNLSASQVRNRLSSTATYLGSSFYYGKGLINVEAAAQ

SEQ ID NO: 52667 - protein, 274 aa, Bacillus licheniformis
AQTVPYGIPLIKADKVQAQGFKGANVKVAVLDTGIQASHEDLNVVGGASFVAGEAYNTDGNGHGTHVAGTVAALDNTTGVLGVAPSVSLYAVKVLNSSGSGSYSGIVSGIEWATTNGMDVINMSLGGASGSTAMKQAVDNAYARGVVVVAAAGNSGSSGNTNTIGYPAKYDSVIAVGAVDSNSNRASFSSVGPELEVMAPGAGVYSTYPTNTYATLNGTSMASPHVAGAAALILSKHPNLSASQVRNRLSSTATYLGDSFYYGKGLINVEAAAQ

SEQ ID NO: 52668 - protein, 274 aa, Bacillus licheniformis
AQVVPYGIPLIKADKVQAQGFKGANVKVAVLDTGIQASHPDLNVVGGASFVAGEAYNTDGNGHGTHVAGTVAALDNTNGVLGVAPSVSLYAVKVLNSSGSGSYSGIVSGIEWATTNGMDVINMSLGGASGSTAMKQAVDNAYARGVVVVAAAGNSGSSGNTNTIGQPAKYDSVIAVGAVDSNSNRASFSSVGAELEVMAPGAGVYSTYPTNTYATLNGTSMASPHVAGAAALILSKHPNLSASQVRNRLSSTATYLGSSFYYGKGLINVEAAAQ

SEQ ID NO: 52669 - protein, 274 aa, Bacillus licheniformis
AQVVPYGIPLIKADKVQAQGFKGANVKVAVLDTGIQASHPDLNVVGGASFVAGEAYNTDGNGHGTHVAGTVAALDNTTGVLGVAPSVSLYAVKVLNSSGSGSYSGIVSGIEWATTNGRDVINMSLGGASGSTAMKQAVDNAYARGVVVVAAAGNSGSSGNTNTIGYPAKYDSVIAVGAVDSNSNRASFSSVGAELEVMAPGAGVYSTYPTNTYATLNSTSMASPHVAGAAALILSKHPNLSASQVRNRLSSTATYLGSSFYYGKGLINVEAAAQ

SEQ ID NO: 52670 - protein, 275 aa, Bacillus licheniformis
AQTVPYGIPLIKADKVQAQGFKGANVKVAVLDTGIQASHPDLNVVGGASFVAGEAYNTDGNGHGTHVAGTVAALDNTTGVLGVAPSVSLYAVKVLNXSSGSGTYSGIVSGIEWATTNGMDVINMSLGGPSGSTAMKQAVDNAYARGVVVVAAAGNSGSSGNTNTIGYPAKYDSVIAVGAVDSNSNRASFSSVGAELEVMAPGAGVYSTYPTSTYATLNGTSMASPHVAGAAALILSKHPNLSASQVRNRLSSTATYLGSSFYYGKGLINVEAAAQ

SEQ ID NO: 52671 - protein, 275 aa, Bacillus licheniformis
AQTVPYGIPLIKADKVQAQGFKGANVKVAVLDTGIQASHPDLNVVGGASFVAGEAYNTDGNGHGTHVAGTVAALDNTTGVLGVAPSVSLYAVKVLNSSGSGTYSGIVSGIEWATTNGMDVINMSLGGPXSGSTAMKQAVDNAYARGVVVVAAAGNSGSSGNTNTIGYPAKYDSVIAVGAVDSNSNRASFSSVGAELEVMAPGAGVYSTYPTSTYATLNGTSMASPHVAGAAALILSKHPNLSASQVRNRLSSTATYLGSSFYYGKGLINVEAAAQ

SEQ ID NO: 52672 - protein, 274 aa, Synthetic construct
AQTVPYGIPLIKADKVQAQGFKGANVKVAVLDTGIQASHPDLNVVGGASFVAGEAYNTDGNGHGTHVAGTVAALDNTTGVLGVAPSVSLYAVKALNSSGSGSYSGIVSGIEWATTNGMDVINMSLGGASGSTAMKQAVDNAYARGVVVVAAAGNSGNSGSTNTIGYPAKYDSVIAVGAVDSNSNRASFSSVGAELEVMAPGAGVYSTYPTNTYATLNGTSMASPHVAGAAALILSKHPNLSASQVRNRLSSTATYLGSSFYYGKGLINVEAAAQ

SEQ ID NO: 52673 - protein, 274 aa, Bacillus licheniformis
AQTVPYGIPLIKADKVQAQGFKGANVKVAVLDTGIQASHPDLNVVGGASFVAGEAYNTDGNGHGTHVASTVAALDNTTGVLGVAPSVSLYAVKVLNSSGSGSYSGIVSGIEWATTNGMDVINMSLGGASGSTAMKQAVDNAYARGVVVVAAAGNSGSSGNTNTIGQPAKYDSVIAVGAVDSNSNRASFSSVGAELEVMAPGAGVYSTYPTNTYATLNGTSMASPHVAGAAALILSKHPNLSASQVRNRLSSTATYLGSPFYYGKGLINVEAAAQ

SEQ ID NO: 52674 - protein, 274 aa, Bacillus licheniformis
AQVVPYGIPLIKADKVQAQGFKGANVKVAVLDTGIQASHPDLNVVGGASFVAGEAYNTDGNGHGTHVASTVAALDNTTGVLGVAPSVSLYAVKVLNSSGSGSYSGIVSGIEWATTNGMDVINMSLGGASGSTAMKQAVDNAYARGVVVVAAAGNSGSSGNTNTIGQPAKYDSVIAVGAVDSNSNRASFSSVGAELEVMAPGAGVYSTYPTNTYATLNGTSMASPHVAGAAALILSKHPNLSASQVRNRLSSTATYLGSSFYYGKGLINVEAAAQ

SEQ ID NO: 52675 - protein, 274 aa, Synthetic construct
AQTVPYGIPLIKADKVQAQGFKGANVKVAVLDTGIQASHPDLNVVGGASFVAGEAYNTDGNGHGTHVAGTVAALDNTTGVLGVAPSVSLYAVKVLNSSGSGSYSGIVSGIEWATTNGMDVINMSLGGASGSTAMKQAVDNAYARGVVVVAAAGNSGNSGSTNTIGYPAKYDSVIAVGAVDSNSNRASFSSVGAELEVMAPGAGVYSTYQTNTYATLNGTSMASPHVAGAAALILSKHPNLSASQVRNRLSSTATYLGSSFYYGKGLINVEAAAQ

SEQ ID NO: 52676 - protein, 274 aa, Synthetic construct
AQTVPYGIPLIKADKVQAQGFKGANVKVAVLDTGIQASHPDLNVVGGASFVAGEAYNTDGNGHGTHVAGTVAALDNTTGVLGVAPSVSLYAVKVLNSSGSGSYSGIVSGIEWATTNGMDVINMSLGGASGSTAMKQAVDNAYARGVVVVAAANNSGNSGSTNTIGYPAKYDSVIAVGAVDSNSNRASFSSVGAELEVMAPGAGVYSTYPTNTYATLNGTSMASPHVAGAAALILSKHPNLSASQVRNRLSSTATYLGSSFYYGKGLINVEAAAQ

SEQ ID NO: 52677 - protein, 274 aa, Synthetic construct
AQTVPYGIPLIKADKVQAQGFKGANVKVAVLDTGIQASHPDLNVVGGASFVAGEAYNTDGNGHGTHVAGTVAALDNTTGVLGVAPSVSLYAVKVLNSSGSGSASGIVSGIEWATTNGMDVINMSLGGASGSTAMKQAVDNAYARGVVVVAAAGNSGNSGSTNTIGYPAKYDSVIAVGAVDSNSNRASFSSVGAELEVMAPGAGVYSTYPTNTYATLNGTSMASPHVAGAAALILSKHPNLSASQVRNRLSSTATYLGSSFYYGKGLINVEAAAQ

SEQ ID NO: 52678 - protein, 275 aa, Bacillus licheniformis
AQTVPYGIPLIKADKVQAQGFKGANVKVAVLDTGIQASHPDLNVVGGASFVAGEAYNTDGNGHGTHVAGTVAALDNTTGVLGVAPSVSLYAVKVLNSSGSGTYSGIVSGIEWATTNGMDVINMSXLGGPSGSTAMKQAVDNAYARGVVVVAAAGNSGSSGNTNTIGYPAKYDSVIAVGAVDSNSNRASFSSVGAELEVMAPGAGVYSTYPTSTYATLNGTSMASPHVAGAAALILSKHPNLSASQVRNRLSSTATYLGSSFYYGKGLINVEAAAQ

SEQ ID NO: 52679 - protein, 275 aa, Bacillus licheniformis
AQTVPYGIPLIKADKVQAQGFKGANVKVAVLDTGIQASHPDLNVVGGASFVAGEAYNTDGNGHGTHVAGTVAALDNTTGVLGVAPSVSLYAVKVXLNSSGSGTYSGIVSGIEWATTNGMDVINMSLGGPSGSTAMKQAVDNAYARGVVVVAAAGNSGSSGNTNTIGYPAKYDSVIAVGAVDSNSNRASFSSVGAELEVMAPGAGVYSTYPTSTYATLNGTSMASPHVAGAAALILSKHPNLSASQVRNRLSSTATYLGSSFYYGKGLINVEAAAQ

SEQ ID NO: 52680 - protein, 274 aa, Bacillus licheniformis
AQTVPYGIPLIKADKVQAQGFKGANVKVAVLDTGIQASHPDLNVVGGASFVAGEAYNTDGNGHGTHVAGTVAALDNTTGVLGVAPSVSLYAVKVLNSSGSGSYSGIVSGIEWATTNGMDVINMSLGGAPGSTAMKQAVDNAYARGVVVVAAAGNSGSSGNTNTIGYPAKYDSVIAVGAVDSNSNRASFSSVGAELEVMAPGAGVYSTYPTPTYATLNGTSMASPHVAGAAALILSKHPNLSASQVRNRLSSTATYLGSPFYYGKGLINVEAAAQ

SEQ ID NO: 52681 - protein, 290 aa, Bacillus sp.
AQTVPYGIPLIKADKVQAQGFKGANVKVAVLDTGIQASHPDLNVVGGASFVAGEAYNTDGNGHGTHVAGEAYNTDGNGHGTHVAGTVAALDNTTGVLGVAPSVSLYAVKVLNSSGSGTYSGIVSGIEWATTNGMDVINMSLGGPSGSTAMKQAVDNAYARGVVVVAAAGNSGSSGNTNTIGYPAKYDSVIAVGAVDSNSNRASFSSVGAELEVMAPGAGVYSTYPTSTYATLNGTSMASPHVAGAAALILSKHPNLSASQVRNRLSSTATYLGSSFYYGKGLINVEAAAQ

SEQ ID NO: 52682 - protein, 274 aa, Bacillus licheniformis
AQTVPYGIPLIKADKVQAQGFKGANVKVAVLDTGIQASHPDLNVVGGASFVAGEAYNTDGNGHGTHVAGTVAALDNNTGVLGVAPSVSLYAVKVLNSSGSGSYSGIVSGIEWATTNGMDVINISLGGASGSTAMKQAVDNAYARGVVVVAAAGNSGSSGNTNTIQYPAKYDSVIAVGAVDSNSNRASFSSVGAELEVMAPGAGVYSTYPTNTYATLNGTSMASPHVAGAAALILSKHPNLSASQVRNRLSSTATYLGSSFYYGKGLINVEAAAQ

SEQ ID NO: 52683 - protein, 275 aa, Bacillus licheniformis
AQTVPYGIPLIKADKVQAQGFKGANVKVAVLDTGIQASHPDLNVVGGASFVAGEAYNTDGNGHGTHVAGTVAALDNTTGVLGVAPSVSLYAVKVLNSSGSGTYSGIVSGIEWATTNGMDVINMSLGGXPSGSTAMKQAVDNAYARGVVVVAAAGNSGSSGNTNTIGYPAKYDSVIAVGAVDSNSNRASFSSVGAELEVMAPGAGVYSTYPTSTYATLNGTSMASPHVAGAAALILSKHPNLSASQVRNRLSSTATYLGSSFYYGKGLINVEAAAQ

SEQ ID NO: 52684 - protein, 274 aa, Bacillus licheniformis
AQTVPYGIPLIKADKVQAQGFKGANVKVAVLDTGIQASHPDLNVVGGASFVAGEAYNTDGNGHGTHVAGTVAALDNTTGVLGVAPSVSLYAVKVLNSSGSGSYSGIVSGIEWATTNGMDVINMSLGGASGSTAMKQAVDNAYARGVVVVAAAGNSGSSGNTNTIGQPAKYDSVIAVGAVDSNSNRASFSSVGAELEVMAPGAGVYSTYPINTYATLNGTSMASPHVAGAAALILSKHPNLSASQVRNRLSSTATYLGSPFYYGKGLINVEAAAQ

SEQ ID NO: 52685 - protein, 274 aa, Bacillus licheniformis
AQTVPYGIPLIKADKVQAQGFKGANVKVAVLDTGIQASHPDLNVVGGASFVAGEAYNTDGNGHGTHVAGTVAALDNTTGVLGVAPSVSLYAVKVLNSSGSGSYSGIVSGIEWATTNGRDVINMSLGGASGSTAMKQAVDNAYARGVVVVAAAGNSGSSGNTNTIGYPAKYDSVIAVGAVDSNSNRASFSSVGAELEVMAPGAGVYSTYPTNTYATLNSTSMASPHVAGAAALILSKHPNLSASQVRNRLSSTATYLGSPFYYGKGLINVEAAAQ

SEQ ID NO: 52686 - protein, 274 aa, Bacillus licheniformis
AQTVPYGIPLIKADKVQAQGFKGANVKVAVLDTGIQASHPDLNVVGGASFVAGEAYNTDGNGHGTHVAGTVAALDNTTGVLGVAPSVSLYAVKVLNSSGSGSYSGIVSGIEWATTNSMDVINMSLGGASGSTAMKQAVDNAYARGVVVVAAAGNSGSSGCTNTIGYPAKYDSVIAVGAVDSNSNRASFSSVGAELEVMAPGAGVYSTYPTNTYATLSGTSMASPHVAGAAALILSKHPNLSASQVRNRLSSTATYLGSSFYYGKGLINVEAAAQ

SEQ ID NO: 52687 - protein, 274 aa, Bacillus licheniformis
AQTVPYGIPLIKADKVQAQGFKGANVKVAVLDTGIQASHPDLNVVGGASFVAGEAYNTDGNGHGTHVAGTVAALDNNTGVLGVAPSVSLYAVKVLNSSGSGSYSGIVSGIEWATTNGMDVINMSLGGASGSTAMKQAVDNAYARGVVVVAAAGNSGSSGNTNTIQYPAKYDSVIAVGAVDSNSNRASFSSVGAELEVMAPGAGVYSTYPTNTYATLSGTSMASPHVAGAAALILSKHPNLSASQVRNRLSSTATYLGSSFYYGKGLINVEAAAQ

SEQ ID NO: 52688 - protein, 274 aa, Bacillus licheniformis
AQTVPYGIPLIKADKVQAQGFKGANVKVAVLDTGIQASHPDLNVVGGASFVAGEAYNTDGNGHGTHVAGTVAALDNTTGVLGVAPSVSLYAVKVLNSSGSGSYSGIVSGIEWATTNGMDVINMILGGASGSTAMKQAVDNAYARGVVVVAAAGNSGSSGNTNTIGYPAKYDSVIAVGAVDSNSNRASFSSVGAELEVMAPGAGVYSTYPTNTYATLNSTSMASPHVAGAAALILSKHPNLSASQVRNRLSSTATYLGSPFYYGKGLINVEAAAQ

SEQ ID NO: 52689 - protein, 275 aa, Bacillus licheniformis
AQTVPYGIPLIKADKVQAQGFKGANVKVAVLDTGIQASHPDLNVVGGASFVAGEAYNTDGNGHGTHVAGTVAALDNTTGVLGVAPSVSLYAVKVLNSSGSGTYSGIVSGIEWATTNGMDVINMSLGGPSGSXTAMKQAVDNAYARGVVVVAAAGNSGSSGNTNTIGYPAKYDSVIAVGAVDSNSNRASFSSVGAELEVMAPGAGVYSTYPTSTYATLNGTSMASPHVAGAAALILSKHPNLSASQVRNRLSSTATYLGSSFYYGKGLINVEAAAQ

SEQ ID NO: 52690 - protein, 274 aa, Bacillus licheniformis
AQTVPYGIPLIKADKVQAQGFKGANVKVAVLDTGIQASHPDLNVVGGASFVAGEAYNTDGNGHGTHVAGTVAALDNTTGVLGVAPSVSLYAVKVLNSSGSGSYSGIVSGIEWATTNGMDVINMSLGGASGSTAMKQAVDNAYARGVVVVAAAGNSGSSGNTNTIGQPAKYDSVIAVGAVDSNSNRASFSSVGAELEVMAPGAGVYSTYPTPTYATLNGTSMASPHVAGAAALILSKHPNLSASQVRNRLSSTATYLGSPFYYGKGLINVEAAAQ

SEQ ID NO: 52691 - protein, 274 aa, Bacillus licheniformis
AQTVPYGIPLIKADKVQAQGFKGANVKVAVLDTGIQASHPDLNVVGGASFVAGEAYNTDGNGHGTHVAGTVAALDNTTGVLGVAPSVSLYAVKVLNSSGSGSYSGIVSGIEWATTNGMDVINISLGGASGSTAMKRAVDNAYARGVVVVAAAGNSGSSGNTNTIQYPAKYDSVIAVGAVDSNSNRASFSSVGAELEVMAPGAGVYSTYPTNTYATLNGTSMASPHVAGAAALILSKHPNLSASQVRNRLSSTATYLGSSFYYGKGLINVEAAAQ

SEQ ID NO: 52692 - protein, 275 aa, Bacillus licheniformis
AQTVPYGIPLIKADKVQAQGFKGANVKVAVLDTGIQASHPDLNVVGGASFVAGEAYNTDGNGHGTHVAGTVAALDNTTGVLGVAPSVSLYAVKVLNSSGSGTYSGIVSGIEWATTNGMDVINMSLGXGPSGSTAMKQAVDNAYARGVVVVAAAGNSGSSGNTNTIGYPAKYDSVIAVGAVDSNSNRASFSSVGAELEVMAPGAGVYSTYPTSTYATLNGTSMASPHVAGAAALILSKHPNLSASQVRNRLSSTATYLGSSFYYGKGLINVEAAAQ

SEQ ID NO: 52693 - protein, 274 aa, Bacillus licheniformis
AQVVPYGIPLIKADKVQAQGFKGANVKVAVLDTGIQASHPDLNVVGGASFVAGEAYNTDGNGHGTHVAGTVAALDNTTGVLGVAPSDSLYAVKVLNSSGSGSYSGIVSGIEWATTNGMDVINMSLGGQSGSTAMKQAVDNAYARGVVVVAAAGNSGSSGNTNTIGYPAKYDSVIAVGAVDSNSNRASFSSVGAELEVMAPGAGVYSTYPTNTYATLNGTSMASPHVAGAAALILSKHPNLSASQVRNRLSSTATYLGSSFYYGKGLINVEAAAQ

SEQ ID NO: 52694 - protein, 274 aa, Bacillus licheniformis
AQTVPYGIPLIKADKVQAQGFKGANVKVAVLDTGIQASHPDLNVVGGASFVAGEAYNTDGNGHGTHVAGTVAALDNTTGVLGVAPSDSLYAVKVLNSSGSGSYSGIVSGIEWATTNGMDVINMSLGGASGSTAMKQAVDNAYARGVVVVAAAGNSGSSGNTNTIGYPAKYDSVIAVGAVDSNSNRASFSSVGAELEVMAPGAGVYSTYPTNTYATLNSTSMASPHVAGAAALILSKHPNLSASQVRNRLSSTATYLGSPFYYGKGLINVEAAAQ

SEQ ID NO: 52695 - protein, 275 aa, Bacillus licheniformis
AQTVPYGIPLIKADKVQAQGFKGANVKVAVLDTGIQASHPDLNVVGGASFVAGEAYNTDGNGHGTHVAGTVAALDNTTGVLGVAPSVSLYAVKVLNSSGSGTYSGIVSGIEWATTNGMDVINMSLXGGPSGSTAMKQAVDNAYARGVVVVAAAGNSGSSGNTNTIGYPAKYDSVIAVGAVDSNSNRASFSSVGAELEVMAPGAGVYSTYPTSTYATLNGTSMASPHVAGAAALILSKHPNLSASQVRNRLSSTATYLGSSFYYGKGLINVEAAAQ

SEQ ID NO: 52696 - protein, 274 aa, Bacillus licheniformis
AQVVPYGIELIKADKVQAQGFKGANVKVAVLDTGIQASHPDLNVVGGASFVAGEAYNTDGNGHGTHVAGTVAALDNTTGVLGVAPSVSLYAVKVLNSSGSGSYSGIVSGIEWATTNGMDVINMSLGGASGSTAMKQAVDNAYARGVVVVAAAGNSGSSGNTNTIGQPAKYDSVIAVGAVDSNSNRASFSSVGAELEVMAPGAGVYSTYPTNTYATLNGTSMASPHVAGAAALILSKHPNLSASQVRNRLSSTATYLGSSFYYGKGLINVEAAAQ

SEQ ID NO: 52697 - protein, 274 aa, Bacillus licheniformis
AQTVPYGIPLIKADKVQAQGFKGANVKVAVLDTGIQASHPDLNVVGGASFVAGEAYNTDGNGHGTHVAGTVAALDNTNGVLGVAPSVSLYAVKVLNSSGSGSYSGIVSGIEWATTNGMDVINMSLGGASGSTAMKQAVDNAYARGVVVVAAAGNSGSSGNTNTIGQPAKYDSVIAVGAVDSNSNRASFSSVGAELEVMAPGAGVYSTYPTNTYATLNGTSMASPHVAGAAALILSKHPNLSASQVRNRLSSTATYLGSPFYYGKGLINVEAAAQ

SEQ ID NO: 52698 - protein, 274 aa, Bacillus licheniformis
AQVVPYGIPLIKADKVQAQGFKGQNVKVAVLDTGIQASHPDLNVVGGASFVAGEAYNTDGNGHGTHVAGTVAALDNTTGVLGVAPSVSLYAVKVLNSSGSGSYSGIVSGIEWATTNGMDVINMSLGGASGSTAMKQAVDNAYARGVVVVAAAGNSGSSGNTNTIGYPAKYDSVIAVGAVDSNSNRASFSSVGAELEVMAPGAGVYSTYPTNTYATLNGTSMASPHVAGAAALILSKHPNLSASQVRNRLSSTATYLGSPFYYGKGLINVEAAAQ

SEQ ID NO: 52699 - protein, 274 aa, Bacillus licheniformis
AQVVPYGIPLIKADKVQAQGFKGANVKVAVLDTGIQASHPDLNVVGGASFVAGEAYNTDGNGHGTHVAGTVAALDNTTGVLGVAPSVSLYAVKVLNSSGSGSYSGIVSGIEWATTNGMDVINMSLGGQSGSTAMKQAVDNAYARGVVVVAAAGNSGSSGNTNTIGYPAKYDSVIAVGAVDSNSNRASFSSVGAELEVMAPGAGVYSTYPINTYATLNGTSMASPHVAGAAALILSKHPNLSASQVRNRLSSTATYLGSSFYYGKGLINVEAAAQ

SEQ ID NO: 52700 - protein, 274 aa, Bacillus licheniformis
AQQVPYGIPLIKADKVQAQGFKGANVKVAVLDTGIQASHPDLNVVGGASFVAGEAYNTDGNGHGTHVAGTVAALDNTTGVLGVAPSVSLYAVKVLNSSGSGSYSGIVSGIEWATTNGMDVINMSLGGQSGSTAMKQAVDNAYARGVVVVAAAGNSGSSGNTNTIGYPAKYDSVIAVGAVDSNSNRASFSSVGAELEVMAPGAGVYSTYPTNTYATLNGTSMASPHVAGAAALILSKHPNLSASQVRNRLSSTATYLGSPFYYGKGLINVEAAAQ

SEQ ID NO: 52701 - protein, 274 aa, Synthetic construct
AQTVPYGIPLIKADKVQAQGFKGANVKVAVLDTGIQSSHPDLNVVGGSSFVAGEAYNTDGNGHGTHVAGTVAALDNTTGVLGVAPSVSLYAVRVLNSSGSGSYSGIVSGIEWATTNGMDVINMSLGGASGSTAMKQAVDNAYARGVVVVAAAGNSGSSGNTNTIGYPAKYDSVIAVGAVDSNSNRASFSSVGAELEVMAPGAGVYSTYPTNTYATLNGTSMASPHVAGAAALILSKHPNLSASQVRNRLSSTATYLGSSFYYGKGLINVEAAAQ

SEQ ID NO: 52702 - protein, 274 aa, Bacillus licheniformis
AQTVPYGIPLIKADKVQAQGFKGANVKVAVLDTGIQASHPDLNVVGGASFVAGEAYNTDGNGHGTHVAGTVAALDNTTGVLGVAPSVSLYAVKVLNSSGSGSYSGIVSGIEWATTNGRDVINMSLGGASGSTAMKQAVDNAYARGVVVVAAAGNSGSSGNTNTIGQPAKYDSVIAVGAVDSNSNRASFSSVGAELEVMAPGAGVYSTYPTNTYATLNSTSMASPHVAGAAALILSKHPNLSASQVRNRLSSTATYLGSSFYYGKGLINVEAAAQ

SEQ ID NO: 52703 - protein, 274 aa, Synthetic construct
AQTVPYGIPLIKADKVQAQGFKGANVKVAVLDTGIQASHPDLNVVGGASFVAGEAYNTDGNGHGTHVAGTVAALDNTTGVLGVAPSVSLYAVKVLNSSGSGSYSGIVSGIEWATTNGMDVINMSLGGASGSTAMKQAVDNAYARGVVVVAAAGNSGNSGSTNTIGYPAKYDSVIAVGAVDSNSNRASFSSVGAELEVMAPGAGVYSTYPTNQYATLNGTSMASPHVAGAAALILSKHPNLSASQVRNRLSSTATYLGSSFYYGKGLINVEAAAQ

SEQ ID NO: 52704 - protein, 274 aa, Bacillus licheniformis
AQVVPYGIPLIKADKVQAQGFKGANVKVAVLDTGIQASHPDLNVVGGASFVAGEAYNTDGNGHGTHVAGTVAALDNTTGVLGVAPSVSLYAVKVLNSSGSGSYSGIVSGIEWATTNGMDVINMSLGGASGSTAMKQAVDNAYARGVVVVAAAGNSGSSGNTNTIGQPAKYDSVIAVGAVDSNSNRASFSSVGAELEVMAPGAGVYSTYPTNTYATLNGTSMASPHVAGAAALILSKHPNLSASQVRNRLSSTATYLGSPFYYGKGLINVEAAAQ

SEQ ID NO: 52705 - protein, 274 aa, Bacillus licheniformis
AQTVPYGIELIKADKVQAQGFKGANVKVAVLDTGIQASHPDLNVVGGASFVAGEAYNTDGNGHGTHVAGTVAALDNTTGVLGVAPSVSLYAVKVLNSSGSGSYSGIVSGIEWATTNGMDVINMSLGGASGSTAMKQAVDNAYARGVVVVAAAGNSGSSGNTNTIGYPAKYDSVIAVGAVDSNSNRASFSSVGAELEVMAPGAGVYSTYPTNTYATLNSTSMASPHVAGAAALILSKHPNLSASQVRNRLSSTATYLGSPFYYGKGLINVEAAAQ

SEQ ID NO: 52706 - protein, 274 aa, Bacillus licheniformis
AQTVPYGIPLIKADKVQAQGFKGANVKVAVLDTGIQASHPDLNVVGGASFVAGEAYNTDGNGHGTHVAGTVAALDNTTGVLGVAPSVSLYAVKVLNSSGSGSYSGIVSGIEWATTNGMDVINMSLGGRSGSTAMKQAVDNAYARGVVVVAAAGNSGSSGNTNTIGYPAKYDSVIAVGAVDSNSNRASFSSVGAELEVMAPGAGVYSTYPTNTYATLNSTSMASPHVAGAAALILSKHPNLSASQVRNRLSSTATYLGSPFYYGKGLINVEAAAQ

SEQ ID NO: 52707 - protein, 274 aa, Bacillus licheniformis
AQTVPYGIPLIKADKVQAQGFKGANVKVAVLDTGIQASHPDLNVVGGASFVAGEAYNTDGNGHGTHVAGTVAALDNTNGVLGVAPSVSLYAVKVLNSSGSGSYSGIVSGIEWATTNGMDVINMSLGGASGSTAMKQAVDNAYARGVVVVAAAGNSGSSGNTNTIGYPAKYDSVIAVGAVDSNSNRASFSSVGAELEVMAPGAGVYSTYPTNTYATLNSTSMASPHVAGAAALILSKHPNLSASQVRNRLSSTATYLGSPFYYGKGLINVEAAAQ

SEQ ID NO: 52708 - protein, 274 aa, Bacillus licheniformis
AQVVPYGIPLIKADKVQAQGFKGANVKVAVLDTGIQASHPDLNVVGGASFVAGEAYNTDGNGHGTHVAGTVAALDNTTGVLGVAPSVSLYAVKVLNSSGSGSYSGIVSGIEWATTNGMDVINMSLGGASGSTAMKQAVDNAYARGVVVVAAAGNSGSSGNTNTIGYPAKYDSVIAVGAVDSNSNRASFSSVGAELEVMAPGAGVYSTYPTNTYATLNSTSMASPHVAGAAALILSKHPNLSASQVRNRLSSTATYLGSPFYYGKGLINVEAAAQ

SEQ ID NO: 52709 - protein, 274 aa, Bacillus licheniformis
AQVVPYGIPLIKADKVQAQGFKGANVKVAVLDTGIQASHPDLNVVGGASFVAGEAYNTDGNGHGTHVAGTVAALDNTTGVLGVAPSVSLYAVKVLNSSGSGSYSGIVSGIEWATTNGMDVINMSLGGRSGSTAMKQAVDNAYARGVVVVAAAGNSGSSGNTNTIGQPAKYDSVIAVGAVDSNSNRASFSSVGAELEVMAPGAGVYSTYPTNTYATLNGTSMASPHVAGAAALILSKHPNLSASQVRNRLSSTATYLGSSFYYGKGLINVEAAAQ

SEQ ID NO: 52710 - protein, 274 aa, Bacillus licheniformis
AQTVPYGIPLIKADKVQAQGFKGANVKVAVLDTGIQASHEDLNVVGGASFVAGEAYNTDGNGHGTHVAGTVAALDNTTGVLGVAPSVSLYAVKVLNSSGSGSYSGIVSGIEWATTNGMDVINMSLGGASGSTAMKQAVDNAYARGVVVVAAAGNSGSSGNTNTIGYPAKYDSVIAVGAVDSNSNRASFSSVGAELEVMAPGAGVYSTYPTNTYATLNSTSMASPHVAGAAALILSKHPNLSASQVRNRLSSTATYLGSPFYYGKGLINVEAAAQ

SEQ ID NO: 52711 - protein, 274 aa, Bacillus licheniformis
AQTVPYGIPLIKADKVQAQGFKGANVKVAVLDTGIQASHPDLNVVGGASFVAGEAYNTDGNGHGTHVAGTVAALDNTTGVLGVAPSVSLYAVKVLNSSGSGSYSGIVSGIEWATTNGMDVINMSLGGQSGSTAMKQAVDNAYARGVVVVAAAGNSGSSGNTNTIGYPAKYDSVIAVGAVDSESNRASFSSVGAELEVMAPGAGVYSTYPTNTYATLNGTSMASPHVAGAAALILSKHPNLSASQVRNRLSSTATYLGSPFYYGKGLINVEAAAQ

SEQ ID NO: 52712 - protein, 274 aa, Bacillus licheniformis
AQVVPYGIPLIKADKVQAQGFKGANVKVAVLDTGIQASHPDLNVVGGASFVAGEAYNTDGNGHGTHVAGTVAALDNTTGVLGVAPSVSLYAVKVLNSSGSGSYSGIVSGIEWATTNGMDVINMILGGASGSTAMKQAVDNAYARGVVVVAAAGNSGSSGNTNTIGYPAKYDSVIAVGAVDSNSNRASFSSVGAELEVMAPGAGVYSTYPTNTYATLNGTSMASPHVAGAAALILSKHPNLSASQVRNRLSSTATYLGSPFYYGKGLINVEAAAQ

SEQ ID NO: 52713 - protein, 274 aa, Bacillus licheniformis
AQVVPYGIPLIKADKVQAQGFKGANVKVAVLDTGIQASHPDLNVVGGASFVAGEAYNTDGNGHGTHVAGTVAALDNTTGVLGVAPSVSLYAVKVLNSSGSGSYSGIVSGIEWATTNGMDVINMSLGGRSGSTAMKQAVDNAYARGVVVVAAAGNSGSSGNTNTIGYPAKYDSVIAVGAVDSNSNRASFSSVGAELEVMAPGAGVYSTYPTNTYATLNGTSMASPHVAGAAALILSKHPNLSASQVRNRLSSTATYLGSPFYYGKGLINVEAAAQ

SEQ ID NO: 52714 - protein, 275 aa, Bacillus licheniformis
AQTVPYGIPLIKADKVQAQGFKGANVKVAVLDTGIQASHPDLNVVGGASFVAGEAYNTDGNGHGTHVAGTVAALDNTTGVLGVAPSVSLYAVKVLNSSGSGTYSGIVSGIEWATTNGMDVINMSLGGPSXGSTAMKQAVDNAYARGVVVVAAAGNSGSSGNTNTIGYPAKYDSVIAVGAVDSNSNRASFSSVGAELEVMAPGAGVYSTYPTSTYATLNGTSMASPHVAGAAALILSKHPNLSASQVRNRLSSTATYLGSSFYYGKGLINVEAAAQ

SEQ ID NO: 52715 - protein, 274 aa, Bacillus licheniformis
AQTVPYGIPLIKADKVQAQGFKGANVKVAVLDTGIQASHPDLNVVGGASFVAGEAYNTDGNGHGTHVAGTVAALDNTTGVLGVAPSVSLYAVKVLNSSGSGSYSGIVSGIEWATTNGMDVINMILGGASGSTAMKQAVDNAYARGVVVVAAAGNSGSSGNTNTIGQPAKYDSVIAVGAVDSNSNRASFSSVGAELEVMAPGAGVYSTYPTNTYATLNGTSMASPHVAGAAALILSKHPNLSASQVRNRLSSTATYLGSPFYYGKGLINVEAAAQ

SEQ ID NO: 52716 - protein, 274 aa, Bacillus licheniformis
AQTVPYGIPLIKADKVQAQGFKGANVKVAVLDTGIQASHPDLNVVGGASFVAGEAYNTDGNGHGTHVAGTVAALDNTTGVLGVAPSVSLYAVKVLNSSGSGSYSGIVSGIEWATTNGMDVINMSLGGASGSTAMKQAVDNAYARGVVVVAAAGNSGNSGSTNTIGYPAKYDSVIAVGAVDSNSNRASFSSVGAELEVMAPGAGVYSTYPTNTYATLNGTSMASXHVAGAAALILSKHPNLSASQVRNRLSSTATYLGSSFYYGKGLINVEAAAQ

SEQ ID NO: 52717 - protein, 274 aa, Synthetic construct
AQTVPYGIPLIKADKVQAQGFKGANVKVAVLDTGIQASHPDLNVVGGASFVAGEAYNTDGNGHGTHVAGTVAALDNTTGVLGVAPSVSLYAVKVLNSSGSGSYSGIVSGIEWATTNGMDVINMSAGGASGSTAMKQAVDNAYARGVVVVAAAGNSGNSGSTNTIGYPAKYDSVIAVGAVDSNSNRASFSSVGAELEVMAPGAGVYSTYPTNTYATLNGTSMASPHVAGAAALILSKHPNLSASQVRNRLSSTATYLGSSFYYGKGLINVEAAAQ

SEQ ID NO: 52718 - protein, 275 aa, Bacillus licheniformis
AQTVPYGIPLIKADKVQAQGFKGANVKVAVLDTGIQASHPDLNVVGGASFVAGEAYNTDGNGHGTHVAGTVAALDNTTGVLGVAPSVSLYAVKVLNSXSGSGTYSGIVSGIEWATTNGMDVINMSLGGPSGSTAMKQAVDNAYARGVVVVAAAGNSGSSGNTNTIGYPAKYDSVIAVGAVDSNSNRASFSSVGAELEVMAPGAGVYSTYPTSTYATLNGTSMASPHVAGAAALILSKHPNLSASQVRNRLSSTATYLGSSFYYGKGLINVEAAAQ

SEQ ID NO: 52719 - protein, 275 aa, Bacillus licheniformis
AQTVPYGIPLIKADKVQAQGFKGANVKVAVLDTGIQASHPDLNVVGGASFVAGEAYNTDGNGHGTHVAGTVAALDNTTGVLGVAPSVSLYAVKVLNSSXGSGTYSGIVSGIEWATTNGMDVINMSLGGPSGSTAMKQAVDNAYARGVVVVAAAGNSGSSGNTNTIGYPAKYDSVIAVGAVDSNSNRASFSSVGAELEVMAPGAGVYSTYPTSTYATLNGTSMASPHVAGAAALILSKHPNLSASQVRNRLSSTATYLGSSFYYGKGLINVEAAAQ

SEQ ID NO: 52720 - protein, 274 aa, Bacillus licheniformis
AQTVPYGIPLIKADKVQAQGFKGANVKVAVLDTGIQASHPDLNVVGGASFVAGEAYNTDGNGHGTHVAGTVAALDNTTGVLGVAPSVSLYAVKVLNSSGSGSYSGIVSGIEWATTNGMDVINMSLGGQSGSTAMKQAVDNAYARGVVVVAAAGNSGSSGNTNTIGYPAKYDSVIAVGAVDSNSNRASFSSVGAELEVMAPGAGVYSTYPTNTYATLQGTSMASPHVAGAAALILSKHPNLSASQVRNRLSSTATYLGSPFYYGKGLINVEAAAQ

SEQ ID NO: 52721 - protein, 273 aa, Bacillus licheniformis
AQTVPYGIPLIKADKVQAQGFKGANVKVAVLDTGIQASHPDLNVVGGASFVAGEAYNTDGNGHGTHVAGTVAALGNTTGVLGVAPSVSLYAVKVLNSSGSGSYSGIVSGIEWATTNGMDVINMSLGGASGSTAMKQAVDNAYAKGVVVVAAAGNSGSSGNTNTIGYPAKYDSVIAVGAVDSNSNRASFSSVGAELEVMAPGAGVYSTYPTNTYATLNGTSMASPHVAGAAALIMSKHPNLSASQVRNRLSSTATYLGSSFYYGKGLINVEAAA

SEQ ID NO: 52722 - protein, 273 aa, Bacillus licheniformis
AQTVPYGIPLIKADKVQAQGFKGANVKVAVLDTGIQASHPDLNVVGGASFVAGEAYNTDGNGHGTHVAGTVAALANTTGVLGVAPSVSLYAVKVLNSSGSGSYSGIVSGIEWATTNGMDVINMSLGGASGSTAMKQAVDNAYAKGVVVVAAAGNSGSSGNTNTIGYPAKYDSVIAVGAVDSNSNRASFSSVGAELEVMAPGAGVYSTYPTNTYATLNGTSMASPHVAGAAALIMSKHPNLSASQVRNRLSSTATYLGSSFYYGKGLINVEAAA

SEQ ID NO: 52723 - protein, 269 aa, Unidentified
AQSVPWGISRVQAPAAHNRRLTGSGVKVAVLDTGISTHPDLNIRGGASFVPGEPSTQDGNGHGTHVAGTIAALNNSIGVLGVAPSAELYAVKVLGASGSGSVSSIAQGLEWAGNNGMHVANLSLGSPSPSATLEQAVNSATSRGVLVVAASGNSGAGSISYPARYANAMAVGATDQNNNRASFSQYGAGLDIVAPGVNVQSTYPGSTYASLNGTSMATPHVAGAAALVKQKNPSWRNVQIRNHLKNTATSLGSTNLYGSGLVNAEAATR

SEQ ID NO: 52724 - protein, 269 aa, Bacillus sp.
AQSVPWGISRVQAPAAHNRGLTGSGVKVAVLDTGISTHPDLNIRGGASFVPGEPSTQDGNGHGTHVAGTIAALNNSIGVLGVAPNAELYAVKVLGASGSGSVSSIAQGLEWAGNNGMHVANLSLGSPSPSATLEQAVNSATSRGVLVVAASGNSGAGSIDYPARYANAMAVGATDQNNNRASFSQYGAGLDIVAPGVNVQSTYPGSTYASLNGTSQATPHVAGAAALVKQKNPSWSNVQIRNHLKNTATSLGSTNLYGSGLVNAEAATR

SEQ ID NO: 52725 - protein, 269 aa, Unidentified
AQSVPWGISRVQAPAAHNRGLTGSGVKVAVLDTGISTHPDLNIRGGASFVPGEPSTQDGNGHGTHVAGTIAALNNSIGVLGVAPSAELYAVKVLGASGGGSVSSIAQGLEWAGNNGMHVANLSLGSPSPSATLEQAVNSATSRGVLVVAASGNSGAGSISYPARYANAMAVGATDQNNNRASFSQYGAGLDIVAPGVNVQSTYPGSTYASLNGTSMATPHVAGAAVLVKQKNPSWSNVQIRNHLKNTATSLGSTNLYGSGLVNAEAATR

SEQ ID NO: 52726 - protein, 269 aa, Unidentified
AQSVPWGIARVQAPAAHNRGLTGSGVKVAVLDTGISTHPDLNIRGGASFVPGEPSTQDGNGHGTHVAGTIAALNNSIGVLGVAPSAELYAVKVLGASGSGSVSSIAQGLEWAGNNGMHVANLSLGSPSPSATLEQAVNSATSRGVLVVAASGNSGAGSISYPARYANAMAVGATDQNNNRASFSQYGAGLDIVAPGVNVQSTYPGFTYASLNGTSMATPHVAGAAALVKQKNPSWSNVQIRNHLKNTATSLGSTNLYGSGLVNAEAATR

SEQ ID NO: 52727 - protein, 269 aa, Unidentified
AQSVPWGISRVQAPAAHNRGLTGSGVKVAVLDTGISTHPDLNIRGGASFVPGEPSTQDGNGHGTHVAGTIAALNNSIGVLGVAPSAELYAVKVLGASGSGSVSSIAQGVEWAGNNGMHVANLSLGSPSPSATLEQAVNSATSRGVLVVAASGNSGAGSISYPARYANAMAVGATDQNNNRASFSQYGAGLDIVAPGVNVQSTYPGSTYASLNGTSMATPHVAGAAALVKQKNPSWSNVQIRNRLKNTATSLGSTNLYGSGLVNAEAATR

SEQ ID NO: 52728 - protein, 269 aa, Unidentified
AQSVPWGISRVQAPAAHNRGLTGSGVKVAVLDSGISTHPDLNIRGGASFVPGEPSTQDGNGHGTHVAGTIAALNNSIGVLGVAPSAELYAVKVLGASGSGSVSSIAQGLEWAGNNGMHVANLSLGSPSPSATLEQAVNSATSRGVLVVAASGNSGAGSISYPARYANAMAVGATDQNNNRASFSQYGAGLDIVAPGVNVQSTYPGSTYASLNGTSMATPHVAGAAALVKQKNPSWSNVQIRNHLKNAATSLGSTNLYGSGLVNAEAATR

SEQ ID NO: 52729 - protein, 269 aa, Unidentified
AQSVPWGISRVQAPAAHNRGLAGSGVKVAVLDTGISTHPDLNIRGGASFVPGEPSTQDGNGHGTHVAGTIAALNNSIGVLGVAPSAELYAVKVLGASGSGSVSSIAQGLEWAGNNGMHVANLSLGSPSPSATLEQAVNSATSRGVLVVAASGNSGEGSISYPARYANAMAVGATDQNNNRASFSQYGAGLDIVAPGVNVQSTYPGSTYASLNGTSMATPHVAGAAALVKQKNPSWSNVQIRNHLKNTATSLGSTNLYGSGLVNAEAATR

SEQ ID NO: 52730 - protein, 269 aa, Unidentified
AQSVPWGISRVQAPAAHNRGLTGSGVKVAVLDTGISTHPDLNIRGGASFVPGEPSTQDGNGHGTHVAGTIAALNNNIGVLGVAPSAELYAVKVLGASSSGSVSSIAQGLEWAGNNGMHVANLSLGSPSPSATLEQAVNSATSRGVLVVAASGNSGAGSISYPARYANAMAVGATDQNNNRASFSQYGAGLDIVAPGVNVQSTYPGSTYASLNGTSMATPHVAGAAALVKQKNPSWSNVQIRNHLKNTATSLGSTNLYGSGLVNAEAATR

SEQ ID NO: 52731 - protein, 269 aa, Unidentified
AQSVPWGISRVQAPAAHNRGLTGSGVKVAVLDTGISTHPDLNIRGGASFVPGEPSTQDGNGHGTHVAGTIAALNNSIGVLGVAPSAELYAVKVLGASGSGSVSSIAQGLEWAGNNGMHVANLSLGSPSPSATLEQAVNSATSRGVLVVAASGNSGAGSISYPARYANAMAVGATDQNNNRASFSQYGAGLDIVAPGVNVQSTAPGSTYASLNGTSMATPHVAGAAALVFQKNPSWSNVQIRNHLKNTATSLGSTNLYGSGLVNAEAATR

SEQ ID NO: 52732 - protein, 269 aa, Unidentified
AQSVPWGISRVQAPAAHNRGLTGSGVKVAVLDTGISTHPDLNIRGGASFVPGEPSTQDGNGHGTHVAGTIAALNNSIGVLGVAPSAELYAVKVLGASGSGSVSSIAQGLEWAGNNGMHVANLSLGNPSPSATLEQAVNSATSRGVLVVAASGNSGAGSISYPARYANAMAVGATDQNNNHASFSQYGAGLDIVAPGVNVQSTYPGSTYASLNGTSMATPHVAGAAALVKQKNPSWSNVQIRNHLKNTATSLGSTNLYGSGLVNAEAATR

SEQ ID NO: 52733 - protein, 269 aa, Unidentified
AQSVPWGISRVQAPAAHNRGLTGSGVKVAVLDTGISTHPDLNIRGGASFVPGEPSTQDGNGHGTHVAGTIAALNNSIGVLGVAPSAELYAVKVLGASGSGSVSSIAQGLEWAGNNGMHVANLSLGSPSPSATLEQAVNSATSRGVLVVAASGNSGAGELSYPARYANAMAVGATDQNNNRASFSQYGAGLDIVAPGVNVQSTYPGSTYASLNGTSMATPHVAGAAALVKQKNPSWSNVQIRNHLKNTATSLGSTNLYGSGLVNAEAATR

SEQ ID NO: 52734 - protein, 269 aa, Unidentified
AQSVPWGISRVQAPAAHNRGLTGGGVKVAVLDTGISTHPDLNIRGGASFVPGEPSTQDGNGHGTHVAGTIAALNNSIGVLGVAPSAELYAVKVLGASGGGSVSSIAQGLEWAGNNGMHVANLSLGSPSPSATLEQAVNSATSRGVLVVAASGNSGAGSISYPARYANAMAVGATDQNNNRASFSQYGAGLDIVAPGVNVQSTYPGSTYASLNGTSMATPHVAGAAALVKQKNPSWSNVQIRNHLKNTATSLGSTNLYGSGLVNAEAATR

SEQ ID NO: 52735 - protein, 269 aa, Unidentified
AQSVPWGISRVQAPAAHNRGLTGRGVKVAVLDTGISTHPDLNITGGASFVPGEPSTQDGNGHGTHVAGTIAALNNSIGVLGVAPSAELYAVKVLGASGSGSVSSIAQGLEWAGNNGMHVANLSLGSPSPSATLEQAVNSATSRGVLVVAASGNSGAGSISYPARYANAMAVGATDQNNNRASFSQYGAGLDIVAPGVNVQSTYPGSTYASLNGTSMATPHVAGAAALVKQKNPSWSNVQIRNHLKNTATSLGSTNLYGSGLVNAEAATR

SEQ ID NO: 52736 - protein, 269 aa, Unidentified
AQSVPWGISRVQAPAAHNRGLTGRGVKVAVLDTGISTHPDLNIRGGASFVPGEPSTQDGNGHGTHVAGTIAALNNSIGVLGVAPSAELYAVKVLGASGSGSVSSIAQGLEWAGNNGMHVANLSLGSPSPSATLEQAVNSATSRGVLVVAASGNSGAGSISYPARYANAMAVGATDQNNNRASFSQYGAGLDIVAPGVNVQSTYPGSTYASLNGTSMATPHVAGAAALVKQKNPSWSNVQIRNHLKNTATSLGSTNLYGSGLVRAEAATR

SEQ ID NO: 52737 - protein, 269 aa, Unidentified
AQSRPWGISRVQAPAAHNRGLRGSGVKVAVLDTGISTHPDLNIRGGASFVPGEPSTQDGNGHGTHVAGTIAALNNSIGVLGVAPSAELYAVKVLGASGSGSVSSIAQGLEWAGNNGMHVANLSLGSPSPSATLEQAVNSATSRGVLVVAASGNSGAGSISYPARYANAMAVGATDQNNNRASFSQYGAGLDIVAPGVNVQSTYPGSTYASLNGTSMATPHVAGAAALVKQKNPSWSNVQIRNHLKNTATSLGSTNLYGSGLVNAEAATR

SEQ ID NO: 52738 - protein, 269 aa, Unidentified
AQSVPWGISRVQAPAAHNRGLTGSGVKVAVLDTGISTHPDLNIRGGASFVPGEPSTQDGNGHGTHVAGTIAALNNSIGVLGVAPSAELYAVKVLGASGAGSVSSIAQGLEWAGNNGMHVANLSLGSPSPSATLEQAVNSATSRGVIVVAASGNSGAGSISYPARYANAMAVGATDQNNNRASFSQYGAGLDIVAPGVNVQSTYPGSTYASLNGTSMATPHVAGAAALVKQKNPSWSNVQIRNHLKNTATSLGSTNLYGSGLVNAEAATR

SEQ ID NO: 52739 - protein, 269 aa, Unidentified
AQSVPWGISRVQAPAAHNRGLAGSGVKVAVLDTGISTHPDLNIRGGASFVPGEPSTQDGNGHGTHVAGTIAALNNSIGVLGVAPSAELYAVKVLGASGAGSVSSIAQGLEWAGNNGMHVANLSLGSPSPSATLEQAVNSATSRGVLVVAASGNSGAGSISYPARYANAMAVGATDQNNNRASFSQYGAGLDIVAPGVNVQSTYPGSTYASLNGTSMATPHVAGAAALVKQKNPSWSNVQIRNHLKNTATSLGSTNLYGSGLVNAEAATR

SEQ ID NO: 52740 - protein, 269 aa, Unidentified
AQSVPWGISRVQAPAAHNRGLTGSGVKVAVLDTGISTHPDLNIRGGASFVPGEPSTQDGNGHGTHVAGTIAALNNSIGVLGVAPSAELYAVKVLGASGSGSVSSIAQGLEWAGNNGMHVANLSLGSPSPSATLEQAVNSATSRGVLVVAASGNSGAGSISYPARYANAMAVGATDQNNNRASFSQYGAGLDIVAPGVNVQSTAPGSTYASLNGTSMATPHVAGAAALVKQKNPSRSNVQIRNHLKNTATSLGSTNLYGSGLVNAEAATR

SEQ ID NO: 52741 - protein, 269 aa, Unidentified
AQSVPWGISRVQAPAAHNRGLTGSGVKVAVLDTGISTHPDLNIRGGASFVPGEPSTQDGNGHGTHVAGTIAALNNSIGVLGVAPSAELYAVKVLPASGSGSLSSIAQGLEWAGNNGMHVANLSLGSPSPSATLEQAVNSATSRGVLVVAASGNSGAGSISYPARYANAMAVGATDQNNNRASFSQYGAGLDIVAPGVNVQSTYPGSTYASLNGTSMATPHVAGAAALVKQKNPSWSNVQIRNHLKNTATSLGSTNLYGSGLVNAEAATR

SEQ ID NO: 52742 - protein, 269 aa, Unidentified
AQSVPWGISRVQAPAAHNRGLTGSGVKVAVLDTGISTHPDLNIRGGASFVPGEPSTQDGNGHGTHVAGTIAALNNSIGVLGVAPSAELYAVKVLGASGSGSVSSIAQGLEWAGNNGMHVANLSLGSPSPSATLEQAVNSATSRGVLVVAASGNSGAGSISYPARYANAMAVGATDQNNNRASFSQYGAGLDIVAPGVNVQSTYPGSTYASLNGTSMATPHVAGEAALVKQKNPSWRNVQIRNHLKNTATSLGSTNLYGSGLVNAEAATR

SEQ ID NO: 52743 - protein, 269 aa, Bacillus lentus
AQSVPWGISRVQAPAAHNRGLTGSGVKVAVLDTGISTHPDLNIRGGASFVPGEPPTQDGNGHGTHVAGTIAALNNSIGVLGVAPSAELYAVKVLGASGSGSVSSIAQGLEWAGNNGMHVANLSLGSPSPSATLEQAVNSATSRGVLVVAASGNSGAGSISYPALYANAMAVGATDQNNNRASFSQYGAGLDIVAPGVNVQSTYPGSTYASLNGTSMATPHVAGAAALVKQKNPSWSNVQIRNHLKNTATSLGSTNLYGSGLVNAEAATR

SEQ ID NO: 52744 - protein, 269 aa, Unidentified
AQSVPWGISRVQAPAAHNRGLTGSGVKVAVLDSGISTHPDLNIRGGASFVPGEPSTQDGNGHGTHVAGTIAALNNSIGVLGVAPSAELYAVKVLGASGSGSVSSIAQGLEWAGNNGMHVANLSLGSPSPSATLEQAVNSATSRGVLVVAASGNSGAGSISYPARYANAMAVGATDQNNNRADFSQYGAGLDIVAPGVNVQSTYPGSTYASLNGTSMATPHVAGAAALVKQKNPSWSNVQIRNHLKNTATSLGSTNLYGSGLVNAEAATR

SEQ ID NO: 52745 - protein, 269 aa, Unidentified
AQSVPWGISRVQAPAAHNRGLTGSGVKVAVLDTGISTHPDLNIRGGASFVPGEPSTQDGNGHGTHVAGTIAALNNSIGVLGVAPSAELYAVKVLGASGSGSVSSIAQGLEWAGDNGMHVANLSLGSPSPSATLEQAVNSATSRGVLVVAASGNSGAGSISYPARYANAMAVGATDQNNNRASFSQYGAGLDIVAPGVNVQSTYPGSTYASLNGTSMATPHVAGAAMLVKQKNPSWSNVQIRNHLKNTATSLGSTNLYGSGLVNAEAATR

SEQ ID NO: 52746 - protein, 269 aa, Unidentified
AQSVPWGISRVQAPAAHNRGLTGSGVKVAVLDTGISTHPDLNIRGGASFVPGEPSTQDGNGHGTHVAGTIAALNNNIGVLGVAPSAELYAVKVLGASGDGSVSSIAQGLEWAGNNGMHVANLSLGSPSPSATLEQAVNSATSRGVLVVAASGNSGAGSISYPARYANAMAVGATDQNNNRASFSQYGAGLDIVAPGVNVQSTYPGSTYASLNGTSMATPHVAGAAALVKQKNPSWSNVQIRNHLKNTATSLGSTNLYGSGLVNAEAATR

SEQ ID NO: 52747 - protein, 269 aa, Unidentified
AQSVPWGISRVQAPAAHNRGLTGSGVKVAVLDTGISTHPDLNIRGGASFVPGEPSTQDGNGHGTHVAGTIAALNNSIGVLGVAPSAELYAVKVLGASGSGSVSSIAQGLEWAGLNGMHVANLSLGSPSPSATLEQAVNSATSRGVLVVAASGNSGAGSIDYPARYANAMAVGATDQNNNRASFSQYGAGLDIVAPGVNVQSTYPGSTYASLNGTSMATPHVAGAAALVKQKNPSWSNVQIRNHLKNTATSLGSTNLYGSGLVNAEAATR

SEQ ID NO: 52748 - protein, 269 aa, Unidentified
AQSVPWGISRVQAPAAHNRGLTGSGVKVAVLDTGISTHPDLNIRGGASFVPGEPSTQDGNGHGTHVAGTIAALNNSIGVLGVAPSAELYAVKVLGFSSSGSVSSIAQGLEWAGNNGMHVANLSLGSPSPSATLEQAVNSATSRGVLVVAASGNSGAGSISYPARYANAMAVGATDQNNNRASFSQYGAGLDIVAPGVNVQSTYPGSTYASLNGTSMATPHVAGAAALVKQKNPSWSNVQIRNHLKNTATSLGSTNLYGSGLVNAEAATR

SEQ ID NO: 52749 - protein, 269 aa, Unidentified
AQSVPWGISRVQAPAAHNRRLTGSGVKVAVLDTGISTHPDLNIRGGASFVPGEPSTQDGNGHGTHVAGTIAALNNSIGVLGVAPSAELYAVKVLGASGSGSVSSIAQGLEWAGNNGMHVANLSLGSPSPSATLEQAVNSATSRGVLVVAASGNSGAGSISYPARYANAMAVGATDQNNNRASFSQYGAGLDIVAPGVNVQSTYPGSTYASLNGTSMATPHVAGAAALVKQKNPSWSNVQIRNHLKNTATSLGSTNLYGSGLVRAEAATR

SEQ ID NO: 52750 - protein, 269 aa, Unidentified
AQSVPWGISRVQAPAAHNRGLTGRGVKVAVLDTGISTHPDLNIRGGASFVPGEPSTQDGNGHGTHVAGTIAALNNSIGVLGVARSAELYAVKVLGASGSGSVSSIAQGLEWAGNNGMHVANLSLGSPSPSATLEQAVNSATSRGVLVVAASGNSGAGSISYPARYANAMAVGATDQNNNRASFSQYGAGLDIVAPGVNVQSTYPGSTYASLNGTSMATPHVAGAAALVKQKNPSWSNVQIRNHLKNTATSLGSTNLYGSGLVNAEAATR

SEQ ID NO: 52751 - protein, 269 aa, Unidentified
AQSVPWGISRVQAPAAHNRGLTGSGVKVAVLDTGISTHPDLNIRGGASFVPGEPSTQDGNGHGTHVAGTIAALNNSIGVLGVAPSAELYAVKVLGASGSGSVSSIAQGLEWARNNGMHVANLSLGSPSPSATLEQAVNSATSRGVLVVAASGNSGAGSISYPARYANAMAVGATDQNNNRASFSQYGAGLDIVAPGVNVQSTYPGFTYASLNGTSMATPHVAGAAALVKQKNPSWSNVQIRNHLKNTATSLGSTNLYGSGLVNAEAATR

SEQ ID NO: 52752 - protein, 269 aa, Unidentified
AQSVPWGISRVQAPAAHNRGLTGSGVKVAVLDTGISTHPDLNIRGGASFVPGEPSTQDGNGHGTHVAGTIAALNNSIGVLGVAWSAELYAVKVLGASGSGSVSSIAQGLEWAGNNGMHVANLSLGSPSPSATLEQAVNSATSRGVLVVAASGNSGAGSISYPARYANAMAVGATDQNNNRASFSQYGAGLDIVAPGVNVQSTYPGSTYASLNGTSMATPHVAGAAALVFQKNPSWSNVQIRNHLKNTATSLGSTNLYGSGLVNAEAATR

SEQ ID NO: 52753 - protein, 269 aa, Unidentified
AQSVPWGISRVQAPAAHNRGLTGSGVKVAVLDTGISTHPDLNIRGGASFVPGEPSTQDGNGHGTHVAGTIAALNNSIGVRGVAPSAELYAVKVLGASGSGSVSSIAQGLEWAGNNGMHVANLSLGSPSPSATLEQAVNSATSRGVLVVAASGNSGAGSISYPARYANAMAVGATDQNNNRASFSQYGAGLDIVAPGVNVQSTYPGFTYASLNGTSMATPHVAGAAALVKQKNPSWSNVQIRNHLKNTATSLGSTNLYGSGLVNAEAATR

SEQ ID NO: 52754 - protein, 270 aa, Aspergillus oryzae
AQSVPWGISRVQAPAAHNRGLTGSGVKVAVLDTGISTHPDLNIRGGASFVPGEPPTQDGNGHGTHVAGTIAALNNSIGVLGVAPSAELYAVKVLGASEGSGSVSSIAQGLEWAGNNGMHVANLSLGSPSPSATLEQAVNSATSRGVLVVAASGNSGAGSISYPARYANAMAVGATDQNNNRASFSQYGAGLDIVAPGVNVQSTYPGSTYASLNGTSMATPHVAGAAALVKQKNPSWSNVQIQNHLKNTATSLGSTNLYGSGLVNAEAATR

SEQ ID NO: 52755 - protein, 269 aa, Unidentified
AQSVPWGISRVQAPAAHNRGLTGSGVKVAVLDTGISTHPDLNIRGGASFVPGEPSTQDGNGHGTHVAGTIAALNNSIGVLGVAPSAELYAVKVLGASGSGALSSIAQGLEWAGNNGMHVANLSLGSPSPSATLEQAVNSATSRGVLVVAASGNSGAGSISYPARYANAMAVGATDQNNNRASFSQYGAGLDIVAPGVNVQSTYPGSTYASLNGTSMATPHVAGAAALVKQKNPSWSNVQIRNHLKNTATSLGSTNLYGSGLVNAEAATR

SEQ ID NO: 52756 - protein, 269 aa, Unidentified
AQSVPWGISRVQAPAAHNRGLRGSGVKVAVLDTGISTHPDLNIRGGASFVPGEPSTQDGNGHGTHVAGTIAALNNRIGVLGVAPSAELYAVKVLGASGSGSVSSIAQGLEWAGNNGMHVANLSLGSPSPSATLEQAVNSATSRGVLVVAASGNSGAGSISYPARYANAMAVGATDQNNNRASFSQYGAGLDIVAPGVNVQSTYPGSTYASLNGTSMATPHVAGAAALVKQKNPSWSNVQIRNHLKNTATSLGSTNLYGSGLVNAEAATR

SEQ ID NO: 52757 - protein, 269 aa, Unidentified
AQSVPWGISRVQAPAAHNRGLTGRGVKVAVLDTGISTHPDLNIRGGASFVPGEPSTQDGNGHGTHVAGTIAALNNSIGVLGVAPSAELYAVKVLGASGSGSVSSIAQGLEWAGNNGMHVANLSLGSPSPSATLEQAVNSATSRGVLVVAASGNSGAGSISYPARYANAMAVGATDQNNNRASFSQYGAGLDIVAPGVNVQSTYPGSTYASLNGTSMATPHVAGAAALVKQKNPSWRNVQIRNHLKNTATSLGSTNLYGSGLVNAEAATR

SEQ ID NO: 52758 - protein, 269 aa, Unidentified
AQSVPWGISRVQAPAAHNRGLTGSGVKVAVLDTGISTHPDLNIRGGASFVPGEPSTQDGNGHGTHVAGTIAALNNSIGVLGVAPSAELYAVKVLGASSSGSVSSIAQGLEWAGNNGMHVANLSLGSPSPSATLEQAVNSATSRGVLVVAASGNSGAGSISYPARYANAMAVGATDQNNNRASFSQYGAGLDIVAPGVNVQSTYPGSTYASLNGTSMATPHVAGAAALVKQKNPRWSNVQIRNHLKNTATSLGSTNLYGSGLVNAEAATR

SEQ ID NO: 52759 - protein, 269 aa, Unidentified
AQSVPWGISRVQAPAAHNRGLTGSGVKVAVLDTGISTHPDLNIRGGASFVPGEPSTQDGNGHGTHVAGTIAALNNSIGVLGVAPSAPLYAVKVLGASGSGSLSSIAQGLEWAGNNGMHVANLSLGSPSPSATLEQAVNSATSRGVLVVAASGNSGAGSISYPARYANAMAVGATDQNNNRASFSQYGAGLDIVAPGVNVQSTYPGSTYASLNGTSMATPHVAGAAALVKQKNPSWSNVQIRNHLKNTATSLGSTNLYGSGLVNAEAATR

SEQ ID NO: 52760 - protein, 269 aa, Unidentified
AQSVPWGISRVQAPAAHNRGLTGGGVKVAVLDTGISTHPDLNIRGGASFVPGEPSTQDGNGHGTHVAGTIAALNNSIGVLGVAPSAELYAVKVLGASGGGSVSSIAQGLEWAGNNGMHVANLSLGAPSPSATLEQAVNSATSRGVLVVAASGNSGAGSISYPARYANAMAVGATDQNNNRASFSQYGAGLDIVAPGVNVQSTYPGSTYASLNGTSSATPHVAGAAALVKQKNPSWSNVQIRNHLKNTATSLGSTNLYGSGLVNAEAATR

SEQ ID NO: 52761 - protein, 269 aa, Unidentified
AQSVPWGISRVQAPAAHNRRLTGSGVKVAVLDTGISTHPDLNIRGGASFVPGEPSTQDGNGHGTHVAGTIAALNNSIGVLGVAPSAELYAVKVLGASGSGSVSSIAQGLEWAGNNGMHVANLSLGSPSPSATLEQAVNSATSRGVLVVAASGNSGAGSISYPARYANAMAVGATDQNNNRASFSQYGAGLDIVAPGVNVQSTYPGSTYASLNGTSMATPHVAGAAALVKQKNPSWSNVQIRDHLKNTATSLGSTNLYGSGLVNAEAATR

SEQ ID NO: 52762 - protein, 269 aa, Unidentified
AQSVPWGISRVQAPAAHNRGLTGSGVKVAVLDTGISTHPDLNIRGGASFVPGEPSTQDGNGHGTHVAGTIAALNNSIGVLGVAPSAELYAVKVLGASGSGSVSSIAQGLEWAGNNGMHVANLSLGSPSPSATLEQAVNSATSRGVIVVAASGNSGAGSISYPARYANAMAVGATDQNNNRASFSQYGAGLDIVAPGVNVQSTEPGSTYASLNGTSMATPHVAGAAALVKQKNPSWSNVQIRNHLKNTATSLGSTNLYGSGLVNAEAATR

SEQ ID NO: 52763 - protein, 269 aa, Unidentified
AQSVPWGISRVQAPAAHNRGLTGRGVKVAVLDTGISTHPDLNIRGGASFVPGEPSTQDGNGHGTHVAGTIAALNNSIGVLGVAPSAELYAVKVLGASGGGSVSSIAQGLEWAGNNGMHVANLSLGSPSPSATLEQAVNSATSRGVLVVAASGNSGAGSISYPARYANAMAVGATDQNNNRASFSQYGAGLDIVAPGVNVQSTYPGSTYASLNGTSMATPHVAGAAALVKQKNPSWSNVQIRNHLKNTATSLGSTNLYGSGLVNAEAATR

SEQ ID NO: 52764 - protein, 269 aa, Bacillus sp.
AQSVPWGISRVQAPAAHNRGLTGSGVKVAVLDTGISTHPDLNIRGGASFVPGEPSTQDGNGHGTHVAGTIAALNNSIGVLGVAPNAELYAVKVLGASGSGSVSSIAQGLEWAGNNGMHVANLSLGSPSPSATLEQAVNSATSRGVLVVAASGNSGAGSISYPARYANAMAVGATDQNNNRASFSQYGAGLDIVAPGVNVQSTYPGSKYASLNGTSMATPHVAGAAALVKQKNPSWSNVQIRNHLKNTATSLGSTNLYGSGLVNAEAATR

SEQ ID NO: 52765 - protein, 269 aa, Unidentified
AQSVPWGISRVQAPAAHNRGLTGRGVKVAVLDTGISTHPDLNIRGGASFVPGEPSTQDGNGHGTHVAGTIAALNNSIGVLGVAPSAELYAVKVLGASGSGSVSSIAQGLEWAGNNGMHVANLSLGSPSPSATLEQAVNGATSRGVLVVAASGNSGAGSISYPARYANAMAVGATDQNNNRASFSQYGAGLDIVAPGVNVQSTYPGSTYASLNGTSMATPHVAGAAALVKQKNPSWSNVQIRNHLKNTATSLGSTNLYGSGLVNAEAATR

SEQ ID NO: 52766 - protein, 269 aa, Bacillus lentus
AQSVPWGISRVQAPAAHNRGLTGSGVKVAVLDTGISTHPDLNIRGGASFVPGEPSTQDGNGHGTHVAGTIAALNNSIGVLGVAPDAELYAVKVLGASGSGSVSSIAQGLEWAGNNGMHVANLSLGSPSPSATLEQAVNSATSRGVLVVAASGNSGAGSISYPARYANAMAVGATDQNNNRASFSQYGAGLDIVAPGVNVQSTYPGSTYASLNGTSMATPHVAGAAALVKQKNPSWSNVQIRRHLKNTATSLGSTNLYGSGLVNAEAATR

SEQ ID NO: 52767 - protein, 269 aa, Unidentified
AQSVPWGISRVQAPAAHRRGLTGSGVKVAVLDTGISTHPDLNIRGGASFVPGEPSTQDGNGHGTHVAGTIAALNNSIGVLGVAPSAELYAVKVLGASGSGSVSSIAQGLEWAGNNGMHVANLSLGSPSPSATLEQAVNSATSRGVLVVAASGNSGAGSISYPARYANAMAVGATDQNNNRASFSQYGAGLDIVAPGVNVQSTYPGSTYASLNGTSMATPHVAGAAALVKQKNPSWSNVQIRNHLKNTATSLGSTNLYGSGLVNALAATR

SEQ ID NO: 52768 - protein, 269 aa, Unidentified
AQSVPWGISRVQAPAAHNRGLTGSGVKVAVLDTGISTHPDLNIRGGASFVPGEPSTQDGNGHGTHVAGTIAALNNSIGVLGVAPSAELYAVKVLGASGSGSVSSIAQGLEWAGNNGMHVANLSLGSPSPSATLEQAVNSATSRCVLVVAASGNSGAGSISYPARYANAMAVGATDQNNNRASFSQYGAGLDIVAPGVNVQSTYPGSTYASLNGTSMATPHVAGAAALVKLKNPSWSNVQIRNHLKNTATSLGSTNLYGSGLVNAEAATR

SEQ ID NO: 52769 - protein, 269 aa, Unidentified
AQSVPWGISRVQAPAAHNRGLTGFGVKVAVLDTGISTHPDLNIRGGASFVPGEPSTQDGNGHGTHVAGTIAALNNSIGVLGVAPSAELYAVKVLGASGSGSVSSIAQGLEWAGLNGMHVANLSLGSPSPSATLEQAVNSATSRGVLVVAASGNSGAGSISYPARYANAMAVGATDQNNNRASFSQYGAGLDIVAPGVNVQSTYPGSTYASLNGTSMATPHVAGAAALVKQKNPSWSNVQIRNHLKNTATSLGSTNLYGSGLVNAEAATR

SEQ ID NO: 52770 - protein, 269 aa, Unidentified
AQSVPWGIARVQAPAAHNRGLRGSGVKVAVLDTGISTHPDLNIRGGASFVPGEPSTQDGNGHGTHVAGTIAALNNSIGVLGVAPSAELYAVKVLGASGSGSVSSIAQGLEWAGNNGMHVANLSLGSPSPSATLEQAVNSATSRGVLVVAASGNSGAGSISYPARYANAMAVGATDQNNNRASFSQYGAGLDIVAPGVNVQSTYPGSTYASLNGTSMATPHVAGAAALVKQKNPSWSNVQIRNHLKNTATSLGSTNLYGSGLVNAEAATR

SEQ ID NO: 52771 - protein, 269 aa, Unidentified
AQSVPWGISRVQAPAAHNRGLTGSGVKVAVLDTGISTHPDLNIRGGASFVPGEPSTQDGNGHGTHVAGTIAALNNSIGVLGVAPSAELYAVKVLGASGDGSVSSIAQGLEWAGNNGMHVANLSLGQPSPSATLEQAVNSATSRGVLVVAASGNSGAGSISYPARYANAMAVGATDQNNNRASFSQYGAGLDIVAPGVNVQSTYPGSTYASLNGTSMATPHVAGAAALVKQKNPSWSNVQIRNHLKNTATSLGSTNLYGSGLVNAEAATR

SEQ ID NO: 52772 - protein, 269 aa, Unidentified
AQSVPWGISRVQAPAAHNRGLTGSGVKVAVLDTGISTHPDLNIRGGASFVPGEPSTQDGNGHGTHVAGTIAALNNSIGVLGVAWSAELYAVKVLGASGSGSVSSIAQGLEWAGNNRMHVANLSLGSPSPSATLEQAVNSATSRGVLVVAASGNSGAGSISYPARYANAMAVGATDQNNNRASFSQYGAGLDIVAPGVNVQSTYPGSTYASLNGTSMATPHVAGAAALVKQKNPSWSNVQIRNHLKNTATSLGSTNLYGSGLVNAEAATR

SEQ ID NO: 52773 - protein, 269 aa, Unidentified
AQSVPWGISRVQAPAAHNRGLTGSGVKVAVLDTGISTHPDLNIRGGASFVPGEPSTQDGNGHGTHVAGTIAALNNSIGVLGVAPSAELYAVKVLGASGSGSVSSIAQGLEWAGNNGMHVANLSLGSPSPSATLEQAVNSATSRGVLVVAASGNSGAGSIDYPARYANAMAVGATDQNNNRASFSQYGAGLDIVAPGVNVQSTYPGSTYASLDGTSMATPHVAGAAALVKQKNPSWSNVQIRNHLKNTATSLGSTNLYGSGLVNAEAATR

SEQ ID NO: 52774 - protein, 269 aa, Unidentified
AQSVPWGISRVYAPAAHGRGLTGSGVKVAVLDTGISTHPDLNIRGGASFVPGEPSTQDGNGHGTHVAGTIAALNNSIGVLGVAPSAELYAVKVLGASGSGSVSSIAQGLEWAGNNGMHVANLSLGSPSPSATLEQAVNSATSRGVLVVAASGNSGAGSISYPARYANAMAVGATDQNNNRASFSQYGAGLDIVAPGVNVQSTYPGSTYASLNGTSMATPHVAGAAALVKQKNPSWSNVQIRNHLKNTATSLGSTNLYGSGLVNAEAATR

SEQ ID NO: 52775 - protein, 269 aa, Unidentified
AQSVPWGISRVQAPAAHNRGLTGSGVKVAVLDTGISTHPDLNIRGGASFVPGEPSTQDGNGHGTHVAGTIAALNNSIGVLGVAPSAELYAVKVLGASGSGSVSSIAQGLEWAGNNGMHVANLSLGSPSPSATLEQAVNSATSRGVLVVAASGNSGAGSISYPARYANAMAVGATDQNNNRASFSQYGAGLDIVAPGVNVQSTYPGFTYASLNGTSMATPHVAGAAALVKQKNPSRSNVQIRNHLKNTATSLGSTNLYGSGLVNAEAATR

SEQ ID NO: 52776 - protein, 269 aa, Unidentified
AQSVPWGISRVQAPASHNRGLTGSGVKVAVLDTGISTHPDLNIRGGASFVPGEPSTQDGNGHGTHVAGTIAALNNSIGVLGVAPSAELYAVKVLGASGSGGVSSIAQGLEWAGNNGMHVANLSLGSPSPSATLEQAVNSATSRGVLVVAASGNSGAGSISYPARYANAMAVGATDQNNNRASFSQYGAGLDIVAPGVNVQSTYPGSTYASLNGTSMATPHVAGAAALVKQKNPSWSNVQIRNHLKNTATSLGSTNLYGSGLVNAEAATR

SEQ ID NO: 52777 - protein, 269 aa, Unidentified
AQSVPWGISRVQAPAAHNRGLTGRGVKVAVLDTGISTHPDLNIRGGASFVPGEPSTQDGNGHGTHVAGTIAALNNSIGVLGVAPSAELYAVKVLGASGSGSVSSIAQGLEWAGNNGMHVANLSLGSPSPSATLEQAVNSATSRGVLVVAASGNSGAGSISYPARYANAMAVGATDQNNNRASFSQYGAGLDIVAPGVNVQSTYPGSTYASLNGTSMATPHVAGAAALVKQKNPSWSNVQIRNRLKNTATSLGSTNLYGSGLVNAEAATR

SEQ ID NO: 52778 - protein, 269 aa, Unidentified
AQSVPWGISRVQAPAAHNRGLTGRGVKVAVLDTGISTHPDLNIRGGASFVPGEPSTQDGNGHGTHVAGTIAALNNSIGVLGVAWSAELYAVKVLGASGSGSVSSIAQGLEWAGNNGMHVANLSLGSPSPSATLEQAVNSATSRGVLVVAASGNSGAGSISYPARYANAMAVGATDQNNNRASFSQYGAGLDIVAPGVNVQSTYPGSTYASLNGTSMATPHVAGAAALVKQKNPSWSNVQIRNHLKNTATSLGSTNLYGSGLVNAEAATR

SEQ ID NO: 52779 - protein, 269 aa, Unidentified
AQSVPWGISRVQAPAAHNRGLTGSGVKVAVLDTGISTHPDLNIRGGASFVPGEPSTQDGNGHGTHVAGTIAALNNSIGVLGVAPSAELYAVKVLGQTGSGSVSSIAQGLEWAGNNGMHVANLSLGSPSPSATLEQAVNSATSRGVLVVAASGNSGAGSISYPARYANAMAVGATDQNNNRASFSQYGAGLDIVAPGVNVQSTYPGSTYASLNGTSMATPHVAGAAALVKQKNPSWSNVQIRNHLKNTATSLGSTNLYGSGLVNAEAATR

SEQ ID NO: 52780 - protein, 269 aa, Unidentified
AQSVPWGISRVQAPAAHNRGLTGSGVKVAVLDTGISTHPDLNIRGGASFVPGEPSTQDGNGHGTHVAGTIAALNNSIGVLGVAPSAELYAVKVLGASGSGSVSSIAQGLEWAGNNGMHVANLSLGSPSPSATLEQAVNSATSRGVLVVAASGNSGAGSISYPARYANAMAVGATDQNNNRASFSQYGAGLDIVAPGVNVQSTYPGSTYASLNGTSMATPHVAGAAALVKQKNPSRSNVQIRNRLKNTATSLGSTNLYGSGLVNAEAATR

SEQ ID NO: 52781 - protein, 269 aa, Bacillus sp.
AQSVPWGISRVQAPAAHNRGLTGSGVKVAVLDTGISTHPDLNIRGGASFVPGEPSTQDGNGHGTHVAGTIAALNNSIGVLGVAPNAELYAVKVLGASGSGSVSSIAQGLEWAGNNGMHVANLSLGSPSPSATLEQAVNSATSRGVLVVAASGNSGAGSIGYPARYANAMAVGATDQNNNRASFSQYGAGLDIVAPGVNVQSTYPGSTYASLNGTSMATPHVAGAAALVKQKNPSWSNVQIRNHLKNTATSLGSTNLYGSGLVNAEAATR

SEQ ID NO: 52782 - protein, 269 aa, Unidentified
AQSVPWGIARVQAPAAHRRGLTGSGVKVAVLDTGISTHPDLNIRGGASFVPGEPSTQDGNGHGTHVAGTIAALNNSIGVLGVAPSAELYAVKVLGASGSGSVSSIAQGLEWAGNNGMHVANLSLGSPSPSATLEQAVNSATSRGVLVVAASGNSGAGSISYPARYANAMAVGATDQNNNRASFSQYGAGLDIVAPGVNVQSTYPGSTYASLNGTSMATPHVAGAAALVKQKNPSWSNVQIRNHLKNTATSLGSTNLYGSGLVNAEAATR

SEQ ID NO: 52783 - protein, 269 aa, Unidentified
AQSVPWGISRVQAPAAHNRGLTGSGVKVAVLDTGISTHPDLNIRGGASFVPGEPSTQDGNGHGTHVAGTIAALNNSIGVLGVAPSAELYAVKVLGASGSGSNSSIAQGLEWAGNNGMHVANLSLGSPSPSATLEQAVNSATSRGVLVVAASGNSGAGSISYPARYANAMAVGATDQNNNRASFSQYGAGLDIVAPGVNVQSTWPGSTYASLNGTSMATPHVAGAAALVKQKNPSWSNVQIRNHLKNTATSLGSTNLYGSGLVNAEAATR

SEQ ID NO: 52784 - protein, 269 aa, Unidentified
AQSVPWGISRVQAPAAHNRGLTGSGVKVAVLDTGISTHPDLNIRGGASFVPGEPSTQDGNGHGTHVAGTIAALNNSIGVLGVAPSAELYAVKVLGASGSGSVSSIAQGVEWAGNNGMHVANLSLGSPSPSATLEQAVNSATSRGVLVVAASGNSGAGSISYPARYANAMAVGATDQNNNRADFSQYGAGLDIVAPGVNVQSTYPGSTYASLNGTSMATPHVAGAAALVKQKNPSWSNVQIRNHLKNTATSLGSTNLYGSGLVNAEAATR

SEQ ID NO: 52785 - protein, 269 aa, Unidentified
AQSVPWGISRVQAPAAHNRGLTGGGVKVAVLDTGISTHPDLNIRGGASFVPGEPSTQDGNGHGTHVAGTIAALNNNIGVLGVAPSAELYAVKVLGASGQGSVSSIAQGLEWAGNNGMHVANLSLGSPSPSATLEQAVNSATSRGVLVVAASGNSGAGSISYPARYANAMAVGATDQNNNRASFSQYGAGLDIVAPGVNVQSTYPGSTYASLNGTSSATPHVAGAAALVKQKNPSWSNVQIRNHLKNTATSLGSTNLYGSGLVNAEAATR

SEQ ID NO: 52786 - protein, 269 aa, Unidentified
AQSVPWGISRVQAPAAHNRGLTGSGVKVAVLDTGISTHPDLNIRGGASFVPGEPSTQDGNGHGTHVAGTIAALNNSIGVLGVAPSAELYAVKVLGASGSGSVSSIAQGLEWAGNNGMHVANLSLGSPSPSATLEQAVNSATSRGVLVVAASGNSGAGSISYPARYANAMAVGATDQNNNRASFSQYGAGLDIVAPGVNVQSTYPGSTYASLNGTSMATPHVAGAAVLVKQKNPSWSNVQIRNRLKNTATSLGSTNLYGSGLVNAEAATR

SEQ ID NO: 52787 - protein, 269 aa, Unidentified
AQSVPWGISRVQAPAAHNRGLTGSGVKVAVLDTGISTHPDLNIRGGASFVPGEPSTQDGEGHGTHVAGTIAALNNSIGVLGVAPSAELYAVKVLGASGSGSVSSIAQGLEWAGNNGMHVANLSLGSPSPSATLEQAVNSATSRGVLVVAASGNSGAGSISYPARYANAMAVGATDQNNNRASFSQYGAGLDIVAPGVNVQSTEPGSTYASLNGTSMATPHVAGAAALVKQKNPSWSNVQIRNHLKNTATSLGSTNLYGSGLVNAEAATR

SEQ ID NO: 52788 - protein, 269 aa, Unidentified
AQSVPWGISRVQAPAAHNRGLTGSGVKVAVLDTGISTHPDLNIRGGASFVPGEPSTQDGNGHGTHVAGTIAALNNSIGVLGVAPSAELYAVKVLGASGSGSVSSIAQGLEWAGNNGMHVANLSLGVMSPSATLEQAVNSATSRGVLVVAASGNSGAGSISYPARYANAMAVGATDQNNNRASFSQYGAGLDIVAPGVNVQSTYPGSTYASLNGTSMATPHVAGAAALVKQKNPSWSNVQIRNHLKNTATSLGSTNLYGSGLVNAEAATR

SEQ ID NO: 52789 - protein, 269 aa, Unidentified
AQSVPWGISRVQAPAAHRRGLTGRGVKVAVLDTGISTHPDLNIRGGASFVPGEPSTQDGNGHGTHVAGTIAALNNSIGVLGVAPSAELYAVKVLGASGSGSVSSIAQGLEWAGNNGMHVANLSLGSPSPSATLEQAVNSATSRGVLVVAASGNSGAGSISYPARYANAMAVGATDQNNNRASFSQYGAGLDIVAPGVNVQSTYPGSTYASLNGTSMATPHVAGAAALVKQKNPSWSNVQIRNHLKNTATSLGSTNLYGSGLVNAEAATR

SEQ ID NO: 52790 - protein, 269 aa, Unidentified
AQSVPWGISRVQAPAAHNRGLTGSGVKVAVLDTGISTHPDRNIRGGASFVPGEPSTQDGNGHGTHVAGTIAALNNSIGVRGVAPSAELYAVKVLGASGSGSVSSIAQGLEWAGNNGMHVANLSLGSPSPSATLEQAVNSATSRGVLVVAASGNSGAGSISYPARYANAMAVGATDQNNNRASFSQYGAGLDIVAPGVNVQSTYPGSTYASLNGTSMATPHVAGAAALVKQKNPSWSNVQIRNHLKNTATSLGSTNLYGSGLVNAEAATR

SEQ ID NO: 52791 - protein, 269 aa, Unidentified
AQSVPWGISRVQAPAAHNRGLTGSGVKVAVLDTGISTHPDLNIRGGASFVPGEPSTQDGNGHGTHVAGTIAALNNSIGVLGVAPSAELYAVKVLGASGSGSVSSIAQGLEWAGNNGMHVANLSLGSPSPSATLEQAVNSATSRGVLVVAASGNSGAGSISYPARYANAMAVGATDQNNNRASFSQYGAGLDIVAPGVNVQSTYPGSTYASLNGTSMATPHVAGAAALVKQKNPSWRNRQIRNHLKNTATSLGSTNLYGSGLVNAEAATR

SEQ ID NO: 52792 - protein, 269 aa, Unidentified
AQSVPWGISRVQAPAAHNRGLAGSGVKVAVLDTGISTHPDLNIRGGASFVPGEPSTQDGNGHGTHVAGTIAALNNSIGVLGVAPSAELYAVKVLGASGSGSVSSIAQGLEWAGNNGMHVANLSLGSPSPSATLEQAVNSATSRGVLVVAASGNSGAGSISYPARYANAMAVGATDQNNNRASFSQYGAGLDIVAPGVNVQSTYPGSTYASLNGTSMATPHVAGAAALVKQKNPSWSNVQIRNRLKNTATSLGSTNLYGSGLVNAEAATR

SEQ ID NO: 52793 - protein, 269 aa, Unidentified
AQSVPWGISRVQAPAAHNRKLTGSGVKVAVLDTGISTHPDLNIRGGASFVPGEPSTQDGEGHGTHVAGTIAALNNSIGVLGVAPSAELYAVKVLGASGSGSVSSIAQGLEWAGLNGMHVANLSLGSPSPSATLEQAVNSATSRGVLVVAASGNSGAGSISYPARYANAMAVGATDQNNNRASFSQYGAGLDIVAPGVNVQSTYPGSTYASLNGTSSATPHVAGAAALVKQKNPSWSNVQIRNHLKNTATSLGSTNLYGSGLVNAEAATR

SEQ ID NO: 52794 - protein, 269 aa, Bacillus sp.
AQSVPWGISRVQAPAAHNRGLTGSGVKVAVLDTGISTHPDLNIRGGASFVPGEPSTQDGNGHGTHVAGTIAALNNSIGVLGVAPNAELYAVKVLGASGSGSVSSIAQGLEWAGNNGMHVANLSLGSPSPSATLEQAVNSATSRGVLVVAASGNSGAGSISYPARYANAMAVGATDQNNNRASFSQYGAGLDIVAPGVNVQSTYPGSTYASLNGTSMATPHVAGAAALVKQKNPSRSNVQIRNHLKNTATSLGSTNLYGSGLVNAEAATR

SEQ ID NO: 52795 - protein, 269 aa, Unidentified
AQSVPWGISRVQAPAAHNRGLTGSGVKVAVLDTGISTHPDLNIRGGASFVPGEPSTQDGNGHGTHVAGTIAALNNRIGVLGVAPSAELYAVKVLGASGSGSVSSIAQGLEWAGNNGMHVANLSLGSPSPSATLEQAVNSATSRGVLVVAASGNSGAGSISYPARYANAMAVGATDQNNNRASFSQYGAGLDIVAPGVNVQSTYPGSTYASLNGTSMATPHVAGAAALVKQKNPSWSNVQIRNHLKNTATSLGSTNLYGSGLVNALAATR

SEQ ID NO: 52796 - protein, 269 aa, Unidentified
AQSVPWGISRVQAPAAHNRGLTGSGVKVAVLDTGISTHPDLNIRGGASFVPGEPSTQDGNGHGTHVAGTIAALNNSIGVLGVAPSAELYAVKVLGASGSGSVSSIAQGLEWAGNNGMHVANLSLGSPSPSATLEQAVNSATSRGVLVVAASGNSGAGSISYPARYANAMAVGATDQNNNRADFSQYGAGLDIVAPGVNVQSTEPGSTYASLNGTSMATPHVAGAAALVKQKNPSWSNVQIRNHLKNTATSLGSTNLYGSGLVNAEAATR

SEQ ID NO: 52797 - protein, 269 aa, Unidentified
AQSVPWGISRVQAPAAHNRGLTGSGVKVAVLDTGISTHPDLNIRGGASFVPGEPSTQDGNGHGTHVAGTIAALNNSIGVLGVAPSAPLYAVKVLGASGAGSVSSIAQGLEWAGNNGMHVANLSLGSPSPSATLEQAVNSATSRGVLVVAASGNSGAGSISYPARYANAMAVGATDQNNNRASFSQYGAGLDIVAPGVNVQSTYPGSTYASLNGTSMATPHVAGAAALVKQKNPSWSNVQIRNHLKNTATSLGSTNLYGSGLVNAEAATR

SEQ ID NO: 52798 - protein, 269 aa, Unidentified
AQSVPWGISRVQAPAAHNRGLTGSGVKVAVLDTGISTHPDLNIRGGASFVPGEPSTQDGNGHGTHVAGTIAALNNRIGVRGVAPSAELYAVKVLGASGSGSVSSIAQGLEWAGNNGMHVANLSLGSPSPSATLEQAVNSATSRGVLVVAASGNSGAGSISYPARYANAMAVGATDQNNNRASFSQYGAGLDIVAPGVNVQSTYPGSTYASLNGTSMATPHVAGAAALVKQKNPSWSNVQIRNHLKNTATSLGSTNLYGSGLVNAEAATR

SEQ ID NO: 52799 - protein, 269 aa, Unidentified
AQSVPWGISRVQAPAAHNRGLTGSGVKVAVLDTGISTHPDLNIRGGASFVPGEPSTQDGNGHGTHVAGTIAALNNSIGVLGVAPSAELYAVKVLGASGSGEVESIAQGLEWAGNNGMHVANLSLGSPSPSATLEQAVNSATSRGVLVVAASGNSGAGSISYPARYANAMAVGATDQNNNRASFSQYGAGLDIVAPGVNVQSTYPGSTYASLNGTSMATPHVAGAAALVKQKNPSWSNVQIRNHLKNTATSLGSTNLYGSGLVNAEAATR

SEQ ID NO: 52800 - protein, 269 aa, Unidentified
AQSVPWGISRVQAPAAHNRGLTGSGVKVAVLDTGISTHPDLNIRGGASFVPGEPSTQDGNGHGTHVAGTIAALDNSIGVLGVAPSAELYAVKVLGASGSGAISSIAQGLEWAGNNGMHVANLSLGSPSPSATLEQAVNSATSRGVLVVAASGNSGAGSISYPARYANAMAVGATDQNNNRASFSQYGAGLDIVAPGVNVQSTYPGSTYASLNGTSSATPHVAGAAALVKQKNPSWSNVQIRNHLKNTATSLGSTNLYGSGLVNAEAATR

SEQ ID NO: 52801 - protein, 269 aa, Unidentified
AQSVPWGISRVQAPAAHNRGLTGSGVKVAVLDTGISTHPDRNIRGGASFVPGEPSTQDGNGHGTHVAGTIAALNNSIGVLGVAPSAELYAVKVLGASGSGSVSSIAQGLEWAGNNGMHVANLSLGSPSPSATLEQAVNSATSRGVLVVAASGNSGAGSISYPARYANAMAVGATDQNNNRASFSQYGAGLDIVAPGVNVQSTYPGSTYASLNGTSMATPHVAGAAALVKQKNPSRSNVQIRNHLKNTATSLGSTNLYGSGLVNAEAATR

SEQ ID NO: 52802 - protein, 269 aa, Unidentified
AQSVPWGISRVQAPAAHNRRLTGRGVKVAVLDTGISTHPDLNIRGGASFVPGEPSTQDGNGHGTHVAGTIAALNNSIGVLGVAPSAELYAVKVLGASGSGSVSSIAQGLEWAGNNGMHVANLSLGSPSPSATLEQAVNSATSRGVLVVAASGNSGAGSISYPARYANAMAVGATDQNNNRASFSQYGAGLDIVAPGVNVQSTYPGSTYASLNGTSMATPHVAGAAALVKQKNPSWSNVQIRNHLKNTATSLGSTNLYGSGLVNAEAATR

SEQ ID NO: 52803 - protein, 269 aa, Unidentified
AQSVPWGISRVQAPAAHNRGLTGSGVKVAVLDTGISTHPDLNIRGGASFVPGEPSTQDGNGHGTHVAGTIAALNNSIGVLGVAPSAELYAVKVLGASGSGGLSSIAQGLEWAGNNGMHVANLSLGSPSPSATLEQAVNSATSRGVLVVAASGNSGAGSISYPARYANAMAVGATDQNNNRASFSQYGAGLDIVAPGVNVQSTYPGSTYASLNGTSMATPHVAGAAALVKQKNPSWSNVQIRNHLKNTATSLGSTNLYGSGLVNAEAATR

SEQ ID NO: 52804 - protein, 269 aa, Unidentified
AQSVPWGISRVQAPAAHNRKLTGSGVKVAVLDTGISTHPDLNIRGGASFVPGEPSTQDGNGHGTHVAGTIAALNNSIGVLGVAPSAELYAVKVLGASGSGSVSSIAQGLEWAGLNGMHVANLSLGSPSPSATLEQAVNSATSRGVLVVAASGNSGAGSISYPARYANAMAVGATDQNNNRASFSQYGAGLDIVAPGVNVQSTYPGSAYASLNGTSSATPHVAGAAALVKQKNPSWSNVQIRNHLKNTATSLGSTNLYGSGLVNAEAATR

SEQ ID NO: 52805 - protein, 269 aa, Unidentified
AQSVPWGISRVQAPAAHNRGLTGSGVKVAVLDTGISTHPDLNIRGGASFVPGEPSTQDGNGHGTHVAGTIAALNNSIGVLGVAPSAELYAVKVLGASGSGSVSSIAQGLEWARNNGMHVANLSLGSPSPSATLEQAVNSATSRGVLVVAASGNSGAGSISYPARYANAMAVGATDQNNNRASFSQYGAGLDIVAPGVNVQSTYPGSTYASLNGTSMATPHVAGAAALVKQKNPSWRNVQIRNHLKNTATSLGSTNLYGSGLVNAEAATR

SEQ ID NO: 52806 - protein, 269 aa, Unidentified
AQSVPWGISRVQAPAAHNRGLTGSGVKVAVLDTGISTHPDLNIRGGASFVPGEPSTQDGNGHGTHVAGTIAALNNSIGVRGVAPSAELYAVKVLGASGSGSVSSIAQGLEWAGNNGMHVANLSLGSPSPSATLEQAVNSATSRGVLVVAASGNSGAGSISYPARYANAMAVGATDQNNNRASFSQYGAGLDIVAPGVNVQSTYPGSTYASLNGTSMATPHVAGAAALVKQKNPSWSNVQIRNHLKNTATSLGSTNLYGSGLVNALAATR

SEQ ID NO: 52807 - protein, 269 aa, Unidentified
AQSVPWGISRVQAPAAHNRGLTGSGVKVAVLDTGISTHPDLNIRGGASFVPGEPSTQDGNGHGTHVAGTIAALNNSIGVLGVAPSAELYAVKVLGASGSGSVSSIAQGLEWAGNNGMHVANLSLGFXSPSATLEQAVNSATSRGVLVVAASGNSGAGSISYPARYANAMAVGATDQNNNRASFSQYGAGLDIVAPGVNVQSTYPGSTYASLNGTSMATPHVAGAAALVKQKNPSWSNVQIRNHLKNTATSLGSTNLYGSGLVNAEAATR

SEQ ID NO: 52808 - protein, 269 aa, Unidentified
AQSVPWGISRVQAPAAHRRRLTGSGVKVAVLDTGISTHPDLNIRGGASFVPGEPSTQDGNGHGTHVAGTIAALNNSIGVLGVAPSAELYAVKVLGASGSGSVSSIAQGLEWAGNNGMHVANLSLGSPSPSATLEQAVNSATSRGVLVVAASGNSGAGSISYPARYANAMAVGATDQNNNRASFSQYGAGLDIVAPGVNVQSTYPGSTYASLNGTSMATPHVAGAAALVKQKNPSWSNVQIRNHLKNTATSLGSTNLYGSGLVNAEAATR

SEQ ID NO: 52809 - protein, 269 aa, Unidentified
AQSRPWGISRVQAPAAHNRRLTGSGVKVAVLDTGISTHPDLNIRGGASFVPGEPSTQDGNGHGTHVAGTIAALNNSIGVLGVAPSAELYAVKVLGASGSGSVSSIAQGLEWAGNNGMHVANLSLGSPSPSATLEQAVNSATSRGVLVVAASGNSGAGSISYPARYANAMAVGATDQNNNRASFSQYGAGLDIVAPGVNVQSTYPGSTYASLNGTSMATPHVAGAAALVKQKNPSWSNVQIRNHLKNTATSLGSTNLYGSGLVNAEAATR

SEQ ID NO: 52810 - protein, 269 aa, Unidentified
AQSVPWGISRVQAPAAHNRGLTGSGVKVAVLDTGISTHPDLNIRGGASFVPGEPSTQDGNGHGTHVAGTIAALNNSIGVLGVAPSAELYAVKVLGASGSGSISSIAQGVEWAGNNGMHVANLSLGSPSPSATLEQAVNSATSRGVLVVAASGNSGAGSISYPARYANAMAVGATDQNNNRASFSQYGAGLDIVAPGVNVQSTYPGSTYASLNGTSMATPHVAGAAALVKQKNPSWSNVQIRNHLKNTATSLGSTNLYGSGLVNAEAATR

SEQ ID NO: 52811 - protein, 269 aa, Unidentified
AQSVPWGISRVQAPAAHNRGLTGSGVKVAVLDTGISTHPDLNIRGGASFVPGEPSTQDGNGHGTHVAGTIAALNNNIGVLGVAPSAELYAVKVLGASGSGSVSSIAQGLEWAGNNGMHVANLSLGSPSPSATLEQAVNSATSRGVLVVAASGNSGAGSISYPARYANAMAVGATDQNNNRASFSQYGAGLDIVAPGVNVQSTYPGSTYASENGTSMATPHVAGAAALVKQKNPSWSNVQIRNHLKNTATSLGSTNLYGSGLVNAEAATR

SEQ ID NO: 52812 - protein, 269 aa, Unidentified
AQSVPWGIARVQAPAAHNRGLTGSGVKVAVLDTGISTHPDRNIRGGASFVPGEPSTQDGNGHGTHVAGTIAALNNSIGVLGVAPSAELYAVKVLGASGSGSVSSIAQGLEWAGNNGMHVANLSLGSPSPSATLEQAVNSATSRGVLVVAASGNSGAGSISYPARYANAMAVGATDQNNNRASFSQYGAGLDIVAPGVNVQSTYPGSTYASLNGTSMATPHVAGAAALVKQKNPSWSNVQIRNHLKNTATSLGSTNLYGSGLVNAEAATR

SEQ ID NO: 52813 - protein, 269 aa, Unidentified
AQSVPWGISRVQAPAAHNRGLTGSGVKVAVLDTGISTHPDRNIRGGASFVPGEPSTQDGNGHGTHVAGTIAALNNSIGVLGVAPSAELYAVKVLGASGSGSVSSIAQGLEWAGNNGMHVANLSLGSPSPSATLEQAVNSATSRGVLVVAASGNSGAGSISYPARYANAMAVGATDQNNNRASFSQYGAGLDIVAPGVNVQSTYPGFTYASLNGTSMATPHVAGAAALVKQKNPSWSNVQIRNHLKNTATSLGSTNLYGSGLVNAEAATR

SEQ ID NO: 52814 - protein, 269 aa, Unidentified
AQSVPWGISRVQAPAAHNRRLTGSGVKVAVLDTGISTHPDLNIRGGASFVPGEPSTQDGNGHGTHVAGTIAALDNSIGVLGVAPSAELYAVKVLGASGSGSVSSIAQGLEWAGNNGMHVANLSLGSPSPSATLEQAVNSATSRGVLVVAASGNSGAGSISYPARYANAMAVGATDQNNNRASFSQYGAGLDIVAPGVNVQSTYPGSTYASLNGTSMATPHVAGAAALVKQKNPSWSNVQIRNHLKNTATSLGSTNLYGSGLVNAEAATR

SEQ ID NO: 52815 - protein, 269 aa, Unidentified
AQSVPWGISRVQAPAAHNRGLTGSGVKVAVLDTGISTHPDLNIRGGASFVPGEPSTQDGNGHGTHVAGTIAALNNSIGVLGVAPSAELYAVKVLGASGSGAVSSIAQGLEWAGNNGMHVANLSLGNPSPSATLEQAVNSATSRGVLVVAASGNSGAGSISYPARYANAMAVGATDQNNNRASFSQYGAGLDIVAPGVNVQSTYPGSTYASLNGTSMATPHVAGAAALVKQKNPSWSNVQIRNHLKNTATSLGSTNLYGSGLVNAEAATR

SEQ ID NO: 52816 - protein, 272 aa, Unidentified
AQSVPWGISRVQAPAAHNRGLTGSGVKVAVLDTGISTHPDLNIRGGASFVPGEPSTQDGNGHGTHVAGTIAALNNSIGVLGVAPSAELYAVKVLGAGGGTXTGSVSSIAQGLEWAGNNGMHVANLSLGSPSPSATLEQAVNSATSRGVLVVAASGNSGAGSISYPARYANAMAVGATDQNNNRASFSQYGAGLDIVAPGVNVQSTYPGSTYASLNGTSMATPHVAGAAALVKQKNPSWSNVQIRNHLKNTATSLGSTNLYGSGLVNAEAATR

SEQ ID NO: 52817 - protein, 269 aa, Unidentified
AQSRPWGISRVQAPAAHNRGLTGSGVKVAVLDTGISTHPDLNIRGGASFVPGEPSTQDGNGHGTHVAGTIAALNNSIGVLGVAPSAELYAVKVLGASGSGSVSSIAQGLEWAGNNGMHVANLSLGSPSPSATLEQAVNSATSRGVLVVAASGNSGAGSISYPARYANAMAVGATDQNNNRASFSQYGAGLDIVAPGVNVQSTYPGSTYASLNGTSMATPHVAGAAALVKQKNPSWSNVQIRNHLKNTATSLGSTNLYGSGLVRAEAATR

SEQ ID NO: 52818 - protein, 269 aa, Unidentified
AQSVPWGISRVQAPAAHNRGLTGSGVKVAVLDTGISTHPDLNIRGGASFVPGEPSTQDGNGHGTHVAGTIAALNNSIGVLGVAPSAELYAVKVLGASGSGSVSSIAQGLEWAGNNGMHVANLSLGSPEPSATLEQAVNSATSRGVLVVAASGNSGAGSISYPARYANAMAVGATDQNNNRASFSQYGAGLDIVAPGVNVQSTYPGSTYASLNGTSMATPHVAGAAALVKQKNPSWSNVQIRNHLKNTATSLGSTNLYGSGLVKAEAATR

SEQ ID NO: 52819 - protein, 269 aa, Unidentified
AQSVPWGISRVQAPAAHNRGLAGSGVKVAVLDTGISTHPDLNIRGGASFVPGEPSTQDGEGHGTHVAGTIAALNNSIGVLGVAPSAELYAVKVLGASGSGSVSSIAQGLEWAGNNGMHVANLSLGSPSPSATLEQAVNSATSRGVLVVAASGNSGAGSISYPARYANAMAVGATDQNNNRASFSQYGAGLDIVAPGVNVQSTYPGSTYASLNGTSMATPHVAGAAALVKQKNPSWSNVQIRNHLKNTATSLGSTNLYGSGLVNAEAATR

SEQ ID NO: 52820 - protein, 269 aa, Unidentified
AQSVPWGISRVQAPAAHNRGLTGSGVKVAVLDTGISTHPDLNIRGGASFVPGEPSTQDGNGHGTHVAGTIAALNNSIGVLGVAPSAELYAVKVLGFSGSGSLSSIAQGLEWAGNNGMHVANLSLGSPSPSATLEQAVNSATSRGVLVVAASGNSGAGSISYPARYANAMAVGATDQNNNRASFSQYGAGLDIVAPGVNVQSTYPGSTYASLNGTSMATPHVAGAAALVKQKNPSWSNVQIRNHLKNTATSLGSTNLYGSGLVNAEAATR

SEQ ID NO: 52821 - protein, 269 aa, Unidentified
AQSRPWGISRVQAPAAHNRGLTGRGVKVAVLDTGISTHPDLNIRGGASFVPGEPSTQDGNGHGTHVAGTIAALNNSIGVLGVAPSAELYAVKVLGASGSGSVSSIAQGLEWAGNNGMHVANLSLGSPSPSATLEQAVNSATSRGVLVVAASGNSGAGSISYPARYANAMAVGATDQNNNRASFSQYGAGLDIVAPGVNVQSTYPGSTYASLNGTSMATPHVAGAAALVKQKNPSWSNVQIRNHLKNTATSLGSTNLYGSGLVNAEAATR

SEQ ID NO: 52822 - protein, 269 aa, Unidentified
AQSVPWGISRVQAPAAHNRGLTGSGVKVAVLDTGISTHPDLRIRGGASFVPGEPSTQDGNGHGTHVAGTIAALNNSIGVLGVAPSAELYAVKVLGASSSGSVSSIAQGLEWAGNNGMHVANLSLGSPSPSATLEQAVNSATSRGVLVVAASGNSGAGSISYPARYANAMAVGATDQNNNRASFSQYGAGLDIVAPGVNVQSTYPGSTYASLNGTSMATPHVAGAAALVKQKNPSWSNVQIRNHLKNTATSLGSTNLYGSGLVNAEAATR

SEQ ID NO: 52823 - protein, 269 aa, Unidentified
AQSVPWGISRVQAPAAHNRGLTGSGVKVAVLDTGISTHPDLNIRGGASFVPGEPSTQDGNGHGTHVAGTIAALNNSIGVLGVAPSAELYAVKVLGASGSGSVSSIAQGLEWAGNNGMHVANLSLGSPSPSATLEQAVNSATSRGVLVVAASGNSGAGSIDYPARYANAMAVGATDQNNNRASFSQYGAGLDIVAPGVNVQSTYPGSAYASLNGTSMATPHVAGAAALVKQKNPSWSNVQIRNHLKNTATSLGSTNLYGSGLVNAEAATR

SEQ ID NO: 52824 - protein, 269 aa, Unidentified
AQSVPWGISRVQAPAAHNRGLTGRGVKVAVLDSGISTHPDLNIRGGASFVPGEPSTQDGNGHGTHVAGTIAALNNSIGVLGVAPSAELYAVKVLGASGSGSVSSIAQGLEWAGNNGMHVANLSLGSPSPSATLEQAVNSATSRGVLVVAASGNSGAGSISYPARYANAMAVGATDQNNNRASFSQYGAGLDIVAPGVNVQSTYPGSTYASLNGTSMATPHVAGAAALVKQKNPSWSNVQIRNHLKNTATSLGSTNLYGSGLVNAEAATR

SEQ ID NO: 52825 - protein, 269 aa, Unidentified
AQSVPWGISRVQAPAAHNRGLTGSGVKVAVLDTGISTHPDLNIRGGASFVPGEPSTQDGEGHGTHVAGTIAALNNSIGVLGVAPSAELYAVKVLGASGSGSVSSIAQGLEWAGNNGMHVANLSLGSPSPSATLEQAVNSATSRGVLVVAASGNSGAGSISYPARYANAMAVGATDQNNNRADFSQYGAGLDIVAPGVNVQSTYPGSTYASLNGTSMATPHVAGAAALVKQKNPSWSNVQIRNHLKNTATSLGSTNLYGSGLVNAEAATR

SEQ ID NO: 52826 - protein, 269 aa, Unidentified
AQSVPWGISRVQAPAAHNRGLTGSGVKVAVLDTGISTHPDLNIRGGASFVPGEPSTQDGNGHGTHVAGTIAALNNSIGVLGVAPSAELYAVKVLGASGSGSVSSIAQGLEWAGNNGMHVANLSLGIPSPSATLEQAVNSATSRGVLVVAASGNSGAGSISYPARYANAMAVGATDQNNNRADFSQYGAGLDIVAPGVNVQSTYPGSTYASLNGTSMATPHVAGAAALVKQKNPSWSNVQIRNHLKNTATSLGSTNLYGSGLVNAEAATR

SEQ ID NO: 52827 - protein, 269 aa, Unidentified
AQSVPWGISRVQAPAAHNRGLTGSGVKVAVLDTGISTHPDLNIRGGASFVPGEPSTQDGNGHGTHVAGTIAALNNSIGVLGVAPSAELYAVKVLGFSGGGSVSSIAQGLEWAGNNGMHVANLSLGSPSPSATLEQAVNSATSRGVLVVAASGNSGAGSISYPARYANAMAVGATDQNNNRASFSQYGAGLDIVAPGVNVQSTYPGSTYASLNGTSMATPHVAGAAALVKQKNPSWSNVQIRNHLKNTATSLGSTNLYGSGLVNAEAATR

SEQ ID NO: 52828 - protein, 269 aa, Unidentified
AQSVPWGISRVQAPAAHNRGLTGSGVKVAVLDTGISTHPDLNIRGGASFVPGEPSTQDGNGHGTHVAGTIAALNNSIGVLGVAPSAELYAAKVLGASGSGCVSSIAQGLEWAGNNGMHVANLSLGSPSPSATLEQAVNSATSRGVLVVAASGNSGAGSISYPARYANAMAVGATDQNNNRASFSQYGAGLDIVAPGVNVQSTYPGSTYASLNGTSMATPHVAGAAALVKQKNPSWSNVQIRNHLKNTATSLGSTNLYGSGLVNAEAATR

SEQ ID NO: 52829 - protein, 269 aa, Unidentified
AQSVPWGISRVQAPAAHNRGLTGSGVKVAVLDTGISTHPDLNIRGGASFVPGEPSTQDGNGHGTHVAGTIAALNNSIGVLGVAPSAPLYAVKVLGASGSGSVSSIAQGLEWAGNNGMHVANLSLGSPSPSATLEQAVNSATSRGVLVVAASGNSGAGSISYPARYANAMAVGATDQNNNHASFSQYGAGLDIVAPGVNVQSTYPGSTYASLNGTSMATPHVAGAAALVKQKNPSWSNVQIRNHLKNTATSLGSTNLYGSGLVNAEAATR

SEQ ID NO: 52830 - protein, 269 aa, Unidentified
AQSVPWGISRVQAPAAHNRGLTGSGVKVAVLDTGISTHPDLNIRGGASFVPGEPSTQDGNGHGTHVAGTIAALNNSIGVLGVAPSAELYAVKVLGASGSGSVSSIAQGLEWAGNNGMHVANLSLGSPSPSATLEQAVNSATSRGVLVVAASGNSGAGSISYPARYANAMAVGATDQNNNRASFSQYGAGLDIVAPGVNVQSTYPGSTYASLNGTSMATPHVAGAAALVFQKNPSWSFVQIRNHLKNTATSLGSTNLYGSGLVNAEAATR

SEQ ID NO: 52831 - protein, 269 aa, Unidentified
AQSVPWGISRVQAPAAHNRGLTGSGVKVAVLDTGISTHPDLNIRGGASFVPGEPSTQDGNGHGTHVAGTIAALNNSIGVLGVAPSAELYAVKVLGASGGGAVSSIAQGLEWAGNNGMHVANLSLGSPSPSATLEQAVNSATSRGVLVVAASGNSGAGSISYPARYANAMAVGATDQNNNRASFSQYGAGLDIVAPGVNVQSTYPGSTYASLNGTSMATPHVAGAAALVKQKNPSWSNVQIRNHLKNTATSLGSTNLYGSGLVNAEAATR

SEQ ID NO: 52832 - protein, 269 aa, Unidentified
AQSVPWGISRVQAPAAHNRRLTGSGVKVAVLDTGISTHPDLNIRGGASFVPGEPSTQDGNGHGTHVAGTIAALNNSIGVLGVAPSAELYAVKVLGASGSGSVSSIAQGLEWAGNNGMHVANLSLGSPSPSATLEQAVNSATSRGVLVVAASGNSGAGSISYPARYANAMAVGATDQNNNRASFSQYGAGLDIVAPGVNVQSTYPGSTYASLNGTSMATPHVAGAAALVKQKNPSWSNRQIRNHLKNTATSLGSTNLYGSGLVNAEAATR

SEQ ID NO: 52833 - protein, 269 aa, Unidentified
AQSVPWGISRVQAPAAHNRGLRGSGVKVAVLDTGISTHPDLNIRGGASFVPGEPSTQDGNGHGTHVAGTIAALNNSIGVLGVAPSAELYAVKVLGASGSGSVSSIAQGLEWARNNGMHVANLSLGSPSPSATLEQAVNSATSRGVLVVAASGNSGAGSISYPARYANAMAVGATDQNNNRASFSQYGAGLDIVAPGVNVQSTYPGSTYASLNGTSMATPHVAGAAALVKQKNPSWSNVQIRNHLKNTATSLGSTNLYGSGLVNAEAATR

SEQ ID NO: 52834 - protein, 269 aa, Unidentified
AQSRPWGISRVQAPAAHNRGLTGSGVKVAVLDTGISTHPDLNIRGGASFVPGEPSTQDGNGHGTHVAGTIAALNNSIGVLGVAPSAELYAVKVLGASGSGSVSSIAQGLEWAGNNGMHVANLSLGSPSPSATLEQAVNSATSRGVLVVAASGNSGAGSISYPARYANAMAVGATDQNNNRASFSQYGAGLDIVAPGVNVQSTYPGSTYASLNGTSMATPHVAGAAALVKQKNPSWSNVQIRNHLKNTATSLGSTNLYGSGLVNALAATR

SEQ ID NO: 52835 - protein, 269 aa, Unidentified
AQSVPWGISRVQAPAAHNRGLTGSGVKVAVLDTGISTHPDLNIRGGASFVPGEPSTQDGNGHGTHVAGTIAALNNSIGVLGVAPSAELYAVKVLGFSGSASVSSIAQGLEWAGNNGMHVANLSLGSPSPSATLEQAVNSATSRGVLVVAASGNSGAGSISYPARYANAMAVGATDQNNNRASFSQYGAGLDIVAPGVNVQSTYPGSTYASLNGTSMATPHVAGAAALVKQKNPSWSNVQIRNHLKNTATSLGSTNLYGSGLVNAEAATR

SEQ ID NO: 52836 - protein, 269 aa, Bacillus lentus
AQSVPWGISRVQAPAAHNRGLTGSGVKVAVLDTGISTHPDLNIRGGASFVPGEPSTQDGNGHGTHVAGTIAALNNSIGVLGVAPDAELYAVKVLGASGSGSVSSIADGLEWAGNNGMHVANLSLGSPSPSATLEQAVNSATSRGVLVVAASGNSGAGSISYPARYANAMAVGATDQNNNRASFSQYGAGLDIVAPGVNVQSTYPGSTYASLNGTSMATPHVAGAAALVKQKNPSWSNVQIRNHLKNTATSLGSTNLYGSGLVNAEAATR

SEQ ID NO: 52837 - protein, 269 aa, Unidentified
AQSVPWGISRVQAPAAHNRGLTGSGVKVAVLDTGISTHPDLNIRGGASFVPGEPSTQDGNGHGTHVAGTIAALNNSIGVLGVAPSAELYAVKVLGATGSGGVSSIAQGLEWAGNNGMHVANLSLGSPSPSATLEQAVNSATSRGVLVVAASGNSGAGSISYPARYANAMAVGATDQNNNRASFSQYGAGLDIVAPGVNVQSTYPGSTYASLNGTSMATPHVAGAAALVKQKNPSWSNVQIRNHLKNTATSLGSTNLYGSGLVNAEAATR

SEQ ID NO: 52838 - protein, 269 aa, Unidentified
AQSVPWGISRVQAPAAHRRGLTGSGVKVAVLDTGISTHPDLRIRGGASFVPGEPSTQDGNGHGTHVAGTIAALNNSIGVLGVAPSAELYAVKVLGASGSGSVSSIAQGLEWAGNNGMHVANLSLGSPSPSATLEQAVNSATSRGVLVVAASGNSGAGSISYPARYANAMAVGATDQNNNRASFSQYGAGLDIVAPGVNVQSTYPGSTYASLNGTSMATPHVAGAAALVKQKNPSWSNVQIRNHLKNTATSLGSTNLYGSGLVNAEAATR

SEQ ID NO: 52839 - protein, 270 aa, Unidentified
AQSVPWGISRVQAPAAHNRGLTGSGVKVAVLDTGISTHPDLNIRGGASFVPGEPSTQDGHGHGTHVAGTIAALNNSIGVLGVAPSAELYAVKVLGASEGIGSVSSIAQGLEWAGNNGMHVANLSLGSPSPSATLEQAVNSATSRGVLVVAASGNSGAGSISYPARYANAMAVGATDQNNNRASFSQYGAGLDIVAPGVNVQSTYPGSTYASLNGTSMATPHVAGAAALVKQKNPSWSNVQIRNHLKNTATSLGSTNLYGSGLVNAEAATR

SEQ ID NO: 52840 - protein, 269 aa, Unidentified
AQSVPWGISRVQAPAAHNRGLTGSGVKVAVLDTGISTHPDLNIRGGASFVPGEPSTQDGEGHGTHVAGTIAALNNSIGVLGVAPSAELYAVKVLGASGSGSVSSIAQGLEWAGNNGMHVANLSLGSPSPSATLEQAVNSATSRGVLVVAASGNSGAGSISYPARYANAMAVGATDQNNNHASFSQYGAGLDIVAPGVNVQSTYPGSTYASLNGTSMATPHVAGAAALVKQKNPSWSNVQIRNHLKNTATSLGSTNLYGSGLVNAEAATR

SEQ ID NO: 52841 - protein, 269 aa, Unidentified
AQSVPWGISRVQAPAAHNRGLTGSGVKVAVLDTGISTHPDLNIRGGASFVPGEPSTQDGNGHGTHVAGTIAALNNSIGVLGVAPSAELYAVKVLGASGSGSVSSIAQGLEWAGNNGMHVANLSLGSPSPSATLEQAVNSATSRGVLVVAASGNSGAGSISYPARYANAMAVGATDQNNNHASFSQYGAGLDIVAPGVNVQSTEPGSTYASLNGTSMATPHVAGAAALVKQKNPSWSNVQIRNHLKNTATSLGSTNLYGSGLVNAEAATR

SEQ ID NO: 52842 - protein, 269 aa, Unidentified
AQSVPWGISRVQAPAAHNRGLTGSGVKVAVLDTGISTHPDLNIRGGASFVPGEPSTQDGNGHGTHVAGTIAALNNSIGVLGVAPSAELYAVKVLGASGGGSVSSIANGLEWAGNNGMHVANLSLGAPSPSATLEQAVNSATSRGVLVVAASGNSGAGSISYPARYANAMAVGATDQNNNRASFSQYGAGLDIVAPGVNVQSTYPGSTYASLNGTSSATPHVAGAAALVKQKNPSWSNVQIRNHLKNTATSLGSTNLYGSGLVNAEAATR

SEQ ID NO: 52843 - protein, 269 aa, Unidentified
AQSVPWGTSRVQAPAAHNRGLTGRGVKVAVLDTGISTHPDLNIRGGASFVPGEPSTQDGNGHGTHVAGTIAALNNSIGVLGVAPSAELYAVKVLGASGSGSVSSIAQGLEWAGNNGMHVANLSLGSPSPSATLEQAVNSATSRGVLVVAASGNSGAGSISYPARYANAMAVGATDQNNNRASFSQYGAGLDIVAPGVNVQSTYPGSTYASLNGTSMATPHVAGAAALVKQKNPSWSNVQIRNHLKNTATSLGSTNLYGSGLVNAEAATR

SEQ ID NO: 52844 - protein, 269 aa, Unidentified
AQSVPWGISRVQAPAAHNRGLTGSGVKVAVLDTGISTHPDLNIRGGASFVPGEPSTQDGNGHGTHVAGTIAALNNSIGVLGVAPSAELYAVKVLGASGSGSVSSIAQGLEWAGNNGMHVANLSLGSESPSATLEQAVNSATSRGVIVVAASGNSGAGSISYPARYANAMAVGATDQNNNRASFSQYGAGLDIVAPGVNVQSTYPGSTYASLNGTSMATPHVAGAAALVKQKNPSWSNVQIRNHLKNTATSLGSTNLYGSGLVNAEAATR

SEQ ID NO: 52845 - protein, 269 aa, Synthetic construct
AQSVPWGISRVQAPAAHNRGLTGSGVKVAVLDTGISTHPDLNIRGGASFVPGEPSTQDGNGHGTHVAGTIAALDNSIGVLGVAPSAELYAVKVLGASGSGSVSSIAQGLEWAGNNGMHVASLSLGSPSPSATLEQAVNSATSRGVLVVAASGNSGAGSISYPARYANAMAVGATDQNNNRASFSQYGAGLDIVAPGVNVQSTYPGSTYASLNGTSMATPHVAGAAALVKQKNPSWSNVQIRNHLKNTATSLGSTNLYGSGLVNAEAATR

SEQ ID NO: 52846 - protein, 269 aa, Unidentified
AQSVPWGISRVQAPAAHNRGLTGSGVKVAVLDTGISTHPDLNIRGGASFVPGEPSTQDGNGHGTHVAGTIAALNNSIGVLGVAPSAPLYAVKVLGASGSGSVSSIAQGLEWAGNNGMHVANLSLGSPSPSATLEQAVNSATSRGVLVVAASGNSGAGSISYPARYANAMAVGATDQNNNRASFSQYGAGLDIVAPGVNVQSTYPGSTYASLNGTSMATPHVAGAAALVKQKNPSWSNVQIRNHLKNTATSLGSTNLYGSGLVNAFAATR

SEQ ID NO: 52847 - protein, 269 aa, Unidentified
AQSVPWGISRVQAPAAHNRKLTGSGVKVAVLDTGISTHPDLNIRGGASFVPGEPSTQDGEGHGTHVAGTIAALNNSIGVLGVAPSAELYAVKVLGASGSGSVSSIAQGLEWAGNNGMHVANLSLGQPSPSATLEQAVNSATSRGVLVVAASGNSGAGSISYPARYANAMAVGATDQNNNRASFSQYGAGLDIVAPGVNVQSTYPGSTYASLNGTSSATPHVAGAAALVKQKNPSWSNVQIRNHLKNTATSLGSTNLYGSGLVNAEAATR

SEQ ID NO: 52848 - protein, 269 aa, Unidentified
AQSVPWGISRVQAPAAHNRGLTGSGVKVAVLDTGISTHPDLNIRGGASFVPGEPSTQDGNGHGTHVAGTIAALNNSIGVLGVAPSAELYAVKVLGASGQGSVSSIANGLEWAGNNGMHVANLSLGSPSPSATLEQAVNSATSRGVLVVAASGNSGAGSISYPARYANAMAVGATDQNNNRADFSQYGAGLDIVAPGVNVQSTYPGSTYASLNGTSSATPHVAGAAALVKQKNPSWSNVQIRNHLKNTATSLGSTNLYGSGLVNAEAATR

SEQ ID NO: 52849 - protein, 269 aa, Unidentified
AQSVPWGISRVQAPAAHNRGLTGSGVKVAVLDTGISTHPDLNIRGGASFVPGEPSTQDGEGHGTHVAGTIAALNNSIGVLGVAPNAELYAVKVLGASGSGSVSSIAQGLEWAGNNGMHVANLSLGSPSPSATLEQAVNSATSRGVLVVAASGNSGAGSISYPARYANAMAVGATDQNNNRASFSQYGAGLDIVAPGVNVQSTYPGSTYASLNGTSMATPHVAGAAALVKQKNPSWSNVQIRNHLKNTATSLGSTNLYGSGLVNAEAATR

SEQ ID NO: 52850 - protein, 269 aa, Unidentified
AQSVPWGISRVQAPAAHNRGLTGSGVKVAVLDTGISTHPDLNIRGGASFVPGEPSTQDGNGHGTHVAGTIAALNNSIGVLGVAPSAELYAVKVLGASGSGSVSSIAQGLEWAGNNGMHVANLSLGSPSPSATLEQAVNSATSRGVLVVAASGNSGAGSISYPARYANAMAVGATDQNNNRADFSQYGAGLDIVAPGVNVQSTYPGSTYASLNGTSMATPHVAGAAALVKQKNPSWSNVQIRDHLKNTATSLGSTNLYGSGLVNAEAATR

SEQ ID NO: 52851 - protein, 269 aa, Bacillus lentus
AQSVPWGISRVQAPAAHNRGLTGSGVKVAVLDTGISTHPDLSIRGGASFVPGEPSTQDGDGHGTHVAGTIAALNNSIGVLGVAPSAELYAVKVLGASGSGSVSSIAQGLEWAGNNGMHVANLSLGSPSPSATLEQAVNSATSRGVLVVAASGNSGAGSISYPARYANAMAVGATDQNNNRASFSQYGAGLDIVAPGVNVQSTYPGSTYASLNGTSMATPHVAGAAALVKQKNPSWSNVQIRNHLKNTATSLGSTNLYGSGLVNAEAATR

SEQ ID NO: 52852 - protein, 269 aa, Unidentified
AQSVPWGISRVQAPAAHNRGLTGSGVKVAVLDTGISTHPDLNIRGGASFVPGEPSTQDGNGHGTHVAGTIAALNNSIGVLGVAPSAELYAVKVLGASGSGSVSSIAQGLEWARNNGMHVANLSLGSPSPSATLEQAVNSATSRGVLVVAASGNSGAGSISYPARYANAMAVGATDQNNNRASFSQYGAGLDIVAPGVNVQSTYPGSTYASLNGTSMATPHVAGAAALVKQKNPSWSNVQIRNHLKNTATSLGSTNLYGSGLVNALAATR

SEQ ID NO: 52853 - protein, 269 aa, Unidentified
AQSVPWGISRVQAPAAHNRGLTGSGVKVAVLDTGISTHPDLNIRGGASFVPGEPSTQDGNGHGTHVAGTIAALNNSIGVLGVAPSAELYAVKVLGASGSGSVSSIAQGLEWAGNNRMHVANLSLGSPSPSATLEQAVNSATSRGVLVVAASGNSGAGSISYPARYANAMAVGATDQNNNRASFSQYGAGLDIVAPGVNVQSTYPGSTYASLNGTSMATPHVAGAAALVFQKNPSWSNVQIRNHLKNTATSLGSTNLYGSGLVNAEAATR

SEQ ID NO: 52854 - protein, 269 aa, Unidentified
AQSVPWGISRVQAPAAHNRGLTGRGVKVAVLDTGISTHPDLNIRGGASFVPGEPSTQDGNGHGTHVAGTIAALNNSIGVLGVAPSAELYAVKVLGASGSGSVSSIAQGLEWAGNNGMHVANLSLGSPSPSATLEQAVNSATSRGVLVVAASGNSGAGSISYPARYANAMAVGATDQNNNRASFSQYGAGLDIVAPGVNVQSTYPGSTYASLNGTSMATPHVAGAAALVKQKNPSWSFVQIRNHLKNTATSLGSTNLYGSGLVNAEAATR

SEQ ID NO: 52855 - protein, 269 aa, Unidentified
AQSVPWGISRVQAPAAHNRGLTGSGVKVAVLDTGISTHPDLNIRGGASFVPGEPSTQDGNGHGTHVAGTIAALNNSIGVLGVAPSAELYAVKVLGASGAGGVSSIAQGLEWAGNNGMHVANLSLGSPSPSATLEQAVNSATSRGVLVVAASGNSGAGSISYPARYANAMAVGATDQNNNRASFSQYGAGLDIVAPGVNVQSTYPGSTYASLNGTSMATPHVAGAAALVKQKNPSWSNVQIRNHLKNTATSLGSTNLYGSGLVNAEAATR

SEQ ID NO: 52856 - protein, 269 aa, Synthetic construct
AQSVPWGISRVQAPAAHNRGLTGSGVKVAVLDTGISTHPDLNIRGGASFVPGEPSTQDGNGHGEHVAGTIAALNNSIGVLGVAPSAELYAVKVLGASGSGSVSSIAQGLEWAGNNGMHVANLSLGSPSPSATLEQAVNSATSRGVLVVAASGNSGAGSISYPARYANAMAVGATDQNNNRASFSQYGAGLDIVAPGVNVQSTYPGSTYASLNGTSMATPHVAGAAALVKQKNPSWSNVQIRNHLKNTATSLGSTNLYGSGLVNATAATR

SEQ ID NO: 52857 - protein, 269 aa, Unidentified
AQSVPWGISRVQAPAAHNRGLTGSGVKVAVLDTGISTHPDLNIRGGASFVPGEPSTQDGNGHGTHVAGTIAALNNSIGVLGVAPSAELYAVKVLGASGSGSVSSIAQGLEWAGNNGMHVANLSLGSESPSATLEQAVNSATSRGVLVVAASGNSGAGSISYPARYANAMAVGATDQNNNRADFSQYGAGLDIVAPGVNVQSTYPGSTYASLNGTSMATPHVAGAAALVKQKNPSWSNVQIRNHLKNTATSLGSTNLYGSGLVNAEAATR

SEQ ID NO: 52858 - protein, 269 aa, Bacillus sp.
AQSVPWGISRVQAPAAHNRGLTGSGVKVAVLDTGISTHPDLNIRGGASFVPGEPSTQDGNGHGTHVAGTIAALNNSIGVLGVAPNAELYAVKVLGASGSGSVSSIAQGLEWAGNNGMHVANLSLGSPSPSATLEQAVNSATSRGVLVVAASGNSGAGSISYPARYANAMAVGATDQNNNRASFSQYGAGLDIVAPGVNVQSTYPGSTYASYNGTSMATPHVAGAAALVKQKNPSWSNVQIRNHLKNTATSLGSTNLYGSGLVNAEAATR

SEQ ID NO: 52859 - protein, 269 aa, Unidentified
AQSVPWGISRVQAPAAHNRGLTGRGVKVAVLDTGISTHPDLNIRGGASFVPGEPSTQDGNGHGTHVAGTIAALNNSIGVLGVAPSAELYAVKVLGASGSGSVSSIAQGLEWAGNNGMHVANLSLGSPSPSATLEQAVNSATSRGVLVVAASGNSGAGSISYPARYANAMAVGATDQNNNRASFSQYGAGLDIVAPGVNVQSTYPGSTYASLNGTSMATPHVAGAAALVKQKNPSWSNVQIHNHLKNTATSLGSTNLYGSGLVNAEAATR

SEQ ID NO: 52860 - protein, 269 aa, Unidentified
AQSVPWGISRVQAPAAHNRGLTGSGVKVAVLDTGISTHPDLNIRGGASFVPGEPSTQDGNGHGTHVAGTIAALNNSIGVLGVAPSAELYAVKVLGASGSGGVSSIAQGVEWAGNNGMHVANLSLGSPSPSATLEQAVNSATSRGVLVVAASGNSGAGSISYPARYANAMAVGATDQNNNRASFSQYGAGLDIVAPGVNVQSTYPGSTYASLNGTSMATPHVAGAAALVKQKNPSWSNVQIRNHLKNTATSLGSTNLYGSGLVNAEAATR

SEQ ID NO: 52861 - protein, 269 aa, Unidentified
AQSVPWGISRVQAPAAHNRGLTGSGVKVAVLDTGISTHPDLNIRGGASFVPGEPSTQDGNGHGTHVAGTIAALNNSIGVLGVAPSAPLYAVKVLGASGSGSVSSIAQGLEWAGNNGMHVANLSLGSPSPSATLEQAVNSATSRGVLVVAASGNSGAGSISYPARYANAMAVGATDQNNNRASFSQYGAGLDIVAPGVNVQSTEPGSTYASLNGTSMATPHVAGAAALVKQKNPSWSNVQIRNHLKNTATSLGSTNLYGSGLVNAEAATR

SEQ ID NO: 52862 - protein, 269 aa, Unidentified
AQSVPWGISRVQAPAAHNRGLTGSGVKVAVLDTGISTHPDLNIRGGASFVPGEPSTQDGNGHGTHVAGTIAALNNSIGVRGVAPSAELYAVKVLGASGSGSVSSIAQGLEWAGNNGMHVANLSLGSPSPSATLEQAVNSATSRGVLVVAASGNSGAGSISYPARYANAMAVGATDQNNNRASFSQYGAGLDIVAPGVNVQSTYPGSTYASLNGTSMATPHVAGAAALVKQKNPSWRNVQIRNHLKNTATSLGSTNLYGSGLVNAEAATR

SEQ ID NO: 52863 - protein, 269 aa, Unidentified
AQSVPWGISRVQAPAAHNRGLTGSGVKVAVLDTGISTHPDLNIRGGASFVPGEPSTQDGNGHGTHVAGTIAALNNSIGVLGVAPSAELYAVKVLGASGSGSVSSIAQGLEWAGNNGMHVANLSLGSPSPSATLEQAVNSATSRGVLVVAASGNSGAESISYPARYANAMAVGATDQNNNRADFSQYGAGLDIVAPGVNVQSTYPGSTYASLNGTSMATPHVAGAAALVKQKNPSWSNVQIRNHLKNTATSLGSTNLYGSGLVNAEAATR

SEQ ID NO: 52864 - protein, 269 aa, Unidentified
AQSVPWGISRVQAPAAHNRGLTGSGVKVAVLDTGISTHPDLNIRGGASFVPGEPSTQDGNGHGTHVAGTIAALNNSIGVRGVAPSAELYAVKVLGASGSGSVSSIAQGLEWAGNNGMHVANLSLGSPSPSATLEQAVNSATSRGVLVVAASGNSGAGSISYPARYANAMAVGATDQNNNRASFSQYGAGLDIVAPGVNVQSTYPGSTYASLNGTSMATPHVAGAAALVKQKNPSWSNRQIRNHLKNTATSLGSTNLYGSGLVNAEAATR

SEQ ID NO: 52865 - protein, 269 aa, Unidentified
AQSVPWGISRVQAPAAHNRGLTGSGVKVAVLDTGISTHPDLNIRGGASFVPGEPSTQDGNGHGTHVAGTIAALNNSIGVLGVAPSAELYAVKVLGASGSGSVSSIAQGLEWAGNNGMHVANLSLGSPSPSATLEQAVNSATSRGVLVVAASGNSGAESISYPARYANAMAVGATDQNNNHASFSQYGAGLDIVAPGVNVQSTYPGSTYASLNGTSMATPHVAGAAALVKQKNPSWSNVQIRNHLKNTATSLGSTNLYGSGLVNAEAATR

SEQ ID NO: 52866 - protein, 269 aa, Unidentified
AQSVPWGISRVQAPAAHRRGLTGSGVKVAVLDTGISTHPDLNIRGGASFVPGEPSTQDGNGHGTHVAGTIAALNNSIGVLGVAPSAELYAVKVLGASGSGSVSSIAQGLEWAGNNGMHVANLSLGSPSPSATLEQAVNSATSRGVLVVAASGNSGAGSISYPARYANAMAVGATDQNNNRASFSQYGAGLDIVAPGVNVQSTYPGSTYASLNGTSMATPHVAGAAALVKQKNPSWSNVQIRNRLKNTATSLGSTNLYGSGLVNAEAATR

SEQ ID NO: 52867 - protein, 269 aa, Unidentified
AQSVPWGISRVQAPAAHNRGLTGSGVKVAVLDTGISTHPDLNIRGGASFVPGEPSTQDGNGHGTHVAGTIAALNNSIGVLGVAPSAELYAVKVLGASGSGSVSSIAQGLEWAGNNGMHVANLSLGDPSPSATLEQAVNSATSRGVLVVAASGNSGAGSISYPARYANAMAVGATDQNNNRASFSQYGAGLDIVAPGVNVQSTYPGSAYASLNGTSMATPHVAGAAALVKQKNPSWSNVQIRNHLKNTATSLGSTNLYGSGLVNAEAATR

SEQ ID NO: 52868 - protein, 269 aa, Unidentified
AQSVPWGISRVQAPAAHNRGLTGSGVKTAVLDTGISTHPDLNIRGGASFVPGEPSTQDGNGHGTHVAGTIAALNNSIGVLGVAPSAELYAVKVLGASGSGSVSSIAQGLEWAGNNGMHVANLSLGSPSPSATLEQAVNSATSRGVLVVAASGNSGAGSISYPARYANAMAVGATDQNNNRASFSQYGAGLDIVAPGVNVQSTYPGSTYVSLNGTSMATPHVAGAAALVKQKNPSWSNVQIRNHLKNTATSLGSTNLYGSGLVNAEAATR

SEQ ID NO: 52869 - protein, 269 aa, Unidentified
AQSVPWGISRVQAPAAHNRGLTGRGVKVAVLDTGISTHPDLNIRGGASFVPGEPSTQDGNGHGTHVAGTIAALNNSIGVLGVAPSAELYAVKVLGASGSGSVSSIAQGLEWAGNNGMHVANLSLGSPSPSATLEQAVNSATSRGVLVVAASGNSGAGSISYPARYANAMAVGATDQNNNRASFSQYGAGLDIVAPGVNVQSTYPGSTYASLNGTSMATPHVAGAAVLVKQKNPSWSNVQIRNHLKNTATSLGSTNLYGSGLVNAEAATR

SEQ ID NO: 52870 - protein, 269 aa, Unidentified
AQSVPWGISRVQAPAAHNRGLTGRGVKVAVLDTGISTHPDLNIRGGASFVPGEPSTQDGNGHGTHVAGTIAALNNSIGVLGVAPSAELYAVKVLGASGSGSVSSIAQGLEWAGLNGMHVANLSLGSPSPSATLEQAVNSATSRGVLVVAASGNSGAGSISYPARYANAMAVGATDQNNNRASFSQYGAGLDIVAPGVNVQSTYPGSTYASLNGTSMATPHVAGAAALVKQKNPSWSNVQIRNHLKNTATSLGSTNLYGSGLVNAEAATR

SEQ ID NO: 52871 - protein, 269 aa, Unidentified
AQSVPWGISRVQAPAAHNRGLTGSGVKVAVLDTGISTHPDLNIRGGASFVPGEPSTQDGNGHGTHVAGTIAALNNSIGVLGVAPSAELYAVKVLGASGSGSVSSIAQGLEWAGNNGMHVANLSLGSPSPSATLEQAVNSATSRGVLVVAASGNSGAGSISYPARYANAMAVGATDQNNNRADFSQYGAGLDIVAPGVNVQSTYPGSTYASLNGTSMATPHVAGAAALVKQKNPSWSNVQIRNHLKNTATSLGSTNLYGSGLVNAFAATR

SEQ ID NO: 52872 - protein, 269 aa, Unidentified
AQSVPWGISRVQAPAAHNRGLTGSGVKVAVLDTGISTHPDLNIRGGASFVPGEPSTQDGNGHGTHVAGTIAALNNSIGVLGVAPSAELYAVKVLGATSSGSVSSIAQGLEWAGNNGMHVANLSLGSPSPSATLEQAVNSATSRGVLVVAASGNSGAGSISYPARYANAMAVGATDQNNNRASFSQYGAGLDIVAPGVNVQSTYPGSTYASLNGTSMATPHVAGAAALVKQKNPSWSNVQIRNHLKNTATSLGSTNLYGSGLVNAEAATR

SEQ ID NO: 52873 - protein, 269 aa, Unidentified
AQSVPWGISRVQAPASHNRGLTGSGVKVAVLDTGISTHPDLNIRGGASFVPGEPSTQDGNGHGTHVAGTIAALNNSIGVLGVAPSAELYAVKVLGASGSGSVSSIAQGLEWAGNNGMHVANLSLGSPSPSATLEQAVNSATSRGVLVVAASGNSGAGSISYPARYANAMAVGATDQNNNRASFSQYGAGLDIVAPGVNVQSTEPGSTYASLNGTSMATPHVAGAAALVKQKNPSWSNVQIRNHLKNTATSLGSTNLYGSGLVNAEAATR

SEQ ID NO: 52874 - protein, 269 aa, Unidentified
AQSVPWGIARVQAPAAHNRGLTGSGVKVAVLDTGISTHPDLNIRGGASFVPGEPSTQDGNGHGTHVAGTIAALNNRIGVLGVAPSAELYAVKVLGASGSGSVSSIAQGLEWAGNNGMHVANLSLGSPSPSATLEQAVNSATSRGVLVVAASGNSGAGSISYPARYANAMAVGATDQNNNRASFSQYGAGLDIVAPGVNVQSTYPGSTYASLNGTSMATPHVAGAAALVKQKNPSWSNVQIRNHLKNTATSLGSTNLYGSGLVNAEAATR

SEQ ID NO: 52875 - protein, 269 aa, Unidentified
AQSVPWGISRVQAPAAHNRGLTGSGVKVAVLDTGISTHPDLNIRGGASFVPGEPSTQDGNGHGTHVAGTIAALNNSIGVLGVAPSAELYAVKVLPASGSASVSSIAQGLEWAGNNGMHVANLSLGSPSPSATLEQAVNSATSRGVLVVAASGNSGAGSISYPARYANAMAVGATDQNNNRASFSQYGAGLDIVAPGVNVQSTYPGSTYASLNGTSMATPHVAGAAALVKQKNPSWSNVQIRNHLKNTATSLGSTNLYGSGLVNAEAATR

SEQ ID NO: 52876 - protein, 269 aa, Unidentified
AQSVPWGISRVQAPAAHNRGLTGRGVKVAVLDTGISTHPDLNIRGGASFVPGEPSTQDGNGHGTHVAGTIAALNNSIGVLGVAPSAELYAVKVLGASGSGSVSSIAQGLEWARNNGMHVANLSLGSPSPSATLEQAVNSATSRGVLVVAASGNSGAGSISYPARYANAMAVGATDQNNNRASFSQYGAGLDIVAPGVNVQSTYPGSTYASLNGTSMATPHVAGAAALVKQKNPSWSNVQIRNHLKNTATSLGSTNLYGSGLVNAEAATR

SEQ ID NO: 52877 - protein, 269 aa, Unidentified
AQSVPWGISRVQAPAAHNRGLTGSGVKVAVLDTGISTHPDLNITGGASFVPGEPSTQDGNGHGTHVAGTIAALDNSIGVLGVAPSAELYAVKVLGASGSGSVSSIAQGLEWAGNNGMHVANLSLGSPSPSATLEQAVNSATSRGVLVVAASGNSGAGSISYPARYANAMAVGATDQNNNRASFSQYGAGLDIVAPGVNVQSTYPGSTYASLNGTSMATPHVAGAAALVKQKNPSWSNVQIRNHLKNTATSLGSTNLYGSGLVNAEAATR

SEQ ID NO: 52878 - protein, 269 aa, Bacillus sp.
AQSVPWGISRVQAPAAHNRGLTGSGVKVAVLDTGISTHPDLNIRGGASFVPGEPSTQDGNGHGTHVAGTIAALNNSIGVLGVAPNAELYAVKVLGASGSGSVSSIAQGLEWAGNNGMHVANLSLGSPSPSATLEQAVNSATSRGVLVVAASGNSGAGSINYPARYANAMAVGATDQNNNRASFSQYGAGLDIVAPGVNVQSTYPGSTYASLNGTSMATPHVAGAAALVKQKNPSWSNVQIRNHLKNTATSLGSTNLYGSGLVNAEAATR

SEQ ID NO: 52879 - protein, 269 aa, Unidentified
AQSVPWGISRVQAPAAHNRGLTGSGVKVAVLDTGISTHPDLNIRGGASFVPGEPSTQDGEGHGTHVAGTIAALNNSIGVLGVAPSAELYAVKVLGASGSGSVSSIAQGLEWAGNNGMHVANLSLGSPSPSATLEQAVNSATSRGVLVVAASGNSGAESISYPARYANAMAVGATDQNNNRASFSQYGAGLDIVAPGVNVQSTYPGSTYASLNGTSMATPHVAGAAALVKQKNPSWSNVQIRNHLKNTATSLGSTNLYGSGLVNAEAATR

SEQ ID NO: 52880 - protein, 269 aa, Unidentified
AQSVPWGISRVQAPAAHNRGLTGSGVKVAVLDTGISTHPDLNIRGGASFVPGEPSTQDGNGHGTHVAGTIAALNNSIGVLGVAPSAELYAVKVLGASGGGSVSSIAQGLEWAGNNGMHVANLSLGSPSPSATLEQAVNSATSRGVLVVAASGNSGAGSISYPARYANAMAVGATDQNNNRASFSQYGAGLDIVAPGVNVQSTYPGSTYASLNGTSMATPHVAGAAALVKQKNPSWSNVQIRNRLKNTATSLGSTNLYGSGLVNAEAATR

SEQ ID NO: 52881 - protein, 269 aa, Unidentified
AQSVPWGISRVQAPAAHNRGLTGSGVKVAVLDTGISTHPDLNIRGGASFVPGEPSTQDGNGHGTHVAGTIAALNNSIGVLGVAPSAELYAVKVLGASGAGSVSSIAQGLEWAGNNGMHVANLSLGSPSPSATLEQAVNSATSRGVLVVAASGNSGAGSISYPARYANAMAVGATDQNNNRASFSQYGAGLDIVAPGVNVQSTYPGSTYASLNGTSMPTPHVAGAAALVKQKNPSWSNVQIRNHLKNTATSLGSTNLYGSGLVNAEAATR

SEQ ID NO: 52882 - protein, 269 aa, Synthetic construct
AQSVPWGISRVQAPAAHNRGLTGSGVKVAVLDTGISTHPDLNIRGGASFVPGEPSTQDGNGHGTHVAGTIAALNNSIGVLGVAPSAELYAVKVLGASESGSVSSIAQGLEWAGNNGMHVANLSLGSPSPSATLEQAVNSATSRGVLVVAASGNSGAGSISYPARYANAMAVGATDQNNNRASFSQYGAGLDIVAPGVNVQSTYPGSTYASLNGTSMATPHVAGAAALVKQKNPSWSNVQIRNHLKNTATSLGSTNLYGSGLVNATAATR

SEQ ID NO: 52883 - protein, 269 aa, Unidentified
AQSVPWGISRVQAPAAHNRGLTGSGVKVAVLDTGISTHPDLNIRGGASFVPGEPSTQDGNGHGTHVAGTIAALNNSIGVLGVAPSAELYAVKVLSASGGGSVSSIANGLEWAGNNGMHVANLSLGSPSPSATLEQAVNSATSRGVLVVAASGNSGAGSISYPARYANAMAVGATDQNNNRASFSQYGAGLDIVAPGVNVQSTYPGSTYASLNGTSSATPHVAGAAALVKQKNPSWSNVQIRNHLKNTATSLGSTNLYGSGLVNAEAATR

SEQ ID NO: 52884 - protein, 269 aa, Unidentified
AQSVPWGISRVQAPAAHNRGLTGSGVKVAVLDTGISTHPDLNIRGGASFVPGEPSTQDGNGHGTHVAGTIAALNNSIGVLGVAPSAELYAVKVLGASGSGSVSSIAQGLEWAGNNGMHVANLSLGSPSPSATLEQAVNSATSRGVLVVAASGNSGAGSISYPARYANAMAVGATDQNNNHASFSQYGAGLDIVAPGVNVQSTYPGSTYASLNGTSMATPHVAGAAALVKQKNPSWSNVQIRNHLKNTATSLGSTNLYGSGLVNAFAATR

SEQ ID NO: 52885 - protein, 269 aa, Unidentified
AQSVPWGISRVQAPAAHRRGLTGSGVKVAVLDTGISTHPDLNIRGGASFVPGEPSTQDGNGHGTHVAGTIAALNNSIGVLGVAPSAELYAVKVLGASGSGAVSSIAQGLEWAGNNGMHVANLSLGSPSPSATLEQAVNSATSRGVLVVAASGNSGAGSISYPARYANAMAVGATDQNNNRASFSQYGAGLDIVAPGVNVQSTYPGSTYASLNGTSMATPHVAGAAALVKQKNPSWSNVQIRNHLKNTATSLGSTNLYGSGLVNAEAATR

SEQ ID NO: 52886 - protein, 269 aa, Unidentified
AQSVPWGISRVQAPAAHNRGLTGSGVKVAVLDTGISTHPDLNIRGGASFVPGEPSTQDGNGHGTHVAGTIAALNNSIGVLGVAPSAELYAVKVLGASGSGSVSSIAQGLEWAGNNGMHVANLSLGSPSPSATLEQAVNSATSRGVLVVAASGNSGAGSISYPARYANAMAVGATDQNNNRASFSQYGAGLDIVAPGVNVQSTYPGSTYASLNGTSMATPHVAGAAALVKQKNPSRSNVQIRNHLKNTATSLGSTNLYGSGLVNALAATR

SEQ ID NO: 52887 - protein, 269 aa, Unidentified
AQSVPWGISRVQAPAAHNRRLTGSGVKVAVLDTGISTHPDLNIRGGASFVPGEPSTQDGNGHGTHVAGTIAALNNSIGVLGVAPSAELYAVKVLGASGSGSVSSIAQGLEWAGNNGMHVANLSLGSPSPSATLEQAVNSATSRGVLVVAASGNSGAGSISYPARYANAMAVGATDQNNNRASFSQYGAGLDIVAPGVNVQSTYPGFTYASLNGTSMATPHVAGAAALVKQKNPSWSNVQIRNHLKNTATSLGSTNLYGSGLVNAEAATR

SEQ ID NO: 52888 - protein, 269 aa, Unidentified
AQSVPWGISRVQAPAAHNRGLTGSGVKVAVLDTGISTHPDLNIRGGASFVPGEPSTQDGNGHGTHVAGTIAALNNSIGVLGVAPSAELYAVKVLGATGSGSISSIAQGLEWAGNNGMHVANLSLGSPSPSATLEQAVNSATSRGVLVVAASGNSGAGSISYPARYANAMAVGATDQNNNRASFSQYGAGLDIVAPGVNVQSTYPGSTYASLNGTSMATPHVAGAAALVKQKNPSWSNVQIRNHLKNTATSLGSTNLYGSGLVNAEAATR

SEQ ID NO: 52889 - protein, 269 aa, Unidentified
AQSVPWGISRVQAPAAHNRGLTGSGVKVAVLDSGISTHPDLNIRGGASFVPGEPSTQDGNGHGTHVAGTIAALNNSIGVLGVAPSAELYAVKVLGASGSGSVSSIAQGLEWAGNNGMHVANLSLGSPSPSATLEQAVNSATSRGVLVVAASGNSGAGSISYPARYANAMAVGATDQNNNRASFSQYGAGLDIVAPGVNVQSTYPGSTYASLNGTSMATPHVAGAAALVKQKNTSWSNVQIRNHLKNTATSLGSTNLYGSGLVNAEAATR

SEQ ID NO: 52890 - protein, 269 aa, Unidentified
AQSVPWGISRVQAPAAHNRGLTGSGVKVAVLDTGISTHPDLNIRGGASFVPGEPSTQDGNGHGTHVAGTIAALNNSIGVLGVAPSAPLYAVKVLGASGSGSVSSIAQGLEWAGNNGMHVANLSLGSESPSATLEQAVNSATSRGVLVVAASGNSGAGSISYPARYANAMAVGATDQNNNRASFSQYGAGLDIVAPGVNVQSTYPGSTYASLNGTSMATPHVAGAAALVKQKNPSWSNVQIRNHLKNTATSLGSTNLYGSGLVNAEAATR

SEQ ID NO: 52891 - protein, 269 aa, Unidentified
AQSVPWGISRVQAPAAHNRGLTGSGVKVAVLDTGISTHPDLNIRGGASFVPGEPSTQDGNGHGTHVAGTIAALNNSIGVLGVAPSAELYAVKVLGASGSGSVSSIAQGLEWAGNNGMHVANLSLGSPSPSATLEQAVNSATSRGVLVVAASGNSGEGSISYPARYANAMAVGATDQNNNRASFSQYGAGLDIVAPGVNVQSTYPGSTYASLNGTSMATPHVAGAAALVKQKNPSWSNVQIRNHLKNTATSLGSTNLYGSGLVNAFAATR

SEQ ID NO: 52892 - protein, 269 aa, Unidentified
AQSVPWGISRVQAPAAHNRGLTGSGVKVAVLDTGISTHPDLNIRGGASFVPGEPSTQDGNGHGTHVAGTIAALNNSIGVLGVAPSAELYAVKVLGASGSGSVSSIAQGVEWAGNNGMHVANLSLGSPSPSATLEQAVNSATSRGVLVVAASGNSGAGSISYPARYANAMAVGATDQNNNRASFSQYGAGLDIVAPGVNVQSTYPGSTYASLNGTSMATPHVAGAAALVKQKNPSWSNVQIRNHLKNTATSLGSTNLYGSGLVNAFAATR

SEQ ID NO: 52893 - protein, 269 aa, Unidentified
AQSVPWGISRVQAPAAHNRGLTGSGVKVAVLDSGISTHPDLNIRGGASFVPGEPSTQDGNGHGTHVAGTIAALNNRIGVLGVAPSAELYAVKVLGASGSGSVSSIAQGLEWAGNNGMHVANLSLGSPSPSATLEQAVNSATSRGVLVVAASGNSGAGSISYPARYANAMAVGATDQNNNRASFSQYGAGLDIVAPGVNVQSTYPGSTYASLNGTSMATPHVAGAAALVKQKNPSWSNVQIRNHLKNTATSLGSTNLYGSGLVNAEAATR

SEQ ID NO: 52894 - protein, 269 aa, Unidentified
AQSVPWGISRVQAPAAHNRGLTGSGVKVAVLDTGISTHPDLNIRGGASFVPGEPSTQDGNGHGTHVAGTIAALNNSIGVLGVAPSAELYAVKVLGASGAGSVSSIAQGVEWAGNNGMHVANLSLGSPSPSATLEQAVNSATSRGVLVVAASGNSGAGSISYPARYANAMAVGATDQNNNRASFSQYGAGLDIVAPGVNVQSTYPGSTYASLNGTSMATPHVAGAAALVKQKNPSWSNVQIRNHLKNTATSLGSTNLYGSGLVNAEAATR

SEQ ID NO: 52895 - protein, 269 aa, Unidentified
AQSVPWGISRVQAPAAHNRKLTGSGVKVAVLDTGISTHPDLNIRGGASFVPGEPSTQDGNGHGTHVAGTIAALNNNIGVLGVAPSAELYAVKVLGASGSGSVSSIAQGLEWAGNNGMHVANLSLGSPSPSATLEQAVNSATSRGVLVVAASGNSGAGSISYPARYANAMAVGATDQNNNRASFSQYGAGLDIVAPGVNVQSTYPGSTYASLNGTSMATPHVAGAAALVKQKNPSWSNVQIRNHLKNTATSLGSTNLYGSGLVNAEAATR

SEQ ID NO: 52896 - protein, 269 aa, Unidentified
AQSVPWGISRVQAPAAHNRGLAGSGVKVAVLDTGISTHPDLNIRGGASFVPGEPSTQDGNGHGTHVAGTIAALNNSIGVLGVAPSAELYAVKVLGASGSGSVSSIAQGLEWAGNNGMHVANLSLGSESPSATLEQAVNSATSRGVLVVAASGNSGAGSISYPARYANAMAVGATDQNNNRASFSQYGAGLDIVAPGVNVQSTYPGSTYASLNGTSMATPHVAGAAALVKQKNPSWSNVQIRNHLKNTATSLGSTNLYGSGLVNAEAATR

SEQ ID NO: 52897 - protein, 269 aa, Unidentified
AQSVPWGISRVQAPAAHNRGLTGSGVKVAVLDTGISTHPDLNIRGGASFVPGEPSTQDGNGHGTHVAGTIAALNNSIGVLGVAPSAELYAVKVLGASGAGSVSSIAQGLEWAGNNGMHVANLSLGSPSPSATLEQAVNSATSRGVLVVAASGNSGAGSISYPARYANAMAVGATDQNNNRASFSQYGAGLDIVAPGVNVQSTEPGSTYASLNGTSMATPHVAGAAALVKQKNPSWSNVQIRNHLKNTATSLGSTNLYGSGLVNAEAATR

SEQ ID NO: 52898 - protein, 269 aa, Unidentified
AQSVPWGISRVQAPASHNRGLTGSGVKVAVLDTGISTHPDLNIRGGASFVPGEPSTQDGNGHGTHVAGTIAALNNSIGVLGVAPSAELYAVKVLGASGSGSVSSIAQGLEWAGNNGMHVANLSLGNPSPSATLEQAVNSATSRGVLVVAASGNSGAGSISYPARYANAMAVGATDQNNNRASFSQYGAGLDIVAPGVNVQSTYPGSTYASLNGTSMATPHVAGAAALVKQKNPSWSNVQIRNHLKNTATSLGSTNLYGSGLVNAEAATR

SEQ ID NO: 52899 - protein, 269 aa, Unidentified
AQSVPWGISRVQAPAAHNRRLTGSGVKVAVLDTGISTHPDLNIRGGASFVPGEPSTQDGNGHGTHVAGTIAALNNSIGVLGVAPSAELYAVKVLGASGSGSVSSIAQGLEWAGNNGMHVANLSLGSPSPSATLEQAVNSATSRGVLVVAASGNSGAGSISYPARYANAMAVGATDQNNNRASFSQYGAGLDIVAPGVNVQSTYPGSTYASLNGTSMATPHVAGAAALVKQKNPSWSNVQIRNHLKNTATSLGSTNLYGSGLVNALAATR

SEQ ID NO: 52900 - protein, 269 aa, Unidentified
AQSVPWGISRVQAPAAHNRGLTGSGVKVAVLDTGISTHPDLNIRGGASFVPGEPSTQDGNGHGTHVAGTIAALNNRIGVLGVAPSAELYAVKVLGASGSGSVSSIAQGLEWAGNNGMHVANLSLGSPSPSATLEQAVNSATSRGVLVVAASGNSGAGSISYPARYANAMAVGATDQNNNRASFSQYGAGLDIVAPGVNVQSTYPGFTYASLNGTSMATPHVAGAAALVKQKNPSWSNVQIRNHLKNTATSLGSTNLYGSGLVNAEAATR

SEQ ID NO: 52901 - protein, 269 aa, Unidentified
AQSVPWGISRVQAPAAHNRGLTGSGVKVAVLDTGISTHPDLNIRGGASFVPGEPSTQDGEGHGTHVAGTIAALNNSIGVLGVAPSAELYAVKVLGASGSGSVSSIAQGLEWAGNNGMHVANLSLGSPSPSATLEQAVNSATSRGVLVVAASGNSGAGSISYPARYANAMAVGATDQNNNRASFSQYGAGLDIVAPGVNVQSTYPGSTYASLNGTSMATPHVAGAAALVKQKNPSWSNVQIRNHLKNTATSLGSTNLYGSGLVNAFAATR

SEQ ID NO: 52902 - protein, 269 aa, Unidentified
AQSVPWGISRVQAPAAHNRGLTGSGVKVAVLDTGISTHPDLNIRGGASFVPGEPSTQDGNGHGTHVAGTIAALNNSIGVLGVAPSAELYAVKVLGQSGSGAVSSIAQGLEWAGNNGMHVANLSLGSPSPSATLEQAVNSATSRGVLVVAASGNSGAGSISYPARYANAMAVGATDQNNNRASFSQYGAGLDIVAPGVNVQSTYPGSTYASLNGTSMATPHVAGAAALVKQKNPSWSNVQIRNHLKNTATSLGSTNLYGSGLVNAEAATR

SEQ ID NO: 52903 - protein, 269 aa, Unidentified
AQSVPWGISRVQAPAAHNRGLTGSGVKVAVLDTGISTHPDLNIRGGASFVPGEPSTQDGNGHGTHVAGTIAALDNSIGVLGVAPSAELYAVKVLGASGSGSVSSIAQGLEWAGNNGMHVANLSLGSPSPSATLEQAVNSATSRGVLVVAASGNSGAGSISYPARYANAMAVGATDQNNNRASFSQYGAGLDIVAPGVNVQSTYPGSTYASLNGTSMATPHVAGAAALVKQKNPSWSNVRIRNHLKNTATSLGSTNLYGSGLVNAEAATR

SEQ ID NO: 52904 - protein, 269 aa, Unidentified
AQSVPWGISRVQAPAAHNRGLTGRGVKVAVLDTGISTHPDLNIRGGASFVPGEPSTQDGNGHGTHVAGTIAALNNSIGVLGVAPSAELYAVKVLGASGSGSVSSIAQGLEWAGNNGMHVANLSLGSPSPSATLEQAVNSATSRGVLVVAASGNSGAGSISYPARYANAMAVGATDQNNNRASFSQYGAGLDIVAPGVNVQSTYPGSTYASLNGTSMATPHVAGAAALVKQKNPSWSNVQIRNHLKNTATSLGSTNLYGSGLVNAEAAIR

SEQ ID NO: 52905 - protein, 269 aa, Unidentified
AQSVPWGISRVQAPAAHNRGLTGSGVKVAVLDTGISTHPDLNIRGGASFVPGEPSTQDGNGHGTHVAGTIAALNNSIGVLGVAPSAELYAVKVLGASGSGGVSSIAQGLEWAGNNGMHVANLSLGSESPSATLEQAVNSATSRGVLVVAASGNSGAGSISYPARYANAMAVGATDQNNNRASFSQYGAGLDIVAPGVNVQSTYPGSTYASLNGTSMATPHVAGAAALVKQKNPSWSNVQIRNHLKNTATSLGSTNLYGSGLVNAEAATR

SEQ ID NO: 52906 - protein, 269 aa, Unidentified
AQSVPWGISRVQAPAAHNRGLTGSGVKVAVLDTGISTHPDLNIRGGASFVPGEPSTQDGEGHGTHVAGTIAALNNSIGVLGVAPSAELYAVKVLGASGSGGVSSIAQGLEWAGNNGMHVANLSLGSPSPSATLEQAVNSATSRGVLVVAASGNSGAGSISYPARYANAMAVGATDQNNNRASFSQYGAGLDIVAPGVNVQSTYPGSTYASLNGTSMATPHVAGAAALVKQKNPSWSNVQIRNHLKNTATSLGSTNLYGSGLVNAEAATR

SEQ ID NO: 52907 - protein, 269 aa, Unidentified
AQSRPWGISRVQAPAAHNRGLTGSGVKVAVLDTGISTHPDRNIRGGASFVPGEPSTQDGNGHGTHVAGTIAALNNSIGVLGVAPSAELYAVKVLGASGSGSVSSIAQGLEWAGNNGMHVANLSLGSPSPSATLEQAVNSATSRGVLVVAASGNSGAGSISYPARYANAMAVGATDQNNNRASFSQYGAGLDIVAPGVNVQSTYPGSTYASLNGTSMATPHVAGAAALVKQKNPSWSNVQIRNHLKNTATSLGSTNLYGSGLVNAEAATR

SEQ ID NO: 52908 - protein, 269 aa, Unidentified
AQSRPWGISRVQAPAAHNRGLTGSGVKVAVLDTGISTHPDLNIRGGASFVPGEPSTQDGNGHGTHVAGTIAALNNSIGVRGVAPSAELYAVKVLGASGSGSVSSIAQGLEWAGNNGMHVANLSLGSPSPSATLEQAVNSATSRGVLVVAASGNSGAGSISYPARYANAMAVGATDQNNNRASFSQYGAGLDIVAPGVNVQSTYPGSTYASLNGTSMATPHVAGAAALVKQKNPSWSNVQIRNHLKNTATSLGSTNLYGSGLVNAEAATR

SEQ ID NO: 52909 - protein, 269 aa, Unidentified
AQSVPWGISRVQAPASHNRGLTGSGVKVAVLDTGISTHPDLNIRGGASFVPGEPSTQDGNGHGTHVAGTIAALNNSIGVLGVAPSAELYAVKVLGASGSGSVSSIAQGLEWAGNNGMHVANLSLGSPSPSATLEQAVNSATSRGVLVVAASGNSGAGSISYPARYANAMAVGATDQNNNRADFSQYGAGLDIVAPGVNVQSTYPGSTYASLNGTSMATPHVAGAAALVKQKNPSWSNVQIRNHLKNTATSLGSTNLYGSGLVNAEAATR

SEQ ID NO: 52910 - protein, 269 aa, Unidentified
AQSVPWGISRVQAPAAHNRGLTGSGVKVAVLDTGISTHPDLNIRGGASFVPGEPSTQDGNGHGTHVAGTIAALNNSIGVLGVAPSAELYAVKVLGASGSGSLSSIAQGVEWAGNNGMHVANLSLGSPSPSATLEQAVNSATSRGVLVVAASGNSGAGSISYPARYANAMAVGATDQNNNRASFSQYGAGLDIVAPGVNVQSTYPGSTYASLNGTSMATPHVAGAAALVKQKNPSWSNVQIRNHLKNTATSLGSTNLYGSGLVNAEAATR

SEQ ID NO: 52911 - protein, 269 aa, Unidentified
AQSVPWGISRVQAPAAHNRGLTGSGVKVAVLDTGISTHPDLNIRGGASFVPGEPSTQDGNGHGTHVAGTIAALNNSIGVLGVAPNAELYAVKVLGASGSGSXSSIAQGLEWAGNNGMHVANLSLGSPSPSATLEQAVNSATSRGVLVVAASGNSGAGSISYPARYANAMAVGATDQNNNRASFSQYGAGLDIVAPGVNVQSTYPGSTYASLNGTSMATPHVAGAAALVKQKNPSWSNVQIRNHLKNTATSLGSTNLYGSGLVNAEAATR

SEQ ID NO: 52912 - protein, 269 aa, Unidentified
AQSVPWGISRVQAPAAHNRGLTGSGVKVAVLDTGISTHPDLNIRGGASFVPGEPSTQDGNGHGTHVAGTIAALNNSIGVLGVAPSAELYAVKVLGASGSGSVSSIAQGLEWAGNNGMHVANLSLGSESPSATLEQAVNSATSRGVLVVAASGNSGAESISYPARYANAMAVGATDQNNNRASFSQYGAGLDIVAPGVNVQSTYPGSTYASLNGTSMATPHVAGAAALVKQKNPSWSNVQIRNHLKNTATSLGSTNLYGSGLVNAEAATR

SEQ ID NO: 52913 - protein, 269 aa, Unidentified
AQSVPWGISRVQAPAAHNRGLTGSGVKVAVLDTGISTHPDLNIRGGASFVPGEPSTQDGNGHGTHVAGTIAALNNSIGVLGVAPSAELYAVKVLGASGAGSVSSIAQGLEWAGNNGMHVANLSLGSPSPSATLEQAVNSATSRGVLVVAASGNSGAGSISYPARYANAMAVGATDQNNNRASFSQYGAGLDIVAPGVNVQSTYPGSTYASLNGTSMATPHVAGAAALVKQKNPSWSNVQIRNHLKNTATSLGSTNLYGSGLVNAFAATR

SEQ ID NO: 52914 - protein, 269 aa, Unidentified
AQSVPWGISRVQAPAAHNRGLRGSGVKVAVLDTGISTHPDLNIRGGASFVPGEPSTQDGNGHGTHVAGTIAALNNSIGVLGVAPSAELYAVKVLGASGSGSVSSIAQGLEWAGNNGMHVANLSLGSPSPSATLEQAVNSATSRGVLVVAASGNSGAGSISYPARYANAMAVGATDQNNNRASFSQYGAGLDIVAPGVNVQSTYPGSTYASLNGTSMATPHVAGAAALVKQKNPSWSNRQIRNHLKNTATSLGSTNLYGSGLVNAEAATR

SEQ ID NO: 52915 - protein, 269 aa, Unidentified
AQSVPWGISRVQAPAAHNRGLTGSGVKVAVLDTGISTHPDLNIRGGASFVPGEPSTQDGNGHGTHVAGTIAALNNSIGVLGVAPSAELYAVKVLGASGSGSNSSIAQGLEWAGNNGMHVANLSLGSPSPSATLEQAVNSATSRGVLVVAASGNSGAGSISYPARYANAMAVGATDQNNNRASFSQYGAGLDIVAPGVGVQSTYPGSTYASLNGTSMATPHVAGAAALVKQKNPSWSNVQIRNHLKNTATSLGSTNLYGSGLVNAEAATR

SEQ ID NO: 52916 - protein, 269 aa, Unidentified
AQSVPWGISRVQAPASHNRGLTGSGVKVAVLDTGISTHPDLNIRGGASFVPGEPSTQDGNGHGTHVAGTIAALNNSIGVLGVAPSAELYAVKVLGASGSGSLSSIAQGLEWAGNNGMHVANLSLGSPSPSATLEQAVNSATSRGVLVVAASGNSGAGSISYPARYANAMAVGATDQNNNRASFSQYGAGLDIVAPGVNVQSTYPGSTYASLNGTSMATPHVAGAAALVKQKNPSWSNVQIRNHLKNTATSLGSTNLYGSGLVNAEAATR

SEQ ID NO: 52917 - protein, 269 aa, Unidentified
AQSVPWGISRVQAPAAHNRGLTGSGVKVAVLDTGISTHPDLRIRGGASFVPGEPSTQDGNGHGTHVAGTIAALNNSIGVLGVAPSAELYAVKVLGASGAGSVSSIAQGLEWAGNNGMHVANLSLGSPSPSATLEQAVNSATSRGVLVVAASGNSGAGSISYPARYANAMAVGATDQNNNRASFSQYGAGLDIVAPGVNVQSTYPGSTYASLNGTSMATPHVAGAAALVKQKNPSWSNVQIRNHLKNTATSLGSTNLYGSGLVNAEAATR

SEQ ID NO: 52918 - protein, 269 aa, Unidentified
AQSVPWGISRVQAPAAHNRGLAGSGVKVAVLDTGISTHPDLNIRGGASFVPGEPSTQDGNGHGTHVAGTIAALNNSIGVLGVAPSAELYAVKVLGASGSGSVSSIAQGLEWAGNNGMHVANLSLGSPSPSATLEQAVNSATSRGVLVVAASGNSGAGSIDYPARYANAMAVGATDQNNNRASFSQYGAGLDIVAPGVNVQSTYPGSTYASLNGTSMATPHVAGAAALVKQKNPSWSNVQIRNHLKNTATSLGSTNLYGSGLVNAEAATR

SEQ ID NO: 52919 - protein, 269 aa, Unidentified
AQSVPWGIARVQAPAAHNRGLTGSGVKVAVLDTGISTHPDLNIRGGASFVPGEPSTQDGNGHGTHVAGTIAALNNSIGVLGVAPSAELYAVKVLGASGSGSVSSIAQGLEWAGNNGMHVANLSLGSPSPSATLEQAVNSATSRGVLVVAASGNSGAGSISYPARYANAMAVGATDQNNNRASFSQYGAGLDIVAPGVNVQSTYPGSTYASLNGTSMATPHVAGAAALVKQKNPSWSNRQIRNHLKNTATSLGSTNLYGSGLVNAEAATR

SEQ ID NO: 52920 - protein, 269 aa, Unidentified
AQSVPWGISRVQAPAAHNRGLTGSGVKVAVLDSGISTHPDLNIRGGASFVPGEPSTQDGNGHGTHVAGTIAALNNSIGVLGVAPSAELYAVKVLGASGSGSVSSIAQGLEWAGNNGMHVANLSLGSPSPSATLEQAVNSATSRGVLVVAASGNSGAGSIDYPARYANAMAVGATDQNNNRASFSQYGAGLDIVAPGVNVQSTYPGSTYASLNGTSMATPHVAGAAALVKQKNPSWSNVQIRNHLKNTATSLGSTNLYGSGLVNAEAATR

SEQ ID NO: 52921 - protein, 269 aa, Unidentified
AQSVPWGISRVQAPAAHNRGLTGRGVKVAVLDTGISTHPDLNIRGGASFVPGEPSTQDGNGHGTHVAGTIAALNNSIGVLGVAPSAELYAVKVLGASGSGSVSSIAQGLEWAGNNRMHVANLSLGSPSPSATLEQAVNSATSRGVLVVAASGNSGAGSISYPARYANAMAVGATDQNNNRASFSQYGAGLDIVAPGVNVQSTYPGSTYASLNGTSMATPHVAGAAALVKQKNPSWSNVQIRNHLKNTATSLGSTNLYGSGLVNAEAATR

SEQ ID NO: 52922 - protein, 269 aa, Unidentified
AQSVPWGISRVQAPAAHNRGLTGSGVKVAVLDTGISTHPDLNIRGGASFVPGEPSTQDGEGHGTHVAGTIAALNNSIGVLGVAPSAELYAVKVLGASGSGSVSSIAQGLEWAGNNGMHVANLSLGLPSPSATLEQAVNSATSRGVLVVAASGNSGAGSISYPARYANAMAVGATDQNNNRASFSQYGAGLDIVAPGVNVQSTYPGSTYASLNGTSMATPHVAGAAALVKQKNPSWSNVQIRNHLKNTATSLGSTNLYGSGLVNAEAATR

SEQ ID NO: 52923 - protein, 269 aa, Bacillus subtilis
AQSVPWGISRVQAPAAHNRGLTGSGVKVAVLDTGISTHPDLNIRGGASFVPGEPSTQDGNGHGTHVAGTIAALNNSIGVLGVAPSAELYAVKVLGASGSGSVESIAQGLEWAGNNGMHVANLSLGSPSPSATLEQAVNSATSRGVLVVAASGNSGAGSISYPARYANAMAVGATDQNNNRASFSQYGAGLDIVAPGVNVQSTYPGSRYASLNGTSMATPHVAGAAALVKQKNPSWSNVQIRNHLKNTATSLGSTNLYGSGLVNAEAATR

SEQ ID NO: 52924 - protein, 269 aa, Unidentified
AQSVPWGISRVQAPAAHNRGLAGSGVKVAVLDTGISTHPDLNIRGGASFVPGEPSTQDGNGHGTHVAGTIAALNNSIGVLGVAPSAELYAVKVLGASGSGGVSSIAQGLEWAGNNGMHVANLSLGSPSPSATLEQAVNSATSRGVLVVAASGNSGAGSISYPARYANAMAVGATDQNNNRASFSQYGAGLDIVAPGVNVQSTYPGSTYASLNGTSMATPHVAGAAALVKQKNPSWSNVQIRNHLKNTATSLGSTNLYGSGLVNAEAATR

SEQ ID NO: 52925 - protein, 269 aa, Unidentified
AQSVPWGISRVQAPAAHNRGLTGSGVKVAVLDTGISTHPDLNIRGGASFVPGEPSTQDGNGHGTHVAGTIAALNNSIGVLGVAPSAELYAVKVLGASGSGSVSSIAQGLEWAGNNGMHVANLSLGIPSPSATLEQAVNSATSRGVLVVAASGNSGAGSIDYPARYANAMAVGATDQNNNRASFSQYGAGLDIVAPGVNVQSTYPGSTYASLNGTSMATPHVAGAAALVKQKNPSWSNVQIRNHLKNTATSLGSTNLYGSGLVNAEAATR

SEQ ID NO: 52926 - protein, 269 aa, Unidentified
AQSVPWGISRVQAPAAHNRGLTGSGVKVAVLDTGISTHPDLNIRGGASFVPGEPSTQDGNGHGTHVAGTIAALNNSIGVLGVAPSAELYAVKVLGASGSGSVSSIAQGLEWARNNGMHVANLSLGSPSPSATLEQAVNSATSRGVLVVAASGNSGAGSISYPARYANAMAVGATDQNNNRASFSQYGAGLDIVAPGVNVQSTYPGSTYASLNGTSMATPHVAGAAALVKQKNPSWSNVQIRNRLKNTATSLGSTNLYGSGLVNAEAATR

SEQ ID NO: 52927 - protein, 269 aa, Unidentified
AQSVPWGISRVQAPAAHNRGLTGSGVKVAVLDTGISTHPDLNIRGGASFVPGEPSTQDGNGHGTHVAGTIAALNNSIGVLGVAPSAELYAVKVLGASGSGSVSSIAQGLEWAGNNGMHVANLSLGSPSPSATLEQAVNSATSRGVLVVAASGNSGAGSISYPARYANAMAVGATDQNNNRASFSQYGAGLDIVAPGVNVRSTYPGSTYASLNGTSMATPHVAGAVALVKQKNPSWSNVQIRNHLKNTATSLGSTNLYGSGLVNAEAATR

SEQ ID NO: 52928 - protein, 269 aa, Synthetic construct
AQSVPWGISRVQAPAAHNRGLTGSGVKVAVLDTGISTHPDLNIRGGASFVPGEPSTQDGNGHGTHVAGTIAALDNSIGVLGVAPSAELYAVKVLGASGSGAVSSIAQGLEWAGNNGMHVANLSLGSPSPSATLEQAVNSATSRGVLVVAASGNSGAGSISYPARYANAMAVGATDQNNNRASFSQYGAGLDIVAPGVNVQSTYPGSTYASLNGTSMATPHVAGAAALVKQKNPSWSNVQIRNHLKNTATSLGSTNLYGSGLVNAEAATR

SEQ ID NO: 52929 - protein, 269 aa, Unidentified
AQSVPWGISRVQAPAAHNRGLTGSGVKVAVLDTGISTHPDLNIRGGASFVPGEPSTQDGNGHGTHVAGTIAALNNSIGVLGVAPSAELYAVKVLGASGSGGVSSIAQGLEWAGNNGMHVANLSLGSPSPSATLEQAVNSATSRGVLVVAASGNSGEGSISYPARYANAMAVGATDQNNNRASFSQYGAGLDIVAPGVNVQSTYPGSTYASLNGTSMATPHVAGAAALVKQKNPSWSNVQIRNHLKNTATSLGSTNLYGSGLVNAEAATR

SEQ ID NO: 52930 - protein, 269 aa, Unidentified
AQSVPWGISRVQAPAAHNRGLTGSGVKVAVLDTGISTHPDLNIRGGASFVPGEPSTQDGNGHGTHVAGTIAALNNSIGVLGVAPNAELYAVKVLGASGGGSVSSIAQGLEWAGNNGMHVANLSLGSPSPSATLEQAVNSATSRGVLVVAASGNSGAGSISYPARYANAMAVGATDQNNNRASFSQYGAGLDIVAPGVNVQSTYPGSTYASLNGTSMATPHVAGAAALVKQKNPSWSNVQIRNHLKNTATSLGSTNLYGSGLVNAEAATR

SEQ ID NO: 52931 - protein, 269 aa, Unidentified
AQSVPWGISRVQAPAAHNRGLTGSGVKVAVLDTGISTHPDLNIRGGASFVPGEPSTQDGNGHGTHVAGTIAALNNSIGVLGVAPSAELYAVKVLGASGSGSVSSIAQGLEWAGNNGMHVANLSLGSESPSATLEQAVNSATSRGVLVVAASGNSGEGSISYPARYANAMAVGATDQNNNRASFSQYGAGLDIVAPGVNVQSTYPGSTYASLNGTSMATPHVAGAAALVKQKNPSWSNVQIRNHLKNTATSLGSTNLYGSGLVNAEAATR

SEQ ID NO: 52932 - protein, 269 aa, Unidentified
AQSVPWGISRVQAPAAHNRGLTGSGVKVAVLDTGISTHPDLNIRGGASFVPGEPSTQDGNGHGTHVAGTIAALNNSIGVLGVAPSAELYAVKVLGASGSGSVSSIAQGLEWAGNNGMHVANLSLGNPSPSATLEQAVNSATSRGVLVVAASGNSGAESISYPARYANAMAVGATDQNNNRASFSQYGAGLDIVAPGVNVQSTYPGSTYASLNGTSMATPHVAGAAALVKQKNPSWSNVQIRNHLKNTATSLGSTNLYGSGLVNAEAATR

SEQ ID NO: 52933 - protein, 269 aa, Unidentified
AQSVPWGISRVQAPAAHNRGLTGSGVKVAVLDSGISTHPDLNIRGGASFVPGEPSTQDGNGHGTHVAGTIAALNNSIGVLGVAPSAELYAVKVLGASGSGSVSSIAQGLEWAGNNGMHVANLSLGSPSPSATLEQAVNSATSRGVLVVAASGNSGAGSISYPARYANAMAVGATDQNNNRASFSQYGAGLDIVAPGVNVQSTYPGSTYASLNGTSMATPHVAGAAALVKQKNPSRSNVQIRNHLKNTATSLGSTNLYGSGLVNAEAATR

SEQ ID NO: 52934 - protein, 269 aa, Unidentified
AQSVPWGISRVQAPAAHNRGLTGSGVKVAVLDTGISTHPDLNIRGGASFVPGEPSTQDGNGHGTHVAGTIAALNNSIGVLGVAPNAELYAVKVLGASGSGSVSSIAQGLEWAGNNGMHVANLSLGSPSPSATLEQAVNSATSRGVLVVAASGNSGAGSISYPARYANAMAVGATDQNNNRASFSQYGAGLDIVAPGXNVQSTYPGSTYASLNGTSMATPHVAGAAALVKQKNPSWSNVQIRNHLKNTATSLGSTNLYGSGLVNAEAATR

SEQ ID NO: 52935 - protein, 269 aa, Unidentified
AQSVPWGISRVQAPAAHNRGLTGSGVKVAVLDTGISTHPDLNIRGGASFVPGEPSTQDGNGHGTHVAGTIAALNNSIGVLGVAWSAELYAVKVLGASGSGSVSSIAQGLEWAGNNGMHVANLSLGSPSPSATLEQAVNSATSRGVLVVAASGNSGAGSISYPARYANAMAVGATDQNNNRASFSQYGAGLDIVAPGVNVQSTYPGSTYASLNGTSMATPHVAGAAALVKQKNPSWSFVQIRNHLKNTATSLGSTNLYGSGLVNAEAATR

SEQ ID NO: 52936 - protein, 269 aa, Unidentified
AQSVPWGISRVQAPAAHNRGLTGSGVKVAVLDTGISTHPDLNIRGGASFVPGEPSTQDGNGHGTHVAGTIAALNNRIGVLGVAWSAELYAVKVLGASGSGSVSSIAQGLEWAGNNGMHVANLSLGSPSPSATLEQAVNSATSRGVLVVAASGNSGAGSISYPARYANAMAVGATDQNNNRASFSQYGAGLDIVAPGVNVQSTYPGSTYASLNGTSMATPHVAGAAALVKQKNPSWSNVQIRNHLKNTATSLGSTNLYGSGLVNAEAATR

SEQ ID NO: 52937 - protein, 269 aa, Unidentified
AQSVPWGISRVQAPAAHNRGLTGSGVKVAVLDTGISTHPDLNIRGGASFVPGEPSTQDGNGHGTHVAGTIAALNNSIGVLGVAPSAELYAVKVLGASGGGSNSSIAQGLEWAGNNGMHVANLSLGSPSPSATLEQAVNSATSRGVLVVAASGNSGAGSISYPARYANAMAVGATDQNNNRASFSQYGAGLDIVAPGVNVQSTYPGSTYASLNGTSMATPHVAGAAALVKQKNPSWSNVQIRNHLKNTATSLGSTNLYGSGLVNAEAATR

SEQ ID NO: 52938 - protein, 269 aa, Unidentified
AQSVPWGISRVQAPAAHNRGLTGSGVKVAVLDTGISTHPDLNIRGGASFVPGEPSTQDGNGHGTHVAGTIAALNNSIGVLGVAPSAELYAVKVLGASGSGSVSSIAQGLEWAGNNGMHVANLSLGSPSPSATLEQAVNSATSRGVLVVAASGNSGAGSIDYPARYANAMAVGATDQNNNRASFSQYGAGLDIVAPGVNVQSTYPGSTYASENGTSMATPHVAGAAALVKQKNPSWSNVQIRNHLKNTATSLGSTNLYGSGLVNAEAATR

SEQ ID NO: 52939 - protein, 269 aa, Unidentified
AQSVPWGISRVQAPASHNRGLTGSGVKVAVLDTGISTHPDLNIRGGASFVPGEPSTQDGNGHGTHVAGTIAALNNSIGVLGVAPSAELYAVKVLGASGSGSVSSIAQGLEWAGNNGMHVANLSLGSPSPSATLEQAVNSATSRGVLVVAASGNSGAGSISYPARYANAMAVGATDQNNNRASFSQYGAGLDIVAPGVNVQSTYPGSTYASLNGTSMATPHVAGAAALVKQKNPSWSNVQIRNRLKNTATSLGSTNLYGSGLVNAEAATR

SEQ ID NO: 52940 - protein, 269 aa, Unidentified
AQSVPWGISRVQAPAAHNRGLTGSGVKVAVLDTGISTHPDLNIRGGASFVPGEPSTQDGNGHGTHVAGTIAALNNSIGVLGVAPSAELYAVKVLGASGSGSVSSIAQGVEWAGNNGMHVANLSLGSPSPSATLEQAVNSATSRGVLVVAASGNSGAESISYPARYANAMAVGATDQNNNRASFSQYGAGLDIVAPGVNVQSTYPGSTYASLNGTSMATPHVAGAAALVKQKNPSWSNVQIRNHLKNTATSLGSTNLYGSGLVNAEAATR

SEQ ID NO: 52941 - protein, 269 aa, Unidentified
AQSVPWGISRVQAPAAHNRGLTGSGVKVAVLDTGISTHPDLNIRGGASFVPGEPSTQDGNGHGTHVAGTIAALNNSIGVLGVAPSAELYAVKVLGASGSGSVSSIAQGVEWAGNNGMHVANLSLGSPSPSATLEQAVNSATSRGVIVVAASGNSGAGSISYPARYANAMAVGATDQNNNRASFSQYGAGLDIVAPGVNVQSTYPGSTYASLNGTSMATPHVAGAAALVKQKNPSWSNVQIRNHLKNTATSLGSTNLYGSGLVNAEAATR

SEQ ID NO: 52942 - protein, 269 aa, Unidentified
AQSVPWGISRVQAPAAHNRGLTGSGVKVAVLDTGISTHPDLNIRGGASFVPGEPSTQDGNGHGTHVAGTIAALNNSIGVLGVAPSAELYAVKVLGASGSGSLSSIAQGLEWAGNNGMHVANLSLGSESPSATLEQAVNSATSRGVLVVAASGNSGAGSISYPARYANAMAVGATDQNNNRASFSQYGAGLDIVAPGVNVQSTYPGSTYASLNGTSMATPHVAGAAALVKQKNPSWSNVQIRNHLKNTATSLGSTNLYGSGLVNAEAATR

SEQ ID NO: 52943 - protein, 269 aa, Unidentified
AQSVPWGISRVQAPAAHRRGLTGSGVKVAVLDTGISTHPDLNIRGGASFVPGEPSTQDGNGHGTHVAGTIAALNNSIGVRGVAPSAELYAVKVLGASGSGSVSSIAQGLEWAGNNGMHVANLSLGSPSPSATLEQAVNSATSRGVLVVAASGNSGAGSISYPARYANAMAVGATDQNNNRASFSQYGAGLDIVAPGVNVQSTYPGSTYASLNGTSMATPHVAGAAALVKQKNPSWSNVQIRNHLKNTATSLGSTNLYGSGLVNAEAATR

SEQ ID NO: 52944 - protein, 269 aa, Unidentified
AQSVPWGISRVQAPAAHRRGLTGSGVKVAVLDTGISTHPDLNIRGGASFVPGEPSTQDGNGHGTHVAGTIAALNNSIGVLGVAPSAELYAVKVLGASGSGSVSSIAQGLEWAGNNGMHVANLSLGSPSPSATLEQAVNSATSRGVLVVAASGNSGAGSISYPARYANAMAVGATDQNNNRASFSQYGAGLDIVAPGVNVQSTYPGSTYASLNGTSMATPHVAGAAALVKQKNPSRSNVQIRNHLKNTATSLGSTNLYGSGLVNAEAATR

SEQ ID NO: 52945 - protein, 269 aa, Unidentified
AQSVPWGISRVQAPAAHNRGLTGSGVKVAVLDTGISTHPDLNIRGGASFVPGEPSTQDGNGHGTHVAGTIAALNNSIGVLGVAPRAELYAVKVLGASGSGSVSSIADGLEWAGNNGMHVANLSLGSPSPSATLEQAVNSATSRGVLVVAASGNSGAGSISYPARYANAMAVGATDQNNNRASFSQYGAGLDIVAPGVNVQSTYPGSTYASLNGTSMATPHVAGAAALVKQKNPSWSNVQIRNHLKNTATSLGSTNLYGSGLVNAEAATR

SEQ ID NO: 52946 - protein, 269 aa, Unidentified
AQSVPWGISRVQAPAAHNRGLTGRGVKVAVLDTGISTHPDLNIRGGASFVPGEPSTQDGNGHGTHVAGTIAALNNSIGVLGVAPSAELYAVKVLGASGSGSVSSIAQGLEWAGNNGMHVANLSLGSPSPSATLEQAVNSATSRGVLVVAASGNSGAGSISYPARYANTMAVGATDQNNNRASFSQYGAGLDIVAPGVNVQSTYPGSTYASLNGTSMATPHVAGAAALVKQKNPSWSNVQIRNHLKNTATSLGSTNLYGSGLVNAEAATR

SEQ ID NO: 52947 - protein, 269 aa, Unidentified
AQSVPWGISRVQAPAAHNRGLTGSGVKVAVLDTGISTHPDLNIRGGASFVPGEPSTQDGNGHGTHVAGTIAALNNSIGVLGVAPSAELYAVKVLGASGSGSVSSIADGLEWAGNNGMHVANLSLGSPSPSATLEQAVNSATSRGVLVVAASGNSGAGSISYPARYANAMAVGATDQNNNRADFSQYGAGLDIVAPGVNVQSTYPGSTYASLNGTSMATPHVAGAAALVKQKNPSWSNVQIRNHLKNTATSLGSTNLYGSGLVNAEAATR

SEQ ID NO: 52948 - protein, 269 aa, Unidentified
AQSVPWGISRVQAPAAHNRGLRGSGVKVAVLDTGISTHPDLNIRGGASFVPGEPSTQDGNGHGTHVAGTIAALNNSIGVLGVAPSAELYAVKVLGASGSGSVSSIAQGLEWAGNNGMHVANLSLGSPSPSATLEQAVNSATSRGVLVVAASGNSGAGSISYPARYANAMAVGATDQNNNRASFSQYGAGLDIVAPGVNVQSTYPGSTYASLNGTSMATPHVAGAAALVKQKNPSRSNVQIRNHLKNTATSLGSTNLYGSGLVNAEAATR

SEQ ID NO: 52949 - protein, 269 aa, Unidentified
AQSVPWGISRVQAPAAHNRGLTGSGVKVAVLDTGISTHPDLNIRGGASFVPGEPSTQDGNGHGTHVAGTIAALNNSIGVLGVAPSAELYAVKVLGASGSGSVSSIAQGVEWAGNNGMHVANLSLGNPSPSATLEQAVNSATSRGVLVVAASGNSGAGSISYPARYANAMAVGATDQNNNRASFSQYGAGLDIVAPGVNVQSTYPGSTYASLNGTSMATPHVAGAAALVKQKNPSWSNVQIRNHLKNTATSLGSTNLYGSGLVNAEAATR

SEQ ID NO: 52950 - protein, 269 aa, Unidentified
AQSVPWGISRVQAPAAHNRGLLGSGVKVAVLDTGISTHPDLNIRGGASFVPGEPSTQDGNGHGTHVAGTIAALNNNIGVLGVAPSAELYAVKVLGASGSGSVSSIAQGLEWAGNNGMHVANLSLGSPSPSATLEQAVNSATSRGVLVVAASGNSGAGSISYPARYANAMAVGATDQNNNRASFSQYGAGLDIVAPGVNVQSTYPGSTYASLNGTSMATPHVAGAAALVKQKNPSWSNVQIRNHLKNTATSLGSTNLYGSGLVNAEAATR

SEQ ID NO: 52951 - protein, 269 aa, Bacillus sp.
AQSVPWGISRVQAPAAHNRGLTGSGVKVAVLDTGISTHPDLNIRGGASFVPGEPSTQDGNGHGTHVAGTIAALNNSIGVLGVAPNAELYAVKVLGASGSGSVSSIAQGLEWAGNNGMHVANLSLGSPSPSATLEQAVNSATSRGVLVVAASGNSGAGSISYPARYANAMAVGATDQNNNRASFSQYGAGLDIVAPGVNVQSTYPGSTYASLNGTSMATPHVAGAAALVKQKNPSWSNVQIRNHLKNTATSLGSTNLYGKGLVNAEAATR

SEQ ID NO: 52952 - protein, 269 aa, Unidentified
AQSVPWGISRVQAPAAHNRGLTGSGVKVAVLDTGISTHPDRNIRGGASFVPGEPSTQDGNGHGTHVAGTIAALNNSIGVLGVAPSAELYAVKVLGASGSGSVSSIAQGLEWAGNNGMHVANLSLGSPSPSATLEQAVNSATSRGVLVVAASGNSGAGSISYPARYANAMAVGATDQNNNRASFSQYGAGLDIVAPGVNVQSTYPGSTYASLNGTSMATPHVAGAAALVKQKNPSWSNVQIRNRLKNTATSLGSTNLYGSGLVNAEAATR

SEQ ID NO: 52953 - protein, 269 aa, Unidentified
AQSVPWGISRVQAPAAHNRRLRGSGVKVAVLDTGISTHPDLNIRGGASFVPGEPSTQDGNGHGTHVAGTIAALNNSIGVLGVAPSAELYAVKVLGASGSGSVSSIAQGLEWAGNNGMHVANLSLGSPSPSATLEQAVNSATSRGVLVVAASGNSGAGSISYPARYANAMAVGATDQNNNRASFSQYGAGLDIVAPGVNVQSTYPGSTYASLNGTSMATPHVAGAAALVKQKNPSWSNVQIRNHLKNTATSLGSTNLYGSGLVNAEAATR

SEQ ID NO: 52954 - protein, 269 aa, Synthetic construct
AQSVPWGISRVQAPAAHNRGLTGSGVKVAVLDTGISTHPDLNIRGGASFVPGEPSTQDGNGHGTHVAGTIAALNNSIGVLGVAPSAELYAVKVLGASRSGSVSSIAQGLEWAGNNGMHVANLSLGSPSPSATLEQAVNSATSRGVLVVAASGNSGAGSISYPASYANAMAVGATDQNNNRASFSQYGAGLDIVAPGVNVQSTYPGSTYASLNGTSMATPHVAGAAALVKQKNPSWSNVQIRNHLKNTATSLGSTNLYGSGLVNAEAATR

SEQ ID NO: 52955 - protein, 269 aa, Unidentified
AQSVPWGISRVQAPAAHNRGLTGSGVKVAVLDTGISTHPDLNIRGGASFVPGEPSTQDGNGHGTHVAGTIAALNNSIGVLGVAPSAELYAVKVLGASGSGSVSSIAQGVEWAGNNGMHVANLSLGSPSPSATLEQAVNSATSRGVLVVAASGNSGEGSISYPARYANAMAVGATDQNNNRASFSQYGAGLDIVAPGVNVQSTYPGSTYASLNGTSMATPHVAGAAALVKQKNPSWSNVQIRNHLKNTATSLGSTNLYGSGLVNAEAATR

SEQ ID NO: 52956 - protein, 269 aa, Unidentified
AQSVPWGISRVQAPAAHNRGLTGSGVKVAVLDTGISTHPDLNIRGGASFVPGEPSTQDGEGHGTHVAGTIAALNNSIGVLGVAPSAELYAVKVLGASGSGSVSSIAQGLEWAGNNGMHVANLSLGSPSPSATLEQAVNSATSRGVLVVAASGNSGAGSISYPARYANAMAVGATDQNNNRASFSQYGAGLDIVAPGVNVQSTYPGSTYASLNGTSMATPHVAGAAALVKQKNPSWSNVQIRNRLKNTATSLGSTNLYGSGLVNAEAATR

SEQ ID NO: 52957 - protein, 269 aa, Unidentified
AQSVPWGISRVQAPAAHNRGLTGSGVKVAVLDTGISTHPDLNIRGGASFVPGEPSTQDGNGHGTHVAGTIAALNNSIGVLGVAPSAELYAVKVLGQSGSGSLSSIAQGLEWAGNNGMHVANLSLGSPSPSATLEQAVNSATSRGVLVVAASGNSGAGSISYPARYANAMAVGATDQNNNRASFSQYGAGLDIVAPGVNVQSTYPGSTYASLNGTSMATPHVAGAAALVKQKNPSWSNVQIRNHLKNTATSLGSTNLYGSGLVNAEAATR

SEQ ID NO: 52958 - protein, 269 aa, Unidentified
AQSVPWGISRVQAPAAHNRGLTGSGVKVAVLDTGISTHPDLNIRGGASFVPGEPSTQDGNGHGTHVAGTIAALNNSIGVLGVAPSAGLYAVKVLGASGSGSVSSIAQGLEWAGNNGMHVANLSLGSPSPSATLEQAVNSETSRGVLVVAASGNSGAGSISYPARYANAMAVGATDQNNNRASFSQYGAGLDIVAPGVNVQSTYPGSTYASLNGTSMATPHVAGAAALVKQKNPSWSNVQIRNHLKNTATSLGSTNLYGSGLVNAEAATR

SEQ ID NO: 52959 - protein, 269 aa, Unidentified
AQSVPWGISRVQAPAAHNRGLTGSGVKVAVLDTGISTHPDLNIRGGASFVPGEPSTQDGNGHGTHVAGTIAALNNSIGVLGVAPSAELYAVKVLGASGSGSVSSIAQGLEWAGNNRMHVANLSLGSPSPSATLEQAVNSATSRGVLVVAASGNSGAGSISYPARYANAMAVGATDQNNNRASFSQYGAGLDIVAPGVNVQSTYPGSTYASLNGTSMATPHVAGAAALVKQKNPSWSNVQIRNRLKNTATSLGSTNLYGSGLVNAEAATR

SEQ ID NO: 52960 - protein, 271 aa, Unidentified
AQSVPWGISRVQAPAAHNRGLTGSGVKVAVLDTGISTHPDLNIRGGASFVPGEPSTQDGNGHGTHVAGTIAALNNSIGVLGVAPSAELYAVKVLGATXSGSGSVSSICQGLEWAGNNGMHVANLSLGSPSPSATLEQCVNSATSRGVLVVAASGNSGAGSISYPARYANAMAVGATDQNNNRASFSQYGAGLDIVAPGVNVQSTYPGSTYASLNGTSMATPHVAGAAALVKQKNPSWSNVQIRNHLKNTATSLGSTNLYGSGLVNAEAATR

SEQ ID NO: 52961 - protein, 269 aa, Unidentified
AQSVPWGISRVQAPAAHNRGLTGSGVKVAVLDTGISTHPDLNIRGGASFVPGEPSTQDGNGHGTHVAGTIAALNNSIGVLGVAPSAELYAVKVLGASGSGSVSSIAQGLEWAGNNGMHVANLSLGSPSPSATLEQAVNSATSRGVLVVAASGNSGAGSISYPARYANAMAVGATDQNNNRASFSQYGAGLDIVAPGVNVQSTYPGSTYASLNGTSMATPHVAGAAALVKQKNPSWSNVQIRNHLKSTATSLGSTNLYGSGRVNAEAATR

SEQ ID NO: 52962 - protein, 269 aa, Unidentified
AQSVPWGISRVQAPAAHNRGLTGSGVKVAVLDTGISTHPDLNIRGGASFVPGEPSTQDGNGHGTHVAGTIAALNNSIGVLGVAPSAELYAVKVLGASGSGSVSSIAQGLEWAGNNGMHVANLSLGSPSPSATLEQAVNSATSRGVLVVAASGNSGAGSISYPARYANAMAVGATDQNNNRASFSQYGAGLDIVAPGVNVQSTYPGSTYASENGTSMATPHVAGAAALVKQKNPRWSNVQIRNHLKNTATSLGSTNLYGSGLVNAEAATR

SEQ ID NO: 52963 - protein, 269 aa, Unidentified
AQSVPWGISRVQAPAAHNRKLTGSGVKVAVLDTGISTHPDLNIRGGASFVPGEPSTQDGEGHGTHVAGTIAALNNSIGVLGVAPSAELYAVKVLGASGSGSVSSIAQGLEWAGNNGMHVANLSLGSPSPSATLEQAVNSATSRGVLVVAASGNSGAGSISYPARYANAMAVGATDQNNNRASFSQYGAGLDIVAPGVNVQSTYPGSTYASLNGTSMATPHVAGAAALVKQKNPSWSNVQIRNHLKNTATSLGSTNLYGSGLVNAEAATR

SEQ ID NO: 52964 - protein, 269 aa, Unidentified
AQSVPWGISRVQAPASHNRGLTGSGVKVAVLDTGISTHPDLNIRGGASFVPGEPSTQDGEGHGTHVAGTIAALNNSIGVLGVAPSAELYAVKVLGASGSGSVSSIAQGLEWAGNNGMHVANLSLGSPSPSATLEQAVNSATSRGVLVVAASGNSGAGSISYPARYANAMAVGATDQNNNRASFSQYGAGLDIVAPGVNVQSTYPGSTYASLNGTSMATPHVAGAAALVKQKNPSWSNVQIRNHLKNTATSLGSTNLYGSGLVNAEAATR

SEQ ID NO: 52965 - protein, 269 aa, Unidentified
AQSVPWGISRVQAPAAHNRGLTGRGVKVAVLDTGISTHPDLNIRGGASFVPGEPSTQDGNGHGTHVAGTIAALNNSIGVLGVAPSAELYAVKVLGASGSGSASSIAQGLEWAGNNGMHVANLSLGSPSPSATLEQAVNSATSRGVLVVAASGNSGAGSISYPARYANAMAVGATDQNNNRASFSQYGAGLDIVAPGVNVQSTYPGSTYASLNGTSMATPHVAGAAALVKQKNPSWSNVQIRNHLKNTATSLGSTNLYGSGLVNAEAATR

SEQ ID NO: 52966 - protein, 269 aa, Bacillus sp.
AQSVPWGISRVQAPAAHNRGLTGSGVKVAVLDTGISTHPDLNIRGGASFVPGEPSTQDGNGHGTHVAGTIAALNNSIGVLGVAPNAELYAVKVLGASGSGSVSSIAQGLEWAGNNGMHVANLSLGSPSPSATLEQAVNSATSRGVLVVAASGNSGAGSIQYPARYANAMAVGATDQNNNRASFSQYGAGLDIVAPGVNVQSTYPGSTYASLNGTSMATPHVAGAAALVKQKNPSWSNVQIRNHLKNTATSLGSTNLYGSGLVNAEAATR

SEQ ID NO: 52967 - protein, 269 aa, Unidentified
AQSVPWGISRVQAPAAHNRGLTGSGVKVAVLDTGISTHPDLNIRGGASFVPGEPSTQDGNGHGTHVAGTIAALNNSIGVLGVAPSAELYAVKVLGATGSASVSSIAQGLEWAGNNGMHVANLSLGSPSPSATLEQAVNSATSRGVLVVAASGNSGAGSISYPARYANAMAVGATDQNNNRASFSQYGAGLDIVAPGVNVQSTYPGSTYASLNGTSMATPHVAGAAALVKQKNPSWSNVQIRNHLKNTATSLGSTNLYGSGLVNAEAATR

SEQ ID NO: 52968 - protein, 269 aa, Unidentified
AQSVPWGISRVQAPAAHNRGLTGSGVKVAVLDTGISTHPDLNIRGGASFVPGEPSTQDGNGHGTHVAGTIAALNNSIGVLGVAPSAELYAVKVLGASGSGSVSSIAQGLEWAGNNGMHVANLSLGSPSPSATLEQAVNSATSRGVLVVAASGNSGAGSISYPARYANAMAVGATDQNNNRASFSQYGAGLDIVAPGVNVQSTYPGSTYASLNGTSMATPHVAGEAALVKQKNPSWSNVQIRNRLKNTATSLGSTNLYGSGLVNAEAATR

SEQ ID NO: 52969 - protein, 269 aa, Bacillus lentus
AQSVPWGISRVQAPAAHNRGLTGSGVKVAVLDTGISTHPDLNIRGGASFVPGEPSTQDGDGHGTHVAGTIAALNNSIGVLGVAPSAELYAVKVLGASGSGSVSSIAQGLEWAGNNGMHVANLSLGSPSPSATLEQAVNSATSRGVLVVAASGNSGAGSISYPARYANAMAVGATDQNNNRASFSQYGAGLDIVAPGVNVQSTYPGSTYASLNGTSMATPHVAGAAALVRQKNPSWSNVQIRNHLKNTATSLGSTNLYGSGLVNAEAATR

SEQ ID NO: 52970 - protein, 269 aa, Unidentified
AQSVPWGISRVQAPAAHNRGLTGSGVKVAVLDTGISTHPDLNIRGGASFVPGEPSTQDGEGHGTHVAGTIAALNNSIGVLGVAPSAELYAVKVLGASGSGSVSSIAQGLEWAGNNGMHVANLSLGSPSPSATLEQAVNSATSRGVLVVAASGNSGAGSISYPARYANAMAVGATDQNNNRASFSQYGAGLDIVAPGVNVQSTYPGSTYASLNGTSMATPHVAGAAALVKQKNPRWSNVQIRNHLKNTATSLGSTNLYGSGLVNAEAATR

SEQ ID NO: 52971 - protein, 269 aa, Unidentified
AQSVPWGISRVQAPAAHNRRLTGSGVKVAVLDTGISTHPDLNIRGGASFVPGEPSTQDGNGHGTHVAGTIAALNNSIGVLGVAPSAELYAVKVLGASGSGSVSSIAQGLEWARNNGMHVANLSLGSPSPSATLEQAVNSATSRGVLVVAASGNSGAGSISYPARYANAMAVGATDQNNNRASFSQYGAGLDIVAPGVNVQSTYPGSTYASLNGTSMATPHVAGAAALVKQKNPSWSNVQIRNHLKNTATSLGSTNLYGSGLVNAEAATR

SEQ ID NO: 52972 - protein, 269 aa, Unidentified
AQSVPWGISRVQAPAAHNRGLTGSGVKVAVLDTGISTHPDLNIRGGASFVPGEPSTQDGNGHGTHVAGTIAALNNSIGVLGVAPSAELYAVKVLGASGAGSLSSIAQGLEWAGNNGMHVANLSLGSPSPSATLEQAVNSATSRGVLVVAASGNSGAGSISYPARYANAMAVGATDQNNNRASFSQYGAGLDIVAPGVNVQSTYPGSTYASLNGTSMATPHVAGAAALVKQKNPSWSNVQIRNHLKNTATSLGSTNLYGSGLVNAEAATR

SEQ ID NO: 52973 - protein, 269 aa, Unidentified
AQSVPWGISRVQAPAAHNRGLTGSGVKVAVLDTGISTHPDLNIRGGASFVPGEPSTQDGNGHGTHVAGTIAALDNSIGVLGVAPSAELYAVKVLGASGSGSVSSVAQGLEWAGNNGMHVANLSLGSPSPSATLEQAVNSATSRGVLVVAASGNSGAGSISYPARYANAMAVGATDQNNNRASFSQYGAGLDIVAPGVNVQSTYPGSTYASLNGTSMATPHVAGAAALVKQKNPSWSNVQIRNHLKNTATSLGSTNLYGSGLVNAEAATR

SEQ ID NO: 52974 - protein, 269 aa, Unidentified
AQSVPWGISRVQAPAAHRRGLTGSGVKVAVLDTGISTHPDLNIRGGASFVPGEPSTQDGNGHGTHVAGTIAALNNSIGVLGVAPSAELYAVKVLGASGSGSISSIAQGLEWAGNNGMHVANLSLGSPSPSATLEQAVNSATSRGVLVVAASGNSGAGSISYPARYANAMAVGATDQNNNRASFSQYGAGLDIVAPGVNVQSTYPGSTYASLNGTSMATPHVAGAAALVKQKNPSWSNVQIRNHLKNTATSLGSTNLYGSGLVNAEAATR

SEQ ID NO: 52975 - protein, 269 aa, Unidentified
AQSVPWGISRVQAPAAHNRGLTGSGVKVAVLDTGISTHPDLNIRGGASFVPGEPSTQDGNGHGTHVAGTIAALNNSIGVLGVAPSAELYAVKVLGASGGGSISSIAQGLEWAGNNGMHVANLSLGSPSPSATLEQAVNSATSRGVLVVAASGNSGAGSISYPARYANAMAVGATDQNNNRASFSQYGAGLDIVAPGVNVQSTYPGSTYASLNGTSMATPHVAGAAALVKQKNPSWSNVQIRNHLKNTATSLGSTNLYGSGLVNAEAATR

SEQ ID NO: 52976 - protein, 269 aa, Unidentified
AQSVPWGISRVQAPAAHNRGLTGSGVKVAVLDTGISTHPDLNIRGGASFVPGEPATQDGNGHGTHVAGTIAALNNSIGVLGVAPSAELYAVKVLGASGSGSVSSIAQGLEWAGNNGMHVANLSLGSPSPSATLEQAVNSATSRGVLVVAASGNSGAGSISYPARYANAMAVGATDQNNNRASFSQYGAGLDIVASGVNVQSTYPGSTYASLNGTSMATPHVAGAAALVKQKNPSWSNVQIRNHLKNTATSLGSTNLYGSGLVNAEAATR

SEQ ID NO: 52977 - protein, 269 aa, Unidentified
AQSVPWGISRVQAPAAHNRGLTGSGVKVAVLDTGISTHPDLNIRGGASFVPGEPSTQDGNGHGTHVAGTIAALNNSIGVLGVAPSAELYAVKVLGASGSGSVSSIAQGLEWAGNNGMHVANLSLGSPSPSATLEQAVNSATSRGVLVVAASGNSGADSISYPARYANAMAVGATDQNNNRADFSQYGAGLDIVAPGVNVQSTYPGSTYASLNGTSMATPHVAGAAALVKQKNPSWSNVQIRNHLKNTATSLGSTNLYGSGLVNAEAATR

SEQ ID NO: 52978 - protein, 269 aa, Unidentified
AQSVPWGISRVQAPAAHNRGLTGSGVKVAVLDTGISTHPDLNIRGGASFVPGEPSTQDGNGHGTHVAGTIAALNNSIGVLGVAPSAELYAVKVLGASGSGSVSSIAQGLEWAGNNRMHVANLSLGSPSPSATLEQAVNSATSRGVLVVAASGNSGAGSISYPARYANAMAVGATDQNNNRASFSQYGAGLDIVAPGVNVQSTYPGSAYASLNGTSMATPHVAGAAALVKQKNPSWSNVQIRNHLKNTATSLGSTNLYGSGLVNAEAATR

SEQ ID NO: 52979 - protein, 269 aa, Unidentified
AQSVPWGISRVQAPAAHRRGLTGSGVKVAVLDTGISTHPDLNIRGGASFVPGEPSTQDGNGHGTHVAGTIAALNNSIGVLGVAPSAELYAVKVLGASGSGSVSSIAQGLEWARNNGMHVANLSLGSPSPSATLEQAVNSATSRGVLVVAASGNSGAGSISYPARYANAMAVGATDQNNNRASFSQYGAGLDIVAPGVNVQSTYPGSTYASLNGTSMATPHVAGAAALVKQKNPSWSNVQIRNHLKNTATSLGSTNLYGSGLVNAEAATR

SEQ ID NO: 52980 - protein, 269 aa, Unidentified
AQSVPWGISRVQAPAAHNRGLTGSGVKVAVLDTGISTHPDLNIRGGASFVPGEPSTQDGNGHGTHVAGTIAALNNSIGVLGVAPRAELYAVKVLGASGSGSVSSIAQGLEWAGNNGMHVANLSLGSPSPSATLEQAVNSATSRGVLVVAASGNSGAGSISYPARYANAMAVGATDQNNNRARFSQYGAGLDIVAPGVNVQSTYPGSTYASLNGTSMATPHVAGAAALVKQKNPSWSNVQIRNHLKNTATSLGSTNLYGSGLVNAEAATR

SEQ ID NO: 52981 - protein, 269 aa, Unidentified
AQSVPWGISRVQAPAAHNRGLTGSGVKVAVLDTGISTHPDLNIRGGASFVPGEPSTQDGNGHGTHVAGTIAALNNSIGVLGVAPNAELYAVKVLGASGSGSVSSIAQGLEWAGNNGMHVANLSLGSPSPSATLEQAVNSATSRGVLVVAASGNSGAGSISYPARYANAMAVGATDQNNNRASFSQYGAGLDIVAPGVXVQSTYPGSTYASLNGTSMATPHVAGAAALVKQKNPSWSNVQIRNHLKNTATSLGSTNLYGSGLVNAEAATR

SEQ ID NO: 52982 - protein, 269 aa, Unidentified
AQSVPWGISRVQAPAAHNRGLTGRGVKVAVLDTGISTHPDLNIRGGASFVPGEPSTQDGNGHGTHVAGTIAALNNSIGVLGVAPSAELYAVKVLGASGSGSVSSIAQGLEWAGNNGMHVANLSLGSPSPSATLEQAVNSATSRGVLVVAASGNSGAGSISYPARYANAMAVGATDQNNNRASFSQYGAGLDIVAPGVNVQSTYPGSTYASLNGTSMATPHVAGAAALVKQKNPSWSNVQIRNHLKNTATSLGSTNLYGSGLVNALAATR

SEQ ID NO: 52983 - protein, 269 aa, Unidentified
AQSVPWGISRVQAPAAHRRGLTGSGVKVAVLDTGISTHPDLNIRGGASFVPGEPSTQDGNGHGTHVAGTIAALNNSIGVLGVAPSAELYAVKVLGASGSGSVSSIAQGLEWAGNNGMHVANLSLGSPSPSATLEQAVNSATSRGVLVVAASGNSGAGSISYPARYANAMAVGATDQNNNRASFSQYGAGLDIVAPGVNVQSTYPGSTYASLNGTSMATPHVAGAAALVKQKNPSWSNRQIRNHLKNTATSLGSTNLYGSGLVNAEAATR

SEQ ID NO: 52984 - protein, 269 aa, Unidentified
AQSVPWGISRVQAPAAHNRRLTGSGVKVAVLDTGISTHPDLNIRGGASFVPGEPSTQDGNGHGTHVAGTIAALNNSIGVLGVAPSAELYAVKVLGASGSGSVSSIAQGLEWAGNNGMHVANLSLGSPSPSATLEQAVNSATSRGVLVVAASGNSGAGSISYPARYANAMAVGATDQNNNRASFSQYGAGLDIVAPGVNVQSTYPGSTYASLNGTSMATPHVAGAAALVKQKNPSRSNVQIRNHLKNTATSLGSTNLYGSGLVNAEAATR

SEQ ID NO: 52985 - protein, 269 aa, Unidentified
AQSVPWGISRVQAPAAHNRGLTGSGVKVAVLDTGISTHPDLNIRGGASFVPGEPSTQDGNGHGTHVAGTIAALNNSIGVLGVAPSAELYAVKVLGASGSGGVSSIAQGLEWAGNNGMHVANLSLGSPSPSATLEQAVNSATSRGVIVVAASGNSGAGSISYPARYANAMAVGATDQNNNRASFSQYGAGLDIVAPGVNVQSTYPGSTYASLNGTSMATPHVAGAAALVKQKNPSWSNVQIRNHLKNTATSLGSTNLYGSGLVNAEAATR

SEQ ID NO: 52986 - protein, 269 aa, Unidentified
AQSVPWGISRVQAPAAHNRGLTGSGVKVAVLDTGISTHPDLNIRGGASFVPGEPSTQDGNGHGTHVAGTIAALNNRIGVLGVAPSAELYAVKVLGASGSGSVSSIAQGLEWAGNNGMHVANLSLGSPSPSATLEQAVNSATSRGVLVVAASGNSGAGSISYPARYANAMAVGATDQNNNRASFSQYGAGLDIVAPGVNVQSTYPGSTYASLNGTSMATPHVAGAAALVKQKNPSWRNVQIRNHLKNTATSLGSTNLYGSGLVNAEAATR

SEQ ID NO: 52987 - protein, 269 aa, Synthetic construct
AQSVPWGISRVQAPAAHNRGLTGSGVTVAVLDTGISTHPDLNIRGGASFVPGEPSTQDGNGHGTHVAGTIAALNNSIGVLGVAPSAELYAVKVLGASESGSVSSIAQGLEWAGNNGMHVANLSLGSPSPSATLEQAVNSATSRGVLVVAASGNSGAGSISYPARYANAMAVGATDQNNNRASFSQYGAGLDIVAPGVNVQSTYPGSTYASLNGTSMATPHVAGAAALVKQKNPSWSNVQIRNHLKNTATSLGSTNLYGSGLVNAEAATR

SEQ ID NO: 52988 - protein, 269 aa, Unidentified
AQSVPWGISRVQAPASHNRGLTGSGVKVAVLDTGISTHPDLNIRGGASFVPGEPSTQDGNGHGTHVAGTIAALNNSIGVLGVAPSAELYAVKVLGASGSGSVSSIAQGLEWAGNNGMHVANLSLGSESPSATLEQAVNSATSRGVLVVAASGNSGAGSISYPARYANAMAVGATDQNNNRASFSQYGAGLDIVAPGVNVQSTYPGSTYASLNGTSMATPHVAGAAALVKQKNPSWSNVQIRNHLKNTATSLGSTNLYGSGLVNAEAATR

SEQ ID NO: 52989 - protein, 269 aa, Unidentified
AQSVPWGISRVQAPAAHNRGLTGSGVKVAVLDTGISTHPDLNIRGGASFVPGEPSTQDGNGHGTHVAGTIAALNNSIGVLGVAPSAELYAVKVLGASGSGAVSSIAQGLEWAGNNGMHVANLSLGSPSPSATLEQAVNSATSRGVLVVAASGNSGAGSISYPARYANAMAVGATDQNNNRASFSQYGAGLDIVAPGVNVQSTYPGSTYASLNGTSMATPHVAGAAVLVKQKNPSWSNVQIRNHLKNTATSLGSTNLYGSGLVNAEAATR

SEQ ID NO: 52990 - protein, 269 aa, Unidentified
AQSVPWGISRVQAPAAHNRGLTGSGVKVAVLDTGISTHPDLNIRGGASFVPGEPSTQDGNGHGTHVAGTIAALNNRIGVLGVAPSAELYAVKVLGASGSGSVSSIAQGLEWAGNNGMHVANLSLGSPSPSATLEQAVNSATSRGVLVVAASGNSGAGSISYPARYANAMAVGATDQNNNRASFSQYGAGLDIVAPGVNVQSTYPGSTYASLNGTSMATPHVAGAAALVKQKNPSRSNVQIRNHLKNTATSLGSTNLYGSGLVNAEAATR

SEQ ID NO: 52991 - protein, 269 aa, Unidentified
AQSVPWGISRVQAPAAHNRGLTGRGVKVAVLDTGISTHPDLNIRGGASFVPGEPSTQDGNGHGTHVAGTIAALNNSIGVLGVAPSAELYAVKVLGASGSGSVSSIAQGLEWAGNNGMHVANLSLGSPSPSATLEQAVNSATSRGVLVVAASGNSGAGSISYPARYANAMAVGATDQNNNRASFSQYGAGLDIVAPGVNVQSTYPGSTYASLNGTSMATPHVAGAAALVKQKNQSWSNVQIRNHLKNTATSLGSTNLYGSGLVNAEAATR

SEQ ID NO: 52992 - protein, 269 aa, Unidentified
AQSVPWGISRVQAPAAHNRGLTGSGVKVAVLDTGISTHPDLNIRGGASFVPGEPSTQDGNGHGTHVAGTIAALNNSIGVLGVAPSAELYAVKVLGASGRGSVSSIAQGLEWAGNNGMHVANLSLGTPSPSATLEQAVNSATSRGVLVVAASGNSGAGSISYPARYANAMAVGATDQNNNRASFSQYGAGLDIVAPGVNVQSTYPGSTYASLNGTSMATPHVAGAAALVKQKNPSWSNVQIRNHLKNTATSLGSTNLYGSGLVNAEAATR

SEQ ID NO: 52993 - protein, 269 aa, Unidentified
AQSVPWGISRVQAPAAHNRGLTGSGVKVAVLDTGISTHPDLNIRGGASFVPGEPSTQDGNGHGTHVAGTIAALNNSIGVLGVAPSAELYAVKVLGASGSGSVSSIAQGLEWAGNNGMHVANLSLGNPSPSATLEQAVNSATSRGVLVVAASGNSGAGSISYPARYANAMAVGATDQNNNRADFSQYGAGLDIVAPGVNVQSTYPGSTYASLNGTSMATPHVAGAAALVKQKNPSWSNVQIRNHLKNTATSLGSTNLYGSGLVNAEAATR

SEQ ID NO: 52994 - protein, 269 aa, Unidentified
AQSVPWGISRVQAPAAHNRGLTGSGVKVAVLDTGISTHPDLNIRGGASFVPGEPSTQDGNGHGTHVAGTIAALNNSIGVLGVAPSAELYAVKVLPAGGSGSVSSIAQGLEWAGNNGMHVANLSLGSPSPSATLEQAVNSATSRGVLVVAASGNSGAGSISYPARYANAMAVGATDQNNNRASFSQYGAGLDIVAPGVNVQSTYPGSTYASLNGTSMATPHVAGAAALVKQKNPSWSNVQIRNHLKNTATSLGSTNLYGSGLVNAEAATR

SEQ ID NO: 52995 - protein, 269 aa, Unidentified
AQSVPWGISRVQAPAAHNRGLTGSGVKVAVLDTGISTHPDLNIRGGASFVPGEPSTQDGNGHGTHVAGTIAALNNSIGVLGVAPSAELYAVKVLGASGSGSVSSIAQGVEWAGNNGMHVANLSLGSPSPSATLEQAVNSATSRGVLVVAASGNSGAGSISYPARYANAMAVGATDQNNNRASFSQYGAGLDIVAPGVNVQSTEPGSTYASLNGTSMATPHVAGAAALVKQKNPSWSNVQIRNHLKNTATSLGSTNLYGSGLVNAEAATR

SEQ ID NO: 52996 - protein, 269 aa, Unidentified
AQSVPWGISRVQAPAAHNRGLTGSGVKVAVLDTGISTHPDLNIRGGASFVPGEPSTQDGNGHGTHVAGTIAALNNSIGVLGVAPSAELYAVKVLGASGSGSVSSIAQGLEWAGNNGMHVANLSLGSESPSATLEQAVNSATSRGVLVVAASGNSGAGSISYPARYANAMAVGATDQNNNRASFSQYGAGLDIVAPGVNVQSTYPGSTYASLNGTSMATPHVAGAAALVKQKNPSWSNVQIRNHLKNTATSLGSTNLYGSGLVNAFAATR

SEQ ID NO: 52997 - protein, 269 aa, Unidentified
AQSVPWGISRVQAPAAHNRGLTGSGVKVAVLDTGISTHPDLNIRGGASFVPGEPSTQDGNGHGTHVAGTIAALNNSIGVLGVAPSAELYAVKVLPQSGSGSVSSIAQGLEWAGNNGMHVANLSLGSPSPSATLEQAVNSATSRGVLVVAASGNSGAGSISYPARYANAMAVGATDQNNNRASFSQYGAGLDIVAPGVNVQSTYPGSTYASLNGTSMATPHVAGAAALVKQKNPSWSNVQIRNHLKNTATSLGSTNLYGSGLVNAEAATR

SEQ ID NO: 52998 - protein, 269 aa, Unidentified
AQSVPWGISRVQAPAAHNRGLTGSGVKVAVLDTGISTHPDLNIRGGASFVPGEPSTQDGNGHGTHVAGTIAALNNSIGVLGVAPSAELYAVKVLGASSDGSVSSIAQGLEWAGNNGMHVANLSLGSPSPSATLEQAVNSATSRGVLVVAASGNSGAGSISYPARYANAMAVGATDQNNNRASFSQYGAGLDIVAPGVNVQSTYPGSTYASLNGTSMATPHVAGAAALVKQKNPSWSNVQIRNHLKNTATSLGSTNLYGSGLVNAEAATR

SEQ ID NO: 52999 - protein, 269 aa, Unidentified
AQSVPWGISRVQAPAAHNRGLRGSGVKVAVLDTGISTHPDLNIRGGASFVPGEPSTQDGNGHGTHVAGTIAALNNSIGVLGVAPSAELYAVKVLGASGSGSVSSIAQGLEWAGNNGMHVANLSLGSPSPSATLEQAVNSATSRGVLVVAASGNSGAGSISYPARYANAMAVGATDQNNNRASFSQYGAGLDIVAPGVNVQSTYPGSTYASLNGTSMATPHVAGAAALVKQKNPSWSNVQIRNHLKNTATSLGSTNLYGSGLVRAEAATR

SEQ ID NO: 53000 - protein, 269 aa, Unidentified
AQSVPWGISRVQAPAAHNRGLAGSGVKVAVLDTGISTHPDLNIRGGASFVPGEPSTQDGNGHGTHVAGTIAALNNSIGVLGVAPSAPLYAVKVLGASGSGSVSSIAQGLEWAGNNGMHVANLSLGSPSPSATLEQAVNSATSRGVLVVAASGNSGAGSISYPARYANAMAVGATDQNNNRASFSQYGAGLDIVAPGVNVQSTYPGSTYASLNGTSMATPHVAGAAALVKQKNPSWSNVQIRNHLKNTATSLGSTNLYGSGLVNAEAATR

SEQ ID NO: 53001 - protein, 269 aa, Unidentified
AQSVPWGISRVQAPAAHNRGLTGSGVKVAVLDTGISTHPDLNIRGGASFVPGEPSTQDGNGHGTHVAGTIAALNNRIGVLGVAPSAELYAVKVLGASGSGSVSSIAQGLEWAGNNGMHVANLSLGSPSPSATLEQAVNSATSRGVLVVAASGNSGAGSISYPARYANAMAVGATDQNNNRASFSQYGAGLDIVAPGVNVQSTYPGSTYASLNGTSMATPHVAGAAALVKQKNPSWSNRQIRNHLKNTATSLGSTNLYGSGLVNAEAATR

SEQ ID NO: 53002 - protein, 269 aa, Unidentified
AQSVPWGISRVQAPAAHNRGLTGSGVKVAVLDTGISTHPDLNIRGGASFVPGEPSTQDGNGHGTHVAGTIAALNNSIGVLGVAPSAELYAVKVLGASGSGSVSSIAQGLEWAGNNGMHVANLSLGSPSPSATLEQAVNSATSRGVLVVAASGNSGAGSISYPARYANAMAVGATDQNNNRASFSQYGAGLDIVAPGVNVQSTYPGSTYASLNGTSMATPHVAGAAALVKQKNPSWSNVQIRNRLKNTATSLGSTNLYGSGLVRAEAATR

SEQ ID NO: 53003 - protein, 269 aa, Unidentified
AQSVPWGISRVQAPAAHNRGLTGSGVKVAVLDTGISTHPDLRIRGGASFVPGEPSTQDGNGHGTHVAGTIAALNNSIGVLGVAPSAELYAVKVLGASGDGSVSSIAQGLEWAGNNGMHVANLSLGSPSPSATLEQAVNSATSRGVLVVAASGNSGAGSISYPARYANAMAVGATDQNNNRASFSQYGAGLDIVAPGVNVQSTYPGSTYASLNGTSMATPHVAGAAALVKQKNPSWSNVQIRNHLKNTATSLGSTNLYGSGLVNAEAATR

SEQ ID NO: 53004 - protein, 269 aa, Unidentified
AQSVPWGISRVQAPAAHNRGLTGSGVKVAVLDTGISTHPDLNIRGGASFVPGEPSTQDGNGHGTHVAGTIAALNNSIGVLGVAPSAELYAVKVLGASGSGSVSSIAQGLEWAGNNGMHVANLSLGSPSPSATLEQAVNSATSRGVIVVAASGNSGAGSISYPARYANAMAVGATDQNNNRADFSQYGAGLDIVAPGVNVQSTYPGSTYASLNGTSMATPHVAGAAALVKQKNPSWSNVQIRNHLKNTATSLGSTNLYGSGLVNAEAATR

SEQ ID NO: 53005 - protein, 269 aa, Unidentified
AQSVPWGISRVQAPAAHNRGLTGSGVKVAVLDSGISTHPDLNIRGGTSFVPGEPSTQDGNGHGTHVAGTIAALNNSIGVLGVAPSAELYAVKVLGASGSGSVSSIAQGLEWAGNNGMHVANLSLGSPSPSATLEQAVNSATSRGVLVVAASGNSGAGSISYPARYANAMAVGATDQNNNRASFSQYGAGLDIVAPGVNVQSTYPGSTYASLNGTSMATPHVAGAAALVKQKNPSWSNVQIRNHLKNTATSLGSTNLYGSGLVNAEAATR

SEQ ID NO: 53006 - protein, 269 aa, Unidentified
AQSVPWGISRVQAPAAHNRGLTGSGVKVAVLDTGISTHPDLNIRGGASFVPGEPSTQDGNGHGTHVAGTIAALNNSIGVLGVAPSAELYAVKVLGASGDGSVSSIAQGLEWAGNNGMHVANLSLGSPSPSATLEQAVNSATSRGVLVVAASGNSGAGSISYPARYANAMAVGATDQNNNRASFSQYGAGLDIVAPGVNVQSTYPGSTYASLNGTSMATPHVAGAAALVKQKNPSWSNVQIRNHLKNTATSLGSTNLYGSGLVNALAATR

SEQ ID NO: 53007 - protein, 269 aa, Unidentified
AQSVPWGISRVQAPAAHNRGLTGSGVKVAVLDTGISTHPDLNIRGGASFVPGEPSTQDGNGHGTHVAGTIAALNNSIGVLGVAPSAELYAVKVLGASGSGSLSSIAQGLEWAGNNGMHVANLSLGSPSPSATLEQAVNSATSRGVIVVAASGNSGAGSISYPARYANAMAVGATDQNNNRASFSQYGAGLDIVAPGVNVQSTYPGSTYASLNGTSMATPHVAGAAALVKQKNPSWSNVQIRNHLKNTATSLGSTNLYGSGLVNAEAATR

SEQ ID NO: 53008 - protein, 269 aa, Unidentified
AQSVPWGISRVQAPAAHNRGLTGSGVKVAVLDTGISTHPDLRIRGGASFVPGEPSTQDGNGHGTHVAGTIAALNNSIGVLGVAPSAELYAVKVLGASGSGSVSSIAQGLEWAGNNGMHVANLSLGSPSPSATLEQAVNSATSRGVLVVAASGNSGAGSISYPARYANAMAVGATDQNNNRASFSQYGAGLDIVAPGVNVQSTYPGSTYASLNGTSMATPHVAGAAALVKQKNPSWSNVQIRNRLKNTATSLGSTNLYGSGLVNAEAATR

SEQ ID NO: 53009 - protein, 269 aa, Unidentified
AQSVPWGISRVQAPAAHNRGLTGSGVKVAVLDTGISTHPDLNIRGGASFVPGEPSTQDGNGHGTHVAGTIAALNNSIGVLGVAPRAELYAVKVLGASGSGSVSSIAQGLEWAGNNGMHVANLSLGSPSPSATLEQAVNSATSRGVLVVAASGNSGAGSISYPARYANAMAVGATDQNNNRASFSQYGAGLDIVAPGVNVQSTYPGSTYASLNGTSMATPHVAGAAALVKQKNPSWSNVQIRRHLKNTATSLGSTNLYGSGLVNAEAATR

SEQ ID NO: 53010 - protein, 269 aa, Unidentified
AQSVPWGISRVQAPASHNRGLTGSGVKVAVLDTGISTHPDLNIRGGASFVPGEPSTQDGNGHGTHVAGTIAALNNSIGVLGVAPSAELYAVKVLGASGSGSVSSIAQGLEWAGNNGMHVANLSLGSPSPSATLEQAVNSATSRGVLVVAASGNSGAESISYPARYANAMAVGATDQNNNRASFSQYGAGLDIVAPGVNVQSTYPGSTYASLNGTSMATPHVAGAAALVKQKNPSWSNVQIRNHLKNTATSLGSTNLYGSGLVNAEAATR

SEQ ID NO: 53011 - protein, 269 aa, Unidentified
AQSVPWGISRVQAPAAHNRGLTGSGVKVAVLDSGISTHPDLNIRGGASFVPGEPSTQDGNGHGTHVAGTIAALNNSIGVLGVAPSAELYAVKVLGASGSGSVSSIAQGLEWAGNNGMHVANLSLGSPSPSATLEQAVNSATSRGVLVVAASGNSGEGSISYPARYANAMAVGATDQNNNRASFSQYGAGLDIVAPGVNVQSTYPGSTYASLNGTSMATPHVAGAAALVKQKNPSWSNVQIRNHLKNTATSLGSTNLYGSGLVNAEAATR

SEQ ID NO: 53012 - protein, 269 aa, Unidentified
AQSVPWGISRVQAPAAHNRGLTGGGVKVAVLDTGISTHPDLNIRGGASFVPGEPSTQDGNGHGTHVAGTIAALNNSIGVLGVAPSAELYAVKVLSASGQGSVSSIAQGLEWAGNNGMHVANLSLGSPSPSATLEQAVNSATSRGVLVVAASGNSGAGSISYPARYANAMAVGATDQNNNRASFSQYGAGLDIVAPGVNVQSTYPGSTYASLNGTSSATPHVAGAAALVKQKNPSWSNVQIRNHLKNTATSLGSTNLYGSGLVNAEAATR

SEQ ID NO: 53013 - protein, 269 aa, Bacillus sp.
AQSVPWGISRVQAPAAHNRGLTGSGVKVAVLDTGISTHPDLNIRGGASFVPGEPSTQDGNGHGTHVAGTIAALNNSIGVLGVAPNAELYAVKVLGASGSGSVSSIAQGLEWAGNNGMHVANLSLGSPSPSATLEQAVNSATSRGVLVVAASGNSGAGSIKYPARYANAMAVGATDQNNNRASFSQYGAGLDIVAPGVNVQSTYPGSTYASLNGTSMATPHVAGAAALVKQKNPSWSNVQIRNHLKNTATSLGSTNLYGSGLVNAEAATR

SEQ ID NO: 53014 - protein, 269 aa, Unidentified
AQSVPWGISRVQAPAAHNRGLTGSGVKVAVLDTGISTHPDLNIRGGASFVPGEPSTQDGNGHGTHVAGTIAALNNSIGVLGVAPSAELYAVKVLGQSSSGSVSSIAQGLEWAGNNGMHVANLSLGSPSPSATLEQAVNSATSRGVLVVAASGNSGAGSISYPARYANAMAVGATDQNNNRASFSQYGAGLDIVAPGVNVQSTYPGSTYASLNGTSMATPHVAGAAALVKQKNPSWSNVQIRNHLKNTATSLGSTNLYGSGLVNAEAATR

SEQ ID NO: 53015 - protein, 269 aa, Unidentified
AQSVPWGISRVQAPAAHNRGLTGSGVKVAVLDTGISTHPDLNIRGGASFVPGEPSTQDGNGHGTHVAGTIAALNNSIGVLGVAPSAELYAVKVLGASGSGSVSSIAQGLEWAGNNGMHVANLSLGNPSPSATLEQAVNSATSRGVLVVAASGNSGAGSISYPARYANAMAVGATDQNNNRASFSQYGAGLDIVAPGVNVQSTYPGSTYASLNGTSMATPHVAGAAALVKQKNPSWSNVQIRNRLKNTATSLGSTNLYGSGLVNAEAATR

SEQ ID NO: 53016 - protein, 269 aa, Synthetic construct
AQSVPWGISRVQAPAAHNRGLTGSGVKVAVLDTGISTHPDLNIRGGASFVPGEPSTQDGNGHGTHVAGTIAALNNSIGVLGVAPSAELYAVKVLGASGSGSVSSIAQGLEWAGNNGMHVANLSLGRPSPSATLEQAVNSATSRGVLVVAASGNSGAGSISYPASYANAMAVGATDQNNNRASFSQYGAGLDIVAPGVNVQSTYPGSTYASLNGTSMATPHVAGAAALVKQKNPSWSNVQIRNHLKNTATSLGSTNLYGSGLVNAEAATR

SEQ ID NO: 53017 - protein, 269 aa, Unidentified
AQSVPWGISRVQAPAAHNRGLTGSGVKVAVLDSGISTHPDLNIRGGASFVPGEPSTQDGEGHGTHVAGTIAALNNSIGVLGVAPSAELYAVKVLGASGSGSVSSIAQGLEWAGNNGMHVANLSLGSPSPSATLEQAVNSATSRGVLVVAASGNSGAGSISYPARYANAMAVGATDQNNNRASFSQYGAGLDIVAPGVNVQSTYPGSTYASLNGTSMATPHVAGAAALVKQKNPSWSNVQIRNHLKNTATSLGSTNLYGSGLVNAEAATR

SEQ ID NO: 53018 - protein, 269 aa, Unidentified
AQSVPWGISRVQAPAAHNRGLTGSGVKVAVLDTGISTHPDLNIRGGASFVPGEPSTQDGNGHGTHVAGTIAALNNSIGVLGVAPSAELYAVKVLGASGSGSVSSIARGLEWAGNNGMHVANLSLGSPSPSATLEQAVNSATSRGVLVVAASGNSGAGSISYPARYANAMAVGATDQNNNRASFSQYGAGLDIVAPGVNVQSTYPGSTYASLNGTSMATPHVAGAAALVKQKNPSWSNVQIRDHLKNTATSLGSTNLYGSGLVNAEAATR

SEQ ID NO: 53019 - protein, 269 aa, Unidentified
AQSVPWGISRVQAPASHNRGLTGSGVKVAVLDTGISTHPDLNIRGGASFVPGEPSTQDGNGHGTHVAGTIAALNNSIGVLGVAPSAELYAVKVLGASGSGSVSSIAQGLEWAGNNGMHVANLSLGSPSPSATLEQAVNSATSRGVLVVAASGNSGEGSISYPARYANAMAVGATDQNNNRASFSQYGAGLDIVAPGVNVQSTYPGSTYASLNGTSMATPHVAGAAALVKQKNPSWSNVQIRNHLKNTATSLGSTNLYGSGLVNAEAATR

SEQ ID NO: 53020 - protein, 269 aa, Unidentified
AQSVPWGISRVQAPAAHNRGLTGSGVKVAVLDTGISTHPDLNIRGGASFVPGEPSTQDGNGHGTHVAGTIAALNNSIGVLGVAPSAELYAVKVLGASGSGSVSSIAQGLEWAGNNGMHVANLSLGSPSPSATLEQAVNSATSRGVLVVAASGNSGAGSISYPARYANAMAVGATDQNNNRADFSQYGAGLDIVAPGVNVQSTYPGSTYASLNGTSMATPHVAGAAALVKQKNPSWSNVQIRNRLKNTATSLGSTNLYGSGLVNAEAATR

SEQ ID NO: 53021 - protein, 269 aa, Unidentified
AQSVPWGISRVQAPAAHNRGLTGSGVKVAVLDTGISTHPDLNIRGGASFVPGEPSTQDGNGHGTHVAGTIAALNNSIGVLGVAPSAELYAVKVLGAGSSGSVSSIAQGLEWAGNNGMHVANLSLGSPSPSATLEQAVNSATSRGVLVVAASGNSGAGSISYPARYANAMAVGATDQNNNRASFSQYGAGLDIVAPGVNVQSTYPGSTYASLNGTSMATPHVAGAAALVKQKNPSWSNVQIRNHLKNTATSLGSTNLYGSGLVNAEAATR

SEQ ID NO: 53022 - protein, 269 aa, Unidentified
AQSVPWGISRVQAPAAHNRGLTGSGVKVAVLDTGISTHPDLNIRGGASFVPGEPSTQDGNGHGTHVAGTIAALNNSIGVLGVAPSAELYAVKVLGASGSGSVSSIAQGLEWAGNNGMHVANLSLGSPSPSATLEQAVNSATSRGVIVVAASGNSGEGSISYPARYANAMAVGATDQNNNRASFSQYGAGLDIVAPGVNVQSTYPGSTYASLNGTSMATPHVAGAAALVKQKNPSWSNVQIRNHLKNTATSLGSTNLYGSGLVNAEAATR

SEQ ID NO: 53023 - protein, 269 aa, Unidentified
AQSVPWGISRVQAPAAHNRGLTGSGVKVAVLDTGISTHPDLNIRGGASFVPGEPSTQDGNGHGTHVAGTIAALNNSIGVLGVAPSAELYAVKVLGASGSGSVSSIAQGLEWAGNNGMHVANLSLGSPSPSATLEQAVNSATSRGVLVVAASGNSGAGSISYPARYANAMAVGATDQNNNRASFSQYGAGLDIVAPGVNVQSTYPGSTYANLNGTSMATPHVAGAAALVKQKNPSWSNVQIRNHLKNCATSLGSTNLYGSGLVNAEAATR

SEQ ID NO: 53024 - protein, 269 aa, Unidentified
AQSVPWGISRVQAPAAHNRGLAGSGVKVAVLDTGISTHPDLNIRGGASFVPGEPSTQDGNGHGTHVAGTIAALNNSIGVLGVAPSAELYAVKVLGASGSGSVSSIAQGLEWAGNNGMHVANLSLGSPSPSATLEQAVNSATSRGVLVVAASGNSGAESISYPARYANAMAVGATDQNNNRASFSQYGAGLDIVAPGVNVQSTYPGSTYASLNGTSMATPHVAGAAALVKQKNPSWSNVQIRNHLKNTATSLGSTNLYGSGLVNAEAATR

SEQ ID NO: 53025 - protein, 269 aa, Unidentified
AQSVPWGISRVQAPAAHNRGLTGSGVKVAVLDTGISTHPDLNIRGGASFVPGEPSTQDGEGHGTHVAGTIAALNNSIGVLGVAPSAELYAVKVLGASGSGSVSSIAQGLEWAGNNGMHVANLSLGSPSPSATLEQAVNSATSRGVLVVAASGNSGAGSIDYPARYANAMAVGATDQNNNRASFSQYGAGLDIVAPGVNVQSTYPGSTYASLNGTSMATPHVAGAAALVKQKNPSWSNVQIRNHLKNTATSLGSTNLYGSGLVNAEAATR

SEQ ID NO: 53026 - protein, 269 aa, Unidentified
AQSVPWGISRVQAPAAHNRGLTGSGVKVAVLDTGISTHPDLNIRGGASFVPGEPSTQDGNGHGTHVAGTIAALNNSIGVLGVAPSAELYAVKVLGASGSGSVSSIAQGLEWAGNNGMHVANLSLGNPSPSATLEQAVNSATSRGVLVVAASGNSGAGSISYPARYANAMAVGATDQNNNRASFSQYGAGLDIVAPGVNVQSTEPGSTYASLNGTSMATPHVAGAAALVKQKNPSWSNVQIRNHLKNTATSLGSTNLYGSGLVNAEAATR

SEQ ID NO: 53027 - protein, 269 aa, Unidentified
AQSVPWGISRVQAPAAHNRGLTGSGVKVAVLDTGISTHPDLNIRGGASFVPGEPSTQDGNGHGTHVAGTIAALDNSIGVLGVAPSAELYAVKVLGASGSGSISSIAQGLEWAGNNGMHVANLSLGSPSPSATLEQAVNSATSRGVLVVAASGNSGAGSISYPARYANAMAVGATDQNNNRASFSQYGAGLDIVAPGVNVQSTYPGSTYASLNGTSMATPHVAGAAALVKQKNPSWSNVQIRNHLKNTATSLGSTNLYGSGLVNAEAATR

SEQ ID NO: 53028 - protein, 269 aa, Unidentified
AQSVPWGISRVQAPAAHNRGLTGSGVKVAVLDTGISTHPDLNIRGGASFVPGEPSTQDGNGHGTHVAGTIAALNNSIGVLGVAPSAELYAVKVLGASGSGSVSSIAQGLEWAGNNGMHVANLSLGSPSPSATLEQAVNSATSRGVLVVAASGNSGEGSISYPARYANAMAVGATDQNNNRASFSQYGAGLDIVAPGVNVQSTYPGSTYASLNGTSMATPHVAGAAALVKQKNPSWSNVQIRNRLKNTATSLGSTNLYGSGLVNAEAATR

SEQ ID NO: 53029 - protein, 269 aa, Unidentified
AQSVPWGISRVQAPAAHNRGLTGSGVKVAVLDTGISTHPDLNIRGGASFVPGEPSTQDGNGHGTHVAGTIAALNNSIGVLGVAPSAELYAVKVLGASGSGSVSSIADGLEWAGNNGMHVANLSLGSPSPSATLEQAVNSATSRGVLVVAASGNSGAGSISYPARYANAMAVGATDQNNNRASFSQYGAGLDIVAPGVNVQSTYPGSTYASLNGTSMATPHVAGAAALVKQKNPSWSNVQIRDHLKNTATSLGSTNLYGSGLVNAEAATR

SEQ ID NO: 53030 - protein, 269 aa, Unidentified
AQSVPWGISRVQAPAAHNRGLTGSGVKVAVLDTGISTHPDLNIRGGASFVPGEPSTQDGEGHGTHVAGTIAALNNSIGVLGVAPSAELYAVKVLGASGAGSVSSIAQGLEWAGNNGMHVANLSLGSPSPSATLEQAVNSATSRGVLVVAASGNSGAGSISYPARYANAMAVGATDQNNNRASFSQYGAGLDIVAPGVNVQSTYPGSTYASLNGTSMATPHVAGAAALVKQKNPSWSNVQIRNHLKNTATSLGSTNLYGSGLVNAEAATR

SEQ ID NO: 53031 - protein, 269 aa, Unidentified
AQSVPWGISRVQAPAAHNRGLTGSGVKVAVLDTGISTHPDLNIRGGASFVPGEPSTQDGNGHGTHVAGTIAALNNSIGVLGVAPSAELYAVKVLGASGSGSVSSIAQGLEWAGNNGMHVANLSLGSPSPSATLEQAVNSATSRGVLVVAASGNSGAGSISYPARYANAMAVGATDQNNNRASFSQYGAGLDIVSPGVDVQSTYPGSTYASLNGTSMATPHVAGAAALVKQKNPSWSNVQIRNHLKNTATSLGSTNLYGSGLVNAEAATR

SEQ ID NO: 53032 - protein, 269 aa, Unidentified
AQSVPWGISRVQAPAAHNRGLTGSGVKVAVLDTGISTHPDLNIRGGASFVPGEPSTQDGNGHGTHVAGTIAALNNSIGVLGVAPSAELYAVKVLGASGSGSVSSIAQGLEWAGLNGMHVANLSLGIPSPSATLEQAVNSATSRGVLVVAASGNSGAGSISYPARYANAMAVGATDQNNNRASFSQYGAGLDIVAPGVNVQSTYPGSTYASLNGTSMATPHVAGAAALVKQKNPSWSNVQIRNHLKNTATSLGSTNLYGSGLVNAEAATR

SEQ ID NO: 53033 - protein, 269 aa, Unidentified
AQSVPWGISRVQAPAAHNRGLTGSGVKVAVLDTGISTHPDLNIRGGASFVPGEPSTQDGNGHGTHVAGTIAALNNSIGVLGVAPSAELYAVKVLGASGSGSVSSIAQGLEWAGNNGMHVANLSLGSPSPSATLEQAVNSATSRGVLVVAASGNSGAGSISYPARYANAMAVGATDQNNNRASFSQYGAGLDIVAPGVNVQSTEPGSTYASLNGTSMATPHVAGAAALVKQKNPSWSNVQIRNHLKNTATSLGSTNLYGSGLVNAFAATR

SEQ ID NO: 53034 - protein, 269 aa, Unidentified
AQSVPWGISRVQAPAAHNRGLTGFGVKVAVLDTGISTHPDLNIRGGASFVPGEPSTQDGNGHGTHVAGTIAALNNSIGVLGVAPSAELYAVKVLGASGSGSVSSIAQGLEWAGNNGMHVANLSLGDPSPSATLEQAVNSATSRGVLVVAASGNSGAGSISYPARYANAMAVGATDQNNNRASFSQYGAGLDIVAPGVNVQSTYPGSTYASLNGTSMATPHVAGAAALVKQKNPSWSNVQIRNHLKNTATSLGSTNLYGSGLVNAEAATR

SEQ ID NO: 53035 - protein, 269 aa, Unidentified
AQSVPWGISRVQAPAAHNRGLTGSGVKVAVLDTGISTHPDLNIRGGASFVPGEPSTQDGNGHGTHVAGTIAALNNRIGVLGVAPSAELYAVKVLGASGSGSVSSIAQGLEWAGNNGMHVANLSLGSPSPSATLEQAVNSATSRGVLVVAASGNSGAGSISYPARYANAMAVGATDQNNNRASFSQYGAGLDIVAPGVNVQSTYPGSTYASLNGTSMATPHVAGAAALVKQKNPSWSNVQIRNRLKNTATSLGSTNLYGSGLVNAEAATR

SEQ ID NO: 53036 - protein, 269 aa, Unidentified
AQSVPWGISRVQAPAAHNRGLTGSGVKVAVLDTGISTHPDLNIRGGASFVPGEPSTQDGNGHGTHVAGTIAALNNSIGVLGVAPSAELYAVKVLGASGSGSVSSIAQGLEWAGNNGMHVANLSLGSPSPSATLEQAVNSATSRGVLVVAASGNSGAGSISYPARYANAMAVGATDQNNNRASFSQYGAGLDIVAPGVNVQSTYPGSTYASLNGTSMATPHVAGAAALVKQKNPSWSNVQIRNRLKNTATSLGSTNLYGSGLVNALAATR

SEQ ID NO: 53037 - protein, 269 aa, Unidentified
AQSVPWGISRVQAPAAHNRGLTGSGVKVAVLDTGISTHPDLNIRGGASFVPGEPSTQDGNGHGTHVAGTIAALNNSIGVLGVAPSAELYAVKVLGASGGGSVSSIAQGLEWAGNNGMHVANLSLGSPSPGATLEQAVNSATSRGVLVVAASGNSGAGSISYPARYANAMAVGATDQNNNRASFSQYGAGLDIVAPGVNVQSTYPGSTYASLNGTSMATPHVAGAAALVKQKNPSWSNVQIRNHLKNTATSLGSTNLYGSGLVNAEAATR

SEQ ID NO: 53038 - protein, 269 aa, Bacillus sp.
AQSVPWGISRVQAPAAHNRGLTGSGVKVAVLDTGISTHPDLNIRGGASFVPGEPSTQDGNGHGTHVAGTIAALNNSIGVLGVAPNAELYAVKVLGASGSGSVSSIAQGLEWAGNNGMHVANLSLGSPSPSATLEQAVNSATSRGVLVVAASGNSGAGSISYPARYANAMAVGATDQNNNRASFSQYGAGLDIVAPGVNVQSTYPGSTYASLDGTSMATPHVAGAAALVKQKNPSWSNVQIRNHLKNTATSLGSTNLYGSGLVNAEAATR

SEQ ID NO: 53039 - protein, 269 aa, Unidentified
AQSVPWGISRVQAPAAHNRGLTGSGVKVAVLDTGISTHPDLNIRGGASFVPGEPSTQDGNGHGTHVAGTIAALNNSIGVLGVAPSAELYAVKVLGASGSGSVSSIAQGLEWAGNNGMHVANLSLGSPSPSATLEQAVNSAASRGVLVVAASGNSGAGSISYPARYANAMAVGATDQNNNRASFSQYGAGLDIVAPGVNVQSTAPGSTYASLNGTSMATPHVAGAAALVKQKNPSWSNVQIRNHLKNTATSLGSTNLYGSGLVNAEAATR

SEQ ID NO: 53040 - protein, 269 aa, Unidentified
AQSVPWGISRVQAPAAHNRGLTGSGVKVAVLDTGISTHPDLNIRGGASFVPGEPSTQDGNGHGTHVAGTIAALNNSIGVLGVAPSAELYAVKVLGASGAGSVSSIAQGLEWAGNNGMHVANLSLGSESPSATLEQAVNSATSRGVLVVAASGNSGAGSISYPARYANAMAVGATDQNNNRASFSQYGAGLDIVAPGVNVQSTYPGSTYASLNGTSMATPHVAGAAALVKQKNPSWSNVQIRNHLKNTATSLGSTNLYGSGLVNAEAATR

SEQ ID NO: 53041 - protein, 269 aa, Unidentified
AQSVPWGISRVQAPAAHNRGLTGSGVKVAVLDTGISTHPDLNIRGGASFVPGEPSTQDGEGHGTHVAGTIAALNNSIGVLGVAPSAELYAVKVLGASGSGSVSSIAQGLEWAGNNGMHVANLSLGSESPSATLEQAVNSATSRGVLVVAASGNSGAGSISYPARYANAMAVGATDQNNNRASFSQYGAGLDIVAPGVNVQSTYPGSTYASLNGTSMATPHVAGAAALVKQKNPSWSNVQIRNHLKNTATSLGSTNLYGSGLVNAEAATR

SEQ ID NO: 53042 - protein, 269 aa, Unidentified
AQSVPWGISRVQAPAAHNRGLTGSGVKVAVLDSGISTHPDLNIRGGASFVPGEPSTQDGNGHGTHVAGTIAALNNSIGVLGVAPSAELYAVKVLGASGSGSVSSIAQGLEWAGNNGMHVANLSLGSPSPSATLEQAVNSATSRGVLVVAASGNSGAGSISYPARYANAMAVGATDQNNNRASFSQYGAGLDIVASGVNVQSTYPGSTYASLNGTSMATPHVAGAAALVKQKNPSWSNVQIRNHLKNTATSLGSTNLYGSGLVNAEAATR

SEQ ID NO: 53043 - protein, 269 aa, Bacillus lentus
AQSVPWGISRVQAPAAHNRGLTGSGVKVAVLDTGISTHPDLNIRGGASFVPGEPSTQDGNGHGTHVAGTIAALNNSIGVLGVAPSAELYAVKVLGASGSGSVSSIAQGLEWAGNNGMHVANLSLGSPSPSATLEQAVNSATSRGVLVVAASGNSGAGSISYPARYANAMAVGATDQNNNRARFSQYGAGLDIVAPGVNVQSTYPGSTYASLNGTSMATPHVAGAAALVKQKNPSWSNVQIRDHLKNTATSLGSTNLYGSGLVNAEAATR

SEQ ID NO: 53044 - protein, 269 aa, Unidentified
AQSVPWGISRVQAPAAHNRGLTGSGVKVAVLDTGISTHPDLNIRGGASFVPGEPSTQDGNGHGTHVAGTIAALNNSIGVLGVAPSAELYAVKVLGASGSGSVSSIAQGLEWAGNNGMHVANLSLGSPSPSATLEQAVNSATSRGVLVVAASGNSGAGSISYPARYANAMAVGATDQNNNRASFSQYGAGLDIVAPGVNVQSTYPGSTYASLNGTSMATPHVAGAAVLVKQKNPSWSNVRIRNHLKNTATSLGSTNLYGSGLVNAEAATR

SEQ ID NO: 53045 - protein, 269 aa, Unidentified; identical to SEQ ID NO: 86

SEQ ID NO: 53046 - protein, 269 aa, Unidentified
AQSVPWGISRVQAPAAHNRGLTGSGVKVAVLDTGISTHPDLNIRGGASFVPGEPSTQDGNGHGTHVAGTIAALNNSIGVLGVAPSAELYAVKVLGASGSGGVSSIAQGLEWAGNNGMHVANLSLGSPSPSATLEQAVNSATSRGVLVVAASGNSGAGSISYPARYANAMAVGATDQNNNRASFSQYGAGLDIVAPGVNVQSTEPGSTYASLNGTSMATPHVAGAAALVKQKNPSWSNVQIRNHLKNTATSLGSTNLYGSGLVNAEAATR

SEQ ID NO: 53047 - protein, 269 aa, Unidentified
AQSVPWGISRVQAPAAHNRGLTGSGVKVAVLDTGISTHPDLNIRGGASFVPGEPSTQDGNGHGTHVAGTIAALNNSIGVLGVAPSAELYAVKVLGASGSGSVSSIAQGLEWAGNNGMHVANLSLGSPSPSATLEQAVNSATSRGVLVVAASGNSGAGSISYPARYANAMAVGATDQNNNRASFSQYGAGLDIVAPGVNVQSTYPGSTYASLNGTSMATPHVAGAAALVKQKNPSWRNVQIRNRLKNTATSLGSTNLYGSGLVNAEAATR

SEQ ID NO: 53048 - protein, 269 aa, Unidentified
AQSVPWGISRVQAPAAHNRGLTGSGVKVAVLDTGISTHPDLNIRGGASFVPGEPSTQDGNGHGTHVAGTIAALNNRIGVLGVAPSAELYAVKVLGASGSGSVSSIAQGLEWAGNNGMHVANLSLGSPSPSATLEQAVNSATSRGVLVVAASGNSGAGSISYPARYANAMAVGATDQNNNRASFSQYGAGLDIVAPGVNVQSTYPGSTYASLNGTSMATPHVAGAAALVFQKNPSWSNVQIRNHLKNTATSLGSTNLYGSGLVNAEAATR

SEQ ID NO: 53049 - protein, 269 aa, Synthetic construct
AQSVPWGISRVQAPAAHNRGLTGSGVKVAVLDTGISTHPDLNIRGGASFVPGEPSTQDGNGHGTHVAGTIAALNNSIGVLGVAPSAELYAVKVLGASGSGSVSSIAQGLEWAGNNGMHVANLSLGSPSPSATLEQAVNSATSRGVLVVAASGNSGAGSISYPARYANAMAVGATNQNNNRASFSQYGAGLDIVAPGVNVQSTYPGSTYASLNGTSMATPHVAGAAALVKQKNPSWSNVQIRNHLKNTATSLDSTNLYGSGLVNAEAATR

SEQ ID NO: 53050 - protein, 269 aa, Unidentified
AQSVPWGISRVQAPAAHNRGLTGRGVKVAVLDTGISTHPDLNIRGGASFVPGEPSTQDGNGHGTHVAGTIAALNNRIGVLGVAPSAELYAVKVLGASGSGSVSSIAQGLEWAGNNGMHVANLSLGSPSPSATLEQAVNSATSRGVLVVAASGNSGAGSISYPARYANAMAVGATDQNNNRASFSQYGAGLDIVAPGVNVQSTYPGSTYASLNGTSMATPHVAGAAALVKQKNPSWSNVQIRNHLKNTATSLGSTNLYGSGLVNAEAATR

SEQ ID NO: 53051 - protein, 269 aa, Unidentified
AQSVPWGISRVQAPAAHNRGLTGSGVKVAVLDTGISTHPDLNIRGGASFVPGEPSTQDGNGHGTHVAGTIAALNNSIGVLGVAPSAELYAVKVLGASGAGSVSSIAQGLEWAGNNGMHVANLSLGSPSPSATLEQAVNSATSRGVLVVAASGNSGAGSISYPARYANAMAVGATDQNNNRASFSQYGAGLDIVAPGVNVQSTYPQSTYASLNGTSMATPHVAGAAALVKQKNPSWSNVQIRNHLKNTATSLGSTNLYGSGLVNAEAATR

SEQ ID NO: 53052 - protein, 269 aa, Unidentified
AQSVPWGISRVQAPAAHNRGLTGSGVKVAVLDTGISTHPDLNIRGGASFVPGEPSTQDGNGHGTHVAGTIAALNNSIGVLGVAPSAELYAVKVLPAAGSGSVSSIAQGLEWAGNNGMHVANLSLGSPSPSATLEQAVNSATSRGVLVVAASGNSGAGSISYPARYANAMAVGATDQNNNRASFSQYGAGLDIVAPGVNVQSTYPGSTYASLNGTSMATPHVAGAAALVKQKNPSWSNVQIRNHLKNTATSLGSTNLYGSGLVNAEAATR

SEQ ID NO: 53053 - protein, 269 aa, Unidentified
AQSVPWGISRVQAPAAHNRGLTGSGVKVAVLDTGISTHPDLNIRGGASFVPGEPSTQDGNGHGTHVAGTIAALNNSIGVLGVAPSAELYAVKVLGASGSGSVSSIAQGLEWAGNNRMHVANLSLGSPSPSATLEQAVNSATSRGVLVVAASGNSGAGSISYPARYANAMAVGATDQNNNRASFSQYGTGLDIVAPGVNVQSTYPGSTYASLNGTSMATPHVAGAAALVKQKNPSWSNVQIRNHLKNTATSLGSTNLYGSGLVNAEAATR

SEQ ID NO: 53054 - protein, 269 aa, Unidentified
AQSVPWGISRVQAPAAHRRGLTGSGVKVAVLDTGISTHPDLNIRGGASFVPGEPSTQDGNGHGTHVAGTIAALNNRIGVLGVAPSAELYAVKVLGASGSGSVSSIAQGLEWAGNNGMHVANLSLGSPSPSATLEQAVNSATSRGVLVVAASGNSGAGSISYPARYANAMAVGATDQNNNRASFSQYGAGLDIVAPGVNVQSTYPGSTYASLNGTSMATPHVAGAAALVKQKNPSWSNVQIRNHLKNTATSLGSTNLYGSGLVNAEAATR

SEQ ID NO: 53055 - protein, 269 aa, Synthetic construct
AQSVPWGISRVQAPAAHNRGLTGSGVKVAVLDTGISTHPDLNIRGGASFVPGEPSTQDGNGHGTHVAGTIAALNNSIGVLGVAPSAELYAVKVLGASGSGSVSSIAQGLEWAGNNGMHVANLSQGSPEPSATLEQAVNSATSRGVLVVAASGNSGAGSISYPARYANAMAVGATDQNNNRASFSQYGAGLDIVAPGVNVQSTYPGSTYASLNGTSMATPHVAGAAALVKQKNPSWSNVQIRNHLKNTATSLGSTNLYGSGLVNAEAATR

SEQ ID NO: 53056 - protein, 269 aa, Unidentified
AQSVPWGIARVQAPAAHNRGLTGSGVKVAVLDTGISTHPDLNIRGGASFVPGEPSTQDGNGHGTHVAGTIAALNNSIGVLGVAPSAELYAVKVLGASGSGSVSSIAQGLEWAGNNGMHVANLSLGSPSPSATLEQAVNSATSRGVLVVAASGNSGAGSISYPARYANAMAVGATDQNNNRASFSQYGAGLDIVAPGVNVQSTYPGSTYASLNGTSMATPHVAGAAALVKQKNPSWSNVQIRNHLKNTATSLGSTNLYGSGLVNALAATR

SEQ ID NO: 53057 - protein, 269 aa, Unidentified
AQSVPWGISRVQAPAAHNRGLTGSGVKVAVLDTGISTHPDLNIRGGASFVPGEPSTQDGNGHGTHVAGTIAALNNSIGVLGVAPSAELYAVKVLGASGSGSVSSIAQGLEWAGNNGMHVANLSLGSPSPSATLEQAVNSATSRGVLVVAASGNSGAGSISYPARYANAMAVGATDQNNNRASFSQYGAGLDIVAPGVNVQSTEPGSTYASLNGTSMATPHVAGAAALVKQKNPSWSNVQIRNRLKNTATSLGSTNLYGSGLVNAEAATR

SEQ ID NO: 53058 - protein, 269 aa, Unidentified
AQSVPWGISRVQAPAAHNRGLTGSGVKVAVLDTGISTHPDLNIRGGASFVPGEPSTQDGNGHGTHVAGTIAALNNSIGVLGVAPSAELYAVKVLGASGGGSLSSIAQGLEWAGNNGMHVANLSLGSPSPSATLEQAVNSATSRGVLVVAASGNSGAGSISYPARYANAMAVGATDQNNNRASFSQYGAGLDIVAPGVNVQSTYPGSTYASLNGTSMATPHVAGAAALVKQKNPSWSNVQIRNHLKNTATSLGSTNLYGSGLVNAEAATR

SEQ ID NO: 53059 - protein, 269 aa, Unidentified
AQSVPWGISRVQAPAAHNRGLTGSGVKVAVLDTGISTHPDLNIRGGASFVPGEPSTQDGNGHGTHVAGTIAALNNSIGVLGVAPSAELYAVKVLGASGSGSVSSIAQGLEWAGNNGMHVANLSLGSPSPSATLEQAVNSATSRGVLVVAASGNSGAGSISYPARYANAMAVGATDQNNNRASFSQYGAGLDIVAPGVNVQSTYPGSTYASLNGTSMATPHVAGAAALVKQKNPSWSNVQIRNHLKNTATSLGSTNLYGSGLVRALAATR

SEQ ID NO: 53060 - protein, 269 aa, Unidentified
AQSVPWGISRVQAPAAHNRKLTGSGVKVAVLDTGISTHPDLNIRGGASFVPGEPSTQDGNGHGTHVAGTIAALNNSIGVLGVAPSAELYAVKVLGASGSGSVSSIAQGLEWAGNNGMHVAGLSLGSPSPSATLEQAVNSATSRGVLVVAASGNSGAGSISYPARYANAMAVGATDQNNNRASFSQYGAGLDIVAPGVNVQSTYPGSTYASLNGTSMATPHVAGAAALVKQKNPSWSNVQIRNHLKNTATSLGSTNLYGSGLVNAEAATR

SEQ ID NO: 53061 - protein, 269 aa, Unidentified
AQSVPWGISRVQAPAAHNRGLTGRGVKVAVLDTGISTHPDLNIRGGASFVPGEPSTQDGNGHGTHVAGTIAALNNSIGVLGVAPSAELYAVKVLGASGSGSVSSIAQGLEWAGNNGMHVANLSLGSPSPSATLEQAVNSATSRGVLVVAASGNSGAGSISYPARYANAMAVGATDQNNNRASFSQYGAGLDIVAPGVNVQSTAPGSTYASLNGTSMATPHVAGAAALVKQKNPSWSNVQIRNHLKNTATSLGSTNLYGSGLVNAEAATR

SEQ ID NO: 53062 - protein, 269 aa, Unidentified
AQSVPWGISRVQAPAAHNRGLTGRGVKVAVLDTGISTHPDLNIRGGASFVPGEPSTQDGNGHGTHVAGTIAALDNSIGVLGVAPSAELYAVKVLGASGSGSVSSIAQGLEWAGNNGMHVANLSLGSPSPSATLEQAVNSATSRGVLVVAASGNSGAGSISYPARYANAMAVGATDQNNNRASFSQYGAGLDIVAPGVNVQSTYPGSTYASLNGTSMATPHVAGAAALVKQKNPSWSNVQIRNHLKNTATSLGSTNLYGSGLVNAEAATR

SEQ ID NO: 53063 - protein, 269 aa, Unidentified
AQSVPWGISRVQAPASHNRGLTGSGVKVAVLDTGISTHPDLNIRGGASFVPGEPSTQDGNGHGTHVAGTIAALNNSIGVLGVAPSAELYAVKVLGASGSGSVSSIAQGLEWAGNNGMHVANLSLGSPSPSATLEQAVNSATSRGVIVVAASGNSGAGSISYPARYANAMAVGATDQNNNRASFSQYGAGLDIVAPGVNVQSTYPGSTYASLNGTSMATPHVAGAAALVKQKNPSWSNVQIRNHLKNTATSLGSTNLYGSGLVNAEAATR

SEQ ID NO: 53064 - protein, 269 aa, Unidentified
AQSVPWGISRVQAPAAHNRGLTGSGVKVAVLDTGISTHPDLNIRGGASFVPGEPSTQDGNGHGTHVAGTIAALNNSIGVLGVAPSAELYAVKVLGASGSGSVSSIAQGLEWAGNNGMHVANLSLGSPSPSTTLEQAVNSATSRGVLVVAASGNSGAGSISYPARYANAMAVGATDQNNNRASFSQYGAGLDIVAPGVNVQSTYPGSTYASLNGTSMATPHVAGAAALVKQKNPSWSNVQIRNHLKNTATSLGSTNLYGSGLVEAEAATR

SEQ ID NO: 53065 - protein, 269 aa, Unidentified
AQSVPWGISRVQAPAAHNRGLTGCGVKVAVLDSGISTHPDLNIRGGASFVPGEPSTQDGNGHGTHVAGTIAALNNSIGVLGVAPSAELYAVKVLGASGSGSVSSIAQGLEWAGNNGMHVANLSLGSPSPSATLEQAVNSATSRGVLVVAASGNSGAGSISYPARYANAMAVGATDQNNNRASFSQYGAGLDIVAPGVNVQSTYPGSTYASLNGTSMATPHVAGAAALVKQKNPSWSNVQIRNHLKNTATSLGSTNLYGSGLVNAEAATR

SEQ ID NO: 53066 - protein, 269 aa, Unidentified
AQSVPWGISRVQAPAAHNRGLTGSGVKVAVLDTGISTHPDLNIRGGASFVPGEPSTQDGEGHGTHVAGTIAALNNSIGVLGVAPSAELYAVKVLGASGSGSVSSIAQGLEWAGNNGMHVANLSLGNPSPSATLEQAVNSATSRGVLVVAASGNSGAGSISYPARYANAMAVGATDQNNNRASFSQYGAGLDIVAPGVNVQSTYPGSTYASLNGTSMATPHVAGAAALVKQKNPSWSNVQIRNHLKNTATSLGSTNLYGSGLVNAEAATR

SEQ ID NO: 53067 - protein, 269 aa, Unidentified
AQSVPWGISRVQAPAAHNRGLTGSGVKVAVLDTGISTHPDLNIRGGASFVPGEPSTQDGNGHGTHVAGTIAALNNSIGVLGVAPSAELYAVKVLGASGSGSVSSIAQGLEWAGNNGMHVANLSLGSPSPSATLEQAVNSATSRGVLVVAASGNSGAESISYPARYANAMAVGATDQNNNRASFSQYGAGLDIVAPGVNVQSTYPGSTYASLNGTSMATPHVAGAAALVKQKNPSWSNVQIRNHLKNTATSLGSTNLYGSGLVNAFAATR

SEQ ID NO: 53068 - protein, 269 aa, Unidentified
AQSVPWGISRVQAPAAHNRGLTGSGVKVAVLDTGISTHPDLNIRGGASFVPGEPSTQDGNGHGTHVAGTIAALNNSIGVLGVAPSAELYAVKVLGASGSGSVSSIAQGLEWAGNNGMHVANLSLGSESPSATLEQAVNSATSRGVLVVAASGNSGAGSISYPARYANAMAVGATDQNNNRASFSQYGAGLDIVAPGVNVQSTYPGSTYASLNGTSMATPHVAGAAALVKQKNPSWSNVQIRNRLKNTATSLGSTNLYGSGLVNAEAATR

SEQ ID NO: 53069 - protein, 269 aa, Unidentified
AQSVPWGISRVQAPTAHNRGLTGSGVKVAVLDSGISTHPDLNIRGGASFVPGEPSTQDGNGHGTHVAGTIAALNNSIGVLGVAPSAELYAVKVLGASGSGSVSSIAQGLEWAGNNGMHVANLSLGSPSPSATLEQAVNSATSRGVLVVAASGNSGAGSISYPARYANAMAVGATDQNNNRASFSQYGAGLDIVAPGVNVQSTYPGSTYASLNGTSMATPHVAGAAALVKQKNPSWSNVQIRNHLKNTATSLGSTNLYGSGLVNAEAATR

SEQ ID NO: 53070 - protein, 269 aa, Unidentified
AQSVPWGISRVQAPAAHNRGLTGSGVKVAVLDTGISTHPDLNIRGGASFVPGEPSTQDGNGHGTHVAGTIAALNNSIGVLGVAPSAELYAVKVLGASSGGSVSSIAQGLEWAGNNGMHVANLSLGSPSPSATLEQAVNSATSRGVLVVAASGNSGAGSISYPARYANAMAVGATDQNNNRASFSQYGAGLDIVAPGVNVQSTYPGSTYASLNGTSMATPHVAGAAALVKQKNPSWSNVQIRNHLKNTATSLGSTNLYGSGLVNAEAATR

SEQ ID NO: 53071 - protein, 269 aa, Unidentified
AQSVPWGISRVQAPAAHNRGLTGSGVKVAVLDTGISTHPDLNIRGGASFVPGEPSTQDGNGHGTHVAGTIAALNNNIGVLGVAPSAELYAVKVLGASGSGSVSSIAQGLEWAGNNGMHVANLSLGDPSPSATLEQAVNSATSRGVLVVAASGNSGAGSISYPARYANAMAVGATDQNNNRASFSQYGAGLDIVAPGVNVQSTYPGSTYASLNGTSMATPHVAGAAALVKQKNPSWSNVQIRNHLKNTATSLGSTNLYGSGLVNAEAATR

SEQ ID NO: 53072 - protein, 269 aa, Unidentified
AQSVPWGISRVQAPAAHNRGLTGSGVKVAVLDTGISTHPDLNIRGGASFVPGEPSTQDGNGHGTHVAGTIAALNNSIGVLGVAPSAPLYAVKVLGASGSGSVSSIAQGLEWAGNNGMHVANLSLGSPSPSATLEQAVNSATSRGVLVVAASGNSGEGSISYPARYANAMAVGATDQNNNRASFSQYGAGLDIVAPGVNVQSTYPGSTYASLNGTSMATPHVAGAAALVKQKNPSWSNVQIRNHLKNTATSLGSTNLYGSGLVNAEAATR

SEQ ID NO: 53073 - protein, 269 aa, Unidentified
AQSVPWGISRVQAPAAHNRGLTGSGVKVAVLDTGISTHPDLNIRGGASFVPGEPSTQDGNGHGTHVAGTIAALNNSIGVLGVAPSAELYAVKVLGASGAGSVSSIAQGLEWAGNNGMHVANLSLGSPSPSATLEQAVNSATSRGVLVVAASGNSGAGSISYPARYANAMAVGATDQNNNHASFSQYGAGLDIVAPGVNVQSTYPGSTYASLNGTSMATPHVAGAAALVKQKNPSWSNVQIRNHLKNTATSLGSTNLYGSGLVNAEAATR

SEQ ID NO: 53074 - protein, 269 aa, Synthetic construct
AQSVPWGISRVQAPAAHNRGLTGSGVKVAVLDTGISTHPDLNIRGGASFVPGEPSTQDGNGHGTHVAGTIAALNNSIGVLGVAPSAELYAVKVLGASGSESVSSIAQGLEWAGNNGMHVANLSLGSPSPSATLEQAVNSATSRGVLVVAASGNSGAGSISYPARYANAMAVGATDQNNNRASFSQYGAGLDIVAPGVNVQSTYPGSTYASLNGTSMATPHVAGAAALVKQKNPSWSNVQIRNHLKNTATSLGSTNLYGSGLVNATAATR

SEQ ID NO: 53075 - protein, 269 aa, Unidentified
AQSVPWGISRVQAPAAHRRGLTGSGVKVAVLDTGISTHPDLNIRGGASFVPGEPSTQDGNGHGTHVAGTIAALNNSIGVLGVAPSAELYAVKVLGASGSGSVSSIAQGLEWAGNNGMHVANLSLGSPSPSATLEQAVNSATSRGVLVVAASGNSGAGSISYPARYANAMAVGATDQNNNRASFSQYGAGLDIVAPGVNVQSTYPGSTYASLNGTSMATPHVAGAAALVKQKNPSWSNVQIRNHLKNTATSLGSTNLYGSGLVRAEAATR

SEQ ID NO: 53076 - protein, 269 aa, Unidentified
AQSVPWGISRVQAPAAHNRGLTGSGVKVAVLDTGISTHPDLNIRGGASFVPGEPSTQDGNGHGTHVAGTIAALNNSIGVLGVAPSAELYAVKVLGASGAGSVSSIAQGLEWAGNNGMHVANLSLGSPSPSATLEQAVNSATSRGVLVVAASGNSGAGSISYPARYANAMAVGATDQNNNRASFSQYGAGLDIVAPGVNVQSTYPGSTYASLNGTSMATPHVAGAAALVKQKNPSWSNVQIRNRLKNTATSLGSTNLYGSGLVNAEAATR

SEQ ID NO: 53077 - protein, 269 aa, Unidentified
AQSVPWGISRVQAPAAHNRGLTGSGVKVAVLDTGISTHPDLNIRGGASFVPGEPSTQDGNGHGTHVAGTIAALNNSIGVLGVAPNAELYAVKVLGASGSGSVSSIAQGLEWAGNNGMHVANLSLGSPSPSATLEQAVNSATSRGVLVVAASGNSGAGSISYPARYANAMAVGATDQNNNIASFSQYGAGLDIVAPGVNVQSTYPGSTYASLNGTSMATPHVAGAAALVKQKNPSWSNVQIRNHLKNTATSLGSTNLYGSGLVNAEAATR

SEQ ID NO: 53078 - protein, 269 aa, Unidentified
AQSVPWGISRVQAPAAHNRGLTGRGVKVAVLDTGISTHPDLNIRGGASFVPGEPSTQDGNGHGTHVAGTIAALNNSIGVLGVAPSAELYAVKVLGASGSGSVSSIAQGLEWAGNNGMHVANLSLGSPSPSATLEQAVNSATSRGVLVVAASGNSGAGSISYPARYANAMAVGATDQNNNRASFSQYGAGLDIVAPGVNVQSTYPGSTYASLNGTSMATPHVAGAAALVKQKNPSRSNVQIRNHLKNTATSLGSTNLYGSGLVNAEAATR

SEQ ID NO: 53079 - protein, 269 aa, Alkalihalobacillus clausii
AQSVPWGISRIQAPAAHNRGLTGSGVKVAVLDTGISTHPDLNIRGGASFVPGEPSTQDGNGHGTHVAGTIAALNNSIGVLGVAPSAELYAVKVLGASGSGSVSSIAQGLEWAGNNGMHVANLSLGSPSPSATLEQAVNSATSRGVLVVAASGNSGAGSISYPARYANAMAVGATDQNNNRASFSQYGAGLDIVAPGVNVQSTYPGSTYASLTGTSMATPHVAGAAALVKQKNPSWSNVQIRNHLKNTATSLGSTNLYGSGLVNAEAATR

SEQ ID NO: 53080 - protein, 269 aa, Unidentified
AQSVPWGISRVQAPAAHNRGLTGSGVKVAVLDTGISTHPDLNIRGGASFVPGEPSTQDGEGHGTHVAGTIAALNNSIGVLGVAPSAELYAVKVLGASGSGSVSSIAQGLEWAGNNRMHVANLSLGSPSPSATLEQAVNSATSRGVLVVAASGNSGAGSISYPARYANAMAVGATDQNNNRASFSQYGAGLDIVAPGVNVQSTYPGSTYASLNGTSMATPHVAGAAALVKQKNPSWSNVQIRNHLKNTATSLGSTNLYGSGLVNAEAATR

SEQ ID NO: 53081 - protein, 269 aa, Unidentified
AQSVPWGISRVQAPAAHNRGLTGSGVKVAVLDTGISTHPDLNIRGGASFVPGEPSTQDGNGHGTHVAGTIAALNNSIGVLGVAPSAELYAVKVLGASGSGSVSSIAQGLEWAGLNRMHVANLSLGSPSPSATLEQAVNSATSRGVLVVAASGNSGAGSISYPARYANAMAVGATDQNNNRASFSQYGAGLDIVAPGVNVQSTYPGSTYASLNGTSMATPHVAGAAALVKQKNPSWSNVQIRNHLKNTATSLGSTNLYGSGLVNAEAATR

SEQ ID NO: 53082 - protein, 269 aa, Bacillus lentus
AQSVPWGISRVQAPAAHNRGLTGSGVKVAVLDTGISTHPDLNIRGGASFVPGEPSTQDGNGHGTHVAGTIAALNNSIGVLGVAPSAELYAVKVLGASGSGSVSSIAQGLEWAGNNGMHVANLSLGSPSPSATLEQAVNSATSRGVLVVAASGNSGAGSISIPALYANAMAVGATDQNNNRASFSQYGAGLDIVAPGVNVQSTYPGSTYASLNGTSMATPHVAGAAALVKQKNPSWSNVQIRNHLKNTATSLGSTNLYGSGLVNAEAATR

SEQ ID NO: 53083 - protein, 270 aa, Unidentified
AQSVPWGISRVQAPAAHNRGLTGSGVKVAVLDTGISTHPDLNIRGGASFVPGEPSTQDGNGHGTHVAGTIAALDNSIGVLGVAPSAELYAVKVLGAXSGSGSASSIAQGLEWAGNNGMHVANLSLGSPSPSATLEQAVNSATSRGVLVVAASGNSGAGSISYPARYANAMAVGATDQNNNRASFSQYGAGLDIVAPGVNVQSTYPGSTYASLNGTSMATPHVAGAAALVKQKNPSWSNVQIRNHLKNTATSLGSTNLYGSGLVNAEAATR

SEQ ID NO: 53084 - protein, 269 aa, Unidentified
AQSVPWGISRVQAPAAHNRGLTGSGVKVAVLDTGISTHPDLNIRGGASFVPGEPSTQDGNGHGTHVAGTIAALNNSIGVLGVAPSAELYAVKVLGASGSGGVGSIAQGLEWAGNNGMHVANLSLGSPSPSATLEQAVNSATSRGVLVVAASGNSGAGSISYPARYANAMAVGATDQNNNRASFSQYGAGLDIVAPGVNVQSTYPGSTYASLNGTSMATPHVAGAAALVKQKNPSWSNVQIRNHLKNTATSLGSTNLYGSGLVNAEAATR

SEQ ID NO: 53085 - protein, 269 aa, Bacillus sp.
AQSVPWGISRVQAPAAHNRGLTGSGVKVAVLDTGISTHPDLNIRGGASFVPGEPSTQDGNGHGTHVAGTIAALNNSIGVLGVAPNAELYAVKVLGASGSGSVSSIAQGLEWAGNNGMHVANLSLGSPSPSATLEQAVNSATSRGVLVVAASGNSGAGSISYPARYANAMAVGATDQNNNRASFSQYGAGLDIVAPGVNVQSTYPGSTYASLNGTSMATPHVAGAAALVKQKNPSWSNVQIRNRLKNTATSLGSTNLYGSGLVNAEAATR

SEQ ID NO: 53086 - protein, 269 aa, Synthetic construct
AQSVPWGISRVQAPAAHNRGLTGSGVKVAVLDTGISTHPDLNINGGASFVPGEPSTQDGNGHGTHVAGTIAALNNSIGVLGVAPSAELYAVKVLGASGSGSVSSIAQGLEWAGNNGMHVANLSLGSPSPSATLEQAVNSATSRGVLVVAASGNSGAGSISYPARYANAMAVGATDQNNNRASFSQYGAGLDIVAPGVRVQSTYPGSTYASLNGTSMATPHVAGAAALVKQKNPSWSNVQIRNHLKNTATSLGSTNLYGSGLVNAEAATR

SEQ ID NO: 53087 - protein, 269 aa, Bacillus sp.
AQSVPWGISRVQAPAAHNRGLTGSGVKVAVLDTGISTHPDLNIRGGASFVPGEPSTQDGNGHGTHVAGTIAALNNSIGVLGVAPNAELYAVKVLGASGSGSVSSIAQGLEWAGNNGMHVANLSLGSPSPSATLEQAVNSATSRGVLVVAASGNSGAGSIPYPARYANAMAVGATDQNNNRASFSQYGAGLDIVAPGVNVQSTYPGSTYASLNGTSMATPHVAGAAALVKQKNPSWSNVQIRNHLKNTATSLGSTNLYGSGLVNAEAATR

SEQ ID NO: 53088 - protein, 269 aa, Bacillus lentus
AQSVPWGISRVQAPAAHNRGLTGSGVKVAVLDTGISTHPDLNIRGGASFVPGEPSTQDGDGHGTHVAGTIAALNNSIGVLGVAPSAELYAVKVLGASGSGSVSAIAQGLEWAGNNGMHVANLSLGSPSPSATLEQAVNSATSRGVLVVAASGNSGAGSISYPARYANAMAVGATDQNNNRASFSQYGAGLDIVAPGVNVQSTYPGSTYASLNGTSMATPHVAGAAALVKQKNPSWSNVQIRNHLKNTATSLGSTNLYGSGLVNAEAATR

SEQ ID NO: 53089 - protein, 269 aa, Unidentified
AQSVPWGISRVQAPAAHNRGLTGSGVKVAVLDTGISTHPDLNIRGGASFVPGEPSTQDGNGHGTHVAGTIAALNNSIGVLGVAPSAELYAVKVLGASGSGSISSIAQGLEWAGNNGMHVANLSLGSPSPSATLEQAVNSATSRGVLVVAASGNSGAGSISYPARYANAMAVGATDQNNNRASFSQYGAGLDIVAPGVNVQSTYPGSTYASLNGTSMATPHVAGAAVLVKQKNPSWSNVQIRNHLKNTATSLGSTNLYGSGLVNAEAATR

SEQ ID NO: 53090 - protein, 270 aa, Unidentified
AQSVPWGISRVQAPAAHNRGLTGSGVKVAVLDTGISTHPDLNIRGGASFVPGEPSTQDGFGHGTHVAGTIAALNNSIGVLGVAPSAELYAVKVLGASEGIGSVSSIAQGLEWAGNNGMHVANLSLGSPSPSATLEQAVNSATSRGVLVVAASGNSGAGSISYPARYANAMAVGATDQNNNRASFSQYGAGLDIVAPGVNVQSTYPGSTYASLNGTSMATPHVAGAAALVKQKNPSWSNVQIRNHLKNTATSLGSTNLYGSGLVNAEAATR

SEQ ID NO: 53091 - protein, 269 aa, Unidentified
AQSVPWGISRVQAPAAHNRGLTGSGVKVAVLDTGISTHPDLNIRGGASFVPGEPSTQDGNGHGTHVAGTIAALDNSIGVLGVAPSAELYAVKVLGASGSGSVSSIAQGLEWAGNNGMHVANLSLGSPSPSATLEQAVNSATSRGVLVVAASGNSGAGSISYPARYANAMAVGATDQNNNRASFSQYGAGLDIVAPGVNVQSTYPGSTYASLNGTSMATPHVAGAAALVKQKNPSWSNVQIRNRLKNTATSLGSTNLYGSGLVNAEAATR

SEQ ID NO: 53092 - protein, 269 aa, Unidentified
AQSVPWGISRVQAPAAHNRGLTGSGVKVAVLDTGISTHPDLNIRGGASFVPGEPSTQDGNGHGTHVAGTIAALNNSIGVLGVAPSAELYAVKVLRASGDGSVSSIAQGLEWAGNNGMHVANLSLGSPSPSATLEQAVNSATSRGVLVVAASGNSGAGSISYPARYANAMAVGATDQNNNRASFSQYGAGLDIVAPGVNVQSTYPGSTYASLNGTSMATPHVAGAAALVKQKNPSWSNVQIRNHLKNTATSLGSTNLYGSGLVNAEAATR

SEQ ID NO: 53093 - protein, 269 aa, Unidentified
AQSVPWGISRVQAPAAHNRGLTGSGVKVAVLDTGISTHPDLNIRGGASFVPGEPSTQDGNGHGTHVAGTIAALNNSIGVLGVAPSAELYAVKVLGASGSGSVSSIAQGLEWAGNNGMHVANLSLGSPSPSATLEQAVNSATSRGVLVVAASGNSGAGSISYPARYANAMAVGATDQNNNRASFSQYGAGLDIAAPGVNVQSTVPGSTYASLNGTSMATPHVAGAAALVKQKNPSWSNVQIRNHLKNTATSLGSTNLYGSGLVNAEAATR

SEQ ID NO: 53094 - protein, 269 aa, Unidentified
AQSVPWGISRVQAPAAHNRGLTGSGVKVAVLDTGISTHPDLNIRGGASFVPGEPSTQDGNGHGTHVAGTIAALNNSIGVLGVAPSAELYAVKVLGASGSGSVSSIAQGLEWAGNNGMHVANLSLGSPSPSATLEQAVNSATSRGVLVVAASGNSGAGSISYPARYANAMAVGATDQNNNRASFSQYGAGLDIVAPGVNVQSTYPGSTYASLNGTSMATPHVAGAAALVKQKNPSWSNRQIRNHLKNTATSLGSTNLYGSGLVRAEAATR

SEQ ID NO: 53095 - protein, 269 aa, Unidentified
AQSVPWGISRVQAPAAHNRGLRGSGVKVAVLDTGISTHPDLNIRGGASFVPGEPSTQDGNGHGTHVAGTIAALNNSIGVLGVAPSAELYAVKVLGASGSGSVSSIAQGLEWAGNNGMHVANLSLGSPSPSATLEQAVNSATSRGVLVVAASGNSGAGSISYPARYANAMAVGATDQNNNRASFSQYGAGLDIVAPGVNVQSTYPGFTYASLNGTSMATPHVAGAAALVKQKNPSWSNVQIRNHLKNTATSLGSTNLYGSGLVNAEAATR

SEQ ID NO: 53096 - protein, 269 aa, Unidentified
AQSVPWGISRVQAPAAHNRGLTGSGVKVAVLDTGISTHPDLNIRGGASFVPGEPSTQDGNGHGTHVAGTIAALNNSIGVLGVAPSAELYAVKVLGASGNGSVSSIANGLEWAGNNGMHVANLSLGSPSPSATLEQAVNSATSRGVLVVAASGNSGAGSISYPARYANAMAVGATDQNNNRASFSQYGAGLDIVAPGVNVQSTYPGSTYASLNGTSMATPHVAGAAALVKQKNPSWSNVQIRNHLKNTATSLGSTNLYGSGLVNAEAATR

SEQ ID NO: 53097 - protein, 269 aa, Unidentified
AQSVPWGISRVQAPAAHNRGLTGSGVKVAVLDTGISTHEDLNIRGGASFVPGEPSTQDGNGHGTHVAGTIAALNNSIGVLGVAPSADLYAVKVLGASGSGSVSSIAQGLEWAGNNGMHVANLSLGSPSPSATLEQAVNSATSRGVLVVAASGNSGAGSISYPARYANAMAVGATDQNNNRASFSQYGAGLDIVAPGVNVQSTYPGSTYASLNGTSMATPHVAGAAALVKQKNPSWSNVQIRNHLKNTATSLGSTNLYGSGLVNAEAATR

SEQ ID NO: 53098 - protein, 269 aa, Unidentified
AQSVPWGISRVQAPAAHNRGLTGRGVKVAVLDTGISTHPDLNIRGGASFVPGEPSTQDGNGHGTHVAGTIAALNNSIGVLGVAPSAELYAVKVLGASGSGSVSSIAQGLEWAGNNGMHVANLSLGSPSPSATLEQAVNSATSRGVLVVAASGNSGAGSISYPARYANAMAVGATDQNNNRASFSQYGAGLDIVAPGVNVQSTYPGSTYASLNGTSMATPHVAGAAALVKQKNPSWSNRQIRNHLKNTATSLGSTNLYGSGLVNAEAATR

SEQ ID NO: 53099 - protein, 270 aa, Unidentified
AQSVPWGISRVQAPAAHNRGLTGSGVKVAVLDTGISTHPDLNIRGGASFVPGEPSTQDGNGHGTHVAGTIAALNNSIGVLGVAPSAELYAVKVLGASEGIGSVSSIAQGLEWAGNNGMHVANLSLGSPSPSATLEQAVNSATSRGVLVVAASGNSGAGSISYPARFANAMAVGATDQNNNRASFSQYGAGLDIVAPGVNVQSTYPGSTYASLNGTSMATPHVAGAAALVKQKNPSWSNVQIRNHLKNTATSLGSTNLYGSGLVNAEAATR

SEQ ID NO: 53100 - protein, 269 aa, Unidentified
AQSVPWGISRVQAPAAHNRGLTGSGVKVAVLDTGISTHPDLNIRGGASFVPGEPSTQDGNGHGTHVAGTIAALNNSIGVLGVAPSAPLYAVKVLGASGSGSVSSIAQGLEWAGNNGMHVANLSLGSPSPSATLEQAVNSATSRGVLVVAASGNSGAGSISYPARYANAMAVGATDQNNNRASFSQYGAGLDIVAPGVNVQSTYPGSTYASLNGTSMATPHVAGAAALVKQKNPSWSNVQIRNRLKNTATSLGSTNLYGSGLVNAEAATR

SEQ ID NO: 53101 - protein, 269 aa, Synthetic construct
AQSVPWGISRVQAPAAHNRGLTGSGVKVAVLDTGISTHPDLNIRGGASFVPGEPSTQDGNGHGTHVAGTIAALNNSIGVLGVAPSAELYAVKVLGASGSGSVSSIAQGLEWAGNNDMHVANLSLGSPSPSATLEQAVNSATSRGVLVVAASGNSGAGSISYPARYANAMAVGATNQNNNRASFSQYGAGLDIVAPGVNVQSTYPGSTYASLNGTSMATPHVAGAAALVKQKNPSWSNVQIRNHLKNTATSLGSTNLYGSGLVNAEAATR

SEQ ID NO: 53102 - protein, 269 aa, Unidentified
AQSVPWGISRVQAPAAHNRGLTGSGVKVAVLDTGISTHPDLNIRGGASFVPGEPSTQDGNGHGTHVAGTIAALNNSIGVLGVAPNASLYAVKVLGASGSGSVSSIAQGLEWAGNNGMHVANLSLGSPSPSATLEQAVNSATSRGVLVVAASGNSGAGSISYPARYANAMAVGATDQNNNRASFSQYGAGLDIVAPGVNVQSTYPGSTYASLNGTSMATPHVAGAAALVKQKNPSWSNVQIRNHLKNTATSLGSTNLYGSGLVNAEAATR

SEQ ID NO: 53103 - protein, 269 aa, Unidentified
AQSVPWGISRVQAPAAHNRRLTGSGVKVAVLDTGISTHPDLNIRGGASFVPGEPSTQDGNGHGTHVAGTIAALNNSIGVLGVAPSAELYAVKVLGASGSGSVSSIAQGLEWAGNNGMHVANLSLGSPSPSATLEQAVNSATSRGVLVVAASGNSGAGSISYPARYANAMAVGATDQNNNRASFSQYGAGLDIVAPGVNVQSTYPGSTYASLNGTSMATPHVAGAAALVKQKNPSWSNVQIRNRLKNTATSLGSTNLYGSGLVNAEAATR

SEQ ID NO: 53104 - protein, 269 aa, Unidentified
AQSVPWGISRVQAPAAHNRGLTGSGVKVAVLDTGISTHPDLNIRGGASFVPGEPSTQDGNGHGTHVAGTIAALNNSIGVLGVAPSAELYAVKVLGASGSGGVSSIAQGLEWAGNNGMHVANLSLGSPSPSATLEQAVNSATSRGVLVVAASGNSGAESISYPARYANAMAVGATDQNNNRASFSQYGAGLDIVAPGVNVQSTYPGSTYASLNGTSMATPHVAGAAALVKQKNPSWSNVQIRNHLKNTATSLGSTNLYGSGLVNAEAATR

SEQ ID NO: 53105 - protein, 269 aa, Bacillus sp.
AQSVPWGISRVQAPAAHNRGLTGSGVKVAVLDTGISTHPDLNIRGGASFVPGEPSTQDGNGHGTHVAGTIAALNNSIGVLGVAPNAELYAVKVLGASGSGSVSSIAQGLEWAGNNGMHVANLSLGSPSPSATLEQAVNSATSRGVLVVAASGNSGAGSIGYPARYANAMAVGATDQNNNRASFSQYGAGLDIVAPGVNVQSTYPGSTYASLNGTSQATPHVAGAAALVKQKNPSWSNVQIRNHLKNTATSLGSTNLYGSGLVNAEAATR

SEQ ID NO: 53106 - protein, 269 aa, Bacillus sp.
AQSVPWGISRVQAPAAHNRGLTGSGVKVAVLDTGISTHPDLNIRGGASFVPGEPSTQDGNGHGTHVAGTIAALNNSIGVLGVAPNAELYAVKVLGASGSGSVSSIAQGLEWAGNNGMHVANLSLGSPSPSATLEQAVNSATSRGVLVVAASGNSGAGSIYYPARYANAMAVGATDQNNNRASFSQYGAGLDIVAPGVNVQSTYPGSTYASLNGTSMATPHVAGAAALVKQKNPSWSNVQIRNHLKNTATSLGSTNLYGSGLVNAEAATR

SEQ ID NO: 53107 - protein, 269 aa, Unidentified
AQSVPWGISRVQAPAAHNRGLTGSGVKVAVLDTGISTHPDLNIRGGASFVPGEPSTQDGNGHGTHVAGTIAALNNNIGVLGVAPSAELYAVKVLGASGQGSVSSIAQGLEWAGNNGMHVANLSLGAPSPSATLEQAVNSATSRGVLVVAASGNSGAGSISYPARYANAMAVGATDQNNNRASFSQYGAGLDIVAPGVNVQSTYPGSTYASLNGTSSATPHVAGAAALVKQKNPSWSNVQIRNHLKNTATSLGSTNLYGSGLVNAEAATR

SEQ ID NO: 53108 - protein, 269 aa, Unidentified
AQSVPWGISRVQAPAAHNRGLTGSGVKVAVLDTGISTHPDLNIRGGASFVPGEPSTQDGNGHGTHVAGTIAALNNSIGVLGVAPSAELYAVKVLGASGSGSVSSIAQGLEWAGNNGMHVANLSLGSPSPSATLEQAVNSATSRGVLVVAASGNSGAGSISYPARYANAMAVGATDQNNNRASFSQYGAGLDIVAPGVNVQSTYPGFTYASLNGTSMATPHVAGAAALVKQKNPSWSNVQIRNRLKNTATSLGSTNLYGSGLVNAEAATR

SEQ ID NO: 53109 - protein, 269 aa, Unidentified
AQSVPWGISRVQAPAAHNRGLTGSGVKVAVLDTGISTHPDLNIRGGASFVPGEPSTQDGNGHGTHVAGTIAALNNSIGVLGVAPSAELYAVKVLGASGSGGVSSIAQGLEWAGNNGMHVANLSLGSPSPSATLEQAVNSATSRGVLVVAASGNSGAGSISYPARYANAMAVGATDQNNNHASFSQYGAGLDIVAPGVNVQSTYPGSTYASLNGTSMATPHVAGAAALVKQKNPSWSNVQIRNHLKNTATSLGSTNLYGSGLVNAEAATR

SEQ ID NO: 53110 - protein, 269 aa, Bacillus sp.
AQSVPWGISRVQAPAAHNRGLTGSGVKVAVLDTGISTHPDLNIRGGASFVPGEPSTQDGNGHGTHVAGTIAALNNSIGVLGVAPNAELYAVKVLGASGSGSVSSIAQGLEWAGNNGMHVANLSLGSPSPSATLEQAVNSATSRGVLVVAASGNSGAGSISYPARYANAMAVGATDQNNNRASFSQYGAGLDIVAPGVNVQSTYPGSTYASLSGTSMATPHVAGAAALVKQKNPSWSNVQIRNHLKNTATSLGSTNLYGSGLVNAEAATR

SEQ ID NO: 53111 - protein, 270 aa, Aspergillus oryzae
AQSVPWGISRVQAPAAHNRGLTGSGVKVAVLDTGISTHPDLNIRGGASFVPGEPSTQDGNGHGTHVAGTIAALNNSIGVLGVAPSAELYAVKVLGASEGSGSVSSIAQGLEWAGNNGMHVANLSLGSPSPSATLEQAVNSATSRGVLVVAASGNSGNGDISYPARYANAMAVGATDQNNNRASFSQYGAGLDIVAPGVNVQSTYPGSTYASLNGTSMATPHVAGAAALVKQKNPSWSNVQIRNHLKNTATSLGSTNLYGSGLVNAEAATR

SEQ ID NO: 53112 - protein, 269 aa, Bacillus sp.
AQSVPWGISRVQAPAAHNRGLTGSGVKVAVLDTGISTHPDLNIRGGASFVPGEPSTQDGNGHGTHVAGTIAALNNSIGVLGVAPNAELYAVKVLGASGSGSVSSIAQGLEWAGNNGMHVANLSLGSPSPSATLEQAVNSATSRGVLVVAASGNSGAGSIDYPARYANAMAVGATDQNNNRASFSQYGAGLDIVAPGVNVQSTYPGSTYASLNGTSMATPHVAGAAALVKQKNPSWSNVQIRNHLKNTATSLGSTNLYGSGLVNAEAATR

SEQ ID NO: 53113 - protein, 269 aa, Unidentified
AQSVPWGISRVQAPAAHNRGLTGSGVKVAVLDTGISTHPDLNIRGGASFVPGEPSTQDGNGHGTHVAGTIAALNNSIGVLGVAPNAELYAVKVLGASGSGSLSSIAQGLEWAGNNGMHVANLSLGSPSPSATLEQAVNSATSRGVLVVAASGNSGAGSISYPARYANAMAVGATDQNNNRASFSQYGAGLDIVAPGVNVQSTYPGSTYASLNGTSFATPHVAGAAALVKQKNPSWSNVQIRNHLKNTATSLGSTNLYGSGLVNAEAATR

SEQ ID NO: 53114 - protein, 269 aa, Synthetic construct
AQSVPWGISRVQAPAAHNRGLTGSGVKVAVLDTGISTHPDLNIRGGASFVPGEPSTQDRNGHGTHVAGTIAALNNSIGVLGVAPSAELYAVKVLGASGSGSVSSIAQGLEWAGNNGMHVANLSLGSPSPSATLEQAVNSATSRGVLVVAASGNSGAGSISYPASYANAMAVGATDQNNNRASFSQYGAGLDIVAPGVNVQSTYPGSTYASLNGTSMATPHVAGAAALVKQKNPSWSNVQIRNHLKNTATSLGSTNLYGSGLVNAEAATR

SEQ ID NO: 53115 - protein, 269 aa, Unidentified
AQSRPWGISRVQAPAAHNRGLTGSGVKVAVLDTGISTHPDLNIRGGASFVPGEPSTQDGNGHGTHVAGTIAALNNRIGVLGVAPSAELYAVKVLGASGSGSVSSIAQGLEWAGNNGMHVANLSLGSPSPSATLEQAVNSATSRGVLVVAASGNSGAGSISYPARYANAMAVGATDQNNNRASFSQYGAGLDIVAPGVNVQSTYPGSTYASLNGTSMATPHVAGAAALVKQKNPSWSNVQIRNHLKNTATSLGSTNLYGSGLVNAEAATR

SEQ ID NO: 53116 - protein, 269 aa, Unidentified
AQSRPWGISRVQAPAAHNRGLTGSGVKVAVLDTGISTHPDLNIRGGASFVPGEPSTQDGNGHGTHVAGTIAALNNSIGVLGVAPSAELYAVKVLGASGSGSVSSIAQGLEWAGNNGMHVANLSLGSPSPSATLEQAVNSATSRGVLVVAASGNSGAGSISYPARYANAMAVGATDQNNNRASFSQYGAGLDIVAPGVNVQSTYPGSTYASLNGTSMATPHVAGAAALVKQKNPSRSNVQIRNHLKNTATSLGSTNLYGSGLVNAEAATR

SEQ ID NO: 53117 - protein, 269 aa, Unidentified
AQSVPWGISRVQAPAAHNRGLTGSGVKVAVLDTGISTHPDLNIRGGASFVPGEPSTQDGNGHGTHVAGTIAALNNSIGVLGVAPNAELYAVKVLGASGSGSVSSIAQGLEWAGNNGMHVANLSLGSPSPSATXEQAVNSATSRGVLVVAASGNSGAGSISYPARYANAMAVGATDQNNNRASFSQYGAGLDIVAPGVNVQSTYPGSTYASLNGTSMATPHVAGAAALVKQKNPSWSNVQIRNHLKNTATSLGSTNLYGSGLVNAEAATR

SEQ ID NO: 53118 - protein, 269 aa, Unidentified
AQSVPWGISRVQAPAAHNRRLTGSGVKVAVLDTGISTHPDLNIRGGASFVPGEPSTQDGNGHGTHVAGTIAALNNSIGVLGVAPSAELYAVKVLGASGAGSVSSIAQGLEWAGNNGMHVANLSLGSPSPSATLEQAVNSATSRGVLVVAASGNSGAGSISYPARYANAMAVGATDQNNNRASFSQYGAGLDIVAPGVNVQSTYPGSTYASLNGTSMATPHVAGAAALVKQKNPSWSNVQIRNHLKNTATSLGSTNLYGSGLVNAEAATR

SEQ ID NO: 53119 - protein, 269 aa, Unidentified
AQSVPWGISRVQAPAAHNRGLTGSGVKVAVLDTGISTHPDLNIRGGASFVPGEPSTQDGNGHGTHVAGTIAALNNSIGVLGVAPSAELYAVKVLGASGSGSVSSIAQGLEWAGNNGMHVANLSLGSPSPSATLEQAVNSATSRGVLVVAASGNSGAGSISYPARYANAMAVGATDQNNNRASFSQYGAGLDIAAPGVNVQSTLPGSTYASLNGTSMATPHVAGAAALVKQKNPSWSNVQIRNHLKNTATSLGSTNLYGSGLVNAEAATR

SEQ ID NO: 53120 - protein, 269 aa, Unidentified
AQSVPWGISRVQAPAAHNRGLTGSGVKVAVLDTGISTHPDLNIRGGASFVPGEPSTQDGNGHGTHVAGTIAALNNSIGVLGVAPNAELYAVKVLGASGSGSVSSIAQGLEWAGNNGMHVANLSLGSPSPSATLEQAVNSATSRGVLVVAASGNSGAGXISYPARYANAMAVGATDQNNNRASFSQYGAGLDIVAPGVNVQSTYPGSTYASLNGTSMATPHVAGAAALVKQKNPSWSNVQIRNHLKNTATSLGSTNLYGSGLVNAEAATR

SEQ ID NO: 53121 - protein, 271 aa, Bacteria
AQSVPWGISRVQAPAAHNRGLTGSGVKVAVLDTGISTHPDLNIRGGASFVPGEPSTQDGNGHGTHVAGTIAALNNSIGVLGVAPSAELYAVKVLGAASGGTGSVSSIAQGLEWAGNNGMHVANLSLGSPSPSATLEQAVNSATSRGVLVVAASGNSGAGSISYPARYANAMAVGATDQNNNRASFSQYGAGLDIVAPGVNVQSTYPGSTYASLNGTSMATPHVAGAAALVKQKNPSWSNVQIRNHLKNTATSLGSTNLYGSGLVNAEAATR

SEQ ID NO: 53122 - protein, 269 aa, Unidentified
AQSVPWGISRVQAPAAHNRGLTGSGVKVAVLDSGISTHPDLNIRGGASFVPGEPSTQDGNGHGTHVAGTIAALNNSIGVLGVAPSAELYAVKVLGASGSGSVSSIAQGLEWAGNNGMHVANLSLGSPSPSATLEQAVNSATSRGVFVVAASGNSGAGSISYPARYANAMAVGATDQNNNRASFSQYGAGLDIVAPGVNVQSTYPGSTYASLNGTSMATPHVAGAAALVKQKNPSWSNVQIRNHLKNTATSLGSTNLYGSGLVNAEAATR

SEQ ID NO: 53123 - protein, 269 aa, Bacillus lentus
AQSVPWGISRVQAPAAHNRGLTGSGVKVAVLDTGISTHPDLNIRGGASFVPGEPSTQDGNGHGTHVAGTIAALNNSIGVLGVAPRAELYAVKVLGASGSGSVSSIARGLEWAGNNGMHVANLSLGSPSPSATLEQAVNSATSRGVLVVAASGNSGAGSISYPARYANAMAVGATDQNNNRASFSQYGAGLDIVAPGVNVQSTYPGSTYASLNGTSMATPHVAGAAALVKQKNPSWSNVQIRNHLKNTATSLGSTNLYGSGLVNAEAATR

SEQ ID NO: 53124 - protein, 269 aa, Bacillus lentus
AQSVPWGISRVQAPAAHNRGLTGSGVKVAVLDTGISTHPDLNIRGGASFVPGEPSTQDGNGHGTHVAGTIAALNNSIGVLGVAPDAELYAVKVLGASGSGSVSSIAQGLEWAGNNGMHVANLSLGSPSPSATLEQAVNSATSRGVLVVAASGNSGAGSISYPARYANAMAVGATDQNNNRASFSQYGAGLDIVAPGVNVQSTYPGSTYASLNGTSMATPHVAGAAALVKQKNPSWSNVQIRDHLKNTATSLGSTNLYGSGLVNAEAATR

SEQ ID NO: 53125 - protein, 269 aa, Unidentified
AQSVPWGISRVQAPAAHNRGLTGFGVKVAVLDTGISTHPDLNIRGGASFVPGEPSTQDGNGHGTHVAGTIAALNNSIGVLGVAPSAELYAVKVLGASGSGSVSSIAQGLEWAGNNGMHVANLSLGSPSPSATLEQAVNSATSRGVLVVAASGNSGAGSISYPARYANAMAVGATDQNNNRASFSQYGAGLDIVAPGVNVQSTYPGSAYASLNGTSMATPHVAGAAALVKQKNPSWSNVQIRNHLKNTATSLGSTNLYGSGLVNAEAATR

SEQ ID NO: 53126 - protein, 269 aa, Unidentified
AQSVPWGISRVQAPASHNRGLTGSGVKVAVLDTGISTHPDLNIRGGASFVPGEPSTQDGNGHGTHVAGTIAALNNSIGVLGVAPSAELYAVKVLGASGSGSVSSIAQGLEWAGNNGMHVANLSLGSPSPSATLEQAVNSATSRGVLVVAASGNSGAGSISYPARYANAMAVGATDQNNNHASFSQYGAGLDIVAPGVNVQSTYPGSTYASLNGTSMATPHVAGAAALVKQKNPSWSNVQIRNHLKNTATSLGSTNLYGSGLVNAEAATR

SEQ ID NO: 53127 - protein, 269 aa, Unidentified
AQSVPWGISRVQAPAAHNRGLTGSGVKVAVLDSGISTHPDLNIRGGASFVPGEPSTQDGNGHGTHVAGTIAALNNSIGVLGVAPSAELYAVKVLGASGSGSVSSIAQGLEWAGNNGMHVANLSLGSPSPSATLEQAVNSATSRGVLVVAASGNSGAGSISYPARYANAMAVGATDQNNNRASFSQYGAGLDIVAPGVNVQSTYPGSTYASLNGTSMATPHVAGAAALVFQKNPSWSNVQIRNHLKNTATSLGSTNLYGSGLVNAEAATR

SEQ ID NO: 53128 - protein, 269 aa, Unidentified
AQSVPWGISRVQAPAAHNRGLTGSGVKVAVLDTGISTHPDLNIRGGASFVPGEPSTQDGNGHGTHVAGTIAALNNSIGVLGVAPSAELYAVKVLGASGSGSVSSIADGLEWAGNNGMHVANLSLGSPSPSATLEQAVNSATSRGVLVVAASGNSGAGSISYPARYANAMAVGATDQNNNRARFSQYGAGLDIVAPGVNVQSTYPGSTYASLNGTSMATPHVAGAAALVKQKNPSWSNVQIRNHLKNTATSLGSTNLYGSGLVNAEAATR

SEQ ID NO: 53129 - protein, 269 aa, Unidentified
AQSVPWGISRVQAPAAHNRGLTGSGVKVAVLDTGISTHPDLNIRGGASFVPGEPSTQDGNGHGTHVAGTIAALNNSIGVLGVAPSAELYAVKVLGASGSGSVSSIAQGLEWAGNNGMHVANLSLGSPSPSATLEQAVNSATSRGVLVVAASGNSGAGSISYPARYANAMAVGATDQNNNRASFSQYGAGLDIVAPGVNVQSTYPGFTYASLNGTSMATPHVAGAAALVKQKNPSWRNVQIRNHLKNTATSLGSTNLYGSGLVNAEAATR

SEQ ID NO: 53130 - protein, 269 aa, Unidentified
AQSVPWGISRVQAPAAHNRGLAGSGVKVAVLDTGISTHPDLNIRGGASFVPGEPSTQDGNGHGTHVAGTIAALNNSIGVLGVAPSAELYAVKVLGASGSGSVSSIAQGLEWAGNNGMHVANLSLGSPSPSATLEQAVNSATSRGVLVVAASGNSGAGSISYPARYANAMAVGATDQNNNRASFSQYGAGLDIVAPGVNVQSTEPGSTYASLNGTSMATPHVAGAAALVKQKNPSWSNVQIRNHLKNTATSLGSTNLYGSGLVNAEAATR

SEQ ID NO: 53131 - protein, 269 aa, Unidentified
AQSVPWGISRVQAPAAHNRGLTGSGVKVAVLDTGISTHPDLNIRGGASFVPGEPSTQDGEGHGTHVAGTIAALNNNIGVLGVAPSAELYAVKVLGASGSGSVSSIAQGLEWAGNNGMHVANLSLGSPSPSATLEQAVNSATSRGVLVVAASGNSGAGSISYPARYANAMAVGATDQNNNRASFSQYGAGLDIVAPGVNVQSTYPGSTYASLNGTSMATPHVAGAAALVKQKNPSWSNVQIRNHLKNTATSLGSTNLYGSGLVNAEAATR

SEQ ID NO: 53132 - protein, 269 aa, Unidentified
AQSVPWGISRVQAPAAHNRGLTGSGVKVAVLDTGISTHPDLNIRGGASFVPGEPSTQDGNGHGTHVAGTIAALNNSIGVLGVAPSAELYAVKVLGASGSGSVSSIAQGLEWAGNNGMHVANLSLSSPSPSATLEQAVNSATSRGVLVVAASGNSGAGSISYPARYANAMAVGATDQNNNRASFSQYGAGLDIVAPGVNVQSTYPGSTYAYLNGTSMATPHVAGAAALVKQKNPSWSNVQIRNHLKNTATSLGSTNLYGSGLVNAEAATR

SEQ ID NO: 53133 - protein, 269 aa, Unidentified
AQSVPWGISRVQAPAAHNRGLLGSGVKVAVLDTGISTHPDLNIRGGASFVPGEPSTQDGNGHGTHVAGTIAALNNSIGVLGVAPSAELYAVKVLGASGSGSVSSIAQGLEWAGNNGMHVANLSLGDPSPSATLEQAVNSATSRGVLVVAASGNSGAGSISYPARYANAMAVGATDQNNNRASFSQYGAGLDIVAPGVNVQSTYPGSTYASLNGTSMATPHVAGAAALVKQKNPSWSNVQIRNHLKNTATSLGSTNLYGSGLVNAEAATR

SEQ ID NO: 53134 - protein, 269 aa, Unidentified
AQSVPWGIARVQAPAAHNRGLTGSGVKVAVLDTGISTHPDLNIRGGASFVPGEPSTQDGNGHGTHVAGTIAALNNSIGVRGVAPSAELYAVKVLGASGSGSVSSIAQGLEWAGNNGMHVANLSLGSPSPSATLEQAVNSATSRGVLVVAASGNSGAGSISYPARYANAMAVGATDQNNNRASFSQYGAGLDIVAPGVNVQSTYPGSTYASLNGTSMATPHVAGAAALVKQKNPSWSNVQIRNHLKNTATSLGSTNLYGSGLVNAEAATR

SEQ ID NO: 53135 - protein, 269 aa, Unidentified
AQSVPWGISRVQAPAAHNRGLTGSGVKVAVLDTGISTHPDLNIRGGASFVPGEPSTQDGNGHGTHVAGTIAALNNSIGVLGVAPSAELYAVKVLGASGSGSVSSIAQGLEWAGNNGMHVANLSLGSPSPGATLEQAVNSATSRGVLVVAASGNSGAGSISYPARYANAMAVGATDQNNNRASFSQYGAGLDIVAPGVNVQSTWPGSTYASLNGTSMATPHVAGAAALVKQKNPSWSNVQIRNHLKNTATSLGSTNLYGSGLVNAEAATR

SEQ ID NO: 53136 - protein, 269 aa, Unidentified
AQSVPWGISRVQAPAAHNRGLTGSGVKVAVLDTGISTHPDLNIRGGASFVPGEPSTQDGNGHGTHVAGTIAALNNSIGVLGVAPSAELYAVKVLGASGNGSVSSIANGLEWAGNNGMHVANLSLGAPSPSATLEQAVNSATSRGVLVVAASGNSGAGSISYPARYANAMAVGATDQNNNRASFSQYGAGLDIVAPGVNVQSTYPGSTYASLNGTSSATPHVAGAAALVKQKNPSWSNVQIRNHLKNTATSLGSTNLYGSGLVNAEAATR

SEQ ID NO: 53137 - protein, 269 aa, Bacillus lentus
AQSVPWGISRVQAPAAHNRGLTGSGVKVAVLDTGISTHPDLNIRGGASFVPGEPSTQDGNGHGTHVAGTIAALNNSIGVLGVAPSAELYAVKVLGASSSGSVSSIAQGLEWAGNNGMHVANLSLGSPSPSATLEQAVNSATSRGVLVVAASGNSGAGSISYPARYADAMAVGATDQNNNRASFSQYGAGLDIVAPGVNVQSTYPGSTYASLNGTSMATPHVAGAAALVKQKNPSWSNVQIRNHLKNTATSLGSTNLYGSGLVNAEAATR

SEQ ID NO: 53138 - protein, 269 aa, Synthetic construct
AQSVPWGISRVQAPAAHNRGLTGSGVKVAVLDTGISTHPDLNIRGGASFVPGEPSTQDGNGHGTHVAGTIAALNNSIGVLGVAPSAELYAVKVLGASGSGSVSSIAQGLEWAGNNGMHVANLSLGSPSPSATLEQAVNSATSRGVLVVAASGNSGAGSISYPASYANAMAVGATDQNNNRASFSQYGAGLDIVAPGVRVQSTYPGSTYASLNGTSMATPHVAGAAALVKQKNPSWSNVQIRNHLKNTATSLGSTNLYGSGLVNAEAATR

SEQ ID NO: 53139 - protein, 269 aa, Unidentified
AQSVPWGISRVQAPAAHNRGLTGSGVKVAVLDTGISTHPDLNIRGGASFVPGEPSTQDGNGHGTHVAGTIAALNNSIGVLGVAPSAELYAVKVLGASGSGSVSSIAQGLEWAGNNGMHVANLSLGNPSPSATLEQAVNSATSRGVIVVAASGNSGAGSISYPARYANAMAVGATDQNNNRASFSQYGAGLDIVAPGVNVQSTYPGSTYASLNGTSMATPHVAGAAALVKQKNPSWSNVQIRNHLKNTATSLGSTNLYGSGLVNAEAATR

SEQ ID NO: 53140 - protein, 269 aa, Unidentified
AQSVPWGISRVQAPAAHNRKLTGSGVKVAVLDTGISTHPDLNIRGGASFVPGEPSTQDGNGHGTHVAGTIAALNNSIGVLGVAPSAELYAVKVLGASGSGSVSSIAQGLEWAGNNGMHVANLSLGSPSPSATLEQAVNSATSRGVLVVAASGNSGAGSISYPARYANAMAVGATDQNNNRASFSQYGAGLDIVAPGVNVQSTYPGSTYASLNGTSMATPHVAGAAALVKQKNPRWSNVQIRNHLKNTATSLGSTNLYGSGLVNAEAATR

SEQ ID NO: 53141 - protein, 269 aa, Unidentified
AQSVPWGISRVQAPAAHNRGLTGSGVKVAVLDTGISTHPDLNIRGGASFVPGEPSTQDGNGHGTHVAGTIAALNNSIGVLGVAPSAELYAVKVLGASGSGSVSSIAQGLEWAGNNGMHVANLSLGSPSPSATLEQAVNSATSRGVLVVAASGNSGEGSISYPARYANAMAVGATDQNNNHASFSQYGAGLDIVAPGVNVQSTYPGSTYASLNGTSMATPHVAGAAALVKQKNPSWSNVQIRNHLKNTATSLGSTNLYGSGLVNAEAATR

SEQ ID NO: 53142 - protein, 269 aa, Unidentified
AQSRPWGISRVQAPAAHRRGLTGSGVKVAVLDTGISTHPDLNIRGGASFVPGEPSTQDGNGHGTHVAGTIAALNNSIGVLGVAPSAELYAVKVLGASGSGSVSSIAQGLEWAGNNGMHVANLSLGSPSPSATLEQAVNSATSRGVLVVAASGNSGAGSISYPARYANAMAVGATDQNNNRASFSQYGAGLDIVAPGVNVQSTYPGSTYASLNGTSMATPHVAGAAALVKQKNPSWSNVQIRNHLKNTATSLGSTNLYGSGLVNAEAATR

SEQ ID NO: 53143 - protein, 269 aa, Bacillus subtilis
AQSVPWGISRVQAPAAHNRGLTGSGVKVAVLDTGISTHPDLNIRGGASFVPGEPSTQDGNGHGTHVAGTIAALNNSIGVLGVAPNAELYAVKVLGASGSGSVSSIAQGLEWAGNNGMHVANLSLGSPSPSATLEQAVNSATSRGVLVVAASGNSGAGSISYPARYANAMAVGATDQNNNRASFSQYGAGLDIVAPGVNVQSTYPGSTYASLNGTSMATPHVAGAAALVKQKNPSWSNVQIRNHLKNTATSLGSTNLYGSGLINAEAATR

SEQ ID NO: 53144 - protein, 269 aa, Unidentified
AQSVPWGISRVQAPASHNRALTGSGVKVAVLDTGISTHPDLNIRGGASFVPGEPSTQDGNGHGTHVAGTIAALNNSIGVLGVAPSAELYAVKVLGASGSGSVSSIAQGLEWAGNNGMHVANLSLGSPSPSATLEQAVNSATSRGVLVVAASGNSGAGSISYPARYANAMAVGATDQNNNRASFSQYGAGLDIVAPGVNVQSTYPGSTYASLNGTSMATPHVAGAAALVKQKNPSWSNVQIRNHLKNTATSLGSTNLYGSGLVNAEAATR

SEQ ID NO: 53145 - protein, 269 aa, Unidentified
AQSVPWGISRVQAPAAHNRGLTGSGVKVAVLDTGISTHPDLNIRGGASFVPGEPSTQDGNGHGTHVAGTIAALNNSIGVLGVAPSAELYAVKVLGASGSGSVSSIAQGLEWAGNNGMHVANLSLGSPSPSATLEQAVNSATSRGVLVVAASGNSGAGSISYPARYANAMAVGATDQNNNRASFSQYGAGLDIVAPGVGVQSTWPGSTYASLNGTSMATPHVAGAAALVKQKNPSWSNVQIRNHLKNTATSLGSTNLYGSGLVNAEAATR

SEQ ID NO: 53146 - protein, 269 aa, Unidentified
AQSVPWGISRVQAPAAHNRGLTGSGVKVAVLDTGISTHPDLNIRGGASFVPGEPSTQDGNGHGTHVAGTIAALNNSIGVLGVAPSAELYAVKVLGASGSGSVSSIADGLEWAGNNGMHVANLSLGSPSPSATLEQAVNSATSRGVLVVAASGNSGAGSISYPARYANAMAVGATDQNNNRASFSQYGAGLDIVAPGVNVQSTYPGSTYASLNGTSMATPHVAGAAALVKQKNPSWSNVQIRRHLKNTATSLGSTNLYGSGLVNAEAATR

SEQ ID NO: 53147 - protein, 269 aa, Unidentified
AQSVPWGISRVQAPAAHNRGLTGSGVKVAVLDTGISTHPDLNIRGGASFVPGEPSTQDGNGHGTHVAGTIAALNNSIGVLGVAPNAELYAVKVLGASGSGSVSSIAQGLEWAGNNGMHVANLSLGSPSPSATLEQAVNSATSRGVLVVAASGNSGAGSISYPARYANAMAVGATDQNNNRASFSQYGAGLDIVAPGVNVQSTYPGSTYASENGTSMATPHVAGAAALVKQKNPSWSNVQIRNHLKNTATSLGSTNLYGSGLVNAEAATR

SEQ ID NO: 53148 - protein, 269 aa, Unidentified
AQSVPWGISRVQAPAAHNRGLTGRGVKVAVLDTGISTHPDLNIRGGASFVPGEPSTQDGNGHGTHVAGTIAALNNSIGVLGVAPSAELYAVKVLGASGSGSVSSIAQGLEWAGNNGMHVANLSLGSPSPSATLEQAVNSATSRGVLVVAASGNSGAGSISYPARYANAMAVGATDQNNNRASFSQYGAGLDIVAPGVNVQSTYPGSTYASLNGTSMATPHVAGAAALVKQKNPSWSNVQIRNHLKNTATSLGSTNLYGSGLVCAEAATR

SEQ ID NO: 53149 - protein, 269 aa, Bacillus lentus
AQSVPWGISRVQAPAAHNRGLTGSGVKVAVLDTGISTHPDLNIRGGASFVPGEPSTQDGNGHGTHAAGTIAALNNSIGVLGVAPSAELYAVKVLGASGSGSVSSIAQGIEWAGNNGMHVANLSLGSPSPSATLEQAVNSATSRGVLVVAASGNSGAGSISYPARYANAMAVGATDQNNNRASFSQYGAGLDIVAPGVNVQSTYPGSTYASLNGTSMATPHVAGAAALVKQKNPSWSNVQIRNHLKNTATSLGSTNLYGSGLVNAEAATR

SEQ ID NO: 53150 - protein, 269 aa, Unidentified
AQSVPWGISRVQAPAAHNRGLTGSGVKVAVLDSGISTHPDLNIRGGASFVPGEPSTQDGNGHGTHVAGTIAALNNSIGVLGVAPSAELYAVKVLGASGSGSVSSIAQGLEWAGNNGMHVANLSLGSPSPSATLEQAVNSATSRGVLVVAASGNSGAGSISYPARYANAMAVGATDQNNNRASFSQYGAGLDIVAPGVNVQSTAPGSTYASLNGTSMATPHVAGAAALVKQKNPSWSNVQIRNHLKNTATSLGSTNLYGSGLVNAEAATR

SEQ ID NO: 53151 - protein, 269 aa, Unidentified
AQSVPWGISRVQAPAAHNRRLTGSGVKVAVLDTGISTHPDLNIRGGASFVPGEPSTQDGNGHGTHVAGTIAALNNSIGVLGVAPSAELYAVKVLGASGSGSVSSIAQGLEWAGNNRMHVANLSLGSPSPSATLEQAVNSATSRGVLVVAASGNSGAGSISYPARYANAMAVGATDQNNNRASFSQYGAGLDIVAPGVNVQSTYPGSTYASLNGTSMATPHVAGAAALVKQKNPSWSNVQIRNHLKNTATSLGSTNLYGSGLVNAEAATR

SEQ ID NO: 53152 - protein, 269 aa, Unidentified
AQSVPWGISRVQAPAAHNRGLTGSGVKVAVLDTGISTHPDLNIRGGASFVPGEPSTQDGNGHGTHVAGTIAALNNSIGVLGVAPNAELYAVKVLGASGSGSNSSIAQGLEWAGNNGMHVANLSLGSPSPSATLEQAVNSATSRGVLVVAASGNSGAGSISYPARYANAMAVGATDQNNNRASFSQYGAGLDIVAPGVNVQSTYPGSTYASLNGTSXATPHVAGAAALVKQKNPSWSNVQIRNHLKNTATSLGSTNLYGSGLVNAEAATR

SEQ ID NO: 53153 - protein, 269 aa, Bacillus lentus
AQSVPWGISRVQAPAAHNRGLTGSGVKVAVLDTGISTHPDLNIRGGASFVPGEPSTQDGNGHGTHVAGTIAALNNSIGVLGVAPSAELYAVKVLGASGSGSVSSIAQGLEWAGNNGMHVANLSLGSPSPSATLEQAVNSATSRGVLVVAASGNSGAGSISYPARYANAMAVGATDQNNNRASFSQYGAGLDIVAPGVNVQSTYPGSTYASLNGTSMATPHVAGAAALVKQKNPSWSNVRIRNHLKHTATSLGSTNLYGSGLVNAEAATR

SEQ ID NO: 53154 - protein, 269 aa, Unidentified
AQSVPWGISRVQAPAAHNRGLTGSGVKVAVLDTGISTHPDLNIRGGASFVPGEPSTQDGNGHGTHVAGTIAALNNSIGVLGVAPSAPLYAVKVLGASGSGSVSSIAQGVEWAGNNGMHVANLSLGSPSPSATLEQAVNSATSRGVLVVAASGNSGAGSISYPARYANAMAVGATDQNNNRASFSQYGAGLDIVAPGVNVQSTYPGSTYASLNGTSMATPHVAGAAALVKQKNPSWSNVQIRNHLKNTATSLGSTNLYGSGLVNAEAATR

SEQ ID NO: 53155 - protein, 269 aa, Unidentified
AQSVPWGISRVQAPAAHNRGLTGSGVKVAVLDTGISTHPDLNIRGGASFVPGEPSTQDGNGHGTHVAGTIAALNNSIGVLGVAPSAELYAVKVLGASGSAAVSSIAQGLEWAGNNGMHVANLSLGSPSPSATLEQAVNSATSRGVLVVAASGNSGAGSISYPARYANAMAVGATDQNNNRASFSQYGAGLDIVAPGVNVQSTYPGSTYASLNGTSMATPHVAGAAALVKQKNPSWSNVQIRNHLKNTATSLGSTNLYGSGLVNAEAATR

SEQ ID NO: 53156 - protein, 269 aa, Unidentified
AQSVPWGISRVQAPAAHNRGLTGSGVKVAVLDTGISTHPDLNIRGGASFVPGEPSTQDGNGHGTHVAGTIAALNNSIGVLGVAPSAELYAVKVLGASGSGSVSSIAQGLEWAGNNGMHVANLSLGSPSPSATLEQAVNSATSRGVLVVAASGNSGAGSISYPARYANAMAVGATDQNNNRASFSQYGAGLDIVAPGVNVQSTYPGSTYASLNGTSMATPHVAGAAALVKQKNPSRSNRQIRNHLKNTATSLGSTNLYGSGLVNAEAATR

SEQ ID NO: 53157 - protein, 269 aa, Unidentified
AQSVPWGISRVQAPAAHNRGLAGSGVKVAVLDTGISTHPDLNIRGGASFVPGEPSTQDGNGHGTHVAGTIAALNNSIGVLGVAPSAELYAVKVLGASGSGSVSSIAQGVEWAGNNGMHVANLSLGSPSPSATLEQAVNSATSRGVLVVAASGNSGAGSISYPARYANAMAVGATDQNNNRASFSQYGAGLDIVAPGVNVQSTYPGSTYASLNGTSMATPHVAGAAALVKQKNPSWSNVQIRNHLKNTATSLGSTNLYGSGLVNAEAATR

SEQ ID NO: 53158 - protein, 269 aa, Unidentified
AQSVPWGISRVQAPAAHNRKLTGSGVKVAVLDTGISTHPDLNIRGGASFVPGEPSTQDGNGHGTHVAGTIAALNNSIGVLGVAPSAELYAVKVLGASGSGSVSSIAQGLEWAGLNGMHVANLSLGQPSPSATLEQAVNSATSRGVLVVAASGNSGAGSISYPARYANAMAVGATDQNNNRASFSQYGAGLDIVAPGVNVQSTYPGSTYASLNGTSSATPHVAGAAALVKQKNPSWSNVQIRNHLKNTATSLGSTNLYGSGLVNAEAATR

SEQ ID NO: 53159 - protein, 269 aa, Unidentified
AQSVPWGISRVQAPAAHNRGLTGSGVKVAVLDTGISTHPDLNIRGGASFVPGEPSTQDGNGHGTHVAGTIAALNNSIGVLGVAPSAELYAVKVLGASGSGSVSSIAQGLEWARNNGMHVANLSLGSPSPSATLEQAVNSATSRGVLVVAASGNSGAGSISYPARYANAMAVGATDQNNNRASFSQYGAGLDIVAPGVNVQSTYPGSTYASLNGTSMATPHVAGAAALVKQKNPSWSNVQIRNHLKNTATSLGSTNLYGSGLVRAEAATR

SEQ ID NO: 53160 - protein, 269 aa, Unidentified
AQSVPWGISRVQAPAAHNRGLTGSGVKVAVLDTGISTHPDLNIRGGASFVPGEPSTQDGNGHGTHVAGTIAALNNSIGVRGVAPSAELYAVKVLGASGSGSVSSIAQGLEWARNNGMHVANLSLGSPSPSATLEQAVNSATSRGVLVVAASGNSGAGSISYPARYANAMAVGATDQNNNRASFSQYGAGLDIVAPGVNVQSTYPGSTYASLNGTSMATPHVAGAAALVKQKNPSWSNVQIRNHLKNTATSLGSTNLYGSGLVNAEAATR

SEQ ID NO: 53161 - protein, 275 aa, Unidentified
AQSVPWGISRVQAPAAHNRGLTGSGVKVAVLDTGIXSTHPDLNIRGGASFVPGEXPSTQDGNGHGTHVAGTIAALNNSIGVLGVAPSAELYAVKVLGASGSGSXSSIAQGLEWAGNNGMHVASLSLGSPSPSATLEQAVNSATSRGVLVVAASGNSGAGSXXXXISYPARYANAMAVGATDQNNNRASFSQYGAGLDIVAPGVNVQSTYPGSTYASLNGTSMATPHVAGAAALVKQKNPSWSNVQIRNHLKNTATSLGSTNLYGSGLVNAEAATR

SEQ ID NO: 53162 - protein, 269 aa, Synthetic construct
AQSVPWGISRVQAPAAHNRGLTGSGVKVAVLDTGISTHPDLNIRGGARFVPGEPSTQDGNGHGTHVAGTIAALNNSIGVLGVAPSAELYAVKVLGASGSGSVSSIAQGLEWAGNNGMHVANLSLGSPSPSATLEQAVNSATSRGVLVVAASGNSGAGSISYPASYANAMAVGATDQNNNRASFSQYGAGLDIVAPGVNVQSTYPGSTYASLNGTSMATPHVAGAAALVKQKNPSWSNVQIRNHLKNTATSLGSTNLYGSGLVNAEAATR

SEQ ID NO: 53163 - protein, 269 aa, Unidentified
AQSVPWGISRVQAPAAHNRGLTGSGVKVAVLDTGISTHPDLNIRGGASFVPGEPSTQDGNGHGTHVAGTIAALNNSIGVRGVAPSAELYAVKVLGASGSGSVSSIAQGLEWAGNNGMHVANLSLGSPSPSATLEQAVNSATSRGVLVVAASGNSGAGSISYPARYANAMAVGATDQNNNRASFSQYGAGLDIVAPGVNVQSTYPGSTYASLNGTSMATPHVAGAAALVKQKNPSRSNVQIRNHLKNTATSLGSTNLYGSGLVNAEAATR

SEQ ID NO: 53164 - protein, 269 aa, Unidentified
AQSVPWGISRVQAPAAHNRGLTGSGVKVAVLDTGISTHPDLNIRGGASFVPGEPSTQDGNGHGTHVAGTIAALNNSIGVLGVAPSAELYAVKVLGASGSGSVSSIAQGLEWAGNNGMHVANLSLGSPSPSATLEQAVNSATSRGVLVVAASGNSGAGSISYPARYANAMAVGATDQNNNRASFSQYGAGLDIVAPGVNVQSTYPGSTYASLNGTSMATPHVAGAAALVKQKNPSWSNVQIRNHLKNTATSLGSTNLHGSGIVNAEAATR

SEQ ID NO: 53165 - protein, 269 aa, Unidentified
AQSVPWGISRVQAPAAHNRGLRGSGVKVAVLDTGISTHPDLNIRGGASFVPGEPSTQDGNGHGTHVAGTIAALNNSIGVLGVAPSAELYAVKVLGASGSGSVSSIAQGLEWAGNNGMHVANLSLGSPSPSATLEQAVNSATSRGVLVVAASGNSGAGSISYPARYANAMAVGATDQNNNRASFSQYGAGLDIVAPGVNVQSTYPGSTYASLNGTSMATPHVAGAAALVKQKNPSWSNVQIRNHLKNTATSLGSTNLYGSGLVNALAATR

SEQ ID NO: 53166 - protein, 269 aa, Unidentified
AQSVPWGISRVQAPAAHNRGLAGSGVKVAVLDTGISTHPDLNIRGGASFVPGEPSTQDGNGHGTHVAGTIAALNNSIGVLGVAPSAELYAVKVLGASGSGSVSSIAQGLEWAGNNGMHVANLSLGNPSPSATLEQAVNSATSRGVLVVAASGNSGAGSISYPARYANAMAVGATDQNNNRASFSQYGAGLDIVAPGVNVQSTYPGSTYASLNGTSMATPHVAGAAALVKQKNPSWSNVQIRNHLKNTATSLGSTNLYGSGLVNAEAATR

SEQ ID NO: 53167 - protein, 269 aa, Unidentified
AQSVPWGISRVQAPAAHNRGLTGSGVKVAVLDTGISTHPDLNIRGGASFVPGEPSTQDGNGHGTHVAGTIAALNNSIGVLGVAPSAPLYAVKVLGASGSGSVSSIAQGLEWAGNNGMHVANLSLGSPSPSATLEQAVNSATSRGVIVVAASGNSGAGSISYPARYANAMAVGATDQNNNRASFSQYGAGLDIVAPGVNVQSTYPGSTYASLNGTSMATPHVAGAAALVKQKNPSWSNVQIRNHLKNTATSLGSTNLYGSGLVNAEAATR

SEQ ID NO: 53168 - protein, 269 aa, Unidentified
AQSVPWGISRVQAPAAHNRGLTGSGVKVAVLDTGISTHPDLNIRGGASFVPGEPSTQDGNGHGTHVAGTIAALNNSIGVLGVAPSAELYAVKVLGASGSGSVSSIAQGLEWAGNNGMHVANLSLGSPSPSATLEQAVNSATSRGVLVVAASGNSGAGSISYPARYANAMAVGATDQNNNRASFSQYGAGLDIVAPGVNVQSTYPGFTYASLNGTSMATPHVAGAAALVKQKNPSWSNVQIRNHLKNTATSLGSTNLYGSGLVRAEAATR

SEQ ID NO: 53169 - protein, 269 aa, Unidentified
AQSVPWGISRVQAPAAHNRGLTGSGVKVAVLDTGISTHPDLNIRGGASFVPGEPSTQDGNGHGTHVAGTIAALNNSIGVLGVAPSAELYAVKVLGASGSGSVSSIAQGLEWAGNNGMHVANLSLGSPSPSATLEQAVNSATSRGVLVVAASGNSGAGSISTPARDANAMAVGATDQNNNRASFSQYGAGLDIVAPGVNVQSTYPGSTYASLNGTSMATPHVAGAAALVKQKNPSWSNVQIRNHLKNTATSLGSTNLYGSGLVNAEAATR

SEQ ID NO: 53170 - protein, 269 aa, Unidentified
AQSVPWGISRVQAPAAHNRGLTGSGVKVAVLDTGISTHPDLNIRGGASFVPGEPSTQDGNGHGTHVAGTIAALNNSIGVLGVAPSAELYAVKVLGASGSGSVSSIAQGLEWAGNNGMHVANLSLGNPSPSATLEQAVNSATSRGVLVVAASGNSGAGSISYPARYANAMAVGATDQNNNRASFSQYGAGLDIVAPGVNVQSTYPGSTYASLNGTSMATPHVAGAAALVKQKNPSWSNVQIRNHLKNTATSLGSTNLYGSGLVNAFAATR

SEQ ID NO: 53171 - protein, 269 aa, Unidentified
ASSSPWGISRVQAPAAHNRGLTGSGVKVAVLDTGISTHPDLNIRGGASFVPGEPSTQDGNGHGTHVAGTIAALNNSIGVLGVAPSAELYAVKVLGASGSGSVSSIAQGLEWAGNNGMHVANLSLGSPSPSATLEQAVNSATSRGVLVVAASGNSGAGSISYPARYANAMAVGATDQNNNRASFSQYGAGLDIVAPGVNVQSTYPGSTYASLNGTSMATPHVAGAAALVKQKNPSWSNVQIRNHLKNTATSLGSTNLYGSGLVNAEAATR

SEQ ID NO: 53172 - protein, 269 aa, Unidentified
AQSVPWGISRVQAPAAHNRGLTGSGVKVAVLDTGISTHPDLNIRGGASFVPGEPSTQDGNGHGTHVAGTIAALNNSIGVLGVAPSAELYAVKVLGASGSGSVSSIAQGLEWAGNNGMHVANLSLGSPSPSATLEQAVNSATSRGVLVVAASGNSGAGSISYPARYANAMAVGATDQNNNRADFSQYGAGLDIVAPGVNVQSTYPGSTYASLNGTSMATPHVAGAAALVKQKNPSWSNVQIRRHLKNTATSLGSTNLYGSGLVNAEAATR

SEQ ID NO: 53173 - protein, 269 aa, Unidentified
AQSVPWGISRVQAPAAHNRGLTGSGVKVAVLDTGISTHPDLNIRGGASFVPGEPSTQDGNGHGTHVAGTIAALNNSIGVLGVAPSAELYAVKVLGASGSGSVSSIARGLEWAGNNGMHVANLSLGSPSPSATLEQAVNSATSRGVLVVAASGNSGAGSISYPARYANAMAVGATDQNNNRASFSQYGAGLDIVAPGVNVQSTYPGSTYASLNGTSMATPHVAGAAALVKQKNPSWSNVQIRRHLKNTATSLGSTNLYGSGLVNAEAATR

SEQ ID NO: 53174 - protein, 269 aa, Unidentified
AQSVPWGISRVQAPAAHNRGLTGSGVKVAVLDTGISTHPDLNIRGGASFVPGEPSTQDGNGHGTHVAGTIAALNNSIGVLGVAPNAELYAVKVLGASGSGSVSSIAQGLEWAGNNGMHVANLSLGSPSPSATLEQAVNSATSRGVLVVAASGNSGAGSISYPARYANAMAVGATEQNNNRASFSQYGAGLDIVAPGVNVQSTYPGSTYASLNGTSMATPHVAGAAALVKQKNPSWSNVQIRNHLKNTATSLGSTNLYGSGLVNAEAATR

SEQ ID NO: 53175 - protein, 269 aa, Unidentified
AQSVPWGISRVQAPAAHNRKLTGSGVKVAVLDTGISTHPDLNIRGGASFVPGEPSTQDGNGHGTHVAGTIAALNNSIGVLGVAPSAELYAVKVLGASGSGSVSSIAQGLEWAGLNGMHVANLSLGLPSPSATLEQAVNSATSRGVLVVAASGNSGAGSISYPARYANAMAVGATDQNNNRASFSQYGAGLDIVAPGVNVQSTYPGSTYASLNGTSSATPHVAGAAALVKQKNPSWSNVQIRNHLKNTATSLGSTNLYGSGLVNAEAATR

SEQ ID NO: 53176 - protein, 269 aa, Unidentified
AQSVPWGISRVQAPAAHNRGLTGSGVKVAVLDTGISTHPDLNIRGGASFVPGEPSTQDGNGHGTHVAGTIAALNNRIGVLGVAPSAELYAVKVLGASGSGSVSSIAQGLEWARNNGMHVANLSLGSPSPSATLEQAVNSATSRGVLVVAASGNSGAGSISYPARYANAMAVGATDQNNNRASFSQYGAGLDIVAPGVNVQSTYPGSTYASLNGTSMATPHVAGAAALVKQKNPSWSNVQIRNHLKNTATSLGSTNLYGSGLVNAEAATR

SEQ ID NO: 53177 - protein, 269 aa, Unidentified
AQSVPWGISRVQAPAAHNRGLTGSGVKVAVLDTGISTHPDLNIRGGASFVPGEPSTQDGEGHGTHVAGTIAALNNSIGVLGVAPSAELYAVKVLGASGSGSVSSIAQGLEWAGNNGMHVANLSLGSPSPSATLEQAVNSATSRGVIVVAASGNSGAGSISYPARYANAMAVGATDQNNNRASFSQYGAGLDIVAPGVNVQSTYPGSTYASLNGTSMATPHVAGAAALVKQKNPSWSNVQIRNHLKNTATSLGSTNLYGSGLVNAEAATR

SEQ ID NO: 53178 - protein, 269 aa, Synthetic construct
AQSVPWGISRVQAPAAHNRGLTGSGVKVAVLDTGISTHPDLNIRGGASFVPGEPSTQDGNGHGTHVAGTIAALDNSIGVLGVAPSAELYAVKVLGADGSGSVSSIAQGLEWAGNNGMHVANLSLGSPSPSATLEQAVNSATSRGVLVVAASGNSGAGSISYPARYANAMAVGATDQNNNRASFSQYGAGLDIVAPGVNVQSTYPGSTYASLNGTSMATPHVAGAAALVKQKNPSWSNVQIRNHLKNTATSLGSTNLYGSGLVNAEAATR

SEQ ID NO: 53179 - protein, 269 aa, Bacillus lentus
AQSVPWGISRVQAPAAHNRGLTGSGVKVAVLDTGISTHPDLNIRGGASFVPGEPSTQDGNGHGTHVAGTIAALNNSIGVLGVAPSAELYAVKVLGASGSGSVSSIARGLEWAGNNGMHVANLSLGSPSPSATLEQAVNSATSRGVLVVAASGNSGAGSISYPARYANAMAVGATDQNNNRARFSQYGAGLDIVAPGVNVQSTYPGSTYASLNGTSMATPHVAGAAALVKQKNPSWSNVQIRNHLKNTATSLGSTNLYGSGLVNAEAATR

SEQ ID NO: 53180 - protein, 269 aa, Synthetic construct
AQSVPWGISRVQAPAAHNRGLTGSGVKVAVLDTGISTHPDLNIRGGASFVPGEPSTQDGNGHGTHVAGTIAALNNSIGVLGVAPSAELYAVKQLGASGEGSVSSIAQGLEWAGNNGMHVANLSLGSPSPSATLEQAVNSATSRGVLVVAASGNSGAGSISYPARYANAMAVGATDQNNNRASFSQYGAGLDIVAPGVNVQSTYPGSTYASLNGTSMATPHVAGAAALVKQKNPSWSNVQIRNHLKNTATSLGSTNLYGSGLVNAEAATR

SEQ ID NO: 53181 - protein, 269 aa, Unidentified
AQSVPWGISRVQAPAAHNRGLTGSGVKVAVLDTGISTHPDLNIRGGASFVPGEPSTQDGNGHGTHVAGTIAALNNSIGVLGVAPSAELYAVKVLGASGSGSVSSIAQGLEWAGNNGMHVANLSLGSPSPSATLEQAVNSATSRGVLVVAASGNSGAGSISYPARYANGMAVGATDQNNNRASFSQYGAGLDIVAPGVDVQSTYPGSTYASLNGTSMATPHVAGAAALVKQKNPSWSNVQIRNHLKNTATSLGSTNLYGSGLVNAEAATR

SEQ ID NO: 53182 - protein, 269 aa, Bacillus sp.
AQSVPWGISRVQAPAAHNRGLTGSGVKVAVLDTGISTHPDLNIRGGASFVPGEPSTQDGNGHGTHVAGTIAALNNSIGVLGVAPNAELYAVKVLGASGSGSVSSIAQGLEWAGNNGMHVANLSLGSPSPSATLEQAVNSATSRGVLVVAASGNSGAGSILYPARYANAMAVGATDQNNNRASFSQYGAGLDIVAPGVNVQSTYPGSTYASLNGTSMATPHVAGAAALVKQKNPSWSNVQIRNHLKNTATSLGSTNLYGSGLVNAEAATR

SEQ ID NO: 53183 - protein, 269 aa, Unidentified
AQSVPWGISRVQAPAAHNRGLTGSGVKVAVLDTGISTHPDLNIRGGASFVPGEPSTQDGNGHGTHVAGTIAALNNSIGVLGVAPSAELYAVKVLPASGSGSISSIAQGLEWAGNNGMHVANLSLGSPSPSATLEQAVNSATSRGVLVVAASGNSGAGSISYPARYANAMAVGATDQNNNRASFSQYGAGLDIVAPGVNVQSTYPGSTYASLNGTSMATPHVAGAAALVKQKNPSWSNVQIRNHLKNTATSLGSTNLYGSGLVNAEAATR

SEQ ID NO: 53184 - protein, 269 aa, Unidentified
AQSVPWGISRVQAPAAHNRGLTGSGVKVAVLDTGISTHPDLNIRGGASFVPGEPSTQDGNGHGTHVAGTIAALNNSIGVLGVAPSAELYAVKVLGASGSGSVSSIAQGLEWARNNGMHVANLSLGSPSPSATLEQAVNSATSRGVLVVAASGNSGAGSISYPARYANAMAVGATDQNNNRASFSQYGAGLDIVAPGVNVQSTYPGSTYASLNGTSMATPHVAGAAALVKQKNPSRSNVQIRNHLKNTATSLGSTNLYGSGLVNAEAATR

SEQ ID NO: 53185 - protein, 269 aa, Synthetic construct
AQSVPWGISRVQAPAAHNRGLTGSGVKVAVLDTGISTHPDLNIRGGASFVPGEPSTQDGNGHGTHVAGTIAALNNSIGVLGVAPSAELYAVKVLGASGSGSVSSIAQGLEWAGNNGMHVANLSLGSPSPSATLEQAVNSATSRGVLVVAASGNSGAGSISYPASYANAMAVGATDQNNNRASFSQYGAGLDIVAPGVNVQSTYPGSTYARLNGTSMATPHVAGAAALVKQKNPSWSNVQIRNHLKNTATSLGSTNLYGSGLVNAEAATR

SEQ ID NO: 53186 - protein, 269 aa, Unidentified
AQSVPWGISRVQAPAAHNRGLTGSGVKVAVLDTGISTHPDRNIRGGASFVPGEPSTQDGNGHGTHVAGTIAALNNSIGVLGVAPSAELYAVKVLGASGSGSVSSIAQGLEWAGNNGMHVANLSLGSPSPSATLEQAVNSATSRGVLVVAASGNSGAGSISYPARYANAMAVGATDQNNNRASFSQYGAGLDIVAPGVNVQSTYPGSTYASLNGTSMATPHVAGAAALVKQKNPSWSNRQIRNHLKNTATSLGSTNLYGSGLVNAEAATR

SEQ ID NO: 53187 - protein, 269 aa, Unidentified
AQSVPWGISRVQAPAAHNRGLTGSGVKVAVLDTGISTHPDLNIRGGASFVPGEPSTQDGNGHGTHVAGTIAALNNSIGVLGVAPSAELYAVKVLGASGSGSLSSIAQGLEWAGNNGMHVANLSLGSPSPGATLEQAVNSATSRGVLVVAASGNSGAGSISYPARYANAMAVGATDQNNNRASFSQYGAGLDIVAPGVNVQSTYPGSTYASLNGTSMATPHVAGAAALVKQKNPSWSNVQIRNHLKNTATSLGSTNLYGSGLVNAEAATR

SEQ ID NO: 53188 - protein, 269 aa, Unidentified
AQSVPWGISRVQAPAAHNRGLTGSGVKVAVLDTGISTHPDLNIRGGASFVPGEPSTQDGNGHGTHVAGTIAALNNSIGVLGVAPSAPLYAVKVLGASGSGSVSSIAQGLEWAGNNGMHVANLSLGSPSPSATLEQAVNSATSRGVLVVAASGNSGAGSISYPARYANAMAVGATDQNNNRADFSQYGAGLDIVAPGVNVQSTYPGSTYASLNGTSMATPHVAGAAALVKQKNPSWSNVQIRNHLKNTATSLGSTNLYGSGLVNAEAATR

SEQ ID NO: 53189 - protein, 269 aa, Unidentified
AQSVPWGISRVQAPAAHNRGLTGGGVKVAVLDTGISTHPDLNIRGGASFVPGEPSTQDGNGHGTHVAGTIAALNNSIGVLGVAPSAELYAVKVLAASGQGSVSSIAQGLEWAGNNGMHVANLSLGSPSPSATLEQAVNSATSRGVLVVAASGNSGAGSISYPARYANAMAVGATDQNNNRASFSQYGAGLDIVAPGVNVQSTYPGSTYASLNGTSSATPHVAGAAALVKQKNPSWSNVQIRNHLKNTATSLGSTNLYGSGLVNAEAATR

SEQ ID NO: 53190 - protein, 269 aa, Unidentified
AQSVPWGISRVQAPAAHNRGLTGSGVKVAVLDTGISTHPDLNIRGGASFVPGEPSTQDGNGHGTHVAGTIAALNNSIGVLGVAPSAELYAVKVLGASGAGSVSSIAQGLEWAGNNGMHVANLSLGSPSPSATLEQAVNSATSRGVLVVAASGNSGAGSISYPARYANAMAVGATDQNNNRADFSQYGAGLDIVAPGVNVQSTYPGSTYASLNGTSMATPHVAGAAALVKQKNPSWSNVQIRNHLKNTATSLGSTNLYGSGLVNAEAATR

SEQ ID NO: 53191 - protein, 269 aa, Unidentified
AQSVPWGISRVQAPAAHNRGLTGSGVKVAVLDTGISTHPDLNIRGGASFVPGEPSTQDGNGHGTHVAGTIAALNNSIGVLGVAPSAELYAVKVLGASGSGSVSSIAQGLEWAGNNGMHVANLSLGSESPSATLEQAVNSATSRGVLVVAASGNSGAGSISYPARYANAMAVGATDQNNNHASFSQYGAGLDIVAPGVNVQSTYPGSTYASLNGTSMATPHVAGAAALVKQKNPSWSNVQIRNHLKNTATSLGSTNLYGSGLVNAEAATR

SEQ ID NO: 53192 - protein, 269 aa, Unidentified
AQSVPWGISRVQAPAAHNRGLTGSGVKVAVLDTGISTHPDLNIRGGASFVPGEPSTQDGNGHGTHVAGTIAALNNSIGVLGVAPSAELYAVKVLGASGSGSVSSIAQGLEWAGNNGMHVANLSLGSPSPSATLEQAVNSATSRGVLVVAASGNSGAGSISYPARYANAMAVGATDQNNNRASFSQYGAGLDIVAPGVNVQSTYPGSAYASENGTSMATPHVAGAAALVKQKNPSWSNVQIRNHLKNTATSLGSTNLYGSGLVNAEAATR

SEQ ID NO: 53193 - protein, 269 aa, Unidentified
AQSVPWGISRVQAPAAHNRGLTGSGVKVAVLDTGISTHPDLNIRGGASFVPGEPSTQDGNGHGTHVAGTIAALNNSIGVLGVAPSAELYAVKVLPASGSGSVSSIAQGLEWAGNNGMHVANLSLGSPSPSATLEQAANSATSRGVLVVAASGNSGAGSISYPARYANAMAVGATDQNNNRASFSQYGAGLDIVAPGVNVQSTYPGSTYASLNGTSMATPHVAGAAALVKQKNPSWSNVQIRNHLKNTATSLGSTNLYGSGLVNAEAATR

SEQ ID NO: 53194 - protein, 269 aa, Unidentified
AQSVPWGISRVQAPASHNRGLTGSGVKVAVLDTGISTHPDLNIRGGASFVPGEPSTQDGNGHGTHVAGTIAALNNSIGVLGVAPSAELYAVKVLGASGSGSVSSIAQGVEWAGNNGMHVANLSLGSPSPSATLEQAVNSATSRGVLVVAASGNSGAGSISYPARYANAMAVGATDQNNNRASFSQYGAGLDIVAPGVNVQSTYPGSTYASLNGTSMATPHVAGAAALVKQKNPSWSNVQIRNHLKNTATSLGSTNLYGSGLVNAEAATR

SEQ ID NO: 53195 - protein, 269 aa, Unidentified
AQSVPWGISRVQAPAAHNRGLTGSGVKVAVLDTGISTHPDLNIRGGASFVPGEPSTQDGNGHGTHVAGTIAALNNSIGVLGVAPSAELYAVKVLGASGSGSVSSIAQGLEWAGNNRMHVANLSLGSPSPSATLEQAVNSATSRGVLVVAASGNSGAGSISYPARYVNAMAVGATDQNNNRASFSQYGAGLDIVAPGVNVQSTYPGSTYASLNGTSMATPHVAGAAALVKQKNPSWSNVQIRNHLKNTATSLGSTNLYGSGLVNAEAATR

SEQ ID NO: 53196 - protein, 269 aa, Unidentified
AQSVPWGISRVQAPAAHNRGLTGSGVKVAVLDTGISTHPDLNIRGGASFVPGEPSTQDGNGHGTHVAGTIAALNNSIGVLGVAPSAELYAVKVLGASGSGSVSSIAQGLEWAGNNGMHVANLSLGSPSPSATLEQAVNSATSRGVLVVAASGNSGAGSISYPARYANAMAVGATDQNNNHASFSQYGAGLDIVAPGVNVQSTYPGSTYASLNGTSMATPHVAGAAALVKQKNPSWSNVQIRNRLKNTATSLGSTNLYGSGLVNAEAATR

SEQ ID NO: 53197 - protein, 269 aa, Unidentified
AQSVPWGISRVQAPAAHNRGLTGSGVKVAVLDTGISTHPDLNIRGGASFVPGEPSTQDGNGHGTHVAGTIAALNNSIGVLGVAPSAELYAVKVLGASGSGSVSSIAQGLEWAGNNGMHVANLSLGSESPSATLEQAVNSATSRGVLVVAASGNSGAGSISYPARYANAMAVGATDQNNNRASFSQYGAGLDIVAPGVNVQSTWPGSTYASLNGTSMATPHVAGAAALVKQKNPSWSNVQIRNHLKNTATSLGSTNLYGSGLVNAEAATR

SEQ ID NO: 53198 - protein, 269 aa, Unidentified
AQSVPWGISRVQAPAAHNRGLTGSGVKVAVLDTGISTHPDLNIRGGASFVPGEPSTQDGNGHGTHVAGTIAALNNSIGVLGVAPSAELYAVKVLGASGSGSVSSIAQGLEWAGNNGMHVANLSLGSPSPSATLEQAVNSATSRGVLVVAASGNSGAGSISYPARYANAMAVGATDQNNNRASFSQYGAWLDIVAPGVNVQSTYPGSTYASLNGTSMATPHVAGAAALVKQKNPSWSNVQIRNHLKNTATSLGSTNLYGSGLVEAEAATR

SEQ ID NO: 53199 - protein, 269 aa, Unidentified
AQSVPWGISRVQAPAAHNRGLTGSGVKVAVLDTGISTHPDRNIRGGASFVPGEPSTQDGNGHGTHVAGTIAALNNSIGVLGVAPSAELYAVKVLGASGSGSVSSIAQGLEWAGNNGMHVANLSLGSPSPSATLEQAVNSATSRGVLVVAASGNSGAGSISYPARYANAMAVGATDQNNNRASFSQYGAGLDIVAPGVNVQSTYPGSTYASLNGTSMATPHVAGAAALVKQKNPSWSNVQIRNHLKNTATSLGSTNLYGSGLVRAEAATR

SEQ ID NO: 53200 - protein, 269 aa, Unidentified
AQSVPWGISRVQAPAAHNRGLTGSGVKVAVLDTGISTHPDLNIRGGASFVPGEPSTQDGNGHGTHVAGTIAALNNSIGVLGVAWSAELYAVKVLGASGSGSVSSIAQGLEWAGNNGMHVANLSLGSPSPSATLEQAVNSATSRGVLVVAASGNSGAGSISYPARYANAMAVGATDQNNNRASFSQYGAGLDIVAPGVNVQSTAPGSTYASLNGTSMATPHVAGAAALVKQKNPSWSNVQIRNHLKNTATSLGSTNLYGSGLVNAEAATR

SEQ ID NO: 53201 - protein, 269 aa, Unidentified
AQSVPWGISRVQAPAAHNRGLTGSGVKVAVLDSGISTHPDLNIRGGASFVPGEPSTQDGNGHGTHVAGTIAALNNSIGVLGVAPSAELYAVKVLGASGSGSVSSIAQGLEWAGNNGMHVANLSLGIPSPSATLEQAVNSATSRGVLVVAASGNSGAGSISYPARYANAMAVGATDQNNNRASFSQYGAGLDIVAPGVNVQSTYPGSTYASLNGTSMATPHVAGAAALVKQKNPSWSNVQIRNHLKNTATSLGSTNLYGSGLVNAEAATR

SEQ ID NO: 53202 - protein, 269 aa, Unidentified
AQSVPWGISRVQAPAAHNRGLTGSGVKVAVLDTGISTHPDLNIRGGASFVPGEPSTQDGNGHGTHVAGTIAALNNSIGVLGVAPSAELYAVKVLGASGSGSVSSIAQGLEWAGNNGMHVANLSLGSPSPSATLEQAVNSATSRGVLVVAASGNSGAGSISYPARYANAMAVGATDQNNNRASDSQVGAGLDIVAPGVNVQSTYPGSTYASLNGTSMATPHVAGAAALVKQKNPSWSNVQIRNHLKNTATSLGSTNLYGSGLVNAEAATR

SEQ ID NO: 53203 - protein, 269 aa, Unidentified
AQSVPWGISRVQAPAAHNRGLTGRGVKVAVLDTGISTHPDRNIRGGASFVPGEPSTQDGNGHGTHVAGTIAALNNSIGVLGVAPSAELYAVKVLGASGSGSVSSIAQGLEWAGNNGMHVANLSLGSPSPSATLEQAVNSATSRGVLVVAASGNSGAGSISYPARYANAMAVGATDQNNNRASFSQYGAGLDIVAPGVNVQSTYPGSTYASLNGTSMATPHVAGAAALVKQKNPSWSNVQIRNHLKNTATSLGSTNLYGSGLVNAEAATR

SEQ ID NO: 53204 - protein, 269 aa, Unidentified
AQSVPWGISRVQAPAAHNRGLTGSGVKVAVLDTGISTHPDLNIRGGASFVPGEPSTQDGNGHGTHVAGTIAALNNSIGVLGVAPSAELYAVKVLGASGSGSVSSIAQGVEWAGNNGMHVANLSLGSESPSATLEQAVNSATSRGVLVVAASGNSGAGSISYPARYANAMAVGATDQNNNRASFSQYGAGLDIVAPGVNVQSTYPGSTYASLNGTSMATPHVAGAAALVKQKNPSWSNVQIRNHLKNTATSLGSTNLYGSGLVNAEAATR

SEQ ID NO: 53205 - protein, 269 aa, Unidentified
AQSVPWGISRVQAPAAHNRGLTGSGVKVAVLDTGISTHPDLNIRGGASFVPGEPSTQDGNGHGTHVAGTIAALNNSIGVLGVAPSAELYAVKVLGASGSGGVSSIAQGLEWAGNNGMHVANLSLGNPSPSATLEQAVNSATSRGVLVVAASGNSGAGSISYPARYANAMAVGATDQNNNRASFSQYGAGLDIVAPGVNVQSTYPGSTYASLNGTSMATPHVAGAAALVKQKNPSWSNVQIRNHLKNTATSLGSTNLYGSGLVNAEAATR

SEQ ID NO: 53206 - protein, 269 aa, Unidentified
AQSVPWGISRVQAPAAHNRKLTGSGVKVAVLDTGISTHPDLNIRGGASFVPGEPSTQDGNGHGTHVAGTIAALNNSIGVLGVAPSAELYAVKVLGASGSGSVSSIAQGLEWAGNNGMHVANLSLGSPSPSATLEQAVNSATSRGVLVVAASGNSGAGSISYPARYANAMAVGATDQNNNRASFSQYGAGLDIVAPGVNVQSTYPGSAYASLNGTSMATPHVAGAAALVKQKNPSWSNVQIRNHLKNTATSLGSTNLYGSGLVNAEAATR

SEQ ID NO: 53207 - protein, 269 aa, Unidentified
AQSVPWGISRVQAPAAHNRGLTGSGVKVAVLDTGISTHPDLNIRGGASFVPGEPSTQDGNGHGTHVAGTIAALNNSIGVLGVAPSAELYAVKVLGASGSGSLSSIAQGLEWAGNNGMHVANLSLGSPSPSATLEQAVNSATSRGVLVVAASGNSGAGSISYPARYANAMAVGATDQNNNHASFSQYGAGLDIVAPGVNVQSTYPGSTYASLNGTSMATPHVAGAAALVKQKNPSWSNVQIRNHLKNTATSLGSTNLYGSGLVNAEAATR

SEQ ID NO: 53208 - protein, 269 aa, Unidentified
AQSVPWGISRVQAPAAHNRGLTGSGVKVAVLDTGISTHPDLNIRGGASFVPGEPSTQDGEGHGTHVAGTIAALNNSIGVLGVAPSAPLYAVKVLGASGSGSVSSIAQGLEWAGNNGMHVANLSLGSPSPSATLEQAVNSATSRGVLVVAASGNSGAGSISYPARYANAMAVGATDQNNNRASFSQYGAGLDIVAPGVNVQSTYPGSTYASLNGTSMATPHVAGAAALVKQKNPSWSNVQIRNHLKNTATSLGSTNLYGSGLVNAEAATR

SEQ ID NO: 53209 - protein, 269 aa, Unidentified
AQSVPWGISRVQAPAAHNRGLTGSGVKVAVLDTGISTHPDLNIRGGASFVPGEPSTQDGNGHGTHVAGTIAALNNSIGVLGVAPNAELYAVKVLGASGSGSVSSIAQGLEWAGNNGMHVANLSLGSPSPSATLEQAVNSATSRGVLVVAASGNSGAGSISYPAXYANAMAVGATDQNNNRASFSQYGAGLDIVAPGVNVQSTYPGSTYASLNGTSMATPHVAGAAALVKQKNPSWSNVQIRNHLKNTATSLGSTNLYGSGLVNAEAATR

SEQ ID NO: 53210 - protein, 269 aa, Unidentified
AQSVPWGISRVQAPAAHNRGLTGSGVKVAVLDTGISTHPDLNIRGGASFVPGEPSTQDGNGHGTHVAGTIAALNNSIGVLGVAPSAEVYAVKVLGASGSGSVSSIAQGLEWAGNNGMHVANLSLGSPSPSATLEQAVNSATSRGVLVVAASGNSGAGSISYPARYANAMAVGATDQNNNRASFSQYGAGLDIVAPGVDVQSTYPGSTYASLNGTSMATPHVAGAAALVKQKNPSWSNVQIRNHLKNTATSLGSTNLYGSGLVNAEAATR

SEQ ID NO: 53211 - protein, 269 aa, Unidentified
AQSVPWGIARVQAPAAHNRGLTGRGVKVAVLDTGISTHPDLNIRGGASFVPGEPSTQDGNGHGTHVAGTIAALNNSIGVLGVAPSAELYAVKVLGASGSGSVSSIAQGLEWAGNNGMHVANLSLGSPSPSATLEQAVNSATSRGVLVVAASGNSGAGSISYPARYANAMAVGATDQNNNRASFSQYGAGLDIVAPGVNVQSTYPGSTYASLNGTSMATPHVAGAAALVKQKNPSWSNVQIRNHLKNTATSLGSTNLYGSGLVNAEAATR

SEQ ID NO: 53212 - protein, 269 aa, Unidentified
AQSVPWGISRVQAPAAHNRGLTGSGVKVAVLDTGISTHPDLNIRGGASFVPGEPSTQDGNGHGTHVAGTIAALNNSIGVLGVAPSAELYAVKVLGAGGSGAVSSIAQGLEWAGNNGMHVANLSLGSPSPSATLEQAVNSATSRGVLVVAASGNSGAGSISYPARYANAMAVGATDQNNNRASFSQYGAGLDIVAPGVNVQSTYPGSTYASLNGTSMATPHVAGAAALVKQKNPSWSNVQIRNHLKNTATSLGSTNLYGSGLVNAEAATR

SEQ ID NO: 53213 - protein, 269 aa, Synthetic construct
AQSVPWGISRVQAPAAHNRGLTGSGVKVAVLDTGISTHPDLNIRGGASFVPGEPSTQDGNGHGTHVAGTIAALNNSIGVLGVAPSAELYAVKVGGASGSGSVSSIAQGLEWAGNNGMHVANLSLGSPSPSATLEQAVNSATSRGVLVVAASGNSGAGSISYPARYANAMAVGATDQNNNRASFSQYGAGLDIVAPGVNVESTYPGSTYASLNGTSMATPHVAGAAALVKQKNPSWSNVQIRNHLKNTATSLGSTNLYGSGLVNAEAATR

SEQ ID NO: 53214 - protein, 269 aa, Unidentified
AQSVPWGISRVQAPAAHNRGLTGSGVKVAVLDTGISTHPDLNIRGGASFVPGEPSTQDGNGHGTHVAGTIAALNNSIGVLGVAPNAELYAVKVLGADGSGSVSSIAQGLEWAGNNGMHVANLSLGSPSPSATLEQAVNSATSRGVLVVAASGNSGAGSISYPARYANAMAVGATDQNNNRASFSQYGAGLDIVAPGVNVQSTYPGSTYASLNGTSMATPHVAGAAALVKQKNPSWSNVQIRNHLKNTATSLGSTNLYGSGLVNAEAATR

SEQ ID NO: 53215 - protein, 269 aa, Unidentified
AQSVPWGISRVQAPAAHNRGLTGSGVKVAVLDTGISTHPDLNIRGGASFVPGEPSTQDGNGHGTHVAGTIAALNNDIGVLGVAPSAELYAVKVLGASGSGSVSSIAQGLEWAGNNGMHVANLSLGSPSPSATLEQAVNSATSRGVLVVAASGNSGAGSISYPARYANAMAVGATDQNNNRASFSQYGAGLDIVAPGVNVQSTYPGSTYASLNGTSMASPHVAGAAALVKQKNPSWSNVQIRNHLKNTATSLGSTNLYGSGLVNAEAATR

SEQ ID NO: 53216 - protein, 269 aa, Unidentified
AQSVPWGISRVQAPAAHNRGLTGSGVKVAVLDTGISTHPDLNIRGGASFVPGEPSTQDGEGHGTHVAGTIAALNNSIGVLGVAPSAELYAVKVLGASGSGSVSSIAQGLEWAGNNGMHVANLSLGSPSPSATLEQAVNSATSRGVLVVAASGNSGEGSISYPARYANAMAVGATDQNNNRASFSQYGAGLDIVAPGVNVQSTYPGSTYASLNGTSMATPHVAGAAALVKQKNPSWSNVQIRNHLKNTATSLGSTNLYGSGLVNAEAATR

SEQ ID NO: 53217 - protein, 269 aa, Unidentified
AQSVPWGISRVQAPAAHNRGLTGSGVKVAVLDTGISTHPDLNIRGGASFVPGEPSYQDGNGHGTHVAGTIAALNNSIGVLGVAPSAELYAVKVLGASGSGSVSSIAQGLEWAGQNGMHVANLSLGSPSPSATLEQAVNSATSRGVLVVAASGNSGAGSISYPARYANAMAVGATDQNNNRASFSQYGAGLDIVAPGVNVQSTYPGSTYASLNGTSMATPHVAGAAALVKQKNPSWSNVQIRNHLKNTATSLGSTNLYGSGLVNAEAATR

SEQ ID NO: 53218 - protein, 269 aa, Unidentified
AQSVPWGISRVQAPAAHNRGLTGSGVKVAVLDTGISTHPDLNIRGGASFVPGEPSTQDGNGHGTHVAGTIAALNNSIGVLGVAPSAELYAVKVLGASGSGSVSSIVQGLEWAGNNGMHVANLSLGSPSPSATLEQAVNSATSRGVLVVAASGNSGAGSISYPARYANAMAVGATDQNNNRASFSQYGAGLDIVAPGVNVQSTYPGSTYASLNGTSMATPHVAGAAILVKQKNPSWSNVQIRNHLKNTATSLGSTNLYGSGLVNAEAATR

SEQ ID NO: 53219 - protein, 269 aa, Bacillus sp.
AQSVPWGISRVQAPAAHNRGLTGSGVKVAVLDTGISTHPDLNIRGGASFVPGEPSTQDGNGHGTHVAGTIAALNNSIGVLGVAPNAELYAVKVLGASGSGSVSSIAQGLEWAGNNGMHVANLSLGSPSPSATLEQAVNSATSRGVLVVAASGNSGAGSIRYPARYANAMAVGATDQNNNRASFSQYGAGLDIVAPGVNVQSTYPGSTYASLNGTSMATPHVAGAAALVKQKNPSWSNVQIRNHLKNTATSLGSTNLYGSGLVNAEAATR

SEQ ID NO: 53220 - protein, 269 aa, Unidentified
AQSVPWGISRVQAPAAHNRGLTGSGVKVAVLDTGISTHPDLNIRGGASFVPGEPSTQDGNGHGTHVAGTIAALNNSIGVLGVAPSAELYAVKVLPASGAGSVSSIAQGLEWAGNNGMHVANLSLGSPSPSATLEQAVNSATSRGVLVVAASGNSGAGSISYPARYANAMAVGATDQNNNRASFSQYGAGLDIVAPGVNVQSTYPGSTYASLNGTSMATPHVAGAAALVKQKNPSWSNVQIRNHLKNTATSLGSTNLYGSGLVNAEAATR

SEQ ID NO: 53221 - protein, 269 aa, Unidentified
AQSVPWGISRVQAPAAHNRGLTGSGVKVAVLDTGISTHPDLDIRGGASFVPGEPSTQDGNGHGTHVAGTIAALNNSIGVLGVAPSAELYAVKVLGASGSGSVSSIAQGLEWAGNNGMHVANLSLGSPSPSATLEQAVNSATSRGVLVVAASGNSGAGSISYPARYANAMAVCATDQNNNRASFSQYGAGLDIVAPGVNVQSTYPGSTYASLNGTSMATPHVAGAAALVKQKNPSWSNVQIRNHLKNTATSLGSTNLYGSGLVNAEAATR

SEQ ID NO: 53222 - protein, 269 aa, Unidentified
AQSVPWGISRVQAPAAHNRGLTGSGVKVAVLDTGISTHPDLNIRGGASFVPGEPSTQDGNGHGTHVAGTIAALNNSIGVLGVAPSAPLYAVKVLGASGSGSVSSIAQGLEWAGNNGMHVANLSLGSPSPSATLEQAVNSATSRGVLVVAASGNSGAESISYPARYANAMAVGATDQNNNRASFSQYGAGLDIVAPGVNVQSTYPGSTYASLNGTSMATPHVAGAAALVKQKNPSWSNVQIRNHLKNTATSLGSTNLYGSGLVNAEAATR

SEQ ID NO: 53223 - protein, 269 aa, Unidentified
AQSVPWGISRVQAPAAHNRGLTGSGVKVAVLDTGISTHPDLNIRGGASFVPGEPSTQDGNGHGTHVAGTIAALNNSIGVLGVAPNAELYAVKVLGASGTGSVSSIAQGLEWAGNNGMHVANLSLGSPSPSATLEQAVNSATSRGVLVVAASGNSGAGSISYPARYANAMAVGATDQNNNRASFSQYGAGLDIVAPGVNVQSTYPGSTYASLNGTSMATPHVAGAAALVKQKNPSWSNVQIRNHLKNTATSLGSTNLYGSGLVNAEAATR

SEQ ID NO: 53224 - protein, 269 aa, Unidentified
AQSVPWGISRVQAPAAHNRGLAGSGVKVAVLDTGISTHPDLNIRGGASFVPGEPSTQDGNGHGTHVAGTIAALNNSIGVLGVAPSAELYAVKVLGASGSGSVSSIAQGLEWAGNNGMHVANLSLGSPSPSATLEQAVNSATSRGVLVVAASGNSGAGSISYPARYANAMAVGATDQNNNRASFSQYGAGLDIVAPGVNVQSTYPGSTYASLNGTSMATPHVAGAAALVKQKNPSWSNVQIRNHLKNTATSLGSTNLYGSGLVNAFAATR

SEQ ID NO: 53225 - protein, 269 aa, Unidentified
AQSRPWGISRVQAPAAHNRGLTGSGVKVAVLDTGISTHPDLNIRGGASFVPGEPSTQDGNGHGTHVAGTIAALNNSIGVLGVAPSAELYAVKVLGASGSGSVSSIAQGLEWAGNNGMHVANLSLGSPSPSATLEQAVNSATSRGVLVVAASGNSGAGSISYPARYANAMAVGATDQNNNRASFSQYGAGLDIVAPGVNVQSTYPGSTYASLNGTSMATPHVAGAAALVKQKNPSWRNVQIRNHLKNTATSLGSTNLYGSGLVNAEAATR

SEQ ID NO: 53226 - protein, 269 aa, Unidentified
AQSVPWGISRVQAPAAHNRGLTGSGVKVAVLDTGISTHPDLNIRGGASFVPGEPSTQDGNGHGTHVAGTIAALNNSIGVLGVAPSAELYAVKVLGASGSGSVSSIAQGLEWAGNNGMHVANLSLGSPSPSATLEQAANSATSRGVLVAAASGNSGAGSISYPARYANAMAVGATDQNNNRASFSQYGAGLDIVAPGVNVQSTYPGSTYASLNGTSMATPHVAGAAALVKQKNPSWSNVQIRNHLKNTATSLGSTNLYGSGLVNAEAATR

SEQ ID NO: 53227 - protein, 269 aa, Bacillus sp.
AQSVPWGISRVQAPAAHNRGLTGSGVKVAVLDTGISTHPDLNIRGGASFVPGEPSTQDGNGHGTHVAGTIAALNNSIGVLGVAPNAELYAVKVLGASGSGSVSSIAQGLEWAGNNGLHVANLSLGSPSPSATLEQAVNSATSRGVLVVAASGNSGAGSISYPARYANAMAVGATDQNNNRASFSQYGAGLDIVAPGVNVQSTYPGSTYASLNGTSQATPHVAGAAALVKQKNPSWSNVQIRNHLKNTATSLGSTNLYGSGLVNAEAATR

SEQ ID NO: 53228 - protein, 269 aa, Bacillus lentus
AQSVPWGISRVQAPAAHNRGLTGSGVKVAVLDTGISTHPDLNIRGGASFVPGEPSTQDGNGHGTHVAGTIAALNNSIGVLGVAPRAELYAVKVLGASGSGSVSSIAQGLEWAGNNGMHVANLSLGSPSPSATLEQAVNSATSRGVLVVAASGNSGAGSISYPARYANAMAVGATDQNNNRADFSQYGAGLDIVAPGVNVQSTYPGSTYASLNGTSMATPHVAGAAALVKQKNPSWSNVQIRNHLKNTATSLGSTNLYGSGLVNAEAATR

SEQ ID NO: 53229 - protein, 269 aa, Synthetic construct
AQSVPWGISRVQAPAAHNRGLTGSGVKVAVLDTGISTHPDLNIRGGASFVPGEPSTSDGEGHGTHVAGTIAALNNSIGVLGVAPSAELYAVKVLGASGSGSVSSIAQGLEWAGNNGMHVANLSLGSPSPSATLEQAVNSATSRGVLVVAASGNSGAGSISYPARYANAMAVGATDQNNNRASFSQYGAGLDIVAPGVNVQSTYPGSTYASLNGTSMATPHVAGAAALVKQKNPSWSNVQIRNHLKNTATSLGSTNLYGSGLVNAEAATR

SEQ ID NO: 53230 - protein, 269 aa, Unidentified
AQSVPWGISRVQAPAAHNRGLTGSGVKVAVLDTGISTHPDLNIRGGASFVPGEPSTQDGNGHGTHVAGTIAALNNSIGVLGVAPSAELYAVKVLGASGSGSLSSIAQGLEWAGNNGMHVANLSLGSPSPSATLEQAVNSATSRGVLVVAASGNSGAGSISYPARYANAMAVGATDQNNNRASFSQYGAGLDIVAPGVNVQSTEPGSTYASLNGTSMATPHVAGAAALVKQKNPSWSNVQIRNHLKNTATSLGSTNLYGSGLVNAEAATR

SEQ ID NO: 53231 - protein, 269 aa, Unidentified
AQSVPWGISRVQAPAAHNRGLTGSGVKVAVLDTGISTHPDLNIRGGASFVPGEPSTQDGNGHGTHVAGTIAALNNSIGVLGVAPSAELYAVKVLGASGSGAISSIAQGLEWAGNNGMHVANLSLGSPSPSATLEQAVNSATSRGVLVVAASGNSGAGSISYPARYANAMAVGATDQNNNRASFSQYGAGLDIVAPGVNVQSTYPGSTYASLNGTSMATPHVAGAAALVKQKNPSWSNVQIRNHLKNTATSLGSTNLYGSGLVNAEAATR

SEQ ID NO: 53232 - protein, 269 aa, Unidentified
AQSVPWGISRVQAPAAHNRGLTGSGVKVAVLDTGISTHPDLNIRGGASFVPGEPSTQDGNGHGTHVAGTIAALNNSIGVLGVAPSAELYAVKVLGASGSGSVSSIAQGLEWAGNNGMHVANLSLGSPSPSATLEQAVNSATSRGVLVVAASGNSGAGSISYPARYANAMAVGATDQNNNRASFSQYGAGLDIVAPGVNVQSTYPGSTYASLNGTSMATPHVAGAAALVKQKNPSRRNVQIRNHLKNTATSLGSTNLYGSGLVNAEAATR

SEQ ID NO: 53233 - protein, 269 aa, Unidentified
AQSVPWGISRVQAPAAHNRGLTGSGVKVAVLDTGISTHPDLNIRGGASFVPGEPRTQDGNGHPTHVAGTIAALNNSIGVLGVAPSAELYAVKVLGASGSGSVSSIAQGLEWAGNNGMHVANLSLGSPSPSATLEQAVNSATSRGVLVVAASGNSGAGSISYPARYANAMAVGATDQNNNRASFSQYGAGLDIVAPGVNVQSTYPGSTYASLNGTSMATPHVAGAAALVKQKNPSWSNVQIRNHLKNTATSLGSTNLYGSGLVNAEAATR

SEQ ID NO: 53234 - protein, 269 aa, Unidentified
AQSVPWGISRVQAPAAHNRGLTGSGVKVAVLDTGISTHPDLNIRGGASFVPGEPSTQDGNGHGTHVAGTIAALNNSIGVLGVAPSAELYAVKVLGASGSGSVSSIAQGLEWAGNNGMHVANLSLGSPSPSATLEQAVNSATSRGVLVVAASGNSGEGSISYPARYANAMAVGATDQNNNRASFSQYGAGLDIVAPGVNVQSTEPGSTYASLNGTSMATPHVAGAAALVKQKNPSWSNVQIRNHLKNTATSLGSTNLYGSGLVNAEAATR

SEQ ID NO: 53235 - protein, 269 aa, Synthetic construct
AQSVPWGISRVQAPAAHNRGLTGSGVKVAVLDTGISTHPDLNIRGGAEFVPGEPSTQDGNGHGTHVAGTIAALNNSIGVLGVAPSAELYAVKVLGASGSGSVSSIAQGLEWAGNNGMHVANLSLGSPSPSATLEQAVNSATSRGVLVVAASGNSGAGSISYPARYANAMAVGATDQNNNRASFSQYGAGLDIVAPGVNVQSTYPGSTYASLNGTSMATPHVAGAAALVKQKNPSWSNVQIRNHLKNTATSLGSTNLYGSGLVNATAATR

SEQ ID NO: 53236 - protein, 269 aa, Unidentified
AQSVPWGISRVQAPAAHNRGLTGSGVKVAVLDTGISTHPDLNIRGGASFVPGEPSTQDGNGHGTHVAGTIAALNNSIGVLGVAPSAELYAVKVLGASGAGSVSSIAQGLEWAGNNGMHVANLSLGSPSPSATLEQAVNSATSRGVLVVAASGNSGAESISYPARYANAMAVGATDQNNNRASFSQYGAGLDIVAPGVNVQSTYPGSTYASLNGTSMATPHVAGAAALVKQKNPSWSNVQIRNHLKNTATSLGSTNLYGSGLVNAEAATR

SEQ ID NO: 53237 - protein, 269 aa, Unidentified
AQSVPWGISRVQAPAAHNRGLTGSGVKVAVLDTGISTHPDLNIRGGASFVPGEPSTQDGNGHGTHVAGTIAALNNSIGVLGVAPSAELYAVKVLGASGSGSVSSIAQGLEWAGNNGMHVANLSLGNESPSATLEQAVNSATSRGVLVVAASGNSGAGSISYPARYANAMAVGATDQNNNRASFSQYGAGLDIVAPGVNVQSTYPGSTYASLNGTSMATPHVAGAAALVKQKNPSWSNVQIRNHLKNTATSLGSTNLYGSGLVNAEAATR

SEQ ID NO: 53238 - protein, 269 aa, Unidentified
AQSVPWGISRVQAPAAHNRGLAGSGVKVAVLDTGISTHPDLNIRGGASFVPGEPSTQDGNGHGTHVAGTIAALNNSIGVLGVAPSAELYAVKVLGASGSGSVSSIAQGLEWAGNNGMHVANLSLGSPSPSATLEQAVNSATSRGVIVVAASGNSGAGSISYPARYANAMAVGATDQNNNRASFSQYGAGLDIVAPGVNVQSTYPGSTYASLNGTSMATPHVAGAAALVKQKNPSWSNVQIRNHLKNTATSLGSTNLYGSGLVNAEAATR

SEQ ID NO: 53239 - protein, 269 aa, Unidentified
AQSVPWGISRVQAPAAHNRGLTGSGVKVAVLDTGISTHPDLNIRGGASFVPGEPSTQDGNGHGTHVAGTIAALNNSIGVLGVAPSAELYAVKVLGASGAGSVSSIAQGLEWAGNNGMHVANLSLGNPSPSATLEQAVNSATSRGVLVVAASGNSGAGSISYPARYANAMAVGATDQNNNRASFSQYGAGLDIVAPGVNVQSTYPGSTYASLNGTSMATPHVAGAAALVKQKNPSWSNVQIRNHLKNTATSLGSTNLYGSGLVNAEAATR

SEQ ID NO: 53240 - protein, 269 aa, Unidentified
AQSVPWGISRVQAPAAHNRGLTGSGVKVAVLDTGISTHPDLNIRGGASFVPGEPSTQDGNGHGTHVAGTIAALNNGIGVLGVAPSAELYAVKVLGASGSGSVSSIAQGLEWAGNNSMHVANLSLGSPSPSATLEQAVNSATSRGVLVVAASGNSGAGSISYPARYANAMAVGATDQNNNRASFSQYGAGLDIVAPGVNVQSTYPGSTYASLNGTSMATPHVAGAAALVKQKNPSWSNVQIRNHLKNTATSLGSTNLYGSGLVNAEAATR

SEQ ID NO: 53241 - protein, 269 aa, Unidentified
AQSVPWGISRVQAPAAHNRKLTGSGVKVAVLDTGISTHPDLRIRGGASFVPGEPSTQDGNGHGTHVAGTIAALNNSIGVLGVAPSAELYAVKVLGASGSGSVSSIAQGLEWAGNNGMHVANLSLGSPSPSATLEQAVNSATSRGVLVVAASGNSGAGSISYPARYANAMAVGATDQNNNRASFSQYGAGLDIVAPGVNVQSTYPGSTYASLNGTSMATPHVAGAAALVKQKNPSWSNVQIRNHLKNTATSLGSTNLYGSGLVNAEAATR

SEQ ID NO: 53242 - protein, 269 aa, Unidentified
AQSVPWGISRVQAPAAHNRGLTGSGVKVAVLDTGISTHPDLNIRGGASFVPGEPSTQDGNGHGTHVAGTIAALNNSIGVLGVAPSAELYAVKVLGASGSGGVSSIAQGLEWAGNNGMHVANLSLGSPSPSATLEQAVNSATSRGVLVVAASGNSGAGSISYPARYANAMAVGATDQNNNRASFSQYGAGLDIVAPGVNVQSTYPGSTYASLNGTSMATPHVAGAAALVKQKNPSWSNVQIRNRLKNTATSLGSTNLYGSGLVNAEAATR

SEQ ID NO: 53243 - protein, 269 aa, Unidentified
AQSVPWGISRVQAPAAHNRGLTGSGVKVAVLDTGISTHPDLNIRGGASFVPGEPSTQDGNGHGTHVAGTIAALNNSIGVLGVAPSAELYAVKVLGASGSGGVSSIAQGLEWAGNNGMHVANLSLGSPSPSATLEQAVNSATSRGVLVVAASGNSGAGSISYPARYANAMAVGATDQNNNRASFSQYGAGLDIVAPGVNVQSTYPGSTYASLNGTSMATPHVAGAAALVKQKNPSWSNVQIRNHLKNTATSLGSTNLYGSGLVNAFAATR

SEQ ID NO: 53244 - protein, 269 aa, Unidentified
AQSVPWGISRVQAPAAHNRGLTGRGVKVAVLDTGISTHPDLNIRGGASFVPGEPSTQDGNGHGTHVAGTIAALNNSIGVLGVAPSAELYAVKVLGASGSGSVSSIAQGLEWAGNNGMHVANLSLGSPSPSATLEQAVNSATSRGVLVVAASGNSGAGSISYPARYANAMAVGATDQNNNRADFSQYGAGLDIVAPGVNVQSTYPGSTYASLNGTSMATPHVAGAAALVKQKNPSWSNVQIRNHLKNTATSLGSTNLYGSGLVNAEAATR

SEQ ID NO: 53245 - protein, 269 aa, Unidentified
AQSVPWGISRVQAPAAHNRGLTGSGVKVAVLDTGISTHPDLNIRGGASFVPGEPSTQDGNGHGTHVAGTIAALNNSIGVLGVAPSAELYAVKVLGASGSGSVSSIAQGLEWAGNNGMHVANLSLGSPSPSATLEQAVNSATSRGVLVVAASGNSGAESISYPARYANAMAVGATDQNNNRASFSQYGAGLDIVAPGVNVQSTYPGSTYASLNGTSMATPHVAGAAALVKQKNPSWSNVQIRNRLKNTATSLGSTNLYGSGLVNAEAATR

SEQ ID NO: 53246 - protein, 269 aa, Unidentified
AQSVPWGISRVQAPAAHNRRLTGSGVKVAVLDTGISTHPDLRIRGGASFVPGEPSTQDGNGHGTHVAGTIAALNNSIGVLGVAPSAELYAVKVLGASGSGSVSSIAQGLEWAGNNGMHVANLSLGSPSPSATLEQAVNSATSRGVLVVAASGNSGAGSISYPARYANAMAVGATDQNNNRASFSQYGAGLDIVAPGVNVQSTYPGSTYASLNGTSMATPHVAGAAALVKQKNPSWSNVQIRNHLKNTATSLGSTNLYGSGLVNAEAATR

SEQ ID NO: 53247 - protein, 269 aa, Unidentified
AQSVPWGIARVQAPAAHNRGLTGSGVKVAVLDTGISTHPDLNIRGGASFVPGEPSTQDGNGHGTHVAGTIAALNNSIGVLGVAPSAELYAVKVLGASGSGSVSSIAQGLEWARNNGMHVANLSLGSPSPSATLEQAVNSATSRGVLVVAASGNSGAGSISYPARYANAMAVGATDQNNNRASFSQYGAGLDIVAPGVNVQSTYPGSTYASLNGTSMATPHVAGAAALVKQKNPSWSNVQIRNHLKNTATSLGSTNLYGSGLVNAEAATR

SEQ ID NO: 53248 - protein, 269 aa, Unidentified
AQSVPWGISRVQAPASHNRGLTGSGVKVAVLDTGISTHPDLNIRGGASFVPGEPSTQDGNGHGTHVAGTIAALNNSIGVLGVAPSAELYAVKVLGASGAGSVSSIAQGLEWAGNNGMHVANLSLGSPSPSATLEQAVNSATSRGVLVVAASGNSGAGSISYPARYANAMAVGATDQNNNRASFSQYGAGLDIVAPGVNVQSTYPGSTYASLNGTSMATPHVAGAAALVKQKNPSWSNVQIRNHLKNTATSLGSTNLYGSGLVNAEAATR

SEQ ID NO: 53249 - protein, 269 aa, Unidentified
AQSVPWGISRVQAPAAHRRGLTGSGVKVAVLDTGISTHPDLNIRGGASFVPGEPSTQDGNGHGTHVAGTIAALNNSIGVLGVAPSAELYAVKVLGASGSGSVSSIAQGLEWAGNNGMHVANLSLGSPSPSATLEQAVNSATSRGVLVVAASGNSGAGSISYPARYANAMAVGATDQNNNRASFSQYGAGLDIVAPGVNVQSTYPGSTYASLNGTSMATPHVAGAAALVKQKNPSWSNVRIRNHLKNTATSLGSTNLYGSGLVNAEAATR

SEQ ID NO: 53250 - protein, 269 aa, Unidentified
AQSVPWGISRVQAPAAHNRKLTGSGVKVAVLDTGISTHPDLNIRGGASFVPGEPSTQDGNGHGTHVAGTIAALNNSIGVLGVAPSAELYAVKVLGASGSGSVSSIAQGLEWAGNNGMHVANLSLGSPSPSATLEQAVNSATSRGVLVVAASGNSGAGSISYPARYANAMAVGATDQNNNRASFSQYGAGLDIVAPGVNVQSTYPGSTYASENGTSMATPHVAGAAALVKQKNPSWSNVQIRNHLKNTATSLGSTNLYGSGLVNAEAATR

SEQ ID NO: 53251 - protein, 269 aa, Unidentified
AQSVPWGISRVQAPAAHNRGLTGSGVKVAVLDTGISTHPDLNIRGGASFVPGEPSTQDGNGHGTHVAGTIAALNNSIGVLGVAPSAELYAVKVLGAAGSGSLSSIAQGLEWAGNNGMHVANLSLGSPSPSATLEQAVNSATSRGVLVVAASGNSGAGSISYPARYANAMAVGATDQNNNRASFSQYGAGLDIVAPGVNVQSTYPGSTYASLNGTSMATPHVAGAAALVKQKNPSWSNVQIRNHLKNTATSLGSTNLYGSGLVNAEAATR

SEQ ID NO: 53252 - protein, 269 aa, Unidentified
AQSVPWGISRVQAPASHNRGLTGSGVKVAVLDTGISTHPDLNIRGGASFVPGEPSTQDGNGHGTHVAGTIAALNNSIGVLGVAPSAPLYAVKVLGASGSGSVSSIAQGLEWAGNNGMHVANLSLGSPSPSATLEQAVNSATSRGVLVVAASGNSGAGSISYPARYANAMAVGATDQNNNRASFSQYGAGLDIVAPGVNVQSTYPGSTYASLNGTSMATPHVAGAAALVKQKNPSWSNVQIRNHLKNTATSLGSTNLYGSGLVNAEAATR

SEQ ID NO: 53253 - protein, 269 aa, Unidentified
AQSVPWGISRVQAPAAHNRGLTGSGVKVAVLDTGISTHPDRNIRGGASFVPGEPSTQDGNGHGTHVAGTIAALNNSIGVLGVAPSAELYAVKVLGASGSGSVSSIAQGLEWAGNNGMHVANLSLGSPSPSATLEQAVNSATSRGVLVVAASGNSGAGSISYPARYANAMAVGATDQNNNRASFSQYGAGLDIVAPGVNVQSTYPGSTYASLNGTSMATPHVAGAAALVKQKNPSWSNVQIRNHLKNTATSLGSTNLYGSGLVNALAATR

SEQ ID NO: 53254 - protein, 269 aa, Unidentified
AQSVPWGISRVQAPAAHNRGLTGSGVKVAVLDTGISTHPDLNIRGGASFVPGEPSTQDGNGHGTHVAGTIAALNNSIGVLGVAPSAELYAVKVLGASGSGSLSSIAQGLEWAGNNGMHVANLSLGSPSPSATLEQAVNSATSRGVLVVAASGNSGEGSISYPARYANAMAVGATDQNNNRASFSQYGAGLDIVAPGVNVQSTYPGSTYASLNGTSMATPHVAGAAALVKQKNPSWSNVQIRNHLKNTATSLGSTNLYGSGLVNAEAATR

SEQ ID NO: 53255 - protein, 269 aa, Bacillus sp.
AQSVPWGISRVQAPAAHNRGLTGSGVKVAVLDTGISTHPDLNIRGGASFVPGEPSTQDGNGHGTHVAGTIAALNNSIGVLGVAPSAELYAVKVLGASGSGSVSSIAQGLEWAGNNGTHVANLSLGSPSPSATLEQAVNSATSRGVLVVAASGNSGAGSISYPARYANAMAVGATDQNNNRASFSQYGAGLDIVAPGVNVQSTYPGSTYASLNGTSMATPHVAGVAALVKQKNPSWSNVQIRNHLKNTATSLGSTNLYGSGLVNAEAATR

SEQ ID NO: 53256 - protein, 269 aa, Unidentified
AQSVPWGISRVQAPAAHNRGLTGSGVKVAVLDTGISTHPDLNIRGGASFVPGEPSTQDGNGHGTHVAGTIAALNNNIGVLGVAPSAELYAVKVLAASGNGSVSSIAQGLEWAGNNGMHVANLSLGSPSPSATLEQAVNSATSRGVLVVAASGNSGAGSISYPARYANAMAVGATDQNNNRASFSQYGAGLDIVAPGVNVQSTYPGSTYASLNGTSSATPHVAGAAALVKQKNPSWSNVQIRNHLKNTATSLGSTNLYGSGLVNAEAATR

SEQ ID NO: 53257 - protein, 269 aa, Unidentified
AQSVPWGISRVQAPAAHRRGLTGSGVKVAVLDTGISTHPDLNITGGASFVPGEPSTQDGNGHGTHVAGTIAALNNSIGVLGVAPSAELYAVKVLGASGSGSVSSIAQGLEWAGNNGMHVANLSLGSPSPSATLEQAVNSATSRGVLVVAASGNSGAGSISYPARYANAMAVGATDQNNNRASFSQYGAGLDIVAPGVNVQSTYPGSTYASLNGTSMATPHVAGAAALVKQKNPSWSNVQIRNHLKNTATSLGSTNLYGSGLVNAEAATR

SEQ ID NO: 53258 - protein, 269 aa, Unidentified
AQSVPWGISRVQAPAAHNRGLTGSGVKVAVLDTGISTHPDLNIRGGASFVPGEPSTQDGNGHGTHVAGTIAALNNSIGVRGVAPSAELYAVKVLGASGSGSVSSIAQGLEWAGNNGMHVANLSLGSPSPSATLEQAVNSATSRGVLVVAASGNSGAGSISYPARYANAMAVGATDQNNNRASFSQYGAGLDIVAPGVNVQSTYPGSTYASLNGTSMATPHVAGAAALVKQKNPSWSNVQIRNHLKNTATSLGSTNLYGSGLVRAEAATR

SEQ ID NO: 53259 - protein, 269 aa, Unidentified
AQSVPWGISRVQAPAAHNRGLTGRGVKVAVLDTGISTHPDLNIRGGASFVPGEPSTQDGNGHGTHVAGTIAALNNSIGVRGVAPSAELYAVKVLGASGSGSVSSIAQGLEWAGNNGMHVANLSLGSPSPSATLEQAVNSATSRGVLVVAASGNSGAGSISYPARYANAMAVGATDQNNNRASFSQYGAGLDIVAPGVNVQSTYPGSTYASLNGTSMATPHVAGAAALVKQKNPSWSNVQIRNHLKNTATSLGSTNLYGSGLVNAEAATR

SEQ ID NO: 53260 - protein, 269 aa, Unidentified
AQSVPWGISRVQAPAAHNRGLTGSGVKVAVLDTGISTHPDLNIRGGASFVPGEPSTQDGNGHGTHVAGTIAALNNSIGVLGVAPSAELYAVKVLGAAGSASVSSIAQGLEWAGNNGMHVANLSLGSPSPSATLEQAVNSATSRGVLVVAASGNSGAGSISYPARYANAMAVGATDQNNNRASFSQYGAGLDIVAPGVNVQSTYPGSTYASLNGTSMATPHVAGAAALVKQKNPSWSNVQIRNHLKNTATSLGSTNLYGSGLVNAEAATR

SEQ ID NO: 53261 - protein, 269 aa, Unidentified
AQSVPWGISRVQAPAAHNRGLTGSGVKVAVLDTGISTHPDLNIRGGASFVPGEPSTQDGNGHGTHVAGTIAALNNSIGVLGVAPSAELYAVKVLGASGSGSVSSIAQGLEWAGNNGMHVANLSLGSPSPSATLEQAVNSATSRGVLVVAASGNSGEESISYPARYANAMAVGATDQNNNRASFSQYGAGLDIVAPGVNVQSTYPGSTYASLNGTSMATPHVAGAAALVKQKNPSWSNVQIRNHLKNTATSLGSTNLYGSGLVNAEAATR

SEQ ID NO: 53262 - protein, 269 aa, Unidentified
AQSVPWGISRVQAPAAHNRGLTGRGVKVAVLDTGISTHPDLNIRGGASFVPGEPSTQDGNGHGTHVAGTIAALNNSIGVLGVAPSAELYAVKVLGASGSGSVSSIAQGLEWAGNNGMHVANLSLGSPSPSATLEQAVNSATSRGVLVVAASGNSGAGSISYPARYANAMAVGATDQNNNRASFSQYGAGLDIVAPGVNVQSTYPGSTYASLNGTSMATPHVAGAAALVFQKNPSWSNVQIRNHLKNTATSLGSTNLYGSGLVNAEAATR

SEQ ID NO: 53263 - protein, 269 aa, Unidentified
AQSVPWGISRVQAPAAHNRGLTGSGVKVAVLDTGISTHPDLNIRGGASFVPGEPSTQDGNGHGTHVAGTIAALNNSIGVLGVAPSAELYAVKVLGASGSGGVSSIAQGLEWAGNNGMHVANLSLGSPSPSATLEQAVNSATSRGVLVVAASGNSGAGSISYPARYANAMAVGATDQNNNRADFSQYGAGLDIVAPGVNVQSTYPGSTYASLNGTSMATPHVAGAAALVKQKNPSWSNVQIRNHLKNTATSLGSTNLYGSGLVNAEAATR

SEQ ID NO: 53264 - protein, 269 aa, Unidentified
AQSVPWGISRVQAPAAHNRGLTGSGVKVAVLDTGISTHPDLNIRGGASFVPGEPSTQDGNGHGTHVAGTIAALNNSIGVLGVAPSAELYAVKVLAASGGGSVSSIAQGLEWAGNNGMHVANLSLGSPSPSATLEQAVNSATSRGVLVVAASGNSGAGSISYPARYANAMAVGATDQNNNRADFSQYGAGLDIVAPGVNVQSTYPGSTYASLNGTSSATPHVAGAAALVKQKNPSWSNVQIRNHLKNTATSLGSTNLYGSGLVNAEAATR

SEQ ID NO: 53265 - protein, 269 aa, Unidentified
AQSRPWGISRVQAPAAHNRGLTGSGVKVAVLDTGISTHPDLNIRGGASFVPGEPSTQDGNGHGTHVAGTIAALNNSIGVLGVAPSAELYAVKVLGASGSGSVSSIAQGLEWAGNNGMHVANLSLGSPSPSATLEQAVNSATSRGVLVVAASGNSGAGSISYPARYANAMAVGATDQNNNRASFSQYGAGLDIVAPGVNVQSTYPGSTYASLNGTSMATPHVAGAAALVKQKNPSWSNRQIRNHLKNTATSLGSTNLYGSGLVNAEAATR

SEQ ID NO: 53266 - protein, 269 aa, Unidentified
AQSVPWGISRVQAPAAHNRGLRGSGVKVAVLDTGISTHPDRNIRGGASFVPGEPSTQDGNGHGTHVAGTIAALNNSIGVLGVAPSAELYAVKVLGASGSGSVSSIAQGLEWAGNNGMHVANLSLGSPSPSATLEQAVNSATSRGVLVVAASGNSGAGSISYPARYANAMAVGATDQNNNRASFSQYGAGLDIVAPGVNVQSTYPGSTYASLNGTSMATPHVAGAAALVKQKNPSWSNVQIRNHLKNTATSLGSTNLYGSGLVNAEAATR

SEQ ID NO: 53267 - protein, 269 aa, Unidentified
AQSVPWGISRVQAPAAHNRGLTGSGVKVAVLDTGISTHPDLNIRGGASFVPGEPSTQDGNGHGTHVAGTIAALNNSIGVLGVAPSAELYAVKVLGASGSGSLSSIAQGLEWAGNNGMHVANLSLGSPSPSATLEQAVNSATSRGVLVVAASGNSGAGSISYPARYANAMAVGATDQNNNRASFSQYGAGLDIVAPGVNVQSTYPGSTYASLNGTSMATPHVAGAAALVKQKNPSWSNVQIRNRLKNTATSLGSTNLYGSGLVNAEAATR

SEQ ID NO: 53268 - protein, 269 aa, Unidentified
AQSVPWGISRVQAPAAHNRGLTGSGVKVAVLDTGISTHPDLNIRGGASFVPGEPSTQDGNGHGTHVAGTIAALNNSIGVLGVAPSAELYAVKVLGASGSGSVSSIAQGLEWAGNNGMHVANLSLGSPSPSATLEQAVNSATSRGVLVVAASGNSGAGSISYPARYANAMAVGATDQNNNRASFSQYGAGLDIVAPGVNVQSTYPGSTYASLNGTSMATPHVAGAAALVKQKNPSWRNVQIRNHLKNTATSLGSTNLYGSGLVRAEAATR

SEQ ID NO: 53269 - protein, 269 aa, Unidentified
AQSVPWGISRVQAPAAHNRGLTGSGVKVAVLDTGISTHPDLNIRGGASFVPGEPSTQDGNGHGTHVAGTIAALNNSIGVLGVAPSAELYAVKVLSASGNGSVSSIAQGLEWAGNNGMHVANLSLGSPSPSATLEQAVNSATSRGVLVVAASGNSGAGSISYPARYANAMAVGATDQNNNRADFSQYGAGLDIVAPGVNVQSTYPGSTYASLNGTSSATPHVAGAAALVKQKNPSWSNVQIRNHLKNTATSLGSTNLYGSGLVNAEAATR

SEQ ID NO: 53270 - protein, 269 aa, Unidentified
AQSVPWGISRVQAPAAHNRGLTGSGVKVAVLDTGISTHPDLNIRGGASFVPGEPSTQDGNGHGTHVAGTIAALNNGIGVLGVAPSAELYAVKVLGASGSGSVSSIAQGLEWAGNNDMHVANLSLGSPSPSATLEQAVNSATSRGVLVVAASGNSGAGSISYPARYANAMAVGATDQNNNRASFSQYGAGLDIVAPGVNVQSTYPGSTYASLNGTSMATPHVAGAAALVKQKNPSWSNVQIRNHLKNTATSLGSTNLYGSGLVNAEAATR

SEQ ID NO: 53271 - protein, 269 aa, Unidentified
AQSVPWGISRVQAPAAHRRGLTGSGVKVAVLDTGISTHPDLNIRGGASFVPGEPSTQDGNGHGTHVAGTIAALNNSIGVLGVAPSAELYAVKVLGASGSGSVSSIAQGLEWAGNNGMHVANLSLGSPSPSATLEQAVNSATSRGVLVVAASGNSGAGSISYPARYANAMAVGATDQNNNRASFSQYGAGLDIVAPGVNVQSTYPGSTYASLNGTSMATPHVAGAAALVKQKNPSWRNVQIRNHLKNTATSLGSTNLYGSGLVNAEAATR

SEQ ID NO: 53272 - protein, 269 aa, Unidentified
AQSRPWGISRVQAPAAHNRGLTGSGVKVAVLDTGISTHPDLNIRGGASFVPGEPSTQDGNGHGTHVAGTIAALNNSIGVLGVAPSAELYAVKVLGASGSGSVSSIAQGLEWAGNNGMHVANLSLGSPSPSATLEQAVNSATSRGVLVVAASGNSGAGSISYPARYANAMAVGATDQNNNRASFSQYGAGLDIVAPGVNVQSTYPGSTYASLNGTSMATPHVAGAAALVKQKNPSWSNVQIRNRLKNTATSLGSTNLYGSGLVNAEAATR

SEQ ID NO: 53273 - protein, 269 aa, Synthetic construct
AQSVPWGISRVQAPAAHNRGLTGSGVKVAVLDTGISTHPDLNIRGGASFVPGEPSTQDGNGHGTHVAGTIAALDNSIGVLGVAPSAELYAVKVLGASGRGSVSSIAQGLEWAGNNGMHVANLSLGSPSPSATLEQAVNSATSRGVLVVAASGNSGAGSISYPARYANAMAVGATDQNNNRASFSQYGAGLDIVAPGVNVQSTYPGSTYASLNGTSMATPHVAGAAALVKQKNPSWSNVQIRNHLKNTATSLGSTNLYGSGLVNAEAATR

SEQ ID NO: 53274 - protein, 269 aa, Unidentified
AQSVPWGISRVQAPAAHNRGLTGSGVKVAVLDTGISTHPDLNIRGGASFVPGEPSTQDGNGHGTHVAGTIAALNNSIGVLGVAPSAELYAVKVLGFAGSGSVSSIAQGLEWAGNNGMHVANLSLGSPSPSATLEQAVNSATSRGVLVVAASGNSGAGSISYPARYANAMAVGATDQNNNRASFSQYGAGLDIVAPGVNVQSTYPGSTYASLNGTSMATPHVAGAAALVKQKNPSWSNVQIRNHLKNTATSLGSTNLYGSGLVNAEAATR

SEQ ID NO: 53275 - protein, 269 aa, Unidentified
AQSVPWGISRVQAPAAHNRGLTGSGVKVAVLDSGISTHPDLNIRGGASFVPGEPSTQDGNGHGTHVAGTIAALNNSIGVLGVAPSAELYAVKVLGASGSGSVSSIAQGLEWAGNNRMHVANLSLGSPSPSATLEQAVNSATSRGVLVVAASGNSGAGSISYPARYANAMAVGATDQNNNRASFSQYGAGLDIVAPGVNVQSTYPGSTYASLNGTSMATPHVAGAAALVKQKNPSWSNVQIRNHLKNTATSLGSTNLYGSGLVNAEAATR

SEQ ID NO: 53276 - protein, 269 aa, Bacillus subtilis
AQSVPWGISRVQAPAAHNRGLTGSGVKVAVLDTGISTHPDLNIRGGASFVPGEPSTQDGNGHGTHVAGTIAALNNSIGVLGVAPSAELYAVKVLGASGSGSVSSIAQGLEWAGNNGMHVANLSLGSPSPSATLEQAVNSATSRGVLVVAASGNSGAGSISYPAYYANAMAVGATDQNNNRASFSQYGAELDIVAPGVNVQSTYPGSTYASLNGTSMATPHVAGAAALVKQKNPSWSNVQIRNHLKNTATSLGSTNLYGSGLVNAEAATR

SEQ ID NO: 53277 - protein, 269 aa, Unidentified
AQSVPWGISRVQAPAAHNRGLTGSGVKVAVLDTGISTHPDLNIRGGASFVPGEPSTQDGNGHGTHVAGTIAALNNSIGVLGVAPSAELYAVKVLGASGSGSVSSIAQGLEWAGNNGMHVANLSLGSPSPSATLEQAVNSATSRGVLVVAASGNGGAGSIGYPARYANAMAVGATDQNNNRASFSQYGAGLDIVAPGVNVQSTYPGSTYASLNGTSMATPHVAGAAALVKQKNPSWSNVQIRNHLKNTATSLGSTNLYGSGLVNAEAATR

SEQ ID NO: 53278 - protein, 269 aa, Unidentified
AQSVPWGISRVQAPAAHNRGLTGSGVKVAVLDTGISTHPDLNIRGGASFVPGEPSTQDGNGHGTHVAGTIAALNNSIGVLGVAPSAELYAVKVLGASGSGSVSSIAQGVEWAGNNGMHVANLSLGSPSPSATLEQAVNSATSRGVLVVAASGNSGAGSISYPARYANAMAVGATDQNNNHASFSQYGAGLDIVAPGVNVQSTYPGSTYASLNGTSMATPHVAGAAALVKQKNPSWSNVQIRNHLKNTATSLGSTNLYGSGLVNAEAATR

SEQ ID NO: 53279 - protein, 269 aa, Unidentified
AQSVPWGISRVQAPAAHNRGLTGSGVKVAVLDTGISTHPDLNIRGGASFVPGEPSTQDGNGHGTHVAGTIAALNNSIGVLGVAPSAELYAVKVLGASGSGSVSSIAQGLEWAGNNGMHVANLSLGSPSPSATLEQAVNSATSRGVLVVAASGNSGAGSISYPARYANAMAVGATDQNNNRASFSQYGAGLDIVAPGVNVQSTYPGSTYASXXGTSMATPHVAGAAALVKQKNPSWSNVQIRNHLKNTATSLGSTNLYGSGLVNAEAATR

SEQ ID NO: 53280 - protein, 269 aa, Unidentified
AQSVPWGISRVQAPAAHNRGLTGSGVKVAVLDTGISTHPDLNIRGGASFVPGEPSTQDGNGHGTHVAGTIAALNNSIGVLGVAPRAELYAVKVLGASGSGSVSSIAQGLEWAGNNGMHVANLSLGSPSPSATLEQAVNSATSRGVLVVAASGNSGAGSISYPARYANAMAVGATDQNNNRASFSQYGAGLDIVAPGVNVQSTWPGSTYASLNGTSMATPHVAGAAALVKQKNPSWSNVQIRNHLKNTATSLGSTNLYGSGLVNAEAATR

SEQ ID NO: 53281 - protein, 269 aa, Unidentified
AQSVPWGISRVQAPAAHNRGLTGSGVKVAVLDTGISTHPDLNIRGGASFVPGEPSTQDGEGHGTHVAGTIAALNNSIGVLGVAPSAELYAVKVLGASGSGSVSSIAQGVEWAGNNGMHVANLSLGSPSPSATLEQAVNSATSRGVLVVAASGNSGAGSISYPARYANAMAVGATDQNNNRASFSQYGAGLDIVAPGVNVQSTYPGSTYASLNGTSMATPHVAGAAALVKQKNPSWSNVQIRNHLKNTATSLGSTNLYGSGLVNAEAATR

SEQ ID NO: 53282 - protein, 269 aa, Unidentified
AQSVPWGIARVQAPAAHNRGLTGSGVKVAVLDTGISTHPDLNIRGGASFVPGEPSTQDGNGHGTHVAGTIAALNNSIGVLGVAPSAELYAVKVLGASGSGSVSSIAQGLEWAGNNGMHVANLSLGSPSPSATLEQAVNSATSRGVLVVAASGNSGAGSISYPARYANAMAVGATDQNNNRASFSQYGAGLDIVAPGVNVQSTYPGSTYASLNGTSMATPHVAGAAALVKQKNPSWRNVQIRNHLKNTATSLGSTNLYGSGLVNAEAATR

SEQ ID NO: 53283 - protein, 269 aa, Unidentified
AQSVPWGISRVQAPAAHNRGLTGFGVKVAVLDTGISTHPDLNIRGGASFVPGEPSTQDGNGHGTHVAGTIAALNNNIGVLGVAPSAELYAVKVLGASGSGSVSSIAQGLEWAGNNGMHVANLSLGSPSPSATLEQAVNSATSRGVLVVAASGNSGAGSISYPARYANAMAVGATDQNNNRASFSQYGAGLDIVAPGVNVQSTYPGSTYASLNGTSMATPHVAGAAALVKQKNPSWSNVQIRNHLKNTATSLGSTNLYGSGLVNAEAATR

SEQ ID NO: 53284 - protein, 269 aa, Unidentified
AQSVPWGISRVQAPAAHNRGLTGSGVKVAVLDTGISTHPDLNIRGGASFVPGEPSTQDGNGHGTHVAGTIAALNNSIGVLGVAPSAELYAVKVLGASGSGSVSSIAQGLEWAGNNGMHVANLSLGSPSPSATLEQAVNSATSRGVLVVAASGNSGAGSISYPARYANAMAVGATDQNNNRANFSQYGAGLDIVAPGVNVQSTTPGSTYASLNGTSMATPHVAGAAALVKQKNPSWSNVQIRNHLKNTATSLGSTNLYGSGLVNAEAATR

SEQ ID NO: 53285 - protein, 269 aa, Unidentified
AQSVPWGISRVQAPAAHNRGLTGSGVKVAVLDTGISTHPDLNIRGGASFVPGEPSTQDGNGHGTHVAGTIAALNNSIGVLGVAPSAELYAVKVLGASGSGSVSSIAQGLEWAGNNGMHVANLSLGDPSPSATLEQAVNSATSRGVLVVAASGNSGAGSIDYPARYANAMAVGATDQNNNRASFSQYGAGLDIVAPGVNVQSTYPGSTYASLNGTSMATPHVAGAAALVKQKNPSWSNVQIRNHLKNTATSLGSTNLYGSGLVNAEAATR

SEQ ID NO: 53286 - protein, 269 aa, Unidentified
AQSVPWGISRVQAPAAHNRGLAGSGVKVAVLDTGISTHPDLNIRGGASFVPGEPSTQDGNGHGTHVAGTIAALNNSIGVLGVAPSAELYAVKVLGASGSGSVSSIAQGLEWAGNNGMHVANLSLGSPSPSATLEQAVNSATSRGVLVVAASGNSGAGSISYPARYANAMAVGATDQNNNHASFSQYGAGLDIVAPGVNVQSTYPGSTYASLNGTSMATPHVAGAAALVKQKNPSWSNVQIRNHLKNTATSLGSTNLYGSGLVNAEAATR

SEQ ID NO: 53287 - protein, 271 aa, Unidentified
AQSVPWGISRVQAPAAHNRGLTGSGVKVAVLDTGISTHPDLNIRGGASFVPGEPSTQDGNGHGTHVAGTIAALNNSIGVLGVAPSAELYAVKVLGAGGTXTGSVSSIAQGLEWAGNNGMHVANLSLGSPSPSATLEQAVNSATSRGVLVVAASGNSGAGSISYPARYANAMAVGATDQNNNRASFSQYGAGLDIVAPGVNVQSTYPGSTYASLNGTSMATPHVAGAAALVKQKNPSWSNVQIRNHLKNTATSLGSTNLYGSGLVNAEAATR

SEQ ID NO: 53288 - protein, 269 aa, Unidentified
AQSVPWGISRVQAPAAHNRGLTGSGVKVAVLDTGISTHPDLNIRGGASFVPGEPSTQDGNGHGTHVAGTIAALNNSIGVLGVAPSAELYAVKVLPASSSGSVSSIAQGLEWAGNNGMHVANLSLGSPSPSATLEQAVNSATSRGVLVVAASGNSGAGSISYPARYANAMAVGATDQNNNRASFSQYGAGLDIVAPGVNVQSTYPGSTYASLNGTSMATPHVAGAAALVKQKNPSWSNVQIRNHLKNTATSLGSTNLYGSGLVNAEAATR

SEQ ID NO: 53289 - protein, 269 aa, Unidentified
AQSVPWGISRVQAPAAHNRGLTGSGVKVAVLDTGISTHPDLNIRGGASFVPGEPSTQDGNGHGTHVAGTIAALNNSIGVLGVAPSAELYAVKVLGASGSGSNSSIAQGLEWAGNNGMHVANLSLGSPSPSATLEQAVNSATSRGVLVVAASGNSGAGSISYPARYANAMAVGATDQNNNRASFSQYGAGLDIVAPGVNVQSTYPGSTYASENGTSMATPHVAGAAALVKQKNPSWSNVQIRNHLKNTATSLGSTNLYGSGLVNAEAATR

SEQ ID NO: 53290 - protein, 269 aa, Bacillus sp.
AQSVPWGISRVQAPAAHNRGLTGSGVKVAVLDTGISTHPDLNIRGGASFVPGEPSTQDGNGHGTHVAGTIAALNNSIGVLGVAPNAELYAVKVLGASGSGSVSSIAQGLEWAGNNGMHVANLSLGSPSPSATLKQAVNSATSRGVLVVAASGNSGAGSISYPARYANAMAVGATDQNNNRASFSQYGAGLDIVAPGVNVQSTYPGSTYASLNGTSMATPHVAGAAALVKQKNPSWSNVQIRNHLKNTATSLGSTNLYGSGLVNAEAATR

SEQ ID NO: 53291 - protein, 269 aa, Unidentified
AQSVPWGISRVQAPAAHNRGLTGSGVKVAVLDTGISTHPDLNIRGGASFVPGEPSTQDGNGHGTHVAGTIAALNNSIGVLGVAPSAELYAVKVLGAGGSASVSSIAQGLEWAGNNGMHVANLSLGSPSPSATLEQAVNSATSRGVLVVAASGNSGAGSISYPARYANAMAVGATDQNNNRASFSQYGAGLDIVAPGVNVQSTYPGSTYASLNGTSMATPHVAGAAALVKQKNPSWSNVQIRNHLKNTATSLGSTNLYGSGLVNAEAATR

SEQ ID NO: 53292 - protein, 269 aa, Synthetic construct
AQSVPWGISRVQAPAAHNRGLTGSGVKVAVLDTGISTHPDLNIRGGASFVPGEPSTQDGNGHGTHVAGTIAALNNSIGVLGVAPKAELYAVKVLGASGSGSVSSIAQGLEWAGNNGMHVANLSLGSPSPSATLEQAVNSATSRGVLVVAASGNSGAGSISYPARYANAMAVGATDQNNNRASFSQYGAGLDIVAPGVNVQSTYPGSTYASLNGTSMATPHVAGAAALVKQKNPSWSNVQIRNHLGNTATSLGSTNLYGSGLVNAEAATR

SEQ ID NO: 53293 - protein, 269 aa, Unidentified
AQSVPWGISRVQAPAAHRRGLTGSGVKVAVLDTGISTHPDLNIRGGASFVPGEPSTQDGNGHGTHVAGTIAALNNSIGVLGVAPSAELYAVKVLGASGSGSVSSIAQGLEWAGNNGMHVANLSLGSPSPSATLEQAVNSATSRGVLVVAASGNSGAGSISYPARYANAMAVGATDQNNNRASFSQYGAGLDIVAPGVNVQSTYPGFTYASLNGTSMATPHVAGAAALVKQKNPSWSNVQIRNHLKNTATSLGSTNLYGSGLVNAEAATR

SEQ ID NO: 53294 - protein, 269 aa, Bacillus lentus
AQSVPWGISRVQAPAAHNRGLTGSGVKVAVLDTGISTHPDLNIRGGASFVPGEPSTQDGNGHGTHVAGTIAALNNSIGVLGVAPDAELYAVKVLGASGSGSVSSIAQGLEWAGNNGMHVANLSLGSPSPSATLEQAVNSATSRGVLVVAASGNSGAGSISYPARYANAMAVGATDQNNNRADFSQYGAGLDIVAPGVNVQSTYPGSTYASLNGTSMATPHVAGAAALVKQKNPSWSNVQIRNHLKNTATSLGSTNLYGSGLVNAEAATR

SEQ ID NO: 53295 - protein, 269 aa, Unidentified
AQSVPWGISRVQAPAAHNRGLTGSGVKVAVLDTGISTHPDLNIRGGASFVPGEPSTQDGNGHGTHVAGTIAALNNSIGVLGVAPSAELYAVKVLGASGSGSVSSIAQGLEWAGNNGMHVANLSLGSPSPSATLEQAVNSATSRGVLVVAASGNSGAGSISYPARYANAMAVGATDQNNNRASFSQYGAGLDIVAPGVNVQSTYPGFTYASLNGTSMATPHVAGAAALVKQKNPSWSNVQIRNHLKNTATSLGSTNLYGSGLVNALAATR

SEQ ID NO: 53296 - protein, 269 aa, Bacillus lentus
AQSVPWGISRVQAPAAHNRGLTGSGVKVAVLDTGISTHPDLNIRGGASFVPGEPSTQDGNGHGTHVAGTIAALNNSIGVLGVAPSAELYAVKVLGASGSGSVSSIARGLEWAGNNGMHVANLSLGSPSPSATLEQAVNSATSRGVLVVAASGNSGAGSISYPARYANAMAVGATDQNNNRADFSQYGAGLDIVAPGVNVQSTYPGSTYASLNGTSMATPHVAGAAALVKQKNPSWSNVQIRNHLKNTATSLGSTNLYGSGLVNAEAATR

SEQ ID NO: 53297 - protein, 269 aa, Unidentified
AQSVPWGISRVQAPAAHNRKLTGSGVKVAVLDTGISTHPDLNIRGGASFVPGEPSTQDGNGHGTHVAGTIAALNNSIGVLGVAPSAELYAVKVLGASGDGSVSSIAQGLEWAGNNGMHVANLSLGSPSPSATLEQAVNSATSRGVLVVAASGNSGAGSISYPARYANAMAVGATDQNNNRASFSQYGAGLDIVAPGVNVQSTYPGSTYASLNGTSMATPHVAGAAALVKQKNPSWSNVQIRNHLKNTATSLGSTNLYGSGLVNAEAATR

SEQ ID NO: 53298 - protein, 269 aa, Unidentified
AQSVPWGISRVQAPAAHNRGLTGSGVKVAVLDTGISTHPDLNIRGGASFVPGEPSTQDGNGHGTHVAGTIAALNNSIGVLGVAPNAELYAVKVLGASGSGSVSSIAQGLEWAGNNGMHVANLSLGSPSPSATLEQAVNSATSRGVLVVAASGNSGAGSISYPARYANAMAVGATDQNNNRASFSQYGAGLDIVAPGVNVQSTYPGSTYASLEGTSMATPHVAGAAALVKQKNPSWSNVQIRNHLKNTATSLGSTNLYGSGLVNAEAATR

SEQ ID NO: 53299 - protein, 269 aa, Unidentified
AQSVPWGISRVQAPAAHNRGLTGSGVKVAVLDTGISTHPDLNIRGGASFVPGEPSTQDGNGHGTHVAGTIAALNNSIGVLGVAPSAELYAVKVLGAAGSGSISSIAQGLEWAGNNGMHVANLSLGSPSPSATLEQAVNSATSRGVLVVAASGNSGAGSISYPARYANAMAVGATDQNNNRASFSQYGAGLDIVAPGVNVQSTYPGSTYASLNGTSMATPHVAGAAALVKQKNPSWSNVQIRNHLKNTATSLGSTNLYGSGLVNAEAATR

SEQ ID NO: 53300 - protein, 269 aa, Unidentified
AQSVPWGISRVQAPAAHNRGLTGSGVKVAVLDSGISTHPDLNIRGGASFVPGEPSTQDGNGHGTHVAGTIAALNNSIGVLGVAPSAELYAVKVLGASGSGSVSSIAQGLEWAGLNGMHVANLSLGSPSPSATLEQAVNSATSRGVLVVAASGNSGAGSISYPARYANAMAVGATDQNNNRASFSQYGAGLDIVAPGVNVQSTYPGSTYASLNGTSMATPHVAGAAALVKQKNPSWSNVQIRNHLKNTATSLGSTNLYGSGLVNAEAATR

SEQ ID NO: 53301 - protein, 269 aa, Unidentified
AQSVPWGISRVQAPAAHNRGLTGSGVKVAVLDSGISTHPDLNIRGGASFVPGEPSTQDGNGHGTHVAGTIAALNNSIGVLGVAPSAELYAVKVLGASGSGSVSSIAQGLEWAGNNGMHVANLSLGSPSPSATLEQAVNSATSRGVLVVAASGNSGAGSISYPARYANAMAVGATDQNNNRASFSQYGAGLDIVAPGVNVQSTYPGSTYASLNGTSMATPHVAGAAALVKQKNPSWSFVQIRNHLKNTATSLGSTNLYGSGLVNAEAATR

SEQ ID NO: 53302 - protein, 269 aa, Unidentified
AQSVPWGISRVQAPAAHNRGLTGRGVKVAVLDTGISTHPDLNIRGGASFVPGEPSTQDGNGHGTHVAGTIAALNNSIGVLGVAPSAELYAVKVLGASGAGSVSSIAQGLEWAGNNGMHVANLSLGSPSPSATLEQAVNSATSRGVLVVAASGNSGAGSISYPARYANAMAVGATDQNNNRASFSQYGAGLDIVAPGVNVQSTYPGSTYASLNGTSMATPHVAGAAALVKQKNPSWSNVQIRNHLKNTATSLGSTNLYGSGLVNAEAATR

SEQ ID NO: 53303 - protein, 269 aa, Unidentified
AQSVPWGISRVQAPAAHNRGLTGSGVKVAVLDTGISTHPDLNIRGGASFVPGEPSTQDGNGHGTHVAGTIAALNNSIGVLGVAPSAELYAVKVLGASGSGSVSSIAQGLEWAGNNGMHVANLSLGSPSPSATLEQAVNSATSRGVLVVAASGNDGAGSIGYPARYANAMAVGATDQNNNRASFSQYGAGLDIVAPGVNVQSTYPGSTYASLNGTSMATPHVAGAAALVKQKNPSWSNVQIRNHLKNTATSLGSTNLYGSGLVNAEAATR

SEQ ID NO: 53304 - protein, 269 aa, Unidentified
AQSVPWGISRVQAPAAHNRGLTGSGVKVAVLDTGISTHPDLNIRGGASFVPGEPSTQDGNGHGTHVAGTIAALNNSIGVLGVAPSAELYAVKVLGASGSGSVSSIAQGLEWAGNNGMHVANLSLGSPSPSATLEQAVNSATSRGVLVVAASGNSGAGSISYPARYANAMAVGATDQNNNRASFSQYGAGLDIVAPGVNVQSTYPGSTYASLNGTSMATPHVAGAAALVKQKNPSWSNRQIRNHLKNTATSLGSTNLYGSGLVNALAATR

SEQ ID NO: 53305 - protein, 269 aa, Unidentified
AQSVPWGISRVQAPAAHNRGLTGSGVKVAVLDTGISTHPDLNIRGGASFVPGEPSTQDGNGHGTHVAGTIAALNNSIGVLGVAPSAELYAVKVLGASGSGSLSSIAQGLEWAGNNGMHVANLSLGNPSPSATLEQAVNSATSRGVLVVAASGNSGAGSISYPARYANAMAVGATDQNNNRASFSQYGAGLDIVAPGVNVQSTYPGSTYASLNGTSMATPHVAGAAALVKQKNPSWSNVQIRNHLKNTATSLGSTNLYGSGLVNAEAATR

SEQ ID NO: 53306 - protein, 269 aa, Unidentified
AQSVPWGISRVQAPAAHNRGLTGSGVKVAVLDTGISTHPDLNIRGGASFVPGEPSTQDGNGHGTHVAGTIAALNNSIGVLGVAPSAELYAVKVLPATGSGSVSSIAQGLEWAGNNGMHVANLSLGSPSPSATLEQAVNSATSRGVLVVAASGNSGAGSISYPARYANAMAVGATDQNNNRASFSQYGAGLDIVAPGVNVQSTYPGSTYASLNGTSMATPHVAGAAALVKQKNPSWSNVQIRNHLKNTATSLGSTNLYGSGLVNAEAATR

SEQ ID NO: 53307 - protein, 269 aa, Unidentified
AQSVPWGISRVQAPAAHNRRLTGSGVKVAVLDTGISTHPDLNIRGGASFVPGEPSTQDGNGHGTHVAGTIAALNNRIGVLGVAPSAELYAVKVLGASGSGSVSSIAQGLEWAGNNGMHVANLSLGSPSPSATLEQAVNSATSRGVLVVAASGNSGAGSISYPARYANAMAVGATDQNNNRASFSQYGAGLDIVAPGVNVQSTYPGSTYASLNGTSMATPHVAGAAALVKQKNPSWSNVQIRNHLKNTATSLGSTNLYGSGLVNAEAATR

SEQ ID NO: 53308 - protein, 269 aa, Unidentified
AQSVPWGISRVQAPAAHNRGLTGSGVKVAVLDTGISTHPDLNIRGGASFVPGEPSTQDGNGHGTHVAGTIAALNNSIGVLGVAPNAELYAVKVLGASGSGSVSSIAQGLEWAGNNGMHVANLSLGSPSPSATLEQAVNSATSRGVLVVAASGNSGAGSIXYPARYANAMAVGATDQNNNRASFSQYGAGLDIVAPGVNVQSTYPGSTYASLNGTSMATPHVAGAAALVKQKNPSWSNVQIRNHLKNTATSLGSTNLYGSGLVNAEAATR

SEQ ID NO: 53309 - protein, 269 aa, Unidentified
AQSVPWGISRVEAPAAHNRGLTGSGVKVAVLDTGISTHPDLNIRGGASFVPGEPSTQDGNGHGTHVAGTIAALNNSIGVLGVAPSAELYAVKVLGASGSGSVSSIAQGLEWAGNNGMHVANLSLGSPSPSATLEQAVNSATSRGVLVVAASGNSGAGSISYPARYANAMAVGATDQNNNRASFSQYGAGLDIVAPGVNVQSTYPGSTYASLNGTSMATPHVAGAAALVKQKNPSWSNVQIRNHLKNTATSLGNTNLYGSGLVNAEAATR

SEQ ID NO: 53310 - protein, 269 aa, Unidentified
AQSVPWGISRVQAPAAHNRGLTGSGVKVAVLDTGISTHPDLNIRGGASFVPGEPSTQDGNGHGTHVAGTIAALNNSIGVLGVAPNAQLYAVKVLGASGSGSVSSIAQGLEWAGNNGMHVANLSLGSPSPSATLEQAVNSATSRGVLVVAASGNSGAGSISYPARYANAMAVGATDQNNNRASFSQYGAGLDIVAPGVNVQSTYPGSTYASLNGTSMATPHVAGAAALVKQKNPSWSNVQIRNHLKNTATSLGSTNLYGSGLVNAEAATR

SEQ ID NO: 53311 - protein, 269 aa, Unidentified
AQSVPWGISRVQAPAAHNRGLTGSGVKVAVLDTGISTHPDLNIRGGASFVPGEPSTQDGNGHGTHVAGTIAALNNSIGVLGVAPSAELYAVKVLGASGSGSVSSIAQGLEWAGNNGMHVANLSLGSESPSATLEQAVNSATSRGVLVVAASGNSGAGSISYPARYANAMAVGATDQNNNRASFSQYGAGLDIVAPGVNVQSTEPGSTYASLNGTSMATPHVAGAAALVKQKNPSWSNVQIRNHLKNTATSLGSTNLYGSGLVNAEAATR

SEQ ID NO: 53312 - protein, 269 aa, Unidentified
AQSVPWGISRVQAPAAHNRGLTGSGVKVAVLDTGISTHPDLNIRGGASFVPGEPSTQDGNGHGTHVAGTIAALNNSIGVLGVAPSAELYAVKVLGASGSGSVSSIAQGLEWAGNNGMHVANLSLGSPSPSATLEQAVNSATSRGVLVVAASGNSGAESISYPARYANAMAVGATDQNNNRASFSQYGAGLDIVAPGVNVQSTEPGSTYASLNGTSMATPHVAGAAALVKQKNPSWSNVQIRNHLKNTATSLGSTNLYGSGLVNAEAATR

SEQ ID NO: 53313 - protein, 269 aa, Unidentified
AQSVPWGISRVQAPAAHNRGLTGSGVKVAVLDTGISTHPDLNIRGGASFVPGEPSTQDGNGHGTHVAGTIAALNNSIGVLGVAPSAELYAVKVLGASGSGSVSSIAQGLEWAGNNGMHVANLSLGSPSPSATLEQAVNSATSRGVIVVAASGNSGAESISYPARYANAMAVGATDQNNNRASFSQYGAGLDIVAPGVNVQSTYPGSTYASLNGTSMATPHVAGAAALVKQKNPSWSNVQIRNHLKNTATSLGSTNLYGSGLVNAEAATR

SEQ ID NO: 53314 - protein, 269 aa, Unidentified
AQSVPWGISRVQAPAAHNRGLTGSGVKVAVLDTGISTHPDLNIRGGASFVPGEPSTQDGNGHGTHVAGTIAALNNRIGVLGVAPSAELYAVKVLGASGSGSVSSIAQGLEWAGNNGMHVANLSLGSPSPSATLEQAVNSATSRGVLVVAASGNSGAGSISYPARYANAMAVGATDQNNNRASFSQYGAGLDIVAPGVNVQSTYPGSTYASLNGTSMATPHVAGAAALVKQKNPSWSNVQIRNHLKNTATSLGSTNLYGSGLVRAEAATR

SEQ ID NO: 53315 - protein, 269 aa, Unidentified
AQSVPWGIARVQAPAAHNRGLTGSGVKVAVLDTGISTHPDLNIRGGASFVPGEPSTQDGNGHGTHVAGTIAALNNSIGVLGVAPSAELYAVKVLGASGSGSVSSIAQGLEWAGNNGMHVANLSLGSPSPSATLEQAVNSATSRGVLVVAASGNSGAGSISYPARYANAMAVGATDQNNNRASFSQYGAGLDIVAPGVNVQSTYPGSTYASLNGTSMATPHVAGAAALVKQKNPSWSNVQIRNRLKNTATSLGSTNLYGSGLVNAEAATR

SEQ ID NO: 53316 - protein, 269 aa, Unidentified
AQSRPWGIARVQAPAAHNRGLTGSGVKVAVLDTGISTHPDLNIRGGASFVPGEPSTQDGNGHGTHVAGTIAALNNSIGVLGVAPSAELYAVKVLGASGSGSVSSIAQGLEWAGNNGMHVANLSLGSPSPSATLEQAVNSATSRGVLVVAASGNSGAGSISYPARYANAMAVGATDQNNNRASFSQYGAGLDIVAPGVNVQSTYPGSTYASLNGTSMATPHVAGAAALVKQKNPSWSNVQIRNHLKNTATSLGSTNLYGSGLVNAEAATR

SEQ ID NO: 53317 - protein, 269 aa, Unidentified
AQSVPWGIARVQAPAAHNRRLTGSGVKVAVLDTGISTHPDLNIRGGASFVPGEPSTQDGNGHGTHVAGTIAALNNSIGVLGVAPSAELYAVKVLGASGSGSVSSIAQGLEWAGNNGMHVANLSLGSPSPSATLEQAVNSATSRGVLVVAASGNSGAGSISYPARYANAMAVGATDQNNNRASFSQYGAGLDIVAPGVNVQSTYPGSTYASLNGTSMATPHVAGAAALVKQKNPSWSNVQIRNHLKNTATSLGSTNLYGSGLVNAEAATR

SEQ ID NO: 53318 - protein, 269 aa, Unidentified
AQSVPWGISRVQAPAAHNRGLAGSGVKVAVLDTGISTHPDLNIRGGASFVPGEPSTQDGNGHGTHVAGTIAALNNSIGVLGVAPSAELYAVKVLGASGSGSLSSIAQGLEWAGNNGMHVANLSLGSPSPSATLEQAVNSATSRGVLVVAASGNSGAGSISYPARYANAMAVGATDQNNNRASFSQYGAGLDIVAPGVNVQSTYPGSTYASLNGTSMATPHVAGAAALVKQKNPSWSNVQIRNHLKNTATSLGSTNLYGSGLVNAEAATR

SEQ ID NO: 53319 - protein, 269 aa, Unidentified
AQSVPWGISRVQAPAAHNRGLTGSGVKVAVLDTGISTHPDLNIRGGASFVPGEPSTQDGNGHGTHVAGTIAALNNSIGVLGVAPSAELYAVKVLGASGGGSVSSIAQGLEWAGNNGMHVANLSLGSPSPSATLEQAVNSATSRGVLVVAASGNSGAGSISYPARYANAMAVGATDQNNNRASFSQYGAGLDIVAPGVNVQSTWPGSTYASLNGTSMATPHVAGAAALVKQKNPSWSNVQIRNHLKNTATSLGSTNLYGSGLVNAEAATR

SEQ ID NO: 53320 - protein, 269 aa, Unidentified
AQSVPWGISRVQAPAAHNRGLTGSGVKVAVLDTGISTHPDLNIRGGASFVPGEPSTQDGNGHGTHVAGTIAALNNSIGVLGVAPSAELYAVKVLGASGSGSVSSIAQGLEWAGNNGMHVANLSLGSPSPSATLEQAVNSATSRGVLVVAASGNSGAGSISYPARYANAMAVGATDQNNNHADFSQYGAGLDIVAPGVNVQSTYPGSTYASLNGTSMATPHVAGAAALVKQKNPSWSNVQIRNHLKNTATSLGSTNLYGSGLVNAEAATR

SEQ ID NO: 53321 - protein, 269 aa, Unidentified
AQSVPWGISRVQAPAAHNRGLTGSGVKVAVLDTGISTHPDLNIRGGASFVPGEPSTQDGEGHGTHVAGTIAALNNSIGVLGVAPSAELYAVKVLGASGSGSVSSIAQGLEWAGNNGMHVANLSLGSPSPSATLEQAVNSATSRGVLVVAASGNSGAGSISYPARYANAMAVGATDQNNNRASFSQYGAGLDIVAPGVNVQSTYPGSTYASENGTSMATPHVAGAAALVKQKNPSWSNVQIRNHLKNTATSLGSTNLYGSGLVNAEAATR

SEQ ID NO: 53322 - protein, 269 aa, Unidentified
AQSRPWGISRVQAPAAHNRGLTGSGVKVAVLDTGISTHPDLNIRGGASFVPGEPSTQDGNGHGTHVAGTIAALNNSIGVLGVAPSAELYAVKVLGASGSGSVSSIAQGLEWAGNNGMHVANLSLGSPSPSATLEQAVNSATSRGVLVVAASGNSGAGSISYPARYANAMAVGATDQNNNRASFSQYGAGLDIVAPGVNVQSTYPGFTYASLNGTSMATPHVAGAAALVKQKNPSWSNVQIRNHLKNTATSLGSTNLYGSGLVNAEAATR

SEQ ID NO: 53323 - protein, 269 aa, Unidentified
AQSVPWGISRVQAPAAHNRGLTGSGVKVAVLDTGISTHPDLNIRGGASFVPGEPSTQDGNGHGTHVAGTIAALNNSIGVLGVAPSAELYAVKVLGASGSGSVSSIAQGLEWAGNNGMHVANLSLGSPSPSATLEQAVNSATSRGVLVVAASGNSGEGSISYPARYANAMAVGATDQNNNRADFSQYGAGLDIVAPGVNVQSTYPGSTYASLNGTSMATPHVAGAAALVKQKNPSWSNVQIRNHLKNTATSLGSTNLYGSGLVNAEAATR

SEQ ID NO: 53324 - protein, 269 aa, Bacillus sp.
AQSVPWGISRVQAPAAHNRGLTGSGVKVAVLDTGISTHPDLNIRGGASFVPGEPSTQDGNGHGTHVAGTIAALNNSIGVLGVAPNAELYAVKVLGASGSGSVSSIAQGLEWAGNNGMHVANLSLGSPSPSATLEQAVNSATSRGVLVVAASGNSGAGSIIYPARYANAMAVGATDQNNNRASFSQYGAGLDIVAPGVNVQSTYPGSTYASLNGTSMATPHVAGAAALVKQKNPSWSNVQIRNHLKNTATSLGSTNLYGSGLVNAEAATR

SEQ ID NO: 53325 - protein, 269 aa, Unidentified
AQSVPWGISRVQAPAAHNRGLTGSGVKVAVLDTGISTHPDLNIRGGASFVPGEPSTQDGNGHGTHVAGTIAALNNSIGVLGVAPSAELYAVKVLGASGSGSVSSIAQGLEWAGNNGMHVANLSLGSPSPSATLEQAVNSATSRGVIVVAASGNSGAGSISYPARYANAMAVGATDQNNNHASFSQYGAGLDIVAPGVNVQSTYPGSTYASLNGTSMATPHVAGAAALVKQKNPSWSNVQIRNHLKNTATSLGSTNLYGSGLVNAEAATR

SEQ ID NO: 53326 - protein, 269 aa, Unidentified
AQSVPWGISRVQAPAAHNRGLTGSGVKVAVLDTGISTHPDLNIRGGASFVPGEPSTQDGNGHGTHVAGTIAALNNSIGVLGVAPSAELYAVKVLGASGSGSVSSIAQGLEWAGNNGMHVANLSLGSPSPSATLEQAVNSATSRGVLVVAASGNSGAGSISAPASYANAMAVGATDQNNNRASFSQYGAGLDIVAPGVNVQSTYPGSTYASLNGTSMATPHVAGAAALVKQKNPSWSNVQIRNHLKNTATSLGSTNLYGSGLVNAEAATR

SEQ ID NO: 53327 - protein, 269 aa, Bacillus lentus
AQSVPWGISRVQAPAAHNRGLTGSGVKVAVLDTGISTHPDLNIRGGASFVPGEPSTQDGNGHGTHVAGTIAALNNSIGVLGVAPSAELYAVKVLGASGSGSVSSIAQGLEWAGNNGMHVANLSLGSPSPSATLEQAVNSATSRGVLVVAASGNSGAGSISYPALYANAMAVGATDQNNNRASFSQYGAGLDIVAPGVNVESTYPGSTYASLNGTSMATPHVAGAAALVKQKNPSWSNVQIRNHLKNTATSLGSTNLYGSGLVNAEAATR

SEQ ID NO: 53328 - protein, 269 aa, Unidentified
AQSVPWGISRVQAPAAHNRGLRGSGVKVAVLDTGISTHPDLNIRGGASFVPGEPSTQDGNGHGTHVAGTIAALNNSIGVRGVAPSAELYAVKVLGASGSGSVSSIAQGLEWAGNNGMHVANLSLGSPSPSATLEQAVNSATSRGVLVVAASGNSGAGSISYPARYANAMAVGATDQNNNRASFSQYGAGLDIVAPGVNVQSTYPGSTYASLNGTSMATPHVAGAAALVKQKNPSWSNVQIRNHLKNTATSLGSTNLYGSGLVNAEAATR

SEQ ID NO: 53329 - protein, 269 aa, Unidentified
AQSVPWGISRVQAPAAHNRGLTGSGVKVAVLDTGISTHPDLNIRGGASFVPGEPSTQDGNGHGTHVAGTIAALNNSIGVLGVAPSAELYAVKVLGASGSGSVSSIAQGLEWAGNNGMHVANLSLGSPSPSATLEQAVNSATSRGVLVVAASGNSGAGSISYPARYANAMAVGATDQNNNRASFSQYGAGLDIVAPGVNVQSTAPGSTYASLNGTSMATPHVAGAAALVKQKNPSWSFVQIRNHLKNTATSLGSTNLYGSGLVNAEAATR

SEQ ID NO: 53330 - protein, 269 aa, Unidentified
AQSVPWGISRVQAPAAHNRGLTGSGVKVAVLDTGISTHPDLNIRGGASFVPGEPSTQDGNGHGTHVAGTIAALNNSIGVLGVAPSAELYAVKVLGASGGGSVSSIAQGLEWAGNNGMHVANLSLGAPSPSATLEQAVNSATSRGVLVVAASGNSGAGSISYPARYANAMAVGATDQNNNRASFSQYGAGLDIVAPGVNVQSTYPGSTYASLNGTSMATPHVAGAAALVKQKNPSWSNVQIRNHLKNTATSLGSTNLYGSGLVNAEAATR

SEQ ID NO: 53331 - protein, 269 aa, Synthetic construct
AQSVPWGISRVQAPAAHNRGLTGSGVKVAVLDTGISTHPDLNIRGGASFVPGEPSTQDGNGHGTHVAGTIAALNNSIGVLGVAPSAELYAVKVLGASGSGSVSSIAQGLEWAGNNGMHVANLSLGEPSPSATLEQAVNSATSRGVLVVAASGNSGAGSISYPARYANAMAVGATDQNNNRASFSQYGAGLDIVAPGVNVQSTYPGSTYASLNGTSMATPHVAGAAALVKQKNPSWSNVQIRNHLKNTATSLGSTNLYGSGLVNATAATR

SEQ ID NO: 53332 - protein, 269 aa, Unidentified
AQSVPWGISRVQAPAAHRRGLTGSGVKVAVLDTGISTHPDRNIRGGASFVPGEPSTQDGNGHGTHVAGTIAALNNSIGVLGVAPSAELYAVKVLGASGSGSVSSIAQGLEWAGNNGMHVANLSLGSPSPSATLEQAVNSATSRGVLVVAASGNSGAGSISYPARYANAMAVGATDQNNNRASFSQYGAGLDIVAPGVNVQSTYPGSTYASLNGTSMATPHVAGAAALVKQKNPSWSNVQIRNHLKNTATSLGSTNLYGSGLVNAEAATR

SEQ ID NO: 53333 - protein, 269 aa, Alkalihalobacillus clausii
AQSVPWGISRVQAPAAHNRGLTGSGVKVAVLDTGISTHPDLNIRGGASFVPGEPSTQDGNGHGTHVAGTIAALNNSIGVLGVAPSAELYAVKVLEASGSGSVSSIAQGLEWAGNNGMHVANLSLGSPSPSATLEQAVNSATSRGVLVVAASGNSGAGSISYPARYANAMAVGATDQNNNRASFSQYGAGLDIVAPGVNVQSTYPGSTYASLNGTSMATPHVAGAAALVKQKNPSWSNVQIRNHLKNTATSLGSTNLYMSGLVNAEAATR

SEQ ID NO: 53334 - protein, 269 aa, Unidentified
AQSVPWGISRVQAPAAHNRGLTGSGVKVAVLDTGISTHPDLNIRGGASFVPGEPSTQDGNGHGTHVAGTIAALNNSIGVLGVAPNAELYAVKVLGASGSGSVSSIAQGLEWAGNNGMHVANLSLGSPSPSATLCQAVNSATSRGVLVVAASGNSGAGSISYPARYANAMAVGATDQNNNRASFSQYGAGLDIVAPGVNVQSTYPGSTYASLNGTSMATPHVAGAAALVKQKNPSWSNVQIRNHLKNTATSLGSTNLYGSGLVNAEAATR

SEQ ID NO: 53335 - protein, 269 aa, Unidentified
AQSVPWGISRVHAPAAHNRGLTGSGVKVAVLDTGISTHPDLNIRGGASFVPGEPSTQDGNGHGTHVAGTIAALNNSIGVLGVAPSAELYAVKVLGASGSGSVSSIAQGLEWAGNNGMHVANLSLGSPSPSATLEQAVNSATSRGVLSVAASGNSGAGSISYPARYANAMAVGATDQNNNRASFSQYGAGLDIVAPGVNVQSTYPGSTYASLNGTSMATPHVAGAAALVKQKNPSWSNVQIRNHLKNTATSLGSTNLYGSGLVNAEAATR

SEQ ID NO: 53336 - protein, 269 aa, Unidentified
AQSVPWGISRVQAPAAHNRGLTGSGVKVAVLDTGISTHPDLNIRGGASFVPGEPSTQDGNGHGTHVAGTIAALNNSIGVLGVAPSAELYAVKVLGQSGSASVSSIAQGLEWAGNNGMHVANLSLGSPSPSATLEQAVNSATSRGVLVVAASGNSGAGSISYPARYANAMAVGATDQNNNRASFSQYGAGLDIVAPGVNVQSTYPGSTYASLNGTSMATPHVAGAAALVKQKNPSWSNVQIRNHLKNTATSLGSTNLYGSGLVNAEAATR

SEQ ID NO: 53337 - protein, 269 aa, Synthetic construct
AQSVPWGISRVQAPAAHNRGLTGSGVKVAVLDTGISTHPDLNINGGASFVPGEPSTQDGNGHGTHVAGTIAALNNSIGVLGVAPSAELYAVKVLGASGSGSVSSIAQGLEWAGNNGMHVANLSLGSPSPSATLEQAVNSATSRGVLVVAASGNSGAGSISYPARYANAMAVGATDQNNNRASFSQYGAGLDIVAPGVNVQSTYPGSTYASLNGTSMATPHVAGAAALVKQKNPSWSNVQIRNHLKNTATSLRSTNLYGSGLVNAEAATR

SEQ ID NO: 53338 - protein, 269 aa, Bacillus sp.
AQSVPWGISRVQAPAAHNRGLTGSGVKVAVLDTGISTHPDLNIRGGASFVPGEPSTQDGNGHGTHVAGTIAALNNSIGVLGVAPNAELYAVKVLGASGSGSVSSIAQGLEWAGNNGMHVANLSLGSPSPSATLEQAVNSATSRGVLVVAASGNSGAGSISYPARYANAMAVGATNQNNNRASFSQYGAGLDIVAPGVNVQSTYPGSTYASLNGTSMATPHVAGAAALVKQKNPSWSNVQIRNHLKNTATSLGSTNLYGSGLVNAEAATR

SEQ ID NO: 53339 - protein, 269 aa, Unidentified
AQSVPWGISRVQAPAAHNRRLWGSGVKVAVLDTGISTHPDLNIRGGASFVPGEPSTQDGNGHGTHVAGTIAALNNSIGVLGVAPSAELYAVKVLGASGSGSVSSIAQGLEWAGNNGMHVANLSLGSPSPSATLEQAVNSATSRGVLVVAASGNSGAGSISYPARYANAMAVGATDQNNNRASFSQYGAGLDIVAPGVNVQSTYPGSTYASLNGTSMATPHVAGAAALVKQKNPSWSNVQIRNHLKNTATSLGSTNLYGSGLVNAEAATR

SEQ ID NO: 53340 - protein, 269 aa, Unidentified
AQSVPWGISRVQAPAAHNRGLTGSGVKVAVLDTGISTHPDLNIRGGASFVPGEPSTQDGNGHGTHVAGTIAALNNRIGVLGVAPSAELYAVKVLGASGSGSVSSIAQGLEWAGNNRMHVANLSLGSPSPSATLEQAVNSATSRGVLVVAASGNSGAGSISYPARYANAMAVGATDQNNNRASFSQYGAGLDIVAPGVNVQSTYPGSTYASLNGTSMATPHVAGAAALVKQKNPSWSNVQIRNHLKNTATSLGSTNLYGSGLVNAEAATR

SEQ ID NO: 53341 - protein, 269 aa, Unidentified
AQSVPWGISRVQAPAAHNRGLTGSGVKVAVLDTGISTHPDLNIRGGASFVPGEPSTQDGEGHGTHVAGTIAALNNSIGVLGVAPSAELYAVKVLGASGSGSLSSIAQGLEWAGNNGMHVANLSLGSPSPSATLEQAVNSATSRGVLVVAASGNSGAGSISYPARYANAMAVGATDQNNNRASFSQYGAGLDIVAPGVNVQSTYPGSTYASLNGTSMATPHVAGAAALVKQKNPSWSNVQIRNHLKNTATSLGSTNLYGSGLVNAEAATR

SEQ ID NO: 53342 - protein, 269 aa, Unidentified
AQSVPWGISRVQAPAAHNRGLTGSGVKVAVLDTGISTHPDLNIRGGASFVPGEPSTQDGNGHGTHVAGTIAALNNSIGVLGVAPNAELYAVKVLGASGSGSVSSIAQGLEWAGNNGMHVANLSLGSPSPSATLEQAVNSATSRGVLVVAASGNXGAGSISYPARYANAMAVGATDQNNNRASFSQYGAGLDIVAPGVNVQSTYPGSTYASLNGTSMATPHVAGAAALVKQKNPSWSNVQIRNHLKNTATSLGSTNLYGSGLVNAEAATR

SEQ ID NO: 53343 - protein, 269 aa, Bacillus sp.
AQSVPWGISRVQAPAAHNRGLTGSGVKVAVLDTGISTHPDLNIRGGASFVPGEPSTQDGNGHGTHVAGTIAALNNSIGVLGVAPNAELYAVKVLGASGSGSVSSIAQGLEWAGNNGMHVANLSLGSPSPSATLEQAVNSATSRGVLVVAASGNSGAGSIAYPARYANAMAVGATDQNNNRASFSQYGAGLDIVAPGVNVQSTYPGSTYASLNGTSMATPHVAGAAALVKQKNPSWSNVQIRNHLKNTATSLGSTNLYGSGLVNAEAATR

SEQ ID NO: 53344 - protein, 270 aa, Unidentified
AQSVPWGISRVQAPAAHNRGLTGSGVKVAVLDTGISTHPDLNIRGGASFVPGEPSTQDGNGHGTHVAGTIAALNNSIGVLGVAPSAELYAVKVLGASGXGGSNSSIAQGLEWAGNNGMHVANLSLGSPSPSATLEQAVNSATSRGVLVVAASGNSGAGSISYPARYANAMAVGATDQNNNRASFSQYGAGLDIVAPGVNVQSTYPGSTYASLNGTSMATPHVAGAAALVKQKNPSWSNVQIRNHLKNTATSLGSTNLYGSGLVNAEAATR

SEQ ID NO: 53345 - protein, 269 aa, Unidentified
AQSVPWGISRVQAPAAHNRGLTGSGVKVAVLDTGISTHPDLNIRGGASFVPGEPSTQDGNGHGTHVAGTIAALNNSIGVLGVAPSAELYAVKVLGASGSGRVRSIAQGLEWAGNNGMHVANLSLGSPSPSATLEQAVNSATSRGVLVVAASGNSGAGSISYPARYANAMAVGATDQNNNRASFSQYGAGLDIVAPGVNVQSTYPGSTYASLNGTSMATPHVAGAAALVKQKNPSWSNVQIRNHLKNTATSLGSTNLYGSGLVNAEAATR

SEQ ID NO: 53346 - protein, 269 aa, Unidentified
AQSVPWGISRVQAPAAHNRGLTGSGVKVAVLDTGISTHPDLNIRGGASFVPGEPSTQDGNGHGTHVAGTIAALNNSIGVLGVAPSAELYAVKVLGASGSGSVSSIAQGLEWAGNNGMHVANLSLGNPSPSATLEQAVNSATSRGVLVVAASGNSGEGSISYPARYANAMAVGATDQNNNRASFSQYGAGLDIVAPGVNVQSTYPGSTYASLNGTSMATPHVAGAAALVKQKNPSWSNVQIRNHLKNTATSLGSTNLYGSGLVNAEAATR

SEQ ID NO: 53347 - protein, 269 aa, Unidentified
AQSVPWGISRVQAPAAHNRGLTGSGVKVAVLDTGISTHPDLNIRGGASFVPGEPSTQDGNGHGTHVAGTIAALNNSIGVLGVAPSAELYAVKVLGASGSGSVSSIAQGLEWAGNNGMHVANLSLGSPSPSATLEQAVNSATSRGVLVVAASGNSGAGSISYPARYANAMAVGATDQNNNRASFSQYGAGLDIVAPGVNVQSTYPGSTYASLNGTSMATPHVAGAAALVKQKNPSRSNVQIRNHLKNTATSLGSTNLYGSGLVRAEAATR

SEQ ID NO: 53348 - protein, 269 aa, Bacillus lentus
AQSVPWGISRVQAPAAHNRGLTGSGVKVAVLDTGISTHPDLNIRGGASFVPGEPSTQDGNGHGTHVAGTIAALNNSIGVLGVAPSAELYAVKVLGASGSGSVSSIAQGLEWAGNNGMHVANLSLGSPSPSATLEQAVNSATSRGVLVVAASGNSGAGSISYPALYANAMAVGATDQNNNRASFSQYGAGLDIVAPGVNVQSTYPGSTYASLSGTSMATPHVAGAAALVKQKNPSWSNVQIRNHLKNTATSLGSTNLYGSGLVNAEAATR

SEQ ID NO: 53349 - protein, 269 aa, Unidentified
AQSVPWGISRVQAPAAHNRGLTGSGVKVAVLDTGISTHPDLNIRGGASFVPGEPSTQDGNGHGTHVAGTIAALNNSIGVLGVAPNAELYAVKVLGASGSGSVSSIAQGLEWAGNNGMHVANLSLGSESPSATLEQAVNSATSRGVLVVAASGNSGAGSISYPARYANAMAVGATDQNNNRASFSQYGAGLDIVAPGVNVQSTYPGSTYASLNGTSMATPHVAGAAALVKQKNPSWSNVQIRNHLKNTATSLGSTNLYGSGLVNAEAATR

SEQ ID NO: 53350 - protein, 269 aa, Unidentified
AQSVPWGISRVQAPAAHNRGLTGSGVKVAVLDTGISTHPDLNIRGGASFVPGEPSTQDGNGHGTHVAGTIAALNNSIGVLGVAPSAELYAVKVLPFSGSGSVSSIAQGLEWAGNNGMHVANLSLGSPSPSATLEQAVNSATSRGVLVVAASGNSGAGSISYPARYANAMAVGATDQNNNRASFSQYGAGLDIVAPGVNVQSTYPGSTYASLNGTSMATPHVAGAAALVKQKNPSWSNVQIRNHLKNTATSLGSTNLYGSGLVNAEAATR

SEQ ID NO: 53351 - protein, 269 aa, Unidentified
AQSVPWGISRVQAPAAHNRKLTGSGVKVAVLDTGISTHPDLNIRGGASFVPGEPSTQDGNGHGTHVAGTIAALNNSIGVLGVAPSAELYAVKVLGASGSGSVSSIAQGLEWAGLNGMHVANLSLGSPSPSATLEQAVNSATSRGVLVVAASGNSGAGSISYPARYANAMAVGATDQNNNRASFSQYGAGLDIVAPGVNVQSTYPGSTYASLNGTSMATPHVAGAAALVKQKNPSWSNVQIRNHLKNTATSLGSTNLYGSGLVNAEAATR

SEQ ID NO: 53352 - protein, 270 aa, Unidentified
AQSVPWGISRVQAPAAHNRGLTGSGVKVAVLDTGISTHPDLNIRGGASFVPGEPSTQDGNGHGTHVAGTIAALDNSIGVLGVAPSAELYAVKVLGASGXSGSASSIAQGLEWAGNNGMHVANLSLGSPSPSATLEQAVNSATSRGVLVVAASGNSGAGSISYPARYANAMAVGATDQNNNRASFSQYGAGLDIVAPGVNVQSTYPGSTYASLNGTSMATPHVAGAAALVKQKNPSWSNVQIRNHLKNTATSLGSTNLYGSGLVNAEAATR

SEQ ID NO: 53353 - protein, 269 aa, Bacillus lentus
AQSVPWGISRVQAPAAHNRGLTGSGVKVAVLDTGISTHPDLNIRGGASFVPGEPSTQDGNGHGTHVAGTIAALNNSIGVLGVAPRAELYAVKVLGASGSGSVSSIAQGLEWAGNNGMHVANLSLGSPSPSATLEQAVNSATSRGVLVVAASGNSGAGSISYPARYANAMAVGATDQNNNRASFSQYGAGLDIVAPGVNVQSTYPGSTYASLNGTSMATPHVAGAAALVKQKNPSWSNVQIRDHLKNTATSLGSTNLYGSGLVNAEAATR

SEQ ID NO: 53354 - protein, 269 aa, Unidentified
AQSVPWGIARVQAPAAHNRGLTGSGVKVAVLDTGISTHPDLNIRGGASFVPGEPSTQDGNGHGTHVAGTIAALNNSIGVLGVAPSAELYAVKVLGASGSGSVSSIAQGLEWAGNNGMHVANLSLGSPSPSATLEQAVNSATSRGVLVVAASGNSGAGSISYPARYANAMAVGATDQNNNRASFSQYGAGLDIVAPGVNVQSTYPGSTYASLNGTSMATPHVAGAAALVKQKNPSWSNVQIRNHLKNTATSLGSTNLYGSGLVRAEAATR

SEQ ID NO: 53355 - protein, 269 aa, Unidentified
AQSVPWGISRVQAPAAHNRGLTGRGVKVAVLDTGISTHPDLNIRGGASFVPGEPSTQDGNGHGTHVAGTIAALNNSIGVLGVAPSAELYAVKVLGASGSGSVSSIAQGLEWAGNNGMHVANLSLGSPSPSATLEQAVNSATSRGVLVVAASGNSGAGSIDYPARYANAMAVGATDQNNNRASFSQYGAGLDIVAPGVNVQSTYPGSTYASLNGTSMATPHVAGAAALVKQKNPSWSNVQIRNHLKNTATSLGSTNLYGSGLVNAEAATR

SEQ ID NO: 53356 - protein, 269 aa, Unidentified
AQSVPWGISRVQAPAAHNRKLTGFGVKVAVLDTGISTHPDLNIRGGASFVPGEPSTQDGNGHGTHVAGTIAALNNSIGVLGVAPSAELYAVKVLGASGSGSVSSIAQGLEWAGNNGMHVANLSLGSPSPSATLEQAVNSATSRGVLVVAASGNSGAGSISYPARYANAMAVGATDQNNNRASFSQYGAGLDIVAPGVNVQSTYPGSTYASLNGTSMATPHVAGAAALVKQKNPSWSNVQIRNHLKNTATSLGSTNLYGSGLVNAEAATR

SEQ ID NO: 53357 - protein, 269 aa, Unidentified
AQSVPWGISRVQAPAAHNRGLTGSGVKVAVLDTGISTHPDLNIRGGASFVPGEPSTQDGNGHGTHVAGTIAALNNSIGVLGVAPSAELYAVKVLGASGSGSVSSIAQGLEWAGNNGMHVANLSLGSPSPSATLEQAVNSATSRGVLVVAASGNSGAGSISYPARYANAMAVGATDQNNNRASFSQYGAGLDIVAPGVNVQSTFPGSTFASLNGTSMATPHVAGAAALVKQKNPSWSNVQIRNHLKNTATSLGSTNLYGSGLVNAEAATR

SEQ ID NO: 53358 - protein, 269 aa, Unidentified
AQSVPWGISRVQAPAAHNRGLTGSGVKVAVLDTGISTHPDLNIRGGASFVPGEPSTQDGNGHGTHVAGTIAALNNSIGVLGVAPSAELYAVKVLGASGSGSVSSIAQGLEWAGNNGMHVANLSLGSPSPSATLEQAVNSATSRGVIVVAASGNSGAGSISYPARYANAMAVGATDQNNNRASFSQYGAGLDIVAPGVNVQSTYPGSTYASLNGTSMATPHVAGAAALVKQKNPSWSNVQIRNHLKNTATSLGSTNLYGSGLVNAFAATR

SEQ ID NO: 53359 - protein, 269 aa, Unidentified
AQSVPWGIARVQAPAAHNRGLTGSGVKVAVLDTGISTHPDLNIRGGASFVPGEPSTQDGNGHGTHVAGTIAALNNSIGVLGVAPSAELYAVKVLGASGSGSVSSIAQGLEWAGNNGMHVANLSLGSPSPSATLEQAVNSATSRGVLVVAASGNSGAGSISYPARYANAMAVGATDQNNNRASFSQYGAGLDIVAPGVNVQSTYPGSTYASLNGTSMATPHVAGAAALVKQKNPSRSNVQIRNHLKNTATSLGSTNLYGSGLVNAEAATR

SEQ ID NO: 53360 - protein, 269 aa, Unidentified
AQSVPWGISRVQAPAAHNRGLTGSGVKVAVLDTGISTHPDLNIRGGASFVPGEPSTQDGNGHGTHVAGTIAALNNSIGVLGVAPNAELYAVKVLGASGSGSVSSIAQGLEWAGNNGMHVANLSLGSETPSATLEQAVNSATSRGVLVVAASGNSGAGSISYPARYANAMAVGATDQNNNRASFSQYGAGLDIVAPGVNVQSTYPGSTYASLNGTSSATPHVAGAAALVKQKNPSWSNVQIRNHLKNTATSLGSTNLYGSGLVNAEAATR

SEQ ID NO: 53361 - protein, 271 aa, Unidentified
AQSVPWGISRVQAPAAHNRGLTGSGVKVAVLDTGISTHPDLNIRGGASFVPGEPSTQDGNGHGTHVAGTIAALNNSIGVLGVAPSAELYAVKVLGASXSGSGSVSSIAQGLEWAGNNGMHVANLSLGSPSPSETLEQAVNSAKSRGVLVVAASGNSGAGSISYPARYANAMAVGATDQNNNRASFSQYGAGLDIVAPGVNVQSTYPGSTYASLNGTSMATPHVAGAAALVKQKNPSWSNVQIRNHLKNTATSLGSTNLYGSGLVNAEAATR

SEQ ID NO: 53362 - protein, 270 aa, Unidentified
AQSVPWGISRVQAPAAHNRGLTGSGVKVAVLDTGISTHPDLNIRGGASFVPGEPSTQDGNGHGTHVAGTIAALNNSIGVLGVAPSAELYAVKVLGASEGIGSVSSIAQGLEWAGNNGMHVANLSLGSPSPSATVEQAVNSATSRGVLVVAASGNSGAGSISYPARYANAMAVGATDQNNNRASFSQYGAGLDIVAPGVNVQSTYPGSTYASLNGTSMATPHVAGAAALVKQKNPSWSNVQIRNHLKNTATSLGSTNLYGSGLVNAEAATR

SEQ ID NO: 53363 - protein, 269 aa, Unidentified
AQSVPWGISRVQAPAAHNRGLTGSGVKVAVLDTGISTHPDLNIRGGASFVPGEPSTQDGNGHGTHVAGTIAALNNSIGVLGVAPNAELYAVKVLGASGSGSVSSIAQGLEWAGNNGMHVANLSLGSPSPGATLEQAVNSATSRGVLVVAASGNSGAGSISYPARYANAMAVGATDQNNNRASFSQYGAGLDIVAPGVNVQSTYPGSTYASLNGTSMATPHVAGAAALVKQKNPSWSNVQIRNHLKNTATSLGSTNLYGSGLVNAEAATR

SEQ ID NO: 53364 - protein, 269 aa, Unidentified
AQSVPWGISRVQAPAAHNRGLTGSGVKVAVLDTGISTHPDLNIRGGASFVPGEPSTQDGNGHGTHVAGTIAALNNSIGVLGVAPNAELYAVKVLGASGSGSVSSIAQGLEWAGNNGMHVANLSLGSPSPSATLEQAVNSATSRGVLVVAASGNSGXGSISYPARYANAMAVGATDQNNNRASFSQYGAGLDIVAPGVNVQSTYPGSTYASLNGTSMATPHVAGAAALVKQKNPSWSNVQIRNHLKNTATSLGSTNLYGSGLVNAEAATR

SEQ ID NO: 53365 - protein, 269 aa, Unidentified
AQSVPWGISRVQAPAAHNRGLTGSGVKVAVLDTGISTHPDLNIRGGASFVPGEPSTQDGNGHGTHVAGTIAALNNSIGVLGVAPSAELYAVKVLGASGSGSVSSIAQGLEWAGNNGMHVANLSLGSPSPSATLEQAVNSATSRGVLVVAASGNSGAGSISYPARYANAMAVGATDQNNNRASFSQYGAGLDIVAPGVNVQSTYPGSTYASLNGTSMATPHVAGAAALVKQKNPSWSNRQIRNRLKNTATSLGSTNLYGSGLVNAEAATR

SEQ ID NO: 53366 - protein, 269 aa, Unidentified
AQSVPWGISRVQAPAAHNRGLTGSGVKVAVLDTGISTHPDLNIRGGASFVPGEPSTQDGNGHGTHVAGTIAALNNSIGVLGVAHSAELYAVKVLGASGSGSVSSIAQGLEWAGNNGMHVANLSLGSPSPSATLEQAVNSATSRGVLVVAASGNSGAGSISYPARYANAMAVGATDQNNNRASFSQYGAGLDIVAPGVNVQSTYPGSTYASLNGTSMATPHVAGAAALVKQKNPSWSNVQIRNHLKNTATSLGSTNLYGSGLVNAGAATR

SEQ ID NO: 53367 - protein, 269 aa, Unidentified
AQSVPWGISRVQAPAAHNRGLTGSGVKVAVLDTGISTHPDLNIRGGASFVPGEPSTQDGNGHGTHVAGTIAALNNSIGVLGVAPSAELYAVKVLGASGSGSVSSIAQGLEWAGNNGMHVANLSLGSPSPSATLEQAVNSATSRGVLVVAASGNSGAGSISYPARYANAMAVGATDQNNNRASFSQYGAGLDIVAPGVNVQSTYPGSTYASLNGTSMATPHVAGAAALVKQKNPSWRNVQIRNHLKNTATSLGSTNLYGSGLVNALAATR

SEQ ID NO: 53368 - protein, 269 aa, Unidentified
AQSVPWGISRVQAPAAHNRRLTGSGVKVAVLDTGISTHPDRNIRGGASFVPGEPSTQDGNGHGTHVAGTIAALNNSIGVLGVAPSAELYAVKVLGASGSGSVSSIAQGLEWAGNNGMHVANLSLGSPSPSATLEQAVNSATSRGVLVVAASGNSGAGSISYPARYANAMAVGATDQNNNRASFSQYGAGLDIVAPGVNVQSTYPGSTYASLNGTSMATPHVAGAAALVKQKNPSWSNVQIRNHLKNTATSLGSTNLYGSGLVNAEAATR

SEQ ID NO: 53369 - protein, 269 aa, Synthetic construct
AQSVPWGISRVQARAAHNRGLTGSGVKVAVLDTGISTHPDLNIRGGASFVPGEPSTQDGNGHGTHVAGTIAALNNSIGVLGVAPSAELYAVKVLGASGSGSVSSIAQGLEWAGNNGMHVANLSLGSPSPSATLEQAVNSATSRGVLVVAASGNSGAGSISYPASYANAMAVGATDQNNNRASFSQYGAGLDIVAPGVNVQSTYPGSTYASLNGTSMATPHVAGAAALVKQKNPSWSNVQIRNHLKNTATSLGSTNLYGSGLVNAEAATR

SEQ ID NO: 53370 - protein, 269 aa, Synthetic construct
AQSVPWGISRVQAPAAHNRGLTGSGVKVAVLDTGISTHPDLNIRGGASFVPGEPSTQDGNGHGTHVAGTIAALNNSIGVLGVAPSAELYAVKVLGASGSGSVSSIAQGLEWAGNNGMHVANLSLGSPSPSATLEQAVNSATSRGVLVVAASGNSGAGSISYPASYANAMAVGATDQNNNRASFSQYGAGLDIVAPGVNVQSTYPGSTYASLNGTSMATPHVAGAAALVKQKNPSWSNVQIRNHLKNTATSLRSTNLYGSGLVNAEAATR

SEQ ID NO: 53371 - protein, 269 aa, Bacillus lentus
AQSVPWGISRVQAPAAHNRGLTGSGVKVAVLDTGISTHPDLNIRGGASFVPGEPSTQDGDGHGTHVAGTIAALNNSIGVLGVAPSAELYAVKVLGASGSGSVSSIAQGLEWAGNNGMHVANLSLGSPSPSATLEQAVNSATSRGVLVVAASGNSGAGSISYPALYANAMAVGATDQNNNRASFSQYGAGLDIVAPGVNVQSTYPGSTYASLNGTSMATPHVAGAAALVKQKNPSWSNVQIRNHLKNTATSLGSTNLYGSGLVNAEAATR

SEQ ID NO: 53372 - protein, 270 aa, Aspergillus oryzae
AQSVPWGISRVQAPAAHNRGLTGSGVKVAVLDTGISTHPDLNIRGGASFVPGEPSTQDGNGHGTHVAGTIAALNNSIGVLGVAPSAELYAVKVLGASEGSGSVSSIAQGLEWAGNNGMHVANLSLGSPSPSATLEQAVNNATSRGVLVVAASGNDGAGSISYPARYANAMAVGATDQNNNRASFSQYGAGLDIVAPGVNVQSTYPGSTYASLNGTSMATPHVAGAAALVKQKNPSWSNVQIRNHLKNTATSLGSTNLYGSGLVNAEAATR

SEQ ID NO: 53373 - protein, 269 aa, Unidentified
AQSVPWGISRVQAPAAHNRGLTGSGVKVAVLDTGISTHPDRNIRGGASFVPGEPSTQDGNGHGTHVAGTIAALNNSIGVLGVAPSAELYAVKVLGASGSGSVSSIAQGLEWARNNGMHVANLSLGSPSPSATLEQAVNSATSRGVLVVAASGNSGAGSISYPARYANAMAVGATDQNNNRASFSQYGAGLDIVAPGVNVQSTYPGSTYASLNGTSMATPHVAGAAALVKQKNPSWSNVQIRNHLKNTATSLGSTNLYGSGLVNAEAATR

SEQ ID NO: 53374 - protein, 270 aa, Unidentified
AQSVPWGISRVQAPAAHNRGLTGSGVKVAVLDTGISTHPDLNIRGGASFVPGEPSTQDGNGHGTHVAGTIAALNNSIGVLGVAPSAELYAVKVLGAXSGGGSNSSIAQGLEWAGNNGMHVANLSLGSPSPSATLEQAVNSATSRGVLVVAASGNSGAGSISYPARYANAMAVGATDQNNNRASFSQYGAGLDIVAPGVNVQSTYPGSTYASLNGTSMATPHVAGAAALVKQKNPSWSNVQIRNHLKNTATSLGSTNLYGSGLVNAEAATR

SEQ ID NO: 53375 - protein, 269 aa, Unidentified
AQSVPWGISRVQAPAAHNRGLTGSGVKVAVLDTGISTHPDLNIRGGASFVPGEPSTQDGNGHGTHVAGTIAALNNSIGVLGVAPSAELYAVKVLGASGSGSISSIAQGLEWAGNNGMHVANLSLGSPSPGATLEQAVNSATSRGVLVVAASGNSGAGSISYPARYANAMAVGATDQNNNRASFSQYGAGLDIVAPGVNVQSTYPGSTYASLNGTSMATPHVAGAAALVKQKNPSWSNVQIRNHLKNTATSLGSTNLYGSGLVNAEAATR

SEQ ID NO: 53376 - protein, 269 aa, Bacillus subtilis
AQSVPWGISRVQAPAAHNRGLTGSGVKVAVLDTGISTHPDLNIRGGASFVPGEPSTQDGNGHGTHVAGTIAALNNSIGVLGVAPSAELYAVKVLGASGSGSVESIAQGLEWAGNNGMHVANLSLGSPSPSADLEQAVNSATSRGVLVVAASGNSGAGSISYPARYANAMAVGATDQNNNRASFSQYGAGLDIVAPGVNVQSTYPGSTYASLNGTSMATPHVAGAAALVKQKNPSWSNVQIRNHLKNTATSLGSTNLYGSGLVNAEAATR

SEQ ID NO: 53377 - protein, 269 aa, Unidentified
AQSVPWGISRVQAPAAHNRGLTGSGVKVAVLDTGISTHPDLNIRGGASFVPGEPSTQDGNGHGTHVAGTIAALNNSIGVLGVAPNAELYAVKVLGASGSGSVSSIAQGLEWAGNNGMHVANLSLGSPSPSATLEQAVNSATSRGVLVVAASGNSGAGSISYPARYANAMAVGATDQNNNRASFSQYGAGLDIVAPGVNVQSTXPGSTYASLNGTSMATPHVAGAAALVKQKNPSWSNVQIRNHLKNTATSLGSTNLYGSGLVNAEAATR

SEQ ID NO: 53378 - protein, 269 aa, Unidentified
AQSVPWGISRVQAPAAHNRGLTGSGVKVAVLDTGISTHPDLNIRGGASFVPGEPSTQDGNGHGTHVAGTIAALNNSINVLGVAPSAELYAVKVLGASGSGSVSSIAQGLEWAGNNGMHVANLSLGSPSPSATLEQAVNSATSRGVLVVAASGNSGAGSISYPARYQNAMAVGATDQNNNRASFSQYGAGLDIVAPGVNVQSTYPGSTYASLNGTSMATPHVAGAAALVKQKNPSWSNVQIRNHLKNTATSLGSTNLYGSGLVNAEAATR

SEQ ID NO: 53379 - protein, 269 aa, Synthetic construct
AQSVPWGISRVQARAAHNRGLTGSGVKVAVLDTGISTHPDLNINGGASFVPGEPSTQDGNGHGTHVAGTIAALNNSIGVLGVAPSAELYAVKVLGASGSGSVSSIAQGLEWAGNNGMHVANLSLGSPSPSATLEQAVNSATSRGVLVVAASGNSGAGSISYPARYANAMAVGATDQNNNRASFSQYGAGLDIVAPGVNVQSTYPGSTYASLNGTSMATPHVAGAAALVKQKNPSWSNVQIRNHLKNTATSLGSTNLYGSGLVNAEAATR

SEQ ID NO: 53380 - protein, 269 aa, Synthetic construct
AQSVPWGISRVQAPAAHNRGLTGSGVKVAVLDTGISTHPDLNINGGASFVPGEPSTQDGNGHGTHVAGTIAALNNSIGVLGVAPSAELYAVKVLGASGSGSVSSIAQGLEWAGNNGMHVANLSLGSPSPSATLEQAVNSATSRGVLVVAASGNSGAGSISYPARYANAMAVGATDQNNNRASFSQYGAGLDIVAPGVNVQSTYPGSTYARLNGTSMATPHVAGAAALVKQKNPSWSNVQIRNHLKNTATSLGSTNLYGSGLVNAEAATR

SEQ ID NO: 53381 - protein, 269 aa, Unidentified
AQSVPWGISRVQAPAAHNRGLTGSGVKVAVLDTGISTHPDLNIRGGASFVPGEPSTQDGNGHGTHVAGTIAALNNSIGVLGVAPSAELYAVKVLGASGSGSVSSIAQGLEWAGNNRMHVANLSLGSPSPSATLEQAVNSATSRGVLVVAASGNSGAGSISYPARYANAMAVGATDQNNNRASFSQYGAGLDIVAPGVNVQSTAPGSTYASLNGTSMATPHVAGAAALVKQKNPSWSNVQIRNHLKNTATSLGSTNLYGSGLVNAEAATR

SEQ ID NO: 53382 - protein, 271 aa, Unidentified
AQSVPWGISRVQAPAAHNRGLTGSGVKVAVLDTGISTHPDLNIRGGASFVPGEPSTQDGNGHGTHVAGTIAALNNSIGVLGVAPSAELYAVKVLGGPXAGSGSVSSIAQGLEWAGNNGMHVANLSLGSPSPSATLEQAVNSATSRGVLVVAASGNSGAGSISYPARYANAMAVGATDQNNNRASFSQYGAGLDIVAPGVNVQSTYPGSTYASLNGTSMATPHVAGAAALVKQKNPSWSNVQIRNHLKNTATSLGSTNLYGSGLVNAEAATR

SEQ ID NO: 53383 - protein, 269 aa, Bacillus lentus
AQSVPWGISRVQAPAAHNRGLTGSGVKVAVLDTGISTHPDLNIRGGASFVPCEPSTQDENGHGTHVAGTIAALNNSIGVLGVAPSAELYAVKVLGASGSGSVSSIAQGLEWAGNNGMHVANLSLGSPSPSATLEQAVNSATSRGVLVVAASGNSGAGSISYPARYANAMAVGATDQNNNRASFSQYGAGLDIVAPGVNVQSTYPGSTYASLNGTSMATPHVAGAAALVKQKNPSWSNVQIRNHLKNTATSLGSTNLYGSGLVNAEAATR

SEQ ID NO: 53384 - protein, 269 aa, Unidentified
AQSVPWGISRVQAPAAHNRGLTGSGVKVAVLDTGISTHPDRNIRGGASFVPGEPSTQDGNGHGTHVAGTIAALNNRIGVLGVAPSAELYAVKVLGASGSGSVSSIAQGLEWAGNNGMHVANLSLGSPSPSATLEQAVNSATSRGVLVVAASGNSGAGSISYPARYANAMAVGATDQNNNRASFSQYGAGLDIVAPGVNVQSTYPGSTYASLNGTSMATPHVAGAAALVKQKNPSWSNVQIRNHLKNTATSLGSTNLYGSGLVNAEAATR

SEQ ID NO: 53385 - protein, 269 aa, Synthetic construct
AQSVPWGISRVQAPAAHNRGLTGSGVKVAVLDTGISTHPDLNINGGASFVPGEPSTQDGNGHGTHVAGTIAALNNSIGVLGVAPSAELYAVKVLGASGSGSVSSIAQGLEWAGNNGMHVANLSLGRPSPSATLEQAVNSATSRGVLVVAASGNSGAGSISYPARYANAMAVGATDQNNNRASFSQYGAGLDIVAPGVNVQSTYPGSTYASLNGTSMATPHVAGAAALVKQKNPSWSNVQIRNHLKNTATSLGSTNLYGSGLVNAEAATR

SEQ ID NO: 53386 - protein, 270 aa, Aspergillus oryzae
AQSVPWGISRVQAPAAHNRGLTGSGVKVAVLDTGISTHPDLNIRGGASFVPGEPSAQDGNGHGTHVAGTIAALNNSIGVLGVAPSAELYAVKVLGASEGSGSVSSIAQGLEWAGNNGMHVANLSLGSPSPSATLEQAVNSATSRGVLVVAASGNNGAGSISYPARYANAMAVGATDQNNNRASFSQYGAGLDIVAPGVNVQSTYPGSTYASLNGTSMATPHVAGAAALVKQKNPSWSNVQIRNHLKNTATSLGSTNLYGSGLVNAEAATR

SEQ ID NO: 53387 - protein, 269 aa, Unidentified
AQSVPWGISRVQAPAAHRRGLRGSGVKVAVLDTGISTHPDLNIRGGASFVPGEPSTQDGNGHGTHVAGTIAALNNSIGVLGVAPSAELYAVKVLGASGSGSVSSIAQGLEWAGNNGMHVANLSLGSPSPSATLEQAVNSATSRGVLVVAASGNSGAGSISYPARYANAMAVGATDQNNNRASFSQYGAGLDIVAPGVNVQSTYPGSTYASLNGTSMATPHVAGAAALVKQKNPSWSNVQIRNHLKNTATSLGSTNLYGSGLVNAEAATR

SEQ ID NO: 53388 - protein, 269 aa, Unidentified
AQSVPWGISRVQAPAAHNRGLTGSGVKVAVLDTGISTHPDLNIRGGASFVPGEPSTQDGNGHGTHVAGTIAALNNSIGVLGVAPSAELYAVKVLGASGSGSVSSIAQGLEWAGNNGMHVANLSLGSPSPSATLEQAVNSATSGGVLVVAASGNSGAGSISYPARYANAMAVGATDQNNNRASFSQYGAGLDIVAPGVNVQSTYPGSTYASLNGTSMATPHVAGAAALVKQKNPSWSNVQIRNHLKNTATSLGSTNLYSSGLVNAEAATR

SEQ ID NO: 53389 - protein, 269 aa, Unidentified
AQSVPWGISRVQAPAAHNRGLTGSGVKVAVLDTGISTHPDLNIRGGASFVPGEPSTQDGNGHGTHVAGTIAALNNSIGVRGVAPSAELYAVKVLGASGSGSVSSIAQGLEWAGNNGMHVANLSLGSPSPSATLEQAVNSATSRGVLVVAASGNSGAGSISYPARYANAMAVGATDQNNNRASFSQYGAGLDIVAPGVNVQSTYPGSTYASLNGTSMATPHVAGAAALVKQKNPSWSNVQIRNRLKNTATSLGSTNLYGSGLVNAEAATR

SEQ ID NO: 53390 - protein, 269 aa, Unidentified
AQSVPWGISRVQAPAAHNRGLTGSGVKVAVLDTGISTHPDLNIRGGASFVPGEPSTQDGNGHGTHVAGTIAALNNSIGVLGVAPNAELYAVKVLGASGSGSVSSIAQGLEWAGNNGLHVANLSLGSPSPSATLEQAVNSATSRGVLVVAASGNSGAGSISYPARYANAMAVGATDQNNNRASFSQYGAGLDIVAPGVNVQSTYPGSTYASLNGTSMATPHVAGAAALVKQKNPSWSNVQIRNHLKNTATSLGSTNLYGSGLVNAEAATR

SEQ ID NO: 53391 - protein, 269 aa, Unidentified
AQSVPWGISRVQAPAAHNRGLTGSGVKVAVLDTGISTHPDLNIRGGASFVPGEPSTQDGNGHGTHVAGTIAALNNSIGVLGVAPSAELYAVKVLGAAGSGGVSSIAQGLEWAGNNGMHVANLSLGSPSPSATLEQAVNSATSRGVLVVAASGNSGAGSISYPARYANAMAVGATDQNNNRASFSQYGAGLDIVAPGVNVQSTYPGSTYASLNGTSMATPHVAGAAALVKQKNPSWSNVQIRNHLKNTATSLGSTNLYGSGLVNAEAATR

SEQ ID NO: 53392 - protein, 269 aa, Unidentified
AQSVPWGISRVQAPAAHNRRLTGSGVKVAVLDTGISTHPDLNIRGGASFVPGEPSTQDGNGHGTHVAGTIAALNNSIGVRGVAPSAELYAVKVLGASGSGSVSSIAQGLEWAGNNGMHVANLSLGSPSPSATLEQAVNSATSRGVLVVAASGNSGAGSISYPARYANAMAVGATDQNNNRASFSQYGAGLDIVAPGVNVQSTYPGSTYASLNGTSMATPHVAGAAALVKQKNPSWSNVQIRNHLKNTATSLGSTNLYGSGLVNAEAATR

SEQ ID NO: 53393 - protein, 269 aa, Unidentified
AQSVPWGISRVQAPAAHNRGLTGSGVKVAVLDTGISTHPDLNIRGGASFVPGEPSTQDGNGHGTHVAGTIAALNNSIGVLGVAPSAELYAVKVLGAGGGGSVSSIAQGLEWAGNNGMHVANLSLGSPSPSATLEQAVNSATSRGVLVVAASGNSGAGSISYPARYANAMAVGATDQNNNRASFSQYGAGLDIVAPGVNVQSTYPGSTYASLNGTSMATPHVAGAAALVKQKNPSWSNVQIRNHLKNTATSLGSTNLYGSGLVNAEAATR

SEQ ID NO: 53394 - protein, 270 aa, Aspergillus oryzae
AQSVPWGISRVQAPAAHNRGLTGSGVKVAVLDTGISTHPDLNIRGGASFVPGEPSTQDGNGHGTHVAGTIAALNNSIGVLGVAPSAELYAVKVLGASEGSGSVSSIAQGLEWAGNNGMHVANLSLGSPSPSATLEQAVNSATSRGVLVVAASGNSGAGSISYPARYANAMAVGATDQNNNRASFSQYGAGLDIVAPGVNVQSTYPGSTYASLNGTSMATPHVAGAAALVKQKNPSWSNVQIRNHLKNTATSLGNINLYGSGLVNAEAATR

SEQ ID NO: 53395 - protein, 269 aa, Unidentified
AQSVPWGISRVQAPAAHNRGLTGSGVKVAVLDTGISTHPDLNIRGGASFVPGEPSTQDGNGHGTHVAGTIAALNNSIGVLGVAPSAPLYAVKVLGASGSGSVSSIAQGLEWAGNNGMHVANLSLGNPSPSATLEQAVNSATSRGVLVVAASGNSGAGSISYPARYANAMAVGATDQNNNRASFSQYGAGLDIVAPGVNVQSTYPGSTYASLNGTSMATPHVAGAAALVKQKNPSWSNVQIRNHLKNTATSLGSTNLYGSGLVNAEAATR

SEQ ID NO: 53396 - protein, 269 aa, Unidentified
AQSVPWGISRVQAPAAHNRGLTGSGVKVAVLDTGISTHPDLNIRGGASFVPGEPSTQDGNGHGTHVAGTIAALNNSIGVLGVAPDAELYAVKVLGASGSGSVSSIAQGLEWAGNNGMHVANLSLGSPSPSATLEQAVNSATSRGVLVVAASGNSGAGSISYPARYANAMAVGATDQNNNRARFSQYGAGLDIVAPGVNVQSTYPGSTYASLNGTSMATPHVAGAAALVKQKNPSWSNVQIRNHLKNTATSLGSTNLYGSGLVNAEAATR

SEQ ID NO: 53397 - protein, 269 aa, Unidentified
AQSVPWGISRVQAPAAHNRGLTGSGSKVAVLDTGISTHPDLNIRGGASFVPGEPSTQDGNGHGTHVAGTIAALNNSIGVLGVAPSAELYAVKVLGASGSGSVSSIAQGLEWAGNNGMHVANLSLGSPSPSATLEQAVNSATSRGVLVVAASGNSGAGSISYPARYANAMAVGATDQNNNRASFSQYGAGLDIVAPGVNVQSTYPGSTYASLSGTSMATPHVAGAAALVKQKNPSWSNVQIRNHLKNTATSLGSTNLYGSGLVNAEAATR

SEQ ID NO: 53398 - protein, 269 aa, Unidentified
AQSVPWGISRVQAPAAHNRGLTGSGVKVAVLDTGISTHPDLNIRGGASFVPGEPSTQDGNGHGTHVAGTIAALNNSIGVLGVAPSAELYAVKVLGAGGSGSVSSIAQGLEWAGNNGMHVANLSLGSPSPSATLEQAVNSATSRGVLVVAASGNSGAGSISYPARYANAMAVGATDQNNNRASFSQYGAGLDIVAPGVNVQSTYPGSTYASLNGTSMATPHVAGAAALVKQKNPSWSNVQIRNHLKNTATSLGSTNLYGSGRVNAEAATR

SEQ ID NO: 53399 - protein, 269 aa, Unidentified
AQSVPWGISRVQAPAAHNRGLTGSGVKVAVLDTGISTHPDLNIRGGASFVPGEPSTQDGNGHGTHVAGTIAALNNSIGVLGVAPSAELYAVKVLGASGSGSLSSIAQGLEWAGNNGMHVANLSLGSPSPSATLEQAVNSATSRGVLVVAASGNSGAGSISYPARYANAMAVGATDQNNNRASFSQYGAGLDIVAPGVNVQSTYPGSTYASLNGTSMATPHVAGAAALVKQKNPSWSNVQIRNHLKNTATSLGSTNLYGSGLVNAFAATR

SEQ ID NO: 53400 - protein, 269 aa, Synthetic construct
AQSVPWGISRVQAPAAHNRGLTGSGVKVAVLDTGISTHPDLNIRGGASFVPGEPSTQDGNGHGTHVAGTIAALNNSIGVLGVAPSAELYAVKVLGASGSGSVSSIAQGLEWAGNNGMHVANLSLGSPSPSATLEQAVNSATSRGVLVVAASGNSGAGSISYPARYANAMAVGATDQNNNRADFSNYGAGLDIVAPGVNVQSTYPGSTYASLNGTSMATPHVAGAAALVKQKNPSWSNVQIRNHLKNTATSLGSTNLYGSGLVNAEAATR

SEQ ID NO: 53401 - protein, 269 aa, Unidentified
AQSVPWGISRVQAPAAHNRGLTGSGVKVAVLDTGISTHPDLNIRGGASFVPGEPSTQDGNGHGTHVAGTIAALNNSIGVLGVAPSAELYAVKVLGASGAGSVSSIAQGLEWAGNNGMHVANLSLGSPSPSATLEQAVNSATSRGVLVVAASGNSGEGSISYPARYANAMAVGATDQNNNRASFSQYGAGLDIVAPGVNVQSTYPGSTYASLNGTSMATPHVAGAAALVKQKNPSWSNVQIRNHLKNTATSLGSTNLYGSGLVNAEAATR

SEQ ID NO: 53402 - protein, 269 aa, Unidentified
AQSVPWGISRVQAPAAHNRGLTGSGVKVAVLDTGISTHPDLNIRGGASFVPGEPSTQDGNGHGTHVAGTIAALNNSIGVLGVAPSAELYAVKVLGASGSGSVSSIAQGLEWARNNGMHVANLSLGSPSPSATLEQAVNSATSRGVLVVAASGNSGAGSISYPARYANAMAVGATDQNNNRASFSQYGAGLDIVAPGVNVQSTYPGSTYASLNGTSMATPHVAGAAALVKQKNPSWSNRQIRNHLKNTATSLGSTNLYGSGLVNAEAATR

SEQ ID NO: 53403 - protein, 269 aa, Unidentified
AQSVPWGISRVQAPAAHNRGLTGSGVKVAVLDTGISTHPDLNIRGGASFVPGEPSTQDGNGHGTHVAGTIAALNNSIGVLGVAPSAELYAVKVLGASGSGSVSSIAQGLEWAGNNGMHVANLSLGSPSPSATLEQAVNSATSRGVLVVAASGNSGAGSISYPARYANAMAVGATDQNNNRASFSQYGAGLDIVAPGVNVQSTYPGSTYASLNGTSMATPHVAGAAALVKQKNPSWSNVQIRNRLKNTATSLGSTNLYGSGLVNAFAATR

SEQ ID NO: 53404 - protein, 269 aa, Unidentified
AQSVPWGISRVQAPAAHNRGLTGSGVKVAVLDTGISTHPDLNIRGGAVFVPGEPSTQDGNGHGTHVAGTIAALNNSIGVLGVAPSAELYAVKVLGASGSGSVSSIAQGLEWAGNNGMHVANLSLGSPSPSATLEQAVNSATSRGVLVVAASGNSGAGSISYPARYANAMAVGATDQNNNRASFSQYGAGLDIIAPGVNVQSTYPGSTYASLNGTSMATPHVAGAAALVKQKNPSWSNVQIRNHLKNTATSLGSTNLYGSGLVNAEAATR

SEQ ID NO: 53405 - protein, 269 aa, Unidentified
AQSVPWGISRVQAPASHNRGLTGSGVKVAVLDTGISTHPDLNIRGGASFVPGEPSTQDGNGHGTHVAGTIAALNNSIGVLGVAPSAELYAVKVLGASGSGSVSSIAQGLEWAGNNGMHVANLSLGSPSPSATLEQAVNSATSRGVLVVAASGNSGAGSISYPARYANAMAVGATDQNNNRASFSQYGAGLDIVAPGVNVQSTYPGSTYASLNGTSMATPHVAGAAALVKQKNPSWSNVQIRNHLKNTATSLGSTNLYGSGLVNAFAATR

SEQ ID NO: 53406 - protein, 269 aa, Unidentified
AQSVPWGISRVQAPAAHNRGLTGSGVKVAVLDTGISTHPDLNIRGGASFVPGEPSTQDGNGHGTHVAGTIAALNNNIGVLGVAPSAELYAVKVLGASGSGSVSSIAQGLEWAGNNGMHVANLSLGSPSPSATLEQAVNSATSRGVLVVAASGNSGAGSISYPARYANAMAVGATDQNNNRASFSQYGAGLDIVAPGVNVQSTYPGSAYASLNGTSMATPHVAGAAALVKQKNPSWSNVQIRNHLKNTATSLGSTNLYGSGLVNAEAATR

SEQ ID NO: 53407 - protein, 269 aa, Unidentified
AQSVPWGISRVQAPAAHNRGLTGSGVKVAVLDSGISTHPDLNIRGGASFVPGEPSTQDGNGHGTHVAGTIAALNNSIGVLGVAWSAELYAVKVLGASGSGSVSSIAQGLEWAGNNGMHVANLSLGSPSPSATLEQAVNSATSRGVLVVAASGNSGAGSISYPARYANAMAVGATDQNNNRASFSQYGAGLDIVAPGVNVQSTYPGSTYASLNGTSMATPHVAGAAALVKQKNPSWSNVQIRNHLKNTATSLGSTNLYGSGLVNAEAATR

SEQ ID NO: 53408 - protein, 269 aa, Bacillus sp.
AQSVPWGISRVQAPAAHNRGLTGSGVKVAVLDTGISTHPDLNIRGGASFVPGEPSTQDGNGHGTHVAGTIAALNNSIGVLGVAPNAELYAVKVLGASGSGSVSSIAQGLEWAGNNGMHVANLSLGSPSPSATLEQAVNSATSRGVLVVAASGNSGAGSICYPARYANAMAVGATDQNNNRASFSQYGAGLDIVAPGVNVQSTYPGSTYASLNGTSMATPHVAGAAALVKQKNPSWSNVQIRNHLKNTATSLGSTNLYGSGLVNAEAATR

SEQ ID NO: 53409 - protein, 269 aa, Unidentified
AQSVPWGISRVQAPAAHNRGLTGSGVKVAVLDTGISTHPDLNIRGGASFVPGEPSTQDGNGHGTHVAGTIAALNNSIGVLGVAPSAELYAVKVLGASSSGSISSIAQGLEWAGNNGMHVANLSLGSPSPSATLEQAVNSATSRGVLVVAASGNSGAGSISYPARYANAMAVGATDQNNNRASFSQYGAGLDIVAPGVNVQSTYPGSTYASLNGTSMATPHVAGAAALVKQKNPSWSNVQIRNHLKNTATSLGSTNLYGSGLVNAEAATR

SEQ ID NO: 53410 - protein, 269 aa, Unidentified
AQSVPWGISRVQAPAAHNRRLTGSGVKVAVLDTGISTHPDLNIRGGASFVPGEPSTQDGNGHGTHVAGTIAALNNSIGVLGVAPSAELYAVKVLGASGSGSVSSIAQGLEWAGNNGMHVANLSLGSESPSATLEQAVNSATSRGVLVVAASGNSGAGSISYPARYANAMAVGATDQNNNRASFSQYGAGLDIVAPGVNVQSTYPGSTYASLNGTSMATPHVAGAAALVKQKNPSWSNVQIRNHLKNTATSLGSTNLYGSGLVNAEAATR

SEQ ID NO: 53411 - protein, 269 aa, Unidentified
AQSVPWGISRVQAPAAHNRGLTGSGVKVAVLDTGISTHPDLNIRGGASFVPGEPSTQDGNGHGTHVAGTIAALNNSIGVLGVAPSAELYAIKVLGASGSGSVSSIAQGLEWAGNNGMHVANLSLGSPSPSATLEQAVNSATSRGVLVVAASGNSGAGSISYPARYANAMAVGATDQNNNRASFSQYGAGLDMVAPGVNVQSTYPGSTYASLNGTSMATPHVAGAAALVKQKNPSWSNVQIRNHLKNTATSLGSTNLYGSGLVNAEAATR

SEQ ID NO: 53412 - protein, 269 aa, Synthetic construct
AQSVPWGISRVQAPAAHNRGLTGSGVKVAVLDTGISTHPDLNINGGASFVPGEPSTQDRNGHGTHVAGTIAALNNSIGVLGVAPSAELYAVKVLGASGSGSVSSIAQGLEWAGNNGMHVANLSLGSPSPSATLEQAVNSATSRGVLVVAASGNSGAGSISYPARYANAMAVGATDQNNNRASFSQYGAGLDIVAPGVNVQSTYPGSTYASLNGTSMATPHVAGAAALVKQKNPSWSNVQIRNHLKNTATSLGSTNLYGSGLVNAEAATR

SEQ ID NO: 53413 - protein, 269 aa, Synthetic construct
AQSVPWGISRVQAPAAHNRGLTGSGVKVAVLDTGISTHPDLNIRGGASFVPGEPSTQDGNGHGTHVAGTIAALNNSIGVLGVAPSAELYAVKVLGASGSGSVSSIAQGLEWAGNNGMHVANLSLGSPSPSATLEQAVNSATSRGVLVVAASGNSGAGDGSYPARYANAMAVGATDQNNNRASFSQYGAGLDIVAPGVNVQSTYPGSTYASLNGTSMATPHVAGAAALVKQKNPSWSNVQIRNHLKNTATSLGSTNLYGSGLVNAEAATR

SEQ ID NO: 53414 - protein, 269 aa, Unidentified
AQSVPWGISRVQAPASHNRGLAGSGVKVAVLDTGISTHPDLNIRGGASFVPGEPSTQDGNGHGTHVAGTIAALNNSIGVLGVAPSAELYAVKVLGASGSGSVSSIAQGLEWAGNNGMHVANLSLGSPSPSATLEQAVNSATSRGVLVVAASGNSGAGSISYPARYANAMAVGATDQNNNRASFSQYGAGLDIVAPGVNVQSTYPGSTYASLNGTSMATPHVAGAAALVKQKNPSWSNVQIRNHLKNTATSLGSTNLYGSGLVNAEAATR

SEQ ID NO: 53415 - protein, 269 aa, Unidentified
AQSVPWGISRVQAPAAHNRGLTGSGVKVAVLDTGISTHPDLNIRGGASFVPGEPSTQDGNGHGTHVAGTIAALNNSIGVLGVAPSAELYAVKVLPASGSGAVSSIAQGLEWAGNNGMHVANLSLGSPSPSATLEQAVNSATSRGVLVVAASGNSGAGSISYPARYANAMAVGATDQNNNRASFSQYGAGLDIVAPGVNVQSTYPGSTYASLNGTSMATPHVAGAAALVKQKNPSWSNVQIRNHLKNTATSLGSTNLYGSGLVNAEAATR

SEQ ID NO: 53416 - protein, 269 aa, Unidentified
AQSVPWGISRVQAPAAHNRGLRGSGVKVAVLDTGISTHPDLNIRGGASFVPGEPSTQDGNGHGTHVAGTIAALNNSIGVLGVAPSAELYAVKVLGASGSGSVSSIAQGLEWAGNNGMHVANLSLGSPSPSATLEQAVNSATSRGVLVVAASGNSGAGSISYPARYANAMAVGATDQNNNRASFSQYGAGLDIVAPGVNVQSTYPGSTYASLNGTSMATPHVAGAAALVKQKNPSWRNVQIRNHLKNTATSLGSTNLYGSGLVNAEAATR

SEQ ID NO: 53417 - protein, 269 aa, Unidentified
AQSVPWGISRVQAPAAHNRGLRGRGVKVAVLDTGISTHPDLNIRGGASFVPGEPSTQDGNGHGTHVAGTIAALNNSIGVLGVAPSAELYAVKVLGASGSGSVSSIAQGLEWAGNNGMHVANLSLGSPSPSATLEQAVNSATSRGVLVVAASGNSGAGSISYPARYANAMAVGATDQNNNRASFSQYGAGLDIVAPGVNVQSTYPGSTYASLNGTSMATPHVAGAAALVKQKNPSWSNVQIRNHLKNTATSLGSTNLYGSGLVNAEAATR

SEQ ID NO: 53418 - protein, 269 aa, Synthetic construct
AQSVPWGISRVQAPAAHNRGLTGSGVKVAVLDTGISTHPDLNIRGGASFVPGEPSTQDGNGHGTHVAGTIAALNNSIGVLGVAPSAELYAVKVLGASGSGSVSSIAQGLEWAGNNGMHVANLSLGSPSPSATLEQAVNSATSRGVLVVAASGNSGAGSISYPARYANAMAVGATDQNNNRASFSQYGAGLDIVAPGVEVQSTYPGSTYASCNGTSMATPHVAGAAALVKQKNPSWSNVQIRNHLKNTATSLGSTNLYGSGLVNAEAATR

SEQ ID NO: 53419 - protein, 269 aa, Unidentified
AQSVPWGISRVQAPAAHNRGLTGSGVKVAVLDTGISTHPDLNIRGGASFVPGEPSTQDGNGHGTHVAGTIAALNNSIGVLGVAPSAELYAVKVLGASGSGSNSSIAQGLEWAGNNGMHVANLSLGSPSPSATLEQAVNSATSRGVLVVAASGNSGAGSISYPAYYANAMAVGATDQNNNRASFSQYGAGLDIVAPGVNVQSTYPGSTYASLNGTSMATPHVAGAAALVKQKNPSWSNVQIRNHLKNTATSLGSTNLYGSGLVNAEAATR

SEQ ID NO: 53420 - protein, 269 aa, Unidentified
AQSVPWGISRVQAPAAHNRGLTGSGVKVAVLDTGISTHPDLNIRGGASFVPGEPSTQDGNGHGTHVAGTIAALNNSIGVLGVAPSAELYAVKVLGASGSGSVSSIAQGLEWAGNNGMHVANLSLGSPSPSATLEQAVNSATSRGVIVVAASGNSGAGSISYPARYANAMAVGATDQNNNRASFSQYGAGLDIVAPGVNVQSTYPGSTYASLNGTSMATPHVAGAAALVKQKNPSWSNVQIRNRLKNTATSLGSTNLYGSGLVNAEAATR

SEQ ID NO: 53421 - protein, 269 aa, Bacillus lentus
AQSVPWGISRVQAPAAHNRGLTGSGVKVAVLDTGISTHPDLNIRGGASFVPGDPSTQDGDGHGTHVAGTIAALNNSIGVLGVAPSAELYAVKVLGASGSGSVSSIAQGLEWAGNNGMHVANLSLGSPSPSATLEQAVNSATSRGVLVVAASGNSGAGSISYPARYANAMAVGATDQNNNRASFSQYGAGLDIVAPGVNVQSTYPGSTYASLNGTSMATPHVAGAAALVKQKNPSWSNVQIRNHLKNTATSLGSTNLYGSGLVNAEAATR

SEQ ID NO: 53422 - protein, 269 aa, Unidentified
AQSVPWGISRVQAPAAHNRGLTGSGVKVAVLDTGISTHPDLNIRGGASFAPGEPSTQDGNGHGTHVAGTIAALNNSIGVLGVAPSAELYAVKVLGASGSGSVSSIAQGLEWAGNNGMHVANLSLGSPSPSATLEQAVNSATSRGVLVVAASGNSGAGSISYPARYANAMAVGATDQNNNRASFSQYGAGLDIVAPGVNVQSTYPGDTYASLNGTSMATPHVAGAAALVKQKNPSWSNVQIRNHLKNTATSLGSTNLYGSGLVNAEAATR

SEQ ID NO: 53423 - protein, 269 aa, Unidentified
AQSRPWGISRVQAPAAHNRGLTGSGVKVAVLDTGISTHPDLNIRGGASFVPGEPSTQDGNGHGTHVAGTIAALNNSIGVLGVAPSAELYAVKVLGASGSGSVSSIAQGLEWARNNGMHVANLSLGSPSPSATLEQAVNSATSRGVLVVAASGNSGAGSISYPARYANAMAVGATDQNNNRASFSQYGAGLDIVAPGVNVQSTYPGSTYASLNGTSMATPHVAGAAALVKQKNPSWSNVQIRNHLKNTATSLGSTNLYGSGLVNAEAATR

SEQ ID NO: 53424 - protein, 270 aa, Aspergillus oryzae
AQSVPWGISRVQAPAAHNRGLTGSGVKVAVLDTGISTHPDLNIRGGASFVPGEPSTQDGNGHGTHVAGTIAALNNSIGVLGVAPSAELYAVKVLGASEGSGSVSSIAQGLEWAGNNGMHVANLSLGSPSPSATLEQAVNSATSRGVLVVAASGNSGAGSISYPARYANAMAVGATDQNNNRASFSQYGAPLDIVAPGVNVQSTYPGSTYASLNGTSMATPHVAGAAALVKQKNPSWSNVQIRNHLKNTATSLGSLNLYGSGLVNAEAATR

SEQ ID NO: 53425 - protein, 269 aa, Unidentified
AQSVPWGISRVQAPAAHNRGLTGSGVKVAVLDTGISTHPDLNIRGGASFVPGEPSTQDGNGHGTHVAGTIAALNNSIGVLGVAPSAPLYAVKVLGASGSGGVSSIAQGLEWAGNNGMHVANLSLGSPSPSATLEQAVNSATSRGVLVVAASGNSGAGSISYPARYANAMAVGATDQNNNRASFSQYGAGLDIVAPGVNVQSTYPGSTYASLNGTSMATPHVAGAAALVKQKNPSWSNVQIRNHLKNTATSLGSTNLYGSGLVNAEAATR

SEQ ID NO: 53426 - protein, 269 aa, Bacillus lentus
AQSVPWGISRVQAPAAHNRGLTGSGVKVAVLDTGISTHPDLNIRGGASFVPGEPSTQDGNGHGTHVAGTIAALNNSIGVLGVAPSAELYAVKVLGASGSGSVSSIAQGLEWAGNNGMHVANLSLGSPSPSATLEQAVNSATSRGVLVVAASGNSGAGSISYPARYANAMAVGATDQNNNRARFSQYGAGLDIVAPGVNVQSTYPGSTYASLNGTSMATPHVAGAAALVKQKNPSWSNVQIRRHLKNTATSLGSTNLYGSGLVNAEAATR

SEQ ID NO: 53427 - protein, 269 aa, Unidentified
AQSVPWGISRVQAPAAHNRGLAGSGVKVAVLDTGISTHPDLNIRGGASFVPGEPSTQDGNGHGTHVAGTIAALNNSIGVLGVAPSAELYAVKVLGASGSGSVSSIAQGLEWAGNNGMHVANLSLGSPSPSATLEQAVNSATSRGVLVVAASGNSGAGSISYPARYANAMAVGATDQNNNRADFSQYGAGLDIVAPGVNVQSTYPGSTYASLNGTSMATPHVAGAAALVKQKNPSWSNVQIRNHLKNTATSLGSTNLYGSGLVNAEAATR

SEQ ID NO: 53428 - protein, 269 aa, Unidentified
AQSVPWGISRVQAPAAHNRGLTGSGVKVAVLDTGISTHPDLNIRGGASFVPGEPSTQDGNGHGTHVAGTIAALNNSIGVLGVAPSAELYAVKVLGASGSGSLSSIAQGLEWAGNNGMHVANLSLGSPSPSATLEQAVNSATSRGVLVVAASGNSGAESISYPARYANAMAVGATDQNNNRASFSQYGAGLDIVAPGVNVQSTYPGSTYASLNGTSMATPHVAGAAALVKQKNPSWSNVQIRNHLKNTATSLGSTNLYGSGLVNAEAATR

SEQ ID NO: 53429 - protein, 269 aa, Unidentified
AQSVPWGISRVQAPAAHNRGLTGSGVKVAVLDTGISTHPDLNIRGGASFVPGEPSTQDGNGHGTHVAGTIAALNNSIGVLGVAPSAELYAVKVLGASGSGDVDSIAQGLEWAGNNGMHVANLSLGSPSPSATLEQAVNSATSRGVLVVAASGNSGAGSISYPARYANAMAVGATDQNNNRASFSQYGAGLDIVAPGVNVQSTYPGSTYASLNGTSMATPHVAGAAALVKQKNPSWSNVQIRNHLKNTATSLGSTNLYGSGLVNAEAATR

SEQ ID NO: 53430 - protein, 269 aa, Unidentified
AQSVPWGISRVQAPAAHNRGLTGRGVKVAVLDTGISTHPDLNIRGGASFVPGEPSTQDGNGHGTHVAGTIAALNNSIGVLGVAPSAELYAVKVLGASGSGSVSSIAQGLEWAGNNGMHVANLSLGSPSPSATLEQAVNSATSRGVLVVAASGNSGAGSISYPARYANAMAVGATDQNNNRASFSQYGAGLDIVAPGVNVQSTYPGSTYASLNGTSMATPHVAGAAALVKQKNPSWSNVQIRNHLKNTATSLGSTNLYGSGLVNAEPATR

SEQ ID NO: 53431 - protein, 269 aa, Unidentified
AQSVPWGISRVQAPAAHNRGLTGSGVKVAVLDTGISTHPDLNIRGGASFVPGEPSTQDGNGHGTHVAGTIAALNNSIGVLGVAPSAELYAVKVLGASGSASVSSIAQGLEWAGNNGMHVANLSLGSPSPSATLEQAVNSATSRGVLVVAASGNSGAGSISYPARYANAMAVGATDQNNNRASFSQYGAGLDIVAPGVNVQSTYPGSTYASENGTSMATPHVAGAAALVKQKNPSWSNVQIRNHLKNTATSLGSTNLYGSGLVNAEAATR

SEQ ID NO: 53432 - protein, 269 aa, Unidentified
AQSVPWGISRVQAPAAHNRGLTGSGVKVAVLDTGISTHPDLNIRGGASFVPGEPSTQDGNGHGTHVAGTIAALNNSIGVLGVAPSAELYAVKVLGASGSGSVSSIAQGLEWAGNNGMHVANLSLGSESPSATLEQAVNSATSRGVLVVAASGNSGAGSISYPARYANAMAVGATDQNNNRASFSQYGAGLDIVAPGVNVQSTYPGSTYASENGTSMATPHVAGAAALVKQKNPSWSNVQIRNHLKNTATSLGSTNLYGSGLVNAEAATR

SEQ ID NO: 53433 - protein, 269 aa, Unidentified
AQSVPWGISRVQAPAAHNRGLTGSGVKVAVLDTGISTHPDLNIRGGASFVPGEPSTQDGNGHGTHVAGTIAALNNSIGVLGVAPSAELYATKVLGASGSGSVSSIAQGLEWAGNNGMHVANLSLGSPSPSATLGQAVNSATSRGVLVVAASGNSGAGSISYPARYANAMAVGATDQNNNRASFSQYGAGLDIVAPGVNVQSTYPGSTYASLNGTSMATPHVAGAAALVKQKNPSWSNVQIRNHLKNTATSLGSTNLYGSGLVNAEAATR

SEQ ID NO: 53434 - protein, 269 aa, Unidentified
AQSVPWGISRVQAPAAHNRGLTGRGVKVAVLDTGISTHPDLNIRGGASFVPGEPSTQDGNGHGTHVAGTIAALNNSIGVLGVAPSAELYAVKVLGASGSGSVSSIAQGLEWAGNNGMHVANLSLGSPSPSATLEQAVNSATSRGVLVVAASGNSGAGSISYPARYANAMAVGATDQNNNRASFSQYGAGLDIVAPGVNVQSTYPGFTYASLNGTSMATPHVAGAAALVKQKNPSWSNVQIRNHLKNTATSLGSTNLYGSGLVNAEAATR

SEQ ID NO: 53435 - protein, 269 aa, Bacillus sp.
AQSVPWGISRVQAPAAHNRGLTGSGVKVAVLDTGISTHPDLNIRGGASFVPGEPSTQDGNGHGTHVAGTIAALNNSIGVLGVAPNAELYAVKVLGASGSGSVSSIAQGLEWAGNNGLDVANLSLGSPSPSATLEQAVNSATSRGVLVVAASGNSGAGSISYPARYANAMAVGATDQNNNRASFSQYGAGLDIVAPGVNVQSTYPGSTYASLNGTSSATPHVAGAAALVKQKNPSWSNVQIRNHLKNTATSLGSTNLYGSGLVNAEAATR

SEQ ID NO: 53436 - protein, 269 aa, Unidentified
AQSVPWGISRVQAPAAHNRKLTGSGVKVAVLDTGISTHPDLNIRGGASFVPGEPSTQDGNGHGTHVAGTIAALNNSIGVLGVAPSAELYAVKVLGASGSGSVSSIAQGLEWAGNNGMHVANLSLGQPSPSATLEQAVNSATSRGVLVVAASGNSGAGSISYPARYANAMAVGATDQNNNRASFSQYGAGLDIVAPGVNVQSTYPGSAYASLNGTSSATPHVAGAAALVKQKNPSWSNVQIRNHLKNTATSLGSTNLYGSGLVNAEAATR

SEQ ID NO: 53437 - protein, 269 aa, Bacillus lentus
AQSVPWGISRVQAPAAHNRGLTGSGVKVAVLDTGISTHPDLNIRGGASFVPGEPSTQDGNGHGTHVAGTIAALNNSIGVLGVAPDAELYAVKVLGASGSGSVSSIARGLEWAGNNGMHVANLSLGSPSPSATLEQAVNSATSRGVLVVAASGNSGAGSISYPARYANAMAVGATDQNNNRASFSQYGAGLDIVAPGVNVQSTYPGSTYASLNGTSMATPHVAGAAALVKQKNPSWSNVQIRNHLKNTATSLGSTNLYGSGLVNAEAATR

SEQ ID NO: 53438 - protein, 269 aa, Bacillus sp.
AQSVPWGISRVQAPAAHNRGLTGSGVKVAVLDTGISTHPDLNIRGGASFVPGEPSTQDGNGHGTHVAGTIAALNNSIGVLGVAPNAELYAVKVLGASGSGSVSSIAQGLEWAGNNGMHVANLSLGSPSPSATLEQAVNSATSRGVLVVAASGNSGAGSITYPARYANAMAVGATDQNNNRASFSQYGAGLDIVAPGVNVQSTYPGSTYASLNGTSMATPHVAGAAALVKQKNPSWSNVQIRNHLKNTATSLGSTNLYGSGLVNAEAATR

SEQ ID NO: 53439 - protein, 269 aa, Unidentified
AQSVPWGISRVQAPAAHNRGLTGSGVKVAVLDTGISTHPDLNIRGGASFVPGEPSTQDGNGHGTHVAGTIAALNNSIGVLGVAPSAELYAVKVLGASGSGSVSSIAQGLEWAGNNGMHVANLSLGSPSPSATLEQAVNSATSRGVLVCAASGNSGAGSISYPARYANAMAVGATDQNNNRASFSQYGAGLDIVAPGVNVQSTYPGSTYASLSGTSMATPHVAGAAALVKQKNPSWSNVQIRNHLKNTATSLGSTNLYGSGLVNAEAATR

SEQ ID NO: 53440 - protein, 269 aa, Unidentified
AQSVPWGISRVQAPAAHNRGLTGSGVKVAVLDTGISTHPDRNIRGGASFVPGEPSTQDGNGHGTHVAGTIAALNNSIGVLGVAPSAELYAVKVLGASGSGSVSSIAQGLEWAGNNGMHVANLSLGSPSPSATLEQAVNSATSRGVLVVAASGNSGAGSISYPARYANAMAVGATDQNNNRASFSQYGAGLDIVAPGVNVQSTYPGSTYASLNGTSMATPHVAGAAALVKQKNPSWRNVQIRNHLKNTATSLGSTNLYGSGLVNAEAATR

SEQ ID NO: 53441 - protein, 269 aa, Bacillus sp.
AQSVPWGISRVQAPAAHNRGLTGSGVKVAVLDTGISTHPDLNIRGGASFVPGEPSTQDGNGHGTHVAGTIAALNNSIGVLGVAPNAELYAVKVLGASGSGSVSSIAQGLEWAGNNGMHVANLSLGSPSPSATLEQAVNSATSRGVLVVAASGNSGAGSISYPARYANASAVGATDQNNNRASFSQYGAGLDIVAPGVNVQSTYPGSTYASLNGTSMATPHVAGAAALVKQKNPSWSNVQIRNHLKNTATSLGSTNLYGSGLVNAEAATR

SEQ ID NO: 53442 - protein, 269 aa, Unidentified
AQSVPWGISRVQAPAAHNRGLTGSGVKVAVLDTGISTHPDLNIRGGASFVPGEPSTQDGNGHGTHVAGTIAALNNSIGVLGVAPSAELYAVKVLGASGSGSLSSIAQGLEWAGNNGMHVANLSLGSPSPSATLEQAVNSATSRGVLVVAASGNSGAGSISYPARYANAMAVGATDQNNNRADFSQYGAGLDIVAPGVNVQSTYPGSTYASLNGTSMATPHVAGAAALVKQKNPSWSNVQIRNHLKNTATSLGSTNLYGSGLVNAEAATR

SEQ ID NO: 53443 - protein, 269 aa, Unidentified
AQSVPWGISRVQAPAAHNRGLTGSGVKVAVLDTGISTHPDLNIRGGASFVPGEPSTQDGNGHGTHVAGTIAALNNSIGVLGVAPSAELYAVKVLGFGGSGSVSSIAQGLEWAGNNGMHVANLSLGSPSPSATLEQAVNSATSRGVLVVAASGNSGAGSISYPARYANAMAVGATDQNNNRASFSQYGAGLDIVAPGVNVQSTYPGSTYASLNGTSMATPHVAGAAALVKQKNPSWSNVQIRNHLKNTATSLGSTNLYGSGLVNAEAATR

SEQ ID NO: 53444 - protein, 269 aa, Unidentified
AQSVPWGISRVQAPAAHNRGLTGSGVKVAVLDTGISTHPDLNIRGGASFVPGEPSTQDGNGHGTHVAGTIAALNNSIGVLGVAPSAELYAVKVLGASGSGSVSSIAQGLEWAGNNGMHVANLSLGSESPSATLEQAVNSATSRGVLVVAASGNSGADSISYPARYANAMAVGATDQNNNRASFSQYGAGLDIVAPGVNVQSTYPGSTYASLNGTSMATPHVAGAAALVKQKNPSWSNVQIRNHLKNTATSLGSTNLYGSGLVNAEAATR

SEQ ID NO: 53445 - protein, 269 aa, Unidentified
AQSVPWGISRVQAPAAHNRGLTGSGVKVAALDTGISTHPDLNIRGGASFVPGEPSTQDGNGHGTHVAGTIAALNNSIGVLGVAPSAELYAVKVLGASGSGSVSSIAQGLEWAGNNGMHVANLSLGSPSPSATLEQAVNSATSRGVLVVAASGNSGAGSISYPARYANAMAVGATDQNNNRASFSQYGAGLDVVAPGVNVQSTYPGSTYASLNGTSMATPHVAGAAALVKQKNPSWSNVQIRNHLKNTATSLGSTNLYGSGLVNAEAATR

SEQ ID NO: 53446 - protein, 269 aa, Unidentified
AQSVPWGISRVQAPAAHNRGLTGSGVKVAVLDTGISTHPDLNIRGGASFVPGEPSTQDGNGHGTHVAGTIAALNNSIGVLGVAPSAELYAVKVLGASGSGSVSSIAQGLEWAGNNGMHVANLSLGSPSPSATLEQAVNSATSRGVLVVAASGNSGAGSISYPARYANAMAVGATDQNNNRASFSQYGAGLDIVAPGVNVQSTYPGFTYASLNGTSMATPHVAGAAALVKQKNPSWSNRQIRNHLKNTATSLGSTNLYGSGLVNAEAATR

SEQ ID NO: 53447 - protein, 269 aa, Unidentified
AQSVPWGISRVQAPAAHNRGLRGSGVKVAVLDTGISTHPDLNIRGGASFVPGEPSTQDGNGHGTHVAGTIAALNNSIGVLGVAPSAELYAVKVLGASGSGSVSSIAQGLEWAGNNGMHVANLSLGSPSPSATLEQAVNSATSRGVLVVAASGNSGAGSISYPARYANAMAVGATDQNNNRASFSQYGAGLDIVAPGVNVQSTYPGSTYASLNGTSMATPHVAGAAALVKQKNPSWSNVQIRNRLKNTATSLGSTNLYGSGLVNAEAATR

SEQ ID NO: 53448 - protein, 268 aa, Unidentified
AQSVPWGISRVQAPAAHNRGLTGSGVKVAVLDTGISTHPDLNIRGGASFVPGEPSTQDGNGHGTHVAGTIAALNNIGVLGVAPSAELYAVKVLGASGSGSVSSIAQGLEWAGNNSMHVANLSLGSPSPSATLEQAVNSATSRGVLVVAASGNSGAGSISYPARYANAMAVGATDQNNNRADFSQYGAGLDIVAPGVNVQSTYPGSTYASLNGTSMATPHVAGAAALVKQKNPSWSNVQIRNHLKNTATSLGSTNLYGSGLVNAEAATR

SEQ ID NO: 53449 - protein, 268 aa, Unidentified
AQSVPWGISRVQAPAAHNRGLTGSGVKVAVLDTGISTHPDLNIRGGASFVPGEPSTQDGNGHGTHVAGTIAALNNSIGVLGVAPSAELYAVKVLGAGGASVSSIAQGLEWAGNNGMHVANLSLGSPSPSATLEQAVNSATSRGVLVVAASGNSGAGSISYPARYANAMAVGATDQNNNRASFSQYGAGLDIVAPGVNVQSTYPGSTYASLNGTSMATPHVAGAAALVKQKNPSWSNVQIRNHLKNTATSLGSTNLYGSGLVNAEAATR

SEQ ID NO: 53450 - protein, 268 aa, Unidentified
AQSVPWGISRVQAPASHNRGLTGSGVKVAVLDTGISTHPDLNIRGGASFVPGEPSTQDGNGHGTHVAGTIAALNNSIGVLGVAPSAELYAVKVLGASGSGSVSSIAQGLEWAGNNGMHVANLSLGSPSPSATLEQAVNSATSRGVLVVAASGNSGAGSISYPARYANAMAVGATDQNNNRADFSQYGAGLDIVAPGVNVQSTYPGSTYASLNGTSMATPHVAGAAALVKQKNPSWSNVQINHLKNTATSLGSTNLYGSGLVNAEAATR

SEQ ID NO: 53451 - protein, 268 aa, Unidentified
AQSVPWGISRVQAPAAHNRGLTGSGVKVAVLDTGISTHPDLNIRGGASFVPGEPSTQDGNGHGTHVAGTIAALNNIGVLGVAPSAELYAVKVLGASGSGSVSSIAQGLEWAGNNDMHVANLSLGSESPSATLEQAVNSATSRGVLVVAASGNSGAGSISYPARYANAMAVGATDQNNNRASFSQYGAGLDIVAPGVNVQSTYPGSTYASLNGTSMATPHVAGAAALVKQKNPSWSNVQIRNHLKNTATSLGSTNLYGSGLVNAEAATR

SEQ ID NO: 53452 - protein, 268 aa, Unidentified
QSVPWGIARVQAPAAHNRGLTGSGVKVAVLDTGISTHPDRNIRGGASFVPGEPSTQDGNGHGTHVAGTIAALNNSIGVLGVAPSAELYAVKVLGASGSGSVSSIAQGLEWAGNNGMHVANLSLGSPSPSATLEQAVNSATSRGVLVVAASGNSGAGSISYPARYANAMAVGATDQNNNRASFSQYGAGLDIVAPGVNVQSTYPGSTYASLNGTSMATPHVAGAAALVKQKNPSWSNVQIRNHLKNTATSLGSTNLYGSGLVNAEAATR

SEQ ID NO: 53453 - protein, 268 aa, Unidentified
QSVPWGISRVQAPAAHNRGLTGRGVKVAVLDTGISTHPDRNIRGGASFVPGEPSTQDGNGHGTHVAGTIAALNNSIGVLGVAPSAELYAVKVLGASGSGSVSSIAQGLEWAGNNGMHVANLSLGSPSPSATLEQAVNSATSRGVLVVAASGNSGAGSISYPARYANAMAVGATDQNNNRASFSQYGAGLDIVAPGVNVQSTYPGSTYASLNGTSMATPHVAGAAALVKQKNPSWSNVQIRNHLKNTATSLGSTNLYGSGLVNAEAATR

SEQ ID NO: 53454 - protein, 268 aa, Unidentified
QSVPWGISRVQAPAAHNRGLTGRGVKVAVLDTGISTHPDLRIRGGASFVPGEPSTQDGNGHGTHVAGTIAALNNSIGVLGVAPSAELYAVKVLGASGSGSVSSIAQGLEWAGNNGMHVANLSLGSPSPSATLEQAVNSATSRGVLVVAASGNSGAGSISYPARYANAMAVGATDQNNNRASFSQYGAGLDIVAPGVNVQSTYPGSTYASLNGTSMATPHVAGAAALVKQKNPSWSNVQIRNHLKNTATSLGSTNLYGSGLVNAEAATR

SEQ ID NO: 53455 - protein, 269 aa, Bacillus sp. KSM-K16
AQSVPWGISRVQAPAAHNRGLTGSGVKVAVLDTGISTHPDLNIRGGASFVPGEPSTQDGNGHGTHVAGTIAALNNSIGVLGVAPSAELYAVKVLGASGSGSVSSIAQGLEWAGNNGMHVANLSLGSPSPSATLEQAVNSATSRGVLVVAASGNSGAGSISYPARYANAMAVGATDQNNNRASFQYGAGLDIVAPGVNVQSTYPGSTYASLNGTSMATPHVAGVAAALVKQKNPSWSNVQIRNHLKNTATGLGNTNLYGSGLVNAEAATR

SEQ ID NO: 53456 - protein, 268 aa, Unidentified
QSVPWGIARVQAPAAHNRGLTGSGVKVAVLDTGISTHPDLRIRGGASFVPGEPSTQDGNGHGTHVAGTIAALNNSIGVLGVAPSAELYAVKVLGASGSGSVSSIAQGLEWAGNNGMHVANLSLGSPSPSATLEQAVNSATSRGVLVVAASGNSGAGSISYPARYANAMAVGATDQNNNRASFSQYGAGLDIVAPGVNVQSTYPGSTYASLNGTSMATPHVAGAAALVKQKNPSWSNVQIRNHLKNTATSLGSTNLYGSGLVNAEAATR

SEQ ID NO: 53457 - protein, 353 aa, Unidentified
AEEAKEKYLIGFNEQEAVSEFVEQVEANDEVAILSEEEEVEIELLHEFETIPVLSVELSPEDVDALELDPAISYIEEDAEVTTMAQSVPWGISRVQAPAAHNRGLTGSGVKVAVLDTGISTHPDLNIRGGASFVPGEPSTQDGNGHGTHVAGTIAALDNSIGVLGVAPSAELYAVKVLGASGSGAISSIAQGLEWAGNNGMHVANLSLGSPSPSATLEQAVNSATSRGVLVVAASGNSGAGSISYPARYANAMAVGATDQNNNRASFSQYGAGLDIVAPGVNVQSTYPGSTYASLNGTSMATPHVAGAAALVKQKNPSWSNVQIRNHLKNTATSLGSTNLYGSGLVNAEAATR

SEQ ID NO: 53458 - protein, 353 aa, Unidentified
AEEAKEKYLIGFNEQEAVSEFVEQVEANDEVAILSEEEEVEIELLHEFETIPVLSVELSPEDVDALELDPAISYIEEDAEVTTMAQSVPWGISRVQAPAAHNRGLTGSGVKVAVLDTGISTHPDLNIRGGASFVPGEPSTQDGNGHGTHVAGTIAALNNSIGVLGVAPNAELYAVKVLGASGGGSNSSIAQGLEWAGNNGMHVANLSLGSPSPSATLEQAVNSATSRGVLVVAASGNSGAGSISYPARYANAMAVGATDQNNNRASFSQYGAGLDIVAPGVNVQSTYPGSTYASLNGTSMATPHVAGAAALVKQKNPSWSNVQIRNHLKNTATSLGSTNLYGSGLVNAEAATR

SEQ ID NO: 53459 - protein, 253 aa, Unidentified
NGFLTGNSGVKVAVLDTGISTHPDLNIRGGASFVPGEPSTQDGNGHGTHVAGTIAALNNSIGVLGVAPSAELYAVKVLGASGSGSVSSIAQGLEWAGNNGMHVANLSLGSPSPSATLEQAVNSATSRGVLVVAASGNSGAGSISYPARYANAMAVGATDQNNNRASFSQYGAGLDIVAPGVNVQSTYPGSTYASLNGTSMATPHVAGAAALVKQKNPSWSNVQIRNHLKNTATSLGSTNLYGSGLVNAEAATR

SEQ ID NO: 53460 - protein, 251 aa, Unidentified
GLAHNSGVKVAVLDTGISTHPDLNIRGGASFVPGEPSTQDGNGHGTHVAGTIAALNNSIGVLGVAPSAELYAVKVLGASGSGSVSSIAQGLEWAGNNGMHVANLSLGSPSPSATLEQAVNSATSRGVLVVAASGNSGAGSISYPARYANAMAVGATDQNNNRASFSQYGAGLDIVAPGVNVQSTYPGSTYASLNGTSMATPHVAGAAALVKQKNPSWSNVQIRNHLKNTATSLGSTNLYGSGLVNAEAATR

SEQ ID NO: 53461 - protein, 249 aa, Unidentified
LHNSGVKVAVLDTGISTHPDLNIRGGASFVPGEPSTQDGNGHGTHVAGTIAALNNSIGVLGVAPSAELYAVKVLGASGSGSVSSIAQGLEWAGNNGMHVANLSLGSPSPSATLEQAVNSATSRGVLVVAASGNSGAGSISYPARYANAMAVGATDQNNNRASFSQYGAGLDIVAPGVNVQSTYPGSTYASLNGTSMATPHVAGAAALVKQKNPSWSNVQIRNHLKNTATSLGSTNLYGSGLVNAEAATR

SEQ ID NO: 53462 - protein, 248 aa, Unidentified
SNSGVKVAVLDTGISTHPDLNIRGGASFVPGEPSTQDGNGHGTHVAGTIAALNNSIGVLGVAPSAELYAVKVLGASGSGSVSSIAQGLEWAGNNGMHVANLSLGSPSPSATLEQAVNSATSRGVLVVAASGNSGAGSISYPARYANAMAVGATDQNNNRASFSQYGAGLDIVAPGVNVQSTYPGSTYASLNGTSMATPHVAGAAALVKQKNPSWSNVQIRNHLKNTATSLGSTNLYGSGLVNAEAATR

SEQ ID NO: 53463 - protein, 244 aa, Unidentified
AEEAKEKYLIGFNEQEAVSEFVEQVEANDEVAILSEEEEVEIELLHEFETIPVLSVELSPEDVDALELDPAISYIEEDAEVTTMAQSVPWGISRVQAPAAHNRGLTGSGVKVAVLDTGISTHPDLNIRGGASFVPGEPSTQDGNGHGTHVAGTIAALNNSIGVLGVAPSAELYAVKVLGASGSGSVSSIAQGLEWAGNNGMHVANLSLGSPSPSATLEQAVNSATSRGVLVVAASGNSGAGCLA

SEQ ID NO: 53464 - protein, 159 aa, Bacillus licheniformis
AQSVPWGISRVQAPAAHNRGLTGSGVKVAVLDTGISTHPDLNIRGGASFVPGEPSTQDGNGHGTHVAGTIAALNNSIGVLGVAPSAELYAVKVLGASGSGSVSSIAQGLEWAGNNGMHVANLSLGSPSPSATLEQAVNSATSRGVLVVAASGNSGAGCL

SEQ ID NO: 53465 - protein, 300 aa, Unidentified
LVVHNSPEDVDALELDPAISYIEEDAEVTTMAQSVPWGISRVQAPAAHNRGLTGSGVKVAVLDTGISTHPDLNIRGGASFVPGEPSTQDGNGHGTHVAGTIAALNNSIGVLGVAPSAELYAVKVLGASGSGSVSSIAQGLEWAGNNGMHVANLSLGSPSPSATLEQAVNSATSRGVLVVAASGNSGAGSISYPARYANAMAVGATDQNNNRASFSQYGAGLDIVAPGVNVQSTYPGSTYASLNGTSMATPHVAGAAALVKQKNPSWSNVQIRNHLKNTATSLGSTNLYGSGLVNAEAATR

SEQ ID NO: 53466 - protein, 296 aa, Unidentified
AEEAKEKYLIGFNEQEAVSEFVEQVEANDEVAILSEEEEVEIELLHEFETIPVLSVELSPEDVDALELDPAISYIEEDAEVTTMAQSVPWGISRVQAPAAHNRGLTGSGVKVAVLDTGISTHPDLNIRGGASFVPGEPSTQDGNGHGTHVAGTIAALNNSIGVLGVAPSAELYAVKVLGASGSGSVSSIAQGLEWAGNNGMHVANLSLGSPSPSATLEQAVNSATSRGVLVVAASGNSGAGSISYPARYANAMAVGATDQNNNRASFSQYGAGLDIVAPGVNVQSTYPGCAAYDTL

SEQ ID NO: 53467 - protein, 294 aa, Unidentified
AEEAKEKYLIGFNEQEAVSEFVEQVEANDEVAILSEEEEVEIELLHEFETIPVLSVELSPEDVDALELDPAISYIEEDAEVTTMAQSVPWGISRVQAPAAHNRGLTGSGVKVAVLDTGISTHPDLNIRGGASFVPGEPSTQDGNGHGTHVAGTIAALNNSIGVLGVAPSAELYAVKVLGASGSGSVSSIAQGLEWAGNNGMHVANLSLGSPSPSATLEQAVNSATSRGVLVVAASGNSGAGSISYPARYANAMAVGATDQNNNRASFSQYGAGLDIVAPGVNVQSTYPGCLNAN

SEQ ID NO: 53468 - protein, 294 aa, Bacillus licheniformis
AEEAKEKYLIGFNEQEAVSEFVEQVEANDEVAILSEEEEVEIELLHEFETIPVLSVELSPEDVDALELDPAISYIEEDAEVTTMAQSVPWGISRVQAPAAHNRGLTGSGVKVAVLDTGISTHPDLNIRGGASFVPGEPSTQDGNGHGTHVAGTIAALNNSIGVLGVAPSAELYAVKVLGASGSGSVSSIAQGLEWAGNNGMHVANLSLGSPSPSATLEQAVNSATSRGVLVVAASGNSGAGSISYPARYANAMAVGATDQNNNRASFSQYGAGLDIVAPGVNVQSTYPGCLVGS

SEQ ID NO: 53469 - protein, 211 aa, Unidentified
AQSVPWGISRVQAPAAHNRGLTGSGVKVAVLDTGISTHPDLNIRGGASFVPGEPSTQDGNGHGTHVAGTIAALNNSIGVLGVAPSAELYAVKVLGASGSGSVSSIAQGLEWAGNNGMHVANLSLGSPSPSATLEQAVNSATSRGVLVVAASGNSGAGSISYPARYANAMAVGATDQNNNRASFSQYGAGLDIVAPGVNVQSTYPGCLANGT

SEQ ID NO: 53470 - protein, 210 aa, Unidentified
AQSVPWGISRVQAPAAHNRGLTGSGVKVAVLDTGISTHPDLNIRGGASFVPGEPSTQDGNGHGTHVAGTIAALNNSIGVLGVAPSAELYAVKVLGASGSGSVSSIAQGLEWAGNNGMHVANLSLGSPSPSATLEQAVNSATSRGVLVVAASGNSGAGSISYPARYANAMAVGATDQNNNRASFSQYGAGLDIVAPGVNVQSTYPGCLPAS

SEQ ID NO: 53471 - protein, 210 aa, Unidentified
AQSVPWGISRVQAPAAHNRGLTGSGVKVAVLDTGISTHPDLNIRGGASFVPGEPSTQDGNGHGTHVAGTIAALNNSIGVLGVAPSAELYAVKVLGASGSGSVSSIAQGLEWAGNNGMHVANLSLGSPSPSATLEQAVNSATSRGVLVVAASGNSGAGSISYPARYANAMAVGATDQNNNRASFSQYGAGLDIVAPGVNVQSTYPGSLACS

SEQ ID NO: 53472 - protein, 209 aa, Unidentified
AQSVPWGISRVQAPAAHNRGLTGSGVKVAVLDTGISTHPDLNIRGGASFVPGEPSTQDGNGHGTHVAGTIAALNNSIGVLGVAPSAELYAVKVLGASGSGSVSSIAQGLEWAGNNGMHVANLSLGSPSPSATLEQAVNSATSRGVLVVAASGNSGAGSISYPARYANAMAVGATDQNNNRASFSQYGAGLDIVAPGVNVQSTYPGCVTA

SEQ ID NO: 53473 - protein, 274 aa, Bacillus licheniformis
AQTVPYGIPLIKADKVQAQGFKGANVKVAVLDTGIQASHPDLNVVGGASFVAGEAYNTDGNGHGTHVSGTVAALDNNTGVLGVAPSVSLYAVKVLNSSGSGSYSGIVSGIEWATTNGMDVINMSLGGPSGSTAMKQAVDNAYARGVVVVAAAGNSGSSGNTNTIQYPAKYDSVIAVGAVDSNSNRASFSSVGAELEVMAPGAGVYSTYPTNTYATLNGTSMASPHVAGAAALILSKHPNLSASQVRNRLSSTATYLGSSFYYGKGLINVEAAAQ

SEQ ID NO: 53474 - protein, 274 aa, Bacillus licheniformis
AQVVPYGIPLIKADKVQAQGFKGANVKVAVLDTGIQASHPDLNVVGGASFVAGEAYNTDGNGHGTHVAGTVAALDNTTGVLGVAPSVSLYAVKVLNSSGSGSYSGIVSGIEWATTNGMDVINMSLGGAPGSTAMKQAVDNAYARGVVVVAAAGNSGSSGNTNTIGYPAKYDSVIAVGAVDSNSNRASFSSVGAELEVMAPGAGVYSTYPTNTYATLNSTSMASPHVAGAAALILSKHPNLSASQVRNRLSSTATYLGSPFYYGKGLINVEAAAQ

SEQ ID NO: 53475 - protein, 274 aa, Bacillus licheniformis
AQTVPYGIPLIKADKVQAQGFKGANVKVAVLDTGIQASHPDLNVVGGASFVAGEAYNTDGNGHGTHVAGTVAALDNTTGVLGVAPSVSLYAVKVLNSSGSGSYSGIVSGIEWATTNGMDVINISLGGASGSTAMKRAVDNAYARGVVVVAAAGNSGSSGNTNTIQYPAKYDSVIAVGAVDSNSNRASFSSVGAELEVMAPGAGVYSTYPTNTYATLNGTSMASPHVAGAAALILSKHPNLSASQVRNRLSSTATYLGESFYYGKGLINVEAAAQ

SEQ ID NO: 53476 - protein, 274 aa, Bacillus licheniformis
AQTVPYGIELIKADKVQAQGFKGANVKVAVLDTGIQASHPDLNVVGGASFVAGEAYNTDGNGHGTHVAGTVAALDNTTGVLGVAPSVSLYAVKVLNSSGSGSYSGIVSGIEWATTNGMDVINMSLGGASGSTAMKQAVDNAYARGVVVVAAAGNSGSSGNTNTIGQPAKYDSVIAVGAVDSNSNRASFSSVGAELEVMAPGAGVYSTYPTNTYATLNSTSMASPHVAGAAALILSKHPNLSASQVRNRLSSTATYLGSPFYYGKGLINVEAAAQ

SEQ ID NO: 53477 - protein, 274 aa, Bacillus licheniformis
AQVVPYGIPLIKADKVQAQGFKGANVKVAVLDTGIQASHPDLNVVGGASFVAGEAYNTDGNGHGTHVAGTVAALDNTTGVLGVAPSVSLYAVKVLNSSGSGSYSGIVSGIEWATTNGMDVINMSLGGQSGSTAMKQAVDNAYARGVVVVAAAGNSGSSGNTNTIGYPAKYDSVIAVGAVDSNSNRASFSSVGAELEVMAPGAGVYSTYPTNTYATLQGTSMASPHVAGAAALILSKHPNLSASQVRNRLSSTATYLGSPFYYGKGLINVEAAAQ

SEQ ID NO: 53478 - protein, 274 aa, Bacillus licheniformis
AQVVPYGIPLIKADKVQAQGFKGANVKVAVLDTGIQASHPDLNVVGGASFVAGEAYNTDGNGHGTHVAGTVAALDNTTGVLGVAPSVSLYAVKVLNSSGSGSYSGIVSGIEWATTNGMDVINMSLGGSSGSTAMKQAVDNAYARGVVVVAAAGNSGSSGNTNTIGQPAKYDSVIAVGAVDSNSNRASFSSVGAELEVMAPGAGVYSTYPTNTYATLNSTSMASPHVAGAAALILSKHPNLSASQVRNRLSSTATYLGSSFYYGKGLINVEAAAQ

SEQ ID NO: 53479 - protein, 274 aa, Bacillus licheniformis
AQVVPYGIPLIKADKVQAQGFKGQNVKVAVLDTGIQASHPDLNVVGGASFVAGEAYNTDGNGHGTHVAGTVAALDNTTGVLGVAPSVSLYAVKVLNSSGSGSYSGIVSGIEWATTNGMDVINMSLGGASGSTAMKQAVDNAYARGVVVVAAAGNSGSSGNTNTIGYPAKYDSVIAVGAVDSNSNRASFSSVGAELEVMAPGAGVYSTYPTNTYATLNSTSMASPHVAGAAALILSKHPNLSASQVRNRLSSTATYLGSPFYYGKGLINVEAAAQ

SEQ ID NO: 53480 - protein, 274 aa, Bacillus licheniformis
AQTVPYGIELIKADKVQAQGFKGANVKVAVLDTGIQASHPDLNVRGGASFVAGEAYNTDGNGHGTHVAGTVAALDNTTGVLGVAPSVSLYAVKVLNSSGSGSYSGIVSGIEWATTNGMDVINISLGGASGSTAMKRAVDNAYARGVVVVAAAGNSGSSGNTNTIGYPAKYDSVIAVGAVDSNSNRASFSSVGAELEVMAPGAGVYSTYPTNTYATLNGTSMASPHVAGAAALILSKHPNLSASQVRNRLSSTATYLGSSFYYGKGLINVEAAAQ

SEQ ID NO: 53481 - protein, 274 aa, Bacillus licheniformis
AQTVPYGIPLIKADKVQAQGFKGANVKVAVLDTGIQASHPDLNVVGGASFVAGEAYNTDGNGHGTHVAGTVAALDNTTGVLGVAPSVSLYAVKVLNSSGSGSYSGIVSGIEWATTNGMDVINMSLGGPSGSTAMKQAVDNAYARGVVVVAAAGNSGSSGNTNTIGYPAKYDSVIAVGAVDSNSNRAPFSSVGAELEVMAPGAGVYSTYPPNTYATLNGTSMASPHVAGAAALILSKHPNLSASQVRNRLSSTATYLGPSFYYGKGLINVEAAAQ

SEQ ID NO: 53482 - protein, 274 aa, Bacillus licheniformis
AQTVPYGIPLIKADKVQAQGFKGANVKVAVLDTGIQASHPDLNVVGGASFVAGEAYNTDGNGHGTHVAGTVAALDDTTGVLGVAPSVSLYAVKVLNSSGSGSYSGIVSGIEWATTNGMDVINMSLGGQPGSTAMKQAVDNAYARGVVVVAAAGNSGSSGNTNTIGYPAKYDSVIAVGAVDSNSNRASFSSVGAELEVMAPGAGVYSTYPTNTYATLNSTSMASPHVAGAAALILSKHPNLSASQVRNRLSSTATYLGSSFYYGKGLINVEAAAQ

SEQ ID NO: 53483 - protein, 274 aa, Bacillus licheniformis
AQTVPYGIPLIKADKVQAQGFKGANVKVAVLDTGIQASHPDLNVVGGASFVAGEAYNADGNGHGTHVAGTVAALDNTTGVLGVAPSVSSYAVKVLDSSGSGSYSGIVSGIEWATTNGMDVINMSLGGASGSTAMKQAVDNAYARGVVVVAAAGNSGSSGNTNTIGYPAKYDSVIAVGAVDSNSNRASFSSVGAELEVMAPGAGVYSTYPTNTYATWNGTSMASPHVAGAAALILSKHPNLSASQVRNRLSSTATYLGSSFYYGKGLINVEAAAQ

SEQ ID NO: 53484 - protein, 274 aa, Bacillus licheniformis
AQTVPYGIPLIKADKVQAQGFKGANVKVAVLDTGIQASHPDLNVVGGASFVAGEAYNTDGNGHGTHVAGTAAALDNTTGVLGVAPSVSLYAVKVANSSGSGSYSGIVSGIEWATTNGMDVINMSLGGSSGSTAMKQAVDNAYARGVVVVAAAGNSGSSGNTNTIGYPAKYDSVIAVGAVDSNSNRASFSSVGAELEVMAPGAGVYSTYPPNTYATLNGTSMASPHVAGAAALILSKHPNLSASQVRNRLSSTATYLGSSFYYGKGLINVEAAAQ

SEQ ID NO: 53485 - protein, 274 aa, Bacillus licheniformis
AQTVPYGIPLIKADKVQAQGFKGANVKVAVLDTGIQASHPDLNVVGGASFVAGEAYNTDGNGHGTHVAGTVAALDDTTGVLGVAPSVSLYAVKVLNSSGSGSYSGIVSGIEWATTNGMDVINMSLGGASGSTAMKQAVDNAYARGVVVVAAAGNSGSSGNTNTIGQPAKYDSVIAVGAVDSNSNQASFSSVGAELEVMAPGAGVYSTYPTNTYATLNGTSMASPHVAGAAALILSKHPNLSASQVRNRLSSTATYLGSPFYYGKGLINVEAAAQ

SEQ ID NO: 53486 - protein, 274 aa, Bacillus licheniformis
AQTVPYGIPLIKADKVQAQGFKGANVKVAVLDTGIQASHPDLNVVGGASFVAGEAYNTDGNGHGTHVAGTVAALDNTTGVLGVAPSVSLYAVKVLNSSGSGTYSGIVSGIEWATTNGMDVINMSLGGPSGSTAMKQAVDNAYARGVVVVAAAGNSGSSGNTNTIGYPAKYDSVIAVGAVDSNSNRASFSSVGAELEVMAPGAGVYSTYPTSTYATLNGTSMASPHIAGAAALILSKHPNLSASQVRNRLSSTATYLGSSFYYGKGLINVEAAAQ

SEQ ID NO: 53487 - protein, 274 aa, Synthetic construct
AQTVPYGIPLIKADKVQAQGFKGANVKVAVLDTGIQASHPDLNVVGGASFVAGEAYNTDGNGHGTHVAGTVAALDNTTGVLGVAPSVSLYAVKVLNSSGSGSYSGIVSGIEWATTNGMDVINMSLGGASGSTAMKQAVDNAYARGVVVVAAAGNSGNSGSTNTIGYPAKYDSVIAVGAVDSNSNRASFSSVGAELEVMTPGAGQYSTYPTNTYATLNGTSMASPHVAGAAALILSKHPNLSASQVRNRLSSTATYLGSSFYYGKGLINVEAAAQ

SEQ ID NO: 53488 - protein, 274 aa, Bacillus licheniformis
AQVVPYGIPLIKADKVQAQGFKGANVKVAVLDTGIQASHPDLNVVGGASFVAGEAYNTDGNGHGTHVAGTVAALDNTTGVLGVAPSVSLYAVKVLNSSGSGSYSGIVSGIEWATTNGMDVINMSLGGAPGSTAMKQAVDNAYARGVVVVAAAGNSGSSGNTNTIGYPAKYDSVIAVGAVDSNSNRASFSSVGAELEVMAPGAGVYSTYPTPTYATLNSTSMASPHVAGAAALILSKHPNLSASQVRNRLSSTATYLGSSFYYGKGLINVEAAAQ

SEQ ID NO: 53489 - protein, 274 aa, Bacillus licheniformis
AQVVPYGIPLIKADKVQAQGFKGANVKVAVLDTGIQASHPDLNVVGGASFVAGEAYNTDGNGHGTHVASTVAALDNTTGVLGVAPSVSLYAVKVLNSSGSGSYSGIVSGIEWATTNGMDVINMSLGGASGSTAMKQAVDNAYARGVVVVAAAGNSGSSGNTNTIGQPAKYDSVIAVGAVDSNSNRASFSSVGAELEVMAPGAGVYSTYPTNTYATLNGTSMASPHVAGAAALILSKHPNLSASQVRNRLSSTATYLGSPFYYGKGLINVEAAAQ

SEQ ID NO: 53490 - protein, 274 aa, Bacillus licheniformis
AQTVPYGIPLIKADKVQAQGFKGANVKVAVLDTGIQASHPDLNVVGGASFVAGEAYNTDGNGHGTHVAGTVAALDNTTGVLGVAPSVSLYAVKVLNSSGSGSYSGIVSGIEWATTNGMDVINISLGGASGSTAMKQAVDNAYARGVVVVAAAGNSGSSGNTNTIQYPAKYDSVIAVGAVDSNSQRASFSSVGAELEVMAPGAGVYSTYPTNTYATLSGTSMASPHVAGAAALILSKHPNLSASQVRNRLSSTATYLGSSFYYGKGLINVEAAAQ

SEQ ID NO: 53491 - protein, 274 aa, Bacillus licheniformis
AQVVPYGIPLIKADKVQAQGFKGANVKVAVLDTGIQASHPDLNVVGGASFVAGEAYNTDGNGHGTHVAGTVAALDNTTGVLGVAPSVSLYAVKVLNSSGSGSYSGIVSGIEWATTNGMDVINMSLGGASGSTAMKQAVDNAYARRVVVVAAAGNSGSSGNTNTIGQPAKYDSVIAVGAVDSNSNQASFSSVGAELEVMAPGAGVYSTYPTNTYATLNGTSMASPHVAGAAALILSKHPNLSASQVRNRLSSTATYLGSSFYYGKGLINVEAAAQ

SEQ ID NO: 53492 - protein, 274 aa, Bacillus licheniformis
AQTVPYGIPLIKADKVQAQGFKGANVKVAVLDTGIQASHPDLNVVGGASFVAGEAYNTDGNGHGTHVAGTAAALDNTTGVLGVAPSVSLYAVKVLNSSGSGSYSGIVSGIEWATTNGMDVINISLGGSSGSTAMKQAVDNAYARGVVVVAAAGNSGSSGNTNTIGYPAKYDSVIAVGAVDSNSNRASFSSVGAELEVMAPGAGVYSTYPPNTYATLNGTSMASPHVAGAAALILSKHPNLSASQVRNRLSSTATYLGSSFYYGKGLINVEAAAQ

SEQ ID NO: 53493 - protein, 275 aa, Bacillus licheniformis
AQTVPYGIPLIKADKVQAQGFKGANVKVAVLDTGIQASHPDLNVVGGASFVAGEAYNTDGNGHGTHVAGTVAALDNTTGVLGVAPSVSLYAVKVLNSSGXSGTYSGIVSGIEWATTNGMDVINMSLGGPSGSTAMKQAVDNAYARGVVVVAAAGNSGSSGNTNTIGYPAKYDSVIAVGAVDSNSNRASFSSVGPELEVMAPGAGVYSTYPTSTYATLNGTSMASPHVAGAAALILSKHPNLSASQVRNRLSSTATYLGSSFYYGKGLINVEAAAQ

SEQ ID NO: 53494 - protein, 274 aa, Bacillus licheniformis
AQTVPYGIPLIKADKVQAQGFKGANVKVAVLDTGIQASHPDLNVVGGASFVAGEAYNTDGNGHGTHVAGTVAALDDTTGVLGVAPSVSLYAVKVLNSSGSGSYSGIVSGIEWATTNGMDVINMSLGGQSGSTAMKQAVDNAYARGVVVVAAAGNSGSSGNTNTIGYPAKYDSVIAVGAVDSNSNQASFSSVGAELEVMAPGAGVYSTYPTNTYATLNGTSMASPHVAGAAALILSKHPNLSASQVRNRLSSTATYLGSPFYYGKGLINVEAAAQ

SEQ ID NO: 53495 - protein, 274 aa, Bacillus licheniformis
AQVVPYGIPLIKADKVQAQGFKGANVKVAVLDTGIQASHPDLNVVGGASFVAGEAYNTDGNGHGTHVAGTVAALDNTTGVLGVAPSDSLYAVKVLNSSGSGSYSGIVSGIEWATTNGMDVINMSLGGQSGSTAMKQAVDNAYARGVVVVAAAGNSGSSGNTNTIGYPAKYDSVIAVGAVDSNSNRASFSSVGAELEVMAPGAGVYSTYPTNTYATLNSTSMASPHVAGAAALILSKHPNLSASQVRNRLSSTATYLGSSFYYGKGLINVEAAAQ

SEQ ID NO: 53496 - protein, 274 aa, Bacillus licheniformis
AQVVPYGIPLIKADKVQAQGFKGANVKVAVLDTGIQASHPDLNVVGGASFVAGEAYNTDGNGHGTHVAGTVAALDDTTGVLGVAPSVSLYAVKVLNSSGSGSYSGIVSGIEWATTNGMDVINMSLGGAPGSTAMKQAVDNAYARGVVVVAAAGNSGSSGNTNTIGYPAKYDSVIAVGAVDSNSNRASFSSVGAELEVMAPGAGVYSTYPTNTYATLNGTSMASPHVAGAAALILSKHPNLSASQVRNRLSSTATYLGSPFYYGKGLINVEAAAQ

SEQ ID NO: 53497 - protein, 274 aa, Synthetic construct
AQTVPYGIPLIKADKVQAQGFKGANVKVAVLDTGIQASHPDLNVVGGASFVAGEAYNTDGNGHGTHVAGTVAALDNTTGVLGVAPSVSLYAVKVLNSSGSGSYSGIVSGIEWATTNGMDVINMSLGGASGSTAMKQAVDNAYARGVVVVAAAENSGNSGSTNTAGYPAKYDSVIAVGAVDSNSNRASFSSVGAELEVMAPGAGVYSTYPTNTYATLNGTSMASPHVAGAAALILSKHPNLSASQVRNRLSSTATYLGSSFYYGKGLINVEAAAQ

SEQ ID NO: 53498 - protein, 274 aa, Bacillus licheniformis
AQTVPYGIPLIKADKVQAQGFKGANVKVAVLDTGIQASHPDLNVVGGASFVAGEAYNTDGNGHGTHVSGTAAALDNNTGVLGVAPSVSLYAVKVLNSSGSGSYSGIVSGIEWATTNGMDVINMSLGGASGSTAMKQAVDNAYARGVVVVAAAGNSGSSGNTNTIQYPAKYDSVIAVGAVDSNSNRASFSSVGAELEVMAPGAGVYSTYPTNTYATLNGTSMASPHVAGAAALILSKHPNLSASQVRNRLSSTATYLGSSFYYGKGLINVEAAAQ

SEQ ID NO: 53499 - protein, 274 aa, Bacillus licheniformis
AQTVPYGIPLIKADKVQAQGFKGANVKVAVLDTGIQASHPDLNVVGGASFVAGEAYNTDGNGHGTHVAGTVAALDNTTGVLGVAPSVSLYAVKVLNSSGSGSYSGIVSGIEWATTNGMDVINMSLGGQPGSTAMKQAVDNAYARGVVVVAAAGNSGSSGNTNTIGYPAKYDSVIAVGAVDSNSNRASFSSVGAELEVMAPGAGVYSTYPTNTYATLLSTSMASPHVAGAAALILSKHPNLSASQVRNRLSSTATYLGSSFYYGKGLINVEAAAQ

SEQ ID NO: 53500 - protein, 274 aa, Bacillus licheniformis
AQTVPYGIPLIKADKVQAQGFKGANVKVAVLDTGIQASHPDLNVVGGASFVAGEAYNTDGNGHGTHVAGTAAALDNTTGVLGVAPSVSLYAVKVLNSSGSGSYSGIVSGIEWATTNGMDVINISLGGSSGSTAMKQAVDNAYARGVVVVAAAGNSGSSGNTNTIEYPAKYDSVIAVGAVDSNSNRASFSSVGAELEVMAPGAGVYSTYPTNTYATLNGTSMASPHVAGAAALILSKHPNLSASQVRNRLSSTATYLGSSFYYGKGLINVEAAAQ

SEQ ID NO: 53501 - protein, 274 aa, Bacillus licheniformis
AQTVPYGIPLIKADKVQAQGFKGANVKVAVLDTGIQASHPDLNVVGGASFVAGEAYNTDGNGHGTHVAGTVAALDNNTGVLGVAPSVSLYAVKVLNSSGSGSYSGIVSGIEWATTNGMDVINMSLGGASGSTAMKQAVDNAYARGVVVVAAAGNSGSSGNTNTIQYPAKYDSVIAVGAVDSNSNRASFSSVGAELEVMAPGAGVYSTYPTNTYATLSGTSMASPHVAGAAALILSKHPNLSASQVRNRLSSTATYLGPSFYYGKGLINVEAAAQ

SEQ ID NO: 53502 - protein, 274 aa, Bacillus licheniformis
AQVVPYGIPLIKADKVQAQGFKGANVKVAVLDTGIQASHPDLNVVGGASFVAGEAYNTDGNGHGTHVAGTVAALDNTTGVLGVAPSVSLYAVKVLNSSGSGSYSGIVSGIEWATTNGMDVINMSLGGQSGSTAMKQAVDNAYARGVVVVAAAGNSGSSGNTNTIGYPAKYDSVIAVGAVDSESNRASFSSVGAELEVMAPGAGVYSTYPTNTYATLNSTSMASPHVAGAAALILSKHPNLSASQVRNRLSSTATYLGSSFYYGKGLINVEAAAQ

SEQ ID NO: 53503 - protein, 274 aa, Bacillus licheniformis
AQTVPYGIPLIKADKVQAQGFKGANVKVAVLDTGIQASHPDLNVVGGASFVAGEAYNTDGNGHGTHVAGTVAALDNTNGVLGVAPSVSLYAVKVLNSSGSGSYSGIVSGIEWATTNGMDVINMMLGGASGSTAMKQAVDNAYARGVVVVAAAGNSGSSGNTNTIGQPAKYDSVIAVGAVDSNSNRASFSSVGAELEVMAPGAGVYSTYPTNTYATLNGTSMASPHVAGAAALILSKHPNLSASQVRNRLSSTATYLGSPFYYGKGLINVEAAAQ

SEQ ID NO: 53504 - protein, 274 aa, Bacillus licheniformis
AQTVPYGIPLIKADKVQAQGFKGANVKVAVLDTGIQASHPDLNVVGGASFVAGEAYNTDGNGHGTHVAGTVAALDDTTGVLGVAPSVSLYAVKVLNSSGSGSYSGIVSGIEWATTNGRDVINMSLGGASGSTAMKQAVDNAYARGVVVVAAAGNSGSSGNTNTIGQPAKYDSVIAVGAVDSNSNRASFSSVGAELEVMAPGAGVYSTYPTNTYATLNSTSMASPHVAGAAALILSKHPNLSASQVRNRLSSTATYLGSSFYYGKGLINVEAAAQ

SEQ ID NO: 53505 - protein, 274 aa, Bacillus licheniformis
AQTVPYGIPLIKADKVQAQGFKGANVKVAVLDTGIQASHPDLNVVGGASFVAGEAYNTDGNGHGTHVAGTVAALDDTNGVLGVAPSVSLYAVKVLNSSGSGSYSGIVSGIEWATTNGMDVINMSLGGASGSTAMKQAVDNAYARGVVVVAAAGNSGSSGNTNTIGYPAKYDSVIAVGAVDSNSNQASFSSVGAELEVMAPGAGVYSTYPTNTYATLNGTSMASPHVAGAAALILSKHPNLSASQVRNRLSSTATYLGSPFYYGKGLINVEAAAQ

SEQ ID NO: 53506 - protein, 274 aa, Bacillus licheniformis
AQTVPYGIPLIKADKVQAQGFKGANVKVAVLDTGIQASHPDLNVVGGASFVAGEAYNTDGNGHGTHVAGTVAALDNTTGVLGVAPSVSLYAVKVLNSSGSGSYSGIVSGIEWATTNGMDVINISLGGASGSTAMKQAVDNAYARGSVVVAAAGNSGSSGNTNTIGYPAKYDSVIAVGAVDSNSNRASFSSVGAELEVMAPGAGVYSTYPPNTYATLNGTSMASPHVAGAAALILSKHPNLSASQVRNRLGSTATYLGSSFYYGKGLINVEAAAQ

SEQ ID NO: 53507 - protein, 274 aa, Bacillus licheniformis
AQTVPYGIPLIKADKVQAQGFKGANVKVAVLDTGIQASHPDLNVVGGASFVAGEAYNTDGNGHGTHVAGTVAALDNNTGVLGVAPSVSLYAVKVLNSSGSGSYSGIVSGIEWATTNGMDVINISLGGASGSTAMKQAVDNAYARGVVVVAAAGNSGSSGNTNTIQYPAKYDSVIAVGAVDSNSNRASFSSVGAELEVMAPGAGVYSTYPTNTYATLSGTSMASPHVAGAAALILSKHPNLSASQVRNRLSSTATYLGSSFYYGKGLINVEAAAQ

SEQ ID NO: 53508 - protein, 274 aa, Synthetic construct
AQTVPYGIPLIKADKVQAQGFKGANVKVAVLDTGIQASHPDLNVVGGASFVAGEAYNTDGNGHGTHVAGTVAALDNTTGVLGVAPSVSLYAVKVLNSSGSGSYSGIVSGIEWATTNGMDVINMSLGGASGSTAMKQAVDNAYARGVVVVAAAGNSGNSGSTNTIGYPAKYDSVIAVGAVDSNSNRASFSSVGAELEVMAPGAGNYSTYPTNTYANLNGTSMASPHVAGAAALILSKHPNLSASQVRNRLSSTATYLGSSFYYGKGLINVEAAAQ

SEQ ID NO: 53509 - protein, 274 aa, Bacillus licheniformis
AQTVPYGIPLIKADKVQAQGFKGANVKVAVLDTGIQASHPDLNVVGGASFVAGEAYNTDGNGHGTHVAGTVAALDNTTGVLGVAPNVSLYAVKVLNSSGSGSYSGIVSGIEWATTNGMDVINMSLGGPSGSTAMKQAVDNAYARGVVVVAAAGNSGSSGNTNTIGYPAKYDSVIAVGAVDSNSNRASFSSVGAKLEVMAPGAGVYSTYPTSTYATLNGTSMASPHVAGAAALILSKHPNLSASQVRNRLSSTATYLGSSFYYGKGLINVEAAAQ

SEQ ID NO: 53510 - protein, 274 aa, Bacillus licheniformis
AQTVPYGIPLIKADKVQAQGYKGANVKVAVLDTGIQASHPDLNVVGGASFVAGEAYNTDGNGHGTHVAGTVAALDNTTGVLGVAPNVSLYAVKVLNSSGSGSYSGIVSGIEWATTNGMDVINMSLGGPSGSTAMKQAVDNAYARGVVVVAAAGNSGSSGNTNTIGYPAKYDSVIAVGAVDSNSNRASFSSVGAELEVMAPGAGVYSTYPTSTYATLNGTSMASPHVAGAAALILSKHPNLSASQVRNRLSSTATYLGSSFYYGKGLINVEAAAQ

SEQ ID NO: 53511 - protein, 274 aa, Bacillus licheniformis
AQTVPYGIPLIKADKVQAQGFKGANVKVAVLDTGIQASHPDLNVVGGASFVAGEAYNTDGNGHGTHVAGTVAALDNTTGVLGVAPSVSLYAVKVLNSSGSGSYSGIVSGIEWATTNSMDVIYMSLGGASGSTAMKQAVDNAYARGVVVVAAAGNSGSSGCTNTIGYPAKYDSVIAVGAVDSNSNRASFSSVGPELEVMAPGAGVYSTYPTNTYATLNGTSMASPHVAGAAALILSKHPNLSASQVRNRLSSTATYLGSSFYYGKGLINVEAAAQ

SEQ ID NO: 53512 - protein, 274 aa, Bacillus licheniformis
AQTVPYGIPLIKADKVQAQGFKGANVKVAVLDTGIQASHPDLNVRGGASFVAGEAYNTDGNGHGTHVAGTVAALDNTTGVLGVAPSVSLYAVKVLNSSGSGSYSGIVSGIEWATTNGMDVINMSLGGASGSTAMKRAVDNAYARGVVVVAAAGNSGSSGNTNTIQYPAKYDSVIAVGAVDSNSNRASFSSVGAELEVMAPGAGVYSTYPTNTYATLNGTSMASPHVAGAAALILSKHPNLSASQVRNRLSSTATYLGESFYYGKGLINVEAAAQ

SEQ ID NO: 53513 - protein, 274 aa, Bacillus licheniformis
AQTVPYGIPLIKADKVQAQGFKGANVKVAVLDTGIQASHPDLNVVGGASFVAGEAYNTDGNGHGTHVAGTVAALDNTTGVLGVAPSVSLYAVKVLNSSGSGSYSGIVSGIEWATTNGMDVINMSLGGQPSSTAMKQAVDNAYARGVVVVAAAGNSGSSGNTNTIGYPAKYDSVIAVGAVDSNSNRASFSSVGAELEVMAPGAGVYSTYPTNTYATLNSTSMASPHVAGAAALILSKHPNLSASQVRNRLSSTATYLGSSFYYGKGLINVEAAAQ

SEQ ID NO: 53514 - protein, 274 aa, Bacillus licheniformis
AQVVPYGIPLIKADKVQAQGFKGANVKVAVLDTGIQASHPDLNVVGGASFVAGEAYNTDGNGHGTHVAGTVAALDNTTGVLGVAPSVSLYAVKVLNSSGSGSYSGIVSGIEWATTNGMDVINMSLGGASGSTAMKQAVDNAYARGVVVVAAAGNSGSSGNTNTIGYPAKYDSVIAVGAVDSESNQASFSSVGAELEVMAPGAGVYSTYPTNTYATLNGTSMASPHVAGAAALILSKHPNLSASQVRNRLSSTATYLGSPFYYGKGLINVEAAAQ

SEQ ID NO: 53515 - protein, 274 aa, Bacillus licheniformis
AQVVPYGIPLIKADKVQAQGFKGANVKVAVLDTGIQASHPDLNVVGGASFVAGEAYNTDGNGHGTHVAGTVAALDNTTGVLGVAPSVSLYAVKVLNSSGSGSYSGIVSGIEWATTNGMDVINMMLGGSSGSTAMKQAVDNAYARGVVVVAAAGNSGSSGNTNTIGQPAKYDSVIAVGAVDSNSNRASFSSVGAELEVMAPGAGVYSTYPTNTYATLNGTSMASPHVAGAAALILSKHPNLSASQVRNRLSSTATYLGSSFYYGKGLINVEAAAQ

SEQ ID NO: 53516 - protein, 275 aa, Bacillus licheniformis
AQTVPYGIPLIKADKVQAQGFKGANVKVAVLDTGIQASHPDLNVVGGASFVAGEAYNTDGNGHGTHVAGTVAALDNTTGVLGVAPSVSLYAVKVLNSXSGSGTYSGIVSGIEWATTNGMDVINMSLGGPSGSTAMKQAVDNAYARGVVVVAAAGNSGSSGNTNTIGYPAKYDSVIAVGAVDSNSNRASFSSVGPELEVMAPGAGVYSTYPTSTYATLNGTSMASPHVAGAAALILSKHPNLSASQVRNRLSSTATYLGSSFYYGKGLINVEAAAQ

SEQ ID NO: 53517 - protein, 274 aa, Bacillus licheniformis
AQTVPYGIPLIKADKVQAQGFKGANVKVAVLDTGIQASHPDLNVVGGASFVAGEAYNTDGNGHGTHVAGTVAALDNTTGVLGVAPSVSLYAVKVLNSSGSGSYSGIVSGIEWATTNGMDVINMSLGTASGSTAMKQAVDNAYARGSVVVAAAGNSGSSGNTNTISYPAKYDSVIAVGAVDSNSNRASFSSVGAELEVMAPGAGVYSTYPTNTYATLNGTSMASPHVAGAAALILSKHPSLSASQVRNRLSSTATYLGSSFYYGKGLINVEAAAQ

SEQ ID NO: 53518 - protein, 274 aa, Bacillus licheniformis
AQTVPYGIPLIKADKVQAQGFKGANVKVAVLDTGIQASHPDLNVVGGASFVAGEAYNTDGNGHGTHVAGTVAALDNTTGVLGVAPNVSLYAVKVLNSSGSGSYSDIVSGIEWATTNGMDVINMSLGGPSGSTAMKQAVDNAYARGVVVVAAAGNSGSSGNTNTIGYPAKYDSVIAVGAVDSNSNRASFSSVGAELEVMAPGAGVYSTYPTSTYATLNGTSMASPHVAGAAALILSKHPNLSASQVRNRLSSTATYLGSSFYYGKGLINVEAAAQ

SEQ ID NO: 53519 - protein, 274 aa, Bacillus licheniformis
AQTVPYGIPLIKADKVQAQGFKGANVKVAVLDTGIQASHPDLNVVGGASFVAGEAYNADGNGHGTHVAGTVAALDNTTGVLGVAPSVSLYAVKVLNSSGSGSYSGIVSGIEWATTNDMDVINMSLGGASGSTAMKQAVDNAYARGVVVVAAAGNSGSSGNTNTIGYPAKYDSVIAVGAVDSNSNRASFSSVGAELEVMAPGAGVYSTYPTNTYATWDGTSMASPHVAGAAALILSKHPNLSASQVRNRLSSTATYLGSSFYYGKGLINVEAAAQ

SEQ ID NO: 53520 - protein, 274 aa, Bacillus licheniformis
AQTVPYGIPLIKADKVQAQGFKGANVKVAVLDTGIQASHPDLNVVGGASFVAGEAYNTDGNGHGTHVAGTVAALDNTTGVLGVAPSVSLYAVKVLNSSGSGSYSGIVSGIEWATTNGMDVINISLGGASGSTAMKQAVDNAYARGSVVVAAAGNSGSSGNTNTISYPAKYDSVIAVGAVDSNSNRASFSSVGAELEVMAPGAGVYSTYPPNTYATLNGTSMASPHVAGAAALILSKHPNLSASQVRNRLSSTATYLGSSFYYGKGLINVEAAAQ

SEQ ID NO: 53521 - protein, 274 aa, Bacillus licheniformis
AQTVPYGIPLIKADKVQAQGFKGANVKVAVLDTGIQASHPDLNVVGGASFVAGEAYNADGNGHGTHVAGTVAALDNTTGVLGVAPSVSSYAVKVLNSSGSGSYSGIVSGIEWATTNGMDVINMSLGGASGSTAMKQAVDNAYARGVVVVAAAGNSGSSGNTNTIGYPAKYDSVIAVGAVDSNSNRASFSSVGAELEVMAPGAGVYSTYPTNTYATWDGTSMASPHVAGAAALILSKHPNLSASQVRNRLSSTATYLGSSFYYGKGLINVEAAAQ

SEQ ID NO: 53522 - protein, 274 aa, Bacillus licheniformis
AQTVPYGIPLIKADKVQAQGFKGANVKVAVLDTGIQASHPDLNVVGGASFVAGEAYNTDGNGHGTHVAGTVAALDNHTGVLGVAPSSSLYAVKVLNSSGSGSYSGIVSGIEWATTNGMDVINMSLGGASGSTAMKQAVDNAYARGVVVVAAAGNGGSSGNTNTIQYPAKYDSVIAVGAVDSNSNRASFSSVGAELEVMAPGAGVYSTYPTNTYATLNGTSMASPHVAGAAALILSKHPNLSASQVRNRLSSTATYLGSSFYYGKGLINVEAAAQ

SEQ ID NO: 53523 - protein, 274 aa, Bacillus licheniformis
AQVVPYGIPLIKADKVQAQGFKGANVKVAVLDTGIQASHPDLNVVGGASFVAGEAYNTDGNGHGTHVAGTVAALDNTNGVLGVAPSVSLYAVKVLNSSGSGSYSGIVSGIEWATTNGMDVINMSLGGASGSTAMKQAVDNAYARRVVVVAAAGNSGSSGNTNTIGYPAKYDSVIAVGAVDSNSNRASFSSVGAELEVMAPGAGVYSTYPTNTYATLNSTSMASPHVAGAAALILSKHPNLSASQVRNRLSSTATYLGSSFYYGKGLINVEAAAQ

SEQ ID NO: 53524 - protein, 274 aa, Bacillus licheniformis
AQTVPYGIPLIKADKVQAQGFKGANVKVAVLDTGIQASHPDLNVVGGASFVAGEAYNTDGNGHGTHVAGTAAALDNSTGVLGVAPSVSLYAVKVLNSSGSGSYSGIVSGIEWATTNGMDVINMSLGGASGSTAMKQAVDNAYARGVVVVAAAGNSGSSGNTNTIGYPAKYDSVIAVGAVDSNSQRASFSSVGAELEVMAPGAGVYSTYPTNTYATLNGTSMASPHVAGAAALILSKHPNLSASQVRNRLSSTATYLGPSFYYGKGLINVEAAAQ

SEQ ID NO: 53525 - protein, 274 aa, Bacillus licheniformis
AQVVPYGIPLIKADKVQAQGFKGANVKVAVLDTGIQASHPDLNVVGGASFVAGEAYNTDGNGHGTHVAGTVAALDNTTGVLGVAPSVSLYAVKVLNSSGSGSYSGIVSGIEWATTNGMDVINMSLGGQSGSTAMKQAVDNAYARGVVVVAAAGNSGSSGNTNTIGYPAKYDSVIAVGAVDSNSNRASFSSVGAELEVMAPGAGVYSTYPTPTYATLNSTSMASPHVAGAAALILSKHPNLSASQVRNRLSSTATYLGSSFYYGKGLINVEAAAQ

SEQ ID NO: 53526 - protein, 275 aa, Bacillus licheniformis
AQTVPYGIPLIKADKVQAQGFKGANVKVAVLDTGIQASHPDLNVVGGASFVAGEAYNTDGNGHGTHVAGTVAALDNTTGVLGVAPSVSLYAVKVLNXXSGSGTYSGIVSGIEWATTNGMDVINMSLGGPSGSTAMKQAVDNAYARGVVVVAAAGNSGSSGNTNTIGYPAKYDSVIAVGAVDSNSNRASFSSVGAELEVMAPGAGVYSTYPTSTYATLNGTSMASPHVAGAAALILSKHPNLSASQVRNRLSSTATYLGSSFYYGKGLINVEAAAQ

SEQ ID NO: 53527 - protein, 274 aa, Bacillus licheniformis
AQTVPYGIPLIKADKVQAQGYKGANVKVAVLDTGIQASHPDLNVVGGASFVAGEAYNTDGNGHGTHVAGTVAALDNTTGVLGVAPDVSLYAVKVLNSSGSGSYSGIVSGIEWATTNGMDVINMSLGGPSGSTAMKQAVDNAYARGVVVVAAAGNSGSSGNTNTIGYPAKYDSVIAVGAVDSNSNRASFSSVGAELEVMAPGAGVYSTYPTSTYATLNGTSMASPHVAGAAALILSKHPNLSASQVRNRLSSTATYLGSSFYYGKGLINVEAAAQ

SEQ ID NO: 53528 - protein, 274 aa, Bacillus licheniformis
AQTVPYGIPLIKADKVQAQGFKGANVKVAVLDTGIQASHEDLNVVGGASFVAGEAYNTDGNGHGTHVAGTVAALDNTTGVLGVAPSVSLYAVKVLNSSGSGSYSGIVSGIEWATTNGMDVINMSLGGASGSTAMKQAVDNAYARGVVVVAAAGNSGSSGNTNTIGYPAKYDSVIAVGAVDSNSNRASFSSVGPELEVMAPGAGVYSTYPTNTYATLSGTSMASPHVAGAAALILSKHPNLSASQVRNRLSSTATYLGDSFYYGKGLINVEAAAQ

SEQ ID NO: 53529 - protein, 274 aa, Bacillus licheniformis
AQTVPYGIPLIKADKVQAQGFKGANVKVAVLDTGIQASHPDLNVVGGASFVAGEAYNTDGNGHGTHVASTVAALDNTTGVLGVAPSVSLYAVKVLNSSGSGSYSGIVSGIEWATTNGMDVINMSLGGASGSTAMKQAVDNAYARGVVVVAAAGNSGSSGNTNTIGQPAKYDSVIAVGAVDSNSNRASFSSVGAELEVMAPGAGVYSTYPTNTYATLNSTSMASPHVAGAAALILSKHPNLSASQVRNRLSSTATYLGSPFYYGKGLINVEAAAQ

SEQ ID NO: 53530 - protein, 274 aa, Bacillus licheniformis
AQTVPYGIPLIKADKVQAQGFKGANVKVAVLDTGIQASHPDLNVVGGASFVAGEAYNTDGNGHGTHVAGTVAALDDTTGVLGVAPSVSLYAVKVLNSSGSGSYSGIVSGIEWATTNGMDVINMSLGGASGSTAMKQAVDNAYARGVVVVAAAGNSGSSGNTNTIGQPAKYDSVIAVGAVDSNSNQASFSSVGAELEVMAPGAGVYSTYPTNTYATLNSTSMASPHVAGAAALILSKHPNLSASQVRNRLSSTATYLGSSFYYGKGLINVEAAAQ

SEQ ID NO: 53531 - protein, 274 aa, Bacillus licheniformis
AQVVPYGIPLIKADKVQAQGFKGANVKVAVLDTGIQASHPDLNVVGGASFVAGEAYNTDGNGHGTHVAGTVAALDNTTGVLGVAPSVSLYAVKVLNSSGSGSYSGIVSGIEWATTNGMDVINMSLGGASGSTAMKQAVDNAYARGVVVVAAAGNSGSSGNTNTIGYPAKYDSVIAVGAVDSNSNRASFSSVGAELEVMAPGAGVYSTYPTNTYATLQSTSMASPHVAGAAALILSKHPNLSASQVRNRLSSTATYLGSPFYYGKGLINVEAAAQ

SEQ ID NO: 53532 - protein, 274 aa, Bacillus licheniformis
AQVVPYGIPLIKADKVQAQGFKGANVKVAVLDTGIQASHPDLNVVGGASFVAGEAYNTDGNGHGTHVAGTVAALDNTTGVLGVAPSVSLYAVKVLNSSGSGSYSGIVSGIEWATTNGMDVINMSLGGAPGSTAMKQAVDNAYARGVVVVAAAGNSGSSGNTNTIGQPAKYDSVIAVGAVDSNSNRASFSSVGAELEVMAPGAGVYSTYPTNTYATLNGTSMASPHVAGAAALILSKHPNLSASQVRNRLSSTATYLGSPFYYGKGLINVEAAAQ

SEQ ID NO: 53533 - protein, 274 aa, Bacillus licheniformis
AQVVPYGIPLIKADKVQAQGFKGANVKVAVLDTGIQASHPDLNVVGGASFVAGEAYNTDGNGHGTHVAGTVAALDNTNGVLGVAPSVSLYAVKVLNSSGSGSYSGIVSGIEWATTNGMDVINMMLGGSSGSTAMKQAVDNAYARGVVVVAAAGNSGSSGNTNTIGYPAKYDSVIAVGAVDSNSNRASFSSVGAELEVMAPGAGVYSTYPTNTYATLNGTSMASPHVAGAAALILSKHPNLSASQVRNRLSSTATYLGSSFYYGKGLINVEAAAQ

SEQ ID NO: 53534 - protein, 274 aa, Bacillus licheniformis
AQVVPYGIPLIKADKVQAQGFKGANVKVAVLDTGIQASHPDLNVVGGASFVAGEAYNTDGNGHGTHVAGTVAALDDTTGVLGVAPSVSLYAVKVLNSSGSGSYSGIVSGIEWATTNGMDVINMSLGGASGSTAMKQAVDNAYARGVVVVAAAGNSGSSGNTNTIGQPAKYDSVIAVGAVDSNSNRASFSSVGAELEVMAPGAGVYSTYPTNTYATLNGTSMASPHVAGAAALILSKHPNLSASQVRNRLSSTATYLGSPFYYGKGLINVEAAAQ

SEQ ID NO: 53535 - protein, 274 aa, Synthetic construct
AQTVPYGIPLIKADKVQAQGFKGANVKVAVLDTGIQASHPDLNVVGGASFVAGEAYNTDGNGHGTHVAGTVAALDNTTGVLGVAPSVSLYAVKVLNSSGSGSYSGIVSGIEWATTNGMDVINMSLGGASGSTAMKQAVDNAYARGVVVVAAAGNSGNSGSTNTIGYPAKYDSVIAVGAVDSNSNRDSQSSVGAELEVMAPGAGVYSTYPTNTYATLNGTSMASPHVAGAAALILSKHPNLSASQVRNRLSSTATYLGSSFYYGKGLINVEAAAQ

SEQ ID NO: 53536 - protein, 274 aa, Bacillus licheniformis
AQTVPYGIPLIKADKVQAQGFKGANVKVAVLDTGIQASHPDLNVVGGASFVAGEAYNTDGNGHGTHVASTVAALDNTTGVLGVAPSVSLYAVKVLNSSGSGSYSGIVSGIEWATTNGMDVINMSLGGASGSTAMKQAVDNAYARGVVVVAAAGNSGSSGNTNTIGQPAKYDSVIAVGAVDSNSNRASFSSVGAELEVMAPGAGVYSTYPTNTYATLLSTSMASPHVAGAAALILSKHPNLSASQVRNRLSSTATYLGSSFYYGKGLINVEAAAQ

SEQ ID NO: 53537 - protein, 274 aa, Bacillus licheniformis
AQVVPYGIPLIKADKVQAQGFKGANVKVAVLDTGIQASHPDLNVVGGASFVAGEAYNTDGNGHGTHVAGTVAALDNTTGVLGVAPSVSLYAVKVLNSSGSGSYSGIVSGIEWATTNGMDVINMSLGGASGSTAMKQAVDNAYARGVVVVAAAGNSGSSGNTNTIGYPAKYDSVIAVGAVDSNSNQASFSSVGAELEVMAPGAGVYSTYPINTYATLNGTSMASPHVAGAAALILSKHPNLSASQVRNRLSSTATYLGSPFYYGKGLINVEAAAQ

SEQ ID NO: 53538 - protein, 276 aa, Bacillus licheniformis
AQTVPYGIPLIKADKVQAQGFKGANVKVAVLDTGIQASHPDLNVVGGASFVAGEAYNTDGNGHGTHVAGTVAALDNTTGVLGVAPSVSLYAVKVLNSSGTXSGTYSGIVSGIEWATTNGMDVINMSLGGPSGSTAMKQAVDNAYARGVVVVAAAGNSGSSGNTNTIGAPAKYDSVIAVGAVDSNSNRASFSSVGAELEVMAPGAGVYSTYPTSTYATLNGTSMASPHVAGAAALILSKHPNLSASQVRNRLSSTATYLGSSFYYGKGLINVEAAAQ

SEQ ID NO: 53539 - protein, 274 aa, Bacillus licheniformis
AQTVPYGIPLIKADKVQAQGFKGANVKVAVLDTGIQASHPDLNVVGGASFVAGEAYNTDGNGHGTHVAGTVAALDNNTGVLGVAPSVSLYAVKVLNSSGSGSYSGIVSGIEWATTNGMDVINMSLGGASGSTAMKQAVDNAYARGVVVVAAAGNSGSSGNTNTIQYPAKYDSVIAVGAVDSNSQRASFSSVGAELEVMAPGAGVYSTYPTNTYATLSGTSMASPHVAGAAALILSKHPNLSASQVRNRLSSTATYLGSSFYYGKGLINVEAAAQ

SEQ ID NO: 53540 - protein, 274 aa, Bacillus licheniformis
AQTVPYGIPLIKADKVQAQGFKGANVKVAVLDTGIQASHPDLNVVGGASFVAGEAYNTDGNGHGTHVAGTVAALDNNTGVLGVAPSVSLYAVKVLNSSGSGSYSGIVSGIEWATTNGMDVINISLGGASGSTAMKQAVDNAYARGVVVVAAAGNSGSSGNTNTIQYPAKYDSVIAVGAVDSNSQRASFSSVGAELEVMAPGAGVYSTYPTNTYATLNGTSMASPHVAGAAALILSKHPNLSASQVRNRLSSTATYLGSSFYYGKGLINVEAAAQ

SEQ ID NO: 53541 - protein, 274 aa, Bacillus licheniformis
AQTVPYGIPLIKADKVQAQGFKGANVKVAVLDTGIQASHPDLNVVGGASFVAGEAYNTDGNGHGTHVASTVAALDDTTGVLGVAPSVSLYAVKVLNSSGSGSYSGIVSGIEWATTNGMDVINMSLGGASGSTAMKQAVDNAYARGVVVVAAAGNSGSSGNTNTIGYPAKYDSVIAVGAVDSNSNRASFSSVGAELEVMAPGAGVYSTYPTNTYATLNSTSMASPHVAGAAALILSKHPNLSASQVRNRLSSTATYLGSPFYYGKGLINVEAAAQ

SEQ ID NO: 53542 - protein, 274 aa, Bacillus licheniformis
AQTVPYGIPLIKADKVQAQGFKGANVKVAVLDTGIQASHPDLNVVGGASFVAGEAYNTDGNGHGTHVAGTVAALDNHTGVLGVAPSVSLYAVKVLNSSGSGSYSGIVSGIEWATTNGMDVINMSLGGSSGSTAMKQAVDNAYARGVVVVAAAGNSGSSGNTNTIQYPAKYDSVIAVGAVDSNSNRASFSSVGAELEVMAPGAGVYSTYPPNTYATLNGTSMASPHVAGAAALILSKHPNLSASQVRNRLSSTATYLGSSFYYGKGLINVEAAAQ

SEQ ID NO: 53543 - protein, 274 aa, Bacillus licheniformis
AQTVPYGIPLIKADKVQAQGFKGANVKVAVLDTGIQASHPDLNVVGGASFVAGEAYNTDGNGHGTHVAGTVAALDNTTGVLGVAPSVSLYAVKVLNSSGSGSYSGIVSGIEWATTNGMDVINMSLGGASGSTAMKQAVDNAYARRVVVVAAAGNSGSSGNTNTIGQPAKYDSVIAVGAVDSNSNQASFSSVGAELEVMAPGAGVYSTYPTNTYATLNSTSMASPHVAGAAALILSKHPNLSASQVRNRLSSTATYLGSSFYYGKGLINVEAAAQ

SEQ ID NO: 53544 - protein, 274 aa, Bacillus licheniformis
AQTVPYGIPLIKADKVQAQGFKGANVKVAVLDTGIQASHPDLNVVGGASFVAGEAYNTDGNGHGTHVAGTVAALDDTNGVLGVAPSVSLYAVKVLNSSGSGSYSGIVSGIEWATTNGMDVINMSLGGAPGSTAMKQAVDNAYARGVVVVAAAGNSGSSGNTNTIGYPAKYDSVIAVGAVDSNSNRASFSSVGAELEVMAPGAGVYSTYPTNTYATLNGTSMASPHVAGAAALILSKHPNLSASQVRNRLSSTATYLGSPFYYGKGLINVEAAAQ

SEQ ID NO: 53545 - protein, 274 aa, Bacillus licheniformis
AQVVPYGIPLIKADKVQAQGFKGANVKVAVLDTGIQASHPDLNVVGGASFVAGEAYNTDGNGHGTHVAGTVAALDNTTGVLGVAPSVSLYAVKVLNSSGSGSYSGIVSGIEWATTNGMDVINMMLGGSSGSTAMKQAVDNAYARGVVVVAAAGNSGSSGNTNTIGYPAKYDSVIAVGAVDSNSNRASFSSVGAELEVMAPGAGVYSTYPTNTYATLNSTSMASPHVAGAAALILSKHPNLSASQVRNRLSSTATYLGSSFYYGKGLINVEAAAQ

SEQ ID NO: 53546 - protein, 274 aa, Synthetic construct
AQTVPYGIPLIKADKVQAQGFKGANVKVAVLDTGIQASHPDLNVVGGASFVAGEAYNQDGEGHGTHVAGTVAALDNTTGVLGVAPSVSLYAVKVLNSSGSGSYSGIVSGIEWATTNGMDVINMSLGGASGSTAMKQAVDNAYARGVVVVAAAGNSGNSGSTNTIGYPAKYDSVIAVGAVDSNSNRASFSSVGAELEVMAPGAGVYSTYPTNTYATLNGTSMASPHVAGAAALILSKHPNLSASQVRNRLSSTATYLGSSFYYGKGLINVEAAAQ

SEQ ID NO: 53547 - protein, 274 aa, Bacillus licheniformis
AQTVPYGIELIKADKVQAQGFKGANVKVAVLDTGIQASHPDLNVVGGASFVAGEAYNTDGNGHGTHVAGTVAALDDTTGVLGVAPSVSLYAVKVLNSSGSGSYSGIVSGIEWATTNGMDVINMSLGGASGSTAMKQAVDNAYARGVVVVAAAGNSGSSGNTNTIGQPAKYDSVIAVGAVDSNSNRASFSSVGAELEVMAPGAGVYSTYPTNTYATLNGTSMASPHVAGAAALILSKHPNLSASQVRNRLSSTATYLGSPFYYGKGLINVEAAAQ

SEQ ID NO: 53548 - protein, 274 aa, Synthetic construct
AQTVPYGIPLIKADKVQAQGFKGANVKVAVLDTGIQASHPDLNVVGGASFVAGEAYNTDGNGHGTHVAGTVAALDNTTGVLGVAPSVSLYAVKVLNSSGSGSYSGIVSGIEWATTNGMDVINMSAEGASGSTAMKQAVDNAYARGVVVVAAAGNSGNSGSTNTIGYPAKYDSVIAVGAVDSNSNRASFSSVGAELEVMAPGAGVYSTYPTNTYATLNGTSMASPHVAGAAALILSKHPNLSASQVRNRLSSTATYLGSSFYYGKGLINVEAAAQ

SEQ ID NO: 53549 - protein, 274 aa, Synthetic construct
AQTVPYGIPLIKADKVQAQGFKGANVKVAVLDTGIQSSHPDLNVVGGSSFVAGEAYNTDGNGHGTHVAGTVAALDNTTGVLGVAPSVSLYAVRVLNSSGSGSYSGIVSGIEWATTNGMDVINMSLGGASGSTAMKQAVDNAYARGVVVVAAAGNSGSSGNTNTIGYPAKYDSVIAVGAVDSNSNRASFSSVGAELEVMAPGAGVYSTYPTNTYATLNGTSMANPHVAGAAALILSKHPNLSASQVRNRLSSTATYLGSSFYYGKGLINVEAAAQ

SEQ ID NO: 53550 - protein, 274 aa, Bacillus licheniformis
AQTVPYGIPLIKADKVQAQGFKGANVKVAVLDTGIQASHPDLNVVGGASFVAGEAYNTDGNGHGTHVAGTVAALDNTNGVLGVAPSVSLYAVKVLNSSGSGSYSGIVSGIEWATTNGMDVINMMLGGASGSTAMKQAVDNAYARGVVVVAAAGNSGSSGNTNTIGQPAKYDSVIAVGAVDSNSNRASFSSVGAELEVMAPGAGVYSTYPTNTYATLNSTSMASPHVAGAAALILSKHPNLSASQVRNRLSSTATYLGSSFYYGKGLINVEAAAQ

SEQ ID NO: 53551 - protein, 274 aa, Bacillus licheniformis
AQVVPYGIPLIKADKVQAQGFKGANVKVAVLDTGIQASHPDLNVVGGASFVAGEAYNTDGNGHGTHVAGTVAALDNTTGVLGVAPSVSLYAVKVLNSSGSGSYSGIVSGIEWATTNGMDVINMSLGGSSGSTAMKQAVDNAYARGVVVVAAAGNSGSSGNTNTIGYPAKYDSVIAVGAVDSNSNRASFSSVGAELEVMAPGAGVYSTYPTNTYATLNSTSMASPHVAGAAALILSKHPNLSASQVRNRLSSTATYLGSPFYYGKGLINVEAAAQ

SEQ ID NO: 53552 - protein, 274 aa, Bacillus licheniformis
AQTVPYGIPLIKADKVQAQGFKGANVKVAVLDTGIQASHPDLNVVGGASFVAGEAYNTDGNGHGTHVAGTVAALDDTNGVLGVAPSVSLYAVKVLNSSGSGSYSGIVSGIEWATTNGMDVINMSLGGQSGSTAMKQAVDNAYARGVVVVAAAGNSGSSGNTNTIGYPAKYDSVIAVGAVDSNSNRASFSSVGAELEVMAPGAGVYSTYPTNTYATLNSTSMASPHVAGAAALILSKHPNLSASQVRNRLSSTATYLGSSFYYGKGLINVEAAAQ

SEQ ID NO: 53553 - protein, 274 aa, Bacillus licheniformis
AQTVPYGIPLIKADKVQAQGFKGANVKVAVLDTGIQASHPDLNVVGGASFVAGEAYNTDGNGHGTHVAGTVAALDNTTGVLGVAPNVSLYAVKVLNSSGSGSYSGIVSGIEWATTNGMDVINMSLGGPSGSTAMKQAVDNAYARGVVVVAAAGNSGSSGNTNTIGYPAKYDSVIAVGAVDSNSNRASFSSVGAELEVMAPGAGVYSTYPTSTYATLNGTSQASPHVAGAAALILSKHPNLSASQVRNRLSSTATYLGSSFYYGKGLINVEAAAQ

SEQ ID NO: 53554 - protein, 274 aa, Synthetic construct
AQTVPYGIPLIKADKVQAQGFKGANVKVAVLDTGIQASHPDLNVVGGASFVAGEAYNTDGNGHGTHVAGTVAALDNTTGVLGVAPSVSLYAVKVLNSSGSGSYSGIVSGIEWATTNGMDVINMSIGGASGETAMKQAVDNAYARGVVVVAAAGNSGNSGSTNTIGYPAKYDSVIAVGAVDSNSNRASFSSVGAELEVMAPGAGVYSTYPTNTYATLNGTSMASPHVAGAAALILSKHPNLSASQVRNRLSSTATYLGSSFYYGKGLINVEAAAQ

SEQ ID NO: 53555 - protein, 274 aa, Synthetic construct
AQTVPYGIPLIKADKVQAQGFKGANVKVAVLDTGIQSSHPDLNVVGGSSFVAGEAYNTDGNGHGTHVAGTVAALDNTTGVLGVAPSVSLYAVRVLNSSGSGSYSGIVSGIEWATTNGMDVINMSLGGASGSTAMKQAVDNAYARGVVVVAAAGNSGSSGNTNTIGYPAKYDSVIAVGAVDSNSNRASFSSVGAELEVMAPGAGVYSTYPTNTYATLWGTSMASPHVAGAAALILSKHPNLSASQVRNRLSSTATYLGSSFYYGKGLINVEAAAQ

SEQ ID NO: 53556 - protein, 274 aa, Bacillus licheniformis
AQTVPYGIPLIKADKVQAQGFKGANVKVAVLDTGIQASHPDLNVRGGASFVAGEAYNTDGNGHGTHVAGTVAALDNTTGVLGVAPSVSLYAVKVLNSSGSGSYSGIVSGIEWATTNGMDVINISLGGASGSTAMKRAVDNAYARGVVVVAAAGNSGSSGNTNTIQYPAKYDSVIAVGAVDSNSNRASFSSVGAELEVMAPGAGVYSTYPTNTYATLNGTSMASPHVAGAAALILSKHPNLSASQVRNRLSSTATYLGSSFYYGKGLINVEAAAQ

SEQ ID NO: 53557 - protein, 274 aa, Synthetic construct
AQTVPYGIPLIKADKVQAQGFKGANVKVAVLDTGIQASHPDLNVVGGASFVAGEAYNTDGNGHGTHVAGTVAALDNTTGVLGVAPSVSLYAVKVGNSSGSGSYSGIVSGIEWATTNGMDVINMSLGGASGSTAMKQAVDNAYARGVVVVAAAGNSGNSGSTNTIGYPAKYDSVIAVGAVDSNSNRASFSSVGAELEVMAPGAPVYSTYPTNTYATLNGTSMASPHVAGAAALILSKHPNLSASQVRNRLSSTATYLGSSFYYGKGLINVEAAAQ

SEQ ID NO: 53558 - protein, 274 aa, Bacillus licheniformis
AQTVPYGIPLIKADKVQAQGFKGANVKVAVLDTGIQASHPDLNVVGGASFVAGEAYNTDGNGHGTHVAGTVAALDNTNGVLGVAPSVSLYAVKVLNSSGSGSYSGIVSGIEWATTNGMDVINMSLGGAPGSTAMKQAVDNAYARGVVVVAAAGNSGSSGNTNTIGYPAKYDSVIAVGAVDSNSNRASFSSVGAELEVMAPGAGVYSTYPTNTYATLNSTSMASPHVAGAAALILSKHPNLSASQVRNRLSSTATYLGSPFYYGKGLINVEAAAQ

SEQ ID NO: 53559 - protein, 274 aa, Bacillus licheniformis
AQTVPYGIPLIKADKVQAQGFKGANVKVAVLDTGIQASHPDLNVVGGASFVAGEAYNTDGNGHGTHVAGTVAALDNTTGVLGVAPSVSLYAVKVLNSSGSGSYSGIVSGIEWATTNGMDVINMSLGGQSSSTAMKQAVDNAYARGVVVVAAAGNSGSSGNTNTIGQPAKYDSVIAVGAVDSNSNQASFSSVGAELEVMAPGAGVYSTYPTNTYATLNGTSMASPHVAGAAALILSKHPNLSASQVRNRLSSTATYLGSSFYYGKGLINVEAAAQ

SEQ ID NO: 53560 - protein, 274 aa, Bacillus licheniformis
AQTVPYGIPLIKADKVQAQGFKGANVKVAVLDTGIQASHPDLNVVGGASFVAGEAYNTDGNGHGTHVASTVAALDNTTGVLGVAPSVSLYAVKVLNSSGSGSYSGIVSGIEWATTNGMDVINMSLGGASGSTAMKQAVDNAYARRVVVVAAAGNSGSSGNTNTIGQPAKYDSVIAVGAVDSNSNRASFSSVGAELEVMAPGAGVYSTYPTNTYATLNSTSMASPHVAGAAALILSKHPNLSASQVRNRLSSTATYLGSSFYYGKGLINVEAAAQ

SEQ ID NO: 53561 - protein, 274 aa, Bacillus licheniformis
AQVVPYGIPLIKADKVQAQGFKGANVKVAVLDTGIQASHPDLNVVGGASFVAGEAYNTDGNGHGTHVAGTVAALDNTNGVLGVAPSVSLYAVKVLNSSGSGSYSGIVSGIEWATTNGMDVINMSLGGASGSTAMKQAVDNAYARGVVVVAAAGNSGSSGNTNTIGQPAKYDSVIAVGAVDSNSNRASFSSVGAELEVMAPGAGVYSTYPTNTYATLNSTSMASPHVAGAAALILSKHPNLSASQVRNRLSSTATYLGSSFYYGKGLINVEAAAQ

SEQ ID NO: 53562 - protein, 274 aa, Bacillus licheniformis
AQVVPYGIPLIKADKVQAQGFKGANVKVAVLDTGIQASHPDLNVVGGASFVAGEAYNTDGNGHGTHVAGTVAALDNTTGVLGVAPSVSLYAVKVLNSSGSGSYSGIVSGIEWATTNGMDVINMILGGASGSTAMKQAVDNAYARGVVVVAAAGNSGSSGNTNTIGYPAKYDSVIAVGAVDSNSNRASFSSVGAELEVMAPGAGVYSTYPTNTYATLLSTSMASPHVAGAAALILSKHPNLSASQVRNRLSSTATYLGSSFYYGKGLINVEAAAQ

SEQ ID NO: 53563 - protein, 274 aa, Bacillus licheniformis
AQTVPYGIELIKADKVQAQGFKGANVKVAVLDTGIQASHPDLNVVGGASFVAGEAYNTDGNGHGTHVAGTVAALDNTTGVLGVAPSVSLYAVKVLNSSGSGSYSGIVSGIEWATTNGMDVINMSLGGASGSTAMKRAVDNAYARGVVVVAAAGNSGSSGNTNTIQYPAKYDSVIAVGAVDSNSNRASFSSVGAELEVMAPGAGVYSTYPTNTYATLNGTSMASPHVAGAAALILSKHPNLSASQVRNRLSSTATYLGESFYYGKGLINVEAAAQ

SEQ ID NO: 53564 - protein, 274 aa, Bacillus licheniformis
AQTVPYGIPLIKADKVQAQGFKGANVKVAVLDTGIQASHPDLNVVGGASFVAGEAYNTDGNGHGTHVAGTVAALDDTTGVLGVAPSVSLYAVKVLNSSGSGSYSGIVSGIEWATTNGMDVINMSLGGASGSTAMKQAVDNAYARGVVVVAAAGNSGSSGNTNTIGQPAKYDSVIAVGAVDSNSNRASFSSVGAELEVMAPGAGVYSTYPTNTYATLNGTSMASPHVAGAAALILSKHPNLSASQVRNDLSSTATYLGSPFYYGKGLINVEAAAQ

SEQ ID NO: 53565 - protein, 274 aa, Bacillus licheniformis
AQVVPYGIELIKADKVQAQGFKGANVKVAVLDTGIQASHPDLNVVGGASFVAGEAYNTDGNGHGTHVAGTVAALDNTTGVLGVAPSVSLYAVKVLNSSGSGSYSGIVSGIEWATTNGMDVINMSLGGASGSTAMKQAVDNAYARGVVVVAAAGNSGSSGNTNTIGQPAKYDSVIAVGAVDSNSNRASFSSVGAELEVMAPGAGVYSTYPTNTYATLNSTSMASPHVAGAAALILSKHPNLSASQVRNRLSSTATYLGSSFYYGKGLINVEAAAQ

SEQ ID NO: 53566 - protein, 274 aa, Bacillus licheniformis
AQTVPYGAPLIKADKVQAQGFKGANVKVAVLDTGIQASHPDLNVVGGASFVAGEAYNTDGNGHGTHVAGTVAALDNTTGVLGVAPSVSLYAVKVLNSSGSGTYSGIVSGIEWATTNGMDVINMSLGGPSGSTAMKQAVDNAYARGVVVVAAAGNSGSSGNTNTIGYPAKYDSVIAVGAVDSNSNRASFSSVGAELEVMAPGAGVYSTYPTSTYATLNGTSMASPHVAGAAALILSKHPNLSASQVRNRLSSTATYLGSSFYYGKGLINVEAAAQ

SEQ ID NO: 53567 - protein, 274 aa, Bacillus licheniformis
AQTVPYGIPLIKADKVQAQGFKGANVKVAVLDTGIQASHPDLNVRGGASFVAGEAYNTDGNGHGTHVAGTVAALDNTTGVLGVAPSVSLYAVKVLNSSGSGSYSGIVSGIEWATTNGMDVINISLGGASGSTAMKRAVDNAYARGVVVVAAAGNSGSSGNTNTIGYPAKYDSVIAVGAVDSNSNRASFSSVGAELEVMAPGAGVYSTYPTNTYATLNGTSMASPHVAGAAALILSKHPNLSASQVRNRLSSTATYLGESFYYGKGLINVEAAAQ

SEQ ID NO: 53568 - protein, 274 aa, Bacillus licheniformis
AQTVPYGIPLIKADKVQAQGFKGANVKVAVLDTGIQASHPDLNVVGGASFVAGEAYNTDGNGHGTHVAGTVAALDNNTGVLGVAPSVSLYAVKVLNSSGSGSYSGIVSGIEWATTNGMDVINISLGGASGSTAMKQAVDNAYARGVVVVAAAGNSGSSGNTNTIGYPAKYDSVIAVGAVDSNSQRASFSSVGAELEVMAPGAGVYSTYPTNTYATLSGTSMASPHVAGAAALILSKHPNLSASQVRNRLSSTATYLGSSFYYGKGLINVEAAAQ

SEQ ID NO: 53569 - protein, 274 aa, Bacillus licheniformis
AQVVPYGIPLIKADKVQAQGFKGANVKVAVLDTGIQASHPDLNVVGGASFVAGEAYNTDGNGHGTHVAGTVAALDDTNGVLGVAPSVSLYAVKVLNSSGSGSYSGIVSGIEWATTNGMDVINMSLGGSSGSTAMKQAVDNAYARGVVVVAAAGNSGSSGNTNTIGYPAKYDSVIAVGAVDSNSNRASFSSVGAELEVMAPGAGVYSTYPTNTYATLNGTSMASPHVAGAAALILSKHPNLSASQVRNRLSSTATYLGSSFYYGKGLINVEAAAQ

SEQ ID NO: 53570 - protein, 275 aa, Bacillus licheniformis
AQTVPYGIPLIKADKVQAQGFKGANVKVAVLDTGIQASHPDLNVVGGASFVAGEAYNTDGNGHGTHVAGTVAALDNTTGVLGVAPSVSLYAVKVLNSSXXSGTYSGIVSGIEWATTNGMDVINMSLGGPSGSTAMKQAVDNAYARGVVVVAAAGNSGSSGNTNTIGYPAKYDSVIAVGAVDSNSNRASFSSVGAELEVMAPGAGVYSTYPTSTYATLNGTSMASPHVAGAAALILSKHPNLSASQVRNRLSSTATYLGSSFYYGKGLINVEAAAQ

SEQ ID NO: 53571 - protein, 274 aa, Bacillus licheniformis
AQVVPYGIPLIKADKVQAQGFKGANVKVAVLDTGIQASHPDLNVVGGASFVAGEAYNTDGNGHGTHVAGTVAALDNTNGVLGVAPSVSLYAVKVLNSSGSGSYSGIVSGIEWATTNGMDVINMSLGGASGSTAMKQAVDNAYARGVVVVAAAGNSGSSGNTNTIGYPAKYDSVIAVGAVDSNSNRASFSSVGAELEVMAPGAGVYSTYPTNTYATLQGTSMASPHVAGAAALILSKHPNLSASQVRNRLSSTATYLGSPFYYGKGLINVEAAAQ

SEQ ID NO: 53572 - protein, 274 aa, Bacillus licheniformis
AQTVPYGIELIKADKVQAQGFKGANVKVAVLDTGIQASHPDLNVVGGASFVAGEAYNTDGNGHGTHVAGTVAALDNTTGVLGVAPSVSLYAVKVLNSSGSGSYSGIVSGIEWATTNGMDVINISLGGASGSTAMKRAVDNAYARGVVVVAAAGNSGSSGNTNTIQYPAKYDSVIAVGAVDSNSNRASFSSVGAELEVMAPGAGVYSTYPTNTYATLNGTSMASPHVAGAAALILSKHPNLSASQVRNRLSSTATYLGSSFYYGKGLINVEAAAQ

SEQ ID NO: 53573 - protein, 274 aa, Bacillus licheniformis
AQVVPYGIPLIKADKVQAQGFKGANVKVAVLDTGIQASHPDLNVVGGASFVAGEAYNTDGNGHGTHVAGTVAALDNTTGVLGVAPSVSLYAVKVLNSSGSGSYSGIVSGIEWATTNGMDVINMSLGGRSGSTAMKQAVDNAYARGVVVVAAAGNSGSSGNTNTIGYPAKYDSVIAVGAVDSNSNRASFSSVGAELEVMAPGAGVYSTYPTNTYATLNSTSMASPHVAGAAALILSKHPNLSASQVRNRLSSTATYLGSPFYYGKGLINVEAAAQ

SEQ ID NO: 53574 - protein, 274 aa, Bacillus licheniformis
AQTVPYGIPLIKADKVQAQGFKGANVKVAVLDTGIQASHPDLNVVGGASFVAGEAYNTDGNGHGTHVAGTVAALDNTTTGLGVAPSVSLYAVKVLNSSGSGSYSGIVSGIEWATTNGMDVINMSLGGASGSTAMKQAVDNAYARGVVVVAAAGNSGNSGSTNTIGYPAKYDSVIAVGAVDSNSNRASFSSVGAELEVMAPGAGVYSTYPTNTYATLNGTSMASPHVAGAAALILSKHPNLSASQVRNRLSSTATYLGSSFYYGKGLINVEAAAQ

SEQ ID NO: 53575 - protein, 275 aa, Bacillus licheniformis
AQTVPYGIPLIKADKVQAQGFKGANVKVAVLDTGIQASHPDLNVVGGASFVAGEAYNTXDGNGHGTHVAGTVAALDNTTGVLGVAPSVSLYAVKVLNSSGSGSYSGIVSGIEWATTNGMDVINMSLGGASGSTAMKQAVDNAYARGVVVVAAAGNSGNSGSTNTIGYPAKYPSVIAVGAVDSNSNRASFSSVGAELEVMAPGAGVYSTYPTNTYATLNGTSMASPHVAGAAALILSKHPNLSASQVRNRLSSTATYLGNSFYYGKGLINVEAAAQ

SEQ ID NO: 53576 - protein, 274 aa, Bacillus licheniformis
AQTVPYGIPLIKADKVQAQGFKGANVKVAVLDTGIQASHPDLNVVGGASFVAGEAYNTDGNGHGTHVAGTVAALDNTTGVLGVAPSVSLYAVKVLNSSGSGTYSGIVSGIEWATTNGMDVINMSLGGPSGSTAMKQAVDNAYARGVVVVAAAGNSGSSGNTNTIGYPAKYDSVIAVGIVDSNSNRASFSSVGAELEVMAPGAGVYSTYPTSTYATLNGTSMASPHVAGAAALILSKHPNLSASQVRNRLSSTATYLGSSFYYGKGLINVEAAAQ

SEQ ID NO: 53577 - protein, 274 aa, Bacillus licheniformis
AQVVPYGIPLIKADKVQAQGFKGANVKVAVLDTGIQASHPDLNVVGGASFVAGEAYNTDGNGHGTHVAGTVAALDDTTGVLGVAPSVSLYAVKVLNSSGSGSYSGIVSGIEWATTNGMDVINMSLGGSSGSTAMKQAVDNAYARGVVVVAAAGNSGSSGNTNTIGYPAKYDSVIAVGAVDSNSNRASFSSVGAELEVMAPGAGVYSTYPTNTYATLNSTSMASPHVAGAAALILSKHPNLSASQVRNRLSSTATYLGSSFYYGKGLINVEAAAQ

SEQ ID NO: 53578 - protein, 274 aa, Bacillus licheniformis
AQTVPYGIPLIKADKVQAQGWKGANVKVAVLDTGIQASHPDLNVVGGASYVAGEAYNTDGNGHGTHVAGTVAALDNTTGVLGVAPSVSLYAVKVLNSSGSGSYSGIVSGIEWATTNGMDVINMSLGGASGSTAMKQAVDNAYARGVVVVAAAGNSGSSGNTNTIGYPAKYDSVIAVGAVDSNSNRASWSSVGAELEVMAPGAGVYSTYPTNTYATLNGTSMASPHVAGAAALILSKHPNLSASQVRNRLSSTATYLGSSWYYGKGLINVEAAAQ

SEQ ID NO: 53579 - protein, 274 aa, Bacillus licheniformis
AQTVPYGIPLIKADKVQAQGFKGANVKVAVLDTGIQASHPDLNVVGGASFVAGEAYNTDGNGHGTHVASTVAALDDTTGVLGVAPSVSLYAVKVLNSSGSGSYSGIVSGIEWATTNGMDVINMSLGGASGSTAMKQAVDNAYARGVVVVAAAGNSGSSGNTNTIGQPAKYDSVIAVGAVDSNSNRASFSSVGAELEVMAPGAGVYSTYPTNTYATLNSTSMASPHVAGAAALILSKHPNLSASQVRNRLSSTATYLGSSFYYGKGLINVEAAAQ

SEQ ID NO: 53580 - protein, 274 aa, Bacillus licheniformis
AQTVPYGIPLIKADKVQAQGFKGANVKVAVLDTGIQASHPDLNVVGGASFVAGEAYNTDGNGHGTHVAGTVAALDNTTGVLGVAPSVSLYAVKVLNSSGSGSYSGIVSGIEWATTNGMDVINMSLGGASGSTAMKQAVDNAYARGVVVVAAAGNSGSSGNTNTIGYPAKYDSVIAVGAVDSNSNRASFSSVGPELEVMAPGAGVYSTYPTNTYATLSGTSMVSPHVAGAAALILSKHPNLSASQVRNRLSSTATYLGDSFYYGKGLINVEAAAQ

SEQ ID NO: 53581 - protein, 274 aa, Bacillus licheniformis
AQTVPYGIPLIKADKVQAQGFKGANVKVAVLDTGIQASHPDLNVVGGASFVAGEAYNTDGNGHGTHVAGTVAALDNTTGVLGVAPSVSLYAVKVLNSSGSGSYSGIVSGIEWATTNGMDVINISLGGASGSTAMKQAVDNAYARGVVVVAAAGNSGSSGNTNTIGYPAKYDSVIAVGAVDSNSNRASFSSVGAELEVMAPGAGVYSTYPPNTYATLSGTSMASPHVAGAAALILSKHPNLSASQVRNRLSSTATYLGPSFYYGKGLINVEAAAQ

SEQ ID NO: 53582 - protein, 274 aa, Bacillus licheniformis
AQTVPYGIPMIKADKVQAQGFKGANVRVAVLDTGIQASHPDLNVVGGASFVAGEAYNTDGNGHGTHVAGTVAALDNTTGVLGVAPSVSLYAVKVLNSHGSGSYSGIVSGIEWATTNGMDVINISLGGASGSTAMKQAVDNAYARGVVVVAAAGNSGSSGNTNTIGYPAKYDSVIAVGAVDSNSNRASFSSVGAELEVMAPGAGVYSTYPTNTYATLNGTSMASPHVAGAAALILSKHPNLSASQVRNRLSSTATYLGSSFYYGKGLINVEAAAQ

SEQ ID NO: 53583 - protein, 274 aa, Bacillus licheniformis
AQTVPYGIPLIKADKVQAQGFKGANVKVAVLDTGIQASHPDLNVVGGASFVAGEAYNTDGNGHGTHVAGTVAALDNTTGVLGVAPSVSLYAVKVLNSSGSGSYSGIVSGIEWATTNGMDVINMSLGFASGSTAMKQAVDNAYARGVVVVAAAGNSGSSGNTNTIQYPAKYDSVIAVGAVDSNSNRASFSSVGAELEVMAPGAGVYSTYPTNTYATLSGTSMASPHVAGAAALILSKHPNLSASQVRNRLSSTATYLGPSFYYGKGLINVEAAAQ

SEQ ID NO: 53584 - protein, 274 aa, Bacillus licheniformis
AQTVPYGIPLIKADKVQAQGFKGANVKVAVLDTGIQASHPDLNVVGGASFVAGEAYNTDGNGHGTHVAGTVAALDDTTGVLGVAPSVSLYAVKVLNSSGSGSYSGIVSGIEWATTNGMDVINMSLGGQSGSTAMKQAVDNAYARGVVVVAAAGNSGSSGNTNTIGQPAKYDSVIAVGAVDSNSNQASFSSVGAELEVMAPGAGVYSTYPTNTYATLNGTSMASPHVAGAAALILSKHPNLSASQVRNRLSSTATYLGSSFYYGKGLINVEAAAQ

SEQ ID NO: 53585 - protein, 274 aa, Bacillus licheniformis
AQTVPYGIPLIKADKVQAQGFKGANVKVAVLDTGIQASHPDLNVVGGASFVAGEAYNTDGNGHGTHVAGTVAALDDTTGVLGVAPSVSLYAVKVLNSSGSGSYSGIVSGIEWATTNGMDVINMSLGGAPGSTAMKQAVDNAYARGVVVVAAAGNSGSSGNTNTIGYPAKYDSVIAVGAVDSNSNRASFSSVGAELEVMAPGAGVYSTYPTNTYATLNSTSMASPHVAGAAALILSKHPNLSASQVRNRLSSTATYLGSPFYYGKGLINVEAAAQ

SEQ ID NO: 53586 - protein, 274 aa, Bacillus licheniformis
AQTVPYGIPLIKADKVQAQGFKGANVKVAVLDTGIQASHPDLNVVGGASFVAGEAYNTDGNGHGTHVAGTVAALDDTNGVLGVAPSVSLYAVKVLNSSGSGSYSGIVSGIEWATTNGMDVINMSLGGASGSTAMKQAVDNAYARGVVVVAAAGNSGSSGNTNTIGQPAKYDSVIAVGAVDSNSNRASFSSVGAELEVMAPGAGVYSTYPTNTYATLNSTSMASPHVAGAAALILSKHPNLSASQVRNRLSSTATYLGSSFYYGKGLINVEAAAQ

SEQ ID NO: 53587 - protein, 269 aa, Unidentified
AQSVPWGIARVQAPAAHNRGLTGSGVKVAVLDTGISTHPDLRIRGGASFVPGEPSTQDGNGHGTHVAGTIAALNNSIGVLGVAPSAELYAVKVLGASGSGSVSSIAQGLEWAGNNGMHVANLSLGSPSPSATLEQAVNSATSRGVLVVAASGNSGAGSISYPARYANAMAVGATDQNNNRASFSQYGAGLDIVAPGVNVQSTYPGSTYASLNGTSMATPHVAGAAALVKQKNPSRSNVQIRNHLKNTATSLGSTNLYGSGLVNAEAATR

SEQ ID NO: 53588 - protein, 269 aa, Unidentified
AQSVPWGISRVQAPAAHNRRLWGSGVKVAVLDTGISTHPDLNIRGGASFVPGEPSTQDGNGHGTHVAGTIAALNNSIGVLGVAPSAELYAVKVLGASGAGSVSSIAQGLEWAGNNGMHVANLSLGSPSPSATLEQAVNSATSRGVLVVAASGNSGAGSISYPARYANAMAVGATDQNNNRASFSQYGAGLDIVAPGVNVQSTYPGSTYASLNGTSMATPHVAGAAALVKQKNPSWSNVQIRNHLKNTATSLGSTNLYGSGLVNAEAATR

SEQ ID NO: 53589 - protein, 269 aa, Unidentified
AQSVPWGISRVQAPAAHNRGLTGSGVKVAVLDTGISTHPDLNIRGGASFVPGEPSTQDGNGHGTHVAGTIAALNNSIGVLGVAPSAELYAVKVLGASGSGSVSSIAQGLEWAGNNRMHVANLSLGIPSPSATLEQAVNSATSRGVLVVAASGNSGAGSISYPARYANAMAVGATDQNNNRADFSQYGAGLDIVAPGVNVQSTYPGSTYASLNGTSMATPHVAGAAALVKQKNPSWSNVQIRNHLKNTATSLGSTNLYGSGLVNAEAATR

SEQ ID NO: 53590 - protein, 269 aa, Unidentified
AQSVPWGISRVQAPAAHNRKLTGSGVKVAVLDTGISTHPDLNIRGGASFVPGEPSTQDGNGHGTHVAGTIAALNNSIGVLGVAPSAELYAVKVLGASGSGSVSSIAQGLEWAGNNGMHVANLSLGLPSPSATLEQAVNSATSRGVLVVAASGNSGAGSISYPARYANAMAVGATDQNNNRASFSQYGAGLDIVAPGVNVQSTYPGSTYASENGTSMATPHVAGAAALVKQKNPSWSNVQIRNHLKNTATSLGSTNLYGSGLVNAEAATR

SEQ ID NO: 53591 - protein, 269 aa, Unidentified
AQSVPWGISRVQAPAAHNRGLTGRGVKVAVLDSGISTHPDLNIRGGASFVPGEPSTQDGNGHGTHVAGTIAALNNSIGVLGVAPSAELYAVKVLGASGSGSVSSIAQGLEWAGNNGMHVANLSLGSPSPSATLEQAVNSATSRGVLVVVASGNSGAGSISYPARYANAMAVGATDQNNNRASFSQYGAGLDIVAPGVNVQSTYPGSTYASLNGTSMATPHVAGAAALVKQKNPSWSNVQIRNHLKNTATSLGSTNLYGSGLVNAEAATR

SEQ ID NO: 53592 - protein, 269 aa, Unidentified
AQSVPWGISRVQAPAAHNRGLTGSGVKVAVLDTGISTHPDLNIRGGASFVPGEPSTQDGEGHGTHVAGTIAALNNSIGVLGVAPSAELYAVKVLGASGSGSVSSIAQGLEWAGNNGMHVANLSLGSPSPSATLEQAVNSATSRGVLVVAASGNSGAGSISYPARYANAMAVGATDQNNNRADFSQYGAGLDIVAPGVNVQSTYPGSTYASLNGTSMATPHVAGAAALVKQKNGSWSNVQIRNHLKNTATSLGSTNLYGSGLVNAEAATR

SEQ ID NO: 53593 - protein, 269 aa, Unidentified
AQSVPWGISRVQAPAAHNRGLTGSGVKVAVLDTGISTHPDLNIRGGASFVPGEPSTQDGNGHGTHVAGTIAALNNSIGVLGVAPSAELYAVKVLGASGSGSVSSIAQGLEWAGNNGMHVANLSLGNESPSATLEQAVNSATSRGVLVVAASGNSGAGSISYPARYANAMAVGATDQNNNHASFSQYGAGLDIVAPGVNVQSTYPGSTYASLNGTSMATPHVAGAAALVKQKNPSWSNVQIRNHLKNTATSLGSTNLYGSGLVNAEAATR

SEQ ID NO: 53594 - protein, 269 aa, Unidentified
AQSVPWGISRVQAPAAHNRGLTGSGVKVAVLDTGISTHPDLNIRGGASFVPGEPSTQDGNGHGTHVAGTIAALNNSIGVLGVAPSAELYAVKVLGFAGSGSISSIAQGLEWAGNNGMHVANLSLGSPSPSATLEQAVNSATSRGVLVVAASGNSGAGSISYPARYANAMAVGATDQNNNRASFSQYGAGLDIVAPGVNVQSTYPGSTYASLNGTSMATPHVAGAAALVKQKNPSWSNVQIRNHLKNTATSLGSTNLYGSGLVNAEAATR

SEQ ID NO: 53595 - protein, 269 aa, Unidentified
AQSVPWGISRVQAPAAHNRGLTGSGVKVAVLDTGISTHPDLNIRGGASFVPGEPSTQDGNGHGTHVAGTIAALNNSIGVLGVAPSAELYAVKVLGASGSGSVSSIAQGLEWAGNNGMHVANLSLGQPSPSATLEQAVNSATSRGVLVVAASGNSGAGSISYPARYANAMAVGATDQNNNRASFSQYGAGLDIVAPGVNVQSTYPGSTYASENGTSMATPHVAGAAALVKQKNPSWSNVQIRNHLKNTATSLGSTNLYGSGLVNALAATR

SEQ ID NO: 53596 - protein, 269 aa, Unidentified
AQSVPWGISRVQAPAAHNRGLTGGGVKVAVLDTGISTHPDLNIRGGASFVPGEPSTQDGNGHGTHVAGTIAALNNNIGVLGVAPSAELYAVKVLGASGNGSVSSIAQGLEWAGNNGMHVANLSLGAPSPSATLEQAVNSATSRGVLVVAASGNSGAGSISYPARYANAMAVGATDQNNNRASFSQYGAGLDIVAPGVNVQSTYPGSTYASLNGTSSATPHVAGAAALVKQKNPSWSNVQIRNHLKNTATSLGSTNLYGSGLVNAEAATR

SEQ ID NO: 53597 - protein, 269 aa, Unidentified
AQSVPWGISRVQAPAAHNRGLTGSGVKVAVLDTGISTHPDLNIRGGASFVPGEPSTQDGNGHGTHVAGTIAALNNSIGVLGVAPSAELYAVKVLAASGQGSVSSIAGGLEWAGNNGMHVANLSLGSPSPSATLEQAVNSATSRGVLVVAASGNSGAGSISYPARYANAMAVGATDQNNNRASFSQYGAGLDIVAPGVNVQSTYPGSTYASLNGTSMATPHVAGAAALVKQKNPSWSNVQIRNHLKNTATSLGSTNLYGSGLVNAEAATR

SEQ ID NO: 53598 - protein, 269 aa, Unidentified
AQSVPWGISRVQAPAAHNRGLAGSGVKVAVLDTGISTHPDLNIRGGASFVPGEPSTQDGEGHGTHVAGTIAALNNSIGVLGVAPSAELYAVKVLGASGSGSVSSIAQGLEWAGNNGMHVANLSLGSPSPSATLEQAVNSATSRGVLVVAASGNSGEGSISYPARYANAMAVGATDQNNNRASFSQYGAGLDIVAPGVNVQSTYPGSTYASLNGTSMATPHVAGAAALVKQKNPSWSNVQIRNHLKNTATSLGSTNLYGSGLVNAEAATR

SEQ ID NO: 53599 - protein, 269 aa, Unidentified
AQSVPWGISRVQAPAAHNRGLTGSGVKVAVLDTGISTHPDLNIRGGASFVPGEPSTQDGNGHGTHVAGTIAALNNSIGVLGVAPSAELYAVKVLGASGRGSVSSIAQGLEWAGNNGMHVANLSLGTPSPSATLEQAVNSATSRGVLVVAASGNSGAGSISYPARYANAMAVGATDQNNNRASFSQYGAGLDIVAPGVNVQSTYPGSTYASLNGTSMATPHVAGAAALVKQKNPSWSNVQIRDHLKNTATSLGSTNLYGSGLVNAEAATR

SEQ ID NO: 53600 - protein, 269 aa, Unidentified
AQSVPWGISRVQAPAAHNRGLTGRGVKVAVLDTGISTHPDLNIRGGASFVPGEPSTQDGNGHGTHVAGTIAALNNSIGVLGVAPSAELYAVKVLGASGSGAISSIAQGLEWAGNNGMHVANLSLGSPSPSATLEQAVNSATSRGVLVVAASGNSGAGSISYPARYANAMAVGATDQNNNRASFSQYGAGLDIVAPGVNVQSTYPGSTYASLNGTSMATPHVAGAAALVKQKNPSWSNVQIRNHLKNTATSLGSTNLYGSGLVNAEAATR

SEQ ID NO: 53601 - protein, 269 aa, Unidentified
AQSVPWGISRVQAPAAHNRGLTGSGVKVAVLDTGISTHPDLNIRGGASFVPGEPSTQDGNGHGTHVAGTIAALNNSIGVLGVAPSAELYAVKVLGASGAGSLSSIAQGLEWAGNNGMHVANLSLGNPSPSATLEQAVNSATSRGVLVVAASGNSGAGSISYPARYANAMAVGATDQNNNRASFSQYGAGLDIVAPGVNVQSTYPGSTYASLNGTSMATPHVAGAAALVKQKNPSWSNVQIRNHLKNTATSLGSTNLYGSGLVNAEAATR

SEQ ID NO: 53602 - protein, 269 aa, Unidentified
AQSVPWGISRVQAPAAHNRGLTGSGVKVAVLDTGISTHPDLRIRGGASFVPGEPSTQDGNGHGTHVAGTIAALNNSIGVLGVAPSAELYAVKVLGASGSGSVSSIAQGLEWAGNNGMHVANLSLGSPSPSATLEQAVNSATSRGVLVVAASGNSGAGSISYPARYANAMAVGATDQNNNRASFSQYGAGLDIVAPGVNVQSTYPGSTYASLNGTSMATPHVAGEAALVKQKNPSWSNVQIRNRLKNTATSLGSTNLYGSGLVNAEAATR

SEQ ID NO: 53603 - protein, 269 aa, Unidentified
AQSVPWGISRVQAPAAHNRGLTGSGVKVAVLDTGISTHPDLNIRGGASFVPGEPSTQDGNGHGTHVAGTIAALNNSIGVLGVAPSAELYAVKVLGATGAGAVSSIAQGLEWAGNNGMHVANLSLGSPSPSATLEQAVNSATSRGVLVVAASGNSGAGSISYPARYANAMAVGATDQNNNRASFSQYGAGLDIVAPGVNVQSTYPGSTYASLNGTSMATPHVAGAAALVKQKNPSWSNVQIRNHLKNTATSLGSTNLYGSGLVNAEAATR

SEQ ID NO: 53604 - protein, 269 aa, Unidentified
AQSVPWGISRVQAPAAHNRRLTGSGVKVAVLDTGISTHPDLNIRGGASFVPGEPSTQDGNGHGTHVAGTIAALNNSIGVLGVAPSAELYAVKVLGASGSGSVSSIAQGLEWAGNNGMHVANLSLGSESPSATLEQAVNSATSRGVLVVAASGNSGAGSISYPARYANAMAVGATDQNNNRASFSQYGAGLDIVAPGVNVQSTYPGSTYASLNGTSMATPHVAGAAALVKQKNPSWSNVQIRNRLKNTATSLGSTNLYGSGLVNAEAATR

SEQ ID NO: 53605 - protein, 269 aa, Unidentified
AQSVPWGISRVQAPAAHNRGLTGSGVKVAVLDTGISTHPDLNIRGGASFVPGEPSTQDGNGHGTHVAGTIAALNNRIGVLGVAWSAELYAVKVLGASGSGSVSSIAQGLEWAGNNGMHVANLSLGSPSPSATLEQAVNSATSRGVLVVAASGNSGAGSISYPARYANAMAVGATDQNNNRASFSQYGAGLDIVAPGVNVQSTYPGSTYASLNGTSMATPHVAGAAALVKQKNPSWSFVQIRNHLKNTATSLGSTNLYGSGLVNAEAATR

SEQ ID NO: 53606 - protein, 269 aa, Bacillus lentus
AQSVPWGISRVQAPAAHNRGLTGSGVKVAVLDTGISTHPDLNIRGGASFVPGEPSTQDGNGHGTHVAGTIAALNNSIGVLGVAPRAELYAVKVLGASGSGSVSSIADGLEWAGNNGMHVANLSLGSPSPSATLEQAVNSATSRGVLVVAASGNSGAGSISYPARYANAMAVGATDQNNNRASFSQYGAGLDIVAPGVNVQSTYPGSTYASLNGTSMATPHVAGAAALVKQKNPSWSNVQIRRHLKNTATSLGSTNLYGSGLVNAEAATR

SEQ ID NO: 53607 - protein, 269 aa, Unidentified
AQSVPWGISRVQAPAAHNRRLTGSGVKVAVLDTGISTHPDRNIRGGASFVPGEPSTQDGNGHGTHVAGTIAALNNSIGVLGVAPSAELYAVKVLGASGSGSVSSIAQGLEWAGNNGMHVANLSLGSPSPSATLEQAVNSATSRGVLVVAASGNSGAGSISYPARYANAMAVGATDQNNNRASFSQYGAGLDIVAPGVNVQSTYPGSTYASLNGTSMATPHVAGAAALVKQKNPSWSNVQIRNRLKNTATSLGSTNLYGSGLVNAEAATR

SEQ ID NO: 53608 - protein, 269 aa, Unidentified
AQSVPWGISRVQAPAAHNRRLTGRGVKVAVLDTGISTHPDLNIRGGASFVPGEPSTQDGNGHGTHVAGTIAALNNSIGVLGVAPSAELYAVKVLGASGSGSVSSIAQGLEWAGNNGMHVANLSLGSPSPSATLEQAVNSATSRGVLVVAASGNSGAGSISYPARYANAMAVGATDQNNNRADFSQYGAGLDIVAPGVNVQSTYPGSTYASLNGTSMATPHVAGAAALVKQKNPSWSNVQIRNHLKNTATSLGSTNLYGSGLVNAEAATR

SEQ ID NO: 53609 - protein, 269 aa, Unidentified
AQSVPWGISRVQAPAAHNRGLTGSGVKVAVLDTGISTHPDLNIRGGASFVPGEPSTQDGNGHGTHVAGTIAALNNSIGVLGVAWSAELYAVKVLGASGSGSVSSIAQGLEWAGNNRMHVANLSLGSPSPSATLEQAVNSATSRGVLVVAASGNSGAGSISYPARYANAMAVGATDQNNNRASFSQYGAGLDIVAPGVNVQSTAPGSTYASLNGTSMATPHVAGAAALVKQKNPSWSNVQIRNHLKNTATSLGSTNLYGSGLVNAEAATR

SEQ ID NO: 53610 - protein, 269 aa, Unidentified
AQSVPWGISRVQAPAAHNRRLTGSGVKVAVLDTGISTHPDLRIRGGASFVPGEPSTQDGNGHGTHVAGTIAALNNSIGVLGVAPSAELYAVKVLGASGSGSVSSIAQGLEWAGNNGMHVANLSLGSPSPSATLEQAVNSATSRGVLVVAASGNSGAGSISYPARYANAMAVGATDQNNNRASFSQYGAGLDIVAPGVNVQSTYPGSTYASLNGTSMATPHVAGAAALVKQKNPSWSNVQIRNHLKNTATSLGSTNLYGSGLVNALAATR

SEQ ID NO: 53611 - protein, 269 aa, Synthetic construct
AQSVPWGISRVQAPAAHNRGLTGSGVKVAVLDTGISTHPDLNIRGGASFVPGDPSTQDGNGHGTHVAGTIAALNNSIGVLGVAPSAELFAVRVLGASGSGSVSSIAQGLEWAGNNGMHVANLSLGSPSPSATLEQAVNSATSRGVLVVAASGNSGAGSISYPARYANAMAVGATDQNNNRASFSQYGAGLDIVAPGVNVQSTYPGSTYASLNGTSMATPHVAGAAALVKQKNPSWSNVQIRNHLKNTATSLGSTNLYGSGLVNAEAATR

SEQ ID NO: 53612 - protein, 269 aa, Unidentified
AQSVPWGISRVQAPAAHNRGLTGSGVKVAVLDTGISTHPDLNIRGGASFVPGEPSTQDGNGHGTHVAGTIAALNNSIGVLGVAPSAELYAVKVLAASGGGSVSSIAQGLEWAGNNGMHVANLSLGSPSPSATLEQAVNSATSRGVLVVAASGNSGAGSISYPARYANAMAVGATDQNNNRASFSQYGAGLDIVAPGVNVQSTYPGSTYASQNGTSMATPHVAGAAALVKQKNPSWSNVQIRNHLKNTATSLGSTNLYGSGLVNAEAATR

SEQ ID NO: 53613 - protein, 269 aa, Unidentified
AQSVPWGISRVQAPAAHNRGLTGRGVKVAVLDSGISTHPDLNIRGGASFVPGEPSTQDGNGHGTHVAGTIAALNNSIGVLGVAPSAELYAVKVLGASGSGSVSSIAQGLEWAGNNGMHVANLSLGSPSPSATLEQAVNSATSRGVLVVAASGNSGAGSISYPARYANAMAVGATDQNNNRASFSQYGAGLDIVAPGVNVQSTYPGSTYASLNGTSMATPHVAGAAALVFQKNPSWSNVQIRNHLKNTATSLGSTNLYGSGLVNAEAATR

SEQ ID NO: 53614 - protein, 269 aa, Unidentified
AQQVPWGISRVQAPAAHNRGLTGSGVKVAVLDTGISTHPDLNIRGGASFVPGEPSTQDGNGHGTHVAGTIAALNNDIGVLGVAPSAELYAVKVLGASGSGSVSSIAQGLEWAGNNGMHVANLSLGSPSPSATLEQAVNSATSRGVLVVAASGNSGAGSISYPARYQNAMAVGATDQNNNRASFSQYGAGLDIVAPGVNVQSTYPGSTYASLNGTSMATPHVAGAAALVKQKNPSWSNVQIRNHLKNTATSLGSTNLYGSGLVNAEAATR

SEQ ID NO: 53615 - protein, 269 aa, Unidentified
AQSVPWGISRVQAPAAHNRGLTGSGVKVAVLDTGISTHPDLNIRGGASFVPGEPSTQDGNGHGTHVAGTIAALNNNIGVLGVAPSAELYAVKVLGASGSGSVSSIAQGLEWAGNNGMHVANLSLGQPSPSATLEQAVNSATSRGVLVVAASGNSGAGSISYPARYANAMAVGATDQNNNRASFSQYGAGLDIVAPGVNVQSTYPGSTYASLNGTSMATPHVAGAAALVKQKNPSWSNVQIRNHLKNTATSLGSTNLYGSGLVNALAATR

SEQ ID NO: 53616 - protein, 269 aa, Unidentified
AQSVPWGISRVQAPAAHNRGLTGRGVKVAVLDTGISTHPDLNIRGGASFVPGEPSTQDGNGHGTHVAGTIAALNNSIGVLGVAPSAELYAVKVLGASGSGSVSSIAQGLEWAGLNGMHVANLSLGSPSPSATLEQAVNSATSRGVLVVAASGNSGAGSISYPARYANAMAVGATDQNNNRADFSQYGAGLDIVAPGVNVQSTYPGSTYASLNGTSMATPHVAGAAALVKQKNPSWSNVQIRNHLKNTATSLGSTNLYGSGLVNAEAATR

SEQ ID NO: 53617 - protein, 269 aa, Unidentified
AQSVPWGISRVQAPAAHNRGLTGSGVKVAVLDTGISTHPDLRIRGGASFVPGEPSTQDGNGHGTHVAGTIAALNNSIGVLGVAPSAELYAVKVLGASGDGSVSSIAQGLEWAGNNGMHVANLSLGSPSPSATLEQAVNSATSRGVLVVAASGNSGAGSISYPARYANAMAVGATDQNNNRASFSQYGAGLDIVAPGVNVQSTYPGSTYASENGTSMATPHVAGAAALVKQKNPSWSNVQIRNHLKNTATSLGSTNLYGSGLVNAEAATR

SEQ ID NO: 53618 - protein, 269 aa, Unidentified
AQSVPWGISRVQAPAAHNRRLTGSGVKVAVLDTGISTHPDLNIRGGASFVPGEPSTQDGNGHGTHVAGTIAALNNSIGVLGVAPSAELYAVKVLGASGSGSVSSIAQGLEWAGNNGMHVANLSLGSPSPSATLEQAVNSATSRGVLVVAASGNSGAGSISYPARYANAMAVGATDQNNNRASFSQYGAGLDIVAPGVNVQSTYPGSTYASLNGTSMATPHVAGAAVLVKQKNPSWSNVRIRNHLKNTATSLGSTNLYGSGLVNAEAATR

SEQ ID NO: 53619 - protein, 270 aa, Aspergillus oryzae
AQSVPWGISRVQAPAAHNRGLTGSGVKVAVLDTGISTHPDLNIRGGASFVPGEPSTQDGNGHGTHVAGTIAALNNSIGVLGVAPSAELYAVKVLGASEGSGSVSSIAQGLEWAGNNGMHVANLSLGSPSPSATLEQAVNSATSRGVLVVAASGNSGASSISYPARYANAMAVGATDQNNNRASFSQYGAGLDIVAPGVNVQSTYPDSTYASLNGTSMATPHVAGAAALVKQKNPSWSNVQIRNHLKNTATSLGSLNLYGSGLVNAEAATR

SEQ ID NO: 53620 - protein, 269 aa, Unidentified
AQVVPWGISRVQAPAAHNRGLTGSGVKVAVLDTGISTHPDLNIRGGASFVPGEPSTQDGNGHGTHVAGTIAALNNSIGVLGVAPSAELYAVKVLGASGSGSVSSIAQGLEWAGNNGMHVANLSMGSPSPSATLEQAVNSATSRGVLVVAASGNSGAGSISYPARYANAMAVGATDQNNNRASFSQYGAGLDIVAPGVNVQSTYPGSTYASLNGTSMASPHVAGAAALVKQKNPSWSNVQIRNHLKNTATSLGSTNLYGSGLVNAEAATR

SEQ ID NO: 53621 - protein, 269 aa, Unidentified
AQSVPWGISRVQAPAAHNRGLTGSGVKVAVLDTGISTHPDLNIRGGASFVPGEPSTQDGNGHGTHVAGTIAALNNSIGVLGVAPNAELYAVKVLGASGSGSVSSIAQGLEWAGNNGMHVANLSLGSPSPSATLEQAVNSATSRGVLVVAASGNSGAGSISYPARYANAMAVGATDQNNNRANFSQYGAGLDIVAPGVNVQSTTPGSTYASLNGTSMATPHVAGAAALVKQKNPSWSNVQIRNHLKNTATSLGSTNLYGSGLVNAEAATR

SEQ ID NO: 53622 - protein, 269 aa, Unidentified
AQSVPWGISRVQAPAAHNRGLTGSGVKVAVLDTGISTHPDLNIRGGASFVPGEPSTQDGNGHGTHVAGTIAALNNSIGVLGVAPSAELYAVKVLPAASSGSVSSIAQGLEWAGNNGMHVANLSLGSPSPSATLEQAVNSATSRGVLVVAASGNSGAGSISYPARYANAMAVGATDQNNNRASFSQYGAGLDIVAPGVNVQSTYPGSTYASLNGTSMATPHVAGAAALVKQKNPSWSNVQIRNHLKNTATSLGSTNLYGSGLVNAEAATR

SEQ ID NO: 53623 - protein, 269 aa, Unidentified
AQSVPWGISRVQAPAAHNRGLTGSGVKVAVLDTGISTHPDLNIRGGASFVPGEPSTQDGNGHGTHVAGTIAALNNSIGVLGVAPSAELYAVKVLAASGGGSVSSIAGGLEWAGNNGMHVANLSLGSPSPSATLEQAVNSATSRGVLVVAASGNSGAGSISYPARYANAMAVGATDQNNNRASFSQYGAGLDIVAPGVNVQSTYPGSTYASQNGTSSATPHVAGAAALVKQKNPSWSNVQIRNHLKNTATSLGSTNLYGSGLVNAEAATR

SEQ ID NO: 53624 - protein, 269 aa, Unidentified
AQSVPWGISRVQAPAAHNRGLTGSGVKVAVLDTGISTHPDLNIRGGASFVPGEPSTQDGNGHGTHVAGTIAALNNSIGVLGVAPSAELYAVKVLAASGQGSVSSIANGLEWAGNNGMHVANLSLGSPSPSATLEQAVNSATSRGVLVVAASGNSGAGSISYPARYANAMAVGATDQNNNRADFSQYGAGLDIVAPGVNVQSTYPGSTYASLNGTSSATPHVAGAAALVKQKNPSWSNVQIRNHLKNTATSLGSTNLYGSGLVNAEAATR

SEQ ID NO: 53625 - protein, 269 aa, Unidentified
AQSVPWGISRVQAPAAHNRGLTGSGVKVAVLDTGISTHPDLNIRGGASFVPGEPSTQDGNGHGTHVAGTIAALNNNIGVLGVAPSAELYAVKVLGASGSASVSSIAQGLEWAGNNGMHVANLSLGSPSPSATLEQAVNSATSRGVLVVAASGNSGAGSISYPARYANAMAVGATDQNNNRASFSQYGAGLDIVAPGVNVQSTYPGSTYASLNGTSMATPHVAGAAALVKQKNPRWSNVQIRNHLKNTATSLGSTNLYGSGLVNAEAATR

SEQ ID NO: 53626 - protein, 269 aa, Unidentified
AQSVPWGISRVQAPAAHNRGLTGSGVKVAVLDTGISTHPDLNIRGGASFVPGEPSTQDGNGHGTHVAGTIAALNNSIGVLGVAPSAELYAVKVLGFSGSASISSIAQGLEWAGNNGMHVANLSLGSPSPSATLEQAVNSATSRGVLVVAASGNSGAGSISYPARYANAMAVGATDQNNNRASFSQYGAGLDIVAPGVNVQSTYPGSTYASLNGTSMATPHVAGAAALVKQKNPSWSNVQIRNHLKNTATSLGSTNLYGSGLVNAEAATR

SEQ ID NO: 53627 - protein, 269 aa, Unidentified
AQSVPWGISRVQAPAAHNRKLTGSGVKVAVLDTGISTHPDLNIRGGASFVPGEPSTQDGNGHGTHVAGTIAALNNSIGVLGVAPSAELYAVKVLGASGDGSVSSIAQGLEWAGNNGMHVANLSLGSPSPSATLEQAVNSATSRGVLVVAASGNSGAGSISYPARYANAMAVGATDQNNNRASFSQYGAGLDIVAPGVNVQSTYPGSAYASLNGTSMATPHVAGAAALVKQKNPSWSNVQIRNHLKNTATSLGSTNLYGSGLVNAEAATR

SEQ ID NO: 53628 - protein, 269 aa, Unidentified
AQSVPWGISRVQAPAAHNRGLTGSGVKVAVLDTGISTHPDLNIRGGASFVPGEPSTQDGNGHGTHVAGTIAALNNSIGVLGVAPSAELYAVKVLGFSSSGSISSIAQGLEWAGNNGMHVANLSLGSPSPSATLEQAVNSATSRGVLVVAASGNSGAGSISYPARYANAMAVGATDQNNNRASFSQYGAGLDIVAPGVNVQSTYPGSTYASLNGTSMATPHVAGAAALVKQKNPSWSNVQIRNHLKNTATSLGSTNLYGSGLVNAEAATR

SEQ ID NO: 53629 - protein, 269 aa, Unidentified
AQSVPWGISRVQAPAAHNRGLTGSGVKVAVLDTGISTHPDLNIRGGASFVPGEPSTQDGNGHGTHVAGTIAALNNSIGVLGVAPSAELYAVKVLGASGSGSVSSIAQGLEWAGNNRMHVANLSLGSPSPSATLEQAVNSATSRGVLVVAASGNSGAGSISYPARYANAMAVGATDQNNNRASFSQYGAGLDIVAPGVNVQSTYPGSAYASENGTSMATPHVAGAAALVKQKNPSWSNVQIRNHLKNTATSLGSTNLYGSGLVNAEAATR

SEQ ID NO: 53630 - protein, 269 aa, Unidentified
AQSVPWGISRVQAPAAHNRGLTGRGVKVAVLDTGISTHPDLRIRGGASFVPGEPSTQDGNGHGTHVAGTIAALNNSIGVLGVAPSAELYAVKVLGASGSGSVSSIAQGLEWAGNNGMHVANLSLGSPSPSATLEQAVNSATSRGVLVVAASGNSGAGSISYPARYANAMAVGATDQNNNRASFSQYGAGLDIVAPGVNVQSTYPGSTYASLNGTSMATPHVAGAAALVKQKNPSWSNVQIRNRLKNTATSLGSTNLYGSGLVNAEAATR

SEQ ID NO: 53631 - protein, 269 aa, Unidentified
AQSVPWGISRVQAPAAHNRGLAGSGVKVAVLDTGISTHPDLNIRGGASFVPGEPSTQDGNGHGTHVAGTIAALNNSIGVLGVAPSAELYAVKVLGASGSGSLSSIAQGVEWAGNNGMHVANLSLGSPSPSATLEQAVNSATSRGVLVVAASGNSGAGSISYPARYANAMAVGATDQNNNRASFSQYGAGLDIVAPGVNVQSTYPGSTYASLNGTSMATPHVAGAAALVKQKNPSWSNVQIRNHLKNTATSLGSTNLYGSGLVNAEAATR

SEQ ID NO: 53632 - protein, 269 aa, Unidentified
AQSVPWGISRVQAPAAHNRGLTGRGVKVAVLDTGISTHPDLNIRGGASFVPGEPSTQDGNGHGTHVAGTIAALNNRIGVLGVAWSAELYAVKVLGASGSGSVSSIAQGLEWAGNNGMHVANLSLGSPSPSATLEQAVNSATSRGVLVVAASGNSGAGSISYPARYANAMAVGATDQNNNRASFSQYGAGLDIVAPGVNVQSTYPGSTYASLNGTSMATPHVAGAAALVKQKNPSWSNVQIRNHLKNTATSLGSTNLYGSGLVNAEAATR

SEQ ID NO: 53633 - protein, 269 aa, Unidentified
AQSVPWGISRVQAPAAHNRGLTGSGVKVAVLDTGISTHPDLNIRGGASFVPGEPSTQDGNGHGTHVAGTIAALNNSIGVLGVAPSAELYAVKVLGASGSGSVSSIAQGLEWAGLNRMHVANLSLGSPSPSATLEQAVNSATSRGVLVVAASGNSGAGSIDYPARYANAMAVGATDQNNNRASFSQYGAGLDIVAPGVNVQSTYPGSTYASLNGTSMATPHVAGAAALVKQKNPSWSNVQIRNHLKNTATSLGSTNLYGSGLVNAEAATR

SEQ ID NO: 53634 - protein, 269 aa, Unidentified
AQSVPWGISRVQAPAAHNRRLTGRGVKVAVLDTGISTHPDLNIRGGASFVPGEPSTQDGNGHGTHVAGTIAALNNSIGVLGVAPSAELYAVKVLGASGSGSVSSIAQGLEWAGNNGMHVANLSLGSPSPSATLEQAVNSATSRGVLVVAASGNSGAGSISYPARYANAMAVGATDQNNNRASFSQYGAGLDIVAPGVNVQSTYPGSTYASLNGTSMATPHVAGAAALVKQKNPSWSNVRIRNHLKNTATSLGSTNLYGSGLVNAEAATR

SEQ ID NO: 53635 - protein, 269 aa, Unidentified
AQSVPWGISRVQAPASHNRGLTGSGVKVAVLDTGISTHPDLNIRGGASFVPGEPSTQDGNGHGTHVAGTIAALNNSIGVLGVAPSAELYAVKVLGASGAGSISSIAQGLEWAGNNGMHVANLSLGSPSPSATLEQAVNSATSRGVLVVAASGNSGAGSISYPARYANAMAVGATDQNNNRASFSQYGAGLDIVAPGVNVQSTYPGSTYASLNGTSMATPHVAGAAALVKQKNPSWSNVQIRNHLKNTATSLGSTNLYGSGLVNAEAATR

SEQ ID NO: 53636 - protein, 269 aa, Unidentified
AQSVPWGISRVQAPAAHNRGLTGSGVKVAVLDTGISTHPDLNIRGGASFVPGEPSTQDGNGHGTHVAGTIAALNNSIGVLGVAPSAELYAVKVLGFAGSGGVSSIAQGLEWAGNNGMHVANLSLGSPSPSATLEQAVNSATSRGVLVVAASGNSGAGSISYPARYANAMAVGATDQNNNRASFSQYGAGLDIVAPGVNVQSTYPGSTYASLNGTSMATPHVAGAAALVKQKNPSWSNVQIRNHLKNTATSLGSTNLYGSGLVNAEAATR

SEQ ID NO: 53637 - protein, 269 aa, Unidentified
AQSVPWGISRVQAPAAHNRGLTGSGVKVAVLDTGISTHPDLNIRGGASFVPGEPSTQDGNGHGTHVAGTIAALNNSIGVLGVAPSAELYAVKVLGQGGSGSLSSIAQGLEWAGNNGMHVANLSLGSPSPSATLEQAVNSATSRGVLVVAASGNSGAGSISYPARYANAMAVGATDQNNNRASFSQYGAGLDIVAPGVNVQSTYPGSTYASLNGTSMATPHVAGAAALVKQKNPSWSNVQIRNHLKNTATSLGSTNLYGSGLVNAEAATR

SEQ ID NO: 53638 - protein, 269 aa, Unidentified
AQSVPWGISRVQAPAAHNRGLTGSGVKVAVLDTGISTHPDLNIRGGASFVPGEPSTQDGNGHGTHVAGTIAALNNSIGVLGVAPNAELYAVKVLGASGGGSLSSIAQGLEWAGNNGMHVANLSLGSPSPSATLEQAVNSATSRGVLVVAASGNSGAGSISYPARYANAMAVGATDQNNNRASFSQYGAGLDIVAPGVNVQSTYPGSTYASLNGTSMATPHVAGAAALVKQKNPSWSNVQIRNHLKNTATSLGSTNLYGSGLVNAEAATR

SEQ ID NO: 53639 - protein, 269 aa, Unidentified
AQSVPWGISRVQAPAAHNRGLTGFGVKVAVLDTGISTHPDLNIRGGASFVPGEPSTQDGNGHGTHVAGTIAALNNSIGVLGVAPSAELYAVKVLGASGSGSVSSIAQGLEWAGNNGMHVANLSLGDPSPSATLEQAVNSATSRGVLVVAASGNSGAGSISYPARYANAMAVGATDQNNNRASFSQYGAGLDIVAPGVNVQSTYPGSAYASLNGTSMATPHVAGAAALVKQKNPSWSNVQIRNHLKNTATSLGSTNLYGSGLVNAEAATR

SEQ ID NO: 53640 - protein, 269 aa, Unidentified
AQSVPWGISRVQAPAAHNRGLTGSGVKVAVLDTGISTHPDLNIRGGASFVPGEPSTQDGEGHGTHVAGTIAALNNDIGVLGVAPSAELYAVKVLGASGSGSVSSIAQGLEWAGNNDMHVANLSLGSPSPSATLEQAVNSATSRGVLVVAASGNSGAGSISYPARYANAMAVGATDQNNNRASFSQYGAGLDIVAPGVNVQSTYPGSTYASLNGTSMATPHVAGAAALVKQKNPSWSNVQIRNHLKNTATSLGSTNLYGSGLVNAEAATR

SEQ ID NO: 53641 - protein, 269 aa, Unidentified
AQSVPWGISRVQAPAAHNRGLTGSGVKVAVLDTGISTHPDLNIRGGASFVPGEPSTQDGNGHGTHVAGTIAALNNSIGVLGVAPSAELYAVKVLGASGAGGLSSIAQGLEWAGNNGMHVANLSLGSPSPSATLEQAVNSATSRGVLVVAASGNSGAGSISYPARYANAMAVGATDQNNNRASFSQYGAGLDIVAPGVNVQSTYPGSTYASLNGTSMATPHVAGAAALVKQKNPSWSNVQIRNHLKNTATSLGSTNLYGSGLVNAEAATR

SEQ ID NO: 53642 - protein, 269 aa, Unidentified
AQSVPWGISRVQAPAAHNRGLTGSGVKVAVLDTGISTHPDLNIRGGASFVPGEPSTQDGNGHGTHVAGTIAALNNSIGVLGVAPSAELYAVKVLGASGSGGVSSIAQGVEWAGNNGMHVANLSLGSPSPSATLEQAVNSATSRGVLVVAASGNSGAESISYPARYANAMAVGATDQNNNRASFSQYGAGLDIVAPGVNVQSTYPGSTYASLNGTSMATPHVAGAAALVKQKNPSWSNVQIRNHLKNTATSLGSTNLYGSGLVNAEAATR

SEQ ID NO: 53643 - protein, 269 aa, Unidentified
AQSVPWGISRVQAPAAHNRGLTGSGVKVAVLDTGISTHPDLNIRGGASFVPGEPSTQDGNGHGTHVAGTIAALNNSIGVLGVAPSAELYAVKVLGASGSGSVSSIAQGLEWAGNNRMHVANLSLGSPSPSATLEQAVNSATSRGVLVVAASGNSGAGSIDYPARYANAMAVGATDQNNNRASFSQYGAGLDIVAPGVNVQSTYPGSAYASLNGTSMATPHVAGAAALVKQKNPSWSNVQIRNHLKNTATSLGSTNLYGSGLVNAEAATR

SEQ ID NO: 53644 - protein, 269 aa, Unidentified
AQSVPWGISRVQAPAAHNRGLTGSGVKVAVLDTGISTHPDLNIRGGASFVPGEPSTQDGNGHGTHVAGTIAALNNSIGVLGVAPSAELYAVKVLGASGSGSVSSIAQGLEWAGNNRMHVANLSLGSESPSATLEQAVNSATSRGVLVVAASGNSGAGSISYPARYANAMAVGATDQNNNRASFSQYGAGLDIVAPGVNVQSTYPGSTYASLNGTSMATPHVAGAAALVKQKNPSWSNVQIRNRLKNTATSLGSTNLYGSGLVNAEAATR

SEQ ID NO: 53645 - protein, 269 aa, Unidentified
AQSVPWGISRVQAPAAHNRGLTGSGVKVAVLDTGISTHPDLNIRGGASFVPGEPSTQDGNGHGTHVAGTIAALNNNIGVLGVAPSAELYAVKVLGASGDASVSSIAQGLEWAGNNGMHVANLSLGSPSPSATLEQAVNSATSRGVLVVAASGNSGAGSISYPARYANAMAVGATDQNNNRASFSQYGAGLDIVAPGVNVQSTYPGSTYASLNGTSMATPHVAGAAALVKQKNPSWSNVQIRNHLKNTATSLGSTNLYGSGLVNAEAATR

SEQ ID NO: 53646 - protein, 269 aa, Unidentified
AQSVPWGISRVQAPASHNRGLAGSGVKVAVLDTGISTHPDLNIRGGASFVPGEPSTQDGNGHGTHVAGTIAALNNSIGVLGVAPSAELYAVKVLGASGSGSVSSIAQGLEWAGNNGMHVANLSLGNPSPSATLEQAVNSATSRGVLVVAASGNSGAGSISYPARYANAMAVGATDQNNNRASFSQYGAGLDIVAPGVNVQSTYPGSTYASLNGTSMATPHVAGAAALVKQKNPSWSNVQIRNHLKNTATSLGSTNLYGSGLVNAEAATR

SEQ ID NO: 53647 - protein, 269 aa, Unidentified
AQSVPWGISRVQAPAAHNRKLTGSGVKVAVLDTGISTHPDLNIRGGASFVPGEPSTQDGEGHGTHVAGTIAALNNSIGVLGVAPSAELYAVKVLGASGSGSVSSIAQGLEWAGLNGMHVANLSLGSPSPSATLEQAVNSATSRGVLVVAASGNSGAGSISYPARYANAMAVGATDQNNNRASFSQYGAGLDIVAPGVNVQSTYPGSTYASLNGTSMATPHVAGAAALVKQKNPSWSNVQIRNHLKNTATSLGSTNLYGSGLVNAEAATR

SEQ ID NO: 53648 - protein, 269 aa, Synthetic construct
AQSVPWGISRVQAPAAHNRGLTGSGVKVAVLDTGISTHPDLNIRGGASFVPGEPSTQDGNGHGTHVAGTIAALDNSIGVLGVAPSAELYAVKVLGASGSGSVSSVAQGLEWAGNNGMHVASLSLGSPSPSATLEQAVNSATSRGVLVVAASGNSGAGSISYPARYANAMAVGATDQNNNRASFSQYGAGLDIVAPGVNVQSTYPGSTYASLNGTSMATPHVAGAAALVKQKNPSWSNVQIRNHLKNTATSLGSTNLYGSGLVNAEAATR

SEQ ID NO: 53649 - protein, 269 aa, Unidentified
AQSVPWGISRVQAPAAHNRGLTGSGVKVAVLDTGISTHPDLNIRGGASFVPGEPSTQDGNGHGTHVAGTIAALNNSIGVLGVAPSAELYAVKVLGASGSGSVSSIAQGLEWAGNNGMHVANLSLGQPSPSATLEQAVNSATSRGVLVVAASGNSGAGSISYPARYANAMAVGATDQNNNRASFSQYGAGLDIVAPGVNVQSTYPGSTYASENGTSMATPHVAGAAALVKQKNPRWSNVQIRNHLKNTATSLGSTNLYGSGLVNAEAATR

SEQ ID NO: 53650 - protein, 269 aa, Unidentified
AQSVPWGISRVQAPAAHNRGLAGSGVKVAVLDTGISTHPDLNIRGGASFVPGEPSTQDGNGHGTHVAGTIAALNNSIGVLGVAPSAELYAVKVLGASGSGSISSIAQGLEWAGNNGMHVANLSLGNPSPSATLEQAVNSATSRGVLVVAASGNSGAGSISYPARYANAMAVGATDQNNNRASFSQYGAGLDIVAPGVNVQSTYPGSTYASLNGTSMATPHVAGAAALVKQKNPSWSNVQIRNHLKNTATSLGSTNLYGSGLVNAEAATR

SEQ ID NO: 53651 - protein, 269 aa, Unidentified
AQSVPWGISRVQAPASHNRGLTGSGVKVAVLDTGISTHPDLNIRGGASFVPGEPSTQDGNGHGTHVAGTIAALNNSIGVLGVAPSAELYAVKVLGASGSGSISSIAQGLEWAGNNGMHVANLSLGSPSPSATLEQAVNSATSRGVIVVAASGNSGAGSISYPARYANAMAVGATDQNNNRASFSQYGAGLDIVAPGVNVQSTYPGSTYASLNGTSMATPHVAGAAALVKQKNPSWSNVQIRNHLKNTATSLGSTNLYGSGLVNAEAATR

SEQ ID NO: 53652 - protein, 269 aa, Unidentified
AQSVPWGISRVQAPAAHNRGLTGSGVKVAVLDTGISTHPDLNIRGGASFVPGEPSTQDGNGHGTHVAGTIAALNNSIGVLGVAPSAELYAVKVLGASGSGSVSSIAQGLEWAGNNGMHVANLSLGSPSPSATLEQAVNSATSRGVLVVAASGNSGAGSISFPARVANAMAVGATDQNNNRASFSQFGAGLDIVAPGVNVQSTYPGSTYASLNGTSMATPHVAGAAALVKQKNPSWSNVQIRNHLKNTATSLGSTNLYGSGLVNAEAATR

SEQ ID NO: 53653 - protein, 269 aa, Unidentified
AQSVPWGISRVQAPAAHNRGLTGSGVKVAVLDTGISTHPDLNIRGGASFVPGEPSTQDGNGHGTHVAGTIAALNNSIGVLGVAPSAELYAVKVLGATSSGSISSIAQGLEWAGNNGMHVANLSLGSPSPSATLEQAVNSATSRGVLVVAASGNSGAGSISYPARYANAMAVGATDQNNNRASFSQYGAGLDIVAPGVNVQSTYPGSTYASLNGTSMATPHVAGAAALVKQKNPSWSNVQIRNHLKNTATSLGSTNLYGSGLVNAEAATR

SEQ ID NO: 53654 - protein, 269 aa, Unidentified
AQSVPWGISRVQAPAAHNRGLTGSGVKVAVLDTGISTHPDLNIRGGASFVPGEPSTQDGNGHGTHVAGTIAALNNSIGVLGVAPRAELYAVKVLGASGSGSVSSIARGLEWAGNNGMHVANLSLGSPSPSATLEQAVNSATSRGVLVVAASGNSGAGSISYPARYANAMAVGATDQNNNRADFSQYGAGLDIVAPGVNVQSTYPGSTYASLNGTSMATPHVAGAAALVKQKNPSWSNVQIRNHLKNTATSLGSTNLYGSGLVNAEAATR

SEQ ID NO: 53655 - protein, 269 aa, Unidentified
AQSVPWGISRVQAPAAHNRGLTGRGVKVAVLDTGISTHPDLNIRGGASFVPGEPSTQDGNGHGTHVAGTIAALNNSIGVLGVAWSAELYAVKVLGASGSGSVSSIAQGLEWAGNNGMHVANLSLGSPSPSATLEQAVNSATSRGVLVVAASGNSGAGSISYPARYANAMAVGATDQNNNRASFSQYGAGLDIVAPGVNVQSTAPGSTYASLNGTSMATPHVAGAAALVKQKNPSWSNVQIRNHLKNTATSLGSTNLYGSGLVNAEAATR

SEQ ID NO: 53656 - protein, 269 aa, Unidentified
AQSVPWGISRVQAPAAHNRKLTGSGVKVAVLDTGISTHPDLNIRGGASFVPGEPSTQDGNGHGTHVAGTIAALNNSIGVLGVAPSAELYAVKVLGASGDGSVSSIAQGLEWAGNNGMHVANLSLGSPSPSATLEQAVNSATSRGVLVVAASGNSGAGSISYPARYANAMAVGATDQNNNRASFSQYGAGLDIVAPGVNVQSTYPGSTYASLNGTSMATPHVAGAAALVKQKNPSWSNVQIRNHLKNTATSLGSTNLYGSGLVNALAATR

SEQ ID NO: 53657 - protein, 269 aa, Unidentified
AQSVPWGISRVQAPAAHNRGLTGSGVKVAVLDTGISTHPDLRIRGGASFVPGEPSTQDGNGHGTHVAGTIAALNNSIGVLGVAPSAELYAVKVLGASGSGSVSSIAQGLEWAGANGMHVANLSLGSPSPSATLEQAVNSATSRGVLVVAASGNSGAGSISYPARYANAMAVGATDQNNNRASFSQYGAGLDIVAPGVNVQSTYPGSTYASLNGTSMATPHVAGAAALVKQKNPSWSNVQIRNHLKNTATSLGSTNLYGSGLVRAEAATR

SEQ ID NO: 53658 - protein, 269 aa, Unidentified
AQSVPWGISRVQAPAAHNRKLTGSGVKVAVLDTGISTHPDLNIRGGASFVPGEPSTQDGNGHGTHVAGTIAALNNSIGVLGVAPSAELYAVKVLGASGSGSVSSIAQGLEWAGNNRMHVANLSLGSPSPSATLEQAVNSATSRGVLVVAASGNSGAGSISYPARYANAMAVGATDQNNNRASFSQYGAGLDIVAPGVNVQSTYPGSAYASLNGTSMATPHVAGAAALVKQKNPSWSNVQIRNHLKNTATSLGSTNLYGSGLVNAEAATR

SEQ ID NO: 53659 - protein, 269 aa, Unidentified
AQSVPWGISRVQAPAAHNRGLTGSGVKVAVLDTGISTHPDLNIRGGASFVPGEPSTQDGNGHGTHVAGTIAALNNSIGVLGVAPSAELYAVKVLGAAGGGSISSIAQGLEWAGNNGMHVANLSLGSPSPSATLEQAVNSATSRGVLVVAASGNSGAGSISYPARYANAMAVGATDQNNNRASFSQYGAGLDIVAPGVNVQSTYPGSTYASLNGTSMATPHVAGAAALVKQKNPSWSNVQIRNHLKNTATSLGSTNLYGSGLVNAEAATR

SEQ ID NO: 53660 - protein, 269 aa, Unidentified
AQSVPWGIERVQAPAAHNRGLTGSGVKVAVLDTGISTHPDLNIRGGASFVPGEPSTQDGNGHGTHVAGTIAALNNDIGVLGVAPSAELYAVKVLGASGSGSVSSIAQGLEWAGNNGMHVANLSLGSPSPSATLEQAVNSATSRGVLVVAASGNSGAGSISYPARYANAMAVGATDQNNNRASFSQYGAGLDIVAPGVNVQSTYPGSTYASLNGTSMASPHVAGAAALVKQKNPSWSNVQIRNHLKNTATSLGSTNLYGSGLVNAEAATR

SEQ ID NO: 53661 - protein, 269 aa, Unidentified
AQSVPWGISRVQAPAAHNRKLTGSGVKVAVLDTGISTHPDLRIRGGASFVPGEPSTQDGNGHGTHVAGTIAALNNSIGVLGVAPSAELYAVKVLGASGSGSVSSIAQGLEWAGNNGMHVANLSLGSPSPSATLEQAVNSATSRGVLVVAASGNSGAGSISYPARYANAMAVGATDQNNNRASFSQYGAGLDIVAPGVNVQSTYPGSTYASLNGTSMATPHVAGAAALVKQKNPRWSNVQIRNHLKNTATSLGSTNLYGSGLVNAEAATR

SEQ ID NO: 53662 - protein, 269 aa, Unidentified
AQSVPWGISRVQAPAAHNRGLTGRGVKVAVLDTGISTHPDLNIRGGASFVPGEPSTQDGNGHGTHVAGTIAALNNSIGVLGVAPSAELYAVKVLGASGSGSVSSIAQGLEWAGNNGMHVANLSLGSPSPSATLEQAVNSATSRGVLVVAASGNSGAGSISYPARYANAMAVGATDQNNNRASFSQYGAGLDIVAPGVNVQSTYPGSTYASLNGTSMATPHVAGAAALVFQKNPSWSFVQIRNHLKNTATSLGSTNLYGSGLVNAEAATR

SEQ ID NO: 53663 - protein, 269 aa, Unidentified
AQSVPWGISRVQAPAAHNRRLTGSGVKVAVLDTGISTHPDLRIRGGASFVPGEPSTQDGNGHGTHVAGTIAALNNSIGVLGVAPSAELYAVKVLGASGSGSVSSIAQGLEWAGNNGMHVANLSLGSPSPSATLEQAVNSATSRGVLVVAASGNSGAGSISYPARYANAMAVGATDQNNNRASFSQYGAGLDIVAPGVNVQSTYPGSTYASLNGTSMATPHVAGAAALVKQKNPSWSNVQIRNHLKNTATSLGSTNLYGSGLVNAIAATR

SEQ ID NO: 53664 - protein, 269 aa, Unidentified
AQSVPWGISRVQAPAAHNRKLLGSGVKVAVLDTGISTHPDLNIRGGASFVPGEPSTQDGNGHGTHVAGTIAALNNSIGVLGVAPSAELYAVKVLGASGSGSVSSIAQGLEWAGNNGMHVANLSLGDPSPSATLEQAVNSATSRGVLVVAASGNSGAGSISYPARYANAMAVGATDQNNNRASFSQYGAGLDIVAPGVNVQSTYPGSTYASLNGTSMATPHVAGAAALVKQKNPSWSNVQIRNHLKNTATSLGSTNLYGSGLVNAEAATR

SEQ ID NO: 53665 - protein, 269 aa, Unidentified
AQSVPWGISRVQAPAAHNRGLTGSGVKVAVLDTGISTHPDLNIRGGASFVPGEPSTQDGNGHGTHVAGTIAALNNSIGVLGVAPDAELYAVKVLGASGSGSVSSIARGLEWAGNNGMHVANLSLGSPSPSATLEQAVNSATSRGVLVVAASGNSGAGSISYPARYANAMAVGATDQNNNRASFSQYGAGLDIVAPGVNVQSTYPGSTYASLNGTSMATPHVAGAAALVKQKNPSWSNVQIRDHLKNTATSLGSTNLYGSGLVNAEAATR

SEQ ID NO: 53666 - protein, 269 aa, Unidentified
AQSVPWGISRVQAPAAHNRGLTGSGVKVAVLDTGISTHPDLNIRGGASFVPGEPSTQDGNGHGTHVAGTIAALNNSIGVLGVAPSAELYAVKVLGASGSGSISSIAQGVEWAGNNGMHVANLSLGSPSPSATLEQAVNSATSRGVIVVAASGNSGAGSISYPARYANAMAVGATDQNNNRASFSQYGAGLDIVAPGVNVQSTYPGSTYASLNGTSMATPHVAGAAALVKQKNPSWSNVQIRNHLKNTATSLGSTNLYGSGLVNAEAATR

SEQ ID NO: 53667 - protein, 269 aa, Unidentified
AQSVPWGISRVQAPAAHNRGLTGSGVKVAVLDTGISTHPDLNIRGGASFVPGEPSTQDGNGHGTHVAGTIAALNNSIGVLGVAPSAELYAVKVLGASGSGAVSSIAQGLEWAGNNGMHVANLSLGSPSPSATLEQAVNSATSRGVLVVAASGNSGAGSISYPARYANAMAVGATDQNNNRASFSQYGAGLDIVAPGVNVQSTYPGSTYASLNGTSMATPHVAGAAVLVKQKNPSWSNVRIRNHLKNTATSLGSTNLYGSGLVNAEAATR

SEQ ID NO: 53668 - protein, 269 aa, Unidentified
AQSVPWGISRVQAPAAHNRGLTGSGVKVAVLDTGISTHPDLRITGGASFVPGEPSTQDGNGHGTHVAGTIAALNNSIGVLGVAPSAELYAVKVLGASGAGSVSSIAQGLEWAGNNGMHVANLSLGSPSPSATLEQAVNSATSRGVLVVAASGNSGAGSISYPARYANAMAVGATDQNNNRASFSQYGAGLDIVAPGVNVQSTYPGSTYASLNGTSMATPHVAGAAALVKQKNPSWSNVQIRNHLKNTATSLGSTNLYGSGLVNAEAATR

SEQ ID NO: 53669 - protein, 269 aa, Unidentified
AQSVPWGISRVQAPAAHRRGLTGRGVKVAVLDTGISTHPDLNIRGGASFVPGEPSTQDGNGHGTHVAGTIAALNNSIGVLGVAPSAELYAVKVLGASGSGSISSIAQGLEWAGNNGMHVANLSLGSPSPSATLEQAVNSATSRGVLVVAASGNSGAGSISYPARYANAMAVGATDQNNNRASFSQYGAGLDIVAPGVNVQSTYPGSTYASLNGTSMATPHVAGAAALVKQKNPSWSNVQIRNHLKNTATSLGSTNLYGSGLVNAEAATR

SEQ ID NO: 53670 - protein, 269 aa, Unidentified
AQSVPWGISRVQAPAAHNRGLTGRGVKVAVLDSGISTHPDLNIRGGASFVPGEPSTQDGNGHGTHVAGTIAALNNSIGVLGVAPSAELYAVKVLGASGSGSVSSIAQGLEWAGNNGMHVANLSLGSPSPSATLEQAVNSATSRGVLVVAASGNSGAGSISYPARYANAMAVGATDQNNNRASFSQYGAGLDIVAPGVNVQSTYPGSTYASLNGTSMATPHVAGAAALVKQKNPSRSNVQIRNHLKNTATSLGSTNLYGSGLVNAEAATR

SEQ ID NO: 53671 - protein, 269 aa, Unidentified
AQSVPWGISRVQAPAAHNRKLTGSGVKVAVLDTGISTHPDLNIRGGASFVPGEPSTQDGNGHGTHVAGTIAALNNSIGVLGVAPSAELYAVKVLGASGDGSVSSIAQGLEWAGLNGMHVANLSLGQPSPSATLEQAVNSATSRGVLVVAASGNSGAGSISYPARYANAMAVGATDQNNNRASFSQYGAGLDIVAPGVNVQSTYPGSTYASLNGTSSATPHVAGAAALVKQKNPSWSNVQIRNHLKNTATSLGSTNLYGSGLVNAEAATR

SEQ ID NO: 53672 - protein, 269 aa, Unidentified
AQSVPWGISRVQAPAAHNRGLTGSGVKVAVLDTGISTHPDLRIRGGASFVPGEPSTQDGNGHGTHVAGTIAALNNSIGVLGVAPSAELYAVKVLGASGAGSVSSIAQGLEWAGNNGMHVANLSLGSPSPSATLEQAVNSATSRGVLVVAASGNSGAGSISYPARYANAMAVGATDQNNNRASFSQYGAGLDIVAPGVNVQSTYPGSTYASLNGTSMATPHVAGAAALVKQKNPSWSNVQIRNHLKNTATSLGSTNLYGSGLVRAEAATR

SEQ ID NO: 53673 - protein, 269 aa, Unidentified
AQSVPWGISRVQAPAAHNRGLTGRGVKVAVLDTGISTHPDLNIRGGASFVPGEPSTQDGNGHGTHVAGTIAALNNSIGVLGVAWSAELYAVKVLGASGSGSVSSIAQGLEWAGNNGMHVANLSLGSPSPSATLEQAVNSATSRGVLVVAASGNSGAGSISYPARYANAMAVGATDQNNNRASFSQYGAGLDIVAPGVNVQSTYPGSTYASLNGTSMATPHVAGAAALVKQKNPSWSFVQIRNHLKNTATSLGSTNLYGSGLVNAEAATR

SEQ ID NO: 53674 - protein, 269 aa, Unidentified
AQSVPWGISRVQAPAAHNRGLTGSGVKVAVLDTGISTHPDLNIRGGASFVPGEPSTQDGNGHGTHVAGTIAALDNSIGVLGVAPSAELYAVKVLGASGSGAISSIAQGLEWAGNNGMHVANLSLGSPSPSATLEQAVNSATSRGVLVVAASGNSGAGSISYPARYANAMAVGATDQNNNRASFSQYGAGLDIVAPGVNVQSTYPGSTYASLNGTSSATPHVAGAAALVKQKNPSWSNVQIRNRLKNTATSLGSTNLYGSGLVNAEAATR

SEQ ID NO: 53675 - protein, 269 aa, Unidentified
AQSVPWGISRVQAPAAHNRGLTGSGVKVAVLDTGISTHPDLNIRGGASFVPGEPSTQDGNGHGTHVAGTIAALNNDIGVLGVAPSAELYAVKVLGASGSGSVSSIAQGLEWAGNNSMHVANLSLGSESPSATLEQAVNSATSRGVLVVAASGNSGAGSISYPARYANAMAVGATDQNNNRASFSQYGAGLDIVAPGVNVQSTYPGSTYASLNGTSMATPHVAGAAALVKQKNPSWSNVQIRNHLKNTATSLGSTNLYGSGLVNAEAATR

SEQ ID NO: 53676 - protein, 269 aa, Unidentified
AQSVPWGISRVQAPAAHNRRLTGSGVKVAVLDTGISTHPDLNIRGGASFVPGEPSTQDGNGHGTHVAGTIAALNNGIGVLGVAPSAELYAVKVLGASGSGSVSSIAQGLEWAGNNSMHVANLSLGSPSPSATLEQAVNSATSRGVLVVAASGNSGAGSISYPARYANAMAVGATDQNNNRASFSQYGAGLDIVAPGVNVQSTYPGSTYASLNGTSMATPHVAGAAALVKQKNPSWSNVQIRNHLKNTATSLGSTNLYGSGLVNAEAATR

SEQ ID NO: 53677 - protein, 269 aa, Synthetic construct
AQSVPWGISRVQAPAAHNRGLTGSGVKVAVLDTGISTHPDLNIRGGASFVPGEPSTQDGNGHGTHVAGTIAALDNSIGVLGVAPSAELYAVKVLGASGSGAWSSIAQGLEWAGNNGMHVANLSLGSPSPSATLEQAVNSATSRGVLVVAASGNSGAGSISYPARYANAMAVGATDQNNNRASFSQYGAGLDIVAPGVNVQSTYPGSTYASLNGTSMATPHVAGAAALVKQKNPSWSNVQIRNHLKNTATSLGSTNLYGSGLVNAEAATR

SEQ ID NO: 53678 - protein, 269 aa, Unidentified
AQSVPWGISRVQAPASHNRGLTGSGVKVAVLDTGISTHPDLNIRGGASFVPGEPSTQDGNGHGTHVAGTIAALNNSIGVLGVAPSAELYAVKVLGASGSGGVSSIAQGLEWAGNNGMHVANLSLGSPSPSATLEQAVNSATSRGVIVVAASGNSGAGSISYPARYANAMAVGATDQNNNRASFSQYGAGLDIVAPGVNVQSTYPGSTYASLNGTSMATPHVAGAAALVKQKNPSWSNVQIRNHLKNTATSLGSTNLYGSGLVNAEAATR

SEQ ID NO: 53679 - protein, 269 aa, Unidentified
AQSVPWGISRVQAPAAHNRGLAGSGVKVAVLDTGISTHPDLNIRGGASFVPGEPSTQDGEGHGTHVAGTIAALNNSIGVLGVAPSAELYAVKVLGASGSGSVSSIAQGLEWAGLNGMHVANLSLGSPSPSATLEQAVNSATSRGVLVVAASGNSGAGSISYPARYANAMAVGATDQNNNRASFSQYGAGLDIVAPGVNVQSTYPGSTYASLNGTSMATPHVAGAAALVKQKNPSWSNVQIRNHLKNTATSLGSTNLYGSGLVNAEAATR

SEQ ID NO: 53680 - protein, 269 aa, Unidentified
AQSVPWGISRVQAPASHNRGLTGSGVKVAVLDTGISTHPDLNIRGGASFVPGEPSTQDGNGHGTHVAGTIAALNNSIGVLGVAPSAELYAVKVLGASGSGSVSSIAQGVEWAGNNGMHVANLSLGNPSPSATLEQAVNSATSRGVLVVAASGNSGAGSISYPARYANAMAVGATDQNNNRASFSQYGAGLDIVAPGVNVQSTYPGSTYASLNGTSMATPHVAGAAALVKQKNPSWSNVQIRNHLKNTATSLGSTNLYGSGLVNAEAATR

SEQ ID NO: 53681 - protein, 269 aa, Unidentified
AQSVPWGISRVQAPAAHNRGLTGSGVKVAVLDTGISTHPDLNIRGGASFVPGEPSTQDGNGHGTHVAGTIAALNNDIGVLGVAPSAELYAVKVLGASGSGSVSSIAQGLEWAGNNGMHVANLSLGSPSPSATLEQAVNSATSRGVLVVAASGNSGAGSISYPARYANAMAVGATDQNNNRASFSQYGAGLDIVAPGVNVQSTYPGSTYASLNGTSMQSPHVAGAAALVKQKNPSWSNVQIRNHLKNTATSLGSTNLYGSGLVNAEAATR

SEQ ID NO: 53682 - protein, 269 aa, Unidentified
AQSVPWGISRVQAPAAHNRGLTGRGVKVAVLDSGISTHPDLNIRGGASFVPGEPSTQDGNGHGTHVAGTIAALNNSIGVLGVAWSAELYAVKVLGASGSGSVSSIAQGLEWAGNNGMHVANLSLGSPSPSATLEQAVNSATSRGVLVVAASGNSGAGSISYPARYANAMAVGATDQNNNRASFSQYGAGLDIVAPGVNVQSTYPGSTYASLNGTSMATPHVAGAAALVKQKNPSWSNVQIRNHLKNTATSLGSTNLYGSGLVNAEAATR

SEQ ID NO: 53683 - protein, 269 aa, Unidentified
AQSVPWGISRVQAPAAHNRGLTGSGVKVAVLDTGISTHPDLNIRGGASFVPGEPSTQDGNGHGTHVAGTIAALNNSIGVLGVAPNAELYAVKVLGASGSGSNSSIAQGLEWAGNNGMHVANLSLGSPSPSATLEQAVNSATSRGVLVVAASGNSGAGSISYPARYANAMAVGATDQNNNRASFSQYGAGLDIVAPGVGVQSTYPGSTYASLNGTSMATPHVAGAAALVKQKNPSWSNVQIRNHLKNTATSLGSTNLYGSGLVNAEAATR

SEQ ID NO: 53684 - protein, 269 aa, Unidentified
AQSVPWGISRVQAPAAHNRGLTGSGVKVAVLDTGISTHPDLNIRGGASFVPGEPSTQDGNGHGTHVAGTIAALNNSIGVLGVAPNAELYAVKVLGASGSGSVSSIAQGLEWAGNNGMHVANLSLGSPSPSATLEQAVNSATSRGVLVVAASGNSGAGSISYPARYANAMAVGATDQNNNRASFSQYGAGLDIVAPGVGVQSTWPGSTYASLNGTSMATPHVAGAAALVKQKNPSWSNVQIRNHLKNTATSLGSTNLYGSGLVNAEAATR

SEQ ID NO: 53685 - protein, 269 aa, Unidentified
AQSVPWGISRVQAPAAHNRGLTGRGVKVAVLDTGISTHPDLNITGGASFVPGEPSTQDGNGHGTHVAGTIAALNNSIGVLGVAPSAELYAVKVLGASGAGSVSSIAQGLEWAGNNGMHVANLSLGSPSPSATLEQAVNSATSRGVLVVAASGNSGAGSISYPARYANAMAVGATDQNNNRASFSQYGAGLDIVAPGVNVQSTYPGSTYASLNGTSMATPHVAGAAALVKQKNPSWSNVQIRNHLKNTATSLGSTNLYGSGLVNAEAATR

SEQ ID NO: 53686 - protein, 270 aa, Unidentified
AQSVPWGISRVQAPAAHNRGLTGSGVKVAVLDTGISTHPDLNIRGGASFVPGEPSTQDGNGHGTHVAGTIAALDNSIGVLGVAPSAELYAVKVLGASGXSGAISSIAQGLEWAGNNGMHVANLSLGSPSPSATLEQAVNSATSRGVLVVAASGNSGAGSISYPARYANAMAVGATDQNNNRASFSQYGAGLDIVAPGVNVQSTYPGSTYASLNGTSMATPHVAGAAALVKQKNPSWSNVQIRNHLKNTATSLGSTNLYGSGLVNAEAATR

SEQ ID NO: 53687 - protein, 269 aa, Unidentified
AQSEPWGISRVQAPAAHNRGLTGSGVKVAVLDSGISTHPDLNIRGGASFVPGEPSTQDGNGHGTHVAGTIAALNNRIGVLGVAPSAELYAVKVLGASGSGSVSSIAQGLEWAGNNGMHVANLSLGSPSPSATLEQAVNSATSRGVLVVAASGNSGAGSISYPARYANAMAVGATDQNNNRASFSQYGAGLDIVAPGVNVQSTYPGSTYASLNGTSMATPHVAGAAALVKQKNPSWSNVQIRNHLKNTATSLGSTNLYGSGLVNAEAATR

SEQ ID NO: 53688 - protein, 269 aa, Unidentified
AQSVPWGISRVQAPAAHNRGLTGSGVKVAVLDTGISTHPDLNIRGGASFVPGEPSTQDGNGHGTHVAGTIAALNNNIGVLGVAPSAELYAVKVLSASGGGSVSSIANGLEWAGNNGMHVANLSLGSPSPSATLEQAVNSATSRGVLVVAASGNSGAGSISYPARYANAMAVGATDQNNNRASFSQYGAGLDIVAPGVNVQSTYPGSTYASLNGTSSATPHVAGAAALVKQKNPSWSNVQIRNHLKNTATSLGSTNLYGSGLVNAEAATR

SEQ ID NO: 53689 - protein, 269 aa, Bacillus lentus
AQSVPWGISRVQAPAAHNRGLTGSGVKVAVLDTGISTHPDLNIRGGASFVPGEPSTQDGNGHGTHVAGTIAALNNSIGVLGVAPSAELYAVKVLGASGSGSVSSIADGLEWAGNNGMHVANLSLGSPSPSATLEQAVNSATSRGVLVVAASGNSGAGSISYPARYANAMAVGATDQNNNRADFSQYGAGLDIVAPGVNVQSTYPGSTYASLNGTSMATPHVAGAAALVKQKNPSWSNVQIRDHLKNTATSLGSTNLYGSGLVNAEAATR

SEQ ID NO: 53690 - protein, 269 aa, Unidentified
AQSVPWGISRVQAPAAHNRRLTGSGVKVAVLDTGISTHPDRNIRGGASFVPGEPSTQDGNGHGTHVAGTIAALNNSIGVLGVAPSAELYAVKVLGASGSGSVSSIAQGLEWAGNNGMHVANLSLGSPSPSATLEQAVNSATSRGVLVVAASGNSGAGSISYPARYANAMAVGATDQNNNRASFSQYGAGLDIVAPGVNVQSTYPGSTYASLNGTSMATPHVAGAAALVKQKNPSWSNRQIRNHLKNTATSLGSTNLYGSGLVNAEAATR

SEQ ID NO: 53691 - protein, 269 aa, Unidentified
AQSVPWGISRVQAPAAHNRGLTGSGVKVAVLDTGISTHPDLRIRGGASFVPGEPSTQDGNGHGTHVAGTIAALDNSIGVLGVAPSAELYAVKVLGASGSGSVSSIAQGLEWAGNNGMHVANLSLGSPSPSATLEQAVNSATSRGVLVVAASGNSGAGSISYPARYANAMAVGATDQNNNRASFSQYGAGLDIVAPGVNVQSTYPGSTYASLNGTSMATPHVAGAAALVKQKNPSWSNVQIRNRLKNTATSLGSTNLYGSGLVNAEAATR

SEQ ID NO: 53692 - protein, 269 aa, Unidentified
AQSVPWGISRVQAPAAHNRGLTGSGVKVAVLDTGISTHPDLNIRGGASFVPGEPSTQDGNGHGTHVAGTIAALNNSIGVLGVAPSAELYAVKVLGATGSGAISSIAQGLEWAGNNGMHVANLSLGSPSPSATLEQAVNSATSRGVLVVAASGNSGAGSISYPARYANAMAVGATDQNNNRASFSQYGAGLDIVAPGVNVQSTYPGSTYASLNGTSMATPHVAGAAALVKQKNPSWSNVQIRNHLKNTATSLGSTNLYGSGLVNAEAATR

SEQ ID NO: 53693 - protein, 269 aa, Unidentified
AQSVPWGISRVQAPAAHNRGLTGSGVKVAVLDTGISTHPDLNIRGGASFVPGEPSTQDGNGHGTHVAGTIAALNNSIGVLGVAPSAELYAVKVLGASGSGGVSSIAQGLEWAGNNGMHVANLSLGSPSPSATLEQAVNSATSRGVIVVAASGNSGAGSISYPARYANATAVGATDQNNNRASFSQYGAGLDIVAPGVNVQSTYPGSTYASLNGTSMATPHVAGAAALVKQKNPSWSNVQIRNHLKNTATSLGSTNLYGSGLVNAEAATR

SEQ ID NO: 53694 - protein, 269 aa, Synthetic construct
AQSVPWGISRVQAPAAHNRGLTGSGVKVAVLDTGISTHPDLNIRGGASFVPGEPSTQDGNGHGTHVAGTIAALDNSIGVLGVAPSAELYAVKVLGADGSGSISSIAQGLEWAGNNGMHVANLSLGSPSPSATLEQAVNSATSRGVLVVAASGNSGAGSISYPARYANAMAVGATDQNNNRASFSQYGAGLDIVAPGVNVQSTYPGSTYASLNGTSMATPHVAGAAALVKQKNPSWSNVQIRNHLKNTATSLGSTNLYGSGLVNAEAATR

SEQ ID NO: 53695 - protein, 269 aa, Unidentified
AQSVPWGISRVQAPAAHNRGLTGSGVKVAVLDTGISTHPDLNIRGGASFVPGEPSTQDGEGHGTHVAGTIAALNNSIGVLGVAPSAELYAVKVLGASGSGSVSSIAQGLEWAGLNGMHVANLSLGSPSPSATLEQAVNSATSRGVLVVAASGNSGEGSISYPARYANAMAVGATDQNNNRASFSQYGAGLDIVAPGVNVQSTYPGSTYASLNGTSMATPHVAGAAALVKQKNPSWSNVQIRNHLKNTATSLGSTNLYGSGLVNAEAATR

SEQ ID NO: 53696 - protein, 269 aa, Unidentified
AQSVPWGISRVQAPAAHNRGLTGSGVKVAVLDTGISTHPDLNIRGGASFVPGEPSTQDGNGHGTHVAGTIAALNNGIGVLGVAPSDELYAVKVLGASGSGSVSSIAQGLEWAGNNDMHVANLSLGSPSPSATLEQAVNSATSRGVLVVAASGNSGAGSISYPARYANAMAVGATDQNNNRASFSQYGAGLDIVAPGVNVQSTYPGSTYASLNGTSMATPHVAGAAALVKQKNPSWSNVQIRNHLKNTATSLGSTNLYGSGLVNAEAATR

SEQ ID NO: 53697 - protein, 269 aa, Unidentified
AQSRPWGISRVQAPAAHNRRLTGSGVKVAVLDTGISTHPDLRIRGGASFVPGEPSTQDGNGHGTHVAGTIAALNNSIGVLGVAPSAELYAVKVLGASGSGSVSSIAQGLEWAGNNGMHVANLSLGSPSPSATLEQAVNSATSRGVLVVAASGNSGAGSISYPARYANAMAVGATDQNNNRASFSQYGAGLDIVAPGVNVQSTYPGSTYASLNGTSMATPHVAGAAALVKQKNPSWSNVQIRNHLKNTATSLGSTNLYGSGLVNAEAATR

SEQ ID NO: 53698 - protein, 269 aa, Unidentified
AQSVPWGISRVQAPAAHNRKLTGSGVKVAVLDTGISTHPDLNIRGGASFVPGEPSTQDGNGHGTHVAGTIAALNNSIGVLGVAPSAELYAVKVLGASGSASVSSIAQGLEWAGNNGMHVANLSLGLPSPSATLEQAVNSATSRGVLVVAASGNSGAGSISYPARYANAMAVGATDQNNNRASFSQYGAGLDIVAPGVNVQSTYPGSTYASLNGTSMATPHVAGAAALVKQKNPSWSNVQIRNHLKNTATSLGSTNLYGSGLVNAEAATR

SEQ ID NO: 53699 - protein, 269 aa, Unidentified
AQSVPWGISRVQAPAAHNRGLTGSGVKVAVLDTGISTHPDLNIRGGASFVPGEPSTQDGEGHGTHVAGTIAALNNSIGVLGVAPSAELYAVKVLGASGDGSVSSIAQGLEWAGNNGMHVANLSLGSPSPSATLEQAVNSATSRGVLVVAASGNSGAGSISYPARYANAMAVGATDQNNNRASFSQYGAGLDIVAPGVNVQSTYPGSTYASLNGTSMATPHVAGAAALVKQKNPRWSNVQIRNHLKNTATSLGSTNLYGSGLVNAEAATR

SEQ ID NO: 53700 - protein, 269 aa, Unidentified
AQSVPWGISRVQAPAAHNRGLLGSGVKVAVLDTGISTHPDLNIRGGASFVPGEPSTQDGNGHGTHVAGTIAALNNNIGVLGVAPSAELYAVKVLGASGSGSVSSIAQGLEWAGNNGMHVANLSLGDPSPSATLEQAVNSATSRGVLVVAASGNSGAGSISYPARYANAMAVGATDQNNNRASFSQYGAGLDIVAPGVNVQSTYPGSTYASLNGTSMATPHVAGAAALVKQKNPSWSNVQIRNHLKNTATSLGSTNLYGSGLVNAEAATR

SEQ ID NO: 53701 - protein, 269 aa, Unidentified
AQSVPWGISRVQAPAAHNRGLTGSGVKVAVLDTGISTHPDLNIRGGASFVPGEPSTQDGEGHGTHVAGTIAALNNSIGVLGVAPSAELYAVKVLGASGSGSVSSIAQGLEWAGNNGMHVANLSLGSPSPSATLEQAVNSATSRGVLVVAASGNSGEGSIDYPARYANAMAVGATDQNNNRASFSQYGAGLDIVAPGVNVQSTYPGSTYASLNGTSMATPHVAGAAALVKQKNPSWSNVQIRNHLKNTATSLGSTNLYGSGLVNAEAATR

SEQ ID NO: 53702 - protein, 269 aa, Unidentified
AQSVPWGISRVQAPAAHNRKLTGSGVKVAVLDTGISTHPDLNIRGGASFVPGEPSTQDGNGHGTHVAGTIAALNNSIGVLGVAPSAELYAVKVLGASGSGSVSSIAQGLEWAGNNGMHVANLSLGSPSPSATLEQAVNSATSRGVLVVAASGNSGAGSIDYPARYANAMAVGATDQNNNRASFSQYGAGLDIVAPGVNVQSTYPGSTYASENGTSMATPHVAGAAALVKQKNPSWSNVQIRNHLKNTATSLGSTNLYGSGLVNAEAATR

SEQ ID NO: 53703 - protein, 269 aa, Unidentified
AQSVPWGISRVQAPASHNRGLTGSGVKVAVLDTGISTHPDLNIRGGASFVPGEPSTQDGNGHGTHVAGTIAALNNSIGVLGVAPSAELYAVKVLGASGSGSVSSIAQGLEWAGNNGMHVANLSLGSPSPSATLEQAVNSATSRGVLVVAASGNSGEGSISYPARYANAMAVGATDQNNNRASFSQYGAGLDIVAPGVNVQSTYPGSTYASLNGTSMATPHVAGAAALVKQKNPSWSNVQIRNHLKRTATSLGSTNLYGSGLVNAEAATR

SEQ ID NO: 53704 - protein, 269 aa, Unidentified
AQSVPWGISRVQAPAAHNRGLTGRGVKVAVLDTGISTHPDLNIRGGASFVPGEPSTQDGNGHGTHVAGTIAALNNSIGVLGVAPSAELYAVKVLGASGSGSISSIAQGLEWAGNNGMHVANLSLGSPSPSATLEQAVNSATSRGVLVVAASGNSGAGSISYPARYANAMAVGATDQNNNRASFSQYGAGLDIVAPGVNVQSTYPGSTYASLNGTSMATPHVAGAAALVKQKNPSWSNVQIRNRLKNTATSLGSTNLYGSGLVNAEAATR

SEQ ID NO: 53705 - protein, 269 aa, Unidentified
AQSVPWGISRVQAPAAHNRGLTGSGVKVAVLDTGISTHPDLNIRGGASFVPGEPSTQDGNGHGTHVAGTIAALNNSIGVLGVAPSAELYAVKVLGAAGSASLSSIAQGLEWAGNNGMHVANLSLGSPSPSATLEQAVNSATSRGVLVVAASGNSGAGSISYPARYANAMAVGATDQNNNRASFSQYGAGLDIVAPGVNVQSTYPGSTYASLNGTSMATPHVAGAAALVKQKNPSWSNVQIRNHLKNTATSLGSTNLYGSGLVNAEAATR

SEQ ID NO: 53706 - protein, 269 aa, Unidentified
AQSVPWGISRVQAPAAHNRGLTGSGVKVAVLDTGISTHPDLRIRGGASFVPGEPSTQDGNGHGTHVAGTIAALNNSIGVLGVAPSAELYAVKVLGASGSASVSSIAQGLEWAGNNGMHVANLSLGSPSPSATLEQAVNSATSRGVLVVAASGNSGAGSISYPARYANAMAVGATDQNNNRASFSQYGAGLDIVAPGVNVQSTYPGSTYASLNGTSMATPHVAGAAALVKQKNPRWSNVQIRNHLKNTATSLGSTNLYGSGLVNAEAATR

SEQ ID NO: 53707 - protein, 269 aa, Unidentified
AQSVPWGISRVQAPAAHNRGLTGSGVKVAVLDTGISTHPDLRITGGASFVPGEPSTQDGNGHGTHVAGTIAALNNSIGVLGVAPSAELYAVKVLGASGSGSVSSIAQGLEWAGNNGMHVANLSLGSPSPSATLEQAVNSATSRGVLVVAASGNSGAGSISYPARYANAMAVGATDQNNNRASFSQYGAGLDIVAPGVNVQSTYPGSTYASLNGTSMATPHVAGAAALVKQKNPSWSNVQIRNRLKNTATSLGSTNLYGSGLVNAEAATR

SEQ ID NO: 53708 - protein, 269 aa, Unidentified
AQSVPWGISRVQAPAAHNRKLTGSGVKVAVLDTGISTHPDLNIRGGASFVPGEPSTQDGEGHGTHVAGTIAALNNSIGVLGVAPSAELYAVKVLGASGSGSVSSIAQGLEWAGLNGMHVANLSLGSPSPSATLEQAVNSATSRGVLVVAASGNSGAGSISYPARYANAMAVGATDQNNNRASFSQYGAGLDIVAPGVNVQSTYPGSAYASLNGTSSATPHVAGAAALVKQKNPSWSNVQIRNHLKNTATSLGSTNLYGSGLVNAEAATR

SEQ ID NO: 53709 - protein, 269 aa, Unidentified
AQSVPWGISRVQAPAAHNRGLTGSGVKVAVLDTGISTHPDLNIRGGASFVPGEPSTQDGNGHGTHVAGTIAALNNSIGVLGVAPSAELYAVKVLGQSSSGAVSSIAQGLEWAGNNGMHVANLSLGSPSPSATLEQAVNSATSRGVLVVAASGNSGAGSISYPARYANAMAVGATDQNNNRASFSQYGAGLDIVAPGVNVQSTYPGSTYASLNGTSMATPHVAGAAALVKQKNPSWSNVQIRNHLKNTATSLGSTNLYGSGLVNAEAATR

SEQ ID NO: 53710 - protein, 269 aa, Unidentified
AQSVPWGISRVQAPAAHNRGLTGRGVKVAVLDSGISTHPDLNIRGGASFVPGEPSTQDGNGHGTHVAGTIAALNNSIGVLGVAPSAELYAVKVLGASGSGSVSSIAQGLEWAGNNGMHVANLSLGIPSPSATLEQAVNSATSRGVLVVAASGNSGAGSISYPARYANAMAVGATDQNNNRASFSQYGAGLDIVAPGVNVQSTYPGSTYASLNGTSMATPHVAGAAALVKQKNPSWSNVQIRNHLKNTATSLGSTNLYGSGLVNAEAATR

SEQ ID NO: 53711 - protein, 269 aa, Synthetic construct
AQSVPWGISRVQAPAAHNRGLTGSGVKVAVLDTGISTHPDLNIRGGASFVPGEPSTQDGNGHGTHVAGTIAALDNSIGVLGVAPSAELYAVKVLGASGSGGISSIAQGLEWAGNNGMHVANLSLGSPSPSATLEQAVNSATSRGVLVVAASGNSGAGSISYPARYANAMAVGATDQNNNRASFSQYGAGLDIVAPGVNVQSTYPGSTYASLNGTSMATPHVAGAAALVKQKNPSWSNVQIRNHLKNTATSLGSTNLYGSGLVNAEAATR

SEQ ID NO: 53712 - protein, 269 aa, Unidentified
AQSVPWGISRVQAPAAHNRGLTGSGVKVAVLDTGISTHPDLNIRGGASFVPGEPSTQDGNGHGTHVAGTIAALNNSIGVLGVAPSAELYAVKVLGASGSGALSSIAQGLEWAGNNGMHVANLSLGNPSPSATLEQAVNSATSRGVLVVAASGNSGAGSISYPARYANAMAVGATDQNNNRASFSQYGAGLDIVAPGVNVQSTYPGSTYASLNGTSMATPHVAGAAALVKQKNPSWSNVQIRNHLKNTATSLGSTNLYGSGLVNAEAATR

SEQ ID NO: 53713 - protein, 269 aa, Unidentified
AQSVPWGIARVQAPAAHNRGLTGSGVKVAVLDTGISTHPDLNIRGGASFVPGEPSTQDGNGHGTHVAGTIAALNNRIGVLGVAPSAELYAVKVLGASGSGSVSSIAQGLEWAGNNGMHVANLSLGSPSPSATLEQAVNSATSRGVLVVAASGNSGAGSISYPARYANAMAVGATDQNNNRASFSQYGAGLDIVAPGVNVQSTYPGFTYASLNGTSMATPHVAGAAALVKQKNPSWSNVQIRNHLKNTATSLGSTNLYGSGLVNAEAATR

SEQ ID NO: 53714 - protein, 269 aa, Unidentified
AQSVPWGISRVQAPAAHNRGLTGSGVKVAVLDTGISTHPDLNIRGGASFVPGEPSTQDGNGHGTHVAGTIAALNNNIGVLGVAPSAELYAVKVLSASGQGSVSSIAQGLEWAGNNGMHVANLSLGSPSPSATLEQAVNSATSRGVLVVAASGNSGAGSISYPARYANAMAVGATDQNNNRASFSQYGAGLDIVAPGVNVQSTYPGSTYASLNGTSMATPHVAGAAALVKQKNPSWSNVQIRNHLKNTATSLGSTNLYGSGLVNAEAATR

SEQ ID NO: 53715 - protein, 269 aa, Unidentified
AQSVPWGISRVQAPAAHNRGLTGFGVKVAVLDTGISTHPDLNIRGGASFVPGEPSTQDGEGHGTHVAGTIAALNNSIGVLGVAPSAELYAVKVLGASGSGSVSSIAQGLEWAGLNGMHVANLSLGSPSPSATLEQAVNSATSRGVLVVAASGNSGAGSISYPARYANAMAVGATDQNNNRASFSQYGAGLDIVAPGVNVQSTYPGSTYASLNGTSMATPHVAGAAALVKQKNPSWSNVQIRNHLKNTATSLGSTNLYGSGLVNAEAATR

SEQ ID NO: 53716 - protein, 269 aa, Unidentified
AQSVPWGISRVQAPAAHNRGLTGSGVKVAVLDTGISTHPDLNIRGGASFVPGEPSTQDGNGHGTHVAGTIAALNNSIGVLGVAPSAELYAVKVLGASGAGSVSSIAQGLEWAGNNGMHVANLSLGSPSPSATLEQAVNSATSRGVLVVAASGNSGAGSISYPARYANAMAVGATDQNNNRASFSQYGAGLDIVAPGVNVQSTYIGSAYASLNGTSMATPHVAGAAALVKQKNPSWSNVQIRNHLKNTATSLGSTNLYGSGLVNAEAATR

SEQ ID NO: 53717 - protein, 269 aa, Unidentified
AQSVPWGISRVQAPAAHNRGLAGSGVKVAVLDTGISTHPDLNIRGGASFVPGEPSTQDGNGHGTHVAGTIAALNNSIGVLGVAPSAELYAVKVLGASGAGSVSSIAQGLEWAGNNGMHVANLSLGSPSPSATLEQAVNSATSRGVLVVAASGNSGAGSISYPARYANAMAVGATDQNNNRASFSQYGAGLDIVAPGVNVQSTEPGSTYASLNGTSMATPHVAGAAALVKQKNPSWSNVQIRNHLKNTATSLGSTNLYGSGLVNAEAATR

SEQ ID NO: 53718 - protein, 269 aa, Unidentified
AQSVPWGISRVQAPAAHNRGLTGSGVKVAVLDTGISTHPDLNIRGGASFVPGEPSTQDGNGHGTHVAGTIAALNNSIGVLGVAPSAELYAVKVLSQSSSGSVSSIAQGLEWAGNNGMHVANLSLGSPSPSATLEQAVNSATSRGVLVVAASGNSGAGSISYPARYANAMAVGATDQNNNRASFSQYGAGLDIVAPGVNVQSTYPGSTYASLNGTSMATPHVAGAAALVKQKNPSWSNVQIRNHLKNTATSLGSTNLYGSGLVNAEAATR

SEQ ID NO: 53719 - protein, 269 aa, Unidentified
AQSVPWGISRVQAPAAHNRGLTGSGVKVAVLDTGISTHPDLNIRGGASFVPGEPSTQDGNGHGTHVAGTIAALNNSIGVLGVAPSAELYAVKVLGASGSGSVSSIAQGLEWAGNNGMHVANLSLGQPSPSATLEQAVNSATSRGVLVVAASGNSGAGSISYPARYANAMAVGATDQNNNRASFSQYGAGLDIVAPGVNVQSTYPGSTYASLNGTSMATPHVAGAAALVKQKNPRWSNVQIRNHLKNTATSLGSTNLYGSGLVNALAATR

SEQ ID NO: 53720 - protein, 269 aa, Unidentified
AQSVPWGISRVQAPAAHNRGLTGSGVKVAVLDSGISTHPDLNIRGGASFVPGEPSTQDGNGHGTHVAGTIAALNNSIGVLGVAWSAELYAVKVLGASGSGSVSSIAQGLEWAGNNGMHVANLSLGSPSPSATLEQAVNSATSRGVLVVAASGNSGAGSISYPARYANAMAVGATDQNNNRASFSQYGAGLDIVAPGVNVQSTYPGSTYASLNGTSMATPHVAGAAALVKQKNPSWSFVQIRNHLKNTATSLGSTNLYGSGLVNAEAATR

SEQ ID NO: 53721 - protein, 269 aa, Unidentified
AQSVPWGISRVQAPAAHNRKLTGSGVKVAVLDTGISTHPDLNIRGGASFVPGEPSTQDGNGHGTHVAGTIAALNNSIGVLGVAPSAELYAVKVLGASGSGSVSSIAQGLEWAGLNGMHVAGLSLGSPSPSATLEQAVNSATSRGVLVVAASGNSGAGSISYPARYANAMAVGATDQNNNRASFSQYGAGLDIVAPGVNVQSTYPGSTYASLNGTSMATPHVAGAAALVKQKNPSWSNVQIRNHLKNTATSLGSTNLYGSGLVNAEAATR

SEQ ID NO: 53722 - protein, 269 aa, Unidentified
AQSVPWGISRVQAPAAHNRGLAGSGVKVAVLDTGISTHPDLNIRGGASFVPGEPSTQDGNGHGTHVAGTIAALNNSIGVLGVAPSAELYAVKVLGASGAGSVSSIAQGLEWAGNNGMHVANLSLGSPSPSATLEQAVNSATSRGVLVVAASGNSGAGSISYPARYANAMAVGATDQNNNRASFSQYGAGLDIVAPGVNVQSTYPGSTYASLNGTSMATPHVAGAAALVKQKNPSWSNVQIRNHLKNTATSLGSTNLYGSGLVNAFAATR

SEQ ID NO: 53723 - protein, 269 aa, Unidentified
AQSVPWGISRVQAPAAHNRKLTGSGVKVAVLDTGISTHPDLNIRGGASFVPGEPSTQDGNGHGTHVAGTIAALNNNIGVLGVAPSAELYAVKVLGASGSGSVSSIAQGLEWAGNNGMHVANLSLGSPSPSATLEQAVNSATSRGVLVVAASGNSGAGSIDYPARYANAMAVGATDQNNNRASFSQYGAGLDIVAPGVNVQSTYPGSTYASLNGTSMATPHVAGAAALVKQKNPSWSNVQIRNHLKNTATSLGSTNLYGSGLVNAEAATR

SEQ ID NO: 53724 - protein, 269 aa, Unidentified
AQSVPWGISRVQAPAAHNRGLTGSGVKVAVLDTGISTHPDLNIRGGASFVPGEPSTQDGNGHGTHVAGTIAALNNSIGVLGVAPSAELYAVKVLGASGSGAISSIAQGLEWAGNNGMHVANLSLGSPSPSATLEQAVNSATSRGVLVVAASGNSGAGSISYPARYANAMAVGATDQNNNRASFSQYGAGLDIVAPGVNVQSTYPGSTYASLNGTSMATPHVAGAAALVKQKNPSWSNVRIRNHLKNTATSLGSTNLYGSGLVNAEAATR

SEQ ID NO: 53725 - protein, 269 aa, Unidentified
AQSVPWGISRVQAPAAHNRGLTGRGVKVAVLDSGISTHPDLNIRGGASFVPGEPSTQDGNGHGTHVAGTIAALNNSIGVLGVAPSAELYAVKVLGASGSGSVSSIAQGLEWAGNNGMHVANLSLGSPSPSATLEQAVNSATSRGVLVVAASGNSGAGSISYPARYANAMAVGATDQNNNRASFSQYGTGLDIVAPGVNVQSTYPGSTYASLNGTSMATPHVAGAAALVKQKNPSWSNVQIRNHLKNTATSLGSTNLYGSGLVNAEAATR

SEQ ID NO: 53726 - protein, 269 aa, Unidentified
AQSVPWGISRVQAPAAHNRGLTGRGVKVAVLDTGISTHPDLNIRGGASFVPGEPSTQDGNGHGTHVAGTIAALNNSIGVLGVAPSAELYAVKVLGASGSGSVSSIAQGLEWAGNNGMHVANLSLGSPSPSATLEQAVNSATSRGVLVVAASGNSGEGSISYPARYANAMAVGATDQNNNRADFSQYGAGLDIVAPGVNVQSTYPGSTYASLNGTSMATPHVAGAAALVKQKNPSWSNVQIRNHLKNTATSLGSTNLYGSGLVNAEAATR

SEQ ID NO: 53727 - protein, 269 aa, Unidentified
AQSVPWGIRRVQAPAAHNLGLTGSGVKVAVLDTGISTHPDLNIRGGASFVPGEPSTQDGDGHGTHVAGTIAALNNSIGVLGVAPSAELYAVKVLGASGSGSVSSIAQGLEWAGNNGMHVANLSLGSPSPSATLEQAVNSATSRGVLVVAASGNSGAGSISYPARYANAMAVGATDQNNNRASFSQYGAGLDIVAPGVNVQSTYPGSTYASLNGTSMATPHVAGAAALVKQKNPSWSNVQIRNHLKNTATSLGSTNLYGSGLVNAEAATR

SEQ ID NO: 53728 - protein, 269 aa, Unidentified
AQSVPWGISRVQAPAAHNRGLTGSGVKVAVLDTGISTHPDLNIRGGASFVPGEPSTQDGNGHGTHVAGTIAALNNSIGVLGVAPSAELYAVKVLGASGSGSVSSIAQGLEWAGLNGMHVANLSLGSPSPSATLEQAVNSATSRGVLVVAASGNSGEGSIDYPARYANAMAVGATDQNNNRASFSQYGAGLDIVAPGVNVQSTYPGSTYASLNGTSMATPHVAGAAALVKQKNPSWSNVQIRNHLKNTATSLGSTNLYGSGLVNAEAATR

SEQ ID NO: 53729 - protein, 269 aa, Unidentified
AQSVPWGISRVQAPAAHNRGLAGRGVKVAVLDTGISTHPDLNIRGGASFVPGEPSTQDGNGHGTHVAGTIAALNNSIGVLGVAPSAELYAVKVLGASGSGSVSSIAQGLEWAGNNGMHVANLSLGSPSPSATLEQAVNSATSRGVLVVAASGNSGAGSIDYPARYANAMAVGATDQNNNRASFSQYGAGLDIVAPGVNVQSTYPGSTYASLNGTSMATPHVAGAAALVKQKNPSWSNVQIRNHLKNTATSLGSTNLYGSGLVNAEAATR

SEQ ID NO: 53730 - protein, 269 aa, Unidentified
AQSVPWGISRVQAPAAHNRGLTGSGVKVAVLDTGISTHPDLNIRGGASFVPGEPSTQDGNGHGTHVAGTIAALNNDINVLGVAPSAELYAVKVLGASGSGSVSSIAQGLEWAGNNGMHVANLSLGSPSPSATLEQAVNSATSRGVLVVAASGNSGAGSISYPARYANAMAVGATDQNNNRASFSQYGAGLDIVAPGVNVQSTYPGSTYASPNGTSMATPHVAGAAALVKQKNPSWSNVQIRNHLKNTATSLGSTNLYGSGLVNAEAATR

SEQ ID NO: 53731 - protein, 269 aa, Unidentified
AQSVPWGISRVQAPAAHNRGLTGFGVKVAVLDTGISTHPDLNIRGGASFVPGEPSTQDGNGHGTHVAGTIAALNNNIGVLGVAPSAELYAVKVLGASGSGSVSSIAQGLEWAGNNRMHVANLSLGSPSPSATLEQAVNSATSRGVLVVAASGNSGAGSISYPARYANAMAVGATDQNNNRASFSQYGAGLDIVAPGVNVQSTYPGSTYASLNGTSMATPHVAGAAALVKQKNPSWSNVQIRNHLKNTATSLGSTNLYGSGLVNAEAATR

SEQ ID NO: 53732 - protein, 269 aa, Unidentified
AQSVPWGISRVQAPAAHNRGLTGSGVKVAVLDTGISTHPDLNIRGGASFVPGEPSTQDGEGHGTHVAGTIAALNNSIGVLGVAPSAELYAVKVLGASGSGSVSSIAQGLEWAGNNGMHVANLSLGSPSPSATLEQAVNSATSRGVLVVAASGNSGEGSISYPARYANAMAVGATDQNNNRADFSQYGAGLDIVAPGVNVQSTYPGSTYASLNGTSMATPHVAGAAALVKQKNPSWSNVQIRNHLKNTATSLGSTNLYGSGLVNAEAATR

SEQ ID NO: 53733 - protein, 269 aa, Unidentified
AQSVPWGISRVQAPAAHNRGLTGGGVKVAVLDTGISTHPDLNIRGGASFVPGEPSTQDGNGHGTHVAGTIAALNNSIGVLGVAPSAELYAVKVLGASGGGSVSSIAGGLEWAGNNGMHVANLSLGSPSPSATLEQAVNSATSRGVLVVAASGNSGAGSISYPARYANAMAVGATDQNNNRASFSQYGAGLDIVAPGVNVQSTYPGSTYASLNGTSMATPHVAGAAALVKQKNPSWSNVQIRNHLKNTATSLGSTNLYGSGLVNAEAATR

SEQ ID NO: 53734 - protein, 269 aa, Unidentified
AQSVPWGISRVQAPAAHNRGLTGRGVKVAVLDTGISTHPDLNIRGGASFVPGEPSTQDGNGHGTHVAGTIAALNNSIGVLGVAPSAELYAVKVLGASGAGSVSSIAQGLEWAGNNGMHVANLSLGSPSPSATLEQAVNSATSRGVLVVAASGNSGAGSISYPARYANAMAVGATDQNNNRASFSQYGAGLDIVAPGVNVQSTYIGSTYASLNGTSMATPHVAGAAALVKQKNPSWSNVQIRNHLKNTATSLGSTNLYGSGLVNAEAATR

SEQ ID NO: 53735 - protein, 269 aa, Unidentified
AQSVPWGISRVQAPAAHNRGLTGSGVKVAVLDTGISTHPDLNIRGGASFVPGEPSTQDGNGHGTHVAGTIAALNNNIGVLGVAPSAELYAVKVLAASGNGSVSSIAQGLEWAGNNGMHVANLSLGSPSPSATLEQAVNSATSRGVLVVAASGNSGAGSISYPARYANAMAVGATDQNNNRASFSQYGAGLDIVAPGVNVQSTYPGSTYASLNGTSMATPHVAGAAALVKQKNPSWSNVQIRNHLKNTATSLGSTNLYGSGLVNAEAATR

SEQ ID NO: 53736 - protein, 269 aa, Unidentified
AQSVPWGISRVQAPAAHRRGLTGSGVKVAVLDTGISTHPDLNIRGGASFVPGEPSTQDGNGHGTHVAGTIAALDNSIGVLGVAPSAELYAVKVLGASGSGSVSSIAQGLEWAGNNGMHVANLSLGSPSPSATLEQAVNSATSRGVLVVAASGNSGAGSISYPARYANAMAVGATDQNNNRASFSQYGAGLDIVAPGVNVQSTYPGSTYASLNGTSMATPHVAGAAALVKQKNPSWSNVQIRNRLKNTATSLGSTNLYGSGLVNAEAATR

SEQ ID NO: 53737 - protein, 269 aa, Unidentified
AQSVPWGISRVQAPAAHNRGLTGSGVKVAVLDSGISTHPDLNIRGGASFVPGEPSTQDGNGHGTHVAGTIAALNNSIGVLGVAPSAELYAVKVLGASGSGSVSSIAQGLEWAGNNGMHVANLSLGSPSPSATLEQAVNSATSRGVLVVAASGNSGAGSISYPARYVNAMAVGATDQNNNRASFSQYGAGLDIVAPGVNVQSTAPGSTYASLNGTSMATPHVAGAAALVKQKNPSWSNVQIRNHLKNTATSLGSTNLYGSGLVNAEAATR

SEQ ID NO: 53738 - protein, 269 aa, Unidentified
AQSVPWGISRVQAPAAHNRGLTGRGVKVAVLDTGISTHPDLRIRGGASFVPGEPSTQDGNGHGTHVAGTIAALNNSIGVLGVAPSAELYAVKVLGASGSGSVSSIAQGLEWAGNNGMHVANLSLGSPSPSATLEQAVNSATSRGVLVVAASGNSGAGSISYPARYANAMAVGATDQNNNRASFSQYGAGLDIVAPGVNVQSTYPGSTYASLNGTSMATPHVAGEAALVKQKNPSWSNVQIRNHLKNTATSLGSTNLYGSGLVNAEAATR

SEQ ID NO: 53739 - protein, 269 aa, Unidentified
AQSVPWGISRVQAPAAHNRRLTGSGVKVAVLDTGISTHPDLRIRGGASFVPGEPSTQDGNGHGTHVAGTIAALNNSIGVLGVAPSAELYAVKVLGASGSGSVSSIAQGLEWAGNNGMHVANLSLGSPSPSATLEQAVNSATSRGVLVVAASGNSGAGSISYPARYANAMAVGATDQNNNRASFSQYGAGLDIVAPGVNVQSTYPGFTYASLNGTSMATPHVAGAAALVKQKNPSWSNVQIRNHLKNTATSLGSTNLYGSGLVNAEAATR

SEQ ID NO: 53740 - protein, 269 aa, Unidentified
AQSVPWGISRVQAPAAHNRGLTGSGVKVAVLDTGISTHPDLNIRGGASFVPGEPSTQDGNGHGTHVAGTIAALNNSIGVLGVAPSAELYAVKVLGQGGSASVSSIAQGLEWAGNNGMHVANLSLGSPSPSATLEQAVNSATSRGVLVVAASGNSGAGSISYPARYANAMAVGATDQNNNRASFSQYGAGLDIVAPGVNVQSTYPGSTYASLNGTSMATPHVAGAAALVKQKNPSWSNVQIRNHLKNTATSLGSTNLYGSGLVNAEAATR

SEQ ID NO: 53741 - protein, 269 aa, Bacillus lentus
AQSVPWGISRVQAPAAHNRGLTGSGVKVAVLDTGISTHPDLNIRGGASFVPGEPSTQDGNGHGTHVAGTIAALNNSIGVLGVAPSAELYAVKVLGASGSGSVSSIARGLEWAGNNGMHVANLSLGSPSPSATLEQAVNSATSRGVLVVAASGNSGAGSISYPARYANAMAVGATDQNNNRARFSQYGAGLDIVAPGVNVQSTYPGSTYASLNGTSMATPHVAGAAALVKQKNPSWSNVQIRDHLKNTATSLGSTNLYGSGLVNAEAATR

SEQ ID NO: 53742 - protein, 269 aa, Unidentified
AQSVPWGISRVQAPAAHNRGLTGSGVKVAVLDTGISTHPDLNIRGGASFVPGEPSTQDGNGHGTHVAGTIAALNNSIGVLGVAPSAELYAVKVLGASGSGSVTSIAQGLEWAGNNGMHVANLSLGSPSPSATLEQAVNSATSRGVLVVAASGNSGAGSISYPARYANAMAVGATDQNNNRASFSQYGAGLDIVAPGVNVQSTYPQSTYAFLNGTSMATPHVAGAAALVKQKNPSWSNVQIRNHLKNTATSLGSTNLYGSGLVNAEAATR

SEQ ID NO: 53743 - protein, 269 aa, Unidentified
AQSVPWGISRVQAPAAHNRGLTGRGVKVAVLDTGISTHPDLNIRGGASFVPGEPSTQDGNGHGTHVAGTIAALNNSIGVLGVAPSAELYAVKVLGASGSGSVSSIAQGLEWAGNNGMHVANLSLGSPSPSATLEQAVNSATSRGVLVVAASGNSGAGSISYPARYANAMAVGATDQNNNRASFSQYGAGLDIVAPGVNVQSTYPGSTYASLNGTSMATPHVAGAAVLVKQKNPSWSNVRIRNHLKNTATSLGSTNLYGSGLVNAEAATR

SEQ ID NO: 53744 - protein, 269 aa, Unidentified
AQSVPWGISRVQAPAAHNRRLTGSGVKVAVLDTGISTHPDLNIRGGASFVPGEPSTQDGNGHGTHVAGTIAALNNSIGVLGVAPSAELYAVKVLGASGSGSVSSIAQGLEWAGNNGMHVANLSLGSPSPSATLEQAVNSATSRGVLVVAASGNSGAGSISYPARYANAMAVGATDQNNNRASFSQYGAGLDIVAPGVNVQSTYPGFTYASLNGTSMATPHVAGAAALVKQKNPSWSNVQIRNRLKNTATSLGSTNLYGSGLVNAEAATR

SEQ ID NO: 53745 - protein, 269 aa, Bacillus sp.
AQSVPWGISRVQAPAAHNRGLTGSGVKVAVLDTGISTHPDLNIRGGASFVPGEPSTQDGNGHGTHVAGTIAALNNSIGVLGVAPNAELYAVKVLGASGSGSVSSIAQGLEWAGNNGMHVANLSLGSPSPSATLEQAVNSATSRGVLVVAASGNSGAGSISYPARYANAMAVGATDQNNNRASFSQYGAGLDIVAPGVNVQSTYPGSTYASLNGTSMATPHVAGAAALVKQKNPSWSNVQIRNRLKNTATSLGSTNLYGKGLVNAEAATR

SEQ ID NO: 53746 - protein, 269 aa, Synthetic construct
AQSVPWGISRVQAPAAHNRGLTGSGVKVAVLDTGISTHPDLNIRGGASFVPGEPSTQDGNGHGTHVAGTIAALDNSIGVLGVAPSAELYAVKVLGASGRGAVSSIAQGLEWAGNNGMHVANLSLGSPSPSATLEQAVNSATSRGVLVVAASGNSGAGSISYPARYANAMAVGATDQNNNRASFSQYGAGLDIVAPGVNVQSTYPGSTYASLNGTSMATPHVAGAAALVKQKNPSWSNVQIRNHLKNTATSLGSTNLYGSGLVNAEAATR

SEQ ID NO: 53747 - protein, 269 aa, Unidentified
AQSVPWGISRVQAPAAHNRGLTGSGVKVAVLDTGISTHPDLNIRGGASFVPGEPSTQDGNGHGTHVAGTIAALNNSIGVLGVAPSAELYAVKVLGQTGAGSVSSIAQGLEWAGNNGMHVANLSLGSPSPSATLEQAVNSATSRGVLVVAASGNSGAGSISYPARYANAMAVGATDQNNNRASFSQYGAGLDIVAPGVNVQSTYPGSTYASLNGTSMATPHVAGAAALVKQKNPSWSNVQIRNHLKNTATSLGSTNLYGSGLVNAEAATR

SEQ ID NO: 53748 - protein, 269 aa, Unidentified
AQSVPWGISRVQAPAAHNRGLTGRGVKVAVLDSGISTHPDLNIRGGASFVPGEPSTQDGNGHGTHVAGTIAALNNSIGVLGVAPSAELYAVKVLGASGSGSVSSIAQGLEWAGNNGMHVANLSLGSPSPSATLEQAVNSATSRGVLVVAASGNSGAGSISYPARYANAMAVGATDQNNNRASFSQYGAGLDIVAPGVNVQSTAPGSTYASLNGTSMATPHVAGAAALVKQKNPSWSNVQIRNHLKNTATSLGSTNLYGSGLVNAEAATR

SEQ ID NO: 53749 - protein, 269 aa, Unidentified
AQSVPWGISRVQAPAAHNRGLWGSGVKVAVLDTGISTHPDLNIRGGASFVPGEPSTQDGNGHGTHVAGTIAALNNSIGVLGVAPSAILYAVKVLGASGSGSVSSIAQGLEWAGNNGMHVANLSLGSPSPSATLEQAVNSATSRGVLVVAASGNSGAGSISYPARYANAMAVGATDQNNNRASFSQYGAGLDIVAPGVNVQSTYPGSTYAFLNGTSMATPHVAGAAALVKQKNPSWSNVQIRNHLKNTATSLGSTNLYGSGLVNAEAATR

SEQ ID NO: 53750 - protein, 269 aa, Unidentified
AQSVPWGISRVQAPAAHNRGLTGSGVKVAVLDTGISTHPDLNIRGGASFVPGEPSTQDGNGHGTHVAGTIAALNNSIGVLGVAPSAELYAVKVLGASGGAAVSSIAQGLEWAGNNGMHVANLSLGSPSPSATLEQAVNSATSRGVLVVAASGNSGAGSISYPARYANAMAVGATDQNNNRASFSQYGAGLDIVAPGVNVQSTYPGSTYASLNGTSMATPHVAGAAALVKQKNPSWSNVQIRNHLKNTATSLGSTNLYGSGLVNAEAATR

SEQ ID NO: 53751 - protein, 269 aa, Unidentified
AQSVPWGISRVQAPAAHNRGLTGSGVKVAVLDTGISTHPDLNIRGGASFVPGEPSTQDGNGHGTHAAGTIAALNNSIGVLGVAPSAELYAVKVLGASGGGSNSSIAQGLEWAGNNGMHVANLSLGSPSPSATLEQAVNSATSRGVLVVAASGNSGAGSISYPARYANAMAVGATDQNNNRASFSQYGAGLDIVAPGVNVQSTYPGSTYASLNGTSMATPHVAGAAALVKQKNPSWSNVQIRNHLKNTATSLGSTNLYGSGLVNAEAATR

SEQ ID NO: 53752 - protein, 269 aa, Unidentified
AQSVPWGISRVQAPAAHNRGLTGSGVKVAVLDTGISTHPDLNIRGGASFVPGEPSTQDGNGHGTHVAGTIAALNNSIGVLGVAPSAELYAVKVLGAGSSGAVSSIAQGLEWAGNNGMHVANLSLGSPSPSATLEQAVNSATSRGVLVVAASGNSGAGSISYPARYANAMAVGATDQNNNRASFSQYGAGLDIVAPGVNVQSTYPGSTYASLNGTSMATPHVAGAAALVKQKNPSWSNVQIRNHLKNTATSLGSTNLYGSGLVNAEAATR

SEQ ID NO: 53753 - protein, 269 aa, Unidentified
AQSVPWGISRVQAPAAHRRGLTGSGVKVAVLDTGISTHPDLNIRGGASFVPGEPSTQDGNGHGTHVAGTIAALNNSIGVLGVAPSAELYAVKVLGASGSGSISSIAQGLEWAGNNGMHVANLSLGSPSPSATLEQAVNSATSRGVLVVAASGNSGAGSISYPARYANAMAVGATDQNNNRASFSQYGAGLDIVAPGVNVQSTYPGSTYASLNGTSMATPHVAGAAVLVKQKNPSWSNVQIRNHLKNTATSLGSTNLYGSGLVNAEAATR

SEQ ID NO: 53754 - protein, 269 aa, Unidentified
AQSVPWGISRVQAPASHNRGLAGSGVKVAVLDTGISTHPDLNIRGGASFVPGEPSTQDGNGHGTHVAGTIAALNNSIGVLGVAPSAELYAVKVLGASGSGAVSSIAQGLEWAGNNGMHVANLSLGSPSPSATLEQAVNSATSRGVLVVAASGNSGAGSISYPARYANAMAVGATDQNNNRASFSQYGAGLDIVAPGVNVQSTYPGSTYASLNGTSMATPHVAGAAALVKQKNPSWSNVQIRNHLKNTATSLGSTNLYGSGLVNAEAATR

SEQ ID NO: 53755 - protein, 269 aa, Unidentified
AQSVPWGISRVQAPAAHNRGLTGSGVKVAVLDTGISTHPDLNVRGGVSFVPGEPSTQDGNGHGTHVAGTIAALNNSIGVLGVAPSAELYAVKVLGASGSGSVSSIAQGLEWAGNNGMHVANLSLGSPSPSATLEQAVNSATSRGVLVVAASGNSGAGSISYPARYANAMAVGATDQNNNRASFSQYGAGLDIVAPGVNVQSTYPGSTYASLNGTSMATPHVAGAAALVKQKNPSWSNVQIRDHLKNTATSLGSTNLYGSGLVNAEAATR

SEQ ID NO: 53756 - protein, 269 aa, Unidentified
AQSVPWGISRVQAPAAHNRGLTGSGVKVAVLDSGISTHPDLNIRGGASFVPGEPSTQDGNGHGTHVAGTIAALNNSIGVLGVAPSAELYAVKVLGASGSGSVSSIAQGLEWAGNNGMHVANLSLGSPSPSATLEQAVNSATSRGVLVVAASGNSGAGSIDYPARYANAMAVGATDQNNNRADFSQYGAGLDIVAPGVNVQSTYPGSTYASLNGTSMATPHVAGAAALVKQKNPSWSNVQIRNHLKNTATSLGSTNLYGSGLVNAEAATR

SEQ ID NO: 53757 - protein, 269 aa, Unidentified
AQSVPWGISRVQAPAAHNRGLAGSGVKVAVLDSGISTHPDLNIRGGASFVPGEPSTQDGNGHGTHVAGTIAALNNSIGVLGVAPSAELYAVKVLGASGSGSVSSIAQGLEWAGNNGMHVANLSLGSPSPSATLEQAVNSATSRGVLVVAASGNSGEGSISYPARYANAMAVGATDQNNNRASFSQYGAGLDIVAPGVNVQSTYPGSTYASLNGTSMATPHVAGAAALVKQKNPSWSNVQIRNHLKNTATSLGSTNLYGSGLVNAEAATR

SEQ ID NO: 53758 - protein, 269 aa, Unidentified
AQSVPWGISRVQAPAAHNRGLTGSGVKVAVLDTGISTHPDLNIRGGASFVPGEPSTQDGNGHGTHVAGTIAALNNSIGVLGVAPSAELYAVKVLGASGSGSVSSIAQGLEWAGNNGMRVANLSLGSPSPSATLEQAVNSATSRGVLVVAASGNSGAGSISYPARYQNAMAVGATDQNNNRASFSQYGAGLDIVAPGVNVQSTYPGSTYASLNGTSMASPHVAGAAALVKQKNPSWSNVQIRNHLKNTATSLGSTNLYGSGLVNAEAATR

SEQ ID NO: 53759 - protein, 269 aa, Unidentified
AQSVPWGISRVQAPAAHNRGLAGSGVKVAVLDTGISTHPDLNIRGGASFVPGEPSTQDGNGHGTHVAGTIAALNNSIGVLGVAPSAELYAVKVLGASGSGSVSSIAQGVEWAGNNGMHVANLSLGNPSPSATLEQAVNSATSRGVLVVAASGNSGAGSISYPARYANAMAVGATDQNNNRASFSQYGAGLDIVAPGVNVQSTYPGSTYASLNGTSMATPHVAGAAALVKQKNPSWSNVQIRNHLKNTATSLGSTNLYGSGLVNAEAATR

SEQ ID NO: 53760 - protein, 269 aa, Unidentified
AQSVPWGISRVQAPAAHNRGLTGSGVKVAVLDSGISTHPDLNIRGGASFVPGEPSTQDGNGHGTHVAGTIAALNNSIGVLGVAPSAELYAVKVLGASGSGSVSSIAQGLEWAGNNGMHVANLSLGSPSPSATLEQAVNSATSRGVLVVAASGNSGAGSISYPARYANAMAVGATDQNNNRASFSQYGAGLDIVAPGVNVQSTAPGSTYASLNGTSMATPHVAGAAALVFQKNPSWSNVQIRNHLKNTATSLGSTNLYGSGLVNAEAATR

SEQ ID NO: 53761 - protein, 269 aa, Bacillus sp.
AQSVPWGISRVQAPAAHNRGLTGSGVKVAVLDTGISTHPDLNIRGGASFVPGEPSTQDGNGHGTHVAGTIAALNNSIGVLGVAPNAELYAVKVLGASGSGSVSSIAQGLEWAGNNGMHVANLSLGSPSPSATLEQAVNSATSRGVLVVAASGNSGAGSIGYPARYANAMAVGATDQNNNRASFSQYGAGLDIVAPGVNVQSTYPGSTYASLDGTSMATPHVAGAAALVKQKNPSWSNVQIRNHLKNTATSLGSTNLYGSGLVNAEAATR

SEQ ID NO: 53762 - protein, 269 aa, Unidentified
AQSVPWGISRVQAPAAHNRGLTGRGVKVAVLDSGISTHPDLNIRGGASFVPGEPSTQDGNGHGTHVAGTIAALNNSIGVLGVAPSAELYAVKVLGASGSGSVSSIAQGLEWAGNNRMHVANLSLGSPSPSATLEQAVNSATSRGVLVVAASGNSGAGSISYPARYANAMAVGATDQNNNRASFSQYGAGLDIVAPGVNVQSTYPGSTYASLNGTSMATPHVAGAAALVKQKNPSWSNVQIRNHLKNTATSLGSTNLYGSGLVNAEAATR

SEQ ID NO: 53763 - protein, 269 aa, Unidentified
AQSVPWGISRVQAPAAHNRRLTGSGVKVAVLDTGISTHPDLNITGGASFVPGEPSTQDGNGHGTHVAGTIAALNNSIGVLGVAPSAELYAVKVLGASGAGSVSSIAQGLEWAGNNGMHVANLSLGSPSPSATLEQAVNSATSRGVLVVAASGNSGAGSISYPARYANAMAVGATDQNNNRASFSQYGAGLDIVAPGVNVQSTYPGSTYASLNGTSMATPHVAGAAALVKQKNPSWSNVQIRNHLKNTATSLGSTNLYGSGLVNAEAATR

SEQ ID NO: 53764 - protein, 269 aa, Unidentified
AQSVPWGISRVQAPAAHNRGLTGSGVKVAVLDTGISTHPDLNIRGGASFVPGEPSTQDGNGHGTHVAGTIAALNNSIGVLGVAPSAELYAVKVLGASGAGSVSSIAQGVEWAGNNGMHVANLSLGSESPSATLEQAVNSATSRGVLVVAASGNSGAGSISYPARYANAMAVGATDQNNNRASFSQYGAGLDIVAPGVNVQSTYPGSTYASLNGTSMATPHVAGAAALVKQKNPSWSNVQIRNHLKNTATSLGSTNLYGSGLVNAEAATR

SEQ ID NO: 53765 - protein, 269 aa, Bacillus lentus
AQSVPWGISRVQAPAAHNRGLTGSGVKVAVLDTGISTHPDLNIRGGASFVPGEPSTQDGNGHGTHAAGTIAALNNSIGVLGVAPSAELYAVKVLGASGSGSVSAIAQGLEWAGNNGMHVANLSLGSPSPSATLEQAVNSATSRGVLVVAASGNSGAGSISYPARYANAMAVGATDQNNNRASFSQYGAGLDIVAPGVNVQSTYPGSTYASLNGTSMATPHVAGAAALVKQKNPSWSNVQIRNHLKKTATSLGSTNLYGSGLVNAEAATR

SEQ ID NO: 53766 - protein, 269 aa, Unidentified
AQSVPWGISRVQAPAAHNRKLTGSGVKVAVLDTGISTHPDLNIRGGASFVPGEPSTQDGNGHGTHVAGTIAALNNSIGVLGVAPSAELYAVKVLGASGSGSVSSIAQGLEWAGLNGMHVANLSLGQPSPSATLEQAVNSATSRGVLVVAASGNSGAGSISYPARYANAMAVGATDQNNNRASFSQYGAGLDIVAPGVNVQSTYPGSAYASLNGTSSATPHVAGAAALVKQKNPSWSNVQIRNHLKNTATSLGSTNLYGSGLVNAEAATR

SEQ ID NO: 53767 - protein, 269 aa, Unidentified
AQSVPWGISRVQAPAAHNRGLTGSGVKVAVLDTGISTHPDLNIRGGASFVPGEPSTQDGNGHGTHVAGTIAALNNSIGVLGVAPSAELYAVKVLGASGSGSVSSIAQGLEWAGNNGMHVANLSLGSESPSATLEQAVNSATSRGVLVVAASGNSGADSISYPARYANAMAVGATDQNNNRADFSQYGAGLDIVAPGVNVQSTYPGSTYASLNGTSMATPHVAGAAALVKQKNPSWSNVQIRNHLKNTATSLGSTNLYGSGLVNAEAATR

SEQ ID NO: 53768 - protein, 269 aa, Unidentified
AQSVPWGISRVQAPAAHNRGLTGSGVKVAVLDTGISTHPDLNIRGGASFVPGEPSTQDGNGHGTHVAGTIAALNNSIGVLGVAPSAELYAVKVLGASGSGSVSSIAQGLEWAGNNRMHVANLSLGSPSPSATLEQAVNSATSRGVLVVAASGNSGEGSISYPARYANAMAVGATDQNNNRADFSQYGAGLDIVAPGVNVQSTYPGSTYASLNGTSMATPHVAGAAALVKQKNPSWSNVQIRNHLKNTATSLGSTNLYGSGLVNAEAATR

SEQ ID NO: 53769 - protein, 269 aa, Unidentified
AQSVPWGISRVQAPAAHNRGLTGSGVKVAVLDSGISTHPDLNIRGGASFVPGEPSTQDGNGHGTHVAGTIAALNNSIGVLGVAPSAELYAVKVLGASGSGSVSSIAQGLEWAGNNRMHVANLSLGSPSPSATLEQAVNSATSRGVLVVAASGNSGAGSISYPARYANAMAVGATDQNNNRASFSQYGAGLDIVAPGVNVQSTYPGSTYASLNGTSMATPHVAGAAALVKQKNPSRSNVQIRNHLKNTATSLGSTNLYGSGLVNAEAATR

SEQ ID NO: 53770 - protein, 270 aa, Aspergillus oryzae
AQSVPWGISRVQAPAAHNRGLTGSGVKVAVLDTGISTHPDLNIRGGASFVPGEPSTQDGNGHGTHVAGTIAALNNSIGVLGVAPSAELYAVKVLGASEGSGSVSSIAQGLEWAGNNGMHVANLSLGSPSPSATLEQAVNSATSRGVLVVAASGNSGAGSISYPARYANAMAVGATDQNNNRASFSQYGADLDIVAPGVNVQSTYPNSTYASLNGTSMATPHVAGAAALVKQKNPSWSNVQIRNHLKNTATSLGSLNLYGSGLVNAEAATR

SEQ ID NO: 53771 - protein, 269 aa, Unidentified
AQSVPWGISRVQAPAAHNRGLTGSGVKVAVLDSGISTHPDLNIRGGASFVPGEPSTQDGNGHGTHVAGTIAALNNSIGVLGVAPSAELYAVKVLGASGSGSVSSIAQGLEWAGNNRMHVANLSLGSPSPSATLEQAVNSATSRGVLVVAASGNSGAGSISYPARYANAMAVGATDQNNNRADFSQYGAGLDIVAPGVNVQSTYPGSTYASLNGTSMATPHVAGAAALVKQKNPSWSNVQIRNHLKNTATSLGSTNLYGSGLVNAEAATR

SEQ ID NO: 53772 - protein, 269 aa, Bacillus lentus
AQSVPWGISRVQAPAAHNRGLTGSGVKVAVLDTGISTHPDLNIRGGASFVPGEPPTQDGNGHGTHVAGTIAALNNSIGVLGVAPSAELYAVKVLGASGSGSVSSIAQGLEWAGNNGMHVANLSLGSPSPSATLEQAVNSATSRGVLVVAASGNSGAGSISYPALYANAMAVGATDQNNNRASFSQYGAGLDIVAPGVNVQSTYPGSTYASLSGTSMATPHVAGAAALVKQKNPSWSNVQIRNHLKNTATSLGSTNLYGSGLVNAEAATR

SEQ ID NO: 53773 - protein, 269 aa, Unidentified
AQSVPWGISRVQAPAAHNRGLTGRGVKVAVLDTGISTHPDLNIRGGASFVPGEPSTQDGNGHGTHVAGTIAALNNSIGVLGVAPSAELYAVKVLGASGSGSVSSIAQGLEWAGNNGMHVANLSLGIPSPSATLEQAVNSATSRGVLVVAASGNSGEGSISYPARYANAMAVGATDQNNNRASFSQYGAGLDIVAPGVNVQSTYPGSTYASLNGTSMATPHVAGAAALVKQKNPSWSNVQIRNHLKNTATSLGSTNLYGSGLVNAEAATR

SEQ ID NO: 53774 - protein, 269 aa, Unidentified
AQSVPWGISRVQAPAAHNRGLTGSGVKVAVLDTGISTHPDLNIRGGASFVPGEPSTQDGNGHGTHVAGTIAALNNSIGVLGVAPSAELYAVKVLSASGGGSVSSIAQGLEWAGNNGMHVANLSLGAPSPSATLEQAVNSATSRGVLVVAASGNSGAGSISYPARYANAMAVGATDQNNNRASFSQYGAGLDIVAPGVNVQSTYPGSTYASLNGTSMATPHVAGAAALVKQKNPSWSNVQIRNHLKNTATSLGSTNLYGSGLVNAEAATR

SEQ ID NO: 53775 - protein, 269 aa, Unidentified
AQSVPWGISRVQAPAAHNRGLTGSGVKVAVLDTGISTHPDLNIRGGASFVPGEPSTQDGNGHGTHVAGTIAALNNSIGVLGVAPNAELYAVKVLGASGSGSVSSIAQGLEWAGNNGMHVANLSLGSESPSATLEQAVNSATSRGVLVVAASGNSGAGSISYPARYANAMAVGATDQNNNRASFSQYGAGLDIVAPGVNVQSTYPGSTYASENGTSMATPHVAGAAALVKQKNPSWSNVQIRNHLKNTATSLGSTNLYGSGLVNAEAATR

SEQ ID NO: 53776 - protein, 269 aa, Unidentified
AQSVPWGISRVQAPAAHNRGLTGSGVKVAVLDTGISTHPDLNIRGGASFVPGEPSTQDGNGHGTHVAGTIAALNNSIGVLGVAPSAELYAVKVLGASGSGSVSSIAQGLEWAGNNGMHVANLSLGSPSPSATLEQAVNSATSRGVLVVAASGNSGEGSISYPARYANAMAVGATDQNNNHASFSQYGAGLDIVAPGVNVQSTYPGSTYASLNGTSMATPHVAGAAALVKQKNPSWSNVQIRNRLKNTATSLGSTNLYGSGLVNAEAATR

SEQ ID NO: 53777 - protein, 269 aa, Unidentified
AQSVPWGISRVQAPAAHNRGLAGSGVKVAVLDTGISTHPDLNIRGGASFVPGEPSTQDGNGHGTHVAGTIAALNNSIGVLGVAPSAELYAVKVLGASGSGSVSSIAQGLEWAGNNRMHVANLSLGSPSPSATLEQAVNSATSRGVLVVAASGNSGAGSIDYPARYANAMAVGATDQNNNRASFSQYGAGLDIVAPGVNVQSTYPGSTYASLNGTSMATPHVAGAAALVKQKNPSWSNVQIRNHLKNTATSLGSTNLYGSGLVNAEAATR

SEQ ID NO: 53778 - protein, 269 aa, Unidentified
AQSVPWGISRVQAPAAHNRGLTGSGVKVAVLDTGISTHPDLNIRGGASFVPGEPSTQDGEGHGTHVAGTIAALNNSIGVLGVAPSAELYAVKVLGASGSGSVSSIAQGLEWAGNNGMHVANLSLGSPSPSATLEQAVNSATSRGVLVVAASGNSGAGSISYPARYANAMAVGATDQNNNHASFSQYGAGLDIVAPGVNVQSTYPGSTYASLNGTSMATPHVAGAAALVKQKNPSWSNVQIRNHLKRTATSLGSTNLYGSGLVNAEAATR

SEQ ID NO: 53779 - protein, 269 aa, Unidentified
AQSVPWGISRVQAPAAHNRKLTGSGVKVAVLDTGISTHPDLNIRGGASFVPGEPSTQDGNGHGTHVAGTIAALNNSIGVLGVAPSAELYAVKVLGASGDGSVSSIAQGLEWAGNNGMHVANLSLGQPSPSATLEQAVNSATSRGVLVVAASGNSGAGSISYPARYANAMAVGATDQNNNRASFSQYGAGLDIVAPGVNVQSTYPGSAYASLNGTSSATPHVAGAAALVKQKNPSWSNVQIRNHLKNTATSLGSTNLYGSGLVNAEAATR

SEQ ID NO: 53780 - protein, 269 aa, Unidentified
AQSVPWGISRVQAPAAHNRGLTGRGVKVAVLDTGISTHPDLNIRGGASFVPGEPSTQDGNGHGTHVAGTIAALNNSIGVLGVAPSAELYAVKVLGASGSGSVSSIAQGLEWAGLNGMHVANLSLGIPSPSATLEQAVNSATSRGVLVVAASGNSGAGSISYPARYANAMAVGATDQNNNRASFSQYGAGLDIVAPGVNVQSTYPGSTYASLNGTSMATPHVAGAAALVKQKNPSWSNVQIRNHLKNTATSLGSTNLYGSGLVNAEAATR

SEQ ID NO: 53781 - protein, 269 aa, Unidentified
AQSVPWGISRVQAPAAHNRGLTGSGVKVAVLDTGISTHPDLNIRGGASFVPGEPSTQDGNGHGTHVAGTIAALNNSIGVLGVAPSAELYAVKVLGASGSGSVSSIAQGLEWAGNNGMHVANLSLGSPSPSATLEQAVNSATSRGVLVVAASGNSGAGSISYPARYANAMAVGATDQNNNRASFSQYGFGLDIVAPGVNVQSTYPQSTYASLNGTSMATPHVAGAAALVKNKNPSWSNVQIRNHLKNTATSLGSTNLYGSGLVNAEAATR

SEQ ID NO: 53782 - protein, 269 aa, Unidentified
AQSVPWGISRVQAPAAHNRGLTGSGVKVAVLDTGISTHPDLNIRGGASFVPGEPSTQDGNGHGTHVAGTIAALNNSIGVLGVAPSAELYAVKVLGASGAGSVSSIAQGLEWAGNNGMHVANLSLGSPSPSATLEQAVNSATSRGVLVVAASGNSGAGSISYPARYANAMAVGATDQNNNRASFSQYGAGLDIVAPGVNVQSTEPGSTYASLNGTSMATPHVAGAAALVKQKNPSWSNVQIRNHLKNTATSLGSTNLYGSGLVNAFAATR

SEQ ID NO: 53783 - protein, 269 aa, Unidentified
AQSVPWGISRVQAPAAHNRGLTGSGVKVAVLDTGISTHPDLNIRGGASFVPGEPSTQDGNGHGTHVAGTIAALNNSIGVLGVAPSAELYAVKVLPAGGSGSLSSIAQGLEWAGNNGMHVANLSLGSPSPSATLEQAVNSATSRGVLVVAASGNSGAGSISYPARYANAMAVGATDQNNNRASFSQYGAGLDIVAPGVNVQSTYPGSTYASLNGTSMATPHVAGAAALVKQKNPSWSNVQIRNHLKNTATSLGSTNLYGSGLVNAEAATR

SEQ ID NO: 53784 - protein, 269 aa, Unidentified
AQSVPWGISRVQAPAAHNRGLAGSGVKVAVLDTGISTHPDLNIRGGASFVPGEPSTQDGNGHGTHVAGTIAALNNSIGVLGVAPSAELYAVKVLGASGSGSVSSIAQGLEWAGNNGMHVANLSLGSPSPSATLEQAVNSATSRGVLVVAASGNSGAGSISYPARYANAMAVGATDQNNNRASFSQYGAGLDIVAPGVNVQSTEPGSTYASLNGTSMATPHVAGAAALVKQKNPSWSNVQIRNHLKNTATSLGSTNLYGSGLVNAFAATR

SEQ ID NO: 53785 - protein, 269 aa, Unidentified
AQSVPWGISRVQAPAAHNRGLAGSGVKVAVLDTGISTHPDLNIRGGASFVPGEPSTQDGEGHGTHVAGTIAALNNSIGVLGVAPSAELYAVKVLGASGSGSVSSIAQGVEWAGNNGMHVANLSLGSPSPSATLEQAVNSATSRGVLVVAASGNSGAGSISYPARYANAMAVGATDQNNNRASFSQYGAGLDIVAPGVNVQSTYPGSTYASLNGTSMATPHVAGAAALVKQKNPSWSNVQIRNHLKNTATSLGSTNLYGSGLVNAEAATR

SEQ ID NO: 53786 - protein, 269 aa, Unidentified
AQSVPWGISRVQAPAAHNRGLTGRGVKVAVLDTGISTHPDLNIRGGASFVPGEPSTQDGNGHGTHVAGTIAALNNSIGVLGVAPSAELYAVKVLGASGSGSVSSIAQGLEWAGNNGMHVANLSLGSPSPSATLEQAVNSATSRGVLVVAASGNSGAGSISYPARYANAMAVGATDQNNNRASFSQYGAGLDIVAPGVNVQSTAPGSTYASLNGTSMATPHVAGAAALVFQKNPSWSNVQIRNHLKNTATSLGSTNLYGSGLVNAEAATR

SEQ ID NO: 53787 - protein, 269 aa, Unidentified
AQSVPWGISRVQAPAAHNRGLTGSGVKVAVLDTGISTHPDLNIRGGASFVPGEPSTQDGNGHGTHVAGTIAALNNSIGVLGVAPSAELYAVKVLGASGSGSVSSIAQGLEWAGNNGMHVANLSMGSPRPSATLEQAVNSATSRGVLVVAASGNSGAGSISYPARYQNAMAVGATDQNNNRASFSQYGAGLDIVAPGVNVQSTYPGSTYASLNGTSMATPHVAGAAALVKQKNPSWSNVQIRNHLKNTATSLGSTNLYGSGLVNAEAATR

SEQ ID NO: 53788 - protein, 269 aa, Unidentified
AQSVPWGISRVQAPAAHNRGLTGGGVKVAVLDTGISTHPDLNIRGGASFVPGEPSTQDGNGHGTHVAGTIAALNNSIGVLGVAPSAELYAVKVLAASGNGSVSSIAQGLEWAGNNGMHVANLSLGAPSPSATLEQAVNSATSRGVLVVAASGNSGAGSISYPARYANAMAVGATDQNNNRASFSQYGAGLDIVAPGVNVQSTYPGSTYASLNGTSSATPHVAGAAALVKQKNPSWSNVQIRNHLKNTATSLGSTNLYGSGLVNAEAATR

SEQ ID NO: 53789 - protein, 269 aa, Unidentified
AQSVPWGISRVQAPAAHNRGLTGRGVKVAVLDTGISTHPDLNIRGGASFVPGEPSTQDGNGHGTHVAGTIAALNNSIGVLGVAPSAELYAVKVLGASGSGSISSIAQGLEWAGNNGMHVANLSLGSPSPSATLEQAVNSATSRGVLVVAASGNSGAGSISYPARYANAMAVGATDQNNNRASFSQYGAGLDIVAPGVNVQSTYPGSTYASLNGTSMATPHVAGAAVLVKQKNPSWSNVQIRNHLKNTATSLGSTNLYGSGLVNAEAATR

SEQ ID NO: 53790 - protein, 269 aa, Unidentified
AQSVPWGISRVQAPAAHNRGLTGSGVKVAVLDTGISTHPDLNIRGGASFVPGEPSTQDGEGHGTHVAGTIAALNNNIGVLGVAPSAELYAVKVLGASSSGSVSSIAQGLEWAGNNGMHVANLSLGSPSPSATLEQAVNSATSRGVLVVAASGNSGAGSISYPARYANAMAVGATDQNNNRASFSQYGAGLDIVAPGVNVQSTYPGSTYASLNGTSMATPHVAGAAALVKQKNPSWSNVQIRNHLKNTATSLGSTNLYGSGLVNAEAATR

SEQ ID NO: 53791 - protein, 269 aa, Unidentified
AQSVPWGISRVQAPAAHNRGLTGSGVKVAVLDTGISTHPDLNIRGGASFVPGEPSTQDGNGHGTHVAGTIAALNNSIGVLGVAPSAELYAVKVLGFTGSASVSSIAQGLEWAGNNGMHVANLSLGSPSPSATLEQAVNSATSRGVLVVAASGNSGAGSISYPARYANAMAVGATDQNNNRASFSQYGAGLDIVAPGVNVQSTYPGSTYASLNGTSMATPHVAGAAALVKQKNPSWSNVQIRNHLKNTATSLGSTNLYGSGLVNAEAATR

SEQ ID NO: 53792 - protein, 269 aa, Unidentified
AQSVPWGISRVQAPAAHNRGLTGSGVKVAVLDTGISTHPDLNIRGGASFVPGEPSTQDGNGHGTHVAGTIAALNNSIGVLGVAPSAELYAVKVLGASGSGSVSSIAQGLEWAGNNGMHVANLSLGSPSPSATLEQAVNSATSRGVLVVAASGNSGAGSISYPARYANAMAVGATDQNNNRASFSQYGAGLDIVAPGVNVQSTYPGSTYASLNGTSMATPHVAGVAALVKQKNPSWSNVQIRNHLKNTATGLGNTNLYGSGLVNAEAATR

SEQ ID NO: 53793 - protein, 269 aa, Unidentified
AQSVPWGISRVQAPAAHNRRLTGSGVKVAVLDTGISTHPDLNIRGGASFVPGEPSTQDGNGHGTHVAGTIAALNNSIGVLGVAPSAELYAVKVLGASGSGSVSSIAQGLEWAGNNGMHVANLSLGSPSPSATLEQAVNSATSRGVLVVAASGNSGAGSISYPARYANAMAVGATDQNNNRASFSQYGAGLDIVAPGVNVQSTYPGSTYASLNGTSMATPHVAGAAALVKQKNPSWRNVQIRNRLKNTATSLGSTNLYGSGLVNAEAATR

SEQ ID NO: 53794 - protein, 269 aa, Unidentified
AQSVPWGISRVQAPAAHNRRLTGSGVKVAVLDTGISTHPDLRIRGGASFVPGEPSTQDGNGHGTHVAGTIAALNNSIGVLGVAPSAELYAVKVLGASGSGSVSSIAQGLEWAGNNGMHVANLSLGSPSPSATLEQAVNSATSRGVLVVAASGNSGAGSISYPARYANAMAVGATDQNNNRASFSQYGAGLDIVAPGVNVQSTYPGSTYASLNGTSMATPHVAGAAALVKQKNPSWSNVQIRNHLKNTATSLGSTNLYGSGLVIAEAATR

SEQ ID NO: 53795 - protein, 269 aa, Unidentified
AQSVPWGISRVQAPAAHNRRLTGSGVKVAVLDTGISTHPDLRIRGGASFVPGEPSTQDGNGHGTHVAGTIAALNNSIGVLGVAPSAELYAVKVLGASGSGSVSSIAQGLEWAGNNGMHVANLSLGSPSPSATLEQAVNSATSRGVLVVAASGNSGAGSISYPARYANAMAVGATDQNNNRASFSQYGAGLDIVAPGVNVQSTYPGSTYASLNGTSMATPHVAGEAALVKQKNPSWSNVQIRNHLKNTATSLGSTNLYGSGLVNAEAATR

SEQ ID NO: 53796 - protein, 269 aa, Unidentified
AQSVPWGISRVQAPAAHNRGLLGFGVKVAVLDTGISTHPDLNIRGGASFVPGEPSTQDGNGHGTHVAGTIAALNNNIGVLGVAPSAELYAVKVLGASGSGSVSSIAQGLEWAGNNGMHVANLSLGSPSPSATLEQAVNSATSRGVLVVAASGNSGAGSISYPARYANAMAVGATDQNNNRASFSQYGAGLDIVAPGVNVQSTYPGSTYASLNGTSMATPHVAGAAALVKQKNPSWSNVQIRNHLKNTATSLGSTNLYGSGLVNAEAATR

SEQ ID NO: 53797 - protein, 269 aa, Unidentified
AQSVPWGISRVQAPAAHNRGLLGSGVKVAVLDTGISTHPDLNIRGGASFVPGEPSTQDGNGHGTHVAGTIAALNNNIGVLGVAPSAELYAVKVLGASGSGSVSSIAQGLEWAGNNGMHVANLSLGSPSPSATLEQAVNSATSRGVLVVAASGNSGAGSIDYPARYANAMAVGATDQNNNRASFSQYGAGLDIVAPGVNVQSTYPGSTYASLNGTSMATPHVAGAAALVKQKNPSWSNVQIRNHLKNTATSLGSTNLYGSGLVNAEAATR

SEQ ID NO: 53798 - protein, 269 aa, Unidentified
AQSVPWGISRVQAPAAHNRGLTGGGVKVAVLDTGISTHPDLNIRGGASFVPGEPSTQDGNGHGTHVAGTIAALNNSIGVLGVAPSAELYAVKVLAASGNGSVSSIAQGLEWAGNNGMHVANLSLGSPSPSATLEQAVNSATSRGVLVVAASGNSGAGSISYPARYANAMAVGATDQNNNRASFSQYGAGLDIVAPGVNVQSTYPGSTYASLNGTSMATPHVAGAAALVKQKNPSWSNVQIRNHLKNTATSLGSTNLYGSGLVNAEAATR

SEQ ID NO: 53799 - protein, 269 aa, Unidentified
AQSVPWGISRVQAPAAHNRGLAGSGVKVAVLDTGISTHPDLNIRGGASFVPGEPSTQDGNGHGTHVAGTIAALNNSIGVLGVAPSAELYAVKVLGASGSGSVSSIAQGLEWAGLNGMHVANLSLGSPSPSATLEQAVNSATSRGVLVVAASGNSGAGSIDYPARYANAMAVGATDQNNNRASFSQYGAGLDIVAPGVNVQSTYPGSTYASLNGTSMATPHVAGAAALVKQKNPSWSNVQIRNHLKNTATSLGSTNLYGSGLVNAEAATR

SEQ ID NO: 53800 - protein, 269 aa, Unidentified
AQSVPWGISRVQAPAAHNRGLAGSGVKVAVLDTGISTHPDLNIRGGASFVPGEPSTQDGNGHGTHVAGTIAALNNSIGVLGVAPSAELYAVKVLGASGAGSVSSIAQGVEWAGNNGMHVANLSLGSPSPSATLEQAVNSATSRGVLVVAASGNSGAGSISYPARYANAMAVGATDQNNNRASFSQYGAGLDIVAPGVNVQSTYPGSTYASLNGTSMATPHVAGAAALVKQKNPSWSNVQIRNHLKNTATSLGSTNLYGSGLVNAEAATR

SEQ ID NO: 53801 - protein, 269 aa, Unidentified
AQSVPWGISRVQAPAAHNRKLTGSGVKVAVLDTGISTHPDLNIRGGASFVPGEPSTQDGNGHGTHVAGTIAALNNSIGVLGVAPSAELYAVKVLGASGDGSVSSIAQGLEWAGNNGMHVANLSLGQPSPSATLEQAVNSATSRGVLVVAASGNSGAGSISYPARYANAMAVGATDQNNNRASFSQYGAGLDIVAPGVNVQSTYPGSTYASLNGTSMATPHVAGAAALVKQKNPSWSNVQIRNHLKNTATSLGSTNLYGSGLVNAEAATR

SEQ ID NO: 53802 - protein, 269 aa, Unidentified
AQSVPWGISRVQAPAAHNRGLTGSGVKVAVLDTGISTHPDLNIRGGASFVPGEPSTQDGNGHGTHVAGTIAALNNNIGVLGVAPSAELYAVKVLGASGSGSVSSIAQGLEWAGNNGMHVANLSLGSPSPSATLEQAVNSATSRGVLVVAASGNSGAGSISYPARYANAMAVGATDQNNNRASFSQYGAGLDIVAPGVNVQSTYPGSTYASENGTSMATPHVAGAAALVKQKNPSWSNVQIRNHLKNTATSLGSTNLYGSGLVNALAATR

SEQ ID NO: 53803 - protein, 269 aa, Unidentified
AQSVPWGISRVQAPAAHNRKLTGSGVKVAVLDTGISTHPDLNIRGGASFVPGEPSTQDGNGHGTHVAGTIAALNNSIGVLGVAPSAELYAVKVLGASGSGSVSSIAQGLEWAGNNGMHVANLSLGSPSPSATLEQAVNSATSRGVLVVAASGNSGAGSIDYPARYANAMAVGATDQNNNRASFSQYGAGLDIVAPGVNVQSTYPGSAYASLNGTSMATPHVAGAAALVKQKNPSWSNVQIRNHLKNTATSLGSTNLYGSGLVNAEAATR

SEQ ID NO: 53804 - protein, 269 aa, Unidentified
AQSVPWGISRVQAPAAHNRRLTGSGVKVAVLDTGISTHPDLNIRGGASFVPGEPSTQDGNGHGTHVAGTIAALNNSIGVLGVAPSAILYAVKVLGASGSGSVSSIAQGLEWAGNNGMHVANLSLGSPSPSATLEQAVNSATSRGVLVVAASGNSGAGSISYPARYANAMAVGATDQNNNRASFSQYGAGLDIVAPGVNVQSTYPGSTYASENGTSMATPHVAGAAALVKQKNPSWSNVQIRNHLKNTATSLGSTNLYGSGLVNAEAATR

SEQ ID NO: 53805 - protein, 269 aa, Unidentified
AQSVPWGISRVQAPAAHNRGLTGSGVKVAVLDTGISTHPDLNIRGGASFVPGEPSTQDGNGHGTHVAGTIAALDNSIGVLGVAPSAELYAVKVLGASGSGAISSIAQGLEWAGNNGMHVANLSLGSPSPSATLEQAVNSATSRGVLVVAASGNSGAGSISYPARYANAMAVGATDQNNNRASFSQYGAGLDIVAPGVNVQSTYPGSTYASLNGTSMATPHVAGAAALVKQKNPSWSNVQIRNHLKNTATSLGSTNLYGSGLVNAEAATR

SEQ ID NO: 53806 - protein, 269 aa, Unidentified
AQSVPWGISRVQAPAAHNRGLTGSGVKVAVLDTGISTHPDLNIRGGASFVPGEPSTQDGNGHGTHVAGTIAALNNSIGVLGVAPSAELYAVKVLGATGAGGVSSIAQGLEWAGNNGMHVANLSLGSPSPSATLEQAVNSATSRGVLVVAASGNSGAGSISYPARYANAMAVGATDQNNNRASFSQYGAGLDIVAPGVNVQSTYPGSTYASLNGTSMATPHVAGAAALVKQKNPSWSNVQIRNHLKNTATSLGSTNLYGSGLVNAEAATR

SEQ ID NO: 53807 - protein, 269 aa, Unidentified
AQSVPWGISRVQAPAAHNRGLTGRGVKVAVLDTGISTHPDLNIRGGASFVPGEPSTQDGNGHGTHVAGTIAALNNSIGVLGVAPSAELYAVKVLGASGSGSVSSIAQGLEWAGNNGMHVANLSLGSPSPSATLEQAVNSATSRGVLVVAASGNSGAGSISYPARYANAMAVGATDQNNNRASFSQYGAGLDIVAPGVNVQSTYPGSTYASLNGTSMATPHVAGAAALVKQKNPSWSNVRIRNRLKNTATSLGSTNLYGSGLVNAEAATR

SEQ ID NO: 53808 - protein, 269 aa, Unidentified
AQSVPWGISRVQAPAAHNRGLTGSGVKVAVLDTGISTHPDLNIRGGASFVPGEPSTQDGNGHGTHVAGTIAALNNNIGVLGVAPSAELYAVKVLGASGSGSVSSIAQGLEWAGNNRMHVANLSLGSPSPSATLEQAVNSATSRGVLVVAASGNSGAGSIDYPARYANAMAVGATDQNNNRASFSQYGAGLDIVAPGVNVQSTYPGSTYASENGTSSATPHVAGAAALVKQKNPSWSNVQIRNHLKNTATSLGSTNLYGSGLVNAEAATR

SEQ ID NO: 53809 - protein, 269 aa, Unidentified
AQSVPWGISRVQAPAAHNRGLTGSRVKVAVLDTGISTHPDLNIRRGASFVPGEPSTQDGNGHGTHVAGTIAALNNSIGVLGVAPSAELYAVKVLGASGSGSVSSIAQGLEWAGNNGMHFANLSLGSPSPSATLEQAVNSATSRGVLVVAASGNSGAGSISYPARYANAMAVGATDQNNNRASFSQYGAGLDIVAPGVNVQSTYPGSTYASLNGTSMATPHVAGAAALVKQKNPSWSNVQIRNHLKNTATSLGSTNLYGSGLVNAEAATR

SEQ ID NO: 53810 - protein, 269 aa, Unidentified
AQSVPWGISRVQAPAAHNRGLTGSGVKVAVLDTGISTHPDLNIRGGASFVPGEPSRQDGNGHGTHVAGTIAALNNSIGVLGVAPSAELYAVKVLGASGSGSVSSIAQGLEWAGNNGMHVANLSLGSPSPSATLEQAVNSATSRGVLVVAASGNSGAGSISWPARYANAMAVGATDQNNNRASFSQYGAGLDIVAPGVNVQSTYPGSTYASLNGTSMATPHVAGAAALVKQKNPSWSNVQIRNRLKNTATSLGSTNLYGSGLVNAEAATR

SEQ ID NO: 53811 - protein, 269 aa, Unidentified
AQSVPWGISRVQAPAAHNRGLTGFGVKVAVLDTGISTHPDLNIRGGASFVPGEPSTQDGNGHGTHVAGTIAALNNSIGVLGVAPSAELYAVKVLGASGSGSVSSIAQGLEWAGNNRMHVANLSLGDPSPSATLEQAVNSATSRGVLVVAASGNSGAGSISYPARYANAMAVGATDQNNNRASFSQYGAGLDIVAPGVNVQSTYPGSTYASLNGTSMATPHVAGAAALVKQKNPSWSNVQIRNHLKNTATSLGSTNLYGSGLVNAEAATR

SEQ ID NO: 53812 - protein, 269 aa, Unidentified
AQSVPWGISRVQAPAAHNRGLTGSGVKVAVLDTGISTHPDLNIRGGASFVPGEPSTQDGNGHGTHVAGTIAALNNRIGVLGVAPSAELYAVKVLGASGSGSVSSIAQGLEWAGNNGMHVANLSLGSESPSATLEQAVNSATSRGVLVVAASGNSGADSISYPARYANAMAVGATDQNNNRASFSQYGAGLDIVAPGVNVQSTYPGSTYASLNGTSMATPHVAGAAALVKQKNPSWSNVQIRNHLKNTATSLGSTNLYGSGLVNAEAATR

SEQ ID NO: 53813 - protein, 269 aa, Unidentified
AQSVPWGISRVQAPAAHNRGLTGSGVKVAVLDTGISTHPDLNIRGGASFVPGEPSTQDGNGHGTHVAGTIAALNNSIGVLGVAPSAELYAVKVLSASGNGSVSSIAGGLEWAGNNGMHVANLSLGAPSPSATLEQAVNSATSRGVLVVAASGNSGAGSISYPARYANAMAVGATDQNNNRASFSQYGAGLDIVAPGVNVQSTYPGSTYASLNGTSSATPHVAGAAALVKQKNPSWSNVQIRNHLKNTATSLGSTNLYGSGLVNAEAATR

SEQ ID NO: 53814 - protein, 269 aa, Unidentified
AQSVPWGISRVQAPAAHNRGLTGSGVKVAVLDTGISTHPDLNIRGGASFVPGEPSTQDGEGHGTHVAGTIAALNNSIGVLGVAPSAELYAVKVLGASGSGSVSSIAQGLEWAGNNGMHVANLSLGNPSPSATLEQAVNSATSRGVLVVAASGNSGEGSISYPARYANAMAVGATDQNNNRASFSQYGAGLDIVAPGVNVQSTYPGSTYASLNGTSMATPHVAGAAALVKQKNPSWSNVQIRNHLKNTATSLGSTNLYGSGLVNAEAATR

SEQ ID NO: 53815 - protein, 269 aa, Unidentified
AQSVPWGISRVQAPAAHRRGLTGSGVKVAVLDTGISTHPDLNIRGGASFVPGEPSTQDGNGHGTHVAGTIAALDNSIGVLGVAPSAELYAVKVLGASGSGSVSSIAQGLEWAGNNGMHVANLSLGSPSPSATLEQAVNSATSRGVLVVAASGNSGAGSISYPARYANAMAVGATDQNNNRASFSQYGAGLDIVAPGVNVQSTYPGSTYASLNGTSMATPHVAGAAALVKQKNPSWRNVQIRNHLKNTATSLGSTNLYGSGLVNAEAATR

SEQ ID NO: 53816 - protein, 269 aa, Unidentified
AQSVPWGISRVQAPAAHNRGLTGSGVKVAVLDTGISTHPDLNIRGGASFVPGEPSTQDGNGHGTHVAGTIAALNNSIGVLGVTPSAELYAVKVLPQSGSGSVSSIAQGLEWAGNNGMHVANLSLGSPSPSATLEQAVNSATSRGVLVVAASGNSGAGSISYPARYANAMAVGATDQNNNRASFSQYGAGLDIVAPGVNVQSTYPGSTYASLNGTSMATPHVAGAAALVKQKNPSWSNVQIRNHLKNTATSLGSTNLYGSGLVNAEAATR

SEQ ID NO: 53817 - protein, 269 aa, Unidentified
AQSVPWGISRVQAPAAHNRGLAGSGVKVAVLDTGISTHPDLNIRGGASFVPGEPSTQDGNGHGTHVAGTIAALNNSIGVLGVAPSAELYAVKVLGASGSGSVSSIAQGVEWAGNNGMHVANLSLGSPSPSATLEQAVNSATSRGVLVVAASGNSGAESISYPARYANAMAVGATDQNNNRASFSQYGAGLDIVAPGVNVQSTYPGSTYASLNGTSMATPHVAGAAALVKQKNPSWSNVQIRNHLKNTATSLGSTNLYGSGLVNAEAATR

SEQ ID NO: 53818 - protein, 269 aa, Bacillus sp.
AQSVPWGISRVQAPAAHNRGLTGSGVKVAVLDTGISTHPDLNIRGGASFVPGEPSTQDGNGHGTHVAGTIAALNNSIGVLGVAPNAELYAVKVLGASGSGSVSSIAQGLEWAGNNGLDVANLSLGSPSPSATLEQAVNSATSRGVLVVAASGNSGAGSISYPARYANAMAVGATDQNNNRASFSQYGAGLDIVAPGVNVQSTYPGSTYASLNGTSQATPHVAGAAALVKQKNPSWSNVQIRNHLKNTATSLGSTNLYGSGLVNAEAATR

SEQ ID NO: 53819 - protein, 269 aa, Unidentified
AQSVPWGISRVQAPAAHNRGLTGSGVKVAVLDTGISTHPDLNIRGGASFVPGEPSTQDGNGHGTHVAGTIAALNNSIGVLGVAPSAELYAVKVLPAAGSASVSSIAQGLEWAGNNGMHVANLSLGSPSPSATLEQAVNSATSRGVLVVAASGNSGAGSISYPARYANAMAVGATDQNNNRASFSQYGAGLDIVAPGVNVQSTYPGSTYASLNGTSMATPHVAGAAALVKQKNPSWSNVQIRNHLKNTATSLGSTNLYGSGLVNAEAATR

SEQ ID NO: 53820 - protein, 269 aa, Unidentified
AQSVPWGISRVQAPAAHNRGLTGRGVKVAVLDTGISTHPDLDIRGGASFVPGEPSTQDGNGHGTHVAGTIAALNNSIGVLGVAPSAELYAVKVLGASGSGSVSSIAQGLEWAGNNGMHVANLSLGSPSPSATLEQAVNSATSRGVLVVAASGNSGAGSISYPARYANAMAVGATDQNNNRASFSQYGAGLDIVAPGVNVQSTYPGSTYASLNGTSMATPHVAGAAALVKQKNPSWSNVQIRNRLKNTATSLGSTNLYGSGLVNAEAATR

SEQ ID NO: 53821 - protein, 269 aa, Unidentified
AQSVPWGISRVQAPAAHNRGLTGSGVKVAVLDTGISTHPDLNIRGGASFVPGEPSTQDGNGHGTHVAGTIAALNNSIGVLGVAPSAELYAVKVLGAASAGSVSSIAQGLEWAGNNGMHVANLSLGSPSPSATLEQAVNSATSRGVLVVAASGNSGAGSISYPARYANAMAVGATDQNNNRASFSQYGAGLDIVAPGVNVQSTYPGSTYASLNGTSMATPHVAGAAALVKQKNPSWSNVQIRNHLKNTATSLGSTNLYGSGLVNAEAATR

SEQ ID NO: 53822 - protein, 269 aa, Unidentified
AQSVPWGISRVQAPAAHNRGLTGSGVKVAVLDTGISTHPDLNIRGGASFVPGEPSTQDGEGHGTHVAGTIAALNNSIGVLGVAPSAELYAVKVLGASGSGSVSSIAQGLEWAGNNGMHVANLSLGSPSPSATLEQAVNSATSRGVLVVAASGNSGEGSISYPARYANAMAVGATDQNNNRASFSQYGAGLDIVAPGVNVQSTYPGSTYASLNGTSMATPHVAGAAALVKQKNPSWSNVQIRNRLKNTATSLGSTNLYGSGLVNAEAATR

SEQ ID NO: 53823 - protein, 269 aa, Unidentified
AQSVPWGISRVQAPAAHNRGLTGSGVKVAVLDTGISTHPDLNIRGGASFVPGEPSTQDGNGHGTHVAGTIAALNNNIGVLGVAPSAELYAVKVLGASGSGSVSSIAQGLEWAGNNGMHVANLSLGSPSPSATLEQAVNSATSRGVLVVAASGNSGAGSIDYPARYANAMAVGATDQNNNRASFSQYGAGLDIVAPGVNVQSTYPGSTYASENGTSMATPHVAGAAALVKQKNPSWSNVQIRNHLKNTATSLGSTNLYGSGLVNAEAATR

SEQ ID NO: 53824 - protein, 269 aa, Unidentified
AQSVPWGISRVQAPAAHNRGLAGRGVKVAVLDTGISTHPDLNIRGGASFVPGEPSTQDGEGHGTHVAGTIAALNNSIGVLGVAPSAELYAVKVLGASGSGSVSSIAQGLEWAGNNGMHVANLSLGSPSPSATLEQAVNSATSRGVLVVAASGNSGAGSISYPARYANAMAVGATDQNNNRASFSQYGAGLDIVAPGVNVQSTYPGSTYASLNGTSMATPHVAGAAALVKQKNPSWSNVQIRNHLKNTATSLGSTNLYGSGLVNAEAATR

SEQ ID NO: 53825 - protein, 269 aa, Unidentified
AQSVPWGISRVQAPAAHNRGLTGSGVKVAVLDTGISTHPDLNIRGGASFVPGEPSTQDGNGHGTHVAGTIAALNNSIGVLGVAPSAELYAVKVLGFGSSGSVSSIAQGLEWAGNNGMHVANLSLGSPSPSATLEQAVNSATSRGVLVVAASGNSGAGSISYPARYANAMAVGATDQNNNRASFSQYGAGLDIVAPGVNVQSTYPGSTYASLNGTSMATPHVAGAAALVKQKNPSWSNVQIRNHLKNTATSLGSTNLYGSGLVNAEAATR

SEQ ID NO: 53826 - protein, 269 aa, Unidentified
AQSVPWGISRVQAPAAHNRKLTGSGVKVAVLDTGISTHPDLNIRGGASFVPGEPSTQDGEGHGTHVAGTIAALNNSIGVLGVAPSAELYAVKVLGASGSGSVSSIAQGLEWAGLNGMHVANLSLGIPSPSATLEQAVNSATSRGVLVVAASGNSGAGSISYPARYANAMAVGATDQNNNRASFSQYGAGLDIVAPGVNVQSTYPGSTYASLNGTSSATPHVAGAAALVKQKNPSWSNVQIRNHLKNTATSLGSTNLYGSGLVNAEAATR

SEQ ID NO: 53827 - protein, 269 aa, Unidentified
AQSVPWGISRVQAPAAHNRGLTGSGVKVAVLDTGISTHPDLNIRGGASFVPGEPSTQDGNGHGTHVAGTIAALNNSIGVLGVAPRAELYAVKVLGASGSGSVSSIADGLEWAGNNGMHVANLSLGSPSPSATLEQAVNSATSRGVLVVAASGNSGAGSISYPARYANAMAVGATDQNNNRASFSQYGAGLDIVAPGVNVQSTYPGSTYASLNGTSMATPHVAGAAALVKQKNPSWSNVQIRDHLKNTATSLGSTNLYGSGLVNAEAATR

SEQ ID NO: 53828 - protein, 269 aa, Unidentified
AQSVPWGISRVQAPAAHNRGLWGSGVKVAVLDTGISTHPDLNIRGGASFVPGEPSTQDGNGHGTHVAGTIAALNNSIGVLGVAPSAELYAVKVLGASGAGSVSSIAQGLEWAGNNGMHVANLSLGSPSPSATLEQAVNSATSRGVLVVAASGNSGAGSISYPARYANAMAVGATDQNNNRASFSQYGAGLDIVAPGVNVQSTYIGSTYASLNGTSMATPHVAGAAALVKQKNPSWSNVQIRNHLKNTATSLGSTNLYGSGLVNAEAATR

SEQ ID NO: 53829 - protein, 269 aa, Unidentified
AQSVPWGISRVQAPAAHNRGLTGSGVKVAVLDTGISTHPDLNIRGGASFVPGEPSTQDGNGHGTHVAGTIAALDNSIGVLGVAPSAELYAVKVLGASGSGSISSIAQGLEWAGNNGMHVANLSLGSPSPSATLEQAVNSATSRGVLVVAASGNSGAGSISYPARYANAMAVGATDQNNNRASFSQYGAGLDIVAPGVNVQSTYPGSTYASLNGTSMATPHVAGAAALVKQKNPSWSNVRIRNHLKNTATSLGSTNLYGSGLVNAEAATR

SEQ ID NO: 53830 - protein, 269 aa, Unidentified
AQSVPWGISRVQAPAAHNRGLTGSGVKVAVLDTGISTHPDLNIRGGASFVPGEPSTQDGNGHGTHVAGTIAALNNDIGVLGVAPSAELYAVKVLGASGSGSVSSIAQGLEWAGNNGMHVANLSMGSPSPSATLEQAVNSATSRGVLVVAASGNSGAGSISYPARYANAMAVGATDQNNNRASFSQYGAGLDIVAPGVNVQSTYPGSTYASLNGTSMQTPHVAGAAALVKQKNPSWSNVQIRNHLKNTATSLGSTNLYGSGLVNAEAATR

SEQ ID NO: 53831 - protein, 269 aa, Unidentified
AQSVPWGISRVQAPAAHNRGLTGSGVKVAVLDTGISTHPDLNIRGGASFVPGEPSTQDGNGHGTHVAGTIAALNNSIGVLGVAPRAELYAVKVLGASGSGSVSSIADGLEWAGNNGMHVANLSLGSPSPSATLEQAVNSATSRGVLVVAASGNSGAGSISYPARYANAMAVGATDQNNNRADFSQYGAGLDIVAPGVNVQSTYPGSTYASLNGTSMATPHVAGAAALVKQKNPSWSNVQIRNHLKNTATSLGSTNLYGSGLVNAEAATR

SEQ ID NO: 53832 - protein, 269 aa, Unidentified
AQSVPWGISRVQAPAAHNRGLTGSGVKVAVLDTGISTHPDLNIRGGASFVPGEPSTQDGNGHGTHVAGTIAALNNSIGVLGVAPDAELYAVKVLGASGSGSVSSIAQGLEWAGNNGMHVANLSLGSPSPSATLEQAVNSATSRGVLVVAASGNSGAGSISYPARYANAMAVGATDQNNNRADFSQYGAGLDIVAPGVNVQSTYPGSTYASLNGTSMATPHVAGAAALVKQKNPSWSNVQIRRHLKNTATSLGSTNLYGSGLVNAEAATR

SEQ ID NO: 53833 - protein, 269 aa, Unidentified
AQSVPWGISRVQAPAAHNRGLTGSGVKVAVLDTGISTHPDLNIRGGASFVPGEPSTQDGNGHGTHVAGTIAALNNSIGVLGVAPSAELYAVKVLGASGSGSISSIAQGLEWAGNNGMHVANLSLGSPSPSATLEQAVNSATSRGVLVVAASGNSGAGSISYPARYANAMAVGATDQNNNRASFSQYGAGLDIVAPGVNVQSTYPGSTYASLNGTSMATPHVAGAAVLVKQKNPSWSNVQIRNRLKNTATSLGSTNLYGSGLVNAEAATR

SEQ ID NO: 53834 - protein, 269 aa, Unidentified
AQSVPWGISRVQAPAAHNRRLTGSGVKVAVLDTGISTHPDLNIRGGASFVPGEPSTQDGNGHGTHVAGTIAALNNSIGVLGVAPSAELYAVKVLGASGSGSVSSIAQGLEWAGNNGMHVANLSLGSESPSATLEQAVNSATSRGVLVVAASGNSGAGSISYPARYANAMAVGATDQNNNRASFSQYGAGLDIVAPGVNVQSTYPGSTYASLNGTSMATPHVAGAAALVKQKNPSWSNVQIRDHLKNTATSLGSTNLYGSGLVNAEAATR

SEQ ID NO: 53835 - protein, 269 aa, Unidentified
AQSVPWGISRVQAPAAHNRGLTGRGVKVAVLDTGISTHPDLNIRGGASFVPGEPSTQDGNGHGTHVAGTIAALNNGIGVLGVAPSAELYAVKVLGASGSGSVSSIAQGLEWAGNNSMHVANLSLGSPSPSATLEQAVNSATSRGVLVVAASGNSGAGSISYPARYANAMAVGATDQNNNRASFSQYGAGLDIVAPGVNVQSTYPGSTYASLNGTSMATPHVAGAAALVKQKNPSWSNVQIRNHLKNTATSLGSTNLYGSGLVNAEAATR

SEQ ID NO: 53836 - protein, 269 aa, Unidentified
AQSVPWGISRVQAPAAHNRGLTGSGVKVAVLDTGISTHPDLNIRGGASFVPGEPSTQDGNGHGTHVAGTIAALNNSIGVLGVAPNAELYAVKVLGASGSGSNSSIAQGLEWAGNNGMHVANLSLGSPSPSATLEQAVNSATSRGVLVVAASGNSGAGSISYPARYANAMAVGATDQNNNRASFSQYGAGLDIVAPGVNVQSTYPGSTYASENGTSMATPHVAGAAALVKQKNPSWSNVQIRNHLKNTATSLGSTNLYGSGLVNAEAATR

SEQ ID NO: 53837 - protein, 269 aa, Unidentified
AQSVPWGISRVQAPAAHNRGLTGGGVKVAVLDTGISTHPDLNIRGGASFVPGEPSTQDGNGHGTHVAGTIAALNNSIGVLGVAPSAELYAVKVLAASGNGSVSSIAQGLEWAGNNGMHVANLSLGSPSPSATLEQAVNSATSRGVLVVAASGNSGAGSISYPARYANAMAVGATDQNNNRADFSQYGAGLDIVAPGVNVQSTYPGSTYASLNGTSSATPHVAGAAALVKQKNPSWSNVQIRNHLKNTATSLGSTNLYGSGLVNAEAATR

SEQ ID NO: 53838 - protein, 269 aa, Unidentified
AQSVPWGISRVQAPAAHNRGLTGSGVKVAVLDTGISTHPDLNIRGGASFVPGEPSTQDGNGHGTHVAGTIAALNNGIGVLGVAPSAELYAVKVLGASGSGSVSSIAQGLEWAGNNDMHVANLSLGSPSPSATLEQAVNSATSRGVLVVAASGNSGADSISYPARYANAMAVGATDQNNNRASFSQYGAGLDIVAPGVNVQSTYPGSTYASLNGTSMATPHVAGAAALVKQKNPSWSNVQIRNHLKNTATSLGSTNLYGSGLVNAEAATR

SEQ ID NO: 53839 - protein, 269 aa, Unidentified
AQSVPWGISRVQAPAAHNRGLTGSGVKVAVLDTGISTHPDLNIRGGASFVPGEPSTQDGNGHGTHVAGTIAALNNSIGVLGVAPSAELYAVKVLPATGSASVSSIAQGLEWAGNNGMHVANLSLGSPSPSATLEQAVNSATSRGVLVVAASGNSGAGSISYPARYANAMAVGATDQNNNRASFSQYGAGLDIVAPGVNVQSTYPGSTYASLNGTSMATPHVAGAAALVKQKNPSWSNVQIRNHLKNTATSLGSTNLYGSGLVNAEAATR

SEQ ID NO: 53840 - protein, 269 aa, Bacillus lentus
AQSVPWGISRVQAPAAHNRGLTGSGVKVAVLDTGISTHPDLNIRGGASFVPGEPSTQDGNGHGTHVAGTIAALNNSIGVLGVAPSAELYAVKVLGASGSGSVSSIAQGLEWAGNNGMHVANLSLGSPSPSATLEQAVNSATSRGVLVVAASGNSGAGSISAPASYTNAMAVGATDQNNNRASFSQYGAGLDIVAPGVNVQSTYPGSTYASLNGTSMATPHVAGAAALVKQKNPSWSNVQIRNHLKNTATSLGSTNLYGSGLVNAEAATR

SEQ ID NO: 53841 - protein, 269 aa, Unidentified
AQSVPWGISRVQAPAAHNRGLTGSGVKVAVLDSGISTHPDLNIRGGASFVPGEPSTQDGNGHGTHVAGTIAALNNSIGVLGVAPSAELYAVKVLGASGSGSVSSIAQGLEWAGNNRMHVANLSLGSPSPSATLEQAVNSATSRGVLVVAASGNSGAGSIDYPARYANAMAVGATDQNNNRASFSQYGAGLDIVAPGVNVQSTYPGSTYASLNGTSMATPHVAGAAALVKQKNPSWSNVQIRNHLKNTATSLGSTNLYGSGLVNAEAATR

SEQ ID NO: 53842 - protein, 269 aa, Unidentified
AQSVPWGISRVQAPAAHNRGLTGSGVKVAVLDTGISTHPDLNIRGGASFVPGEPSTQDGEGHGTHVAGTIAALNNSIGVLGVAPSAELYAVKVLGASGSGSVSSIAQGLEWAGNNGMHVANLSLGSPSPSATLEQAVNSATSRGVLVVAASGNSGAGSISYPARYANAMAVGATDQNNNHASFSQYGAGLDIVAPGVNVQSTYPGSTYASLNGTSMATPHVAGAAALVKQKNPSWSNVQIRNRLKNTATSLGSTNLYGSGLVNAEAATR

SEQ ID NO: 53843 - protein, 269 aa, Unidentified
AQSVPWGISRVQAPAAHNRGLTGSGVKVAVLDTGISTHPDLNIRGGASFVPGEPSTQDGNGHGTHVAGTIAALDNSIGVLGVAPSAELYAVKVLGASGSGSISSVAQGLEWAGNNGMHVANLSLGSPSPSATLEQAVNSATSRGVLVVAASGNSGAGSISYPARYANAMAVGATDQNNNRASFSQYGAGLDIVAPGVNVQSTYPGSTYASLNGTSMATPHVAGAAALVKQKNPSWSNVQIRNHLKNTATSLGSTNLYGSGLVNAEAATR

SEQ ID NO: 53844 - protein, 269 aa, Unidentified
AQSVPWGISRVQAPAAHNRGLTGSGVKVAVLDTGISTHPDLNIRGGASFVPGEPSTQDGNGHGTHVAGTIAALNNSIGVLGVAPSAELYAVKVLGASGSGSVSSIAQGLEWAGNNRMHVANLSLGIPSPSATLEQAVNSATSRGVLVVAASGNSGAGSIDYPARYANAMAVGATDQNNNRASFSQYGAGLDIVAPGVNVQSTYPGSTYASLNGTSMATPHVAGAAALVKQKNPSWSNVQIRNHLKNTATSLGSTNLYGSGLVNAEAATR

SEQ ID NO: 53845 - protein, 269 aa, Unidentified
AQSVPWGISRVQAPAAHNRGLTGRGVKVAVLDTGISTHPDLNIRGGASFVPGEPSTQDGNGHGTHVAGTIAALNNSIGVLGVAPSAELYAVKVLGASGSGSVSSIAQGLEWAGNNGMHVANLSLGSPSPSATLEQAVNSATSRGVLVVAASGNSGAGSISYPARYANAMAVGATDQNNNRASFSQYGAGLDIVAPGVNVQSTAPGSTYASLNGTSMATPHVAGAAALVKQKNPSWSFVQIRNHLKNTATSLGSTNLYGSGLVNAEAATR

SEQ ID NO: 53846 - protein, 269 aa, Unidentified
AQSVPWGISRVQAPAAHNRGLTGSGVKVAVLDTGISTHPDLNIRGGASFVPGEPSTQDGNGHGTHVAGTIAALNNRIGVLGVAPSAELYAVKVLGASGSGSVSSIAQGLEWAGNNGMHVANLSLGSESPSATLEQAVNSATSRGVLVVAASGNSGAGSISYPARYANAMAVGATDQNNNRASFSQYGAGLDIVAPGVNVQSTYPGSTYASLNGTSMATPHVAGAAALVKQKNPSWSNVQIRDHLKNTATSLGSTNLYGSGLVNAEAATR

SEQ ID NO: 53847 - protein, 269 aa, Unidentified
AQSVPWGISRVQAPAAHNRGLTGSGVKVAVLDTGISTHPDLNIRGGASFVPGEPSTQDGNGHGTHVAGTIAALNNSIGVLGVAPSAELYAVKVLGQSGSGGISSIAQGLEWAGNNGMHVANLSLGSPSPSATLEQAVNSATSRGVLVVAASGNSGAGSISYPARYANAMAVGATDQNNNRASFSQYGAGLDIVAPGVNVQSTYPGSTYASLNGTSMATPHVAGAAALVKQKNPSWSNVQIRNHLKNTATSLGSTNLYGSGLVNAEAATR

SEQ ID NO: 53848 - protein, 269 aa, Unidentified
AQSVPWGISRVQAPASHNRGLTGSGVKVAVLDTGISTHPDLNIRGGASFVPGEPSTQDGNGHGTHVAGTIAALNNSIGVLGVAPSAELYAVKVLGASGSGSVSSIAQGVEWAGNNGMHVANLSLGSPSPSATLEQAVNSATSRGVLVVAASGNSGAGSISYPARYANAMAVGATDQNNNRADFSQYGAGLDIVAPGVNVQSTYPGSTYASLNGTSMATPHVAGAAALVKQKNPSWSNVQIRNHLKNTATSLGSTNLYGSGLVNAEAATR

SEQ ID NO: 53849 - protein, 269 aa, Unidentified
AQSVPWGISRVQAPAAHNRKLTGSGVKVAVLDTGISTHPDLNIRGGASFVPGEPSTQDGNGHGTHVAGTIAALNNNIGVLGVAPSAELYAVKVLGASGSGSVSSIAQGLEWAGNNGMHVANLSLGDPSPSATLEQAVNSATSRGVLVVAASGNSGAGSISYPARYANAMAVGATDQNNNRASFSQYGAGLDIVAPGVNVQSTYPGSTYASLNGTSMATPHVAGAAALVKQKNPSWSNVQIRNHLKNTATSLGSTNLYGSGLVNAEAATR

SEQ ID NO: 53850 - protein, 269 aa, Unidentified
AQSVPWGISRVQAPAAHNRGLTGSGVKVAVLDSGISTHPDLNIRGGASFVPGEPSTQDGNGHGTHVAGTIAALNNSIGVLGVAPSAELYAVKVLGASGSGSVSSIAQGLEWAGNNRMHVANLSLGSPSPSATLEQAVNSATSRGVLVVAASGNSGAGSISYPARYANAMAVGATDQNNNRASFSQYGAGLDIVAPGVNVQSTAPGSTYASLNGTSMATPHVAGAAALVKQKNPSWSNVQIRNHLKNTATSLGSTNLYGSGLVNAEAATR

SEQ ID NO: 53851 - protein, 269 aa, Unidentified
AQSVPWGISRVQAPAAHNRGLTGSGVKVAVLDTGISTHPDLNIRGGASFVPGEPSTQDGNGHGTHVAGTIAALNNSIGVLGVAPSAELYAVKVLGAGGSGGISSIAQGLEWAGNNGMHVANLSLGSPSPSATLEQAVNSATSRGVLVVAASGNSGAGSISYPARYANAMAVGATDQNNNRASFSQYGAGLDIVAPGVNVQSTYPGSTYASLNGTSMATPHVAGAAALVKQKNPSWSNVQIRNHLKNTATSLGSTNLYGSGLVNAEAATR

SEQ ID NO: 53852 - protein, 269 aa, Unidentified
AQSVPWGISRVQAPAAHNRGLTGSGVKVAVLDTGISTHPDLNIRGGASFVPGEPSTQDGNGHGTHVAGTIAALNNSIGVLGVAPSAELYAVKVLGASGSGSVSSIAQGLEWAGNNGMHFANLSLGSPSPSATLEQAVNSATSRGVLVVAASGNSGAGSISYPARYANAMAVGATDQNNNRASFSQYGAGLDIVAPGVNVQSTYPGSTYASLNGTSMATPHVAGAAALVKQKNPSWSNVQIRNHLKRTATSLGSTNLYGSGLVNCEAATR

SEQ ID NO: 53853 - protein, 269 aa, Unidentified
AQSVPWGISRVQAPAAHNRGLAGSGVKVAVLDTGISTHPDLNIRGGASFVPGEPSTQDGNGHGTHVAGTIAALNNSIGVLGVAPSAELYAVKVLGASGAGSVSSIAQGLEWAGNNGMHVANLSLGSPSPSATLEQAVNSATSRGVLVVAASGNSGAESISYPARYANAMAVGATDQNNNRASFSQYGAGLDIVAPGVNVQSTYPGSTYASLNGTSMATPHVAGAAALVKQKNPSWSNVQIRNHLKNTATSLGSTNLYGSGLVNAEAATR

SEQ ID NO: 53854 - protein, 269 aa, Unidentified
AQSVPWGISRVQAPAAHNRGLTGSGVKVAVLDTGISTHPDLNIRGGASFVPGEPSTQDGNGHGTHVAGTIAALNNRIGVLGVAPSAELYAVKVLGASGSGSVSSIAQGLEWAGNNGMHVANLSLGSPSPSATLEQAVNSATSRGVLVVAASGNSGAGSISYPARYANAMAVGATDQNNNRASFSQYGAGLDIVAPGVNVQSTAPGSTYASLNGTSMATPHVAGAAALVFQKNPSWSNVQIRNHLKNTATSLGSTNLYGSGLVNAEAATR

SEQ ID NO: 53855 - protein, 269 aa, Synthetic construct
AQSVPWGISRVQAPAAHNRGLTGSGVKVAVLDTGISTHPDLNIRGGASFVPGEPSTQDGNGHGTHVAGTIAALDNSIGVLGVAPSAELYAVKVLGADGSGAVSSIAQGLEWAGNNGMHVANLSLGSPSPSATLEQAVNSATSRGVLVVAASGNSGAGSISYPARYANAMAVGATDQNNNRASFSQYGAGLDIVAPGVNVQSTYPGSTYASLNGTSMATPHVAGAAALVKQKNPSWSNVQIRNHLKNTATSLGSTNLYGSGLVNAEAATR

SEQ ID NO: 53856 - protein, 269 aa, Unidentified
AQSVPWGISRVQAPAAHNRKLTGSGVKVAVLDTGISTHPDLNIRGGASFVPGEPSTQDGNGHGTHVAGTIAALNNSIGVLGVAPSAELYAVKVLGASGSGSVSSIAQGLEWAGNNGMHVANLSLGSPSPSATLEQAVNSATSRGVLVVAASGNSGAGSISYPARYANAMAVGATDQNNNRASFSQYGAGLDIVAPGVNVQSTYPGSAYASENGTSMATPHVAGAAALVKQKNPSWSNVQIRNHLKNTATSLGSTNLYGSGLVNAEAATR

SEQ ID NO: 53857 - protein, 269 aa, Unidentified
AQSVPWGISRVQAPAAHNRGLTGSGVKVAVLDTGISTHPDLNIRGGASFVPGEPSTQDGNGHGTHVAGTIAALNNSIGVLGVAPSAELYAVKVLGASGDASVSSIAQGLEWAGNNGMHVANLSLGSPSPSATLEQAVNSATSRGVLVVAASGNSGAGSISYPARYANAMAVGATDQNNNRASFSQYGAGLDIVAPGVNVQSTYPGSTYASENGTSMATPHVAGAAALVKQKNPSWSNVQIRNHLKNTATSLGSTNLYGSGLVNAEAATR

SEQ ID NO: 53858 - protein, 269 aa, Unidentified
AQSVPWGISRVQAPAAHNRGLTGSGVKVAVLDTGISTHPDLNITGGASFVPGEPSTQDGNGHGTHVAGTIAALNNSIGVLGVAPSAELYAVKVLGASGSGSVSSIAQGLEWAGNNGMHVANLSLGSPSPSATLEQAVNSATSRGVLVVAASGNSGAGSISYPARYANAMAVGATDQNNNRASFSQYGAGLDIVAPGVNVQSTYPGSTYASLNGTSMATPHVAGAAALVKQKNPSWRNVQIRNRLKNTATSLGSTNLYGSGLVNAEAATR

SEQ ID NO: 53859 - protein, 269 aa, Unidentified
AQSVPWGISRVQAPAAHNRKLTGSGVKVAVLDTGISTHPDLRIRGGASFVPGEPSTQDGNGHGTHVAGTIAALNNSIGVLGVAPSAELYAVKVLGASGDGSVSSIAQGLEWAGNNGMHVANLSLGSPSPSATLEQAVNSATSRGVLVVAASGNSGAGSISYPARYANAMAVGATDQNNNRASFSQYGAGLDIVAPGVNVQSTYPGSTYASLNGTSMATPHVAGAAALVKQKNPSWSNVQIRNHLKNTATSLGSTNLYGSGLVNAEAATR

SEQ ID NO: 53860 - protein, 269 aa, Unidentified
AQSVPWGISRVQAPAAHNRGLTGSGVKVAVLDTGISTHPDLNIRGGASFVPGEPSTQDGNGHGTHVAGTIAALNNSIGVLGVAPSAELYAVKVLGASGGGAVSSIAQGLEWAGNNGMHVANLSLGSPSPSATLEQAVNSATSRGVIVVAASGNSGAGSISYPARYANAMAVGATDQNNNRASFSQYGAGLDIVAPGVNVQSTYPGSTYASLNGTSMATPHVAGAAALVKQKNPSWSNVQIRNHLKNTATSLGSTNLYGSGLVNAEAATR

SEQ ID NO: 53861 - protein, 269 aa, Unidentified
AQSVPWGISRVQAPAAHNRGLTGSGVKVAVLDTGISTHPDLWIRGGASFVPGEPSTQDGEGHGTHVAGTIAALNNSIGVLGVAPSAELYAVKVLGASGSGSVSSIAQGLEWAGLNGMHVANLSLGSPSPSATLEQAVNSATSRGVLVVAASGNSGAGSISYPARYANAMAVGATDQNNNRASFSQYGAGLDIVAPGVNVQSTYPGSTYASLNGTSMATPHVAGAAALVKQKNPSWSNVQIRNHLKNTATSLGSTNLYGSGLVNAEAATR

SEQ ID NO: 53862 - protein, 269 aa, Unidentified
AQSVPWGISRVQAPASHNRGLTGSGVKVAVLDTGISTHPDLNIRGGASFVPGEPSTQDGNGHGTHVAGTIAALNNSIGVLGVAPSAELYAVKVLGASGSGSVSSIAQGLEWAGNNGMHVANLSLGSPSPSATLEQAVNSATSRGVLVVAASGNSGEGSISYPARYANAMAVGATDQNNNRASFSQYGAGLDIVAPGVNVQSTYPGSTYASLNGTSMATPHVAGAAALVKQKNPSWSNVQIRNRLKNTATSLGSTNLYGSGLVNAEAATR

SEQ ID NO: 53863 - protein, 269 aa, Unidentified
AQSVPWGISRVQAPAAHNRGLTGSGVKVAVLDTGISTHPDLNIRGGASFVPGEPSTQDGNGHGTHVAGTIAALNNSIGVLGVAPRAELYAVKVLGASGSGSVSSIARGLEWAGNNGMHVANLSLGSPSPSATLEQAVNSATSRGVLVVAASGNSGAGSISYPARYANAMAVGATDQNNNRASFSQYGAGLDIVAPGVNVQSTYPGSTYASLNGTSMATPHVAGAAALVKQKNPSWSNVQIRRHLKNTATSLGSTNLYGSGLVNAEAATR

SEQ ID NO: 53864 - protein, 269 aa, Bacillus lentus
AQSVPWGISRVQAPAAHNRGLTGSGVKVAVLDTGISTHPDLNIRGGASFVPGEPSTQDGDGHGTHVAGTIAALNNSIGVLGVAPSAELYAVKVLGASGSGSVSSIAQGLEWAGNNGMHVANLSLGSPSPSATLEQAVNSATSRGVLVVAASGNSGAGSISYPASYANAMAVGATDQNNNRASFSQYGAGLDIVAPGVNVQSTYPGSTYASLNGTSMATPHVAGAAALVKQKNPSWSNVRIRNHLKNTATSLGSTNLYGSGLVNAEAATR

SEQ ID NO: 53865 - protein, 269 aa, Synthetic construct
AQSVPWGISRVQAPAAHNRGLTGSGVKVAVLDTGISTHPDLNIRGGASFVPGEPSTQDGNGHGTHVAGTIAALDNSIGVLGVAPSAELYAVKVLGASGSGATSSIAQGLEWAGNNGMHVANLSLGSPSPSATLEQAVNSATSRGVLVVAASGNSGAGSISYPARYANAMAVGATDQNNNRASFSQYGAGLDIVAPGVNVQSTYPGSTYASLNGTSMATPHVAGAAALVKQKNPSWSNVQIRNHLKNTATSLGSTNLYGSGLVNAEAATR

SEQ ID NO: 53866 - protein, 269 aa, Synthetic construct
AQSVPWGISRVQAPAAHNRGLTGSGVKVAVLDTGISTHPDLNIRGGASFVPGEPSTQDGNGHGTHVAGTIAALDNSIGVLGVAPSAELYAVKVLGASGSGSYSSVAQGLEWAGNNGMHVANLSLGSPSPSATLEQAVNSATSRGVLVVAASGNSGAGSISYPARYANAMAVGATDQNNNRASFSQYGAGLDIVAPGVNVQSTYPGSTYASLNGTSMATPHVAGAAALVKQKNPSWSNVQIRNHLKNTATSLGSTNLYGSGLVNAEAATR

SEQ ID NO: 53867 - protein, 269 aa, Unidentified
AQSVPWGISRVQAPAAHNRGLTGSGVKVAVLDTGISTHPDLNIRGGASFVPGEPSTQDGNGHGTHVAGTIAALNNSIGVLGVAPSAELYAVKVLGFAGSGAVSSIAQGLEWAGNNGMHVANLSLGSPSPSATLEQAVNSATSRGVLVVAASGNSGAGSISYPARYANAMAVGATDQNNNRASFSQYGAGLDIVAPGVNVQSTYPGSTYASLNGTSMATPHVAGAAALVKQKNPSWSNVQIRNHLKNTATSLGSTNLYGSGLVNAEAATR

SEQ ID NO: 53868 - protein, 269 aa, Unidentified
AQSVPWGISRVQAPAAHRRGLTGSGVKVAVLDTGISTHPDLNIRGGASFVPGEPSTQDGNGHGTHVAGTIAALDNSIGVLGVAPSAELYAVKVLGASGSGSVSSIAQGLEWAGNNGMHVANLSLGSPSPSATLEQAVNSATSRGVLVVAASGNSGAGSISYPARYANAMAVGATDQNNNRASFSQYGAGLDIVAPGVNVQSTYPGSTYASLNGTSMATPHVAGAAALVKQKNPSWSNVRIRNHLKNTATSLGSTNLYGSGLVNAEAATR

SEQ ID NO: 53869 - protein, 269 aa, Unidentified
AQSVPWGISRVQAPASHNRGLTGSGVKVAVLDTGISTHPDLNIRGGASFVPGEPSTQDGNGHGTHVAGTIAALNNSIGVLGVAPSAELYAVKVLGASGSGSISSIAQGLEWAGNNGMHVANLSLGNPSPSATLEQAVNSATSRGVLVVAASGNSGAGSISYPARYANAMAVGATDQNNNRASFSQYGAGLDIVAPGVNVQSTYPGSTYASLNGTSMATPHVAGAAALVKQKNPSWSNVQIRNHLKNTATSLGSTNLYGSGLVNAEAATR

SEQ ID NO: 53870 - protein, 269 aa, Unidentified
AQSVPWGISRVQAPAAHNRGLTGSGVKVAVLDTGISTHPDLNIRGGASFVPGEPSTQDGNGHGTHVAGTIAALNNSIGVLGVAPSAELYAVKVLGFSGGGSISSIAQGLEWAGNNGMHVANLSLGSPSPSATLEQAVNSATSRGVLVVAASGNSGAGSISYPARYANAMAVGATDQNNNRASFSQYGAGLDIVAPGVNVQSTYPGSTYASLNGTSMATPHVAGAAALVKQKNPSWSNVQIRNHLKNTATSLGSTNLYGSGLVNAEAATR

SEQ ID NO: 53871 - protein, 269 aa, Unidentified
AQSVPWGISRVQAPAAHNRGLTGSGVKVAVLDTGISTHPDLNIRGGASFVPGEPSRQDGNGHGTHVAGTIAALNNSIGVLGVAPSAILYAVKVLGASGSGSVSSIAQGLEWAGNNGMHVANLSLGSPSPSATLEQAVNSATSRGVLVVAASGNSGAGSISYPARYANAMAVGATDQNNNRASFSQYGAGLDLVAPGVNVQSTYPGSTYASLNGTSMATPHVAGAAALVKQKNPSWSNVQIRNHLKNTATSLGSTNLYGSGLVNAEAATR

SEQ ID NO: 53872 - protein, 269 aa, Unidentified
AQSVPWGISRVQAPAAHNRGLAGSGVKVAVLDTGISTHPDLNIRGGASFVPGEPSTQDGNGHGTHVAGTIAALNNSIGVLGVAPSAELYAVKVLGASGSGGVSSIAQGLEWAGNNGMHVANLSLGSPSPSATLEQAVNSATSRGVLVVAASGNSGAESISYPARYANAMAVGATDQNNNRASFSQYGAGLDIVAPGVNVQSTYPGSTYASLNGTSMATPHVAGAAALVKQKNPSWSNVQIRNHLKNTATSLGSTNLYGSGLVNAEAATR

SEQ ID NO: 53873 - protein, 269 aa, Unidentified
AQSVPWGISRVQAPAAHNRGLTGRGVKVAVLDTGISTHPDLNIRGGASFVPGEPSTQDGNGHGTHVAGTIAALNNRIGVLGVAPSAELYAVKVLGASGSGSVSSIAQGLEWAGNNGMHVANLSLGSPSPSATLEQAVNSATSRGVLVVAASGNSGAGSISYPARYANAMAVGATDQNNNRASFSQYGAGLDIVAPGVNVQSTYPGFTYASLNGTSMATPHVAGAAALVKQKNPSWSNVQIRNHLKNTATSLGSTNLYGSGLVNAEAATR

SEQ ID NO: 53874 - protein, 269 aa, Unidentified
AQSVPWGISRVQAPAAHRRGLTGRGVKVAVLDTGISTHPDLNIRGGASFVPGEPSTQDGNGHGTHVAGTIAALNNSIGVLGVAPSAELYAVKVLGASGSGSVSSIAQGLEWAGNNGMHVANLSLGSPSPSATLEQAVNSATSRGVLVVAASGNSGAGSISYPARYANAMAVGATDQNNNRASFSQYGAGLDIVAPGVNVQSTYPGSTYASLNGTSMATPHVAGAAALVKQKNPSWRNVQIRNHLKNTATSLGSTNLYGSGLVNAEAATR

SEQ ID NO: 53875 - protein, 269 aa, Unidentified
AQSVPWGISRVQAPAAHNRGLTGSGVKVAVLDTGISTHPDLNIRGGASFVPGEPSTQDGNGHGTHVAGTIAALNNSIGVLGVAPSAELYAVKVLAASGSGSVSSIAQGLEWAGNNGMHVANLSLGAPSPSATLEQAVNSATSRGVLVVAASGNSGAGSISYPARYANAMAVGATDQNNNRASFSQYGAGLDIVAPGVNVQSTYPGSTYASQNGTSMATPHVAGAAALVKQKNPSWSNVQIRNHLKNTATSLGSTNLYGSGLVNAEAATR

SEQ ID NO: 53876 - protein, 269 aa, Unidentified
AQSVPWGISRVQAPAAHNRRLTGSGVKVAVLDTGISTHPDLNIRGGASFVPGEPSTQDGNGHGTHVAGTIAALNNSIGVLGVAPSAELYAVKVLGASGSGSVSSIAQGLEWAGANGMHVANLSLGSPSPSATLEQAVNSATSRGVLVVAASGNSGAGSISYPARYANAMAVGATDQNNNRASFSQYGAGLDIVAPGVNVQSTYPGSTYASLNGTSMATPHVAGAAALVKQKNPSWSNVQIRNHLKNTATSLGSTNLYGSGLVRAEAATR

SEQ ID NO: 53877 - protein, 269 aa, Unidentified
AQSVPWGISRVQAPAAHNRGLTGSGVKVAVLDTGISTHPDLRIRGGASFVPGEPSTQDGNGHGTHVAGTIAALNNSIGVLGVAPSAELYAVKVLGASGSASVSSIAQGLEWAGNNGMHVANLSLGSPSPSATLEQAVNSATSRGVLVVAASGNSGAGSISYPARYANAMAVGATDQNNNRASFSQYGAGLDIVAPGVNVQSTYPGSTYASENGTSMATPHVAGAAALVKQKNPSWSNVQIRNHLKNTATSLGSTNLYGSGLVNAEAATR

SEQ ID NO: 53878 - protein, 269 aa, Unidentified
AQSVPWGISRVQAPAAHNRGLTGSGVKVAVLDTGISTHPDLNIRGGASFVPGEPSTQDGNGHGTHVAGTIAALNNSIGVLGVAPSAELYAVKVLGASGSGSVSSIARGLEWAGNNGMHVANLSLGSPSPSATLEQAVNSATSRGVLVVAASGNSGAGSISYPARYANAMAVGATDQNNNRADFSQYGAGLDIVAPGVNVQSTYPGSTYASLNGTSMATPHVAGAAALVKQKNPSWSNVQIRDHLKNTATSLGSTNLYGSGLVNAEAATR

SEQ ID NO: 53879 - protein, 269 aa, Unidentified
AQSVPWGISRVQAPAAHNRGLTGSGVKVAVLDTGISTHPDLNIRGGASFVPGEPSTQDGNGHGTHVAGTIAALNNSIGVLGVAPSAELYAVKVLGASGSGSVSSIAQGLEWAGLNGMHVANLSLGIPSPSATLEQAVNSATSRGVLVVAASGNSGAGSIDYPARYANAMAVGATDQNNNRASFSQYGAGLDIVAPGVNVQSTYPGSTYASLNGTSMATPHVAGAAALVKQKNPSWSNVQIRNHLKNTATSLGSTNLYGSGLVNAEAATR

SEQ ID NO: 53880 - protein, 269 aa, Unidentified
AQSVPWGISRVQAPAAHRRRLTGSGVKVAVLDTGISTHPDLNITGGASFVPGEPSTQDGNGHGTHVAGTIAALNNSIGVLGVAPSAELYAVKVLGASGSGSVSSIAQGLEWAGNNGMHVANLSLGSPSPSATLEQAVNSATSRGVLVVAASGNSGAGSISYPARYANAMAVGATDQNNNRASFSQYGAGLDIVAPGVNVQSTYPGSTYASLNGTSMATPHVAGAAALVKQKNPSWSNVQIRNHLKNTATSLGSTNLYGSGLVNAEAATR

SEQ ID NO: 53881 - protein, 269 aa, Unidentified
AQSVPWGISRVQAPAAHNRKLTGSGVKVAVLDTGISTHPDLNIRGGASFVPGEPSTQDGNGHGTHVAGTIAALNNSIGVLGVAPSAELYAVKVLGASGDGSVSSIAQGLEWAGLNGMHVANLSLGSPSPSATLEQAVNSATSRGVLVVAASGNSGAGSISYPARYANAMAVGATDQNNNRASFSQYGAGLDIVAPGVNVQSTYPGSAYASLNGTSSATPHVAGAAALVKQKNPSWSNVQIRNHLKNTATSLGSTNLYGSGLVNAEAATR

SEQ ID NO: 53882 - protein, 269 aa, Unidentified
AQSVPWGISRVQAPAAHNRRLTGSGVKVAVLDTGISTHPDLRIRGGASFVPGEPSTQDGNGHGTHVAGTIAALNNSIGVLGVAPSAELYAVKVLGASGSGSVSSIAQGLEWAGNNGMHVANLSLGSPSPSATLEQAVNSATSRGVLVVAASGNSGAGSISYPARYANAMAVGATDQNNNRASFSQYGAGLDIVAPGVNVQSTYPGSTYASLNGTSMATPHVAGAAALVKQKNPSRSNVQIRNHLKNTATSLGSTNLYGSGLVNAEAATR

SEQ ID NO: 53883 - protein, 269 aa, Unidentified
AQSVPWGIARVQAPAAHNRGLTGSGVKVAVLDTGISTHPDLRIRGGASFVPGEPSTQDGNGHGTHVAGTIAALNNRIGVLGVAPSAELYAVKVLGASGSGSVSSIAQGLEWAGNNGMHVANLSLGSPSPSATLEQAVNSATSRGVLVVAASGNSGAGSISYPARYANAMAVGATDQNNNRASFSQYGAGLDIVAPGVNVQSTYPGSTYASLNGTSMATPHVAGAAALVKQKNPSWSNVQIRNHLKNTATSLGSTNLYGSGLVNAEAATR

SEQ ID NO: 53884 - protein, 269 aa, Synthetic construct
AQSVPWGISRVQAPAAQNRGLTGSGVRVAVLDTGISTHSDLNIRGGASFVPGEPSTQDGNGHGTHVAGTIAALNNSIGVLGVAPSAELYAVKVLGASGSGSVSSIAQGLEWAGNNGMHVANLSLGSPSPSATLEQAVNSATSRGVLVVAASGNSGAGSISYPARYANAMAVGATDQNNNRASFSQYGAGLDIVAPGVNVQSTYPGSTYASLNGTSMATPHVAGAAALVKQKNPSWSNVQIRNHLKNTATSLGSTNLYGSGLVNAEAATR

SEQ ID NO: 53885 - protein, 269 aa, Unidentified
AQSVPWGISRVQAPAAHNRKLTGSGVKVAVLDTGISTHPDLNIRGGASFVPGEPSTQDGNGHGTHVAGTIAALNNSIGVLGVAPSAELYAVKVLGASGSGSVSSIAQGLEWAGNNGMHVANLSLGSPSPSATLEQAVNSATSRGVLVVAASGNSGAGSISYPARYANAMAVGATDQNNNRASFSQYGAGLDIVAPGVNVQSTYPGSTYASENGTSMATPHVAGAAALVKQKNPRWSNVQIRNHLKNTATSLGSTNLYGSGLVNAEAATR

SEQ ID NO: 53886 - protein, 269 aa, Unidentified
AQSVPWGISRVQAPAAHNRGLTGSGVKVAVLDTGISTHPDLNIRGGASFVPGEPSTQDGNGHGTHVAGTIAALNNSIGVLGVAPSAELYAVKVLGAAGAASVSSIAQGLEWAGNNGMHVANLSLGSPSPSATLEQAVNSATSRGVLVVAASGNSGAGSISYPARYANAMAVGATDQNNNRASFSQYGAGLDIVAPGVNVQSTYPGSTYASLNGTSMATPHVAGAAALVKQKNPSWSNVQIRNHLKNTATSLGSTNLYGSGLVNAEAATR

SEQ ID NO: 53887 - protein, 269 aa, Unidentified
AQSVPWGISRVQAPAAHNRGLTGSGVKVAVLDTGISTHPDLNIRGGASFVPGEPSTQDGNGHGTHVAGTIAALNNSIGVLGVAPSAELYAVKVLGASGRGSVSSIAQGLEWAGNNGMHVANLSLGSPAPSATLEQAVNSATSRGVLVVAASGNSGAGSISYPARYANAMAVGATDQNNNRASFSQYGAGLDIVAPGVNVQSTYPGSTYASLNGTSMATPHVAGAAALVKQKNPSWSNVQIRDHLKNTATSLGSTNLYGSGLVNAEAATR

SEQ ID NO: 53888 - protein, 269 aa, Unidentified
AQSVPWGISRVQAPAAHNRGLTGSGVKVAVLDTGISTHPDLNIRGGASFVPGEPSTQDGNGHGTHVAGTIAALNNGIGVLGVAPSAELYAVKVLGASGSGSVSSIAQGLEWAGNNDMHVANLSLGSPSPSATLEQAVNSATSRGVLVVAASGNSGAGSISYPARYANAMAVGATDQNNNRASFSQYGAGLDIVAPGVNVQSTYPGSTYASLNGTSMATPHVAGAAALVKQKNPSWSNVRIRNHLKNTATSLGSTNLYGSGLVNAEAATR

SEQ ID NO: 53889 - protein, 269 aa, Unidentified
AQSVPWGISRVQAPAAHNRGLTGSGVKVAVLDTGISTHPDLNIRGGASFVPGEPSTQDGNGHGTHVAGTIAALNNSIGVLGVAPSAELYAVKVLGASGSGAVSSIAQGLEWAGNNGMHVANLSLGSPSPSATLEQAVNSATSRGVLVVAASGNSGAGSISYPARYANAMAVGATDQNNNRASFSQYGAGLDIVAPGVNVQSTYPGSTYASLNGTSMATPHVAGAAVLVKQKNPSWSNVQIRNRLKNTATSLGSTNLYGSGLVNAEAATR

SEQ ID NO: 53890 - protein, 269 aa, Unidentified
AQSVPWGISRVQAPAAHNRGLTGSGVKVAVLDSGISTHPDLNIRGGASFVPGEPSTQDGNGHGTHVAGTIAALNNRIGVLGVAPSAELYAVKVLGASGSGSVSSIAQGLEWAGNNGMHVANLSLGSPSPSATLEQAVNSATSRGVLVVAASGNSGAGSISYPARYANAMAVGATDQNNNRASFSQYGAGLDIVAPGVNVQSTAPGSTYASLNGTSMATPHVAGAAALVKQKNPSWSNVQIRNHLKNTATSLGSTNLYGSGLVNAEAATR

SEQ ID NO: 53891 - protein, 269 aa, Unidentified
AQSVPWGISRVQAPAAHNRGLTGSGVKVAVLDTGISTHPDLNIRGGASFVPGEPSTQDGEGHGTHVAGTIAALNNSIGVLGVAPSAELYAVKVLGASGSGSVSSIAQGLEWAGNNGMHVANLSLGSPSPSATLEQAVNSATSRGVIVVAASGNSGAESISYPARYANAMAVGATDQNNNRASFSQYGAGLDIVAPGVNVQSTYPGSTYASLNGTSMATPHVAGAAALVKQKNPSWSNVQIRNHLKNTATSLGSTNLYGSGLVNAEAATR

SEQ ID NO: 53892 - protein, 269 aa, Unidentified
AQSVPWGISRVQAPAAHRRGLTGSGVKVAVLDTGISTHPDLNIRGGASFVPGEPSTQDGNGHGTHVAGTIAALNNSIGVLGVAPSAELYAVKVLGASGGGSISSIAQGLEWAGNNGMHVANLSLGSPSPSATLEQAVNSATSRGVLVVAASGNSGAGSISYPARYANAMAVGATDQNNNRASFSQYGAGLDIVAPGVNVQSTYPGSTYASLNGTSMATPHVAGAAALVKQKNPSWSNVQIRNHLKNTATSLGSTNLYGSGLVNAEAATR

SEQ ID NO: 53893 - protein, 270 aa, Alkalihalobacillus clausii
AQSVPWGISRIVQAPAAHNRGLTGSGVKVAVLDTGISTHPDLNIRGGASFVPGEPSTQDGNGHGTHVAGTIAALNNSIGVLGVAPSAELYAVKVLPASGSGSVSSIAQGLEWAGNNGMHVANLSLGSPSPSATLEQAVNSATSRGLLVVAASGNSGAGSISYPARYANAMAVGATDQNNNRASFSQYGAGLDIVAPGVNVQSTYPGSTYASLSGTSMATPHVAGAAALVKQKNPSWSNVQIRNHLKNTATSLGSTNLYGSGLVNAEAATR

SEQ ID NO: 53894 - protein, 269 aa, Unidentified
AQSVPWGISRVQAPAAHNRGLTGSGVKVAVLDTGISTHPDLNIRGGASFVPGEPSTQDGNGHGTHVAGTIAALNNSIGVLGVAPDAELYAVKVLGASGSGSVSSIADGLEWAGNNGMHVANLSLGSPSPSATLEQAVNSATSRGVLVVAASGNSGAGSISYPARYANAMAVGATDQNNNRARFSQYGAGLDIVAPGVNVQSTYPGSTYASLNGTSMATPHVAGAAALVKQKNPSWSNVQIRNHLKNTATSLGSTNLYGSGLVNAEAATR

SEQ ID NO: 53895 - protein, 269 aa, Unidentified
AQSVPWGISRVQAPAAHNRGLTGSGVKVAVLDTGISTHPDLNIRGGASFVPGEPSTQDGNGHGTHVAGTIAALNNSIGVLGVAPSAELYAVKVLGASGSGAISSIAQGLEWAGNNGMHVANLSLGSPSPSATLEQAVNSATSRGVLVVAASGNSGAGSISYPARYANAMAVGATDQNNNRASFSQYGAGLDIVAPGVNVQSTYPGSTYASLNGTSMATPHVAGAAVLVKQKNPSWSNVQIRNHLKNTATSLGSTNLYGSGLVNAEAATR

SEQ ID NO: 53896 - protein, 269 aa, Unidentified
AQSVPWGISRVQAPAAHNRGLLGSGVKVAVLDTGISTHPDLNIRGGASFVPGEPSTQDGNGHGTHVAGTIAALNNSIGVLGVAPSAELYAVKVLGASGSGSVSSIAQGLEWAGNNRMHVANLSLGDPSPSATLEQAVNSATSRGVLVVAASGNSGAGSISYPARYANAMAVGATDQNNNRASFSQYGAGLDIVAPGVNVQSTYPGSTYASLNGTSMATPHVAGAAALVKQKNPSWSNVQIRNHLKNTATSLGSTNLYGSGLVNAEAATR

SEQ ID NO: 53897 - protein, 269 aa, Unidentified
AQSVPWGISRVQAPAAHNRGLTGSGVKVAVLDTGISTHPDLNIRGGASFVPGEPSTQDGNGHGTHVAGTIAALNNSIGVLGVAPSAELYAVKVLGFTGAGSVSSIAQGLEWAGNNGMHVANLSLGSPSPSATLEQAVNSATSRGVLVVAASGNSGAGSISYPARYANAMAVGATDQNNNRASFSQYGAGLDIVAPGVNVQSTYPGSTYASLNGTSMATPHVAGAAALVKQKNPSWSNVQIRNHLKNTATSLGSTNLYGSGLVNAEAATR

SEQ ID NO: 53898 - protein, 269 aa, Unidentified
AQSVPWGISRVQAPAAHNRGLTGSGVKVAVLDTGISTHPDLNIRGGASFVPGEPSTQDGNGHGTHVAGTIAALNNSIGVLGVAPSAELYAVKVLGASGSGSVSSIAQGLEWAGNNGMHVANLSLGSPSPSATLEQAVNSATSRGVLVVAASGNSGAGSIDYPARYDNAIAVGATDQNNNRASFSQYGAGLDIVAPGVNVQSTYPGSTYASLNGTSMATPHVAGAAALVKQKNPSWSNVQIRNHLKNTATSLGSTNLYGSGLVNAEAATR

SEQ ID NO: 53899 - protein, 269 aa, Unidentified
AQSVPWGISRVQAPAAHNRGLTGSGVKVAVLDTGISTHPDLNIRGGASFVPGEPSTQDGNGHGTHVAGTIAALNNDIGVLGVAPSAELYAVKVLGASGSGSVSSIAQGLEWAGNNGMHVANLSLGSPSPSATLEQAVNSATSRGRLVVAASGNSGAGSISYPARYANAMAVGATDQNNNRASFSQYGAGLDIVAPGVNVQSTYPGSTYASLNGTSMASPHVAGAAALVKQKNPSWSNVQIRNHLKNTATSLGSTNLYGSGLVNAEAATR

SEQ ID NO: 53900 - protein, 269 aa, Unidentified
AQSVPWGISRVQAPAAHNRKLTGSGVKVAVLDTGISTHPDLNIRGGASFVPGEPSTQDGNGHGTHVAGTIAALNNSIGVLGVAPSAELYAVKVLGASGDGSVSSIAQGLEWAGNNGMHVANLSLGSPSPSATLEQAVNSATSRGVLVVAASGNSGAGSISYPARYANAMAVGATDQNNNRASFSQYGAGLDIVAPGVNVQSTYPGSTYASENGTSMATPHVAGAAALVKQKNPSWSNVQIRNHLKNTATSLGSTNLYGSGLVNAEAATR

SEQ ID NO: 53901 - protein, 269 aa, Unidentified
AQSVPWGISRVQAPAAHNRGLTGSGVKVAVLDTGISTHPDLNIRGGASFVPGEPSTQDGNGHGTHVAGTIAALNNSIGVLGVAPSAELYAVKVLGATSGGSVSSIAQGLEWAGNNGMHVANLSLGSPSPSATLEQAVNSATSRGVLVVAASGNSGAGSISYPARYANAMAVGATDQNNNRASFSQYGAGLDIVAPGVNVQSTYPGSTYASLNGTSMATPHVAGAAALVKQKNPSWSNVQIRNHLKNTATSLGSTNLYGSGLVNAEAATR

SEQ ID NO: 53902 - protein, 269 aa, Unidentified
AQSVPWGISRVQAPAAHNRGLTGRGVKVAVLDTGISTHPDLNIRGGASFVPGEPSTQDGNGHGTHVAGTIAALNNSIGVLGVAPSAELYAVKVLGASGSGSVSSIAQGLEWAGLNRMHVANLSLGSPSPSATLEQAVNSATSRGVLVVAASGNSGAGSISYPARYANAMAVGATDQNNNRASFSQYGAGLDIVAPGVNVQSTYPGSTYASLNGTSMATPHVAGAAALVKQKNPSWSNVQIRNHLKNTATSLGSTNLYGSGLVNAEAATR

SEQ ID NO: 53903 - protein, 269 aa, Unidentified
AQSVPWGISRVQAPAAHNRGLTGSGVKVAVLDTGISTHPDLNIRGGASFVPGEPSTQDGNGHGTHVAGTIAALNNSIGVLGVAPNAELYAVKVLGASGGGSNSSIAQGLEWAGNNGMHVANLSLGSPSPSATLEQAVNSATSRGVLVVAASGNSGAGSISYPARYANAMAVGATDQNNNRASFSQYGAGLDIVAPGVNVQSTYPGSTYASLNGTSMATPHVAGAAALVKQKNPSWSNVQIRNHLKNTATSLGSTNLYGSGLVNAEAATR

SEQ ID NO: 53904 - protein, 269 aa, Unidentified
AQSVPWGISRVQAPAAHNRGLTGSGVKVAVLDTGISTHPDLNIRGGASFVPGEPSTQDGNGHGTHVAGTIAALNNSIGVLGVAPSAELYAVKVLGASGSGSVSSIAQGLEWAGNNGMHVANLSLGNPSPSATLEQAVNSATSRGVLVVAASGNSGEGSISYPARYANAMAVGATDQNNNRASFSQYGAGLDIVAPGVNVQSTEPGSTYASLNGTSMATPHVAGAAALVKQKNPSWSNVQIRNHLKNTATSLGSTNLYGSGLVNAEAATR

SEQ ID NO: 53905 - protein, 269 aa, Unidentified
AQSVPWGISRVQAPAAHNRGLTGSGVKVAVLDTGISTHPDLNIRGGASFVPGEPSTQDGNGHGTHVAGTIAALNNSIGVLGVAPSAELYAVKVLGASGSGSLSSIAQGLEWAGNNGMHVANLSLGSPSPSATLEQAVNSATSRGVLVVAASGNSGEGSISYPARYANAMAVGATDQNNNRASFSQYGAGLDIVAPGVNVQSTYPGSTYASLNGTSMATPHVAGAAALVKQKNPSWSNVQIRNRLKNTATSLGSTNLYGSGLVNAEAATR

SEQ ID NO: 53906 - protein, 269 aa, Unidentified
AQSVPWGISRVQAPAAHNRGLTGRGVKVAVLDTGISTHPDLNIRGGASFVPGEPSTQDGNGHGTHVAGTIAALNNSIGVLGVAPSAELYAVKVLGASGSGSVSSIAQGLEWAGNNGMHVANLSLGSPSPSATLEQAVNSATSRGVLVVAASGNSGAGSISYPARYANAMAVGATDQNNNRASFSQYGAGLDIVAPGVNVQSTYPGSTYFSLNGTSMATPHVAGAAALVKQKNPSWSNVQIRNHLKNTATSLGSTNLYGSGLVRAEAATR

SEQ ID NO: 53907 - protein, 269 aa, Unidentified
AQSVPWGISRVQAPAAHNRGLTGGGVKVAVLDTGISTHPDLNIRGGASFVPGEPSTQDGNGHGTHVAGTIAALNNSIGVLGVAPSAELYAVKVLSASGNGSVSSIAQGLEWAGNNGMHVANLSLGSPSPSATLEQAVNSATSRGVLVVAASGNSGAGSISYPARYANAMAVGATDQNNNRASFSQYGAGLDIVAPGVNVQSTYPGSTYASLNGTSMATPHVAGAAALVKQKNPSWSNVQIRNHLKNTATSLGSTNLYGSGLVNAEAATR

SEQ ID NO: 53908 - protein, 269 aa, Unidentified
AQSVPWGISRVQAPAAHNRGLTGRGVKVAVLDTGISTHPDLNIRGGASFVPGEPSTQDGEGHGTHVAGTIAALNNSIGVLGVAPSAELYAVKVLGASGSGSVSSIAQGLEWAGNNGMHVANLSLGSPSPSATLEQAVNSATSRGVLVVAASGNSGAGSISYPARYANAMAVGATDQNNNRASFSQYGAGLDIVAPGVNVQSTYPGSTYASLNGTSMATPHVAGAAALVKQKNPSWSNVRIRNHLKNTATSLGSTNLYGSGLVNAEAATR

SEQ ID NO: 53909 - protein, 269 aa, Unidentified
AQSVPWGISRVQAPASHNRGLTGSGVKVAVLDTGISTHPDLNIRGGASFVPGEPSTQDGNGHGTHVAGTIAALNNSIGVLGVAPSAELYAVKVLGASGAGSVSSIAQGLEWAGNNGMHVANLSLGSPSPSATLEQAVNSATSRGVIVVAASGNSGAGSISYPARYANAMAVGATDQNNNRASFSQYGAGLDIVAPGVNVQSTYPGSTYASLNGTSMATPHVAGAAALVKQKNPSWSNVQIRNHLKNTATSLGSTNLYGSGLVNAEAATR

SEQ ID NO: 53910 - protein, 269 aa, Unidentified
AQSVPWGISRVQAPAAHNRGLTGSGVKVAVLDTGISTHPDLNIRGGASFVPGEPSTQDGNGHGTHVAGTIAALNNDINVLGVAPSAELYAVKVLGASGSGSVSSIAQGLEWAGNNGMHVANLSLGSPSPSATLEQAVNSATSRGVLVVAASGNSGAGSISYPARYANAMAVGATDQNNNRASFSQYGAGLDIVAPGVNVQSTYPGSTYASLNGTSMATPHVAGAAALVKQKNPSWSNVQIRNHLKNTATSLGSTNLYGPGLVNAEAATR

SEQ ID NO: 53911 - protein, 269 aa, Unidentified
AQSVPWGISRVQAPAAHNRGLTGSGVKVAVLDTGISTHPDLNIRGGASFVPGEPSTQDGNGHGTHVAGTIAALNNSIGVLGVAPSAELYAVKVLGASGSGSVSSIAQGLEWAGNNGMHVANLSLGSPSPSATLEQAVNSATSRGVLVVAASGNSGAGSISYPARYANAMAVGATDQNNNRASFSQYGAGLDIVAPGVNVQSTYPGSTYASLNGTSMATPHVAGAAALVKQKNPSWSNVRIRDRLKNTATSLGSTNLYGSGLVNAEAATR

SEQ ID NO: 53912 - protein, 269 aa, Unidentified
AQSVPWGISRVQAPAAHNRGLAGSGVKVAVLDTGISTHPDLNIRGGASFVPGEPSTQDGNGHGTHVAGTIAALNNSIGVLGVAPSAELYAVKVLGASGSGSVSSIAQGLEWAGNNRMHVANLSLGIPSPSATLEQAVNSATSRGVLVVAASGNSGAGSISYPARYANAMAVGATDQNNNRASFSQYGAGLDIVAPGVNVQSTYPGSTYASLNGTSMATPHVAGAAALVKQKNPSWSNVQIRNHLKNTATSLGSTNLYGSGLVNAEAATR

SEQ ID NO: 53913 - protein, 269 aa, Unidentified
AQSVPWGISRVQAPAAHNRGLTGRGVKVAVLDSGISTHPDLNIRGGASFVPGEPSTQDGNGHGTHVAGTIAALNNSIGVLGVAPSAELYAVKVLGASGSGSVSSIAQGLEWAGNNGMHVANLSLGSPSPSATLEQAVNSATSRGVLVVAASGNSGAGSIDYPARYANAMAVGATDQNNNRASFSQYGAGLDIVAPGVNVQSTYPGSTYASLNGTSMATPHVAGAAALVKQKNPSWSNVQIRNHLKNTATSLGSTNLYGSGLVNAEAATR

SEQ ID NO: 53914 - protein, 269 aa, Unidentified
AQSVPWGISRVQAPAAHNRGLTGRGVKVAVLDSGISTHPDLNIRGGASFVPGEPSTQDGNGHGTHVAGTIAALNNSIGVLGVAPSAELYAVKVLGASGSGSVSSIAQGLEWAGNNGMHVANLSLGSPSPSATLEQAVNSATSRGVLVVAASGNSGAGSISYPARYANAMAVGATDQNNNRASFSQYGAGLDIVAPGVNVQSTYPGSTYASLNGTSMATPHVTGAAALVKQKNPSWSNVQIRNHLKNTATSLGSTNLYGSGLVNAEAATR

SEQ ID NO: 53915 - protein, 269 aa, Unidentified
AQSVPWGISRVQAPAAHNRGLTGSGVKVAVLDTGISTHPDLNIRGGASFVPGEPSTQDGNGHGTHVAGTIAALNNSIGVLGVAPSAELYAVKVLGASGSGSVSSIAQGLEWAGNNGMHVANLSLGSPSPSATLEQAVNSATSRGVIVVAASGNSGAGSISYPARYANAMAVGATDQNNNRASFSQYGAGLDIVAPGVNVQSTYPGSAYASLNGTSMATPHVAGAAALVKQKNPSWSNVQIRNHLKRTATSLGSTNLYGSGLVNAEAATR

SEQ ID NO: 53916 - protein, 269 aa, Unidentified
AQSVPWGISRVQAPAAHNRGLTGSGVKVAVLDTGISTHPDLNIRGGASFVPGEPSTQDGEGHGTHVAGTIAALNNSIGVLGVAPSAELYAVKVLGASGSGSVSSIAQGLEWAGNNRMHVANLSLGSPSPSATLEQAVNSATSRGVLVVAASGNSGAGSISYPARYANAMAVGATDQNNNRADFSQYGAGLDIVAPGVNVQSTYPGSTYASLNGTSMATPHVAGAAALVKQKNPSWSNVQIRNHLKNTATSLGSTNLYGSGLVNAEAATR

SEQ ID NO: 53917 - protein, 269 aa, Unidentified
AQSVPWGISRVQAPAAHNRGLTGRGVKVAVLDTGISTHPDLNIRGGASFVPGEPSTQDGNGHGTHVAGTIAALNNSIGVLGVAPSAELYAVKVLGASGSGSVSSIAQGLEWAGNNRMHVANLSLGSPSPSATLEQAVNSATSRGVLVVAASGNSGAGSISYPARYANAMAVGATDQNNNRASFSQYGAGLDIVAPGVNVQSTYPGSTYASLNGTSMATPHVAGAAALVFQKNPSWSNVQIRNHLKNTATSLGSTNLYGSGLVNAEAATR

SEQ ID NO: 53918 - protein, 269 aa, Unidentified
AQSVPWGISRVQAPASHNRGLTGSGVKVAVLDTGISTHPDLNIRGGASFVPGEPSTQDGNGHGTHVAGTIAALNNSIGVLGVAPSAELYAVKVLGASGGGSISSIAQGLEWAGNNGMHVANLSLGSPSPSATLEQAVNSATSRGVLVVAASGNSGAGSISYPARYANAMAVGATDQNNNRASFSQYGAGLDIVAPGVNVQSTYPGSTYASLNGTSMATPHVAGAAALVKQKNPSWSNVQIRNHLKNTATSLGSTNLYGSGLVNAEAATR

SEQ ID NO: 53919 - protein, 269 aa, Unidentified
AQSVPWGISRVQAPAAHNRGLAGSGVKVAVLDTGISTHPDLNIRGGASFVPGEPSTQDGNGHGTHVAGTIAALNNSIGVLGVAPSAELYAVKVLGASGAGSLSSIAQGLEWAGNNGMHVANLSLGSPSPSATLEQAVNSATSRGVLVVAASGNSGAGSISYPARYANAMAVGATDQNNNRASFSQYGAGLDIVAPGVNVQSTYPGSTYASLNGTSMATPHVAGAAALVKQKNPSWSNVQIRNHLKNTATSLGSTNLYGSGLVNAEAATR

SEQ ID NO: 53920 - protein, 269 aa, Unidentified
AQSVPWGISRVQAPAAHNRGLTGSGVKVAVLDTGISTHPDLNIRGGASFVPGEPSTQDGNGHGTHVAGTIAALNNSIGVLGVAPNAELYAVKVLGASGGGSVSSIAQGLEWAGNNGMHVANLSLGSPSPGATLEQAVNSATSRGVLVVAASGNSGAGSISYPARYANAMAVGATDQNNNRASFSQYGAGLDIVAPGVNVQSTYPGSTYASLNGTSMATPHVAGAAALVKQKNPSWSNVQIRNHLKNTATSLGSTNLYGSGLVNAEAATR

SEQ ID NO: 53921 - protein, 269 aa, Unidentified
AQSVPWGISRVQAPAAHNRGLTGSGVKVAVLDSGISTHPDLNIRGGASFVPGEPSTQDGNGHGTHVAGTIAALNNRIGVLGVAWSAELYAVKVLGASGSGSVSSIAQGLEWAGNNGMHVANLSLGSPSPSATLEQAVNSATSRGVLVVAASGNSGAGSISYPARYANAMAVGATDQNNNRASFSQYGAGLDIVAPGVNVQSTYPGSTYASLNGTSMATPHVAGAAALVKQKNPSWSNVQIRNHLKNTATSLGSTNLYGSGLVNAEAATR

SEQ ID NO: 53922 - protein, 269 aa, Unidentified
AQSVPWGIARVQAPAAHNRGLTGSGVKVAVLDTGISTHPDLRIRGGASFVPGEPSTQDGNGHGTHVAGTIAALNNSIGVLGVAPSAELYAVKVLGASGSGSVSSIAQGLEWAGNNGMHVANLSLGSPSPSATLEQAVNSATSRGVLVVAASGNSGAGSISYPARYANAMAVGATDQNNNRASFSQYGAGLDIVAPGVNVQSTYPGFTYASLNGTSMATPHVAGAAALVKQKNPSWSNVQIRNHLKNTATSLGSTNLYGSGLVNAEAATR

SEQ ID NO: 53923 - protein, 269 aa, Unidentified
AQSVPWGISRVQAPAAHNRRLTGSGVKVAVLDTGISTHPDLNIRGGASFVPGEPSTQDGNGHGTHVAGTIAALNNSIGVLGVAPSAELYAVKVLGASGSGSVSSIAQGLEWAGNNGMHVANLSLGSESPSATLEQAVNSATSRGVLVVAASGNSGAGSISYPARYANAMAVGATDQNNNRASFSQYGAGLDIVAPGVNVQSTYPGSTYASLNGTSMATPHVAGAAALVKQKNPSWSNVRIRNHLKNTATSLGSTNLYGSGLVNAEAATR

SEQ ID NO: 53924 - protein, 269 aa, Unidentified
AQSVPWGISRVQAPAAHNRRLTGRGVKVAVLDTGISTHPDRNIRGGASFVPGEPSTQDGNGHGTHVAGTIAALNNSIGVLGVAPSAELYAVKVLGASGSGSVSSIAQGLEWAGNNGMHVANLSLGSPSPSATLEQAVNSATSRGVLVVAASGNSGAGSISYPARYANAMAVGATDQNNNRASFSQYGAGLDIVAPGVNVQSTYPGSTYASLNGTSMATPHVAGAAALVKQKNPSWSNVQIRNHLKNTATSLGSTNLYGSGLVNAEAATR

SEQ ID NO: 53925 - protein, 269 aa, Unidentified
AQSVPWGISRVQAPAAHNRGLTGSGVKVAVLDTGISTHPDLNIRGGASFVPGEPSTQDGNGHGTHVAGTIAALNNSIGVLGVAPSAELYAVKVLGASGSGSVSSIAQGLEWAGNNRMHVANLSLGDPSPSATLEQAVNSATSRGVLVVAASGNSGAGSISYPARYANAMAVGATDQNNNRASFSQYGAGLDIVAPGVNVQSTYPGSTYASENGTSMATPHVAGAAALVKQKNPSWSNVQIRNHLKNTATSLGSTNLYGSGLVNAEAATR

SEQ ID NO: 53926 - protein, 269 aa, Unidentified
AQSVPWGISRVQAPAAHNRGLTGRGVKVAVLDTGISTHPDLNIRGGASFVPGEPSTQDGNGHGTHVAGTIAALNNSIGVLGVAPSAELYAVKVLGASGSGSVSSIAQGLEWAGNNRMHVANLSLGSPSPSATLEQAVNSATSRGVLVVAASGNSGAGSISYPARYANAMAVGATDQNNNRADFSQYGAGLDIVAPGVNVQSTYPGSTYASLNGTSMATPHVAGAAALVKQKNPSWSNVQIRNHLKNTATSLGSTNLYGSGLVNAEAATR

SEQ ID NO: 53927 - protein, 269 aa, Unidentified
AQSVPWGISRVQAPAAHNRGLTGRGVKVAVLDTGISTHPDLRIRGGASFVPGEPSTQDGNGHGTHVAGTIAALDNSIGVLGVAPSAELYAVKVLGASGSGSVSSIAQGLEWAGNNGMHVANLSLGSPSPSATLEQAVNSATSRGVLVVAASGNSGAGSISYPARYANAMAVGATDQNNNRASFSQYGAGLDIVAPGVNVQSTYPGSTYASLNGTSMATPHVAGAAALVKQKNPSWSNVQIRNHLKNTATSLGSTNLYGSGLVNAEAATR

SEQ ID NO: 53928 - protein, 269 aa, Unidentified
AQSVPWGISRVQAPAAHNRGLLGFGVKVAVLDTGISTHPDLNIRGGASFVPGEPSTQDGNGHGTHVAGTIAALNNSIGVLGVAPSAELYAVKVLGASGSGSVSSIAQGLEWAGNNGMHVANLSLGDPSPSATLEQAVNSATSRGVLVVAASGNSGAGSISYPARYANAMAVGATDQNNNRASFSQYGAGLDIVAPGVNVQSTYPGSTYASLNGTSMATPHVAGAAALVKQKNPSWSNVQIRNHLKNTATSLGSTNLYGSGLVNAEAATR

SEQ ID NO: 53929 - protein, 269 aa, Unidentified
AQSVPWGISRVQAPAAHNRGLTGSGVKVAVLDTGISTHPDLNIRGGASFVPGEPSTQDGNGHGTHVAGTIAALNNSIGVLGVAPSAELYAVKVLGASGSGSVSSIAQGLEWAGNNGMHVANLSLGSPSPSATLEQAVNSATSRGVLVVAASGNSGAGSISAPASYANAMAVGATDQNNNRASFSQYGPGLDIVAPGVNVQSTYPGSTYASLNGTSMATPHVAGAAALVKQKNPSWSNVQIRNHLKNTATSLGSTNLYGSGLVNAEAATR

SEQ ID NO: 53930 - protein, 269 aa, Unidentified
AQSVPWGISRVQAPAAHNRGLTGSGVKVAVLDTGISTHPDLNIRGGASFVPGEPSTQDGNGHGTHVAGTIAALNNSIGVLGVAPSAELYAVKVLPAAGSGGVSSIAQGLEWAGNNGMHVANLSLGSPSPSATLEQAVNSATSRGVLVVAASGNSGAGSISYPARYANAMAVGATDQNNNRASFSQYGAGLDIVAPGVNVQSTYPGSTYASLNGTSMATPHVAGAAALVKQKNPSWSNVQIRNHLKNTATSLGSTNLYGSGLVNAEAATR

SEQ ID NO: 53931 - protein, 269 aa, Bacillus lentus
AQSVPWGISRVQAPAAHNRGLTGSGVKVAVLDTGISTHPDLNIRGGASFVPGEPPTQDGNGHGTHVAGTIAALNNSIGVLGVAPSAELYAVKVLGASGSGSVSSIAQGLEWAGNNGMHVANLSLGSPSPSATLEQAVNSATSRGVLVVAASGNSGAGSISYPALYANAMAVGATDQNNNRASFSQYGAGLDIVAPGVNVESTYPGSTYASLNGTSMATPHVAGAAALVKQKNPSWSNVQIRNHLKNTATSLGSTNLYGSGLVNAEAATR

SEQ ID NO: 53932 - protein, 269 aa, Synthetic construct
AQSVPWGISRVQAPAAHNRGLTGSGVKVAVLDTGISTHPDLNIRGGASFVPGEPSTQDPNGHQEHVAGTIAALNNSIGVLGVAPSAELYAVKVLGASGSGSVSSIAQGLEWAGNNGMHVANLSLGSPSPSATLEQAVNSATSRGVLVVAASGNSGAGSISYPARYANAMAVGATDQNNNRASFSQYGAGLDIVAPGVNVQSTYPGSTYASLNGTSMATPHVAGAAALVKQKNPSWSNVQIRNHLKNTATSLGSTNLYGSGLVNAEAATR

SEQ ID NO: 53933 - protein, 269 aa, Unidentified
AQSVPWGISRVQAPAAHNRGLTGSGVKVAVLDTGISTHPDLNIRGGASFVPGEPSTQDGNGHGTHVAGTIAALNNSIGVLGVAPSAELYAVKVLGASGSGSVSSIAQGLEWAGNNRMHVANLSLGSPSPSATLEQAVNSATSRGVLVVAASGNSGAGSISYPARYANAMAVGATDQNNNRASFSQYGAGLDIVAPGVNVQSTAPGSTYASLNGTSMATPHVAGAAALVFQKNPSWSNVQIRNHLKNTATSLGSTNLYGSGLVNAEAATR

SEQ ID NO: 53934 - protein, 269 aa, Unidentified
AQSVPWGISRVQAPAAHNRGLTGSGVKVAVLDTGISTHPDLNIRGGASFVPGEPSTQDGNGHGTHVAGTIAALDNSIGVLGVAPSAELYAVKVLGASGSGSVSSIAQGLEWAGNNGMHVANLSLGSPSPSATLEQAVNSATSRGVLVVAASGNSGAGSISYPARYANAMAVGATDQNNNRASFSQYGAGLDIVAPGVNVQSTYPGSTYASLNGTSMATPHVAGAAVLVKQKNPSWSNVRIRNHLKNTATSLGSTNLYGSGLVNAEAATR

SEQ ID NO: 53935 - protein, 269 aa, Unidentified
AQSVPWGISRVQAPAAHNRKLTGSGVKVAVLDTGISTHPDLNIRGGASFVPGEPSTQDGEGHGTHVAGTIAALNNSIGVLGVAPSAELYAVKVLGASSSGSVSSIAQGLEWAGNNGMHVANLSLGSPSPSATLEQAVNSATSRGVLVVAASGNSGAGSISYPARYANAMAVGATDQNNNRASFSQYGAGLDIVAPGVNVQSTYPGSTYASLNGTSMATPHVAGAAALVKQKNPSWSNVQIRNHLKNTATSLGSTNLYGSGLVNAEAATR

SEQ ID NO: 53936 - protein, 269 aa, Unidentified
AQSVPWGISRVQAPAAHNRGLTGSGVKVAVLDTGISTHPDLNIRGGASFVPGEPSTQDGNGHGTHVAGTIAALNNSIGVLGVAPSAELYAVKVLGASGSGSVSSIAQGLEWAGNFGMHVANLSLGSPSPSATLEQAVNSATSRGVLVVAASGNSGAGSISYPARYANAMAVGATDQNNNRASFSQYGAGLDIVAPGVNVQSTYPGSAYFSLNGTSMATPHVAGAAALVKQKNPSWSNVQIRNHLKNTATSLGSTNLYGSGLVNAEAATR

SEQ ID NO: 53937 - protein, 269 aa, Unidentified
AQSVPWGISRVQAPAAHNRRLTGSGVKVAVLDTGISTHPDLNIRGGASFVPGEPSTQDGNGHGTHVAGTIAALNNSIGVLGVAPSAELYAVKVLGASGAGSVSSIAQGLEWAGNNGMHVANLSLGSPSPSATLEQAVNSATSRGVLVVAASGNSGAGSISYPARYANAMAVGATDQNNNRASFSQYGAGLDIVAPGVNVQSTYPQSTYASLNGTSMATPHVAGAAALVKQKNPSWSNVQIRNHLKNTATSLGSTNLYGSGLVNAEAATR

SEQ ID NO: 53938 - protein, 269 aa, Unidentified
AQSVPWGISRVQAPAAHNRGLTGSGVKVAVLDTGISTHPDLNIRGGASFVPGEPSTQDGNGHGTHVAGTIAALNNSIGVLGVAPSAELYAVKVLGASGGGAISSIAQGLEWAGNNGMHVANLSLGSPSPSATLEQAVNSATSRGVLVVAASGNSGAGSISYPARYANAMAVGATDQNNNRASFSQYGAGLDIVAPGVNVQSTYPGSTYASLNGTSMATPHVAGAAALVKQKNPSWSNVQIRNHLKNTATSLGSTNLYGSGLVNAEAATR

SEQ ID NO: 53939 - protein, 269 aa, Unidentified
AQSVPWGISRVQAPAAHNRGLAGSGVKVAVLDSGISTHPDLNIRGGASFVPGEPSTQDGNGHGTHVAGTIAALNNSIGVLGVAPSAELYAVKVLGASGSGSVSSIAQGLEWAGNNGMHVANLSLGSPSPSATLEQAVNSATSRGVLVVAASGNSGAGSISYPARYANAMAVGATDQNNNRADFSQYGAGLDIVAPGVNVQSTYPGSTYASLNGTSMATPHVAGAAALVKQKNPSWSNVQIRNHLKNTATSLGSTNLYGSGLVNAEAATR

SEQ ID NO: 53940 - protein, 269 aa, Unidentified
AQSVPWGISRVQAPAAHNRKLTGSGVKVAVLDTGISTHPDLNIRGGASFVPGEPSTQDGNGHGTHVAGTIAALNNSIGVLGVAPSAELYAVKVLGASGDGSVSSIAQGLEWAGNNGMHVANLSLGSPSPSATLEQAVNSATSRGVLVVAASGNSGAGSISYPARYANAMAVGATDQNNNRASFSQYGAGLDIVAPGVNVQSTYPGSTYASLNGTSMATPHVAGAAALVKQKNPRWSNVQIRNHLKNTATSLGSTNLYGSGLVNAEAATR

SEQ ID NO: 53941 - protein, 269 aa, Unidentified
AQSVPWGISRVQAPAAHNRGLTGSGVKVAVLDTGISTHPDLNIRGGASFVPGEPSTQDGNGHGTHVAGTIAALNNSIGVLGVAWSAELYAVKVLGASGSGSVSSIAQGLEWAGNNGMHVANLSLGSPSPSATLEQAVNSATSRGVLVVAASGNSGAGSISYPARYANAMAVGATDQNNNRASFSQYGAGLDIVAPGVNVQSTAPGSTYASLNGTSMATPHVAGAAALVKQKNPSWSFVQIRNHLKNTATSLGSTNLYGSGLVNAEAATR

SEQ ID NO: 53942 - protein, 269 aa, Unidentified
AQSVPWGISRVQAPAAHNRGLTGSGVKVAVLDTGISTHPDLNIRGGASFVPGEPSTQDGEGHGTHVAGTIAALNNSIGVLGVAPSAELYAVKVLGASGSGSVSSIAQGVEWAGNNGMHVANLSLGNPSPSATLEQAVNSATSRGVLVVAASGNSGAGSISYPARYANAMAVGATDQNNNRASFSQYGAGLDIVAPGVNVQSTYPGSTYASLNGTSMATPHVAGAAALVKQKNPSWSNVQIRNHLKNTATSLGSTNLYGSGLVNAEAATR

SEQ ID NO: 53943 - protein, 269 aa, Unidentified
AQSVPWGISRVQAPAAHNRGLTGFGVKVAVLDTGISTHPDLNIRGGASFVPGEPSTQDGNGHGTHVAGTIAALNNSIGVLGVAPSAELYAVKVLGASGSGSVSSIAQGLEWAGNNRMHVANLSLGSPSPSATLEQAVNSATSRGVLVVAASGNSGAGSISYPARYANAMAVGATDQNNNRASFSQYGAGLDIVAPGVNVQSTYPGSAYASLNGTSMATPHVAGAAALVKQKNPSWSNVQIRNHLKNTATSLGSTNLYGSGLVNAEAATR

SEQ ID NO: 53944 - protein, 269 aa, Unidentified
AQSVPWGISRVQAPAAHNRGLTGSGVKVAVLDTGISTHPDLRIRGGASFVPGEPSTQDGNGHGTHVAGTIAALNNSIGVLGVAPSAELYAVKVLGASGAGSVSSIAQGLEWAGNNGMHVANLSLGSPSPSATLEQAVNSATSRGVLVVAASGNSGAGSISYPARYANAMAVGATDQNNNRASFSQYGAGLDIVAPGVNVQSTYIGSTYASLNGTSMATPHVAGAAALVKQKNPSWSNVQIRNHLKNTATSLGSTNLYGSGLVNAEAATR

SEQ ID NO: 53945 - protein, 269 aa, Unidentified
AQSVPWGISRVQAPAAHNRGLTGSGVKVAVLDTGISTHPDLNIRGGASFVPGEPSTQDGNGHGTHVAGTIAALNNSIGVLGVAPSAELYAVKVLGQGGAGSVSSIAQGLEWAGNNGMHVANLSLGSPSPSATLEQAVNSATSRGVLVVAASGNSGAGSISYPARYANAMAVGATDQNNNRASFSQYGAGLDIVAPGVNVQSTYPGSTYASLNGTSMATPHVAGAAALVKQKNPSWSNVQIRNHLKNTATSLGSTNLYGSGLVNAEAATR

SEQ ID NO: 53946 - protein, 269 aa, Unidentified
AQSVPWGISRVQAPAAHNRGLAGSGVKVAVLDTGISTHPDLNIRGGASFVPGEPSTQDGNGHGTHVAGTIAALNNSIGVLGVAPSAELYAVKVLGASGSGGVSSIAQGVEWAGNNGMHVANLSLGSPSPSATLEQAVNSATSRGVLVVAASGNSGAGSISYPARYANAMAVGATDQNNNRASFSQYGAGLDIVAPGVNVQSTYPGSTYASLNGTSMATPHVAGAAALVKQKNPSWSNVQIRNHLKNTATSLGSTNLYGSGLVNAEAATR

SEQ ID NO: 53947 - protein, 269 aa, Unidentified
AQSVPWGISRVQAPAAHNRGLTGSGVKVAVLDTGISTHPDLNIRGGASFVPGEPSTQDGNGHGTHVAGTIAALNNRIGVLGVAWSAELYAVKVLGASGSGSVSSIAQGLEWAGNNGMHVANLSLGSPSPSATLEQAVNSATSRGVLVVAASGNSGAGSISYPARYANAMAVGATDQNNNRASFSQYGAGLDIVAPGVNVQSTAPGSTYASLNGTSMATPHVAGAAALVKQKNPSWSNVQIRNHLKNTATSLGSTNLYGSGLVNAEAATR

SEQ ID NO: 53948 - protein, 269 aa, Unidentified
AQSVPWGISRVQAPAAHNRGLTGRGVKVAVLDTGISTHPDLNIRGGASFVPGEPSTQDGNGHGTHVAGTIAALNNSIGVLGVAPSAELYAVKVLGASGSGSVSSIAQGLEWAGNNRMHVANLSLGSPSPSATLEQAVNSATSRGVLVVAASGNSGAGSIDYPARYANAMAVGATDQNNNRASFSQYGAGLDIVAPGVNVQSTYPGSTYASLNGTSMATPHVAGAAALVKQKNPSWSNVQIRNHLKNTATSLGSTNLYGSGLVNAEAATR

SEQ ID NO: 53949 - protein, 269 aa, Synthetic construct
AQSVPWGISRVQAPAAHNRGLTGSGVKVAVLDTGISTHPDLNIRGGASFVPGEPSTQDGNGHGTHVAGTIAALDNSIGVLGVAPSAELYAVKVLGASGSGAISSIAQGLEWAGNNGMHVANLSLGSPSPSATLEQAVNSATSRGVLVVAASGNSGAGSISYPARYANAMAVGATDQNNNRASFSQYGAGLDIVAPGVNVQSTYPGSTYASLNGTSAATPHVAGAAALVKQKNPSWSNVQIRNHLKNTATSLGSTNLYGSGLVNAEAATR

SEQ ID NO: 53950 - protein, 269 aa, Unidentified
AQSVPWGISRVQAPAAHRRGLTGSGVKVAVLDTGISTHPDLNITGGASFVPGEPSTQDGNGHGTHVAGTIAALNNSIGVLGVAPSAELYAVKVLGASGSGSVSSIAQGLEWAGNNGMHVANLSLGSPSPSATLEQAVNSATSRGVLVVAASGNSGAGSISYPARYANAMAVGATDQNNNRASFSQYGAGLDIVAPGVNVQSTYPGSTYASLNGTSMATPHVAGAAALVKQKNPSWSNVQIRNRLKNTATSLGSTNLYGSGLVNAEAATR

SEQ ID NO: 53951 - protein, 269 aa, Unidentified
AQSVPWGISRVQAPAAHRRGLTGRGVKVAVLDTGISTHPDLNIRGGASFVPGEPSTQDGNGHGTHVAGTIAALDNSIGVLGVAPSAELYAVKVLGASGSGSVSSIAQGLEWAGNNGMHVANLSLGSPSPSATLEQAVNSATSRGVLVVAASGNSGAGSISYPARYANAMAVGATDQNNNRASFSQYGAGLDIVAPGVNVQSTYPGSTYASLNGTSMATPHVAGAAALVKQKNPSWSNVQIRNHLKNTATSLGSTNLYGSGLVNAEAATR

SEQ ID NO: 53952 - protein, 269 aa, Unidentified
AQSVPWGISRVQAPAAHNRGLTGSGVKVAVLDTGISTHPDLNIRGGASFVPGEPSTQDGNGHGTHVAGTIAALNNSIGVLGVAPSAELYAVKVLGASGSGSNSSIAQGLEWAGNNGMHVANLSLGSPSPSATLEQAVNSATSRGVLVVAASGNSGAGSISYPARYANAMAVGATDQNNNRASFSQYGAGLDIVAPGTGVQSTYPGSTYASLNGTSMATPHVAGAAALVKQKNPSWSNVQIRNHLKNTATSLGSTNLYGSGLVNAEAATR

SEQ ID NO: 53953 - protein, 269 aa, Unidentified
AQSVPWGISRVQAPAAHNRGLTGRGVKVAVLDTGISTHPDLNIRGGASFVPGEPSTQDGNGHGTHVAGTIAALNNSIGVLGVAPSAELYAVKVLGASGSGSVSSIAQGLEWAGNNGMHVANLSLGSPSPSATLEQAVNSATSRGVLVVAASGNSGAGSISYPARYANAMAVGATDQNNNRASFSQYGAGLDIVAPGVNVQSTAPGSTYASLNGTSMATPHVAGAAALVKQKNPSWPNVQIRNHLKNTATSLGSTNLYGSGLVNAEAATR

SEQ ID NO: 53954 - protein, 269 aa, Unidentified
AQSVPWGISRVQAPAAHNRGLTGSGVKVAVLDTGISTHPDLNIRGGASFVPGEPSTQDGNGHGTHVAGTIAALNNDIGVLGVAPSAELYAVKVLGASGSGSVSSIAQGLEWAGNNGMHVANLSLGSPQPSATLEQAVNSATSRGVLVVAASGNSGAGSISYPARYANAMAVGATDQNNNRASFSQYGAGLDIVAPGVNVQSTYPGSTYASLNGTSMASPHVAGAAALVKQKNPSWSNVQIRNHLKNTATSLGSTNLYGSGLVNAEAATR

SEQ ID NO: 53955 - protein, 269 aa, Unidentified
AQSVPWGISRVQAPAAHNRGLTGSGVKVAVLDTGISTHPDLNIRGGASFVPGEPSTQDGNGHGTHVAGTIAALNNSIGVLGVAPSAELYAVKVLGATGSASISSIAQGLEWAGNNGMHVANLSLGSPSPSATLEQAVNSATSRGVLVVAASGNSGAGSISYPARYANAMAVGATDQNNNRASFSQYGAGLDIVAPGVNVQSTYPGSTYASLNGTSMATPHVAGAAALVKQKNPSWSNVQIRNHLKNTATSLGSTNLYGSGLVNAEAATR

SEQ ID NO: 53956 - protein, 269 aa, Unidentified
AQSVPWGISRVQAPAAHNRGLTGSGVKVAVLDTGISTHPDLNIRGGASFVPGEPSTQDGEGHGTHVAGTIAALNNSIGVLGVAPSAELYAVKVLGASGSGSVSSIAQGLEWAGNNGMHVANLSLGIPSPSATLEQAVNSATSRGVLVVAASGNSGAGSISYPARYANAMAVGATDQNNNRADFSQYGAGLDIVAPGVNVQSTYPGSTYASLNGTSMATPHVAGAAALVKQKNPSWSNVQIRNHLKNTATSLGSTNLYGSGLVNAEAATR

SEQ ID NO: 53957 - protein, 269 aa, Unidentified
AQSVPWGISRVQAPAAHNRGLTGSGVKVAVLDTGISTHPDLNIRGGASFVPGEPSTQDGNGHGTHVAGTIAALNNSIGVLGVAPSAELYAVKVLGASGSGSVSSIAQGLEWAGNNGMHVANLSLGIPSPSATLEQAVNSATSRGVLVVAASGNSGEGSIDYPARYANAMAVGATDQNNNRASFSQYGAGLDIVAPGVNVQSTYPGSTYASLNGTSMATPHVAGAAALVKQKNPSWSNVQIRNHLKNTATSLGSTNLYGSGLVNAEAATR

SEQ ID NO: 53958 - protein, 269 aa, Unidentified
AQSVPWGISRVQAPAAHNRKLLGFGVKVAVLDTGISTHPDLNIRGGASFVPGEPSTQDGNGHGTHVAGTIAALNNSIGVLGVAPSAELYAVKVLGASGSGSVSSIAQGLEWAGNNGMHVANLSLGSPSPSATLEQAVNSATSRGVLVVAASGNSGAGSISYPARYANAMAVGATDQNNNRASFSQYGAGLDIVAPGVNVQSTYPGSTYASLNGTSMATPHVAGAAALVKQKNPSWSNVQIRNHLKNTATSLGSTNLYGSGLVNAEAATR

SEQ ID NO: 53959 - protein, 269 aa, Unidentified
AQSRPWGIARVQAPAAHNRGLTGSGVKVAVLDTGISTHPDLNIRGGASFVPGEPSTQDGNGHGTHVAGTIAALNNSIGVLGVAPSAELYAVKVLGASGSGSVSSIAQGLEWAGNNGMHVANLSLGSPSPSATLEQAVNSATSRGVLVVAASGNSGAGSISYPARYANAMAVGATDQNNNRASFSQYGAGLDIVAPGVNVQSTYPGSTYASLNGTSMATPHVAGAAALVKQKNPSRSNVQIRNHLKNTATSLGSTNLYGSGLVNAEAATR

SEQ ID NO: 53960 - protein, 269 aa, Unidentified
AQSVPWGISRVQAPAAHNRGLTGSGVKVAVLDTGISTHPDLNIRGGASFVPGEPSTQDGEGHGTHVAGTIAALNNGIGVLGVAPSAELYAVKVLGASGSGSVSSIAQGLEWAGNNDMHVANLSLGSPSPSATLEQAVNSATSRGVLVVAASGNSGAGSISYPARYANAMAVGATDQNNNRASFSQYGAGLDIVAPGVNVQSTYPGSTYASLNGTSMATPHVAGAAALVKQKNPSWSNVQIRNHLKNTATSLGSTNLYGSGLVNAEAATR

SEQ ID NO: 53961 - protein, 269 aa, Unidentified
AQSVPWGISRVQAPAAHNRGLTGSGVKVAVLDSGISTHPDLNIRGGASFVPGEPSTQDGNGHGTHVAGTIAALNNSIGVLGVAPSAELYAVKVLGASGSGSVSSIAQGLEWAGNNGMHVANLSLGIPSPSATLEQAVNSATSRGVLVVAASGNSGEGSISYPARYANAMAVGATDQNNNRASFSQYGAGLDIVAPGVNVQSTYPGSTYASLNGTSMATPHVAGAAALVKQKNPSWSNVQIRNHLKNTATSLGSTNLYGSGLVNAEAATR

SEQ ID NO: 53962 - protein, 269 aa, Unidentified
AQSVPWGISRVQAPAAHNRGLTGSGVKVAVLDTGISTHPDLNIRGGASFVPGEPSTQDGNGHGTHVAGTIAALNNSIGVLGVAPSAELYAVKVLPAAGGGSVSSIAQGLEWAGNNGMHVANLSLGSPSPSATLEQAVNSATSRGVLVVAASGNSGAGSISYPARYANAMAVGATDQNNNRASFSQYGAGLDIVAPGVNVQSTYPGSTYASLNGTSMATPHVAGAAALVKQKNPSWSNVQIRNHLKNTATSLGSTNLYGSGLVNAEAATR

SEQ ID NO: 53963 - protein, 269 aa, Unidentified
AQSVPWGISRVQAPAAHNRGLTGRGVKVAVLDTGISTHPDLNIRGGASFVPGEPSTQDGNGHGTHVAGTIAALNNSIGVLGVARSAELYAVKVLGASGSGSVSSIAQGLEWAGNNRMHVANLSLGSPSPSATLEQAVNSATSRGVLVVAASGNSGAGSISYPARYANAMAVGATDQNNNRASFSQYGAGLDIVAPGVNVQSTYPGSTYASLNGTSMATPHVAGAAALVKQKNPSWSNVQIRNHLKNTATSLGSTNLYGSGLVNAEAATR

SEQ ID NO: 53964 - protein, 269 aa, Unidentified
AQSVPWGISRVQAPAAHNRKLTGSGVKVAVLDTGISTHPDLNIRGGASFVPGEPSTQDGEGHGTHVAGTIAALNNSIGVLGAAPSAELYAVKVLGASGSGSVSSIAQGLEWAGNNGMHVANLSLGQPSPSATLEQAVNSATSRGVLVVAASGNSGAGSISYPARYANAMAVGATDQNNNRASFSQYGAGLDIVAPGVNVQSTYPGSTYASLNGTSSATPHVAGAAALVKQKNPSWSNVQIRNHLKNTATSLGSTNLYGSGLVNAEAATR

SEQ ID NO: 53965 - protein, 269 aa, Unidentified
AQSVPWGISRVQAPAAHNRGLTGRGVKVAVLDSGISTHPDLNIRGGASFVPGEPSTQDGNGHGTHVAGTIAALNNSIGVLGVAPSAELYAVKVLGASGSGSVSSIAQGLEWAGNNGMHVANLSLGSPSPSVTLEQAVNSATSRGVLVVAASGNSGAGSISYPARYANAMAVGATDQNNNRASFSQYGAGLDIVAPGVNVQSTYPGSTYASLNGTSMATPHVAGAAALVKQKNPSWSNVQIRNHLKNTATSLGSTNLYGSGLVNAEAATR

SEQ ID NO: 53966 - protein, 269 aa, Bacillus lentus
AQSVPWGISRVQAPAAHNRGLTGSGVKVAVLDTGISTHPDLNIRGGASFVPGEPSTQDGNGHGTHVAGTIAALNNSIGVLGVAPSAELYAVKVLGASGSGSVSSIADGLEWAGNNGMHVANLSLGSPSPSATLEQAVNSATSRGVLVVAASGNSGAGSISYPARYANAMAVGATDQNNNRARFSQYGAGLDIVAPGVNVQSTYPGSTYASLNGTSMATPHVAGAAALVKQKNPSWSNVQIRDHLKNTATSLGSTNLYGSGLVNAEAATR

SEQ ID NO: 53967 - protein, 269 aa, Unidentified
AQSVPWGISRVQAPAAHNRRLRGSGVKVAVLDTGISTHPDLNIRGGASFVPGEPSTQDGNGHGTHVAGTIAALNNSIGVLGVAPSAELYAVKVLGASGSGSVSSIAQGLEWAGNNGMHVANLSLGSPSPSATLEQAVNSATSRGVLVVAASGNSGAGSISYPARYANAMAVGATDQNNNRASFSQYGAGLDIVAPGVNVQSTYPGSTYASLNGTSMATPHVAGAAALVKQKNPSWSNVQIRNHLKNTATSLGSTNLYGSGLVRAEAATR

SEQ ID NO: 53968 - protein, 269 aa, Unidentified
AQSVPWGISRVQAPAAHNRGLTGSGVKVAVLDTGISTHPDLNIRGGASFVPGEPSTQDGNGHGTHVAGTIAALNNDIGVLGVAPSAELYAVKVLGASGSGSVSSIAQGLEWAGNNSMHVANLSLGSPSPSATLEQAVNSATSRGVLVVAASGNSGAGSISYPARYANAMAVGATDQNNNRASFSQYGAGLDIVAPGVNVQSTYPGSTYASLNGTSMATPHVAGAAALVKQKNPSWSNVRIRNHLKNTATSLGSTNLYGSGLVNAEAATR

SEQ ID NO: 53969 - protein, 269 aa, Bacillus lentus
AQSVPWGISRVQAPAAHNRGLTGSGVKVAVLDTGISTHPDLNIRGGASFVPGEPSTQDGNGHGTHVAGTIAALNNSIGVLGVAPDAELYAVKVLGASGSGSVSSIAQGLEWAGNNGMHVANLSLGSPSPSATLEQAVNSATSRGVLVVAASGNSGAGSISYPARYANAMAVGATDQNNNRARFSQYGAGLDIVAPGVNVQSTYPGSTYASLNGTSMATPHVAGAAALVKQKNPSWSNVQIRDHLKNTATSLGSTNLYGSGLVNAEAATR

SEQ ID NO: 53970 - protein, 269 aa, Unidentified
AQSVPWGISRVQAPAAHNRGLTGSGVKVAVLDTGISTHPDLNIRGGASFVPGEPSTQDGNGHGTHVAGTIAALNNNIGVLGVAPSAELYAVKVLGASGQGSVSSIAGGLEWAGNNGMHVANLSLGSPSPSATLEQAVNSATSRGVLVVAASGNSGAGSISYPARYANAMAVGATDQNNNRASFSQYGAGLDIVAPGVNVQSTYPGSTYASLNGTSMATPHVAGAAALVKQKNPSWSNVQIRNHLKNTATSLGSTNLYGSGLVNAEAATR

SEQ ID NO: 53971 - protein, 269 aa, Unidentified
AQVVPWGISRVQAPAAHNRGLTGSGVKVAVLDTGISTHPDLNIRGGASFVPGEPSTQDGNGHGTHVAGSIAALNNSIGVLGVAPSAELYAVKVLGASGSGSVSSIAQGLEWAGNNGMHVANLSLGSPSPSATLEQAVNSATSRGVLVVAASGNSGAGSISYPARYQNAMAVGATDQNNNRASFSQYGAGLDIVAPGVNVQSTYPGSTYASLNGTSMATPHVAGAAALVKQKNPSWSNVQIRNHLKNTATSLGSTNLYGSGLVNAEAATR

SEQ ID NO: 53972 - protein, 269 aa, Unidentified
AQSVPWGISRVQAPAAHNRGLTGSGVKVAVLDTGISTHPDLNIRGGASFVPGEPSTQDGNGHGTHVAGTIAALNNSIGVLGVAPSAELYAVKVLPAAGSGSLSSIAQGLEWAGNNGMHVANLSLGSPSPSATLEQAVNSATSRGVLVVAASGNSGAGSISYPARYANAMAVGATDQNNNRASFSQYGAGLDIVAPGVNVQSTYPGSTYASLNGTSMATPHVAGAAALVKQKNPSWSNVQIRNHLKNTATSLGSTNLYGSGLVNAEAATR

SEQ ID NO: 53973 - protein, 269 aa, Unidentified
AQSVPWGISRVQAPAAHNRGLTGSGVKVAVLDTGISTHPDLNIRGGASFVPGEPSTQDGNGHGTHVAGTIAALNNSIGVLGVAPSAELYAVKVLGASGSGSLSSIAQGLEWAGNNGMHVANLSLGSPSPSATLEQAVNSATSRGVLVVAASGNSGAGSISYPARYANAMAVGATDQNNNRASFSQYGAGLDIVAPGVNVQSTYPGSAYAFLNGTSMATPHVAGAAALVKQKNPSWSNVQIRNHLKNTATSLGSTNLYGSGLVNAEAATR

SEQ ID NO: 53974 - protein, 269 aa, Unidentified
AQSVPWGISRVQAPAAHNRKLTGFGVKVAVLDTGISTHPDLNIRGGASFVPGEPSTQDGNGHGTHVAGTIAALNNSIGVLGVAPSAELYAVKVLGASGSGSVSSIAQGLEWAGNNGMHVANLSLGSPSPSATLEQAVNSATSRGVLVVAASGNSGAGSIDYPARYANAMAVGATDQNNNRASFSQYGAGLDIVAPGVNVQSTYPGSTYASLNGTSMATPHVAGAAALVKQKNPSWSNVQIRNHLKNTATSLGSTNLYGSGLVNAEAATR

SEQ ID NO: 53975 - protein, 269 aa, Unidentified
AQSVPWGISRVQAPAAHNRGLTGQGVKVAVLDTGISTHPDLNIRGGASFVPGEPSTQDGNGHGTHVAGTIAALNNDINVLGVAPSAELYAVKVLGASGSGSVSSIAQGLEWAGNNGMHVANLSLGSPSPSATLEQAVNSATSRGVLVVAASGNSGAGSISYPARYANAMAVGATDQNNNRASFSQYGAGLDIVAPGVNVQSTYPGSTYASLNGTSMATPHVAGAAALVKQKNPSWSNVQIRNHLKNTATSLGSTNLYGSGLVNAEAATR

SEQ ID NO: 53976 - protein, 269 aa, Unidentified
AQVVPWGISRVQAPAAHNRGLTGSGVKVAVLDTGISTHPDLNIRGGASFVPGEPSTQDGNGHGTHVAGTIAALNNDIGVLGVAPSAELYAVKVLGASGSGSVSSIAQGLEWAGNNGMHVANLSLGSPSPSATLEQAVNSATSRGVLVVAASGNSGAGSISYPARYANAMAVGATDQNNNRASFSQYGAGLDIVAPGVNVQSTYPGSTYASPNGTSMATPHVAGAAALVKQKNPSWSNVQIRNHLKNTATSLGSTNLYGSGLVNAEAATR

SEQ ID NO: 53977 - protein, 269 aa, Bacillus lentus
AQSVPWGISRVQAPAAHNRGLTGSGVKVAVLDTGISTHPDLNIRGGASFVPGEPSTQDGNGHGTHVAGTIAALNNSIGVLGVAPRAELYAVKVLGASGSGSVSSIARGLEWAGNNGMHVANLSLGSPSPSATLEQAVNSATSRGVLVVAASGNSGAGSISYPARYANAMAVGATDQNNNRARFSQYGAGLDIVAPGVNVQSTYPGSTYASLNGTSMATPHVAGAAALVKQKNPSWSNVQIRNHLKNTATSLGSTNLYGSGLVNAEAATR

SEQ ID NO: 53978 - protein, 269 aa, Unidentified
AQSVPWGISRVQAPAAHNRGLTGSGVKVAVLDTGISTHPDLNIRGGASFVPGEPSTQDGNGHGTHVAGTIAALNNSIGVLGVAPSAELYAVKVLGASGSGSVSSIAQGLEWAGNNGMHVANLSLGNPSPSATLEQAVNSATSRGVLVVAASGNSGEGSISYPARYANAMAVGATDQNNNRASFSQYGAGLDIVAPGVNVQSTYPGSTYASLNGTSMATPHVAGAAALVKQKNPSWSNVQIRNHLKRTATSLGSTNLYGSGLVNAEAATR

SEQ ID NO: 53979 - protein, 269 aa, Unidentified
AQSVPWGISRVQAPAAHNRGLLGSGVKVAVLDTGISTHPDLNIRGGASFVPGEPSTQDGNGHGTHVAGTIAALNNNIGVLGVAPSAELYAVKVLGASGSGSVSSIAQGLEWAGNNRMHVANLSLGSPSPSATLEQAVNSATSRGVLVVAASGNSGAGSISYPARYANAMAVGATDQNNNRASFSQYGAGLDIVAPGVNVQSTYPGSTYASLNGTSMATPHVAGAAALVKQKNPSWSNVQIRNHLKNTATSLGSTNLYGSGLVNAEAATR

SEQ ID NO: 53980 - protein, 269 aa, Unidentified
AQSVPWGISRVQAPAAHNRGLTGSGVKVAVLDTGISTHPDLNIRGGASFVPGEPSTQDGNGHGTHVAGTIAALNNGIGVLGVAPSAELYAVKVLGASGSGSVSSIAQGLEWAGNNSMHVANLSLGSPSPSATLEQAVNSATSRGVLVVAASGNSGAGSISYPARYANAMAVGATDQNNNRASFSQYGAGLDIVAPGVNVQSTYPGSTYASLNGTSMATPHVAGAAALVKQKNPSWSNVQIRNRLKNTATSLGSTNLYGSGLVNAEAATR

SEQ ID NO: 53981 - protein, 269 aa, Unidentified
AQSVPWGISRVQAPAAHNRGLTGSGVKVAVLDTGISTHPDLNIRGGASFVPGEPSTQDGNGHGTHVAGTIAALNNSIGVLGVAPSAELYAVKVLPAGGAGSVSSIAQGLEWAGNNGMHVANLSLGSPSPSATLEQAVNSATSRGVLVVAASGNSGAGSISYPARYANAMAVGATDQNNNRASFSQYGAGLDIVAPGVNVQSTYPGSTYASLNGTSMATPHVAGAAALVKQKNPSWSNVQIRNHLKNTATSLGSTNLYGSGLVNAEAATR

SEQ ID NO: 53982 - protein, 269 aa, Unidentified
AQSVPWGISRVQAPAAHNRGLTGSGVKVAVLDTGISTHPDLNIRGGASFVPGEPSTQDGNGHGTHVAGTIAALNNSIGVLGVAPSAELYAVKVLGASGSGSVSSIAQGLEWAGNNGMHVANLSLGSPSPSATLEQAVNSATSRGVLVVAASGNSGAGSISYPARYQNAMAVGATDQNNNRASFSQYGAGLDIVAPGVNVQSTYPGSTYASLNGTSMATPHVAGAAALVKQKNPSWSNVQIRNHLKNTDTSLGSTNLYGPGLVNAEAATR
